United States Patent Application Publication US 2008/0113351 A1 - sequence listing, part 2

SEQ ID NO: 24080 - DNA, 19 bp, Homo sapiens
  siRNA target sequence for CENTB2 (NM_012287.3,2234-2252).
cacagggcaggtatgttta

SEQ ID NO: 24081 - DNA, 19 bp, Homo sapiens
  siRNA target sequence for CENTB2 (NM_012287.3,2345-2363).
caccttgttacgtttagca

SEQ ID NO: 24082 - DNA, 19 bp, Homo sapiens
  siRNA target sequence for CENTB2 (NM_012287.3,2383-2401).
gggaatcagaaggacttta

SEQ ID NO: 24083 - DNA, 19 bp, Homo sapiens
  siRNA target sequence for CENTB2 (NM_012287.3,2449-2467).
cccaaatggcatccaataa

SEQ ID NO: 24084 - DNA, 19 bp, Homo sapiens
  siRNA target sequence for CENTB2 (NM_012287.3,2450-2468).
ccaaatggcatccaataat

SEQ ID NO: 24085 - DNA, 19 bp, Homo sapiens
  siRNA target sequence for CENTB2 (NM_012287.3,2485-2503).
gtttccagcaagattcaca

SEQ ID NO: 24086 - DNA, 19 bp, Homo sapiens
  siRNA target sequence for CENTB5 (NM_030649.1,89-107).
ccgtcatctcggaatgtct

SEQ ID NO: 24087 - DNA, 19 bp, Homo sapiens
  siRNA target sequence for CENTB5 (NM_030649.1,978-996).
gagccctgacagttgctat

SEQ ID NO: 24088 - DNA, 19 bp, Homo sapiens
  siRNA target sequence for CENTB5 (NM_030649.1,1304-1322).
gcgctgtgaatcagatcta

SEQ ID NO: 24089 - DNA, 19 bp, Homo sapiens
  siRNA target sequence for CENTB5 (NM_030649.1,1305-1323).
cgctgtgaatcagatctat

SEQ ID NO: 24090 - DNA, 19 bp, Homo sapiens
  siRNA target sequence for CENTB5 (NM_030649.1,1394-1412).
ggatcaaggacaaatacgt

SEQ ID NO: 24091 - DNA, 19 bp, Homo sapiens
  siRNA target sequence for CENTB5 (NM_030649.1,1402-1420).
gacaaatacgtggaaaaga

SEQ ID NO: 24092 - DNA, 19 bp, Homo sapiens
  siRNA target sequence for CENTB5 (NM_030649.1,1583-1601).
gcaccctggatcgtaagtt

SEQ ID NO: 24093 - DNA, 19 bp, Homo sapiens
  siRNA target sequence for CENTB5 (NM_030649.1,1955-1973).
cggacgtgaaccaaagaga

SEQ ID NO: 24094 - DNA, 19 bp, Homo sapiens
  siRNA target sequence for CENTD1 (NM_015230.2,343-361).
cctcagtcagtgaagtaaa

SEQ ID NO: 24095 - DNA, 19 bp, Homo sapiens
  siRNA target sequence for CENTD1 (NM_015230.2,375-393).
gatttcctaatgagcatta

SEQ ID NO: 24096 - DNA, 19 bp, Homo sapiens
  siRNA target sequence for CENTD1 (NM_015230.2,398-416).
ggagcagtatctcttacat

SEQ ID NO: 24097 - DNA, 19 bp, Homo sapiens
  siRNA target sequence for CENTD1 (NM_015230.2,399-417).
gagcagtatctcttacatt

SEQ ID NO: 24098 - DNA, 19 bp, Homo sapiens
  siRNA target sequence for CENTD1 (NM_015230.2,419-437).
ccatgagtctggttttact

SEQ ID NO: 24099 - DNA, 19 bp, Homo sapiens
  siRNA target sequence for CENTD1 (NM_015230.2,420-438).
catgagtctggttttacta

SEQ ID NO: 24100 - DNA, 19 bp, Homo sapiens
  siRNA target sequence for CENTD1 (NM_015230.2,504-522).
caccgtaggaggatactta

SEQ ID NO: 24101 - DNA, 19 bp, Homo sapiens
  siRNA target sequence for CENTD1 (NM_015230.2,506-524).
ccgtaggaggatacttaaa

SEQ ID NO: 24102 - DNA, 19 bp, Homo sapiens
  siRNA target sequence for CENTD1 (NM_015230.2,508-526).
gtaggaggatacttaaaca

SEQ ID NO: 24103 - DNA, 19 bp, Homo sapiens
  siRNA target sequence for CENTD1 (NM_015230.2,511-529).
ggaggatacttaaacagtt

SEQ ID NO: 24104 - DNA, 19 bp, Homo sapiens
  siRNA target sequence for CENTD1 (NM_015230.2,512-530).
gaggatacttaaacagtta

SEQ ID NO: 24105 - DNA, 19 bp, Homo sapiens
  siRNA target sequence for CENTD1 (NM_015230.2,514-532).
ggatacttaaacagttaca

SEQ ID NO: 24106 - DNA, 19 bp, Homo sapiens
  siRNA target sequence for CENTD1 (NM_015230.2,525-543).
cagttacagataatcttgt

SEQ ID NO: 24107 - DNA, 19 bp, Homo sapiens
  siRNA target sequence for CENTD1 (NM_015230.2,602-620).
cccttcaaaggattaccat

SEQ ID NO: 24108 - DNA, 19 bp, Homo sapiens
  siRNA target sequence for CENTD1 (NM_015230.2,644-662).
ctgcatagaactttccaat

SEQ ID NO: 24109 - DNA, 19 bp, Homo sapiens
  siRNA target sequence for CENTD1 (NM_015230.2,690-708).
ccgcagttggagactgtta

SEQ ID NO: 24110 - DNA, 19 bp, Homo sapiens
  siRNA target sequence for CENTD1 (NM_015230.2,695-713).
gttggagactgttagaaaa

SEQ ID NO: 24111 - DNA, 19 bp, Homo sapiens
  siRNA target sequence for CENTD1 (NM_015230.2,698-716).
ggagactgttagaaaaaat

SEQ ID NO: 24112 - DNA, 19 bp, Homo sapiens
  siRNA target sequence for CENTD1 (NM_015230.2,748-766).
gccagtatcctcaatcaga

SEQ ID NO: 24113 - DNA, 19 bp, Homo sapiens
  siRNA target sequence for CENTD1 (NM_015230.2,749-767).
ccagtatcctcaatcagat

SEQ ID NO: 24114 - DNA, 19 bp, Homo sapiens
  siRNA target sequence for CENTD1 (NM_015230.2,752-770).
gtatcctcaatcagatgat

SEQ ID NO: 24115 - DNA, 19 bp, Homo sapiens
  siRNA target sequence for CENTD1 (NM_015230.2,807-825).
gaggaaccacacctgaatt

SEQ ID NO: 24116 - DNA, 19 bp, Homo sapiens
  siRNA target sequence for CENTD1 (NM_015230.2,828-846).
ggttctttgaatgattctt

SEQ ID NO: 24117 - DNA, 19 bp, Homo sapiens
  siRNA target sequence for CENTD1 (NM_015230.2,956-974).
cagtaagctccctaatgca

SEQ ID NO: 24118 - DNA, 19 bp, Homo sapiens
  siRNA target sequence for CENTD1 (NM_015230.2,1062-1080).
ccatccccattctttaagt

SEQ ID NO: 24119 - DNA, 19 bp, Homo sapiens
  siRNA target sequence for CENTD1 (NM_015230.2,1063-1081).
catccccattctttaagtt

SEQ ID NO: 24120 - DNA, 19 bp, Homo sapiens
  siRNA target sequence for CENTD1 (NM_015230.2,1168-1186).
gaccatctcgatcttttct

SEQ ID NO: 24121 - DNA, 19 bp, Homo sapiens
  siRNA target sequence for CENTD1 (NM_015230.2,1209-1227).
gagattccagggtcaacaa

SEQ ID NO: 24122 - DNA, 19 bp, Homo sapiens
  siRNA target sequence for CENTD1 (NM_015230.2,1211-1229).
gattccagggtcaacaaaa

SEQ ID NO: 24123 - DNA, 19 bp, Homo sapiens
  siRNA target sequence for CENTD1 (NM_015230.2,1241-1259).
gagctatttccgtgaaaga

SEQ ID NO: 24124 - DNA, 19 bp, Homo sapiens
  siRNA target sequence for CENTD1 (NM_015230.2,1273-1291).
cctcaactgaaaaatctgt

SEQ ID NO: 24125 - DNA, 19 bp, Homo sapiens
  siRNA target sequence for CENTD1 (NM_015230.2,1290-1308).
gtggcatggcaaaattcaa

SEQ ID NO: 24126 - DNA, 19 bp, Homo sapiens
  siRNA target sequence for CENTD1 (NM_015230.2,1383-1401).
cgatctataaagaatgaat

SEQ ID NO: 24127 - DNA, 19 bp, Homo sapiens
  siRNA target sequence for CENTD1 (NM_015230.2,1438-1456).
ctactgcaacaaactcttt

SEQ ID NO: 24128 - DNA, 19 bp, Homo sapiens
  siRNA target sequence for CENTD1 (NM_015230.2,1463-1481).
caaatcaagcatatacgat

SEQ ID NO: 24129 - DNA, 19 bp, Homo sapiens
  siRNA target sequence for CENTD1 (NM_015230.2,1471-1489).
gcatatacgataacagaaa

SEQ ID NO: 24130 - DNA, 19 bp, Homo sapiens
  siRNA target sequence for CENTD1 (NM_015230.2,1530-1548).
cctcgagaggacaaaaaca

SEQ ID NO: 24131 - DNA, 19 bp, Homo sapiens
  siRNA target sequence for CENTD1 (NM_015230.2,1533-1551).
cgagaggacaaaaacaatt

SEQ ID NO: 24132 - DNA, 19 bp, Homo sapiens
  siRNA target sequence for CENTD1 (NM_015230.2,1661-1679).
gattttggactccgttaat

SEQ ID NO: 24133 - DNA, 19 bp, Homo sapiens
  siRNA target sequence for CENTD1 (NM_015230.2,1672-1690).
ccgttaataggcacagtta

SEQ ID NO: 24134 - DNA, 19 bp, Homo sapiens
  siRNA target sequence for CENTD1 (NM_015230.2,1673-1691).
cgttaataggcacagttat

SEQ ID NO: 24135 - DNA, 19 bp, Homo sapiens
  siRNA target sequence for CENTD1 (NM_015230.2,1683-1701).
cacagttatccgttaagct

SEQ ID NO: 24136 - DNA, 19 bp, Homo sapiens
  siRNA target sequence for CENTD1 (NM_015230.2,1731-1749).
gtttcttcacaggcaatat

SEQ ID NO: 24137 - DNA, 19 bp, Homo sapiens
  siRNA target sequence for CENTD1 (NM_015230.2,1754-1772).
ctatgcctgcttttatgga

SEQ ID NO: 24138 - DNA, 19 bp, Homo sapiens
  siRNA target sequence for CENTD1 (NM_015230.2,1860-1878).
gatggccttagcatttctt

SEQ ID NO: 24139 - DNA, 19 bp, Homo sapiens
  siRNA target sequence for CENTD1 (NM_015230.2,1863-1881).
ggccttagcatttcttact

SEQ ID NO: 24140 - DNA, 19 bp, Homo sapiens
  siRNA target sequence for CENTD1 (NM_015230.2,1864-1882).
gccttagcatttcttacta

SEQ ID NO: 24141 - DNA, 19 bp, Homo sapiens
  siRNA target sequence for CENTD1 (NM_015230.2,1892-1910).
gaaggagatgtattcgaaa

SEQ ID NO: 24142 - DNA, 19 bp, Homo sapiens
  siRNA target sequence for CENTD1 (NM_015230.2,1898-1916).
gatgtattcgaaaggaata

SEQ ID NO: 24143 - DNA, 19 bp, Homo sapiens
  siRNA target sequence for CENTD1 (NM_015230.2,1920-1938).
cccctttctgctatatcaa

SEQ ID NO: 24144 - DNA, 19 bp, Homo sapiens
  siRNA target sequence for CENTD1 (NM_015230.2,1945-1963).
gagttcaaggagacaacaa

SEQ ID NO: 24145 - DNA, 19 bp, Homo sapiens
  siRNA target sequence for CENTD1 (NM_015230.2,1947-1965).
gttcaaggagacaacaaat

SEQ ID NO: 24146 - DNA, 19 bp, Homo sapiens
  siRNA target sequence for CENTD1 (NM_015230.2,1961-1979).
caaatttgaagttgttaca

SEQ ID NO: 24147 - DNA, 19 bp, Homo sapiens
  siRNA target sequence for CENTD1 (NM_015230.2,1968-1986).
gaagttgttacaacacaaa

SEQ ID NO: 24148 - DNA, 19 bp, Homo sapiens
  siRNA target sequence for CENTD1 (NM_015230.2,2028-2046).
gactggatcagcatactat

SEQ ID NO: 24149 - DNA, 19 bp, Homo sapiens
  siRNA target sequence for CENTD1 (NM_015230.2,2030-2048).
ctggatcagcatactatta

SEQ ID NO: 24150 - DNA, 19 bp, Homo sapiens
  siRNA target sequence for CENTD1 (NM_015230.2,2032-2050).
ggatcagcatactattaaa

SEQ ID NO: 24151 - DNA, 19 bp, Homo sapiens
  siRNA target sequence for CENTD1 (NM_015230.2,2078-2096).
gcagtctcaagctgttgtt

SEQ ID NO: 24152 - DNA, 19 bp, Homo sapiens
  siRNA target sequence for CENTD1 (NM_015230.2,2079-2097).
cagtctcaagctgttgtta

SEQ ID NO: 24153 - DNA, 19 bp, Homo sapiens
  siRNA target sequence for CENTD1 (NM_015230.2,2081-2099).
gtctcaagctgttgttaca

SEQ ID NO: 24154 - DNA, 19 bp, Homo sapiens
  siRNA target sequence for CENTD1 (NM_015230.2,2206-2224).
gtggacttggtattaccat

SEQ ID NO: 24155 - DNA, 19 bp, Homo sapiens
  siRNA target sequence for CENTD1 (NM_015230.2,2208-2226).
ggacttggtattaccataa

SEQ ID NO: 24156 - DNA, 19 bp, Homo sapiens
  siRNA target sequence for CENTD1 (NM_015230.2,2209-2227).
gacttggtattaccataat

SEQ ID NO: 24157 - DNA, 19 bp, Homo sapiens
  siRNA target sequence for CENTD1 (NM_015230.2,2214-2232).
ggtattaccataattccta

SEQ ID NO: 24158 - DNA, 19 bp, Homo sapiens
  siRNA target sequence for CENTD1 (NM_015230.2,2258-2276).
ggaccgaactgtgaaacaa

SEQ ID NO: 24159 - DNA, 19 bp, Homo sapiens
  siRNA target sequence for CENTD1 (NM_015230.2,2259-2277).
gaccgaactgtgaaacaat

SEQ ID NO: 24160 - DNA, 19 bp, Homo sapiens
  siRNA target sequence for CENTD1 (NM_015230.2,2363-2381).
gcaatcaatagcagaaact

SEQ ID NO: 24161 - DNA, 19 bp, Homo sapiens
  siRNA target sequence for CENTD1 (NM_015230.2,2373-2391).
gcagaaactctctctgatt

SEQ ID NO: 24162 - DNA, 19 bp, Homo sapiens
  siRNA target sequence for CENTD1 (NM_015230.2,2374-2392).
cagaaactctctctgatta

SEQ ID NO: 24163 - DNA, 19 bp, Homo sapiens
  siRNA target sequence for CENTD1 (NM_015230.2,2405-2423).
gaagatttggttcaatgaa

SEQ ID NO: 24164 - DNA, 19 bp, Homo sapiens
  siRNA target sequence for CENTD1 (NM_015230.2,2521-2539).
gatctttaggaccaaaaga

SEQ ID NO: 24165 - DNA, 19 bp, Homo sapiens
  siRNA target sequence for CENTD1 (NM_015230.2,2543-2561).
caaggttagaagtctaaaa

SEQ ID NO: 24166 - DNA, 19 bp, Homo sapiens
  siRNA target sequence for CENTD1 (NM_015230.2,2586-2604).
gaactcatcgagcttttta

SEQ ID NO: 24167 - DNA, 19 bp, Homo sapiens
  siRNA target sequence for CENTD1 (NM_015230.2,2594-2612).
cgagctttttattgtcatt

SEQ ID NO: 24168 - DNA, 19 bp, Homo sapiens
  siRNA target sequence for CENTD1 (NM_015230.2,2633-2651).
cttttgggctggtaatctt

SEQ ID NO: 24169 - DNA, 19 bp, Homo sapiens
  siRNA target sequence for CENTD1 (NM_015230.2,2676-2694).
gactcaccagtagaaaaga

SEQ ID NO: 24170 - DNA, 19 bp, Homo sapiens
  siRNA target sequence for CENTD1 (NM_015230.2,2678-2696).
ctcaccagtagaaaagaga

SEQ ID NO: 24171 - DNA, 19 bp, Homo sapiens
  siRNA target sequence for CENTD1 (NM_015230.2,2801-2819).
gaaaccggatgttctagaa

SEQ ID NO: 24172 - DNA, 19 bp, Homo sapiens
  siRNA target sequence for CENTD1 (NM_015230.2,2805-2823).
ccggatgttctagaaacaa

SEQ ID NO: 24173 - DNA, 19 bp, Homo sapiens
  siRNA target sequence for CENTD1 (NM_015230.2,2806-2824).
cggatgttctagaaacaat

SEQ ID NO: 24174 - DNA, 19 bp, Homo sapiens
  siRNA target sequence for CENTD1 (NM_015230.2,2936-2954).
ctaccataacaaattctca

SEQ ID NO: 24175 - DNA, 19 bp, Homo sapiens
  siRNA target sequence for CENTD1 (NM_015230.2,2960-2978).
ccctcaacatgatattcat

SEQ ID NO: 24176 - DNA, 19 bp, Homo sapiens
  siRNA target sequence for CENTD1 (NM_015230.2,2976-2994).
cattccgagggtgtattaa

SEQ ID NO: 24177 - DNA, 19 bp, Homo sapiens
  siRNA target sequence for CENTD1 (NM_015230.2,2981-2999).
cgagggtgtattaagtcaa

SEQ ID NO: 24178 - DNA, 19 bp, Homo sapiens
  siRNA target sequence for CENTD1 (NM_015230.2,3128-3146).
cttgagttactatgaaaat

SEQ ID NO: 24179 - DNA, 19 bp, Homo sapiens
  siRNA target sequence for CENTD1 (NM_015230.2,3160-3178).
cacctaatggcaccattaa

SEQ ID NO: 24180 - DNA, 19 bp, Homo sapiens
  siRNA target sequence for CENTD1 (NM_015230.2,3162-3180).
cctaatggcaccattaata

SEQ ID NO: 24181 - DNA, 19 bp, Homo sapiens
  siRNA target sequence for CENTD1 (NM_015230.2,3169-3187).
gcaccattaatatcaatga

SEQ ID NO: 24182 - DNA, 19 bp, Homo sapiens
  siRNA target sequence for CENTD1 (NM_015230.2,3207-3225).
cacaaagaggacttctatt

SEQ ID NO: 24183 - DNA, 19 bp, Homo sapiens
  siRNA target sequence for CENTD1 (NM_015230.2,3209-3227).
caaagaggacttctattta

SEQ ID NO: 24184 - DNA, 19 bp, Homo sapiens
  siRNA target sequence for CENTD1 (NM_015230.2,3232-3250).
ctgggcccatctttatctt

SEQ ID NO: 24185 - DNA, 19 bp, Homo sapiens
  siRNA target sequence for CENTD1 (NM_015230.2,3238-3256).
ccatctttatctttgagat

SEQ ID NO: 24186 - DNA, 19 bp, Homo sapiens
  siRNA target sequence for CENTD1 (NM_015230.2,3268-3286).
ccgaacgtgtgtttttatt

SEQ ID NO: 24187 - DNA, 19 bp, Homo sapiens
  siRNA target sequence for CENTD1 (NM_015230.2,3269-3287).
cgaacgtgtgtttttattt

SEQ ID NO: 24188 - DNA, 19 bp, Homo sapiens
  siRNA target sequence for CENTD1 (NM_015230.2,3324-3342).
gaggcaatagccaagcatt

SEQ ID NO: 24189 - DNA, 19 bp, Homo sapiens
  siRNA target sequence for CENTD1 (NM_015230.2,3396-3414).
caactcttctacaaagact

SEQ ID NO: 24190 - DNA, 19 bp, Homo sapiens
  siRNA target sequence for CENTD1 (NM_015230.2,3523-3541).
gactgcaagagctaacaat

SEQ ID NO: 24191 - DNA, 19 bp, Homo sapiens
  siRNA target sequence for CENTD1 (NM_015230.2,3551-3569).
ggttcaaaatggggaaaaa

SEQ ID NO: 24192 - DNA, 19 bp, Homo sapiens
  siRNA target sequence for CENTD1 (NM_015230.2,3618-3636).
gggcataccaagttggatt

SEQ ID NO: 24193 - DNA, 19 bp, Homo sapiens
  siRNA target sequence for CENTD1 (NM_015230.2,3619-3637).
ggcataccaagttggattt

SEQ ID NO: 24194 - DNA, 19 bp, Homo sapiens
  siRNA target sequence for CENTD1 (NM_015230.2,3621-3639).
cataccaagttggatttca

SEQ ID NO: 24195 - DNA, 19 bp, Homo sapiens
  siRNA target sequence for CENTD1 (NM_015230.2,3644-3662).
ctggcatactgcaattgaa

SEQ ID NO: 24196 - DNA, 19 bp, Homo sapiens
  siRNA target sequence for CENTD1 (NM_015230.2,3667-3685).
cagcaggtacagatggtaa

SEQ ID NO: 24197 - DNA, 19 bp, Homo sapiens
  siRNA target sequence for CENTD1 (NM_015230.2,3672-3690).
ggtacagatggtaatgctt

SEQ ID NO: 24198 - DNA, 19 bp, Homo sapiens
  siRNA target sequence for CENTD1 (NM_015230.2,3717-3735).
gacgttcccattatagtga

SEQ ID NO: 24199 - DNA, 19 bp, Homo sapiens
  siRNA target sequence for CENTD1 (NM_015230.2,3732-3750).
gtgaacagctgtatagcat

SEQ ID NO: 24200 - DNA, 19 bp, Homo sapiens
  siRNA target sequence for CENTD1 (NM_015230.2,3737-3755).
cagctgtatagcatttgtt

SEQ ID NO: 24201 - DNA, 19 bp, Homo sapiens
  siRNA target sequence for CENTD1 (NM_015230.2,3740-3758).
ctgtatagcatttgttaca

SEQ ID NO: 24202 - DNA, 19 bp, Homo sapiens
  siRNA target sequence for CENTD1 (NM_015230.2,3742-3760).
gtatagcatttgttacaca

SEQ ID NO: 24203 - DNA, 19 bp, Homo sapiens
  siRNA target sequence for CENTD1 (NM_015230.2,3761-3779).
gtatggtttaggatgcaaa

SEQ ID NO: 24204 - DNA, 19 bp, Homo sapiens
  siRNA target sequence for CENTD1 (NM_015230.2,3772-3790).
gatgcaaatatatctatca

SEQ ID NO: 24205 - DNA, 19 bp, Homo sapiens
  siRNA target sequence for CENTD1 (NM_015230.2,3794-3812).
gaatggtgatcctttgcat

SEQ ID NO: 24206 - DNA, 19 bp, Homo sapiens
  siRNA target sequence for CENTD1 (NM_015230.2,3895-3913).
cggctgtgttgaaaagttt

SEQ ID NO: 24207 - DNA, 19 bp, Homo sapiens
  siRNA target sequence for CENTD1 (NM_015230.2,3927-3945).
gatgatgcactgcttacta

SEQ ID NO: 24208 - DNA, 19 bp, Homo sapiens
  siRNA target sequence for CENTD1 (NM_015230.2,3948-3966).
gagctctacccatattgga

SEQ ID NO: 24209 - DNA, 19 bp, Homo sapiens
  siRNA target sequence for CENTD1 (NM_015230.2,4040-4058).
ggtcaaccgagcaacacta

SEQ ID NO: 24210 - DNA, 19 bp, Homo sapiens
  siRNA target sequence for CENTD1 (NM_015230.2,4077-4095).
ctgtatagggttcagaaat

SEQ ID NO: 24211 - DNA, 19 bp, Homo sapiens
  siRNA target sequence for CENTD1 (NM_015230.2,4091-4109).
gaaatgctcagaaatcaat

SEQ ID NO: 24212 - DNA, 19 bp, Homo sapiens
  siRNA target sequence for CENTD1 (NM_015230.2,4110-4128).
cacatgaatgcccataatt

SEQ ID NO: 24213 - DNA, 19 bp, Homo sapiens
  siRNA target sequence for CENTD1 (NM_015230.2,4239-4257).
gaagatcaagtcaaacaaa

SEQ ID NO: 24214 - DNA, 19 bp, Homo sapiens
  siRNA target sequence for CENTD1 (NM_015230.2,4349-4367).
ggaacccgactgtagtatt

SEQ ID NO: 24215 - DNA, 19 bp, Homo sapiens
  siRNA target sequence for CENTD1 (NM_015230.2,4350-4368).
gaacccgactgtagtatta

SEQ ID NO: 24216 - DNA, 19 bp, Homo sapiens
  siRNA target sequence for CENTD1 (NM_015230.2,4388-4406).
gatggaagcagaagaatta

SEQ ID NO: 24217 - DNA, 19 bp, Homo sapiens
  siRNA target sequence for CENTD1 (NM_015230.2,4460-4478).
ggccacatttgaagtcatt

SEQ ID NO: 24218 - DNA, 19 bp, Homo sapiens
  siRNA target sequence for CENTD1 (NM_015230.2,4533-4551).
gtgcttcggtggagttcat

SEQ ID NO: 24219 - DNA, 19 bp, Homo sapiens
  siRNA target sequence for CENTD1 (NM_015230.2,4535-4553).
gcttcggtggagttcatta

SEQ ID NO: 24220 - DNA, 19 bp, Homo sapiens
  siRNA target sequence for CENTD1 (NM_015230.2,4577-4595).
ggtggtgaagagattctta

SEQ ID NO: 24221 - DNA, 19 bp, Homo sapiens
  siRNA target sequence for CENTD1 (NM_015230.2,4592-4610).
cttaaccgctgacacaatt

SEQ ID NO: 24222 - DNA, 19 bp, Homo sapiens
  siRNA target sequence for CENTD1 (NM_015230.2,4597-4615).
ccgctgacacaattaaaca

SEQ ID NO: 24223 - DNA, 19 bp, Homo sapiens
  siRNA target sequence for CENTD1 (NM_015230.2,4674-4692).
gaaccatccaaaatactat

SEQ ID NO: 24224 - DNA, 19 bp, Homo sapiens
  siRNA target sequence for CENTD1 (NM_015230.2,4703-4721).
gtttcaagaccggtatttt

SEQ ID NO: 24225 - DNA, 19 bp, Homo sapiens
  siRNA target sequence for CENTD1 (NM_015230.2,4712-4730).
ccggtattttgttttacga

SEQ ID NO: 24226 - DNA, 19 bp, Homo sapiens
  siRNA target sequence for CENTD1 (NM_015230.2,4805-4823).
gttttatcgtggagtgaaa

SEQ ID NO: 24227 - DNA, 19 bp, Homo sapiens
  siRNA target sequence for CENTD1 (NM_015230.2,4850-4868).
gggattgaccgcatattct

SEQ ID NO: 24228 - DNA, 19 bp, Homo sapiens
  siRNA target sequence for CENTD1 (NM_015230.2,4856-4874).
gaccgcatattctgagaaa

SEQ ID NO: 24229 - DNA, 19 bp, Homo sapiens
  siRNA target sequence for CENTD1 (NM_015230.2,4886-4904).
cctgtgttgtgatagttca

SEQ ID NO: 24230 - DNA, 19 bp, Homo sapiens
  siRNA target sequence for CENTD1 (NM_015230.2,4917-4935).
gagtggatgaccagtatct

SEQ ID NO: 24231 - DNA, 19 bp, Homo sapiens
  siRNA target sequence for CENTD1 (NM_015230.2,4922-4940).
gatgaccagtatctttatt

SEQ ID NO: 24232 - DNA, 19 bp, Homo sapiens
  siRNA target sequence for CENTD1 (NM_015230.2,4943-4961).
ccagcatgaatatgatata

SEQ ID NO: 24233 - DNA, 19 bp, Homo sapiens
  siRNA target sequence for CENTD1 (NM_015230.2,4974-4992).
ggaaaggaacgaaaacgtt

SEQ ID NO: 24234 - DNA, 19 bp, Homo sapiens
  siRNA target sequence for CENTD1 (NM_015230.2,4979-4997).
ggaacgaaaacgttcaata

SEQ ID NO: 24235 - DNA, 19 bp, Homo sapiens
  siRNA target sequence for CENTD1 (NM_015230.2,4983-5001).
cgaaaacgttcaataacca

SEQ ID NO: 24236 - DNA, 19 bp, Homo sapiens
  siRNA target sequence for CENTD1 (NM_015230.2,4984-5002).
gaaaacgttcaataaccaa

SEQ ID NO: 24237 - DNA, 19 bp, Homo sapiens
  siRNA target sequence for CENTD1 (NM_015230.2,5108-5126).
gcggctcagtgaaaagtgt

SEQ ID NO: 24238 - DNA, 19 bp, Homo sapiens
  siRNA target sequence for CENTD1 (NM_015230.2,5135-5153).
gtccgtggactctagctta

SEQ ID NO: 24239 - DNA, 19 bp, Homo sapiens
  siRNA target sequence for CENTD1 (NM_015230.2,5195-5213).
ggacgataaacttcgaaat

SEQ ID NO: 24240 - DNA, 19 bp, Homo sapiens
  siRNA target sequence for CENTD1 (NM_015230.2,5198-5216).
cgataaacttcgaaatcga

SEQ ID NO: 24241 - DNA, 19 bp, Homo sapiens
  siRNA target sequence for CENTD1 (NM_015230.2,5209-5227).
gaaatcgaccccgaaaaca

SEQ ID NO: 24242 - DNA, 19 bp, Homo sapiens
  siRNA target sequence for CENTD1 (NM_015230.2,5220-5238).
cgaaaacatcggagtttca

SEQ ID NO: 24243 - DNA, 19 bp, Homo sapiens
  siRNA target sequence for CENTD1 (NM_015230.2,5221-5239).
gaaaacatcggagtttcaa

SEQ ID NO: 24244 - DNA, 19 bp, Homo sapiens
  siRNA target sequence for CENTD1 (NM_015230.2,5286-5304).
ggccataaaggcctaaaga

SEQ ID NO: 24245 - DNA, 19 bp, Homo sapiens
  siRNA target sequence for CENTD1 (NM_015230.2,5288-5306).
ccataaaggcctaaagaca

SEQ ID NO: 24246 - DNA, 19 bp, Homo sapiens
  siRNA target sequence for CENTD1 (NM_015230.2,5322-5340).
gacaggaatagcaaagcta

SEQ ID NO: 24247 - DNA, 19 bp, Homo sapiens
  siRNA target sequence for CENTD1 (NM_015230.2,5360-5378).
gttaccatcaagggtaatt

SEQ ID NO: 24248 - DNA, 19 bp, Homo sapiens
  siRNA target sequence for CENTD1 (NM_015230.2,5365-5383).
catcaagggtaattgaaga

SEQ ID NO: 24249 - DNA, 19 bp, Homo sapiens
  siRNA target sequence for CENTD1 (NM_015230.2,5368-5386).
caagggtaattgaagaact

SEQ ID NO: 24250 - DNA, 19 bp, Homo sapiens
  siRNA target sequence for CENTD1 (NM_015230.2,5394-5412).
gttctacaacggtcaagaa

SEQ ID NO: 24251 - DNA, 19 bp, Homo sapiens
  siRNA target sequence for CENTD1 (NM_015230.2,5405-5423).
gtcaagaacccttccaaaa

SEQ ID NO: 24252 - DNA, 19 bp, Homo sapiens
  siRNA target sequence for CENTD2 (NM_015242.2,749-767).
cttgcccagcacaatagct

SEQ ID NO: 24253 - DNA, 19 bp, Homo sapiens
  siRNA target sequence for CENTD2 (NM_015242.2,849-867).
ccaccgcagggatcttaca

SEQ ID NO: 24254 - DNA, 19 bp, Homo sapiens
  siRNA target sequence for CENTD2 (NM_015242.2,850-868).
caccgcagggatcttacat

SEQ ID NO: 24255 - DNA, 19 bp, Homo sapiens
  siRNA target sequence for CENTD2 (NM_015242.2,852-870).
ccgcagggatcttacatct

SEQ ID NO: 24256 - DNA, 19 bp, Homo sapiens
  siRNA target sequence for CENTD2 (NM_015242.2,853-871).
cgcagggatcttacatcta

SEQ ID NO: 24257 - DNA, 19 bp, Homo sapiens
  siRNA target sequence for CENTD2 (NM_015242.2,854-872).
gcagggatcttacatctat

SEQ ID NO: 24258 - DNA, 19 bp, Homo sapiens
  siRNA target sequence for CENTD2 (NM_015242.2,858-876).
ggatcttacatctatcaga

SEQ ID NO: 24259 - DNA, 19 bp, Homo sapiens
  siRNA target sequence for CENTD2 (NM_015242.2,859-877).
gatcttacatctatcagaa

SEQ ID NO: 24260 - DNA, 19 bp, Homo sapiens
  siRNA target sequence for CENTD2 (NM_015242.2,884-902).
ggtgagactggatactgat

SEQ ID NO: 24261 - DNA, 19 bp, Homo sapiens
  siRNA target sequence for CENTD2 (NM_015242.2,898-916).
ctgatcacctgcgatactt

SEQ ID NO: 24262 - DNA, 19 bp, Homo sapiens
  siRNA target sequence for CENTD2 (NM_015242.2,903-921).
cacctgcgatactttgaca

SEQ ID NO: 24263 - DNA, 19 bp, Homo sapiens
  siRNA target sequence for CENTD2 (NM_015242.2,938-956).
ctctaagcgctttatctct

SEQ ID NO: 24264 - DNA, 19 bp, Homo sapiens
  siRNA target sequence for CENTD2 (NM_015242.2,1010-1028).
cacaaacaaccgaaccttt

SEQ ID NO: 24265 - DNA, 19 bp, Homo sapiens
  siRNA target sequence for CENTD2 (NM_015242.2,1114-1132).
ggctctctagcgcttatct

SEQ ID NO: 24266 - DNA, 19 bp, Homo sapiens
  siRNA target sequence for CENTD2 (NM_015242.2,1179-1197).
gagcttcgtggcttcaaga

SEQ ID NO: 24267 - DNA, 19 bp, Homo sapiens
  siRNA target sequence for CENTD2 (NM_015242.2,1181-1199).
gcttcgtggcttcaagaat

SEQ ID NO: 24268 - DNA, 19 bp, Homo sapiens
  siRNA target sequence for CENTD2 (NM_015242.2,1213-1231).
ccgtggtcggggacaaagt

SEQ ID NO: 24269 - DNA, 19 bp, Homo sapiens
  siRNA target sequence for CENTD2 (NM_015242.2,2023-2041).
cgatgaagcccctggaaaa

SEQ ID NO: 24270 - DNA, 19 bp, Homo sapiens
  siRNA target sequence for CENTD2 (NM_015242.2,2171-2189).
cggggtcctgagctacttt

SEQ ID NO: 24271 - DNA, 19 bp, Homo sapiens
  siRNA target sequence for CENTD2 (NM_015242.2,2207-2225).
gacccccaatggagagatt

SEQ ID NO: 24272 - DNA, 19 bp, Homo sapiens
  siRNA target sequence for CENTD2 (NM_015242.2,2352-2370).
catgagtgggtcaagtgta

SEQ ID NO: 24273 - DNA, 19 bp, Homo sapiens
  siRNA target sequence for CENTD2 (NM_015242.2,2357-2375).
gtgggtcaagtgtattgct

SEQ ID NO: 24274 - DNA, 19 bp, Homo sapiens
  siRNA target sequence for CENTD2 (NM_015242.2,2432-2450).
gggacgcctaccctacaaa

SEQ ID NO: 24275 - DNA, 19 bp, Homo sapiens
  siRNA target sequence for CENTD2 (NM_015242.2,2620-2638).
gaaggaggacactgtacat

SEQ ID NO: 24276 - DNA, 19 bp, Homo sapiens
  siRNA target sequence for CENTD2 (NM_015242.2,2763-2781).
cgctgtgtggactacatca

SEQ ID NO: 24277 - DNA, 19 bp, Homo sapiens
  siRNA target sequence for CENTD2 (NM_015242.2,2901-2919).
cagcacgtggatgatgttt

SEQ ID NO: 24278 - DNA, 19 bp, Homo sapiens
  siRNA target sequence for CENTD2 (NM_015242.2,3237-3255).
cactatgtggtggtgttta

SEQ ID NO: 24279 - DNA, 19 bp, Homo sapiens
  siRNA target sequence for CENTD2 (NM_015242.2,3763-3781).
gctgcttgcggctctacaa

SEQ ID NO: 24280 - DNA, 19 bp, Homo sapiens
  siRNA target sequence for CENTD2 (NM_015242.2,3837-3855).
gagaaggagtggcctatta

SEQ ID NO: 24281 - DNA, 19 bp, Homo sapiens
  siRNA target sequence for CENTD2 (NM_015242.2,3842-3860).
ggagtggcctattaagagt

SEQ ID NO: 24282 - DNA, 19 bp, Homo sapiens
  siRNA target sequence for CENTD2 (NM_015242.2,3848-3866).
gcctattaagagtctcaaa

SEQ ID NO: 24283 - DNA, 19 bp, Homo sapiens
  siRNA target sequence for CENTD2 (NM_015242.2,3992-4010).
ggagtggttcgctaccttt

SEQ ID NO: 24284 - DNA, 19 bp, Homo sapiens
  siRNA target sequence for CENTD2 (NM_015242.2,3997-4015).
ggttcgctacctttctgtt

SEQ ID NO: 24285 - DNA, 19 bp, Homo sapiens
  siRNA target sequence for CENTD2 (NM_015242.2,3998-4016).
gttcgctacctttctgttt

SEQ ID NO: 24286 - DNA, 19 bp, Homo sapiens
  siRNA target sequence for CENTD2 (NM_015242.2,4106-4124).
cccccttcgaggtagtgaa

SEQ ID NO: 24287 - DNA, 19 bp, Homo sapiens
  siRNA target sequence for CENTD2 (NM_015242.2,4109-4127).
ccttcgaggtagtgaaaat

SEQ ID NO: 24288 - DNA, 19 bp, Homo sapiens
  siRNA target sequence for CENTG1 (NM_014770.1,392-410).
gagagtgagcagtacaaga

SEQ ID NO: 24289 - DNA, 19 bp, Homo sapiens
  siRNA target sequence for CENTG1 (NM_014770.1,394-412).
gagtgagcagtacaagaaa

SEQ ID NO: 24290 - DNA, 19 bp, Homo sapiens
  siRNA target sequence for CENTG1 (NM_014770.1,467-485).
gcacctgatgccaagttct

SEQ ID NO: 24291 - DNA, 19 bp, Homo sapiens
  siRNA target sequence for CENTG1 (NM_014770.1,681-699).
ctctgtgcgcggacatgaa

SEQ ID NO: 24292 - DNA, 19 bp, Homo sapiens
  siRNA target sequence for CENTG1 (NM_014770.1,697-715).
gaaacgctgcagctactat

SEQ ID NO: 24293 - DNA, 19 bp, Homo sapiens
  siRNA target sequence for CENTG1 (NM_014770.1,916-934).
cccgtcctcaccgaatgtt

SEQ ID NO: 24294 - DNA, 19 bp, Homo sapiens
  siRNA target sequence for CENTG1 (NM_014770.1,1012-1030).
gcgcaggaccagccttttt

SEQ ID NO: 24295 - DNA, 19 bp, Homo sapiens
  siRNA target sequence for CENTG1 (NM_014770.1,1099-1117).
gcgagccatccccatcaaa

SEQ ID NO: 24296 - DNA, 19 bp, Homo sapiens
  siRNA target sequence for CENTG1 (NM_014770.1,1120-1138).
gagcttcctactaaaacga

SEQ ID NO: 24297 - DNA, 19 bp, Homo sapiens
  siRNA target sequence for CENTG1 (NM_014770.1,1210-1228).
ccaccccagtattaacgat

SEQ ID NO: 24298 - DNA, 19 bp, Homo sapiens
  siRNA target sequence for CENTG1 (NM_014770.1,1211-1229).
caccccagtattaacgatt

SEQ ID NO: 24299 - DNA, 19 bp, Homo sapiens
  siRNA target sequence for CENTG1 (NM_014770.1,1215-1233).
ccagtattaacgattacat

SEQ ID NO: 24300 - DNA, 19 bp, Homo sapiens
  siRNA target sequence for CENTG1 (NM_014770.1,1838-1856).
gccaaggggaattcaatct

SEQ ID NO: 24301 - DNA, 19 bp, Homo sapiens
  siRNA target sequence for CENTG1 (NM_014770.1,2223-2241).
ctaccgttctcctgctttt

SEQ ID NO: 24302 - DNA, 19 bp, Homo sapiens
  siRNA target sequence for CENTG2 (NM_014914.1,841-859).
gtacctgacgggcacatat

SEQ ID NO: 24303 - DNA, 19 bp, Homo sapiens
  siRNA target sequence for CENTG2 (NM_014914.1,878-896).
gaaggtggcaggttcaaga

SEQ ID NO: 24304 - DNA, 19 bp, Homo sapiens
  siRNA target sequence for CENTG2 (NM_014914.1,885-903).
gcaggttcaagaaagagat

SEQ ID NO: 24305 - DNA, 19 bp, Homo sapiens
  siRNA target sequence for CENTG2 (NM_014914.1,978-996).
gggtggacgctgttatatt

SEQ ID NO: 24306 - DNA, 19 bp, Homo sapiens
  siRNA target sequence for CENTG2 (NM_014914.1,979-997).
ggtggacgctgttatattt

SEQ ID NO: 24307 - DNA, 19 bp, Homo sapiens
  siRNA target sequence for CENTG2 (NM_014914.1,983-1001).
gacgctgttatatttgtct

SEQ ID NO: 24308 - DNA, 19 bp, Homo sapiens
  siRNA target sequence for CENTG2 (NM_014914.1,1023-1041).
gtttccagaccgtttacca

SEQ ID NO: 24309 - DNA, 19 bp, Homo sapiens
  siRNA target sequence for CENTG2 (NM_014914.1,1048-1066).
cagtcgaatggccaactat

SEQ ID NO: 24310 - DNA, 19 bp, Homo sapiens
  siRNA target sequence for CENTG2 (NM_014914.1,1240-1258).
ggacgttgcccagaagatt

SEQ ID NO: 24311 - DNA, 19 bp, Homo sapiens
  siRNA target sequence for CENTG2 (NM_014914.1,1243-1261).
cgttgcccagaagattgtt

SEQ ID NO: 24312 - DNA, 19 bp, Homo sapiens
  siRNA target sequence for CENTG2 (NM_014914.1,1297-1315).
ctgcaagtcgctacctaat

SEQ ID NO: 24313 - DNA, 19 bp, Homo sapiens
  siRNA target sequence for CENTG2 (NM_014914.1,1300-1318).
caagtcgctacctaattct

SEQ ID NO: 24314 - DNA, 19 bp, Homo sapiens
  siRNA target sequence for CENTG2 (NM_014914.1,1361-1379).
cacatcagccagacaagta

SEQ ID NO: 24315 - DNA, 19 bp, Homo sapiens
  siRNA target sequence for CENTG2 (NM_014914.1,1363-1381).
catcagccagacaagtaat

SEQ ID NO: 24316 - DNA, 19 bp, Homo sapiens
  siRNA target sequence for CENTG2 (NM_014914.1,1388-1406).
gggagtttaagcgactatt

SEQ ID NO: 24317 - DNA, 19 bp, Homo sapiens
  siRNA target sequence for CENTG2 (NM_014914.1,1641-1659).
gtggcaaatcgttgaataa

SEQ ID NO: 24318 - DNA, 19 bp, Homo sapiens
  siRNA target sequence for CENTG3 (NM_031946.3,128-146).
ccgtgcatcccaatatcta

SEQ ID NO: 24319 - DNA, 19 bp, Homo sapiens
  siRNA target sequence for CENTG3 (NM_031946.3,263-281).
gctccgtaccggagcttaa

SEQ ID NO: 24320 - DNA, 19 bp, Homo sapiens
  siRNA target sequence for CENTG3 (NM_031946.3,264-282).
ctccgtaccggagcttaaa

SEQ ID NO: 24321 - DNA, 19 bp, Homo sapiens
  siRNA target sequence for CENTG3 (NM_031946.3,266-284).
ccgtaccggagcttaaagt

SEQ ID NO: 24322 - DNA, 19 bp, Homo sapiens
  siRNA target sequence for CENTG3 (NM_031946.3,520-538).
cagacggtgtacaactact

SEQ ID NO: 24323 - DNA, 19 bp, Homo sapiens
  siRNA target sequence for CENTG3 (NM_031946.3,669-687).
gaagcggtgcacctactat

SEQ ID NO: 24324 - DNA, 19 bp, Homo sapiens
  siRNA target sequence for CENTG3 (NM_031946.3,1353-1371).
cgtggagcggagtaacaca

SEQ ID NO: 24325 - DNA, 19 bp, Homo sapiens
  siRNA target sequence for CENTG3 (NM_031946.3,1702-1720).
gcagaggagtcgtttgaat

SEQ ID NO: 24326 - DNA, 19 bp, Homo sapiens
  siRNA target sequence for CENTG3 (NM_031946.3,1703-1721).
cagaggagtcgtttgaatt

SEQ ID NO: 24327 - DNA, 19 bp, Homo sapiens
  siRNA target sequence for CENTG3 (NM_031946.3,1975-1993).
gccctgatgtgcattgagt

SEQ ID NO: 24328 - DNA, 19 bp, Homo sapiens
  siRNA target sequence for CENTG3 (NM_031946.3,2184-2202).
ctggatacgggccaagtat

SEQ ID NO: 24329 - DNA, 19 bp, Homo sapiens
  siRNA target sequence for CENTG3 (NM_031946.3,2187-2205).
gatacgggccaagtatgaa

SEQ ID NO: 24330 - DNA, 19 bp, Homo sapiens
  siRNA target sequence for CENTG3 (NM_031946.3,2192-2210).
gggccaagtatgaacagaa

SEQ ID NO: 24331 - DNA, 19 bp, Homo sapiens
  siRNA target sequence for CENTG3 (NM_031946.3,2387-2405).
ccatggccaacgttgtctt

SEQ ID NO: 24332 - DNA, 19 bp, Homo sapiens
  siRNA target sequence for CHC1 (NM_001269.2,291-309).
cacccaagcgcatagctaa

SEQ ID NO: 24333 - DNA, 19 bp, Homo sapiens
  siRNA target sequence for CHC1 (NM_001269.2,293-311).
cccaagcgcatagctaaaa

SEQ ID NO: 24334 - DNA, 19 bp, Homo sapiens
  siRNA target sequence for CHC1 (NM_001269.2,295-313).
caagcgcatagctaaaaga

SEQ ID NO: 24335 - DNA, 19 bp, Homo sapiens
  siRNA target sequence for CHC1 (NM_001269.2,477-495).
ccattccggaggatgttgt

SEQ ID NO: 24336 - DNA, 19 bp, Homo sapiens
  siRNA target sequence for CHC1 (NM_001269.2,523-541).
cgtgtgtctaagcaaaagt

SEQ ID NO: 24337 - DNA, 19 bp, Homo sapiens
  siRNA target sequence for CHC1 (NM_001269.2,540-558).
gtggccaggtctattcctt

SEQ ID NO: 24338 - DNA, 19 bp, Homo sapiens
  siRNA target sequence for CHC1 (NM_001269.2,716-734).
ggctccttccgggacaata

SEQ ID NO: 24339 - DNA, 19 bp, Homo sapiens
  siRNA target sequence for CHC1 (NM_001269.2,727-745).
ggacaataacggtgtgatt

SEQ ID NO: 24340 - DNA, 19 bp, Homo sapiens
  siRNA target sequence for CHC1 (NM_001269.2,900-918).
gccgtgtgcctgagttatt

SEQ ID NO: 24341 - DNA, 19 bp, Homo sapiens
  siRNA target sequence for CHC1 (NM_001269.2,901-919).
ccgtgtgcctgagttattt

SEQ ID NO: 24342 - DNA, 19 bp, Homo sapiens
  siRNA target sequence for CHC1 (NM_001269.2,1103-1121).
ggaactccgggcacagaat

SEQ ID NO: 24343 - DNA, 19 bp, Homo sapiens
  siRNA target sequence for CHC1 (NM_001269.2,1114-1132).
cacagaatcttgcttcata

SEQ ID NO: 24344 - DNA, 19 bp, Homo sapiens
  siRNA target sequence for CHC1 (NM_001269.2,1141-1159).
cctaacatccttcaagaat

SEQ ID NO: 24345 - DNA, 19 bp, Homo sapiens
  siRNA target sequence for CHC1 (NM_001269.2,1188-1206).
gtggccagcaccatacagt

SEQ ID NO: 24346 - DNA, 19 bp, Homo sapiens
  siRNA target sequence for CHC1 (NM_001269.2,1199-1217).
catacagtctgcatggatt

SEQ ID NO: 24347 - DNA, 19 bp, Homo sapiens
  siRNA target sequence for CHC1 (NM_001269.2,1209-1227).
gcatggattcggaaggaaa

SEQ ID NO: 24348 - DNA, 19 bp, Homo sapiens
  siRNA target sequence for CHC1 (NM_001269.2,1475-1493).
gagaaccgtgtggtcttat

SEQ ID NO: 24349 - DNA, 19 bp, Homo sapiens
  siRNA target sequence for CHC1 (NM_001269.2,1508-1526).
ggccagcatacagtcttat

SEQ ID NO: 24350 - DNA, 19 bp, Homo sapiens
  siRNA target sequence for CHC1 (NM_001269.2,1509-1527).
gccagcatacagtcttatt

SEQ ID NO: 24351 - DNA, 19 bp, Homo sapiens
  siRNA target sequence for CHC1 (NM_001269.2,1514-1532).
catacagtcttattagtca

SEQ ID NO: 24352 - DNA, 19 bp, Homo sapiens
  siRNA target sequence for CHD1L (NM_024568.1,412-430).
gaaacaggagtcacgtttt

SEQ ID NO: 24353 - DNA, 19 bp, Homo sapiens
  siRNA target sequence for CHD1L (NM_024568.1,440-458).
ctgactacctatgagattt

SEQ ID NO: 24354 - DNA, 19 bp, Homo sapiens
  siRNA target sequence for CHD1L (NM_024568.1,444-462).
ctacctatgagatttgctt

SEQ ID NO: 24355 - DNA, 19 bp, Homo sapiens
  siRNA target sequence for CHD1L (NM_024568.1,448-466).
ctatgagatttgcttgaaa

SEQ ID NO: 24356 - DNA, 19 bp, Homo sapiens
  siRNA target sequence for CHD1L (NM_024568.1,459-477).
gcttgaaagatgcatcatt

SEQ ID NO: 24357 - DNA, 19 bp, Homo sapiens
  siRNA target sequence for CHD1L (NM_024568.1,470-488).
gcatcatttctaaaatcat

SEQ ID NO: 24358 - DNA, 19 bp, Homo sapiens
  siRNA target sequence for CHD1L (NM_024568.1,521-539).
cacaggttgaaaaaccaaa

SEQ ID NO: 24359 - DNA, 19 bp, Homo sapiens
  siRNA target sequence for CHD1L (NM_024568.1,808-826).
gaagacagaagtagtgata

SEQ ID NO: 24360 - DNA, 19 bp, Homo sapiens
  siRNA target sequence for CHD1L (NM_024568.1,813-831).
cagaagtagtgatatacca

SEQ ID NO: 24361 - DNA, 19 bp, Homo sapiens
  siRNA target sequence for CHD1L (NM_024568.1,881-899).
gacctagatgcatttgaaa

SEQ ID NO: 24362 - DNA, 19 bp, Homo sapiens
  siRNA target sequence for CHD1L (NM_024568.1,902-920).
gagacggcaaagaaagtta

SEQ ID NO: 24363 - DNA, 19 bp, Homo sapiens
  siRNA target sequence for CHD1L (NM_024568.1,904-922).
gacggcaaagaaagttaaa

SEQ ID NO: 24364 - DNA, 19 bp, Homo sapiens
  siRNA target sequence for CHD1L (NM_024568.1,937-955).
gtcccagcttcgaaagtgt

SEQ ID NO: 24365 - DNA, 19 bp, Homo sapiens
  siRNA target sequence for CHD1L (NM_024568.1,1055-1073).
ctactagcattcctgtatt

SEQ ID NO: 24366 - DNA, 19 bp, Homo sapiens
  siRNA target sequence for CHD1L (NM_024568.1,1130-1148).
caagactatatggattaca

SEQ ID NO: 24367 - DNA, 19 bp, Homo sapiens
  siRNA target sequence for CHD1L (NM_024568.1,1221-1239).
gacagcagcccattttcgt

SEQ ID NO: 24368 - DNA, 19 bp, Homo sapiens
  siRNA target sequence for CHD1L (NM_024568.1,1263-1281).
gtggagttggcatgaactt

SEQ ID NO: 24369 - DNA, 19 bp, Homo sapiens
  siRNA target sequence for CHD1L (NM_024568.1,1367-1385).
ggccaaaacaagtctgtta

SEQ ID NO: 24370 - DNA, 19 bp, Homo sapiens
  siRNA target sequence for CHD1L (NM_024568.1,1375-1393).
caagtctgttaaagttatt

SEQ ID NO: 24371 - DNA, 19 bp, Homo sapiens
  siRNA target sequence for CHD1L (NM_024568.1,1454-1472).
cagctcaccaacatgatca

SEQ ID NO: 24372 - DNA, 19 bp, Homo sapiens
  siRNA target sequence for CHD1L (NM_024568.1,1459-1477).
caccaacatgatcatagaa

SEQ ID NO: 24373 - DNA, 19 bp, Homo sapiens
  siRNA target sequence for CHD1L (NM_024568.1,1525-1543).
cctccagttgagtgagata

SEQ ID NO: 24374 - DNA, 19 bp, Homo sapiens
  siRNA target sequence for CHD1L (NM_024568.1,1529-1547).
cagttgagtgagatactca

SEQ ID NO: 24375 - DNA, 19 bp, Homo sapiens
  siRNA target sequence for CHD1L (NM_024568.1,1544-1562).
ctcaaatttggtttggata

SEQ ID NO: 24376 - DNA, 19 bp, Homo sapiens
  siRNA target sequence for CHD1L (NM_024568.1,1580-1598).
gggagcaccatggatgaaa

SEQ ID NO: 24377 - DNA, 19 bp, Homo sapiens
  siRNA target sequence for CHD1L (NM_024568.1,1691-1709).
gaaggaaaaaatcatatgt

SEQ ID NO: 24378 - DNA, 19 bp, Homo sapiens
  siRNA target sequence for CHD1L (NM_024568.1,1708-1726).
gtacttatttgaaggtaaa

SEQ ID NO: 24379 - DNA, 19 bp, Homo sapiens
  siRNA target sequence for CHD1L (NM_024568.1,1819-1837).
ggccgatcactccgaaata

SEQ ID NO: 24380 - DNA, 19 bp, Homo sapiens
  siRNA target sequence for CHD1L (NM_024568.1,1820-1838).
gccgatcactccgaaataa

SEQ ID NO: 24381 - DNA, 19 bp, Homo sapiens
  siRNA target sequence for CHD1L (NM_024568.1,1821-1839).
ccgatcactccgaaataaa

SEQ ID NO: 24382 - DNA, 19 bp, Homo sapiens
  siRNA target sequence for CHRAC1 (NM_017444.3,205-223).
gtggtcgtgggtaaagaca

SEQ ID NO: 24383 - DNA, 19 bp, Homo sapiens
  siRNA target sequence for CHRAC1 (NM_017444.3,336-354).
ggccacggagctctttgtt

SEQ ID NO: 24384 - DNA, 19 bp, Homo sapiens
  siRNA target sequence for CHRAC1 (NM_017444.3,355-373).
caatgcctagccacctatt

SEQ ID NO: 24385 - DNA, 19 bp, Homo sapiens
  siRNA target sequence for CHRAC1 (NM_017444.3,359-377).
gcctagccacctattccta

SEQ ID NO: 24386 - DNA, 19 bp, Homo sapiens
  siRNA target sequence for CHRAC1 (NM_017444.3,382-400).
cacggcagtggaaaggaaa

SEQ ID NO: 24387 - DNA, 19 bp, Homo sapiens
  siRNA target sequence for CHRAC1 (NM_017444.3,402-420).
gaaagtactgacttacagt

SEQ ID NO: 24388 - DNA, 19 bp, Homo sapiens
  siRNA target sequence for CHRAC1 (NM_017444.3,411-429).
gacttacagtgatttagca

SEQ ID NO: 24389 - DNA, 19 bp, Homo sapiens
  siRNA target sequence for CHTF18 (NM_022092.1,64-82).
gcggcgtcgaggatgattt

SEQ ID NO: 24390 - DNA, 19 bp, Homo sapiens
  siRNA target sequence for CHTF18 (NM_022092.1,878-896).
cctctgggtggatgagttt

SEQ ID NO: 24391 - DNA, 19 bp, Homo sapiens
  siRNA target sequence for CHTF18 (NM_022092.1,1482-1500).
ctcatgaggcccattatct

SEQ ID NO: 24392 - DNA, 19 bp, Homo sapiens
  siRNA target sequence for CHTF18 (NM_022092.1,1492-1510).
ccattatctgcatttgcaa

SEQ ID NO: 24393 - DNA, 19 bp, Homo sapiens
  siRNA target sequence for CHTF18 (NM_022092.1,1493-1511).
cattatctgcatttgcaat

SEQ ID NO: 24394 - DNA, 19 bp, Homo sapiens
  siRNA target sequence for CHTF18 (NM_022092.1,1657-1675).
ccctctgtgagaaaactga

SEQ ID NO: 24395 - DNA, 19 bp, Homo sapiens
  siRNA target sequence for CHTF18 (NM_022092.1,1918-1936).
ccgcctcacagcgattcta

SEQ ID NO: 24396 - DNA, 19 bp, Homo sapiens
  siRNA target sequence for CHTF18 (NM_022092.1,1983-2001).
gtccagggcttgtttgaca

SEQ ID NO: 24397 - DNA, 19 bp, Homo sapiens
  siRNA target sequence for CHTF18 (NM_022092.1,2381-2399).
cagcacccgtgaaaagcaa

SEQ ID NO: 24398 - DNA, 19 bp, Homo sapiens
  siRNA target sequence for CHTF18 (NM_022092.1,2463-2481).
cccgatggccagtacatct

SEQ ID NO: 24399 - DNA, 19 bp, Homo sapiens
  siRNA target sequence for CHTF18 (NM_022092.1,2464-2482).
ccgatggccagtacatcta

SEQ ID NO: 24400 - DNA, 19 bp, Homo sapiens
  siRNA target sequence for CIC (NM_015125.2,241-259).
ctccaaccagagcaaagaa

SEQ ID NO: 24401 - DNA, 19 bp, Homo sapiens
  siRNA target sequence for CIC (NM_015125.2,577-595).
ggaacgggactcatcttct

SEQ ID NO: 24402 - DNA, 19 bp, Homo sapiens
  siRNA target sequence for CIC (NM_015125.2,1126-1144).
cctggacggcggagaagta

SEQ ID NO: 24403 - DNA, 19 bp, Homo sapiens
  siRNA target sequence for CIC (NM_015125.2,1414-1432).
cggcaccactgacattgat

SEQ ID NO: 24404 - DNA, 19 bp, Homo sapiens
  siRNA target sequence for CIC (NM_015125.2,1532-1550).
gtgatccgttcctccttta

SEQ ID NO: 24405 - DNA, 19 bp, Homo sapiens
  siRNA target sequence for CIC (NM_015125.2,1804-1822).
ccggttcctcccaatggat

SEQ ID NO: 24406 - DNA, 19 bp, Homo sapiens
  siRNA target sequence for CIC (NM_015125.2,1839-1857).
gcaagagacccgaaagtgt

SEQ ID NO: 24407 - DNA, 19 bp, Homo sapiens
  siRNA target sequence for CIC (NM_015125.2,2128-2146).
ggctgaggcgtctccaaat

SEQ ID NO: 24408 - DNA, 19 bp, Homo sapiens
  siRNA target sequence for CIC (NM_015125.2,2130-2148).
ctgaggcgtctccaaatga

SEQ ID NO: 24409 - DNA, 19 bp, Homo sapiens
  siRNA target sequence for CIC (NM_015125.2,2132-2150).
gaggcgtctccaaatgaca

SEQ ID NO: 24410 - DNA, 19 bp, Homo sapiens
  siRNA target sequence for CIC (NM_015125.2,2210-2228).
ggtgtcagcttagtgtatt

SEQ ID NO: 24411 - DNA, 19 bp, Homo sapiens
  siRNA target sequence for CIC (NM_015125.2,2222-2240).
gtgtattcggacaagaagt

SEQ ID NO: 24412 - DNA, 19 bp, Homo sapiens
  siRNA target sequence for CIC (NM_015125.2,2307-2325).
cgcctgccactgtcactaa

SEQ ID NO: 24413 - DNA, 19 bp, Homo sapiens
  siRNA target sequence for CIC (NM_015125.2,3301-3319).
cggaggtcctgtcataaca

SEQ ID NO: 24414 - DNA, 19 bp, Homo sapiens
  siRNA target sequence for CIC (NM_015125.2,3313-3331).
cataacagcattttactct

SEQ ID NO: 24415 - DNA, 19 bp, Homo sapiens
  siRNA target sequence for CIC (NM_015125.2,4387-4405).
gcttggggagctagagtat

SEQ ID NO: 24416 - DNA, 19 bp, Homo sapiens
  siRNA target sequence for CIP29 (NM_033082.1,36-54).
ggtggagctccataagcta

SEQ ID NO: 24417 - DNA, 19 bp, Homo sapiens
  siRNA target sequence for CIP29 (NM_033082.1,42-60).
gctccataagctaaagctt

SEQ ID NO: 24418 - DNA, 19 bp, Homo sapiens
  siRNA target sequence for CIP29 (NM_033082.1,52-70).
ctaaagcttgccgaactaa

SEQ ID NO: 24419 - DNA, 19 bp, Homo sapiens
  siRNA target sequence for CIP29 (NM_033082.1,57-75).
gcttgccgaactaaagcaa

SEQ ID NO: 24420 - DNA, 19 bp, Homo sapiens
  siRNA target sequence for CIP29 (NM_033082.1,222-240).
cattgagctccctgtcaaa

SEQ ID NO: 24421 - DNA, 19 bp, Homo sapiens
  siRNA target sequence for CIP29 (NM_033082.1,336-354).
gagggctgaacgattcaat

SEQ ID NO: 24422 - DNA, 19 bp, Homo sapiens
  siRNA target sequence for CIP29 (NM_033082.1,338-356).
gggctgaacgattcaatgt

SEQ ID NO: 24423 - DNA, 19 bp, Homo sapiens
  siRNA target sequence for CIP29 (NM_033082.1,339-357).
ggctgaacgattcaatgta

SEQ ID NO: 24424 - DNA, 19 bp, Homo sapiens
  siRNA target sequence for CIP29 (NM_033082.1,427-445).
ggtctgtcatctgataaca

SEQ ID NO: 24425 - DNA, 19 bp, Homo sapiens
  siRNA target sequence for CIP29 (NM_033082.1,434-452).
catctgataacaaacctat

SEQ ID NO: 24426 - DNA, 19 bp, Homo sapiens
  siRNA target sequence for CIP29 (NM_033082.1,439-457).
gataacaaacctatggtta

SEQ ID NO: 24427 - DNA, 19 bp, Homo sapiens
  siRNA target sequence for CNTN1 (NM_001843.2,125-143).
gttgctggtcagtcatctt

SEQ ID NO: 24428 - DNA, 19 bp, Homo sapiens
  siRNA target sequence for CNTN1 (NM_001843.2,131-149).
ggtcagtcatcttgtgata

SEQ ID NO: 24429 - DNA, 19 bp, Homo sapiens
  siRNA target sequence for CNTN1 (NM_001843.2,132-150).
gtcagtcatcttgtgataa

SEQ ID NO: 24430 - DNA, 19 bp, Homo sapiens
  siRNA target sequence for CNTN1 (NM_001843.2,144-162).
gtgataatatctattacta

SEQ ID NO: 24431 - DNA, 19 bp, Homo sapiens
  siRNA target sequence for CNTN1 (NM_001843.2,171-189).
gcagagtttacatggtata

SEQ ID NO: 24432 - DNA, 19 bp, Homo sapiens
  siRNA target sequence for CNTN1 (NM_001843.2,174-192).
gagtttacatggtatagaa

SEQ ID NO: 24433 - DNA, 19 bp, Homo sapiens
  siRNA target sequence for CNTN1 (NM_001843.2,243-261).
gaagagcagccaatcaata

SEQ ID NO: 24434 - DNA, 19 bp, Homo sapiens
  siRNA target sequence for CNTN1 (NM_001843.2,362-380).
cgttgatctcacaagtgat

SEQ ID NO: 24435 - DNA, 19 bp, Homo sapiens
  siRNA target sequence for CNTN1 (NM_001843.2,373-391).
caagtgatcgatacagtat

SEQ ID NO: 24436 - DNA, 19 bp, Homo sapiens
  siRNA target sequence for CNTN1 (NM_001843.2,393-411).
gtaggaggaaaccttgtta

SEQ ID NO: 24437 - DNA, 19 bp, Homo sapiens
  siRNA target sequence for CNTN1 (NM_001843.2,396-414).
ggaggaaaccttgttatca

SEQ ID NO: 24438 - DNA, 19 bp, Homo sapiens
  siRNA target sequence for CNTN1 (NM_001843.2,397-415).
gaggaaaccttgttatcaa

SEQ ID NO: 24439 - DNA, 19 bp, Homo sapiens
  siRNA target sequence for CNTN1 (NM_001843.2,438-456).
gctggaatatactactgtt

SEQ ID NO: 24440 - DNA, 19 bp, Homo sapiens
  siRNA target sequence for CNTN1 (NM_001843.2,439-457).
ctggaatatactactgttt

SEQ ID NO: 24441 - DNA, 19 bp, Homo sapiens
  siRNA target sequence for CNTN1 (NM_001843.2,449-467).
ctactgtttagcatctaat

SEQ ID NO: 24442 - DNA, 19 bp, Homo sapiens
  siRNA target sequence for CNTN1 (NM_001843.2,496-514).
caaccctgagctttggata

SEQ ID NO: 24443 - DNA, 19 bp, Homo sapiens
  siRNA target sequence for CNTN1 (NM_001843.2,503-521).
gagctttggatatcttgat

SEQ ID NO: 24444 - DNA, 19 bp, Homo sapiens
  siRNA target sequence for CNTN1 (NM_001843.2,540-558).
cgtcctgaggtcagagtaa

SEQ ID NO: 24445 - DNA, 19 bp, Homo sapiens
  siRNA target sequence for CNTN1 (NM_001843.2,541-559).
gtcctgaggtcagagtaaa

SEQ ID NO: 24446 - DNA, 19 bp, Homo sapiens
  siRNA target sequence for CNTN1 (NM_001843.2,586-604).
gtgaccccccataccattt

SEQ ID NO: 24447 - DNA, 19 bp, Homo sapiens
  siRNA target sequence for CNTN1 (NM_001843.2,619-637).
gctatcgctggcttctaaa

SEQ ID NO: 24448 - DNA, 19 bp, Homo sapiens
  siRNA target sequence for CNTN1 (NM_001843.2,620-638).
ctatcgctggcttctaaat

SEQ ID NO: 24449 - DNA, 19 bp, Homo sapiens
  siRNA target sequence for CNTN1 (NM_001843.2,663-681).
gataaacggcgatttgtgt

SEQ ID NO: 24450 - DNA, 19 bp, Homo sapiens
  siRNA target sequence for CNTN1 (NM_001843.2,684-702).
cagacaaatggcaatctct

SEQ ID NO: 24451 - DNA, 19 bp, Homo sapiens
  siRNA target sequence for CNTN1 (NM_001843.2,694-712).
gcaatctctacattgcaaa

SEQ ID NO: 24452 - DNA, 19 bp, Homo sapiens
  siRNA target sequence for CNTN1 (NM_001843.2,695-713).
caatctctacattgcaaat

SEQ ID NO: 24453 - DNA, 19 bp, Homo sapiens
  siRNA target sequence for CNTN1 (NM_001843.2,721-739).
cttccgacaaaggcaatta

SEQ ID NO: 24454 - DNA, 19 bp, Homo sapiens
  siRNA target sequence for CNTN1 (NM_001843.2,754-772).
ccagtccttctattacaaa

SEQ ID NO: 24455 - DNA, 19 bp, Homo sapiens
  siRNA target sequence for CNTN1 (NM_001843.2,775-793).
gcgtgttcagcaaattcat

SEQ ID NO: 24456 - DNA, 19 bp, Homo sapiens
  siRNA target sequence for CNTN1 (NM_001843.2,829-847).
catatcctgctgatattgt

SEQ ID NO: 24457 - DNA, 19 bp, Homo sapiens
  siRNA target sequence for CNTN1 (NM_001843.2,835-853).
ctgctgatattgtagttca

SEQ ID NO: 24458 - DNA, 19 bp, Homo sapiens
  siRNA target sequence for CNTN1 (NM_001843.2,934-952).
gatggcggaaggttctaga

SEQ ID NO: 24459 - DNA, 19 bp, Homo sapiens
  siRNA target sequence for CNTN1 (NM_001843.2,959-977).
gccaagcactgctgagatt

SEQ ID NO: 24460 - DNA, 19 bp, Homo sapiens
  siRNA target sequence for CNTN1 (NM_001843.2,988-1006).
gggctgttcttaagatctt

SEQ ID NO: 24461 - DNA, 19 bp, Homo sapiens
  siRNA target sequence for CNTN1 (NM_001843.2,990-1008).
gctgttcttaagatcttca

SEQ ID NO: 24462 - DNA, 19 bp, Homo sapiens
  siRNA target sequence for CNTN1 (NM_001843.2,991-1009).
ctgttcttaagatcttcaa

SEQ ID NO: 24463 - DNA, 19 bp, Homo sapiens
  siRNA target sequence for CNTN1 (NM_001843.2,1084-1102).
gaatttatgttcaagcatt

SEQ ID NO: 24464 - DNA, 19 bp, Homo sapiens
  siRNA target sequence for CNTN1 (NM_001843.2,1195-1213).
caatccgatggttgaaaaa

SEQ ID NO: 24465 - DNA, 19 bp, Homo sapiens
  siRNA target sequence for CNTN1 (NM_001843.2,1223-1241).
gtatcataaaggggaatta

SEQ ID NO: 24466 - DNA, 19 bp, Homo sapiens
  siRNA target sequence for CNTN1 (NM_001843.2,1234-1252).
gggaattaagactgtatga

SEQ ID NO: 24467 - DNA, 19 bp, Homo sapiens
  siRNA target sequence for CNTN1 (NM_001843.2,1235-1253).
ggaattaagactgtatgat

SEQ ID NO: 24468 - DNA, 19 bp, Homo sapiens
  siRNA target sequence for CNTN1 (NM_001843.2,1247-1265).
gtatgatgtgacttttgaa

SEQ ID NO: 24469 - DNA, 19 bp, Homo sapiens
  siRNA target sequence for CNTN1 (NM_001843.2,1340-1358).
ggcgttggctccaactttt

SEQ ID NO: 24470 - DNA, 19 bp, Homo sapiens
  siRNA target sequence for CNTN1 (NM_001843.2,1347-1365).
gctccaacttttgaaatga

SEQ ID NO: 24471 - DNA, 19 bp, Homo sapiens
  siRNA target sequence for CNTN1 (NM_001843.2,1382-1400).
gatcctggctgctaaaggt

SEQ ID NO: 24472 - DNA, 19 bp, Homo sapiens
  siRNA target sequence for CNTN1 (NM_001843.2,1405-1423).
gggtgataattgaatgcaa

SEQ ID NO: 24473 - DNA, 19 bp, Homo sapiens
  siRNA target sequence for CNTN1 (NM_001843.2,1437-1455).
ccgaaaccaaagttttcat

SEQ ID NO: 24474 - DNA, 19 bp, Homo sapiens
  siRNA target sequence for CNTN1 (NM_001843.2,1512-1530).
ggtagcttggaaatcaaca

SEQ ID NO: 24475 - DNA, 19 bp, Homo sapiens
  siRNA target sequence for CNTN1 (NM_001843.2,1513-1531).
gtagcttggaaatcaacaa

SEQ ID NO: 24476 - DNA, 19 bp, Homo sapiens
  siRNA target sequence for CNTN1 (NM_001843.2,1521-1539).
gaaatcaacaacattacaa

SEQ ID NO: 24477 - DNA, 19 bp, Homo sapiens
  siRNA target sequence for CNTN1 (NM_001843.2,1526-1544).
caacaacattacaaggaat

SEQ ID NO: 24478 - DNA, 19 bp, Homo sapiens
  siRNA target sequence for CNTN1 (NM_001843.2,1618-1636).
cagatcctacgcgaattat

SEQ ID NO: 24479 - DNA, 19 bp, Homo sapiens
  siRNA target sequence for CNTN1 (NM_001843.2,1620-1638).
gatcctacgcgaattatat

SEQ ID NO: 24480 - DNA, 19 bp, Homo sapiens
  siRNA target sequence for CNTN1 (NM_001843.2,1644-1662).
ccaattaatgccgatatca

SEQ ID NO: 24481 - DNA, 19 bp, Homo sapiens
  siRNA target sequence for CNTN1 (NM_001843.2,1743-1761).
ggctatgtgatcgatttta

SEQ ID NO: 24482 - DNA, 19 bp, Homo sapiens
  siRNA target sequence for CNTN1 (NM_001843.2,1744-1762).
gctatgtgatcgattttaa

SEQ ID NO: 24483 - DNA, 19 bp, Homo sapiens
  siRNA target sequence for CNTN1 (NM_001843.2,1776-1794).
cactaccagaggaatttta

SEQ ID NO: 24484 - DNA, 19 bp, Homo sapiens
  siRNA target sequence for CNTN1 (NM_001843.2,1804-1822).
ccaatggggaattactaat

SEQ ID NO: 24485 - DNA, 19 bp, Homo sapiens
  siRNA target sequence for CNTN1 (NM_001843.2,1858-1876).
catgcactgcccagacaat

SEQ ID NO: 24486 - DNA, 19 bp, Homo sapiens
  siRNA target sequence for CNTN1 (NM_001843.2,1861-1879).
gcactgcccagacaattgt

SEQ ID NO: 24487 - DNA, 19 bp, Homo sapiens
  siRNA target sequence for CNTN1 (NM_001843.2,1871-1889).
gacaattgtggacaattct

SEQ ID NO: 24488 - DNA, 19 bp, Homo sapiens
  siRNA target sequence for CNTN1 (NM_001843.2,1894-1912).
cttcagctgaccttgtagt

SEQ ID NO: 24489 - DNA, 19 bp, Homo sapiens
  siRNA target sequence for CNTN1 (NM_001843.2,1989-2007).
cgtggttcagacaatcata

SEQ ID NO: 24490 - DNA, 19 bp, Homo sapiens
  siRNA target sequence for CNTN1 (NM_001843.2,2010-2028).
cctatttctaaatacacta

SEQ ID NO: 24491 - DNA, 19 bp, Homo sapiens
  siRNA target sequence for CNTN1 (NM_001843.2,2026-2044).
ctatccagaccaagactat

SEQ ID NO: 24492 - DNA, 19 bp, Homo sapiens
  siRNA target sequence for CNTN1 (NM_001843.2,2031-2049).
cagaccaagactattcttt

SEQ ID NO: 24493 - DNA, 19 bp, Homo sapiens
  siRNA target sequence for CNTN1 (NM_001843.2,2033-2051).
gaccaagactattctttca

SEQ ID NO: 24494 - DNA, 19 bp, Homo sapiens
  siRNA target sequence for CNTN1 (NM_001843.2,2035-2053).
ccaagactattctttcaga

SEQ ID NO: 24495 - DNA, 19 bp, Homo sapiens
  siRNA target sequence for CNTN1 (NM_001843.2,2072-2090).
gacagatcccccaattatt

SEQ ID NO: 24496 - DNA, 19 bp, Homo sapiens
  siRNA target sequence for CNTN1 (NM_001843.2,2074-2092).
cagatcccccaattattga

SEQ ID NO: 24497 - DNA, 19 bp, Homo sapiens
  siRNA target sequence for CNTN1 (NM_001843.2,2109-2127).
gcaagagcagtggacttaa

SEQ ID NO: 24498 - DNA, 19 bp, Homo sapiens
  siRNA target sequence for CNTN1 (NM_001843.2,2150-2168).
ccgcgtggtagcaaccaat

SEQ ID NO: 24499 - DNA, 19 bp, Homo sapiens
  siRNA target sequence for CNTN1 (NM_001843.2,2151-2169).
cgcgtggtagcaaccaata

SEQ ID NO: 24500 - DNA, 19 bp, Homo sapiens
  siRNA target sequence for CNTN1 (NM_001843.2,2153-2171).
cgtggtagcaaccaataca

SEQ ID NO: 24501 - DNA, 19 bp, Homo sapiens
  siRNA target sequence for CNTN1 (NM_001843.2,2181-2199).
ggagagcccagtataccat

SEQ ID NO: 24502 - DNA, 19 bp, Homo sapiens
  siRNA target sequence for CNTN1 (NM_001843.2,2299-2317).
ctttgtcaagagaatacca

SEQ ID NO: 24503 - DNA, 19 bp, Homo sapiens
  siRNA target sequence for CNTN1 (NM_001843.2,2315-2333).
ccactatggcaacaatttt

SEQ ID NO: 24504 - DNA, 19 bp, Homo sapiens
  siRNA target sequence for CNTN1 (NM_001843.2,2323-2341).
gcaacaattttggttacat

SEQ ID NO: 24505 - DNA, 19 bp, Homo sapiens
  siRNA target sequence for CNTN1 (NM_001843.2,2334-2352).
ggttacatagtggcattta

SEQ ID NO: 24506 - DNA, 19 bp, Homo sapiens
  siRNA target sequence for CNTN1 (NM_001843.2,2398-2416).
ctgatactggccgatatgt

SEQ ID NO: 24507 - DNA, 19 bp, Homo sapiens
  siRNA target sequence for CNTN1 (NM_001843.2,2404-2422).
ctggccgatatgtccataa

SEQ ID NO: 24508 - DNA, 19 bp, Homo sapiens
  siRNA target sequence for CNTN1 (NM_001843.2,2407-2425).
gccgatatgtccataaaga

SEQ ID NO: 24509 - DNA, 19 bp, Homo sapiens
  siRNA target sequence for CNTN1 (NM_001843.2,2408-2426).
ccgatatgtccataaagat

SEQ ID NO: 24510 - DNA, 19 bp, Homo sapiens
  siRNA target sequence for CNTN1 (NM_001843.2,2435-2453).
gagcccttccactgcattt

SEQ ID NO: 24511 - DNA, 19 bp, Homo sapiens
  siRNA target sequence for CNTN1 (NM_001843.2,2440-2458).
cttccactgcatttcaagt

SEQ ID NO: 24512 - DNA, 19 bp, Homo sapiens
  siRNA target sequence for CNTN1 (NM_001843.2,2443-2461).
ccactgcatttcaagttaa

SEQ ID NO: 24513 - DNA, 19 bp, Homo sapiens
  siRNA target sequence for CNTN1 (NM_001843.2,2449-2467).
catttcaagttaaagtcaa

SEQ ID NO: 24514 - DNA, 19 bp, Homo sapiens
  siRNA target sequence for CNTN1 (NM_001843.2,2500-2518).
gcctagtagcagtcattaa

SEQ ID NO: 24515 - DNA, 19 bp, Homo sapiens
  siRNA target sequence for CNTN1 (NM_001843.2,2501-2519).
cctagtagcagtcattaat

SEQ ID NO: 24516 - DNA, 19 bp, Homo sapiens
  siRNA target sequence for CNTN1 (NM_001843.2,2551-2569).
cagaagtaggtgtaaaagt

SEQ ID NO: 24517 - DNA, 19 bp, Homo sapiens
  siRNA target sequence for CNTN1 (NM_001843.2,2556-2574).
gtaggtgtaaaagtcttat

SEQ ID NO: 24518 - DNA, 19 bp, Homo sapiens
  siRNA target sequence for CNTN1 (NM_001843.2,2559-2577).
ggtgtaaaagtcttatcat

SEQ ID NO: 24519 - DNA, 19 bp, Homo sapiens
  siRNA target sequence for CNTN1 (NM_001843.2,2570-2588).
cttatcatcttctgagata

SEQ ID NO: 24520 - DNA, 19 bp, Homo sapiens
  siRNA target sequence for CNTN1 (NM_001843.2,2729-2747).
gccagacacccagtatttt

SEQ ID NO: 24521 - DNA, 19 bp, Homo sapiens
  siRNA target sequence for CNTN1 (NM_001843.2,2835-2853).
cctccaaggatcatcagtt

SEQ ID NO: 24522 - DNA, 19 bp, Homo sapiens
  siRNA target sequence for CNTN1 (NM_001843.2,2860-2878).
ggtctggttcacgctatat

SEQ ID NO: 24523 - DNA, 19 bp, Homo sapiens
  siRNA target sequence for CNTN1 (NM_001843.2,2861-2879).
gtctggttcacgctatata

SEQ ID NO: 24524 - DNA, 19 bp, Homo sapiens
  siRNA target sequence for CNTN1 (NM_001843.2,2865-2883).
ggttcacgctatataatca

SEQ ID NO: 24525 - DNA, 19 bp, Homo sapiens
  siRNA target sequence for CNTN1 (NM_001843.2,2892-2910).
catgtcgttgcactatcaa

SEQ ID NO: 24526 - DNA, 19 bp, Homo sapiens
  siRNA target sequence for CNTN1 (NM_001843.2,2901-2919).
gcactatcaaatgaatcta

SEQ ID NO: 24527 - DNA, 19 bp, Homo sapiens
  siRNA target sequence for CNTN1 (NM_001843.2,2964-2982).
gatggcaagctgtattcaa

SEQ ID NO: 24528 - DNA, 19 bp, Homo sapiens
  siRNA target sequence for CNTN1 (NM_001843.2,3013-3031).
ccagagatggagaatacgt

SEQ ID NO: 24529 - DNA, 19 bp, Homo sapiens
  siRNA target sequence for CNTN1 (NM_001843.2,3014-3032).
cagagatggagaatacgtt

SEQ ID NO: 24530 - DNA, 19 bp, Homo sapiens
  siRNA target sequence for CNTN1 (NM_001843.2,3067-3085).
gagtggtgtctcaagtcaa

SEQ ID NO: 24531 - DNA, 19 bp, Homo sapiens
  siRNA target sequence for CNTN1 (NM_001843.2,3139-3157).
cctttggcatccttgtcta

SEQ ID NO: 24532 - DNA, 19 bp, Homo sapiens
  siRNA target sequence for COPEB (NM_001300.3,381-399).
gagcgagccctgctatgtt

SEQ ID NO: 24533 - DNA, 19 bp, Homo sapiens
  siRNA target sequence for COPEB (NM_001300.3,384-402).
cgagccctgctatgtttca

SEQ ID NO: 24534 - DNA, 19 bp, Homo sapiens
  siRNA target sequence for COPEB (NM_001300.3,397-415).
gtttcagcctcagaaatca

SEQ ID NO: 24535 - DNA, 19 bp, Homo sapiens
  siRNA target sequence for COPEB (NM_001300.3,430-448).
gaagatctgtggaccaaaa

SEQ ID NO: 24536 - DNA, 19 bp, Homo sapiens
  siRNA target sequence for COPEB (NM_001300.3,433-451).
gatctgtggaccaaaatca

SEQ ID NO: 24537 - DNA, 19 bp, Homo sapiens
  siRNA target sequence for COPEB (NM_001300.3,474-492).
ggaatccgaactgaagata

SEQ ID NO: 24538 - DNA, 19 bp, Homo sapiens
  siRNA target sequence for COPEB (NM_001300.3,475-493).
gaatccgaactgaagatat

SEQ ID NO: 24539 - DNA, 19 bp, Homo sapiens
  siRNA target sequence for COPEB (NM_001300.3,519-537).
catcagcccgagcttttgt

SEQ ID NO: 24540 - DNA, 19 bp, Homo sapiens
  siRNA target sequence for COPEB (NM_001300.3,530-548).
gcttttgttacaacttaga

SEQ ID NO: 24541 - DNA, 19 bp, Homo sapiens
  siRNA target sequence for COPEB (NM_001300.3,589-607).
gacagctccgaggaacttt

SEQ ID NO: 24542 - DNA, 19 bp, Homo sapiens
  siRNA target sequence for COPEB (NM_001300.3,652-670).
gtcagctcgggaaaattga

SEQ ID NO: 24543 - DNA, 19 bp, Homo sapiens
  siRNA target sequence for COPEB (NM_001300.3,711-729).
gagcagggaaccttctcaa

SEQ ID NO: 24544 - DNA, 19 bp, Homo sapiens
  siRNA target sequence for COPEB (NM_001300.3,844-862).
gtgcaccggtgccacttta

SEQ ID NO: 24545 - DNA, 19 bp, Homo sapiens
  siRNA target sequence for COPEB (NM_001300.3,1018-1036).
gccaagccttttaaatgct

SEQ ID NO: 24546 - DNA, 19 bp, Homo sapiens
  siRNA target sequence for CREB3 (NM_006368.4,587-605).
cgagcgactgggaagtaga

SEQ ID NO: 24547 - DNA, 19 bp, Homo sapiens
  siRNA target sequence for CREB3 (NM_006368.4,588-606).
gagcgactgggaagtagat

SEQ ID NO: 24548 - DNA, 19 bp, Homo sapiens
  siRNA target sequence for CREB3 (NM_006368.4,631-649).
cccccagcgtcgttgaaca

SEQ ID NO: 24549 - DNA, 19 bp, Homo sapiens
  siRNA target sequence for CREB3 (NM_006368.4,632-650).
ccccagcgtcgttgaacat

SEQ ID NO: 24550 - DNA, 19 bp, Homo sapiens
  siRNA target sequence for CREB3 (NM_006368.4,633-651).
cccagcgtcgttgaacatt

SEQ ID NO: 24551 - DNA, 19 bp, Homo sapiens
  siRNA target sequence for CREB3 (NM_006368.4,635-653).
cagcgtcgttgaacattct

SEQ ID NO: 24552 - DNA, 19 bp, Homo sapiens
  siRNA target sequence for CREB3 (NM_006368.4,637-655).
gcgtcgttgaacattctca

SEQ ID NO: 24553 - DNA, 19 bp, Homo sapiens
  siRNA target sequence for CREB3 (NM_006368.4,698-716).
ccctcccacgggaaactgt

SEQ ID NO: 24554 - DNA, 19 bp, Homo sapiens
  siRNA target sequence for CREB3 (NM_006368.4,704-722).
cacgggaaactgtctctat

SEQ ID NO: 24555 - DNA, 19 bp, Homo sapiens
  siRNA target sequence for CREB3 (NM_006368.4,708-726).
ggaaactgtctctatggat

SEQ ID NO: 24556 - DNA, 19 bp, Homo sapiens
  siRNA target sequence for CREB3 (NM_006368.4,734-752).
gtgagagctgtagaaaaga

SEQ ID NO: 24557 - DNA, 19 bp, Homo sapiens
  siRNA target sequence for CREB3 (NM_006368.4,913-931).
gtgcggaggaagattcgaa

SEQ ID NO: 24558 - DNA, 19 bp, Homo sapiens
  siRNA target sequence for CREB3 (NM_006368.4,915-933).
gcggaggaagattcgaaat

SEQ ID NO: 24559 - DNA, 19 bp, Homo sapiens
  siRNA target sequence for CREB3 (NM_006368.4,924-942).
gattcgaaataaaagatct

SEQ ID NO: 24560 - DNA, 19 bp, Homo sapiens
  siRNA target sequence for CREB3 (NM_006368.4,1177-1195).
cttgtacctgctatgtact

SEQ ID NO: 24561 - DNA, 19 bp, Homo sapiens
  siRNA target sequence for CREB3 (NM_006368.4,1529-1547).
gtagcccctctgtcatttt

SEQ ID NO: 24562 - DNA, 19 bp, Homo sapiens
  siRNA target sequence for CREB3L3 (NM_032607.1,359-377).
ccccgaaggcagtgatagt

SEQ ID NO: 24563 - DNA, 19 bp, Homo sapiens
  siRNA target sequence for CREB3L3 (NM_032607.1,629-647).
cctgtccccacgatgcaat

SEQ ID NO: 24564 - DNA, 19 bp, Homo sapiens
  siRNA target sequence for CREB3L3 (NM_032607.1,643-661).
gcaatctcaccgtgaaaga

SEQ ID NO: 24565 - DNA, 19 bp, Homo sapiens
  siRNA target sequence for CREB3L3 (NM_032607.1,813-831).
cagctgcccctcactaagt

SEQ ID NO: 24566 - DNA, 19 bp, Homo sapiens
  siRNA target sequence for CREB3L3 (NM_032607.1,834-852).
gaggagcgagtgctgaaaa

SEQ ID NO: 24567 - DNA, 19 bp, Homo sapiens
  siRNA target sequence for CREB3L3 (NM_032607.1,955-973).
ctcagaatcaggagttaca

SEQ ID NO: 24568 - DNA, 19 bp, Homo sapiens
  siRNA target sequence for CREB3L3 (NM_032607.1,1341-1359).
gcgaacctgaccaattcga

SEQ ID NO: 24569 - DNA, 19 bp, Homo sapiens
  siRNA target sequence for CREB3L4 (NM_130898.2,371-389).
ccagaggttccggtaacta

SEQ ID NO: 24570 - DNA, 19 bp, Homo sapiens
  siRNA target sequence for CREB3L4 (NM_130898.2,591-609).
gttctcctatgctctatga

SEQ ID NO: 24571 - DNA, 19 bp, Homo sapiens
  siRNA target sequence for CREB3L4 (NM_130898.2,933-951).
ggaggaaaatccgtaacaa

SEQ ID NO: 24572 - DNA, 19 bp, Homo sapiens
  siRNA target sequence for CREB3L4 (NM_130898.2,1102-1120).
ccagctgcagacgctaatt

SEQ ID NO: 24573 - DNA, 19 bp, Homo sapiens
  siRNA target sequence for CREB3L4 (NM_130898.2,1105-1123).
gctgcagacgctaattgct

SEQ ID NO: 24574 - DNA, 19 bp, Homo sapiens
  siRNA target sequence for CREB3L4 (NM_130898.2,1111-1129).
gacgctaattgctcaaact

SEQ ID NO: 24575 - DNA, 19 bp, Homo sapiens
  siRNA target sequence for CREB3L4 (NM_130898.2,1145-1163).
cagaccagcacttgtgttt

SEQ ID NO: 24576 - DNA, 19 bp, Homo sapiens
  siRNA target sequence for CREB3L4 (NM_130898.2,1149-1167).
ccagcacttgtgttttgat

SEQ ID NO: 24577 - DNA, 19 bp, Homo sapiens
  siRNA target sequence for CREB3L4 (NM_130898.2,1152-1170).
gcacttgtgttttgattct

SEQ ID NO: 24578 - DNA, 19 bp, Homo sapiens
  siRNA target sequence for CREB3L4 (NM_130898.2,1153-1171).
cacttgtgttttgattctt

SEQ ID NO: 24579 - DNA, 19 bp, Homo sapiens
  siRNA target sequence for CREB3L4 (NM_130898.2,1258-1276).
cggagtgacttccagaaat

SEQ ID NO: 24580 - DNA, 19 bp, Homo sapiens
  siRNA target sequence for CREB3L4 (NM_130898.2,1285-1303).
ccacaaggacgtaacagaa

SEQ ID NO: 24581 - DNA, 19 bp, Homo sapiens
  siRNA target sequence for CREB3L4 (NM_130898.2,1286-1304).
cacaaggacgtaacagaaa

SEQ ID NO: 24582 - DNA, 19 bp, Homo sapiens
  siRNA target sequence for CREB3L4 (NM_130898.2,1358-1376).
gatgcaaatggctcaacaa

SEQ ID NO: 24583 - DNA, 19 bp, Homo sapiens
  siRNA target sequence for CREB5 (NM_004904.1,155-173).
caacagaggaccatctgat

SEQ ID NO: 24584 - DNA, 19 bp, Homo sapiens
  siRNA target sequence for CREB5 (NM_004904.1,174-192).
gattcataggcacaaacat

SEQ ID NO: 24585 - DNA, 19 bp, Homo sapiens
  siRNA target sequence for CREB5 (NM_004904.1,224-242).
cagacaatatgttatcaga

SEQ ID NO: 24586 - DNA, 19 bp, Homo sapiens
  siRNA target sequence for CREB5 (NM_004904.1,361-379).
cggaatatctcgatgcata

SEQ ID NO: 24587 - DNA, 19 bp, Homo sapiens
  siRNA target sequence for CREB5 (NM_004904.1,362-380).
ggaatatctcgatgcataa

SEQ ID NO: 24588 - DNA, 19 bp, Homo sapiens
  siRNA target sequence for CREB5 (NM_004904.1,363-381).
gaatatctcgatgcataat

SEQ ID NO: 24589 - DNA, 19 bp, Homo sapiens
  siRNA target sequence for CREB5 (NM_004904.1,538-556).
cctgtcccaggctctctat

SEQ ID NO: 24590 - DNA, 19 bp, Homo sapiens
  siRNA target sequence for CREB5 (NM_004904.1,541-559).
gtcccaggctctctatctt

SEQ ID NO: 24591 - DNA, 19 bp, Homo sapiens
  siRNA target sequence for CREB5 (NM_004904.1,661-679).
ccaatggagcgacaaatgt

SEQ ID NO: 24592 - DNA, 19 bp, Homo sapiens
  siRNA target sequence for CREB5 (NM_004904.1,1358-1376).
cccagctgaaacagttgtt

SEQ ID NO: 24593 - DNA, 19 bp, Homo sapiens
  siRNA target sequence for CREB5 (NM_004904.1,1362-1380).
gctgaaacagttgttgtta

SEQ ID NO: 24594 - DNA, 19 bp, Homo sapiens
  siRNA target sequence for CREB5 (NM_004904.1,1369-1387).
cagttgttgttaacacata

SEQ ID NO: 24595 - DNA, 19 bp, Homo sapiens
  siRNA target sequence for CREB5 (NM_004904.1,1371-1389).
gttgttgttaacacataaa

SEQ ID NO: 24596 - DNA, 19 bp, Homo sapiens
  siRNA target sequence for CREB5 (NM_004904.1,1472-1490).
cttgctcccagcaacaagt

SEQ ID NO: 24597 - DNA, 19 bp, Homo sapiens
  siRNA target sequence for CREB5 (NM_004904.1,1486-1504).
caagtcatccagcataata

SEQ ID NO: 24598 - DNA, 19 bp, Homo sapiens
  siRNA target sequence for CREB5 (NM_004904.1,1495-1513).
cagcataataccatcacta

SEQ ID NO: 24599 - DNA, 19 bp, Homo sapiens
  siRNA target sequence for CREB5 (NM_004904.1,1579-1597).
gacctgaatccgattcttt

SEQ ID NO: 24600 - DNA, 19 bp, Homo sapiens
  siRNA target sequence for CREBL1 (NM_004381.3,65-83).
ctgacccgacgcgtttctt

SEQ ID NO: 24601 - DNA, 19 bp, Homo sapiens
  siRNA target sequence for CREBL1 (NM_004381.3,120-138).
gcagaacagcaccttgtat

SEQ ID NO: 24602 - DNA, 19 bp, Homo sapiens
  siRNA target sequence for CREBL1 (NM_004381.3,123-141).
gaacagcaccttgtattct

SEQ ID NO: 24603 - DNA, 19 bp, Homo sapiens
  siRNA target sequence for CREBL1 (NM_004381.3,135-153).
gtattctggcctagatgaa

SEQ ID NO: 24604 - DNA, 19 bp, Homo sapiens
  siRNA target sequence for CREBL1 (NM_004381.3,389-407).
gggaggtgctccatgtgaa

SEQ ID NO: 24605 - DNA, 19 bp, Homo sapiens
  siRNA target sequence for CREBL1 (NM_004381.3,470-488).
ccgtccagatcaatgttat

SEQ ID NO: 24606 - DNA, 19 bp, Homo sapiens
  siRNA target sequence for CREBL1 (NM_004381.3,879-897).
cctcatccagggtgctatt

SEQ ID NO: 24607 - DNA, 19 bp, Homo sapiens
  siRNA target sequence for CREBL1 (NM_004381.3,986-1004).
cgcctgaagtggatgcaaa

SEQ ID NO: 24608 - DNA, 19 bp, Homo sapiens
  siRNA target sequence for CREBL1 (NM_004381.3,1018-1036).
cagcagcgaatgatcaaga

SEQ ID NO: 24609 - DNA, 19 bp, Homo sapiens
  siRNA target sequence for CREBL1 (NM_004381.3,1246-1264).
ctcttcattgccttcaact

SEQ ID NO: 24610 - DNA, 19 bp, Homo sapiens
  siRNA target sequence for CREBL1 (NM_004381.3,1248-1266).
cttcattgccttcaacttt

SEQ ID NO: 24611 - DNA, 19 bp, Homo sapiens
  siRNA target sequence for CREBL1 (NM_004381.3,1485-1503).
caaggagctactactaaga

SEQ ID NO: 24612 - DNA, 19 bp, Homo sapiens
  siRNA target sequence for CREBL1 (NM_004381.3,1529-1547).
ctgattgccggcacttcaa

SEQ ID NO: 24613 - DNA, 19 bp, Homo sapiens
  siRNA target sequence for CREBL1 (NM_004381.3,1726-1744).
gtgggccagctgcaactat

SEQ ID NO: 24614 - DNA, 19 bp, Homo sapiens
  siRNA target sequence for CREBL1 (NM_004381.3,1760-1778).
gttcgcagccagcattctt

SEQ ID NO: 24615 - DNA, 19 bp, Homo sapiens
  siRNA target sequence for CREBL1 (NM_004381.3,1769-1787).
cagcattcttggatgcaat

SEQ ID NO: 24616 - DNA, 19 bp, Homo sapiens
  siRNA target sequence for CREBL1 (NM_004381.3,1772-1790).
cattcttggatgcaattga

SEQ ID NO: 24617 - DNA, 19 bp, Homo sapiens
  siRNA target sequence for CREBL1 (NM_004381.3,1792-1810).
cgacgggaagacacatttt

SEQ ID NO: 24618 - DNA, 19 bp, Homo sapiens
  siRNA target sequence for CREBL1 (NM_004381.3,2121-2139).
gcccctctacctcaatcat

SEQ ID NO: 24619 - DNA, 19 bp, Homo sapiens
  siRNA target sequence for CRY1 (NM_004075.2,736-754).
caggtggcgatttttgctt

SEQ ID NO: 24620 - DNA, 19 bp, Homo sapiens
  siRNA target sequence for CRY1 (NM_004075.2,757-775).
gtgtcttgaggatcttgat

SEQ ID NO: 24621 - DNA, 19 bp, Homo sapiens
  siRNA target sequence for CRY1 (NM_004075.2,766-784).
ggatcttgatgccaatcta

SEQ ID NO: 24622 - DNA, 19 bp, Homo sapiens
  siRNA target sequence for CRY1 (NM_004075.2,773-791).
gatgccaatctacgaaaat

SEQ ID NO: 24623 - DNA, 19 bp, Homo sapiens
  siRNA target sequence for CRY1 (NM_004075.2,776-794).
gccaatctacgaaaattaa

SEQ ID NO: 24624 - DNA, 19 bp, Homo sapiens
  siRNA target sequence for CRY1 (NM_004075.2,777-795).
ccaatctacgaaaattaaa

SEQ ID NO: 24625 - DNA, 19 bp, Homo sapiens
  siRNA target sequence for CRY1 (NM_004075.2,796-814).
ctcccgtctgtttgtgatt

SEQ ID NO: 24626 - DNA, 19 bp, Homo sapiens
  siRNA target sequence for CRY1 (NM_004075.2,850-868).
caaggaatggaacattact

SEQ ID NO: 24627 - DNA, 19 bp, Homo sapiens
  siRNA target sequence for CRY1 (NM_004075.2,862-880).
cattactaaactttcaatt

SEQ ID NO: 24628 - DNA, 19 bp, Homo sapiens
  siRNA target sequence for CRY1 (NM_004075.2,867-885).
ctaaactttcaattgagta

SEQ ID NO: 24629 - DNA, 19 bp, Homo sapiens
  siRNA target sequence for CRY1 (NM_004075.2,887-905).
gattctgagccctttggaa

SEQ ID NO: 24630 - DNA, 19 bp, Homo sapiens
  siRNA target sequence for CRY1 (NM_004075.2,908-926).
gaacgagacgcagctatta

SEQ ID NO: 24631 - DNA, 19 bp, Homo sapiens
  siRNA target sequence for CRY1 (NM_004075.2,978-996).
cattatatgacctagacaa

SEQ ID NO: 24632 - DNA, 19 bp, Homo sapiens
  siRNA target sequence for CRY1 (NM_004075.2,1016-1034).
ggacaaccgcctctaactt

SEQ ID NO: 24633 - DNA, 19 bp, Homo sapiens
  siRNA target sequence for CRY1 (NM_004075.2,1017-1035).
gacaaccgcctctaactta

SEQ ID NO: 24634 - DNA, 19 bp, Homo sapiens
  siRNA target sequence for CRY1 (NM_004075.2,1019-1037).
caaccgcctctaacttata

SEQ ID NO: 24635 - DNA, 19 bp, Homo sapiens
  siRNA target sequence for CRY1 (NM_004075.2,1022-1040).
ccgcctctaacttataaaa

SEQ ID NO: 24636 - DNA, 19 bp, Homo sapiens
  siRNA target sequence for CRY1 (NM_004075.2,1024-1042).
gcctctaacttataaaaga

SEQ ID NO: 24637 - DNA, 19 bp, Homo sapiens
  siRNA target sequence for CRY1 (NM_004075.2,1025-1043).
cctctaacttataaaagat

SEQ ID NO: 24638 - DNA, 19 bp, Homo sapiens
  siRNA target sequence for CRY1 (NM_004075.2,1026-1044).
ctctaacttataaaagatt

SEQ ID NO: 24639 - DNA, 19 bp, Homo sapiens
  siRNA target sequence for CRY1 (NM_004075.2,1078-1096).
gataccagtagagacaatt

SEQ ID NO: 24640 - DNA, 19 bp, Homo sapiens
  siRNA target sequence for CRY1 (NM_004075.2,1082-1100).
ccagtagagacaattactt

SEQ ID NO: 24641 - DNA, 19 bp, Homo sapiens
  siRNA target sequence for CRY1 (NM_004075.2,1136-1154).
gatgaccatgatgagaaat

SEQ ID NO: 24642 - DNA, 19 bp, Homo sapiens
  siRNA target sequence for CRY1 (NM_004075.2,1167-1185).
cactggaagagctaggttt

SEQ ID NO: 24643 - DNA, 19 bp, Homo sapiens
  siRNA target sequence for CRY1 (NM_004075.2,1172-1190).
gaagagctaggttttgata

SEQ ID NO: 24644 - DNA, 19 bp, Homo sapiens
  siRNA target sequence for CRY1 (NM_004075.2,1343-1361).
ccttatctccgatttggtt

SEQ ID NO: 24645 - DNA, 19 bp, Homo sapiens
  siRNA target sequence for CRY1 (NM_004075.2,1349-1367).
ctccgatttggttgtttgt

SEQ ID NO: 24646 - DNA, 19 bp, Homo sapiens
  siRNA target sequence for CRY1 (NM_004075.2,1351-1369).
ccgatttggttgtttgtca

SEQ ID NO: 24647 - DNA, 19 bp, Homo sapiens
  siRNA target sequence for CRY1 (NM_004075.2,1352-1370).
cgatttggttgtttgtcat

SEQ ID NO: 24648 - DNA, 19 bp, Homo sapiens
  siRNA target sequence for CRY1 (NM_004075.2,1371-1389).
gtcgactgttttacttcaa

SEQ ID NO: 24649 - DNA, 19 bp, Homo sapiens
  siRNA target sequence for CRY1 (NM_004075.2,1441-1459).
cctttatgggcaactgtta

SEQ ID NO: 24650 - DNA, 19 bp, Homo sapiens
  siRNA target sequence for CRY1 (NM_004075.2,1454-1472).
ctgttatggcgtgaatttt

SEQ ID NO: 24651 - DNA, 19 bp, Homo sapiens
  siRNA target sequence for CRY1 (NM_004075.2,1497-1515).
cacgctttgataaaatgga

SEQ ID NO: 24652 - DNA, 19 bp, Homo sapiens
  siRNA target sequence for CRY1 (NM_004075.2,1522-1540).
ccctatctgtgttcagatt

SEQ ID NO: 24653 - DNA, 19 bp, Homo sapiens
  siRNA target sequence for CRY1 (NM_004075.2,1535-1553).
cagattccttgggataaaa

SEQ ID NO: 24654 - DNA, 19 bp, Homo sapiens
  siRNA target sequence for CRY1 (NM_004075.2,1745-1763).
gatgcagattggagcataa

SEQ ID NO: 24655 - DNA, 19 bp, Homo sapiens
  siRNA target sequence for CRY1 (NM_004075.2,1853-1871).
gatcccaatggagactata

SEQ ID NO: 24656 - DNA, 19 bp, Homo sapiens
  siRNA target sequence for CRY1 (NM_004075.2,1856-1874).
cccaatggagactatatca

SEQ ID NO: 24657 - DNA, 19 bp, Homo sapiens
  siRNA target sequence for CRY1 (NM_004075.2,1865-1883).
gactatatcaggcgttatt

SEQ ID NO: 24658 - DNA, 19 bp, Homo sapiens
  siRNA target sequence for CRY1 (NM_004075.2,1938-1956).
cagaaggtatccaaaaggt

SEQ ID NO: 24659 - DNA, 19 bp, Homo sapiens
  siRNA target sequence for CRY1 (NM_004075.2,1965-1983).
gtttgataggagttaatta

SEQ ID NO: 24660 - DNA, 19 bp, Homo sapiens
  siRNA target sequence for CRY1 (NM_004075.2,1969-1987).
gataggagttaattatcct

SEQ ID NO: 24661 - DNA, 19 bp, Homo sapiens
  siRNA target sequence for CRY1 (NM_004075.2,1976-1994).
gttaattatcctaaaccaa

SEQ ID NO: 24662 - DNA, 19 bp, Homo sapiens
  siRNA target sequence for CRY1 (NM_004075.2,2007-2025).
ctgaggcaagccgtttgaa

SEQ ID NO: 24663 - DNA, 19 bp, Homo sapiens
  siRNA target sequence for CRY1 (NM_004075.2,2009-2027).
gaggcaagccgtttgaata

SEQ ID NO: 24664 - DNA, 19 bp, Homo sapiens
  siRNA target sequence for CRY1 (NM_004075.2,2019-2037).
gtttgaatatcgaaaggat

SEQ ID NO: 24665 - DNA, 19 bp, Homo sapiens
  siRNA target sequence for CRY1 (NM_004075.2,2051-2069).
cagcagctttcacgatata

SEQ ID NO: 24666 - DNA, 19 bp, Homo sapiens
  siRNA target sequence for CRY1 (NM_004075.2,2053-2071).
gcagctttcacgatataga

SEQ ID NO: 24667 - DNA, 19 bp, Homo sapiens
  siRNA target sequence for CRY1 (NM_004075.2,2091-2109).
cagtaccttctaatcctaa

SEQ ID NO: 24668 - DNA, 19 bp, Homo sapiens
  siRNA target sequence for CRY1 (NM_004075.2,2117-2135).
ggaggcttcatgggatatt

SEQ ID NO: 24669 - DNA, 19 bp, Homo sapiens
  siRNA target sequence for CRY1 (NM_004075.2,2128-2146).
gggatattctgcagaaaat

SEQ ID NO: 24670 - DNA, 19 bp, Homo sapiens
  siRNA target sequence for CRY1 (NM_004075.2,2176-2194).
ctctcaagggagtggtatt

SEQ ID NO: 24671 - DNA, 19 bp, Homo sapiens
  siRNA target sequence for CRY1 (NM_004075.2,2178-2196).
ctcaagggagtggtatttt

SEQ ID NO: 24672 - DNA, 19 bp, Homo sapiens
  siRNA target sequence for CRY1 (NM_004075.2,2183-2201).
gggagtggtattttacact

SEQ ID NO: 24673 - DNA, 19 bp, Homo sapiens
  siRNA target sequence for CRY1 (NM_004075.2,2211-2229).
gcgacagtcagcaaactca

SEQ ID NO: 24674 - DNA, 19 bp, Homo sapiens
  siRNA target sequence for CSEN (NM_013434.3,206-224).
cgccaggctttgatgagat

SEQ ID NO: 24675 - DNA, 19 bp, Homo sapiens
  siRNA target sequence for CSEN (NM_013434.3,375-393).
ctctctacaggggctttaa

SEQ ID NO: 24676 - DNA, 19 bp, Homo sapiens
  siRNA target sequence for CSEN (NM_013434.3,379-397).
ctacaggggctttaagaat

SEQ ID NO: 24677 - DNA, 19 bp, Homo sapiens
  siRNA target sequence for CSEN (NM_013434.3,418-436).
ggacgaagacaccttcaaa

SEQ ID NO: 24678 - DNA, 19 bp, Homo sapiens
  siRNA target sequence for D1S155E (NM_007158.2,472-490).
gtaccctaatggtacttca

SEQ ID NO: 24679 - DNA, 19 bp, Homo sapiens
  siRNA target sequence for D1S155E (NM_007158.2,499-517).
gcgtgaaactggggttatt

SEQ ID NO: 24680 - DNA, 19 bp, Homo sapiens
  siRNA target sequence for D1S155E (NM_007158.2,510-528).
gggttattgaaaaactgtt

SEQ ID NO: 24681 - DNA, 19 bp, Homo sapiens
  siRNA target sequence for D1S155E (NM_007158.2,531-549).
cctcttacggatttattca

SEQ ID NO: 24682 - DNA, 19 bp, Homo sapiens
  siRNA target sequence for D1S155E (NM_007158.2,557-575).
gaacgtcaagctagacttt

SEQ ID NO: 24683 - DNA, 19 bp, Homo sapiens
  siRNA target sequence for D1S155E (NM_007158.2,560-578).
cgtcaagctagacttttct

SEQ ID NO: 24684 - DNA, 19 bp, Homo sapiens
  siRNA target sequence for D1S155E (NM_007158.2,599-617).
ggcaacctgcaagacttaa

SEQ ID NO: 24685 - DNA, 19 bp, Homo sapiens
  siRNA target sequence for D1S155E (NM_007158.2,613-631).
cttaaaagtaggagatgat

SEQ ID NO: 24686 - DNA, 19 bp, Homo sapiens
  siRNA target sequence for D1S155E (NM_007158.2,678-696).
ctgttaaactggtgaagat

SEQ ID NO: 24687 - DNA, 19 bp, Homo sapiens
  siRNA target sequence for D1S155E (NM_007158.2,680-698).
gttaaactggtgaagataa

SEQ ID NO: 24688 - DNA, 19 bp, Homo sapiens
  siRNA target sequence for D1S155E (NM_007158.2,938-956).
gtaagtgctcgcaacatta

SEQ ID NO: 24689 - DNA, 19 bp, Homo sapiens
  siRNA target sequence for D1S155E (NM_007158.2,942-960).
gtgctcgcaacattatgct

SEQ ID NO: 24690 - DNA, 19 bp, Homo sapiens
  siRNA target sequence for D1S155E (NM_007158.2,979-997).
ccgctgtcagggagtagtt

SEQ ID NO: 24691 - DNA, 19 bp, Homo sapiens
  siRNA target sequence for D1S155E (NM_007158.2,1037-1055).
gatgttgtaaaagagatat

SEQ ID NO: 24692 - DNA, 19 bp, Homo sapiens
  siRNA target sequence for D1S155E (NM_007158.2,1057-1075).
ctttcactatagtgaattt

SEQ ID NO: 24693 - DNA, 19 bp, Homo sapiens
  siRNA target sequence for D1S155E (NM_007158.2,1078-1096).
gggtgacttagaaacctta

SEQ ID NO: 24694 - DNA, 19 bp, Homo sapiens
  siRNA target sequence for D1S155E (NM_007158.2,1105-1123).
cgatgatgtggaattcaca

SEQ ID NO: 24695 - DNA, 19 bp, Homo sapiens
  siRNA target sequence for D1S155E (NM_007158.2,1120-1138).
cacaatcaaggacagaaat

SEQ ID NO: 24696 - DNA, 19 bp, Homo sapiens
  siRNA target sequence for D1S155E (NM_007158.2,1151-1169).
gcaacagatgtcagactat

SEQ ID NO: 24697 - DNA, 19 bp, Homo sapiens
  siRNA target sequence for D1S155E (NM_007158.2,1152-1170).
caacagatgtcagactatt

SEQ ID NO: 24698 - DNA, 19 bp, Homo sapiens
  siRNA target sequence for D1S155E (NM_007158.2,1184-1202).
gtcatttttgaagatatca

SEQ ID NO: 24699 - DNA, 19 bp, Homo sapiens
  siRNA target sequence for D1S155E (NM_007158.2,1230-1248).
ccaaagttatcccaaaagt

SEQ ID NO: 24700 - DNA, 19 bp, Homo sapiens
  siRNA target sequence for D1S155E (NM_007158.2,1231-1249).
caaagttatcccaaaagta

SEQ ID NO: 24701 - DNA, 19 bp, Homo sapiens
  siRNA target sequence for D1S155E (NM_007158.2,1276-1294).
gccaggacgcatcaaagtt

SEQ ID NO: 24702 - DNA, 19 bp, Homo sapiens
  siRNA target sequence for D1S155E (NM_007158.2,1278-1296).
caggacgcatcaaagttga

SEQ ID NO: 24703 - DNA, 19 bp, Homo sapiens
  siRNA target sequence for D1S155E (NM_007158.2,1364-1382).
ggtgaccatgttaggttta

SEQ ID NO: 24704 - DNA, 19 bp, Homo sapiens
  siRNA target sequence for D1S155E (NM_007158.2,1365-1383).
gtgaccatgttaggtttaa

SEQ ID NO: 24705 - DNA, 19 bp, Homo sapiens
  siRNA target sequence for D1S155E (NM_007158.2,1392-1410).
cagaccgacgtgacaaatt

SEQ ID NO: 24706 - DNA, 19 bp, Homo sapiens
  siRNA target sequence for D1S155E (NM_007158.2,1458-1476).
ctaatgaagcccgagaaat

SEQ ID NO: 24707 - DNA, 19 bp, Homo sapiens
  siRNA target sequence for D1S155E (NM_007158.2,1468-1486).
ccgagaaatgggtgtgatt

SEQ ID NO: 24708 - DNA, 19 bp, Homo sapiens
  siRNA target sequence for D1S155E (NM_007158.2,1488-1506).
ctgccatgagagatggttt

SEQ ID NO: 24709 - DNA, 19 bp, Homo sapiens
  siRNA target sequence for D1S155E (NM_007158.2,1519-1537).
gtgtgtggatcgtgatgtt

SEQ ID NO: 24710 - DNA, 19 bp, Homo sapiens
  siRNA target sequence for D1S155E (NM_007158.2,1529-1547).
cgtgatgttcgtatgttct

SEQ ID NO: 24711 - DNA, 19 bp, Homo sapiens
  siRNA target sequence for D1S155E (NM_007158.2,1530-1548).
gtgatgttcgtatgttctt

SEQ ID NO: 24712 - DNA, 19 bp, Homo sapiens
  siRNA target sequence for D1S155E (NM_007158.2,1608-1626).
ctgtggttcctgatatgct

SEQ ID NO: 24713 - DNA, 19 bp, Homo sapiens
  siRNA target sequence for D1S155E (NM_007158.2,1638-1656).
gaaatcatgctattaggat

SEQ ID NO: 24714 - DNA, 19 bp, Homo sapiens
  siRNA target sequence for D1S155E (NM_007158.2,1668-1686).
ccaagggcacggtttcatt

SEQ ID NO: 24715 - DNA, 19 bp, Homo sapiens
  siRNA target sequence for D1S155E (NM_007158.2,1669-1687).
caagggcacggtttcattt

SEQ ID NO: 24716 - DNA, 19 bp, Homo sapiens
  siRNA target sequence for D1S155E (NM_007158.2,1734-1752).
ccactttttccaatcctaa

SEQ ID NO: 24717 - DNA, 19 bp, Homo sapiens
  siRNA target sequence for D1S155E (NM_007158.2,1735-1753).
cactttttccaatcctaaa

SEQ ID NO: 24718 - DNA, 19 bp, Homo sapiens
  siRNA target sequence for D1S155E (NM_007158.2,1786-1804).
ggctgaggatggcattatt

SEQ ID NO: 24719 - DNA, 19 bp, Homo sapiens
  siRNA target sequence for D1S155E (NM_007158.2,1792-1810).
ggatggcattattgcttat

SEQ ID NO: 24720 - DNA, 19 bp, Homo sapiens
  siRNA target sequence for D1S155E (NM_007158.2,1822-1840).
ggtgaaactgactattgct

SEQ ID NO: 24721 - DNA, 19 bp, Homo sapiens
  siRNA target sequence for D1S155E (NM_007158.2,1823-1841).
gtgaaactgactattgctt

SEQ ID NO: 24722 - DNA, 19 bp, Homo sapiens
  siRNA target sequence for D1S155E (NM_007158.2,1863-1881).
gatctacttctcctcaaat

SEQ ID NO: 24723 - DNA, 19 bp, Homo sapiens
  siRNA target sequence for D1S155E (NM_007158.2,1872-1890).
ctcctcaaataggagataa

SEQ ID NO: 24724 - DNA, 19 bp, Homo sapiens
  siRNA target sequence for D1S155E (NM_007158.2,1875-1893).
ctcaaataggagataaggt

SEQ ID NO: 24725 - DNA, 19 bp, Homo sapiens
  siRNA target sequence for D1S155E (NM_007158.2,1891-1909).
ggttgaatttagtattagt

SEQ ID NO: 24726 - DNA, 19 bp, Homo sapiens
  siRNA target sequence for D1S155E (NM_007158.2,1948-1966).
gcgacttttaggtcgtaat

SEQ ID NO: 24727 - DNA, 19 bp, Homo sapiens
  siRNA target sequence for D1S155E (NM_007158.2,1949-1967).
cgacttttaggtcgtaatt

SEQ ID NO: 24728 - DNA, 19 bp, Homo sapiens
  siRNA target sequence for D1S155E (NM_007158.2,2102-2120).
ggggacatggtcgagtata

SEQ ID NO: 24729 - DNA, 19 bp, Homo sapiens
  siRNA target sequence for D1S155E (NM_007158.2,2151-2169).
gtgcagaaaaagtgaacaa

SEQ ID NO: 24730 - DNA, 19 bp, Homo sapiens
  siRNA target sequence for D1S155E (NM_007158.2,2198-2216).
gaagctgatcccaccattt

SEQ ID NO: 24731 - DNA, 19 bp, Homo sapiens
  siRNA target sequence for D1S155E (NM_007158.2,2201-2219).
gctgatcccaccatttact

SEQ ID NO: 24732 - DNA, 19 bp, Homo sapiens
  siRNA target sequence for D1S155E (NM_007158.2,2375-2393).
gagagcgtcaagttccaat

SEQ ID NO: 24733 - DNA, 19 bp, Homo sapiens
  siRNA target sequence for D1S155E (NM_007158.2,2380-2398).
cgtcaagttccaattgtgt

SEQ ID NO: 24734 - DNA, 19 bp, Homo sapiens
  siRNA target sequence for D1S155E (NM_007158.2,2404-2422).
gggccaaaatgcacaaact

SEQ ID NO: 24735 - DNA, 19 bp, Homo sapiens
  siRNA target sequence for D1S155E (NM_007158.2,2406-2424).
gccaaaatgcacaaactat

SEQ ID NO: 24736 - DNA, 19 bp, Homo sapiens
  siRNA target sequence for DC8 (NM_015471.2,110-128).
cactccccgagaagacttt

SEQ ID NO: 24737 - DNA, 19 bp, Homo sapiens
  siRNA target sequence for DC8 (NM_015471.2,152-170).
ggctgtgaccgaaatgcta

SEQ ID NO: 24738 - DNA, 19 bp, Homo sapiens
  siRNA target sequence for DC8 (NM_015471.2,246-264).
gcgcagtggacttttgaat

SEQ ID NO: 24739 - DNA, 19 bp, Homo sapiens
  siRNA target sequence for DC8 (NM_015471.2,305-323).
gcaggaagcttcagataat

SEQ ID NO: 24740 - DNA, 19 bp, Homo sapiens
  siRNA target sequence for DC8 (NM_015471.2,308-326).
ggaagcttcagataattgt

SEQ ID NO: 24741 - DNA, 19 bp, Homo sapiens
  siRNA target sequence for DC8 (NM_015471.2,362-380).
gtttgatgaaatcatagta

SEQ ID NO: 24742 - DNA, 19 bp, Homo sapiens
  siRNA target sequence for DC8 (NM_015471.2,366-384).
gatgaaatcatagtagata

SEQ ID NO: 24743 - DNA, 19 bp, Homo sapiens
  siRNA target sequence for DC8 (NM_015471.2,431-449).
catcaaaaccataaaagca

SEQ ID NO: 24744 - DNA, 19 bp, Homo sapiens
  siRNA target sequence for DC8 (NM_015471.2,517-535).
cagcccctcatatggaaaa

SEQ ID NO: 24745 - DNA, 19 bp, Homo sapiens
  siRNA target sequence for DC8 (NM_015471.2,589-607).
ccttgcctgcattaattga

SEQ ID NO: 24746 - DNA, 19 bp, Homo sapiens
  siRNA target sequence for DC8 (NM_015471.2,590-608).
cttgcctgcattaattgaa

SEQ ID NO: 24747 - DNA, 19 bp, Homo sapiens
  siRNA target sequence for DC8 (NM_015471.2,664-682).
ggattcaccaagaagtctt

SEQ ID NO: 24748 - DNA, 19 bp, Homo sapiens
  siRNA target sequence for DC8 (NM_015471.2,709-727).
ctaaacctgagaactttat

SEQ ID NO: 24749 - DNA, 19 bp, Homo sapiens
  siRNA target sequence for DC8 (NM_015471.2,719-737).
gaactttataacacagata

SEQ ID NO: 24750 - DNA, 19 bp, Homo sapiens
  siRNA target sequence for DDEF2 (NM_003887.1,476-494).
gtggaccggatggttcttt

SEQ ID NO: 24751 - DNA, 19 bp, Homo sapiens
  siRNA target sequence for DDEF2 (NM_003887.1,479-497).
gaccggatggttctttaca

SEQ ID NO: 24752 - DNA, 19 bp, Homo sapiens
  siRNA target sequence for DDEF2 (NM_003887.1,481-499).
ccggatggttctttacaaa

SEQ ID NO: 24753 - DNA, 19 bp, Homo sapiens
  siRNA target sequence for DDEF2 (NM_003887.1,603-621).
gcagagatgacccagattt

SEQ ID NO: 24754 - DNA, 19 bp, Homo sapiens
  siRNA target sequence for DDEF2 (NM_003887.1,844-862).
caagctccatgggatgatt

SEQ ID NO: 24755 - DNA, 19 bp, Homo sapiens
  siRNA target sequence for DDEF2 (NM_003887.1,854-872).
gggatgattcggactgaaa

SEQ ID NO: 24756 - DNA, 19 bp, Homo sapiens
  siRNA target sequence for DDEF2 (NM_003887.1,856-874).
gatgattcggactgaaata

SEQ ID NO: 24757 - DNA, 19 bp, Homo sapiens
  siRNA target sequence for DDEF2 (NM_003887.1,882-900).
cggaaattgccgaagagat

SEQ ID NO: 24758 - DNA, 19 bp, Homo sapiens
  siRNA target sequence for DDEF2 (NM_003887.1,1009-1027).
ctttcatgcccaatgcaat

SEQ ID NO: 24759 - DNA, 19 bp, Homo sapiens
  siRNA target sequence for DDEF2 (NM_003887.1,1060-1078).
cctcaaaccttccattgaa

SEQ ID NO: 24760 - DNA, 19 bp, Homo sapiens
  siRNA target sequence for DDEF2 (NM_003887.1,1090-1108).
ggatcttcacacgatcaaa

SEQ ID NO: 24761 - DNA, 19 bp, Homo sapiens
  siRNA target sequence for DDEF2 (NM_003887.1,1164-1182).
ccgcattgcaggttgaaca

SEQ ID NO: 24762 - DNA, 19 bp, Homo sapiens
  siRNA target sequence for DDEF2 (NM_003887.1,1202-1220).
cgtcagagcacagcttata

SEQ ID NO: 24763 - DNA, 19 bp, Homo sapiens
  siRNA target sequence for DDEF2 (NM_003887.1,1205-1223).
cagagcacagcttatagct

SEQ ID NO: 24764 - DNA, 19 bp, Homo sapiens
  siRNA target sequence for DDEF2 (NM_003887.1,1210-1228).
cacagcttatagcttacat

SEQ ID NO: 24765 - DNA, 19 bp, Homo sapiens
  siRNA target sequence for DDEF2 (NM_003887.1,1212-1230).
cagcttatagcttacatca

SEQ ID NO: 24766 - DNA, 19 bp, Homo sapiens
  siRNA target sequence for DDEF2 (NM_003887.1,1263-1281).
ggaacggcagcctctacaa

SEQ ID NO: 24767 - DNA, 19 bp, Homo sapiens
  siRNA target sequence for DDEF2 (NM_003887.1,1317-1335).
ggaaatgttcagttaaaaa

SEQ ID NO: 24768 - DNA, 19 bp, Homo sapiens
  siRNA target sequence for DDEF2 (NM_003887.1,1465-1483).
ccactttcaagctgaagat

SEQ ID NO: 24769 - DNA, 19 bp, Homo sapiens
  siRNA target sequence for DDEF2 (NM_003887.1,1509-1527).
ctgtgctgcaaaatagcaa

SEQ ID NO: 24770 - DNA, 19 bp, Homo sapiens
  siRNA target sequence for DDEF2 (NM_003887.1,1731-1749).
gagagctgggggttcatta

SEQ ID NO: 24771 - DNA, 19 bp, Homo sapiens
  siRNA target sequence for DDEF2 (NM_003887.1,1733-1751).
gagctgggggttcattatt

SEQ ID NO: 24772 - DNA, 19 bp, Homo sapiens
  siRNA target sequence for DDEF2 (NM_003887.1,1736-1754).
ctgggggttcattattcca

SEQ ID NO: 24773 - DNA, 19 bp, Homo sapiens
  siRNA target sequence for DDEF2 (NM_003887.1,1798-1816).
gctgctcgccaagaatatt

SEQ ID NO: 24774 - DNA, 19 bp, Homo sapiens
  siRNA target sequence for DDEF2 (NM_003887.1,1890-1908).
gcgacatgaatgcaagaaa

SEQ ID NO: 24775 - DNA, 19 bp, Homo sapiens
  siRNA target sequence for DDEF2 (NM_003887.1,1901-1919).
gcaagaaaggactacatca

SEQ ID NO: 24776 - DNA, 19 bp, Homo sapiens
  siRNA target sequence for DDEF2 (NM_003887.1,1988-2006).
ctttgcgaggccgtcaaaa

SEQ ID NO: 24777 - DNA, 19 bp, Homo sapiens
  siRNA target sequence for DDEF2 (NM_003887.1,1998-2016).
ccgtcaaaacgagagatat

SEQ ID NO: 24778 - DNA, 19 bp, Homo sapiens
  siRNA target sequence for DDEF2 (NM_003887.1,1999-2017).
cgtcaaaacgagagatatt

SEQ ID NO: 24779 - DNA, 19 bp, Homo sapiens
  siRNA target sequence for DDEF2 (NM_003887.1,2007-2025).
cgagagatatttttggatt

SEQ ID NO: 24780 - DNA, 19 bp, Homo sapiens
  siRNA target sequence for DDEF2 (NM_003887.1,2039-2057).
gctgatggtgtggatctta

SEQ ID NO: 24781 - DNA, 19 bp, Homo sapiens
  siRNA target sequence for DDEF2 (NM_003887.1,2136-2154).
cctctcttcacattgtaga

SEQ ID NO: 24782 - DNA, 19 bp, Homo sapiens
  siRNA target sequence for DDEF2 (NM_003887.1,2273-2291).
gcctccatcgagatagcaa

SEQ ID NO: 24783 - DNA, 19 bp, Homo sapiens
  siRNA target sequence for DDEF2 (NM_003887.1,2274-2292).
cctccatcgagatagcaaa

SEQ ID NO: 24784 - DNA, 19 bp, Homo sapiens
  siRNA target sequence for DDEF2 (NM_003887.1,2356-2374).
gctgacccaagccttatct

SEQ ID NO: 24785 - DNA, 19 bp, Homo sapiens
  siRNA target sequence for DDEF2 (NM_003887.1,2368-2386).
cttatctggaagatttaat

SEQ ID NO: 24786 - DNA, 19 bp, Homo sapiens
  siRNA target sequence for DDEF2 (NM_003887.1,2373-2391).
ctggaagatttaattctca

SEQ ID NO: 24787 - DNA, 19 bp, Homo sapiens
  siRNA target sequence for DDEF2 (NM_003887.1,2388-2406).
ctcacgttcacgttgaata

SEQ ID NO: 24788 - DNA, 19 bp, Homo sapiens
  siRNA target sequence for DDEF2 (NM_003887.1,2392-2410).
cgttcacgttgaatatgaa

SEQ ID NO: 24789 - DNA, 19 bp, Homo sapiens
  siRNA target sequence for DDEF2 (NM_003887.1,2393-2411).
gttcacgttgaatatgaat

SEQ ID NO: 24790 - DNA, 19 bp, Homo sapiens
  siRNA target sequence for DDEF2 (NM_003887.1,2425-2443).
cgaagacctggatgaaagt

SEQ ID NO: 24791 - DNA, 19 bp, Homo sapiens
  siRNA target sequence for DDEF2 (NM_003887.1,2523-2541).
ccaaccagcttcagtctaa

SEQ ID NO: 24792 - DNA, 19 bp, Homo sapiens
  siRNA target sequence for DDEF2 (NM_003887.1,2709-2727).
ggaatgttggcaaagttca

SEQ ID NO: 24793 - DNA, 19 bp, Homo sapiens
  siRNA target sequence for DDEF2 (NM_003887.1,2837-2855).
cctcttcgcgtgacatcta

SEQ ID NO: 24794 - DNA, 19 bp, Homo sapiens
  siRNA target sequence for DDEF2 (NM_003887.1,2896-2914).
gacgcccagcgtaatggaa

SEQ ID NO: 24795 - DNA, 19 bp, Homo sapiens
  siRNA target sequence for DDEF2 (NM_003887.1,3037-3055).
caccccactgaccaacaaa

SEQ ID NO: 24796 - DNA, 19 bp, Homo sapiens
  siRNA target sequence for DDEF2 (NM_003887.1,3101-3119).
ggtcctctgtccaatgcta

SEQ ID NO: 24797 - DNA, 19 bp, Homo sapiens
  siRNA target sequence for DDEF2 (NM_003887.1,3102-3120).
gtcctctgtccaatgctat

SEQ ID NO: 24798 - DNA, 19 bp, Homo sapiens
  siRNA target sequence for DDEF2 (NM_003887.1,3182-3200).
cgggtgaaagcgctctata

SEQ ID NO: 24799 - DNA, 19 bp, Homo sapiens
  siRNA target sequence for DDEF2 (NM_003887.1,3183-3201).
gggtgaaagcgctctataa

SEQ ID NO: 24800 - DNA, 19 bp, Homo sapiens
  siRNA target sequence for DDEF2 (NM_003887.1,3185-3203).
gtgaaagcgctctataact

SEQ ID NO: 24801 - DNA, 19 bp, Homo sapiens
  siRNA target sequence for DDEF2 (NM_003887.1,3187-3205).
gaaagcgctctataactgt

SEQ ID NO: 24802 - DNA, 19 bp, Homo sapiens
  siRNA target sequence for DDEF2 (NM_003887.1,3237-3255).
ccgagggggatgtgatcat

SEQ ID NO: 24803 - DNA, 19 bp, Homo sapiens
  siRNA target sequence for DDEF2 (NM_003887.1,3321-3339).
gcgcattcccggtgtcatt

SEQ ID NO: 24804 - DNA, 19 bp, Homo sapiens
  siRNA target sequence for DDEF2 (NM_003887.1,3322-3340).
cgcattcccggtgtcattt

SEQ ID NO: 24805 - DNA, 19 bp, Homo sapiens
  siRNA target sequence for DDEF2 (NM_003887.1,3324-3342).
cattcccggtgtcatttgt

SEQ ID NO: 24806 - DNA, 19 bp, Homo sapiens
  siRNA target sequence for DDX11 (NM_030655.2,1004-1022).
ctcccttggcagatgtctt

SEQ ID NO: 24807 - DNA, 19 bp, Homo sapiens
  siRNA target sequence for DDX20 (NM_007204.3,581-599).
gcgctgcgggctcgattta

SEQ ID NO: 24808 - DNA, 19 bp, Homo sapiens
  siRNA target sequence for DDX20 (NM_007204.3,582-600).
cgctgcgggctcgatttaa

SEQ ID NO: 24809 - DNA, 19 bp, Homo sapiens
  siRNA target sequence for DDX20 (NM_007204.3,583-601).
gctgcgggctcgatttaat

SEQ ID NO: 24810 - DNA, 19 bp, Homo sapiens
  siRNA target sequence for DDX20 (NM_007204.3,584-602).
ctgcgggctcgatttaatt

SEQ ID NO: 24811 - DNA, 19 bp, Homo sapiens
  siRNA target sequence for DDX20 (NM_007204.3,586-604).
gcgggctcgatttaattgt

SEQ ID NO: 24812 - DNA, 19 bp, Homo sapiens
  siRNA target sequence for DDX20 (NM_007204.3,587-605).
cgggctcgatttaattgtt

SEQ ID NO: 24813 - DNA, 19 bp, Homo sapiens
  siRNA target sequence for DDX20 (NM_007204.3,589-607).
ggctcgatttaattgttca

SEQ ID NO: 24814 - DNA, 19 bp, Homo sapiens
  siRNA target sequence for DDX20 (NM_007204.3,636-654).
gtgttctccaccatagctt

SEQ ID NO: 24815 - DNA, 19 bp, Homo sapiens
  siRNA target sequence for DDX20 (NM_007204.3,701-719).
ggctcctacaagagaaatt

SEQ ID NO: 24816 - DNA, 19 bp, Homo sapiens
  siRNA target sequence for DDX20 (NM_007204.3,723-741).
gtacagatacattctgtta

SEQ ID NO: 24817 - DNA, 19 bp, Homo sapiens
  siRNA target sequence for DDX20 (NM_007204.3,776-794).
gtgtcatgtctttattgga

SEQ ID NO: 24818 - DNA, 19 bp, Homo sapiens
  siRNA target sequence for DDX20 (NM_007204.3,799-817).
ccccattatcacaagacaa

SEQ ID NO: 24819 - DNA, 19 bp, Homo sapiens
  siRNA target sequence for DDX20 (NM_007204.3,800-818).
cccattatcacaagacaaa

SEQ ID NO: 24820 - DNA, 19 bp, Homo sapiens
  siRNA target sequence for DDX20 (NM_007204.3,801-819).
ccattatcacaagacaaaa

SEQ ID NO: 24821 - DNA, 19 bp, Homo sapiens
  siRNA target sequence for DDX20 (NM_007204.3,850-868).
gatctcctggcagaattaa

SEQ ID NO: 24822 - DNA, 19 bp, Homo sapiens
  siRNA target sequence for DDX20 (NM_007204.3,900-918).
ggcagtatacgcctcttta

SEQ ID NO: 24823 - DNA, 19 bp, Homo sapiens
  siRNA target sequence for DDX20 (NM_007204.3,901-919).
gcagtatacgcctctttat

SEQ ID NO: 24824 - DNA, 19 bp, Homo sapiens
  siRNA target sequence for DDX20 (NM_007204.3,904-922).
gtatacgcctctttattct

SEQ ID NO: 24825 - DNA, 19 bp, Homo sapiens
  siRNA target sequence for DDX20 (NM_007204.3,960-978).
caggagcaaataaattgga

SEQ ID NO: 24826 - DNA, 19 bp, Homo sapiens
  siRNA target sequence for DDX20 (NM_007204.3,1013-1031).
ggcagtatcagctacttat

SEQ ID NO: 24827 - DNA, 19 bp, Homo sapiens
  siRNA target sequence for DDX20 (NM_007204.3,1023-1041).
gctacttatcccgaatttt

SEQ ID NO: 24828 - DNA, 19 bp, Homo sapiens
  siRNA target sequence for DDX20 (NM_007204.3,1034-1052).
cgaatttttggctaatgct

SEQ ID NO: 24829 - DNA, 19 bp, Homo sapiens
  siRNA target sequence for DDX20 (NM_007204.3,1045-1063).
ctaatgctttgacaaagta

SEQ ID NO: 24830 - DNA, 19 bp, Homo sapiens
  siRNA target sequence for DDX20 (NM_007204.3,1105-1123).
caagtctcataggtttgaa

SEQ ID NO: 24831 - DNA, 19 bp, Homo sapiens
  siRNA target sequence for DDX20 (NM_007204.3,1116-1134).
ggtttgaagcagtattaca

SEQ ID NO: 24832 - DNA, 19 bp, Homo sapiens
  siRNA target sequence for DDX20 (NM_007204.3,1151-1169).
ccctttggcacataaggtt

SEQ ID NO: 24833 - DNA, 19 bp, Homo sapiens
  siRNA target sequence for DDX20 (NM_007204.3,1152-1170).
cctttggcacataaggttt

SEQ ID NO: 24834 - DNA, 19 bp, Homo sapiens
  siRNA target sequence for DDX20 (NM_007204.3,1153-1171).
ctttggcacataaggtttt

SEQ ID NO: 24835 - DNA, 19 bp, Homo sapiens
  siRNA target sequence for DDX20 (NM_007204.3,1207-1225).
gcagaattccatttaatca

SEQ ID NO: 24836 - DNA, 19 bp, Homo sapiens
  siRNA target sequence for DDX20 (NM_007204.3,1268-1286).
ggctgatatcctttcttct

SEQ ID NO: 24837 - DNA, 19 bp, Homo sapiens
  siRNA target sequence for DDX20 (NM_007204.3,1341-1359).
gatgctatggctaaactga

SEQ ID NO: 24838 - DNA, 19 bp, Homo sapiens
  siRNA target sequence for DDX20 (NM_007204.3,1397-1415).
gacttctcgtgggattgat

SEQ ID NO: 24839 - DNA, 19 bp, Homo sapiens
  siRNA target sequence for DDX20 (NM_007204.3,1424-1442).
ggtgaatctggttgtaaat

SEQ ID NO: 24840 - DNA, 19 bp, Homo sapiens
  siRNA target sequence for DDX20 (NM_007204.3,1453-1471).
cattggattgggagacata

SEQ ID NO: 24841 - DNA, 19 bp, Homo sapiens
  siRNA target sequence for DDX20 (NM_007204.3,1487-1505).
gagagctggccgttttggt

SEQ ID NO: 24842 - DNA, 19 bp, Homo sapiens
  siRNA target sequence for DDX20 (NM_007204.3,1492-1510).
ctggccgttttggtacatt

SEQ ID NO: 24843 - DNA, 19 bp, Homo sapiens
  siRNA target sequence for DDX20 (NM_007204.3,1515-1533).
ctgacagtgacctactgtt

SEQ ID NO: 24844 - DNA, 19 bp, Homo sapiens
  siRNA target sequence for DDX20 (NM_007204.3,1570-1588).
cccagaaatgtaatatcaa

SEQ ID NO: 24845 - DNA, 19 bp, Homo sapiens
  siRNA target sequence for DDX20 (NM_007204.3,1586-1604).
caaccttctccctttacca

SEQ ID NO: 24846 - DNA, 19 bp, Homo sapiens
  siRNA target sequence for DDX20 (NM_007204.3,1641-1659).
gattgggatgtggaagtta

SEQ ID NO: 24847 - DNA, 19 bp, Homo sapiens
  siRNA target sequence for DDX20 (NM_007204.3,1665-1683).
gctgtgcatacatatggta

SEQ ID NO: 24848 - DNA, 19 bp, Homo sapiens
  siRNA target sequence for DDX20 (NM_007204.3,1681-1699).
gtatagcaagtgtacctaa

SEQ ID NO: 24849 - DNA, 19 bp, Homo sapiens
  siRNA target sequence for DDX20 (NM_007204.3,1767-1785).
cacatggcttcctctagaa

SEQ ID NO: 24850 - DNA, 19 bp, Homo sapiens
  siRNA target sequence for DDX20 (NM_007204.3,1769-1787).
catggcttcctctagaaat

SEQ ID NO: 24851 - DNA, 19 bp, Homo sapiens
  siRNA target sequence for DDX20 (NM_007204.3,1792-1810).
ctgtatctggactatcagt

SEQ ID NO: 24852 - DNA, 19 bp, Homo sapiens
  siRNA target sequence for DDX20 (NM_007204.3,1800-1818).
ggactatcagtcaaatcaa

SEQ ID NO: 24853 - DNA, 19 bp, Homo sapiens
  siRNA target sequence for DDX20 (NM_007204.3,1882-1900).
caacgtcaccaaaagaact

SEQ ID NO: 24854 - DNA, 19 bp, Homo sapiens
  siRNA target sequence for DDX20 (NM_007204.3,2046-2064).
cagccatacacgttgactt

SEQ ID NO: 24855 - DNA, 19 bp, Homo sapiens
  siRNA target sequence for DDX20 (NM_007204.3,2048-2066).
gccatacacgttgactttt

SEQ ID NO: 24856 - DNA, 19 bp, Homo sapiens
  siRNA target sequence for DDX20 (NM_007204.3,2056-2074).
cgttgacttttgctgaatt

SEQ ID NO: 24857 - DNA, 19 bp, Homo sapiens
  siRNA target sequence for DDX20 (NM_007204.3,2213-2231).
ccctgtgttggcaagtagt

SEQ ID NO: 24858 - DNA, 19 bp, Homo sapiens
  siRNA target sequence for DDX20 (NM_007204.3,2214-2232).
cctgtgttggcaagtagta

SEQ ID NO: 24859 - DNA, 19 bp, Homo sapiens
  siRNA target sequence for DDX20 (NM_007204.3,2328-2346).
gataatcagctgaaagact

SEQ ID NO: 24860 - DNA, 19 bp, Homo sapiens
  siRNA target sequence for DDX20 (NM_007204.3,2337-2355).
ctgaaagactctgaatcta

SEQ ID NO: 24861 - DNA, 19 bp, Homo sapiens
  siRNA target sequence for DDX20 (NM_007204.3,2356-2374).
cgcctgtggatgatcgtat

SEQ ID NO: 24862 - DNA, 19 bp, Homo sapiens
  siRNA target sequence for DDX20 (NM_007204.3,2357-2375).
gcctgtggatgatcgtatt

SEQ ID NO: 24863 - DNA, 19 bp, Homo sapiens
  siRNA target sequence for DDX20 (NM_007204.3,2358-2376).
cctgtggatgatcgtattt

SEQ ID NO: 24864 - DNA, 19 bp, Homo sapiens
  siRNA target sequence for DDX20 (NM_007204.3,2361-2379).
gtggatgatcgtatttctt

SEQ ID NO: 24865 - DNA, 19 bp, Homo sapiens
  siRNA target sequence for DDX20 (NM_007204.3,2444-2462).
ccagatgaagacaagactt

SEQ ID NO: 24866 - DNA, 19 bp, Homo sapiens
  siRNA target sequence for DDX20 (NM_007204.3,2512-2530).
ggcggtcttccttcagatt

SEQ ID NO: 24867 - DNA, 19 bp, Homo sapiens
  siRNA target sequence for DDX20 (NM_007204.3,2553-2571).
gattggtatgactgtcata

SEQ ID NO: 24868 - DNA, 19 bp, Homo sapiens
  siRNA target sequence for DDX20 (NM_007204.3,2564-2582).
ctgtcatagggaaatacgt

SEQ ID NO: 24869 - DNA, 19 bp, Homo sapiens
  siRNA target sequence for DDX20 (NM_007204.3,2593-2611).
ctgatacctatcaggatta

SEQ ID NO: 24870 - DNA, 19 bp, Homo sapiens
  siRNA target sequence for DDX20 (NM_007204.3,2636-2654).
cagggcatggcaagaatat

SEQ ID NO: 24871 - DNA, 19 bp, Homo sapiens
  siRNA target sequence for DDX20 (NM_007204.3,2639-2657).
ggcatggcaagaatattat

SEQ ID NO: 24872 - DNA, 19 bp, Homo sapiens
  siRNA target sequence for DDX20 (NM_007204.3,2663-2681).
cgcttctcattcatattat

SEQ ID NO: 24873 - DNA, 19 bp, Homo sapiens
  siRNA target sequence for DDX20 (NM_007204.3,2711-2729).
ggcagcttatcacatgaat

SEQ ID NO: 24874 - DNA, 19 bp, Homo sapiens
  siRNA target sequence for DDX20 (NM_007204.3,2712-2730).
gcagcttatcacatgaata

SEQ ID NO: 24875 - DNA, 19 bp, Homo sapiens
  siRNA target sequence for DDX20 (NM_007204.3,2715-2733).
gcttatcacatgaatacca

SEQ ID NO: 24876 - DNA, 19 bp, Homo sapiens
  siRNA target sequence for DDX3X (NM_001356.2,908-926).
ggcctagacctgaactctt

SEQ ID NO: 24877 - DNA, 19 bp, Homo sapiens
  siRNA target sequence for DDX3X (NM_001356.2,914-932).
gacctgaactcttcagata

SEQ ID NO: 24878 - DNA, 19 bp, Homo sapiens
  siRNA target sequence for DDX3X (NM_001356.2,1007-1025).
ggtttctacgataaagaca

SEQ ID NO: 24879 - DNA, 19 bp, Homo sapiens
  siRNA target sequence for DDX3X (NM_001356.2,1073-1091).
ggatctcgtagtgattcaa

SEQ ID NO: 24880 - DNA, 19 bp, Homo sapiens
  siRNA target sequence for DDX3X (NM_001356.2,1316-1334).
ggcaacactgggattaatt

SEQ ID NO: 24881 - DNA, 19 bp, Homo sapiens
  siRNA target sequence for DDX3X (NM_001356.2,1361-1379).
gaggcaacaggcaacaact

SEQ ID NO: 24882 - DNA, 19 bp, Homo sapiens
  siRNA target sequence for DDX3X (NM_001356.2,1485-1503).
ctattcctattatcaaaga

SEQ ID NO: 24883 - DNA, 19 bp, Homo sapiens
  siRNA target sequence for DDX3X (NM_001356.2,1564-1582).
gcccatcttgagtcagatt

SEQ ID NO: 24884 - DNA, 19 bp, Homo sapiens
  siRNA target sequence for DDX3X (NM_001356.2,1566-1584).
ccatcttgagtcagattta

SEQ ID NO: 24885 - DNA, 19 bp, Homo sapiens
  siRNA target sequence for DDX3X (NM_001356.2,1567-1585).
catcttgagtcagatttat

SEQ ID NO: 24886 - DNA, 19 bp, Homo sapiens
  siRNA target sequence for DDX3X (NM_001356.2,1654-1672).
cccaatctccttggtatta

SEQ ID NO: 24887 - DNA, 19 bp, Homo sapiens
  siRNA target sequence for DDX3X (NM_001356.2,1878-1896).
gcaaatacttggtgttaga

SEQ ID NO: 24888 - DNA, 19 bp, Homo sapiens
  siRNA target sequence for DDX3X (NM_001356.2,1879-1897).
caaatacttggtgttagat

SEQ ID NO: 24889 - DNA, 19 bp, Homo sapiens
  siRNA target sequence for DDX3X (NM_001356.2,1930-1948).
gcctcagattcgtagaata

SEQ ID NO: 24890 - DNA, 19 bp, Homo sapiens
  siRNA target sequence for DDX3X (NM_001356.2,1932-1950).
ctcagattcgtagaatagt

SEQ ID NO: 24891 - DNA, 19 bp, Homo sapiens
  siRNA target sequence for DDX3X (NM_001356.2,1941-1959).
gtagaatagtcgaacaaga

SEQ ID NO: 24892 - DNA, 19 bp, Homo sapiens
  siRNA target sequence for DDX3X (NM_001356.2,1977-1995).
gtgtccgccacactatgat

SEQ ID NO: 24893 - DNA, 19 bp, Homo sapiens
  siRNA target sequence for DDX3X (NM_001356.2,1979-1997).
gtccgccacactatgatgt

SEQ ID NO: 24894 - DNA, 19 bp, Homo sapiens
  siRNA target sequence for DDX3X (NM_001356.2,1981-1999).
ccgccacactatgatgttt

SEQ ID NO: 24895 - DNA, 19 bp, Homo sapiens
  siRNA target sequence for DDX3X (NM_001356.2,2029-2047).
gctggctcgtgatttctta

SEQ ID NO: 24896 - DNA, 19 bp, Homo sapiens
  siRNA target sequence for DDX3X (NM_001356.2,2036-2054).
cgtgatttcttagatgaat

SEQ ID NO: 24897 - DNA, 19 bp, Homo sapiens
  siRNA target sequence for DDX3X (NM_001356.2,2062-2080).
cttggctgtaggaagagtt

SEQ ID NO: 24898 - DNA, 19 bp, Homo sapiens
  siRNA target sequence for DDX3X (NM_001356.2,2149-2167).
gcttgacctcctaaatgca

SEQ ID NO: 24899 - DNA, 19 bp, Homo sapiens
  siRNA target sequence for DDX3X (NM_001356.2,2494-2512).
cgagaggaacataaatatt

SEQ ID NO: 24900 - DNA, 19 bp, Homo sapiens
  siRNA target sequence for DDX3X (NM_001356.2,2558-2576).
ccgtcttggttagaaaaca

SEQ ID NO: 24901 - DNA, 19 bp, Homo sapiens
  siRNA target sequence for DDX3X (NM_001356.2,2559-2577).
cgtcttggttagaaaacat

SEQ ID NO: 24902 - DNA, 19 bp, Homo sapiens
  siRNA target sequence for DDX3Y (NM_004660.2,107-125).
ggaccagcagcttgctaat

SEQ ID NO: 24903 - DNA, 19 bp, Homo sapiens
  siRNA target sequence for DDX3Y (NM_004660.2,217-235).
ctaaaggattccatgataa

SEQ ID NO: 24904 - DNA, 19 bp, Homo sapiens
  siRNA target sequence for DDX3Y (NM_004660.2,306-324).
ggaaagcctggttatttca

SEQ ID NO: 24905 - DNA, 19 bp, Homo sapiens
  siRNA target sequence for DDX3Y (NM_004660.2,370-388).
ggagtgactatgatggtat

SEQ ID NO: 24906 - DNA, 19 bp, Homo sapiens
  siRNA target sequence for DDX3Y (NM_004660.2,371-389).
gagtgactatgatggtatt

SEQ ID NO: 24907 - DNA, 19 bp, Homo sapiens
  siRNA target sequence for DDX3Y (NM_004660.2,499-517).
gcttggagcaagaactgtt

SEQ ID NO: 24908 - DNA, 19 bp, Homo sapiens
  siRNA target sequence for DDX3Y (NM_004660.2,500-518).
cttggagcaagaactgttt

SEQ ID NO: 24909 - DNA, 19 bp, Homo sapiens
  siRNA target sequence for DDX3Y (NM_004660.2,525-543).
ggaaacacggggattaact

SEQ ID NO: 24910 - DNA, 19 bp, Homo sapiens
  siRNA target sequence for DDX3Y (NM_004660.2,526-544).
gaaacacggggattaactt

SEQ ID NO: 24911 - DNA, 19 bp, Homo sapiens
  siRNA target sequence for DDX3Y (NM_004660.2,570-588).
gaggcaaccggcagtaact

SEQ ID NO: 24912 - DNA, 19 bp, Homo sapiens
  siRNA target sequence for DDX3Y (NM_004660.2,572-590).
ggcaaccggcagtaactgt

SEQ ID NO: 24913 - DNA, 19 bp, Homo sapiens
  siRNA target sequence for DDX3Y (NM_004660.2,776-794).
catactgagtcagatatat

SEQ ID NO: 24914 - DNA, 19 bp, Homo sapiens
  siRNA target sequence for DDX3Y (NM_004660.2,875-893).
ggttttagccccaacaaga

SEQ ID NO: 24915 - DNA, 19 bp, Homo sapiens
  siRNA target sequence for DDX3Y (NM_004660.2,1141-1159).
ctcagatacgtcgtatagt

SEQ ID NO: 24916 - DNA, 19 bp, Homo sapiens
  siRNA target sequence for DDX3Y (NM_004660.2,1145-1163).
gatacgtcgtatagttgaa

SEQ ID NO: 24917 - DNA, 19 bp, Homo sapiens
  siRNA target sequence for DDX3Y (NM_004660.2,1150-1168).
gtcgtatagttgaacaaga

SEQ ID NO: 24918 - DNA, 19 bp, Homo sapiens
  siRNA target sequence for DDX3Y (NM_004660.2,1152-1170).
cgtatagttgaacaagata

SEQ ID NO: 24919 - DNA, 19 bp, Homo sapiens
  siRNA target sequence for DDX3Y (NM_004660.2,1188-1206).
gttcgtcacaccatgatgt

SEQ ID NO: 24920 - DNA, 19 bp, Homo sapiens
  siRNA target sequence for DDX3Y (NM_004660.2,1235-1253).
gatgcttgctcgtgacttt

SEQ ID NO: 24921 - DNA, 19 bp, Homo sapiens
  siRNA target sequence for DDX3Y (NM_004660.2,1327-1345).
gggtggaagacttagataa

SEQ ID NO: 24922 - DNA, 19 bp, Homo sapiens
  siRNA target sequence for DDX3Y (NM_004660.2,1337-1355).
cttagataaacggtcattt

SEQ ID NO: 24923 - DNA, 19 bp, Homo sapiens
  siRNA target sequence for DDX3Y (NM_004660.2,1371-1389).
ggtgcaacagggagtgatt

SEQ ID NO: 24924 - DNA, 19 bp, Homo sapiens
  siRNA target sequence for DDX3Y (NM_004660.2,1375-1393).
caacagggagtgattcact

SEQ ID NO: 24925 - DNA, 19 bp, Homo sapiens
  siRNA target sequence for DDX3Y (NM_004660.2,1380-1398).
gggagtgattcacttactt

SEQ ID NO: 24926 - DNA, 19 bp, Homo sapiens
  siRNA target sequence for DDX3Y (NM_004660.2,1381-1399).
ggagtgattcacttacttt

SEQ ID NO: 24927 - DNA, 19 bp, Homo sapiens
  siRNA target sequence for DDX3Y (NM_004660.2,1384-1402).
gtgattcacttactttagt

SEQ ID NO: 24928 - DNA, 19 bp, Homo sapiens
  siRNA target sequence for DDX3Y (NM_004660.2,1455-1473).
gaaggatatgcttgtacta

SEQ ID NO: 24929 - DNA, 19 bp, Homo sapiens
  siRNA target sequence for DDX3Y (NM_004660.2,1458-1476).
ggatatgcttgtactagta

SEQ ID NO: 24930 - DNA, 19 bp, Homo sapiens
  siRNA target sequence for DDX3Y (NM_004660.2,1819-1837).
gtggacgatctaaaagtaa

SEQ ID NO: 24931 - DNA, 19 bp, Homo sapiens
  siRNA target sequence for DDX3Y (NM_004660.2,1824-1842).
cgatctaaaagtaatagat

SEQ ID NO: 24932 - DNA, 19 bp, Homo sapiens
  siRNA target sequence for DDX3Y (NM_004660.2,1825-1843).
gatctaaaagtaatagatt

SEQ ID NO: 24933 - DNA, 19 bp, Homo sapiens
  siRNA target sequence for DDX48 (NM_014740.1,255-273).
gaaagcggctgctcaaaga

SEQ ID NO: 24934 - DNA, 19 bp, Homo sapiens
  siRNA target sequence for DDX48 (NM_014740.1,376-394).
cgcttacggttttgaaaaa

SEQ ID NO: 24935 - DNA, 19 bp, Homo sapiens
  siRNA target sequence for DDX48 (NM_014740.1,414-432).
gagcaatcaagcagatcat

SEQ ID NO: 24936 - DNA, 19 bp, Homo sapiens
  siRNA target sequence for DDX48 (NM_014740.1,416-434).
gcaatcaagcagatcatca

SEQ ID NO: 24937 - DNA, 19 bp, Homo sapiens
  siRNA target sequence for DDX48 (NM_014740.1,417-435).
caatcaagcagatcatcaa

SEQ ID NO: 24938 - DNA, 19 bp, Homo sapiens
  siRNA target sequence for DDX48 (NM_014740.1,596-614).
gctctcggtgactacatga

SEQ ID NO: 24939 - DNA, 19 bp, Homo sapiens
  siRNA target sequence for DDX48 (NM_014740.1,597-615).
ctctcggtgactacatgaa

SEQ ID NO: 24940 - DNA, 19 bp, Homo sapiens
  siRNA target sequence for DDX48 (NM_014740.1,634-652).
cattggaggcaccaatgtt

SEQ ID NO: 24941 - DNA, 19 bp, Homo sapiens
  siRNA target sequence for DDX48 (NM_014740.1,704-722).
ccagggcgtgtttttgata

SEQ ID NO: 24942 - DNA, 19 bp, Homo sapiens
  siRNA target sequence for DDX48 (NM_014740.1,705-723).
cagggcgtgtttttgatat

SEQ ID NO: 24943 - DNA, 19 bp, Homo sapiens
  siRNA target sequence for DDX48 (NM_014740.1,707-725).
gggcgtgtttttgatatga

SEQ ID NO: 24944 - DNA, 19 bp, Homo sapiens
  siRNA target sequence for DDX48 (NM_014740.1,708-726).
ggcgtgtttttgatatgat

SEQ ID NO: 24945 - DNA, 19 bp, Homo sapiens
  siRNA target sequence for DDX48 (NM_014740.1,709-727).
gcgtgtttttgatatgatt

SEQ ID NO: 24946 - DNA, 19 bp, Homo sapiens
  siRNA target sequence for DDX48 (NM_014740.1,744-762).
ggacacgtgctatcaaaat

SEQ ID NO: 24947 - DNA, 19 bp, Homo sapiens
  siRNA target sequence for DDX48 (NM_014740.1,747-765).
cacgtgctatcaaaatgtt

SEQ ID NO: 24948 - DNA, 19 bp, Homo sapiens
  siRNA target sequence for DDX48 (NM_014740.1,809-827).
gagcagatttacgatgtat

SEQ ID NO: 24949 - DNA, 19 bp, Homo sapiens
  siRNA target sequence for DDX48 (NM_014740.1,812-830).
cagatttacgatgtataca

SEQ ID NO: 24950 - DNA, 19 bp, Homo sapiens
  siRNA target sequence for DDX48 (NM_014740.1,873-891).
cgctgccacacgagattct

SEQ ID NO: 24951 - DNA, 19 bp, Homo sapiens
  siRNA target sequence for DDX48 (NM_014740.1,931-949).
cttggtgaaacgtgatgaa

SEQ ID NO: 24952 - DNA, 19 bp, Homo sapiens
  siRNA target sequence for DDX48 (NM_014740.1,935-953).
gtgaaacgtgatgaattga

SEQ ID NO: 24953 - DNA, 19 bp, Homo sapiens
  siRNA target sequence for DDX48 (NM_014740.1,937-955).
gaaacgtgatgaattgact

SEQ ID NO: 24954 - DNA, 19 bp, Homo sapiens
  siRNA target sequence for DDX48 (NM_014740.1,956-974).
ctggaaggcatcaagcaat

SEQ ID NO: 24955 - DNA, 19 bp, Homo sapiens
  siRNA target sequence for DDX48 (NM_014740.1,1109-1127).
gaagccaacttcactgtat

SEQ ID NO: 24956 - DNA, 19 bp, Homo sapiens
  siRNA target sequence for DDX48 (NM_014740.1,1192-1210).
cgccagccgagtgcttatt

SEQ ID NO: 24957 - DNA, 19 bp, Homo sapiens
  siRNA target sequence for DDX48 (NM_014740.1,1193-1211).
gccagccgagtgcttattt

SEQ ID NO: 24958 - DNA, 19 bp, Homo sapiens
  siRNA target sequence for DDX48 (NM_014740.1,1195-1213).
cagccgagtgcttatttct

SEQ ID NO: 24959 - DNA, 19 bp, Homo sapiens
  siRNA target sequence for DDX48 (NM_014740.1,1198-1216).
ccgagtgcttatttctaca

SEQ ID NO: 24960 - DNA, 19 bp, Homo sapiens
  siRNA target sequence for DDX48 (NM_014740.1,1254-1272).
ccctcatcattaactatga

SEQ ID NO: 24961 - DNA, 19 bp, Homo sapiens
  siRNA target sequence for DDX48 (NM_014740.1,1344-1362).
ccattaactttgtaaagaa

SEQ ID NO: 24962 - DNA, 19 bp, Homo sapiens
  siRNA target sequence for DDX48 (NM_014740.1,1345-1363).
cattaactttgtaaagaat

SEQ ID NO: 24963 - DNA, 19 bp, Homo sapiens
  siRNA target sequence for DDX48 (NM_014740.1,1374-1392).
gcatcctcagagatatcga

SEQ ID NO: 24964 - DNA, 19 bp, Homo sapiens
  siRNA target sequence for DDX48 (NM_014740.1,1383-1401).
gagatatcgagcagtacta

SEQ ID NO: 24965 - DNA, 19 bp, Homo sapiens
  siRNA target sequence for DDX48 (NM_014740.1,1385-1403).
gatatcgagcagtactatt

SEQ ID NO: 24966 - DNA, 19 bp, Homo sapiens
  siRNA target sequence for DDX48 (NM_014740.1,1426-1444).
gatgaacgttgctgatctt

SEQ ID NO: 24967 - DNA, 19 bp, Homo sapiens
  siRNA target sequence for DEAF1 (NM_021008.2,1011-1029).
gggggctgctgcagacaat

SEQ ID NO: 24968 - DNA, 19 bp, Homo sapiens
  siRNA target sequence for DEAF1 (NM_021008.2,1013-1031).
gggctgctgcagacaatgt

SEQ ID NO: 24969 - DNA, 19 bp, Homo sapiens
  siRNA target sequence for DEAF1 (NM_021008.2,1061-1079).
ccatctcaggacatgttct

SEQ ID NO: 24970 - DNA, 19 bp, Homo sapiens
  siRNA target sequence for DEAF1 (NM_021008.2,1085-1103).
gtaggacggcccttcagat

SEQ ID NO: 24971 - DNA, 19 bp, Homo sapiens
  siRNA target sequence for DEAF1 (NM_021008.2,1249-1267).
gaaaaaggtggaactaaat

SEQ ID NO: 24972 - DNA, 19 bp, Homo sapiens
  siRNA target sequence for DEAF1 (NM_021008.2,1255-1273).
ggtggaactaaatacaact

SEQ ID NO: 24973 - DNA, 19 bp, Homo sapiens
  siRNA target sequence for DEAF1 (NM_021008.2,1306-1324).
gtacggtgccggaacatca

SEQ ID NO: 24974 - DNA, 19 bp, Homo sapiens
  siRNA target sequence for DEAF1 (NM_021008.2,1548-1566).
cgacgacatgaccttaagt

SEQ ID NO: 24975 - DNA, 19 bp, Homo sapiens
  siRNA target sequence for DEAF1 (NM_021008.2,1578-1596).
gctttttgtgccttacaaa

SEQ ID NO: 24976 - DNA, 19 bp, Homo sapiens
  siRNA target sequence for DEAF1 (NM_021008.2,1622-1640).
ccacaactcccgtgaagaa

SEQ ID NO: 24977 - DNA, 19 bp, Homo sapiens
  siRNA target sequence for DEAF1 (NM_021008.2,1759-1777).
gaggccactgctgtcatat

SEQ ID NO: 24978 - DNA, 19 bp, Homo sapiens
  siRNA target sequence for DEAF1 (NM_021008.2,1928-1946).
caacgtcacatcccaaaat

SEQ ID NO: 24979 - DNA, 19 bp, Homo sapiens
  siRNA target sequence for DEAF1 (NM_021008.2,1931-1949).
cgtcacatcccaaaatagt

SEQ ID NO: 24980 - DNA, 19 bp, Homo sapiens
  siRNA target sequence for DEAF1 (NM_021008.2,1939-1957).
cccaaaatagtgttgacat

SEQ ID NO: 24981 - DNA, 19 bp, Homo sapiens
  siRNA target sequence for DEAF1 (NM_021008.2,2048-2066).
gctggctgtacctagaaga

SEQ ID NO: 24982 - DNA, 19 bp, Homo sapiens
  siRNA target sequence for DEAF1 (NM_021008.2,2194-2212).
gagcagtcctgcgttaact

SEQ ID NO: 24983 - DNA, 19 bp, Homo sapiens
  siRNA target sequence for DEAF1 (NM_021008.2,2243-2261).
gctgccacaaggtcaacta

SEQ ID NO: 24984 - DNA, 19 bp, Homo sapiens
  siRNA target sequence for DEDD (NM_004216.2,279-297).
cctctttgttgatgtcatt

SEQ ID NO: 24985 - DNA, 19 bp, Homo sapiens
  siRNA target sequence for DEDD (NM_004216.2,323-341).
gaaatggacgtgacttctt

SEQ ID NO: 24986 - DNA, 19 bp, Homo sapiens
  siRNA target sequence for DEDD (NM_004216.2,364-382).
cgctgtgatgaaagtaact

SEQ ID NO: 24987 - DNA, 19 bp, Homo sapiens
  siRNA target sequence for DEDD (NM_004216.2,365-383).
gctgtgatgaaagtaactt

SEQ ID NO: 24988 - DNA, 19 bp, Homo sapiens
  siRNA target sequence for DEDD (NM_004216.2,554-572).
cccagccctctaaaacagt

SEQ ID NO: 24989 - DNA, 19 bp, Homo sapiens
  siRNA target sequence for DEDD (NM_004216.2,730-748).
cgggttcgggctgaatact

SEQ ID NO: 24990 - DNA, 19 bp, Homo sapiens
  siRNA target sequence for DEDD (NM_004216.2,773-791).
gcaatgtcttctctaacaa

SEQ ID NO: 24991 - DNA, 19 bp, Homo sapiens
  siRNA target sequence for DEDD (NM_004216.2,809-827).
gccagtttgagcgctttaa

SEQ ID NO: 24992 - DNA, 19 bp, Homo sapiens
  siRNA target sequence for DEDD (NM_004216.2,938-956).
ctttattagaggcacttaa

SEQ ID NO: 24993 - DNA, 19 bp, Homo sapiens
  siRNA target sequence for DEDD (NM_004216.2,1004-1022).
ccatcaagctgctggtaaa

SEQ ID NO: 24994 - DNA, 19 bp, Homo sapiens
  siRNA target sequence for DEDD2 (NM_133328.2,400-418).
ctccagaacgctatagcta

SEQ ID NO: 24995 - DNA, 19 bp, Homo sapiens
  siRNA target sequence for DEDD2 (NM_133328.2,807-825).
gtggtttgtgacatcaagt

SEQ ID NO: 24996 - DNA, 19 bp, Homo sapiens
  siRNA target sequence for DEK (NM_003472.2,370-388).
caagtctcttccttacaga

SEQ ID NO: 24997 - DNA, 19 bp, Homo sapiens
  siRNA target sequence for DEK (NM_003472.2,473-491).
ccgatgaacttagaaatct

SEQ ID NO: 24998 - DNA, 19 bp, Homo sapiens
  siRNA target sequence for DEK (NM_003472.2,517-535).
ggcactgtgtcctcattaa

SEQ ID NO: 24999 - DNA, 19 bp, Homo sapiens
  siRNA target sequence for DEK (NM_003472.2,663-681).
ggagagatcaggtgtaaat

SEQ ID NO: 25000 - DNA, 19 bp, Homo sapiens
  siRNA target sequence for DEK (NM_003472.2,664-682).
gagagatcaggtgtaaata

SEQ ID NO: 25001 - DNA, 19 bp, Homo sapiens
  siRNA target sequence for DEK (NM_003472.2,668-686).
gatcaggtgtaaatagtga

SEQ ID NO: 25002 - DNA, 19 bp, Homo sapiens
  siRNA target sequence for DEK (NM_003472.2,674-692).
gtgtaaatagtgaactagt

SEQ ID NO: 25003 - DNA, 19 bp, Homo sapiens
  siRNA target sequence for DEK (NM_003472.2,688-706).
ctagtgaagaggatcttga

SEQ ID NO: 25004 - DNA, 19 bp, Homo sapiens
  siRNA target sequence for DEK (NM_003472.2,696-714).
gaggatcttgaatttctta

SEQ ID NO: 25005 - DNA, 19 bp, Homo sapiens
  siRNA target sequence for DEK (NM_003472.2,735-753).
caaaccattgccgaaatct

SEQ ID NO: 25006 - DNA, 19 bp, Homo sapiens
  siRNA target sequence for DEK (NM_003472.2,739-757).
ccattgccgaaatctaaaa

SEQ ID NO: 25007 - DNA, 19 bp, Homo sapiens
  siRNA target sequence for DEK (NM_003472.2,740-758).
cattgccgaaatctaaaaa

SEQ ID NO: 25008 - DNA, 19 bp, Homo sapiens
  siRNA target sequence for DEK (NM_003472.2,745-763).
ccgaaatctaaaaaaactt

SEQ ID NO: 25009 - DNA, 19 bp, Homo sapiens
  siRNA target sequence for DEK (NM_003472.2,810-828).
gaaggctaagcgaaccaaa

SEQ ID NO: 25010 - DNA, 19 bp, Homo sapiens
  siRNA target sequence for DEK (NM_003472.2,813-831).
ggctaagcgaaccaaatgt

SEQ ID NO: 25011 - DNA, 19 bp, Homo sapiens
  siRNA target sequence for DEK (NM_003472.2,843-861).
gtcagatgaatctagtagt

SEQ ID NO: 25012 - DNA, 19 bp, Homo sapiens
  siRNA target sequence for DEK (NM_003472.2,966-984).
gaaagctacttctaaaagt

SEQ ID NO: 25013 - DNA, 19 bp, Homo sapiens
  siRNA target sequence for DEK (NM_003472.2,1028-1046).
gcaccaccaagaagaatca

SEQ ID NO: 25014 - DNA, 19 bp, Homo sapiens
  siRNA target sequence for DEK (NM_003472.2,1029-1047).
caccaccaagaagaatcaa

SEQ ID NO: 25015 - DNA, 19 bp, Homo sapiens
  siRNA target sequence for DEK (NM_003472.2,1085-1103).
cagatgatgaacctttaat

SEQ ID NO: 25016 - DNA, 19 bp, Homo sapiens
  siRNA target sequence for DEK (NM_003472.2,1121-1139).
cccctacagatgaagagtt

SEQ ID NO: 25017 - DNA, 19 bp, Homo sapiens
  siRNA target sequence for DEK (NM_003472.2,1229-1247).
ctacttatgatttaactga

SEQ ID NO: 25018 - DNA, 19 bp, Homo sapiens
  siRNA target sequence for DHX9 (NM_001357.2,87-105).
gacgttaaaaattttctgt

SEQ ID NO: 25019 - DNA, 19 bp, Homo sapiens
  siRNA target sequence for DHX9 (NM_001357.2,89-107).
cgttaaaaattttctgtat

SEQ ID NO: 25020 - DNA, 19 bp, Homo sapiens
  siRNA target sequence for DHX9 (NM_001357.2,191-209).
ggttcaggtggaaggttat

SEQ ID NO: 25021 - DNA, 19 bp, Homo sapiens
  siRNA target sequence for DHX9 (NM_001357.2,192-210).
gttcaggtggaaggttata

SEQ ID NO: 25022 - DNA, 19 bp, Homo sapiens
  siRNA target sequence for DHX9 (NM_001357.2,195-213).
caggtggaaggttataatt

SEQ ID NO: 25023 - DNA, 19 bp, Homo sapiens
  siRNA target sequence for DHX9 (NM_001357.2,261-279).
gctgccagagactttgtta

SEQ ID NO: 25024 - DNA, 19 bp, Homo sapiens
  siRNA target sequence for DHX9 (NM_001357.2,508-526).
ccaacttgaaggattacta

SEQ ID NO: 25025 - DNA, 19 bp, Homo sapiens
  siRNA target sequence for DHX9 (NM_001357.2,549-567).
gtgcaagcgactctagaat

SEQ ID NO: 25026 - DNA, 19 bp, Homo sapiens
  siRNA target sequence for DHX9 (NM_001357.2,551-569).
gcaagcgactctagaatca

SEQ ID NO: 25027 - DNA, 19 bp, Homo sapiens
  siRNA target sequence for DHX9 (NM_001357.2,663-681).
caaggagaatataagtaca

SEQ ID NO: 25028 - DNA, 19 bp, Homo sapiens
  siRNA target sequence for DHX9 (NM_001357.2,755-773).
gatttttgcacgagaacat

SEQ ID NO: 25029 - DNA, 19 bp, Homo sapiens
  siRNA target sequence for DHX9 (NM_001357.2,763-781).
cacgagaacatggatcaaa

SEQ ID NO: 25030 - DNA, 19 bp, Homo sapiens
  siRNA target sequence for DHX9 (NM_001357.2,765-783).
cgagaacatggatcaaata

SEQ ID NO: 25031 - DNA, 19 bp, Homo sapiens
  siRNA target sequence for DHX9 (NM_001357.2,768-786).
gaacatggatcaaataaga

SEQ ID NO: 25032 - DNA, 19 bp, Homo sapiens
  siRNA target sequence for DHX9 (NM_001357.2,859-877).
ccggacttacaaagaagaa

SEQ ID NO: 25033 - DNA, 19 bp, Homo sapiens
  siRNA target sequence for DHX9 (NM_001357.2,906-924).
gtaaacctctctcaagatt

SEQ ID NO: 25034 - DNA, 19 bp, Homo sapiens
  siRNA target sequence for DHX9 (NM_001357.2,954-972).
gagctaaatcttgagattt

SEQ ID NO: 25035 - DNA, 19 bp, Homo sapiens
  siRNA target sequence for DHX9 (NM_001357.2,1039-1057).
catctcagcgacaaaacca

SEQ ID NO: 25036 - DNA, 19 bp, Homo sapiens
  siRNA target sequence for DHX9 (NM_001357.2,1105-1123).
ggactagtagcaacattga

SEQ ID NO: 25037 - DNA, 19 bp, Homo sapiens
  siRNA target sequence for DHX9 (NM_001357.2,1106-1124).
gactagtagcaacattgat

SEQ ID NO: 25038 - DNA, 19 bp, Homo sapiens
  siRNA target sequence for DHX9 (NM_001357.2,1108-1126).
ctagtagcaacattgatga

SEQ ID NO: 25039 - DNA, 19 bp, Homo sapiens
  siRNA target sequence for DHX9 (NM_001357.2,1147-1165).
ctccagagcaaataagcat

SEQ ID NO: 25040 - DNA, 19 bp, Homo sapiens
  siRNA target sequence for DHX9 (NM_001357.2,1223-1241).
cttgcaggagagagagtta

SEQ ID NO: 25041 - DNA, 19 bp, Homo sapiens
  siRNA target sequence for DHX9 (NM_001357.2,1345-1363).
cccagttcattctagatga

SEQ ID NO: 25042 - DNA, 19 bp, Homo sapiens
  siRNA target sequence for DHX9 (NM_001357.2,1380-1398).
cgagcagcagagtgtaaca

SEQ ID NO: 25043 - DNA, 19 bp, Homo sapiens
  siRNA target sequence for DHX9 (NM_001357.2,1381-1399).
gagcagcagagtgtaacat

SEQ ID NO: 25044 - DNA, 19 bp, Homo sapiens
  siRNA target sequence for DHX9 (NM_001357.2,1389-1407).
gagtgtaacatcgtagtaa

SEQ ID NO: 25045 - DNA, 19 bp, Homo sapiens
  siRNA target sequence for DHX9 (NM_001357.2,1391-1409).
gtgtaacatcgtagtaact

SEQ ID NO: 25046 - DNA, 19 bp, Homo sapiens
  siRNA target sequence for DHX9 (NM_001357.2,1404-1422).
gtaactcagcccagaagaa

SEQ ID NO: 25047 - DNA, 19 bp, Homo sapiens
  siRNA target sequence for DHX9 (NM_001357.2,1420-1438).
gaatcagtgcggtttctgt

SEQ ID NO: 25048 - DNA, 19 bp, Homo sapiens
  siRNA target sequence for DHX9 (NM_001357.2,1443-1461).
gagcgagttgcatttgaaa

SEQ ID NO: 25049 - DNA, 19 bp, Homo sapiens
  siRNA target sequence for DHX9 (NM_001357.2,1554-1572).
ggtgtgctcctgagaaaat

SEQ ID NO: 25050 - DNA, 19 bp, Homo sapiens
  siRNA target sequence for DHX9 (NM_001357.2,1591-1609).
gaatcagtcatgtaattgt

SEQ ID NO: 25051 - DNA, 19 bp, Homo sapiens
  siRNA target sequence for DHX9 (NM_001357.2,1652-1670).
ggtagtactgcgtgatgtt

SEQ ID NO: 25052 - DNA, 19 bp, Homo sapiens
  siRNA target sequence for DHX9 (NM_001357.2,1772-1790).
gaggacttacccagttcaa

SEQ ID NO: 25053 - DNA, 19 bp, Homo sapiens
  siRNA target sequence for DHX9 (NM_001357.2,1774-1792).
ggacttacccagttcaaga

SEQ ID NO: 25054 - DNA, 19 bp, Homo sapiens
  siRNA target sequence for DHX9 (NM_001357.2,1890-1908).
gatgcaaattgcaacttga

SEQ ID NO: 25055 - DNA, 19 bp, Homo sapiens
  siRNA target sequence for DHX9 (NM_001357.2,1893-1911).
gcaaattgcaacttgatct

SEQ ID NO: 25056 - DNA, 19 bp, Homo sapiens
  siRNA target sequence for DHX9 (NM_001357.2,1907-1925).
gatctgtggtgatgaatat

SEQ ID NO: 25057 - DNA, 19 bp, Homo sapiens
  siRNA target sequence for DHX9 (NM_001357.2,1920-1938).
gaatatggtccagaaacaa

SEQ ID NO: 25058 - DNA, 19 bp, Homo sapiens
  siRNA target sequence for DHX9 (NM_001357.2,1939-1957).
ggttgagcatgtctcaatt

SEQ ID NO: 25059 - DNA, 19 bp, Homo sapiens
  siRNA target sequence for DHX9 (NM_001357.2,1993-2011).
ctctacttaagtacattga

SEQ ID NO: 25060 - DNA, 19 bp, Homo sapiens
  siRNA target sequence for DHX9 (NM_001357.2,2106-2124).
ggaagccatcggtatcaga

SEQ ID NO: 25061 - DNA, 19 bp, Homo sapiens
  siRNA target sequence for DHX9 (NM_001357.2,2107-2125).
gaagccatcggtatcagat

SEQ ID NO: 25062 - DNA, 19 bp, Homo sapiens
  siRNA target sequence for DHX9 (NM_001357.2,2110-2128).
gccatcggtatcagattct

SEQ ID NO: 25063 - DNA, 19 bp, Homo sapiens
  siRNA target sequence for DHX9 (NM_001357.2,2111-2129).
ccatcggtatcagattcta

SEQ ID NO: 25064 - DNA, 19 bp, Homo sapiens
  siRNA target sequence for DHX9 (NM_001357.2,2187-2205).
gttggagtaaccaaggtta

SEQ ID NO: 25065 - DNA, 19 bp, Homo sapiens
  siRNA target sequence for DHX9 (NM_001357.2,2202-2220).
gttattttgtccacaaata

SEQ ID NO: 25066 - DNA, 19 bp, Homo sapiens
  siRNA target sequence for DHX9 (NM_001357.2,2226-2244).
gaaacaagcattaccataa

SEQ ID NO: 25067 - DNA, 19 bp, Homo sapiens
  siRNA target sequence for DHX9 (NM_001357.2,2291-2309).
cttcactgctcacaacaat

SEQ ID NO: 25068 - DNA, 19 bp, Homo sapiens
  siRNA target sequence for DHX9 (NM_001357.2,2323-2341).
ctaccgtatgggcatcaaa

SEQ ID NO: 25069 - DNA, 19 bp, Homo sapiens
  siRNA target sequence for DHX9 (NM_001357.2,2405-2423).
gtgcagccgagctcgtttt

SEQ ID NO: 25070 - DNA, 19 bp, Homo sapiens
  siRNA target sequence for DHX9 (NM_001357.2,2407-2425).
gcagccgagctcgttttga

SEQ ID NO: 25071 - DNA, 19 bp, Homo sapiens
  siRNA target sequence for DHX9 (NM_001357.2,2456-2474).
gttccgaacaccattgcat

SEQ ID NO: 25072 - DNA, 19 bp, Homo sapiens
  siRNA target sequence for DHX9 (NM_001357.2,2460-2478).
cgaacaccattgcatgaaa

SEQ ID NO: 25073 - DNA, 19 bp, Homo sapiens
  siRNA target sequence for DHX9 (NM_001357.2,2509-2527).
gaggaattggccaatttct

SEQ ID NO: 25074 - DNA, 19 bp, Homo sapiens
  siRNA target sequence for DHX9 (NM_001357.2,2651-2669).
ccccattgagcctcgtttt

SEQ ID NO: 25075 - DNA, 19 bp, Homo sapiens
  siRNA target sequence for DHX9 (NM_001357.2,2661-2679).
cctcgttttggcaaaatga

SEQ ID NO: 25076 - DNA, 19 bp, Homo sapiens
  siRNA target sequence for DHX9 (NM_001357.2,2664-2682).
cgttttggcaaaatgatga

SEQ ID NO: 25077 - DNA, 19 bp, Homo sapiens
  siRNA target sequence for DHX9 (NM_001357.2,2678-2696).
gatgataatggggtgtatt

SEQ ID NO: 25078 - DNA, 19 bp, Homo sapiens
  siRNA target sequence for DHX9 (NM_001357.2,2702-2720).
cgtgggagatgctatctgt

SEQ ID NO: 25079 - DNA, 19 bp, Homo sapiens
  siRNA target sequence for DHX9 (NM_001357.2,2703-2721).
gtgggagatgctatctgta

SEQ ID NO: 25080 - DNA, 19 bp, Homo sapiens
  siRNA target sequence for DHX9 (NM_001357.2,2778-2796).
ggctatatccatcgaaatt

SEQ ID NO: 25081 - DNA, 19 bp, Homo sapiens
  siRNA target sequence for DHX9 (NM_001357.2,2817-2835).
gatcacgtagcccttttat

SEQ ID NO: 25082 - DNA, 19 bp, Homo sapiens
  siRNA target sequence for DHX9 (NM_001357.2,2822-2840).
cgtagcccttttatcagta

SEQ ID NO: 25083 - DNA, 19 bp, Homo sapiens
  siRNA target sequence for DHX9 (NM_001357.2,2823-2841).
gtagcccttttatcagtat

SEQ ID NO: 25084 - DNA, 19 bp, Homo sapiens
  siRNA target sequence for DHX9 (NM_001357.2,2848-2866).
cctgggatgatgctagaat

SEQ ID NO: 25085 - DNA, 19 bp, Homo sapiens
  siRNA target sequence for DHX9 (NM_001357.2,2896-2914).
gtgagcacaaaagacttaa

SEQ ID NO: 25086 - DNA, 19 bp, Homo sapiens
  siRNA target sequence for DHX9 (NM_001357.2,2910-2928).
cttaatatggctacactaa

SEQ ID NO: 25087 - DNA, 19 bp, Homo sapiens
  siRNA target sequence for DHX9 (NM_001357.2,2979-2997).
gggtttccagaagattgtt

SEQ ID NO: 25088 - DNA, 19 bp, Homo sapiens
  siRNA target sequence for DHX9 (NM_001357.2,3016-3034).
ctaacactggaccagataa

SEQ ID NO: 25089 - DNA, 19 bp, Homo sapiens
  siRNA target sequence for DHX9 (NM_001357.2,3020-3038).
cactggaccagataataat

SEQ ID NO: 25090 - DNA, 19 bp, Homo sapiens
  siRNA target sequence for DHX9 (NM_001357.2,3022-3040).
ctggaccagataataattt

SEQ ID NO: 25091 - DNA, 19 bp, Homo sapiens
  siRNA target sequence for DHX9 (NM_001357.2,3069-3087).
ggtgtgtaccccaatgtat

SEQ ID NO: 25092 - DNA, 19 bp, Homo sapiens
  siRNA target sequence for DHX9 (NM_001357.2,3074-3092).
gtaccccaatgtatgctat

SEQ ID NO: 25093 - DNA, 19 bp, Homo sapiens
  siRNA target sequence for DHX9 (NM_001357.2,3077-3095).
ccccaatgtatgctatcat

SEQ ID NO: 25094 - DNA, 19 bp, Homo sapiens
  siRNA target sequence for DHX9 (NM_001357.2,3078-3096).
cccaatgtatgctatcata

SEQ ID NO: 25095 - DNA, 19 bp, Homo sapiens
  siRNA target sequence for DHX9 (NM_001357.2,3079-3097).
ccaatgtatgctatcataa

SEQ ID NO: 25096 - DNA, 19 bp, Homo sapiens
  siRNA target sequence for DHX9 (NM_001357.2,3084-3102).
gtatgctatcataaggaaa

SEQ ID NO: 25097 - DNA, 19 bp, Homo sapiens
  siRNA target sequence for DHX9 (NM_001357.2,3119-3137).
cactgaagggcgtaatgca

SEQ ID NO: 25098 - DNA, 19 bp, Homo sapiens
  siRNA target sequence for DHX9 (NM_001357.2,3127-3145).
ggcgtaatgcacttatcca

SEQ ID NO: 25099 - DNA, 19 bp, Homo sapiens
  siRNA target sequence for DHX9 (NM_001357.2,3146-3164).
caaatcatctgttaattgt

SEQ ID NO: 25100 - DNA, 19 bp, Homo sapiens
  siRNA target sequence for DHX9 (NM_001357.2,3156-3174).
gttaattgtccttttagta

SEQ ID NO: 25101 - DNA, 19 bp, Homo sapiens
  siRNA target sequence for DHX9 (NM_001357.2,3244-3262).
ctaaaggcatgactttagt

SEQ ID NO: 25102 - DNA, 19 bp, Homo sapiens
  siRNA target sequence for DHX9 (NM_001357.2,3314-3332).
gcagattgtgcttgtagat

SEQ ID NO: 25103 - DNA, 19 bp, Homo sapiens
  siRNA target sequence for DHX9 (NM_001357.2,3335-3353).
ctggattaaactgcaaata

SEQ ID NO: 25104 - DNA, 19 bp, Homo sapiens
  siRNA target sequence for DHX9 (NM_001357.2,3338-3356).
gattaaactgcaaatatct

SEQ ID NO: 25105 - DNA, 19 bp, Homo sapiens
  siRNA target sequence for DHX9 (NM_001357.2,3401-3419).
ggctttggttgttgaagta

SEQ ID NO: 25106 - DNA, 19 bp, Homo sapiens
  siRNA target sequence for DHX9 (NM_001357.2,3421-3439).
ccaaacaacctgctatcat

SEQ ID NO: 25107 - DNA, 19 bp, Homo sapiens
  siRNA target sequence for DHX9 (NM_001357.2,3443-3461).
ccagttggaccccgtaaat

SEQ ID NO: 25108 - DNA, 19 bp, Homo sapiens
  siRNA target sequence for DHX9 (NM_001357.2,3446-3464).
gttggaccccgtaaatgaa

SEQ ID NO: 25109 - DNA, 19 bp, Homo sapiens
  siRNA target sequence for DHX9 (NM_001357.2,3505-3523).
ctgctggtatcaaccttat

SEQ ID NO: 25110 - DNA, 19 bp, Homo sapiens
  siRNA target sequence for DHX9 (NM_001357.2,3570-3588).
gcccgatacgacaatggaa

SEQ ID NO: 25111 - DNA, 19 bp, Homo sapiens
  siRNA target sequence for DHX9 (NM_001357.2,3581-3599).
caatggaagcggatataga

SEQ ID NO: 25112 - DNA, 19 bp, Homo sapiens
  siRNA target sequence for DHX9 (NM_001357.2,3598-3616).
gaaggggaggttctagtta

SEQ ID NO: 25113 - DNA, 19 bp, Homo sapiens
  siRNA target sequence for DHX9 (NM_030588.1,1017-1035).
ctatggaactggctacttt

SEQ ID NO: 25114 - DNA, 19 bp, Homo sapiens
  siRNA target sequence for DKFZp434I1930 (NM_032255.1,307-325).
cgcaaaggggggactgaaa

SEQ ID NO: 25115 - DNA, 19 bp, Homo sapiens
  siRNA target sequence for DKFZp434I1930 (NM_032255.1,309-327).
caaaggggggactgaaagt

SEQ ID NO: 25116 - DNA, 19 bp, Homo sapiens
  siRNA target sequence for DKFZp434I1930 (NM_032255.1,403-421).
gcagctgcgatcctctaaa

SEQ ID NO: 25117 - DNA, 19 bp, Homo sapiens
  siRNA target sequence for DKFZp434I1930 (NM_032255.1,695-713).
gccatggcctccttctcat

SEQ ID NO: 25118 - DNA, 19 bp, Homo sapiens
  siRNA target sequence for DKFZp434I1930 (NM_032255.1,739-757).
caagtccaagctgacaata

SEQ ID NO: 25119 - DNA, 19 bp, Homo sapiens
  siRNA target sequence for DKFZp434I1930 (NM_032255.1,765-783).
gaatccagggtggaaacat

SEQ ID NO: 25120 - DNA, 19 bp, Homo sapiens
  siRNA target sequence for DKFZp434I1930 (NM_032255.1,892-910).
gaactgcagccagatgttt

SEQ ID NO: 25121 - DNA, 19 bp, Homo sapiens
  siRNA target sequence for DKFZp434I1930 (NM_032255.1,1317-1335).
gcctcctgaagggcttatt

SEQ ID NO: 25122 - DNA, 19 bp, Homo sapiens
  siRNA target sequence for DKFZp434I1930 (NM_032255.1,1452-1470).
gctccatgctcgatcaagt

SEQ ID NO: 25123 - DNA, 19 bp, Homo sapiens
  siRNA target sequence for DKFZp434I1930 (NM_032255.1,1518-1536).
gcattgagccacatatcaa

SEQ ID NO: 25124 - DNA, 19 bp, Homo sapiens
  siRNA target sequence for DKFZp434I1930 (NM_032255.1,1525-1543).
gccacatatcaatatagga

SEQ ID NO: 25125 - DNA, 19 bp, Homo sapiens
  siRNA target sequence for DKFZp434I1930 (NM_032255.1,1905-1923).
cccacaagaaggacttcta

SEQ ID NO: 25126 - DNA, 19 bp, Homo sapiens
  siRNA target sequence for DKFZp434I1930 (NM_032255.1,1912-1930).
gaaggacttctacttgata

SEQ ID NO: 25127 - DNA, 19 bp, Homo sapiens
  siRNA target sequence for DKFZp434I1930 (NM_032255.1,1916-1934).
gacttctacttgatacaca

SEQ ID NO: 25128 - DNA, 19 bp, Homo sapiens
  siRNA target sequence for DKFZp434I1930 (NM_032255.1,1961-1979).
cagtgcgttgagtattatt

SEQ ID NO: 25129 - DNA, 19 bp, Homo sapiens
  siRNA target sequence for DKFZp434I1930 (NM_032255.1,1965-1983).
gcgttgagtattattacat

SEQ ID NO: 25130 - DNA, 19 bp, Homo sapiens
  siRNA target sequence for DKFZp434I1930 (NM_032255.1,2128-2146).
gttaaagaccaagagttat

SEQ ID NO: 25131 - DNA, 19 bp, Homo sapiens
  siRNA target sequence for DKFZp434I1930 (NM_032255.1,2256-2274).
gggtgtttgacaagatcaa

SEQ ID NO: 25132 - DNA, 19 bp, Homo sapiens
  siRNA target sequence for DKFZp434I1930 (NM_032255.1,2277-2295).
gtcgaaatgcccatatgaa

SEQ ID NO: 25133 - DNA, 19 bp, Homo sapiens
  siRNA target sequence for DKFZP564I0422 (NM_031435.1,539-557).
gtgccactacctacaacaa

SEQ ID NO: 25134 - DNA, 19 bp, Homo sapiens
  siRNA target sequence for DKFZP564I0422 (NM_031435.1,620-638).
gcctggttaggcgcaaaaa

SEQ ID NO: 25135 - DNA, 19 bp, Homo sapiens
  siRNA target sequence for DKFZP564I0422 (NM_031435.1,621-639).
cctggttaggcgcaaaaat

SEQ ID NO: 25136 - DNA, 19 bp, Homo sapiens
  siRNA target sequence for DKFZP564I0422 (NM_031435.1,622-640).
ctggttaggcgcaaaaatt

SEQ ID NO: 25137 - DNA, 19 bp, Homo sapiens
  siRNA target sequence for DKFZP564I0422 (NM_031435.1,624-642).
ggttaggcgcaaaaatttt

SEQ ID NO: 25138 - DNA, 19 bp, Homo sapiens
  siRNA target sequence for DKFZP564I0422 (NM_031435.1,707-725).
gacaaactcgacgacttaa

SEQ ID NO: 25139 - DNA, 19 bp, Homo sapiens
  siRNA target sequence for DKFZP564I0422 (NM_031435.1,709-727).
caaactcgacgacttaaaa

SEQ ID NO: 25140 - DNA, 19 bp, Homo sapiens
  siRNA target sequence for DKFZP564I0422 (NM_031435.1,713-731).
ctcgacgacttaaaatgga

SEQ ID NO: 25141 - DNA, 19 bp, Homo sapiens
  siRNA target sequence for DKFZP564I0422 (NM_031435.1,729-747).
ggatgctgttccaaccatt

SEQ ID NO: 25142 - DNA, 19 bp, Homo sapiens
  siRNA target sequence for DKFZP564I0422 (NM_031435.1,758-776).
gtacccatataaagtctat

SEQ ID NO: 25143 - DNA, 19 bp, Homo sapiens
  siRNA target sequence for DKFZP564I0422 (NM_031435.1,761-779).
cccatataaagtctatgaa

SEQ ID NO: 25144 - DNA, 19 bp, Homo sapiens
  siRNA target sequence for DKFZP564I0422 (NM_031435.1,762-780).
ccatataaagtctatgaaa

SEQ ID NO: 25145 - DNA, 19 bp, Homo sapiens
  siRNA target sequence for DKFZP564I0422 (NM_031435.1,821-839).
ctccagctggaccatctaa

SEQ ID NO: 25146 - DNA, 19 bp, Homo sapiens
  siRNA target sequence for DKFZP564I0422 (NM_031435.1,826-844).
gctggaccatctaatttaa

SEQ ID NO: 25147 - DNA, 19 bp, Homo sapiens
  siRNA target sequence for DKFZP564I0422 (NM_031435.1,827-845).
ctggaccatctaatttaaa

SEQ ID NO: 25148 - DNA, 19 bp, Homo sapiens
  siRNA target sequence for DKFZP564I0422 (NM_031435.1,829-847).
ggaccatctaatttaaaat

SEQ ID NO: 25149 - DNA, 19 bp, Homo sapiens
  siRNA target sequence for DKFZP564I0422 (NM_031435.1,857-875).
gtagtcagcaagtactact

SEQ ID NO: 25150 - DNA, 19 bp, Homo sapiens
  siRNA target sequence for DKFZP564I0422 (NM_031435.1,860-878).
gtcagcaagtactacttga

SEQ ID NO: 25151 - DNA, 19 bp, Homo sapiens
  siRNA target sequence for DKFZP564I0422 (NM_031435.1,882-900).
cagctatgcctttaggaat

SEQ ID NO: 25152 - DNA, 19 bp, Homo sapiens
  siRNA target sequence for DKFZP564I0422 (NM_031435.1,909-927).
ggcaaaaaagaggatcatt

SEQ ID NO: 25153 - DNA, 19 bp, Homo sapiens
  siRNA target sequence for DKFZP564I0422 (NM_031435.1,911-929).
caaaaaagaggatcattaa

SEQ ID NO: 25154 - DNA, 19 bp, Homo sapiens
  siRNA target sequence for DKFZP564I0422 (NM_031435.1,1015-1033).
gccacgtgtttggtaaaga

SEQ ID NO: 25155 - DNA, 19 bp, Homo sapiens
  siRNA target sequence for DKFZP564I0422 (NM_031435.1,1016-1034).
ccacgtgtttggtaaagaa

SEQ ID NO: 25156 - DNA, 19 bp, Homo sapiens
  siRNA target sequence for DKFZP564I0422 (NM_031435.1,1017-1035).
cacgtgtttggtaaagaat

SEQ ID NO: 25157 - DNA, 19 bp, Homo sapiens
  siRNA target sequence for DKFZP564I0422 (NM_031435.1,1064-1082).
gtacatcagaacacatgtt

SEQ ID NO: 25158 - DNA, 19 bp, Homo sapiens
  siRNA target sequence for DKFZP564I0422 (NM_031435.1,1151-1169).
cactgctaagtctaaatct

SEQ ID NO: 25159 - DNA, 19 bp, Homo sapiens
  siRNA target sequence for DKFZP564I0422 (NM_031435.1,1153-1171).
ctgctaagtctaaatctaa

SEQ ID NO: 25160 - DNA, 19 bp, Homo sapiens
  siRNA target sequence for DKFZP564I052 (NM_015534.3,489-507).
ccgatctactcgtgttaca

SEQ ID NO: 25161 - DNA, 19 bp, Homo sapiens
  siRNA target sequence for DKFZP564I052 (NM_015534.3,490-508).
cgatctactcgtgttacaa

SEQ ID NO: 25162 - DNA, 19 bp, Homo sapiens
  siRNA target sequence for DKFZP564I052 (NM_015534.3,509-527).
gatcaacagtggggttaaa

SEQ ID NO: 25163 - DNA, 19 bp, Homo sapiens
  siRNA target sequence for DKFZP564I052 (NM_015534.3,529-547).
ggcttggatgaatcttttt

SEQ ID NO: 25164 - DNA, 19 bp, Homo sapiens
  siRNA target sequence for DKFZP564I052 (NM_015534.3,548-566).
gtggtagaactttaaggaa

SEQ ID NO: 25165 - DNA, 19 bp, Homo sapiens
  siRNA target sequence for DKFZP564I052 (NM_015534.3,649-667).
ccaattcagaaaggaaata

SEQ ID NO: 25166 - DNA, 19 bp, Homo sapiens
  siRNA target sequence for DKFZP564I052 (NM_015534.3,696-714).
gcagagtacccgagaatca

SEQ ID NO: 25167 - DNA, 19 bp, Homo sapiens
  siRNA target sequence for DKFZP564I052 (NM_015534.3,697-715).
cagagtacccgagaatcat

SEQ ID NO: 25168 - DNA, 19 bp, Homo sapiens
  siRNA target sequence for DKFZP564I052 (NM_015534.3,798-816).
gcaaacagaacctgtttca

SEQ ID NO: 25169 - DNA, 19 bp, Homo sapiens
  siRNA target sequence for DKFZP564I052 (NM_015534.3,837-855).
gcgttgtcttagatctgaa

SEQ ID NO: 25170 - DNA, 19 bp, Homo sapiens
  siRNA target sequence for DKFZP564I052 (NM_015534.3,871-889).
gaagaagattctcctataa

SEQ ID NO: 25171 - DNA, 19 bp, Homo sapiens
  siRNA target sequence for DKFZP564I052 (NM_015534.3,961-979).
cgagcttgtcgatgtctta

SEQ ID NO: 25172 - DNA, 19 bp, Homo sapiens
  siRNA target sequence for DKFZP564I052 (NM_015534.3,965-983).
cttgtcgatgtcttatact

SEQ ID NO: 25173 - DNA, 19 bp, Homo sapiens
  siRNA target sequence for DKFZP564I052 (NM_015534.3,1025-1043).
gtgaggaagggccacttaa

SEQ ID NO: 25174 - DNA, 19 bp, Homo sapiens
  siRNA target sequence for DKFZP564I052 (NM_015534.3,1029-1047).
ggaagggccacttaattct

SEQ ID NO: 25175 - DNA, 19 bp, Homo sapiens
  siRNA target sequence for DKFZP564I052 (NM_015534.3,1077-1095).
ggctgtcaatggtgttgat

SEQ ID NO: 25176 - DNA, 19 bp, Homo sapiens
  siRNA target sequence for DKFZP564I052 (NM_015534.3,1098-1116).
cagtgattcagctgttata

SEQ ID NO: 25177 - DNA, 19 bp, Homo sapiens
  siRNA target sequence for DKFZP564I052 (NM_015534.3,1100-1118).
gtgattcagctgttataaa

SEQ ID NO: 25178 - DNA, 19 bp, Homo sapiens
  siRNA target sequence for DKFZP564I052 (NM_015534.3,1132-1150).
cagcctgatgggaacacta

SEQ ID NO: 25179 - DNA, 19 bp, Homo sapiens
  siRNA target sequence for DKFZP564I052 (NM_015534.3,1207-1225).
gatacggatacccaaactt

SEQ ID NO: 25180 - DNA, 19 bp, Homo sapiens
  siRNA target sequence for DKFZP564I052 (NM_015534.3,1211-1229).
cggatacccaaacttcaat

SEQ ID NO: 25181 - DNA, 19 bp, Homo sapiens
  siRNA target sequence for DKFZP564I052 (NM_015534.3,1244-1262).
ggaaggaggacagttatat

SEQ ID NO: 25182 - DNA, 19 bp, Homo sapiens
  siRNA target sequence for DKFZP564I052 (NM_015534.3,1245-1263).
gaaggaggacagttatata

SEQ ID NO: 25183 - DNA, 19 bp, Homo sapiens
  siRNA target sequence for DKFZP564I052 (NM_015534.3,1256-1274).
gttatatagaccataaggt

SEQ ID NO: 25184 - DNA, 19 bp, Homo sapiens
  siRNA target sequence for DKFZP564I052 (NM_015534.3,1311-1329).
ggaccacaaaatagtaact

SEQ ID NO: 25185 - DNA, 19 bp, Homo sapiens
  siRNA target sequence for DKFZP564I052 (NM_015534.3,1338-1356).
gcctgtggaacatgttaat

SEQ ID NO: 25186 - DNA, 19 bp, Homo sapiens
  siRNA target sequence for DKFZP564I052 (NM_015534.3,1382-1400).
ggcccttttctgaaactca

SEQ ID NO: 25187 - DNA, 19 bp, Homo sapiens
  siRNA target sequence for DKFZP564I052 (NM_015534.3,1391-1409).
ctgaaactcagtcatcttt

SEQ ID NO: 25188 - DNA, 19 bp, Homo sapiens
  siRNA target sequence for DKFZP564I052 (NM_015534.3,1393-1411).
gaaactcagtcatctttaa

SEQ ID NO: 25189 - DNA, 19 bp, Homo sapiens
  siRNA target sequence for DKFZP564I052 (NM_015534.3,1488-1506).
cgaactggacacaagtctt

SEQ ID NO: 25190 - DNA, 19 bp, Homo sapiens
  siRNA target sequence for DKFZP564I052 (NM_015534.3,1564-1582).
gctcaaatgatgtctttat

SEQ ID NO: 25191 - DNA, 19 bp, Homo sapiens
  siRNA target sequence for DKFZP564I052 (NM_015534.3,1588-1606).
cctcaagaacatcgttata

SEQ ID NO: 25192 - DNA, 19 bp, Homo sapiens
  siRNA target sequence for DKFZP564I052 (NM_015534.3,1641-1659).
cagaggtagtcccactaaa

SEQ ID NO: 25193 - DNA, 19 bp, Homo sapiens
  siRNA target sequence for DKFZP564I052 (NM_015534.3,1643-1661).
gaggtagtcccactaaaaa

SEQ ID NO: 25194 - DNA, 19 bp, Homo sapiens
  siRNA target sequence for DKFZP564I052 (NM_015534.3,1685-1703).
gacaatttgaggagaataa

SEQ ID NO: 25195 - DNA, 19 bp, Homo sapiens
  siRNA target sequence for DKFZP564I052 (NM_015534.3,1698-1716).
gaataatcttagtcctaat

SEQ ID NO: 25196 - DNA, 19 bp, Homo sapiens
  siRNA target sequence for DKFZP564I052 (NM_015534.3,1845-1863).
ctcagaggcaagactcaat

SEQ ID NO: 25197 - DNA, 19 bp, Homo sapiens
  siRNA target sequence for DKFZP564I052 (NM_015534.3,1895-1913).
ccagtcagcacattacaga

SEQ ID NO: 25198 - DNA, 19 bp, Homo sapiens
  siRNA target sequence for DKFZP564I052 (NM_015534.3,1896-1914).
cagtcagcacattacagaa

SEQ ID NO: 25199 - DNA, 19 bp, Homo sapiens
  siRNA target sequence for DKFZP564I052 (NM_015534.3,1924-1942).
gatgatcctgatgtttatt

SEQ ID NO: 25200 - DNA, 19 bp, Homo sapiens
  siRNA target sequence for DKFZP564I052 (NM_015534.3,2016-2034).
cgaggctcagcgttctcaa

SEQ ID NO: 25201 - DNA, 19 bp, Homo sapiens
  siRNA target sequence for DKFZP564I052 (NM_015534.3,2158-2176).
caattgcctgagatcgtat

SEQ ID NO: 25202 - DNA, 19 bp, Homo sapiens
  siRNA target sequence for DKFZP564I052 (NM_015534.3,2169-2187).
gatcgtatgggaccaatat

SEQ ID NO: 25203 - DNA, 19 bp, Homo sapiens
  siRNA target sequence for DKFZP564I052 (NM_015534.3,2189-2207).
cccatagccttgggaattt

SEQ ID NO: 25204 - DNA, 19 bp, Homo sapiens
  siRNA target sequence for DKFZP564I052 (NM_015534.3,2227-2245).
cgtaaaagacatactagaa

SEQ ID NO: 25205 - DNA, 19 bp, Homo sapiens
  siRNA target sequence for DKFZP564I052 (NM_015534.3,2246-2264).
gagttaagctagtttttga

SEQ ID NO: 25206 - DNA, 19 bp, Homo sapiens
  siRNA target sequence for DKFZP564I052 (NM_015534.3,2317-2335).
ggagagtccctttcatatt

SEQ ID NO: 25207 - DNA, 19 bp, Homo sapiens
  siRNA target sequence for DKFZP564I052 (NM_015534.3,2320-2338).
gagtccctttcatattcta

SEQ ID NO: 25208 - DNA, 19 bp, Homo sapiens
  siRNA target sequence for DKFZP564I052 (NM_015534.3,2373-2391).
cagtcgtcctcagatgata

SEQ ID NO: 25209 - DNA, 19 bp, Homo sapiens
  siRNA target sequence for DKFZP564I052 (NM_015534.3,2395-2413).
ggacgcttgtgtgatgata

SEQ ID NO: 25210 - DNA, 19 bp, Homo sapiens
  siRNA target sequence for DKFZP564I052 (NM_015534.3,2414-2432).
ccaaacctgaaacatttaa

SEQ ID NO: 25211 - DNA, 19 bp, Homo sapiens
  siRNA target sequence for DKFZP564I052 (NM_015534.3,2433-2451).
ccagttgtggactgttgaa

SEQ ID NO: 25212 - DNA, 19 bp, Homo sapiens
  siRNA target sequence for DKFZP564I052 (NM_015534.3,2507-2525).
ctcgacgctggcagaagat

SEQ ID NO: 25213 - DNA, 19 bp, Homo sapiens
  siRNA target sequence for DKFZP564I052 (NM_015534.3,2567-2585).
gccgagtacagaagtattt

SEQ ID NO: 25214 - DNA, 19 bp, Homo sapiens
  siRNA target sequence for DKFZP564I052 (NM_015534.3,2569-2587).
cgagtacagaagtatttca

SEQ ID NO: 25215 - DNA, 19 bp, Homo sapiens
  siRNA target sequence for DKFZP564I052 (NM_015534.3,2570-2588).
gagtacagaagtatttcat

SEQ ID NO: 25216 - DNA, 19 bp, Homo sapiens
  siRNA target sequence for DKFZP564I052 (NM_015534.3,2620-2638).
ggcagaacaccaaacttat

SEQ ID NO: 25217 - DNA, 19 bp, Homo sapiens
  siRNA target sequence for DKFZP564I052 (NM_015534.3,2621-2639).
gcagaacaccaaacttata

SEQ ID NO: 25218 - DNA, 19 bp, Homo sapiens
  siRNA target sequence for DKFZP564I052 (NM_015534.3,2622-2640).
cagaacaccaaacttatat

SEQ ID NO: 25219 - DNA, 19 bp, Homo sapiens
  siRNA target sequence for DKFZP564I052 (NM_015534.3,2671-2689).
cgacagcaccctcttaata

SEQ ID NO: 25220 - DNA, 19 bp, Homo sapiens
  siRNA target sequence for DKFZP564I052 (NM_015534.3,2672-2690).
gacagcaccctcttaataa

SEQ ID NO: 25221 - DNA, 19 bp, Homo sapiens
  siRNA target sequence for DKFZP564I052 (NM_015534.3,2676-2694).
gcaccctcttaataagcat

SEQ ID NO: 25222 - DNA, 19 bp, Homo sapiens
  siRNA target sequence for DKFZP564I052 (NM_015534.3,2704-2722).
ccttccactttcatgactt

SEQ ID NO: 25223 - DNA, 19 bp, Homo sapiens
  siRNA target sequence for DKFZP564I052 (NM_015534.3,2725-2743).
catgaaccgccagtgtata

SEQ ID NO: 25224 - DNA, 19 bp, Homo sapiens
  siRNA target sequence for DKFZP564I052 (NM_015534.3,2735-2753).
cagtgtatatggatgaaga

SEQ ID NO: 25225 - DNA, 19 bp, Homo sapiens
  siRNA target sequence for DKFZP564I052 (NM_015534.3,2752-2770).
gatgatgaccgatcttgtt

SEQ ID NO: 25226 - DNA, 19 bp, Homo sapiens
  siRNA target sequence for DKFZP564I052 (NM_015534.3,2758-2776).
gaccgatcttgttttcata

SEQ ID NO: 25227 - DNA, 19 bp, Homo sapiens
  siRNA target sequence for DKFZP564I052 (NM_015534.3,2768-2786).
gttttcatagccacatgaa

SEQ ID NO: 25228 - DNA, 19 bp, Homo sapiens
  siRNA target sequence for DKFZP564I052 (NM_015534.3,2803-2821).
gcatcagatgacgaaagta

SEQ ID NO: 25229 - DNA, 19 bp, Homo sapiens
  siRNA target sequence for DKFZP564I052 (NM_015534.3,2804-2822).
catcagatgacgaaagtat

SEQ ID NO: 25230 - DNA, 19 bp, Homo sapiens
  siRNA target sequence for DKFZP564I052 (NM_015534.3,2824-2842).
cctatcatgtataggaatt

SEQ ID NO: 25231 - DNA, 19 bp, Homo sapiens
  siRNA target sequence for DKFZP564I052 (NM_015534.3,2898-2916).
gcaaatgcaagctgaaagt

SEQ ID NO: 25232 - DNA, 19 bp, Homo sapiens
  siRNA target sequence for DKFZP564I052 (NM_015534.3,2926-2944).
caacatgtgggctttaagt

SEQ ID NO: 25233 - DNA, 19 bp, Homo sapiens
  siRNA target sequence for DKFZP564I052 (NM_015534.3,2995-3013).
gattgtcctccagaaatgt

SEQ ID NO: 25234 - DNA, 19 bp, Homo sapiens
  siRNA target sequence for DKFZP564I052 (NM_015534.3,2999-3017).
gtcctccagaaatgtcttt

SEQ ID NO: 25235 - DNA, 19 bp, Homo sapiens
  siRNA target sequence for DKFZP564I052 (NM_015534.3,3035-3053).
gttcagactgtctacatga

SEQ ID NO: 25236 - DNA, 19 bp, Homo sapiens
  siRNA target sequence for DKFZP564I052 (NM_015534.3,3079-3097).
caattagaacctatttata

SEQ ID NO: 25237 - DNA, 19 bp, Homo sapiens
  siRNA target sequence for DKFZP564I052 (NM_015534.3,3098-3116).
ggtcagagacattcttaga

SEQ ID NO: 25238 - DNA, 19 bp, Homo sapiens
  siRNA target sequence for DKFZP564I052 (NM_015534.3,3136-3154).
cagggcaccagttacaatt

SEQ ID NO: 25239 - DNA, 19 bp, Homo sapiens
  siRNA target sequence for DMAP1 (NM_019100.3,356-374).
caacccggacaagaaaaaa

SEQ ID NO: 25240 - DNA, 19 bp, Homo sapiens
  siRNA target sequence for DMAP1 (NM_019100.3,419-437).
catgcaccgggaagtctat

SEQ ID NO: 25241 - DNA, 19 bp, Homo sapiens
  siRNA target sequence for DMAP1 (NM_019100.3,577-595).
gcaaggacggagcaatgtt

SEQ ID NO: 25242 - DNA, 19 bp, Homo sapiens
  siRNA target sequence for DMAP1 (NM_019100.3,635-653).
cccctttgccaggttcaat

SEQ ID NO: 25243 - DNA, 19 bp, Homo sapiens
  siRNA target sequence for DMAP1 (NM_019100.3,636-654).
ccctttgccaggttcaata

SEQ ID NO: 25244 - DNA, 19 bp, Homo sapiens
  siRNA target sequence for DMAP1 (NM_019100.3,718-736).
ggactaaggcagaaactga

SEQ ID NO: 25245 - DNA, 19 bp, Homo sapiens
  siRNA target sequence for DMAP1 (NM_019100.3,760-778).
gctttgacctgcgttttgt

SEQ ID NO: 25246 - DNA, 19 bp, Homo sapiens
  siRNA target sequence for DMAP1 (NM_019100.3,761-779).
ctttgacctgcgttttgtt

SEQ ID NO: 25247 - DNA, 19 bp, Homo sapiens
  siRNA target sequence for DMAP1 (NM_019100.3,765-783).
gacctgcgttttgttgtta

SEQ ID NO: 25248 - DNA, 19 bp, Homo sapiens
  siRNA target sequence for DMAP1 (NM_019100.3,770-788).
gcgttttgttgttatccat

SEQ ID NO: 25249 - DNA, 19 bp, Homo sapiens
  siRNA target sequence for DMAP1 (NM_019100.3,851-869).
ccacatctgtgctaagctt

SEQ ID NO: 25250 - DNA, 19 bp, Homo sapiens
  siRNA target sequence for DMAP1 (NM_019100.3,888-906).
ccaggcacagaccttaaga

SEQ ID NO: 25251 - DNA, 19 bp, Homo sapiens
  siRNA target sequence for DMAP1 (NM_019100.3,889-907).
caggcacagaccttaagat

SEQ ID NO: 25252 - DNA, 19 bp, Homo sapiens
  siRNA target sequence for DMAP1 (NM_019100.3,1633-1651).
gctcatcttccgtgaagaa

SEQ ID NO: 25253 - DNA, 19 bp, Homo sapiens
  siRNA target sequence for DNAJC1 (NM_022365.2,256-274).
gcggagacctggagttgtt

SEQ ID NO: 25254 - DNA, 19 bp, Homo sapiens
  siRNA target sequence for DNAJC1 (NM_022365.2,261-279).
gacctggagttgtttgact

SEQ ID NO: 25255 - DNA, 19 bp, Homo sapiens
  siRNA target sequence for DNAJC1 (NM_022365.2,358-376).
catatcgtaagctttcact

SEQ ID NO: 25256 - DNA, 19 bp, Homo sapiens
  siRNA target sequence for DNAJC1 (NM_022365.2,363-381).
cgtaagctttcactaactt

SEQ ID NO: 25257 - DNA, 19 bp, Homo sapiens
  siRNA target sequence for DNAJC1 (NM_022365.2,435-453).
gtggccatttatgaagttt

SEQ ID NO: 25258 - DNA, 19 bp, Homo sapiens
  siRNA target sequence for DNAJC1 (NM_022365.2,469-487).
gaaggcagaggtatgatga

SEQ ID NO: 25259 - DNA, 19 bp, Homo sapiens
  siRNA target sequence for DNAJC1 (NM_022365.2,516-534).
cgacagcctgtattctact

SEQ ID NO: 25260 - DNA, 19 bp, Homo sapiens
  siRNA target sequence for DNAJC1 (NM_022365.2,517-535).
gacagcctgtattctacta

SEQ ID NO: 25261 - DNA, 19 bp, Homo sapiens
  siRNA target sequence for DNAJC1 (NM_022365.2,519-537).
cagcctgtattctactaca

SEQ ID NO: 25262 - DNA, 19 bp, Homo sapiens
  siRNA target sequence for DNAJC1 (NM_022365.2,533-551).
ctacaggcgggtgagaaaa

SEQ ID NO: 25263 - DNA, 19 bp, Homo sapiens
  siRNA target sequence for DNAJC1 (NM_022365.2,562-580).
ctgagctggcattactctt

SEQ ID NO: 25264 - DNA, 19 bp, Homo sapiens
  siRNA target sequence for DNAJC1 (NM_022365.2,569-587).
ggcattactcttgttcatt

SEQ ID NO: 25265 - DNA, 19 bp, Homo sapiens
  siRNA target sequence for DNAJC1 (NM_022365.2,610-628).
ctgtggtttggtcaatcta

SEQ ID NO: 25266 - DNA, 19 bp, Homo sapiens
  siRNA target sequence for DNAJC1 (NM_022365.2,619-637).
ggtcaatctacctggaaaa

SEQ ID NO: 25267 - DNA, 19 bp, Homo sapiens
  siRNA target sequence for DNAJC1 (NM_022365.2,644-662).
ggatgaactactaagtaga

SEQ ID NO: 25268 - DNA, 19 bp, Homo sapiens
  siRNA target sequence for DNAJC1 (NM_022365.2,645-663).
gatgaactactaagtagaa

SEQ ID NO: 25269 - DNA, 19 bp, Homo sapiens
  siRNA target sequence for DNAJC1 (NM_022365.2,700-718).
gtgtggatgtatcaaaact

SEQ ID NO: 25270 - DNA, 19 bp, Homo sapiens
  siRNA target sequence for DNAJC1 (NM_022365.2,717-735).
ctcggtgcttcagaaaaaa

SEQ ID NO: 25271 - DNA, 19 bp, Homo sapiens
  siRNA target sequence for DNAJC1 (NM_022365.2,757-775).
cacagtggcatgatttgct

SEQ ID NO: 25272 - DNA, 19 bp, Homo sapiens
  siRNA target sequence for DNAJC1 (NM_022365.2,796-814).
ggttttgccttacactaaa

SEQ ID NO: 25273 - DNA, 19 bp, Homo sapiens
  siRNA target sequence for DNAJC1 (NM_022365.2,797-815).
gttttgccttacactaaaa

SEQ ID NO: 25274 - DNA, 19 bp, Homo sapiens
  siRNA target sequence for DNAJC1 (NM_022365.2,802-820).
gccttacactaaaagcatt

SEQ ID NO: 25275 - DNA, 19 bp, Homo sapiens
  siRNA target sequence for DNAJC1 (NM_022365.2,844-862).
ggcagttttatgctaaata

SEQ ID NO: 25276 - DNA, 19 bp, Homo sapiens
  siRNA target sequence for DNAJC1 (NM_022365.2,845-863).
gcagttttatgctaaatat

SEQ ID NO: 25277 - DNA, 19 bp, Homo sapiens
  siRNA target sequence for DNAJC1 (NM_022365.2,871-889).
caagattgaaggaaaagga

SEQ ID NO: 25278 - DNA, 19 bp, Homo sapiens
  siRNA target sequence for DNAJC1 (NM_022365.2,954-972).
cctgaatttcctgtataca

SEQ ID NO: 25279 - DNA, 19 bp, Homo sapiens
  siRNA target sequence for DNAJC1 (NM_022365.2,964-982).
ctgtatacacacctttaga

SEQ ID NO: 25280 - DNA, 19 bp, Homo sapiens
  siRNA target sequence for DNAJC1 (NM_022365.2,966-984).
gtatacacacctttagaaa

SEQ ID NO: 25281 - DNA, 19 bp, Homo sapiens
  siRNA target sequence for DNAJC1 (NM_022365.2,985-1003).
ctacatatattcagtctta

SEQ ID NO: 25282 - DNA, 19 bp, Homo sapiens
  siRNA target sequence for DNAJC1 (NM_022365.2,1119-1137).
ctgacaagaagtatggtta

SEQ ID NO: 25283 - DNA, 19 bp, Homo sapiens
  siRNA target sequence for DNAJC1 (NM_022365.2,1123-1141).
caagaagtatggttaagtt

SEQ ID NO: 25284 - DNA, 19 bp, Homo sapiens
  siRNA target sequence for DNAJC1 (NM_022365.2,1155-1173).
ccaggtcgatgggaaaaga

SEQ ID NO: 25285 - DNA, 19 bp, Homo sapiens
  siRNA target sequence for DNAJC1 (NM_022365.2,1156-1174).
caggtcgatgggaaaagat

SEQ ID NO: 25286 - DNA, 19 bp, Homo sapiens
  siRNA target sequence for DNAJC1 (NM_022365.2,1249-1267).
ccccaggaatggttagact

SEQ ID NO: 25287 - DNA, 19 bp, Homo sapiens
  siRNA target sequence for DNAJC1 (NM_022365.2,1321-1339).
ccttgcccgatgacatgat

SEQ ID NO: 25288 - DNA, 19 bp, Homo sapiens
  siRNA target sequence for DNAJC1 (NM_022365.2,1517-1535).
ctttgacatagcagaacaa

SEQ ID NO: 25289 - DNA, 19 bp, Homo sapiens
  siRNA target sequence for DNAJC1 (NM_022365.2,1587-1605).
gaggagccgtggactcaaa

SEQ ID NO: 25290 - DNA, 19 bp, Homo sapiens
  siRNA target sequence for DNAJC1 (NM_022365.2,1589-1607).
ggagccgtggactcaaaat

SEQ ID NO: 25291 - DNA, 19 bp, Homo sapiens
  siRNA target sequence for DNAJC1 (NM_022365.2,1657-1675).
ctgaccgctgggacaaaat

SEQ ID NO: 25292 - DNA, 19 bp, Homo sapiens
  siRNA target sequence for DNAJC1 (NM_022365.2,1711-1729).
gtatcgctaggtacaagtt

SEQ ID NO: 25293 - DNA, 19 bp, Homo sapiens
  siRNA target sequence for DNASE1L1 (NM_006730.1,998-1016).
cctgcttcgagaactcaat

SEQ ID NO: 25294 - DNA, 19 bp, Homo sapiens
  siRNA target sequence for DNASE1L1 (NM_006730.1,1002-1020).
cttcgagaactcaatcgat

SEQ ID NO: 25295 - DNA, 19 bp, Homo sapiens
  siRNA target sequence for DNASE1L1 (NM_006730.1,1006-1024).
gagaactcaatcgatttga

SEQ ID NO: 25296 - DNA, 19 bp, Homo sapiens
  siRNA target sequence for DNASE1L1 (NM_006730.1,1083-1101).
gagacgtatgtgtacttct

SEQ ID NO: 25297 - DNA, 19 bp, Homo sapiens
  siRNA target sequence for DNASE1L1 (NM_006730.1,1085-1103).
gacgtatgtgtacttctat

SEQ ID NO: 25298 - DNA, 19 bp, Homo sapiens
  siRNA target sequence for DNASE1L1 (NM_006730.1,1097-1115).
cttctatcggtcacacaaa

SEQ ID NO: 25299 - DNA, 19 bp, Homo sapiens
  siRNA target sequence for DNASE1L1 (NM_006730.1,1100-1118).
ctatcggtcacacaaaaca

SEQ ID NO: 25300 - DNA, 19 bp, Homo sapiens
  siRNA target sequence for DNASE1L1 (NM_006730.1,1243-1261).
ctcctaaggccgtagagaa

SEQ ID NO: 25301 - DNA, 19 bp, Homo sapiens
  siRNA target sequence for DNASE1L1 (NM_006730.1,1271-1289).
cgccctctacgatgtgttt

SEQ ID NO: 25302 - DNA, 19 bp, Homo sapiens
  siRNA target sequence for DNASE1L1 (NM_006730.1,1273-1291).
ccctctacgatgtgtttct

SEQ ID NO: 25303 - DNA, 19 bp, Homo sapiens
  siRNA target sequence for DNASE1L2 (NM_001374.1,159-177).
cgcatcggagccttcaaca

SEQ ID NO: 25304 - DNA, 19 bp, Homo sapiens
  siRNA target sequence for DNASE1L2 (NM_001374.1,160-178).
gcatcggagccttcaacat

SEQ ID NO: 25305 - DNA, 19 bp, Homo sapiens
  siRNA target sequence for DNASE1L2 (NM_001374.1,161-179).
catcggagccttcaacatt

SEQ ID NO: 25306 - DNA, 19 bp, Homo sapiens
  siRNA target sequence for DNASE1L2 (NM_001374.1,336-354).
cacgagtacagctttgtga

SEQ ID NO: 25307 - DNA, 19 bp, Homo sapiens
  siRNA target sequence for DNASE1L3 (NM_004944.1,217-235).
caaacgctgtgacatcata

SEQ ID NO: 25308 - DNA, 19 bp, Homo sapiens
  siRNA target sequence for DNASE1L3 (NM_004944.1,312-330).
gaggcataacgtacaacta

SEQ ID NO: 25309 - DNA, 19 bp, Homo sapiens
  siRNA target sequence for DNASE1L3 (NM_004944.1,339-357).
gctctcggcttggaagaaa

SEQ ID NO: 25310 - DNA, 19 bp, Homo sapiens
  siRNA target sequence for DNASE1L3 (NM_004944.1,417-435).
gttatcactaccatgacta

SEQ ID NO: 25311 - DNA, 19 bp, Homo sapiens
  siRNA target sequence for DNASE1L3 (NM_004944.1,495-513).
cccacactgctgtcaaaga

SEQ ID NO: 25312 - DNA, 19 bp, Homo sapiens
  siRNA target sequence for DNASE1L3 (NM_004944.1,543-561).
cagagacatccgttaagga

SEQ ID NO: 25313 - DNA, 19 bp, Homo sapiens
  siRNA target sequence for DNASE1L3 (NM_004944.1,602-620).
cgctggaaggcggagaatt

SEQ ID NO: 25314 - DNA, 19 bp, Homo sapiens
  siRNA target sequence for DNASE1L3 (NM_004944.1,694-712).
gactgaccccaggtttgtt

SEQ ID NO: 25315 - DNA, 19 bp, Homo sapiens
  siRNA target sequence for DNASE1L3 (NM_004944.1,751-769).
gagcaccaactgtgcatat

SEQ ID NO: 25316 - DNA, 19 bp, Homo sapiens
  siRNA target sequence for DNASE2 (NM_001375.1,192-210).
caagctgccagctcttaga

SEQ ID NO: 25317 - DNA, 19 bp, Homo sapiens
  siRNA target sequence for DNASE2 (NM_001375.1,236-254).
ggctgcagtacaagtatct

SEQ ID NO: 25318 - DNA, 19 bp, Homo sapiens
  siRNA target sequence for DNASE2 (NM_001375.1,283-301).
ggcagggcactcatcaaca

SEQ ID NO: 25319 - DNA, 19 bp, Homo sapiens
  siRNA target sequence for DNASE2 (NM_001375.1,623-641).
cctacccctgggtctataa

SEQ ID NO: 25320 - DNA, 19 bp, Homo sapiens
  siRNA target sequence for DNASE2 (NM_001375.1,780-798).
caagttcagcaaatttgga

SEQ ID NO: 25321 - DNA, 19 bp, Homo sapiens
  siRNA target sequence for DNASE2 (NM_001375.1,855-873).
gttctggcacaaaactgta

SEQ ID NO: 25322 - DNA, 19 bp, Homo sapiens
  siRNA target sequence for DNASE2 (NM_001375.1,874-892).
ggcatcctgccctctaact

SEQ ID NO: 25323 - DNA, 19 bp, Homo sapiens
  siRNA target sequence for DNASE2 (NM_001375.1,970-988).
gaggaccactccaaatggt

SEQ ID NO: 25324 - DNA, 19 bp, Homo sapiens
  siRNA target sequence for DNASE2 (NM_001375.1,1119-1137).
gaactaccagccctgtaat

SEQ ID NO: 25325 - DNA, 19 bp, Homo sapiens
  siRNA target sequence for DNASE2 (NM_001375.1,1154-1172).
ccagcagagcttataagat

SEQ ID NO: 25326 - DNA, 19 bp, Homo sapiens
  siRNA target sequence for DNMT1 (NM_001379.1,309-327).
ccgcaggcggctcaaagat

SEQ ID NO: 25327 - DNA, 19 bp, Homo sapiens
  siRNA target sequence for DNMT1 (NM_001379.1,310-328).
cgcaggcggctcaaagatt

SEQ ID NO: 25328 - DNA, 19 bp, Homo sapiens
  siRNA target sequence for DNMT1 (NM_001379.1,375-393).
gaatctcttgcacgaattt

SEQ ID NO: 25329 - DNA, 19 bp, Homo sapiens
  siRNA target sequence for DNMT1 (NM_001379.1,387-405).
cgaatttctgcaaacagaa

SEQ ID NO: 25330 - DNA, 19 bp, Homo sapiens
  siRNA target sequence for DNMT1 (NM_001379.1,426-444).
cttggaaaccaaattacgt

SEQ ID NO: 25331 - DNA, 19 bp, Homo sapiens
  siRNA target sequence for DNMT1 (NM_001379.1,429-447).
ggaaaccaaattacgtaaa

SEQ ID NO: 25332 - DNA, 19 bp, Homo sapiens
  siRNA target sequence for DNMT1 (NM_001379.1,467-485).
gctacctggctaaagtcaa

SEQ ID NO: 25333 - DNA, 19 bp, Homo sapiens
  siRNA target sequence for DNMT1 (NM_001379.1,468-486).
ctacctggctaaagtcaaa

SEQ ID NO: 25334 - DNA, 19 bp, Homo sapiens
  siRNA target sequence for DNMT1 (NM_001379.1,544-562).
gtgaatggacgtctagaaa

SEQ ID NO: 25335 - DNA, 19 bp, Homo sapiens
  siRNA target sequence for DNMT1 (NM_001379.1,694-712).
cctagccccaggattacaa

SEQ ID NO: 25336 - DNA, 19 bp, Homo sapiens
  siRNA target sequence for DNMT1 (NM_001379.1,843-861).
gaagagacgtagagttaca

SEQ ID NO: 25337 - DNA, 19 bp, Homo sapiens
  siRNA target sequence for DNMT1 (NM_001379.1,917-935).
caggaacgcgcactgaaaa

SEQ ID NO: 25338 - DNA, 19 bp, Homo sapiens
  siRNA target sequence for DNMT1 (NM_001379.1,968-986).
gactccgaagtcaaaccaa

SEQ ID NO: 25339 - DNA, 19 bp, Homo sapiens
  siRNA target sequence for DNMT1 (NM_001379.1,1253-1271).
gcgccaaaacagtcatgaa

SEQ ID NO: 25340 - DNA, 19 bp, Homo sapiens
  siRNA target sequence for DNMT1 (NM_001379.1,1255-1273).
gccaaaacagtcatgaact

SEQ ID NO: 25341 - DNA, 19 bp, Homo sapiens
  siRNA target sequence for DNMT1 (NM_001379.1,1285-1303).
cctcccaagtgcattcagt

SEQ ID NO: 25342 - DNA, 19 bp, Homo sapiens
  siRNA target sequence for DNMT1 (NM_001379.1,1318-1336).
gacgaccctgacctcaaat

SEQ ID NO: 25343 - DNA, 19 bp, Homo sapiens
  siRNA target sequence for DNMT1 (NM_001379.1,1320-1338).
cgaccctgacctcaaatat

SEQ ID NO: 25344 - DNA, 19 bp, Homo sapiens
  siRNA target sequence for DNMT1 (NM_001379.1,1416-1434).
gtctggctttgagagttat

SEQ ID NO: 25345 - DNA, 19 bp, Homo sapiens
  siRNA target sequence for DNMT1 (NM_001379.1,1463-1481).
gcttcagtgtgtactgtaa

SEQ ID NO: 25346 - DNA, 19 bp, Homo sapiens
  siRNA target sequence for DNMT1 (NM_001379.1,1511-1529).
gcctcatcgagaagaatat

SEQ ID NO: 25347 - DNA, 19 bp, Homo sapiens
  siRNA target sequence for DNMT1 (NM_001379.1,1515-1533).
catcgagaagaatatcgaa

SEQ ID NO: 25348 - DNA, 19 bp, Homo sapiens
  siRNA target sequence for DNMT1 (NM_001379.1,1547-1565).
gttcagcaaaaccaatcta

SEQ ID NO: 25349 - DNA, 19 bp, Homo sapiens
  siRNA target sequence for DNMT1 (NM_001379.1,1629-1647).
gtggatcactggctttgat

SEQ ID NO: 25350 - DNA, 19 bp, Homo sapiens
  siRNA target sequence for DNMT1 (NM_001379.1,1668-1686).
cggcttcagcacctcattt

SEQ ID NO: 25351 - DNA, 19 bp, Homo sapiens
  siRNA target sequence for DNMT1 (NM_001379.1,1679-1697).
cctcatttgccgaatacat

SEQ ID NO: 25352 - DNA, 19 bp, Homo sapiens
  siRNA target sequence for DNMT1 (NM_001379.1,1715-1733).
ccgagtatgcgcccatatt

SEQ ID NO: 25353 - DNA, 19 bp, Homo sapiens
  siRNA target sequence for DNMT1 (NM_001379.1,1716-1734).
cgagtatgcgcccatattt

SEQ ID NO: 25354 - DNA, 19 bp, Homo sapiens
  siRNA target sequence for DNMT1 (NM_001379.1,1777-1795).
gagttcctgcagagcaatt

SEQ ID NO: 25355 - DNA, 19 bp, Homo sapiens
  siRNA target sequence for DNMT1 (NM_001379.1,1976-1994).
gcatgcgggacctgatcaa

SEQ ID NO: 25356 - DNA, 19 bp, Homo sapiens
  siRNA target sequence for DNMT1 (NM_001379.1,2107-2125).
gtctaccagatcttcgata

SEQ ID NO: 25357 - DNA, 19 bp, Homo sapiens
  siRNA target sequence for DNMT1 (NM_001379.1,2250-2268).
ggacatggttaaatttggt

SEQ ID NO: 25358 - DNA, 19 bp, Homo sapiens
  siRNA target sequence for DNMT1 (NM_001379.1,2344-2362).
gaggaagtcgatgataaca

SEQ ID NO: 25359 - DNA, 19 bp, Homo sapiens
  siRNA target sequence for DNMT1 (NM_001379.1,2458-2476).
gatgggaagaagagttact

SEQ ID NO: 25360 - DNA, 19 bp, Homo sapiens
  siRNA target sequence for DNMT1 (NM_001379.1,2546-2564).
cctcaaaaccgctgtatct

SEQ ID NO: 25361 - DNA, 19 bp, Homo sapiens
  siRNA target sequence for DNMT1 (NM_001379.1,2547-2565).
ctcaaaaccgctgtatcta

SEQ ID NO: 25362 - DNA, 19 bp, Homo sapiens
  siRNA target sequence for DNMT1 (NM_001379.1,2597-2615).
gcaacgggcagatgtttca

SEQ ID NO: 25363 - DNA, 19 bp, Homo sapiens
  siRNA target sequence for DNMT1 (NM_001379.1,2677-2695).
ctgttcttggtggatgaat

SEQ ID NO: 25364 - DNA, 19 bp, Homo sapiens
  siRNA target sequence for DNMT1 (NM_001379.1,2700-2718).
ggacatgcagctttcatat

SEQ ID NO: 25365 - DNA, 19 bp, Homo sapiens
  siRNA target sequence for DNMT1 (NM_001379.1,2701-2719).
gacatgcagctttcatata

SEQ ID NO: 25366 - DNA, 19 bp, Homo sapiens
  siRNA target sequence for DNMT1 (NM_001379.1,2832-2850).
ccagctgtggtatgatcaa

SEQ ID NO: 25367 - DNA, 19 bp, Homo sapiens
  siRNA target sequence for DNMT1 (NM_001379.1,2888-2906).
caacagaggacaacaagtt

SEQ ID NO: 25368 - DNA, 19 bp, Homo sapiens
  siRNA target sequence for DNMT1 (NM_001379.1,2891-2909).
cagaggacaacaagttcaa

SEQ ID NO: 25369 - DNA, 19 bp, Homo sapiens
  siRNA target sequence for DNMT1 (NM_001379.1,2898-2916).
caacaagttcaaattctgt

SEQ ID NO: 25370 - DNA, 19 bp, Homo sapiens
  siRNA target sequence for DNMT1 (NM_001379.1,3148-3166).
gagcactaccggaaatact

SEQ ID NO: 25371 - DNA, 19 bp, Homo sapiens
  siRNA target sequence for DNMT1 (NM_001379.1,3210-3228).
ccgaattggccggatcaaa

SEQ ID NO: 25372 - DNA, 19 bp, Homo sapiens
  siRNA target sequence for DNMT1 (NM_001379.1,3212-3230).
gaattggccggatcaaaga

SEQ ID NO: 25373 - DNA, 19 bp, Homo sapiens
  siRNA target sequence for DNMT1 (NM_001379.1,3286-3304).
cgggtcaacaagttctaca

SEQ ID NO: 25374 - DNA, 19 bp, Homo sapiens
  siRNA target sequence for DNMT1 (NM_001379.1,3489-3507).
cttcctcgaggcctataat

SEQ ID NO: 25375 - DNA, 19 bp, Homo sapiens
  siRNA target sequence for DNMT1 (NM_001379.1,3492-3510).
cctcgaggcctataatgca

SEQ ID NO: 25376 - DNA, 19 bp, Homo sapiens
  siRNA target sequence for DNMT1 (NM_001379.1,3493-3511).
ctcgaggcctataatgcaa

SEQ ID NO: 25377 - DNA, 19 bp, Homo sapiens
  siRNA target sequence for DNMT1 (NM_001379.1,3546-3564).
ccgtagccctggaaacaaa

SEQ ID NO: 25378 - DNA, 19 bp, Homo sapiens
  siRNA target sequence for DNMT1 (NM_001379.1,3617-3635).
cgagcgagccagagataga

SEQ ID NO: 25379 - DNA, 19 bp, Homo sapiens
  siRNA target sequence for DNMT1 (NM_001379.1,3949-3967).
cgcacctactccaagttca

SEQ ID NO: 25380 - DNA, 19 bp, Homo sapiens
  siRNA target sequence for DNMT1 (NM_001379.1,3953-3971).
cctactccaagttcaaaaa

SEQ ID NO: 25381 - DNA, 19 bp, Homo sapiens
  siRNA target sequence for DNMT1 (NM_001379.1,3957-3975).
ctccaagttcaaaaactct

SEQ ID NO: 25382 - DNA, 19 bp, Homo sapiens
  siRNA target sequence for DNMT1 (NM_001379.1,4099-4117).
gtccgcatgggctatcagt

SEQ ID NO: 25383 - DNA, 19 bp, Homo sapiens
  siRNA target sequence for DNMT1 (NM_001379.1,4262-4280).
gcgtggtggtggatgacaa

SEQ ID NO: 25384 - DNA, 19 bp, Homo sapiens
  siRNA target sequence for DNMT1 (NM_001379.1,4697-4715).
ccgcagccaggcagttcaa

SEQ ID NO: 25385 - DNA, 19 bp, Homo sapiens
  siRNA target sequence for DNMT1 (NM_001379.1,4699-4717).
gcagccaggcagttcaaca

SEQ ID NO: 25386 - DNA, 19 bp, Homo sapiens
  siRNA target sequence for DNMT1 (NM_001379.1,4789-4807).
gagtgggacggcttcttca

SEQ ID NO: 25387 - DNA, 19 bp, Homo sapiens
  siRNA target sequence for DNMT1 (NM_001379.1,5002-5020).
ggcttggagatcaagcttt

SEQ ID NO: 25388 - DNA, 19 bp, Homo sapiens
  siRNA target sequence for DNMT1 (NM_001379.1,5043-5061).
gagtgcctcagctaaaata

SEQ ID NO: 25389 - DNA, 19 bp, Homo sapiens
  siRNA target sequence for DNMT1 (NM_001379.1,5048-5066).
cctcagctaaaataaagga

SEQ ID NO: 25390 - DNA, 19 bp, Homo sapiens
  siRNA target sequence for DNMT2 (NM_004412.3,61-79).
cgggtgctggagctataca

SEQ ID NO: 25391 - DNA, 19 bp, Homo sapiens
  siRNA target sequence for DNMT2 (NM_004412.3,156-174).
cactgtcgctaatgaagta

SEQ ID NO: 25392 - DNA, 19 bp, Homo sapiens
  siRNA target sequence for DNMT2 (NM_004412.3,160-178).
gtcgctaatgaagtataca

SEQ ID NO: 25393 - DNA, 19 bp, Homo sapiens
  siRNA target sequence for DNMT2 (NM_004412.3,169-187).
gaagtatacaagtataatt

SEQ ID NO: 25394 - DNA, 19 bp, Homo sapiens
  siRNA target sequence for DNMT2 (NM_004412.3,213-231).
gacgattgaaggcattaca

SEQ ID NO: 25395 - DNA, 19 bp, Homo sapiens
  siRNA target sequence for DNMT2 (NM_004412.3,215-233).
cgattgaaggcattacact

SEQ ID NO: 25396 - DNA, 19 bp, Homo sapiens
  siRNA target sequence for DNMT2 (NM_004412.3,224-242).
gcattacactcgaagagtt

SEQ ID NO: 25397 - DNA, 19 bp, Homo sapiens
  siRNA target sequence for DNMT2 (NM_004412.3,225-243).
cattacactcgaagagttt

SEQ ID NO: 25398 - DNA, 19 bp, Homo sapiens
  siRNA target sequence for DNMT2 (NM_004412.3,234-252).
cgaagagtttgacagatta

SEQ ID NO: 25399 - DNA, 19 bp, Homo sapiens
  siRNA target sequence for DNMT2 (NM_004412.3,238-256).
gagtttgacagattatctt

SEQ ID NO: 25400 - DNA, 19 bp, Homo sapiens
  siRNA target sequence for DNMT2 (NM_004412.3,310-328).
cagggtgatatgactgatt

SEQ ID NO: 25401 - DNA, 19 bp, Homo sapiens
  siRNA target sequence for DNMT2 (NM_004412.3,312-330).
gggtgatatgactgattca

SEQ ID NO: 25402 - DNA, 19 bp, Homo sapiens
  siRNA target sequence for DNMT2 (NM_004412.3,335-353).
cgaatagcttcttacatat

SEQ ID NO: 25403 - DNA, 19 bp, Homo sapiens
  siRNA target sequence for DNMT2 (NM_004412.3,336-354).
gaatagcttcttacatatt

SEQ ID NO: 25404 - DNA, 19 bp, Homo sapiens
  siRNA target sequence for DNMT2 (NM_004412.3,342-360).
cttcttacatattctagat

SEQ ID NO: 25405 - DNA, 19 bp, Homo sapiens
  siRNA target sequence for DNMT2 (NM_004412.3,439-457).
gacctcttgatacaaacaa

SEQ ID NO: 25406 - DNA, 19 bp, Homo sapiens
  siRNA target sequence for DNMT2 (NM_004412.3,441-459).
cctcttgatacaaacaata

SEQ ID NO: 25407 - DNA, 19 bp, Homo sapiens
  siRNA target sequence for DNMT2 (NM_004412.3,518-536).
caaattcaaggctacgata

SEQ ID NO: 25408 - DNA, 19 bp, Homo sapiens
  siRNA target sequence for DNMT2 (NM_004412.3,527-545).
ggctacgatattttcttat

SEQ ID NO: 25409 - DNA, 19 bp, Homo sapiens
  siRNA target sequence for DNMT2 (NM_004412.3,581-599).
cccctggtcaggtactgat

SEQ ID NO: 25410 - DNA, 19 bp, Homo sapiens
  siRNA target sequence for DNMT2 (NM_004412.3,603-621).
gttccccaaaattgaatct

SEQ ID NO: 25411 - DNA, 19 bp, Homo sapiens
  siRNA target sequence for DNMT2 (NM_004412.3,620-638).
ctgtacatccacaaaaata

SEQ ID NO: 25412 - DNA, 19 bp, Homo sapiens
  siRNA target sequence for DNMT2 (NM_004412.3,676-694).
gttgaaccaaatattagct

SEQ ID NO: 25413 - DNA, 19 bp, Homo sapiens
  siRNA target sequence for DNMT2 (NM_004412.3,785-803).
gtgatctctctgtgaaaat

SEQ ID NO: 25414 - DNA, 19 bp, Homo sapiens
  siRNA target sequence for DNMT2 (NM_004412.3,830-848).
ctgacgtgaaccagtatct

SEQ ID NO: 25415 - DNA, 19 bp, Homo sapiens
  siRNA target sequence for DNMT2 (NM_004412.3,832-850).
gacgtgaaccagtatcttt

SEQ ID NO: 25416 - DNA, 19 bp, Homo sapiens
  siRNA target sequence for DNMT2 (NM_004412.3,834-852).
cgtgaaccagtatctttta

SEQ ID NO: 25417 - DNA, 19 bp, Homo sapiens
  siRNA target sequence for DNMT2 (NM_004412.3,861-879).
gtcattgctgcgatatgct

SEQ ID NO: 25418 - DNA, 19 bp, Homo sapiens
  siRNA target sequence for DNMT2 (NM_004412.3,870-888).
gcgatatgctcttctgtta

SEQ ID NO: 25419 - DNA, 19 bp, Homo sapiens
  siRNA target sequence for DNMT2 (NM_004412.3,914-932).
ggtccgtgtgctttaccaa

SEQ ID NO: 25420 - DNA, 19 bp, Homo sapiens
  siRNA target sequence for DNMT2 (NM_004412.3,915-933).
gtccgtgtgctttaccaaa

SEQ ID NO: 25421 - DNA, 19 bp, Homo sapiens
  siRNA target sequence for DNMT2 (NM_004412.3,921-939).
gtgctttaccaaaggatat

SEQ ID NO: 25422 - DNA, 19 bp, Homo sapiens
  siRNA target sequence for DNMT2 (NM_004412.3,956-974).
ggacagggtctgtgttaca

SEQ ID NO: 25423 - DNA, 19 bp, Homo sapiens
  siRNA target sequence for DNMT2 (NM_004412.3,988-1006).
gtgcaggttgagaatatct

SEQ ID NO: 25424 - DNA, 19 bp, Homo sapiens
  siRNA target sequence for DNMT2 (NM_004412.3,994-1012).
gttgagaatatctacaaat

SEQ ID NO: 25425 - DNA, 19 bp, Homo sapiens
  siRNA target sequence for DNMT2 (NM_004412.3,1005-1023).
ctacaaatcccttaccaat

SEQ ID NO: 25426 - DNA, 19 bp, Homo sapiens
  siRNA target sequence for DNMT2 (NM_004412.3,1019-1037).
ccaatttgtcacaagaaga

SEQ ID NO: 25427 - DNA, 19 bp, Homo sapiens
  siRNA target sequence for DNMT2 (NM_004412.3,1060-1078).
cttaaactgcgatatttca

SEQ ID NO: 25428 - DNA, 19 bp, Homo sapiens
  siRNA target sequence for DNMT2 (NM_004412.3,1068-1086).
gcgatatttcactcctaaa

SEQ ID NO: 25429 - DNA, 19 bp, Homo sapiens
  siRNA target sequence for DNMT2 (NM_004412.3,1070-1088).
gatatttcactcctaaaga

SEQ ID NO: 25430 - DNA, 19 bp, Homo sapiens
  siRNA target sequence for DNMT2 (NM_004412.3,1154-1172).
gttatcgcctacttggaaa

SEQ ID NO: 25431 - DNA, 19 bp, Homo sapiens
  siRNA target sequence for DNMT2 (NM_004412.3,1160-1178).
gcctacttggaaatagtct

SEQ ID NO: 25432 - DNA, 19 bp, Homo sapiens
  siRNA target sequence for DNMT2 (NM_004412.3,1182-1200).
cgtgcatgtagtagctaaa

SEQ ID NO: 25433 - DNA, 19 bp, Homo sapiens
  siRNA target sequence for DNMT2 (NM_004412.3,1185-1203).
gcatgtagtagctaaacta

SEQ ID NO: 25434 - DNA, 19 bp, Homo sapiens
  siRNA target sequence for DNMT2 (NM_176084.1,208-226).
gccaagacgattgaagatt

SEQ ID NO: 25435 - DNA, 19 bp, Homo sapiens
  siRNA target sequence for DNMT2 (NM_176085.1,208-226).
gccaagacgattgaaatta

SEQ ID NO: 25436 - DNA, 19 bp, Homo sapiens
  siRNA target sequence for DNMT2 (NM_176085.1,210-228).
caagacgattgaaattaca

SEQ ID NO: 25437 - DNA, 19 bp, Homo sapiens
  siRNA target sequence for DNMT3A (NM_022552.3,502-520).
caggcgcctcagagctatt

SEQ ID NO: 25438 - DNA, 19 bp, Homo sapiens
  siRNA target sequence for DNMT3A (NM_022552.3,914-932).
ggtcattgcaggaatgaat

SEQ ID NO: 25439 - DNA, 19 bp, Homo sapiens
  siRNA target sequence for DNMT3A (NM_022552.3,1058-1076).
cgatgctggggacaagaat

SEQ ID NO: 25440 - DNA, 19 bp, Homo sapiens
  siRNA target sequence for DNMT3A (NM_022552.3,1250-1268).
cggagacggcaaattctca

SEQ ID NO: 25441 - DNA, 19 bp, Homo sapiens
  siRNA target sequence for DNMT3A (NM_022552.3,1293-1311).
ccgctgagctcgttttgca

SEQ ID NO: 25442 - DNA, 19 bp, Homo sapiens
  siRNA target sequence for DNMT3A (NM_022552.3,1320-1338).
caccaggccacgtacaaca

SEQ ID NO: 25443 - DNA, 19 bp, Homo sapiens
  siRNA target sequence for DNMT3A (NM_022552.3,1709-1727).
gcagaagtgccggaacatt

SEQ ID NO: 25444 - DNA, 19 bp, Homo sapiens
  siRNA target sequence for DNMT3A (NM_022552.3,1972-1990).
cccaggcagccattaagga

SEQ ID NO: 25445 - DNA, 19 bp, Homo sapiens
  siRNA target sequence for DNMT3A (NM_022552.3,2062-2080).
cctcccggctccagatgtt

SEQ ID NO: 25446 - DNA, 19 bp, Homo sapiens
  siRNA target sequence for DNMT3A (NM_022552.3,2073-2091).
cagatgttcttcgctaata

SEQ ID NO: 25447 - DNA, 19 bp, Homo sapiens
  siRNA target sequence for DNMT3A (NM_022552.3,2323-2341).
gcgtcacacagaagcatat

SEQ ID NO: 25448 - DNA, 19 bp, Homo sapiens
  siRNA target sequence for DNMT3A (NM_022552.3,2496-2514).
gatgatcgccccttcttct

SEQ ID NO: 25449 - DNA, 19 bp, Homo sapiens
  siRNA target sequence for DNMT3A (NM_022552.3,2557-2575).
gggacatctcgcgatttct

SEQ ID NO: 25450 - DNA, 19 bp, Homo sapiens
  siRNA target sequence for DNMT3A (NM_022552.3,2633-2651).
ctacttctggggtaacctt

SEQ ID NO: 25451 - DNA, 19 bp, Homo sapiens
  siRNA target sequence for DNMT3A (NM_022552.3,2644-2662).
gtaaccttcccggtatgaa

SEQ ID NO: 25452 - DNA, 19 bp, Homo sapiens
  siRNA target sequence for DNMT3A (NM_022552.3,2677-2695).
ccactgtgaatgataagct

SEQ ID NO: 25453 - DNA, 19 bp, Homo sapiens
  siRNA target sequence for DNMT3A (NM_022552.3,2786-2804).
caaagaccagcattttcct

SEQ ID NO: 25454 - DNA, 19 bp, Homo sapiens
  siRNA target sequence for DNMT3A (NM_022552.3,2862-2880).
ggtttcccagtccactata

SEQ ID NO: 25455 - DNA, 19 bp, Homo sapiens
  siRNA target sequence for DNMT3A (NM_022552.3,2964-2982).
gctccgctgaaggagtatt

SEQ ID NO: 25456 - DNA, 19 bp, Homo sapiens
  siRNA target sequence for DNMT3B (NM_006892.3,456-474).
gatcagaggccgaagatca

SEQ ID NO: 25457 - DNA, 19 bp, Homo sapiens
  siRNA target sequence for DNMT3B (NM_006892.3,625-643).
gctgtccgaactcgaaata

SEQ ID NO: 25458 - DNA, 19 bp, Homo sapiens
  siRNA target sequence for DNMT3B (NM_006892.3,626-644).
ctgtccgaactcgaaataa

SEQ ID NO: 25459 - DNA, 19 bp, Homo sapiens
  siRNA target sequence for DNMT3B (NM_006892.3,628-646).
gtccgaactcgaaataaca

SEQ ID NO: 25460 - DNA, 19 bp, Homo sapiens
  siRNA target sequence for DNMT3B (NM_006892.3,631-649).
cgaactcgaaataacaaca

SEQ ID NO: 25461 - DNA, 19 bp, Homo sapiens
  siRNA target sequence for DNMT3B (NM_006892.3,1003-1021).
ctcgtgtggggaaagatca

SEQ ID NO: 25462 - DNA, 19 bp, Homo sapiens
  siRNA target sequence for DNMT3B (NM_006892.3,1071-1089).
caagcgacaggctatgtct

SEQ ID NO: 25463 - DNA, 19 bp, Homo sapiens
  siRNA target sequence for DNMT3B (NM_006892.3,1131-1149).
cgaggtctctgcagacaaa

SEQ ID NO: 25464 - DNA, 19 bp, Homo sapiens
  siRNA target sequence for DNMT3B (NM_006892.3,1165-1183).
ctgttcagccagcacttta

SEQ ID NO: 25465 - DNA, 19 bp, Homo sapiens
  siRNA target sequence for DNMT3B (NM_006892.3,1203-1221).
gctcgtctcctatcgaaaa

SEQ ID NO: 25466 - DNA, 19 bp, Homo sapiens
  siRNA target sequence for DNMT3B (NM_006892.3,1277-1295).
gcagccctggagactcatt

SEQ ID NO: 25467 - DNA, 19 bp, Homo sapiens
  siRNA target sequence for DNMT3B (NM_006892.3,1377-1395).
cacgcaaccagtggttaat

SEQ ID NO: 25468 - DNA, 19 bp, Homo sapiens
  siRNA target sequence for DNMT3B (NM_006892.3,1379-1397).
cgcaaccagtggttaataa

SEQ ID NO: 25469 - DNA, 19 bp, Homo sapiens
  siRNA target sequence for DNMT3B (NM_006892.3,1381-1399).
caaccagtggttaataagt

SEQ ID NO: 25470 - DNA, 19 bp, Homo sapiens
  siRNA target sequence for DNMT3B (NM_006892.3,1415-1433).
caggcagtaggaaattaga

SEQ ID NO: 25471 - DNA, 19 bp, Homo sapiens
  siRNA target sequence for DNMT3B (NM_006892.3,1436-1454).
caaggaaatacgagaacaa

SEQ ID NO: 25472 - DNA, 19 bp, Homo sapiens
  siRNA target sequence for DNMT3B (NM_006892.3,1509-1527).
caagcgcctcaagacaaat

SEQ ID NO: 25473 - DNA, 19 bp, Homo sapiens
  siRNA target sequence for DNMT3B (NM_006892.3,1513-1531).
cgcctcaagacaaattgct

SEQ ID NO: 25474 - DNA, 19 bp, Homo sapiens
  siRNA target sequence for DNMT3B (NM_006892.3,1514-1532).
gcctcaagacaaattgcta

SEQ ID NO: 25475 - DNA, 19 bp, Homo sapiens
  siRNA target sequence for DNMT3B (NM_006892.3,1735-1753).
gatggctatcagtcttact

SEQ ID NO: 25476 - DNA, 19 bp, Homo sapiens
  siRNA target sequence for DNMT3B (NM_006892.3,2048-2066).
gagtcctgtcattgtttga

SEQ ID NO: 25477 - DNA, 19 bp, Homo sapiens
  siRNA target sequence for DNMT3B (NM_006892.3,2081-2099).
gctacctagtcctcaaaga

SEQ ID NO: 25478 - DNA, 19 bp, Homo sapiens
  siRNA target sequence for DNMT3B (NM_006892.3,2173-2191).
cacgaggggaatatcaaat

SEQ ID NO: 25479 - DNA, 19 bp, Homo sapiens
  siRNA target sequence for DNMT3B (NM_006892.3,2200-2218).
gacgtgaggaacatcacaa

SEQ ID NO: 25480 - DNA, 19 bp, Homo sapiens
  siRNA target sequence for DNMT3B (NM_006892.3,2270-2288).
catgcaacgatctctcaaa

SEQ ID NO: 25481 - DNA, 19 bp, Homo sapiens
  siRNA target sequence for DNMT3B (NM_006892.3,2273-2291).
gcaacgatctctcaaatgt

SEQ ID NO: 25482 - DNA, 19 bp, Homo sapiens
  siRNA target sequence for DNMT3B (NM_006892.3,2330-2348).
ggctcttcttcgaatttta

SEQ ID NO: 25483 - DNA, 19 bp, Homo sapiens
  siRNA target sequence for DNMT3B (NM_006892.3,2400-2418).
ctggatgtttgagaatgtt

SEQ ID NO: 25484 - DNA, 19 bp, Homo sapiens
  siRNA target sequence for DNMT3B (NM_006892.3,2402-2420).
ggatgtttgagaatgttgt

SEQ ID NO: 25485 - DNA, 19 bp, Homo sapiens
  siRNA target sequence for DNMT3B (NM_006892.3,2466-2484).
gtgtaatccagtgatgatt

SEQ ID NO: 25486 - DNA, 19 bp, Homo sapiens
  siRNA target sequence for DNMT3B (NM_006892.3,2478-2496).
gatgattgatgccatcaaa

SEQ ID NO: 25487 - DNA, 19 bp, Homo sapiens
  siRNA target sequence for DNMT3B (NM_006892.3,2481-2499).
gattgatgccatcaaagtt

SEQ ID NO: 25488 - DNA, 19 bp, Homo sapiens
  siRNA target sequence for DNMT3B (NM_006892.3,2552-2570).
ggcccgtgatagcatcaaa

SEQ ID NO: 25489 - DNA, 19 bp, Homo sapiens
  siRNA target sequence for DNMT3B (NM_006892.3,2554-2572).
cccgtgatagcatcaaaga

SEQ ID NO: 25490 - DNA, 19 bp, Homo sapiens
  siRNA target sequence for DNMT3B (NM_006892.3,2587-2605).
ctgcaggactgcttggaat

SEQ ID NO: 25491 - DNA, 19 bp, Homo sapiens
  siRNA target sequence for DNMT3B (NM_006892.3,2592-2610).
ggactgcttggaatacaat

SEQ ID NO: 25492 - DNA, 19 bp, Homo sapiens
  siRNA target sequence for DNMT3B (NM_006892.3,2593-2611).
gactgcttggaatacaata

SEQ ID NO: 25493 - DNA, 19 bp, Homo sapiens
  siRNA target sequence for DNMT3B (NM_006892.3,2597-2615).
gcttggaatacaataggat

SEQ ID NO: 25494 - DNA, 19 bp, Homo sapiens
  siRNA target sequence for DNMT3B (NM_006892.3,2598-2616).
cttggaatacaataggata

SEQ ID NO: 25495 - DNA, 19 bp, Homo sapiens
  siRNA target sequence for DNMT3B (NM_006892.3,2607-2625).
caataggatagccaagtta

SEQ ID NO: 25496 - DNA, 19 bp, Homo sapiens
  siRNA target sequence for DNMT3B (NM_006892.3,2649-2667).
caagtcgaactcgatcaaa

SEQ ID NO: 25497 - DNA, 19 bp, Homo sapiens
  siRNA target sequence for DNMT3B (NM_006892.3,2726-2744).
gcactgagctcgaaaggat

SEQ ID NO: 25498 - DNA, 19 bp, Homo sapiens
  siRNA target sequence for DNTT (NM_004088.2,117-135).
cctctcctcaagacatcaa

SEQ ID NO: 25499 - DNA, 19 bp, Homo sapiens
  siRNA target sequence for DNTT (NM_004088.2,143-161).
gatttggtcgtcttcattt

SEQ ID NO: 25500 - DNA, 19 bp, Homo sapiens
  siRNA target sequence for DNTT (NM_004088.2,353-371).
gtctcctggctgatcgaat

SEQ ID NO: 25501 - DNA, 19 bp, Homo sapiens
  siRNA target sequence for DNTT (NM_004088.2,357-375).
cctggctgatcgaatgcat

SEQ ID NO: 25502 - DNA, 19 bp, Homo sapiens
  siRNA target sequence for DNTT (NM_004088.2,358-376).
ctggctgatcgaatgcata

SEQ ID NO: 25503 - DNA, 19 bp, Homo sapiens
  siRNA target sequence for DNTT (NM_004088.2,419-437).
gttgtgagaagagactatt

SEQ ID NO: 25504 - DNA, 19 bp, Homo sapiens
  siRNA target sequence for DNTT (NM_004088.2,463-481).
gaagactccaccaattgct

SEQ ID NO: 25505 - DNA, 19 bp, Homo sapiens
  siRNA target sequence for DNTT (NM_004088.2,470-488).
ccaccaattgctgtacaaa

SEQ ID NO: 25506 - DNA, 19 bp, Homo sapiens
  siRNA target sequence for DNTT (NM_004088.2,471-489).
caccaattgctgtacaaaa

SEQ ID NO: 25507 - DNA, 19 bp, Homo sapiens
  siRNA target sequence for DNTT (NM_004088.2,473-491).
ccaattgctgtacaaaaga

SEQ ID NO: 25508 - DNA, 19 bp, Homo sapiens
  siRNA target sequence for DNTT (NM_004088.2,474-492).
caattgctgtacaaaagat

SEQ ID NO: 25509 - DNA, 19 bp, Homo sapiens
  siRNA target sequence for DNTT (NM_004088.2,547-565).
cacggatgcctttgatata

SEQ ID NO: 25510 - DNA, 19 bp, Homo sapiens
  siRNA target sequence for DNTT (NM_004088.2,549-567).
cggatgcctttgatatact

SEQ ID NO: 25511 - DNA, 19 bp, Homo sapiens
  siRNA target sequence for DNTT (NM_004088.2,642-660).
ctctgccattcacaatcat

SEQ ID NO: 25512 - DNA, 19 bp, Homo sapiens
  siRNA target sequence for DNTT (NM_004088.2,699-717).
ccaaggtgaagggtatcat

SEQ ID NO: 25513 - DNA, 19 bp, Homo sapiens
  siRNA target sequence for DNTT (NM_004088.2,700-718).
caaggtgaagggtatcata

SEQ ID NO: 25514 - DNA, 19 bp, Homo sapiens
  siRNA target sequence for DNTT (NM_004088.2,715-733).
catagaggagattattgaa

SEQ ID NO: 25515 - DNA, 19 bp, Homo sapiens
  siRNA target sequence for DNTT (NM_004088.2,812-830).
ggagtggggctgaagactt

SEQ ID NO: 25516 - DNA, 19 bp, Homo sapiens
  siRNA target sequence for DNTT (NM_004088.2,915-933).
caggatttctgtattatga

SEQ ID NO: 25517 - DNA, 19 bp, Homo sapiens
  siRNA target sequence for DNTT (NM_004088.2,972-990).
ccgtcagtgtgctggttaa

SEQ ID NO: 25518 - DNA, 19 bp, Homo sapiens
  siRNA target sequence for DNTT (NM_004088.2,1041-1059).
ggttccggaggggtaagaa

SEQ ID NO: 25519 - DNA, 19 bp, Homo sapiens
  siRNA target sequence for DNTT (NM_004088.2,1147-1165).
ggaaaagaagggattactt

SEQ ID NO: 25520 - DNA, 19 bp, Homo sapiens
  siRNA target sequence for DNTT (NM_004088.2,1175-1193).
gaccttgtggagtcaacat

SEQ ID NO: 25521 - DNA, 19 bp, Homo sapiens
  siRNA target sequence for DNTT (NM_004088.2,1329-1347).
ccatccgtgtggatttagt

SEQ ID NO: 25522 - DNA, 19 bp, Homo sapiens
  siRNA target sequence for DNTT (NM_004088.2,1330-1348).
catccgtgtggatttagtt

SEQ ID NO: 25523 - DNA, 19 bp, Homo sapiens
  siRNA target sequence for DNTT (NM_004088.2,1392-1410).
ctggctcccggcagtttga

SEQ ID NO: 25524 - DNA, 19 bp, Homo sapiens
  siRNA target sequence for DNTT (NM_004088.2,1434-1452).
cacatgagcggaagatgat

SEQ ID NO: 25525 - DNA, 19 bp, Homo sapiens
  siRNA target sequence for DNTT (NM_004088.2,1447-1465).
gatgattctggataaccat

SEQ ID NO: 25526 - DNA, 19 bp, Homo sapiens
  siRNA target sequence for DNTT (NM_004088.2,1454-1472).
ctggataaccatgctttat

SEQ ID NO: 25527 - DNA, 19 bp, Homo sapiens
  siRNA target sequence for DNTT (NM_004088.2,1456-1474).
ggataaccatgctttatat

SEQ ID NO: 25528 - DNA, 19 bp, Homo sapiens
  siRNA target sequence for DNTT (NM_004088.2,1526-1544).
gcgcatctgggattggatt

SEQ ID NO: 25529 - DNA, 19 bp, Homo sapiens
  siRNA target sequence for DNTT (NM_004088.2,1527-1545).
cgcatctgggattggatta

SEQ ID NO: 25530 - DNA, 19 bp, Homo sapiens
  siRNA target sequence for DNTT (NM_004088.2,1528-1546).
gcatctgggattggattat

SEQ ID NO: 25531 - DNA, 19 bp, Homo sapiens
  siRNA target sequence for DNTT (NM_004088.2,1529-1547).
catctgggattggattata

SEQ ID NO: 25532 - DNA, 19 bp, Homo sapiens
  siRNA target sequence for DOT1L (NM_032482.1,103-121).
ccgctgccggtctacgata

SEQ ID NO: 25533 - DNA, 19 bp, Homo sapiens
  siRNA target sequence for DOT1L (NM_032482.1,104-122).
cgctgccggtctacgataa

SEQ ID NO: 25534 - DNA, 19 bp, Homo sapiens
  siRNA target sequence for DOT1L (NM_032482.1,108-126).
gccggtctacgataaacat

SEQ ID NO: 25535 - DNA, 19 bp, Homo sapiens
  siRNA target sequence for DOT1L (NM_032482.1,110-128).
cggtctacgataaacatca

SEQ ID NO: 25536 - DNA, 19 bp, Homo sapiens
  siRNA target sequence for DOT1L (NM_032482.1,195-213).
cgctatggagaattacgtt

SEQ ID NO: 25537 - DNA, 19 bp, Homo sapiens
  siRNA target sequence for DOT1L (NM_032482.1,196-214).
gctatggagaattacgttt

SEQ ID NO: 25538 - DNA, 19 bp, Homo sapiens
  siRNA target sequence for DOT1L (NM_032482.1,254-272).
ggctctgcgacaagtacaa

SEQ ID NO: 25539 - DNA, 19 bp, Homo sapiens
  siRNA target sequence for DOT1L (NM_032482.1,350-368).
gactcctgcgccatatcct

SEQ ID NO: 25540 - DNA, 19 bp, Homo sapiens
  siRNA target sequence for DOT1L (NM_032482.1,497-515).
ccgacgacgacctgtttgt

SEQ ID NO: 25541 - DNA, 19 bp, Homo sapiens
  siRNA target sequence for DOT1L (NM_032482.1,566-584).
ccaactgcaaacatcacta

SEQ ID NO: 25542 - DNA, 19 bp, Homo sapiens
  siRNA target sequence for DOT1L (NM_032482.1,567-585).
caactgcaaacatcactat

SEQ ID NO: 25543 - DNA, 19 bp, Homo sapiens
  siRNA target sequence for DOT1L (NM_032482.1,732-750).
cgccaacacgagtgttata

SEQ ID NO: 25544 - DNA, 19 bp, Homo sapiens
  siRNA target sequence for DOT1L (NM_032482.1,733-751).
gccaacacgagtgttatat

SEQ ID NO: 25545 - DNA, 19 bp, Homo sapiens
  siRNA target sequence for DOT1L (NM_032482.1,734-752).
ccaacacgagtgttatatt

SEQ ID NO: 25546 - DNA, 19 bp, Homo sapiens
  siRNA target sequence for DOT1L (NM_032482.1,799-817).
gagcggtttgcaaacatga

SEQ ID NO: 25547 - DNA, 19 bp, Homo sapiens
  siRNA target sequence for DOT1L (NM_032482.1,854-872).
cacctctgaacttcagaat

SEQ ID NO: 25548 - DNA, 19 bp, Homo sapiens
  siRNA target sequence for DOT1L (NM_032482.1,869-887).
gaataaacagtagaaactt

SEQ ID NO: 25549 - DNA, 19 bp, Homo sapiens
  siRNA target sequence for DOT1L (NM_032482.1,968-986).
cctactacctgcacactat

SEQ ID NO: 25550 - DNA, 19 bp, Homo sapiens
  siRNA target sequence for DOT1L (NM_032482.1,988-1006).
gaccgcaccatacttgaaa

SEQ ID NO: 25551 - DNA, 19 bp, Homo sapiens
  siRNA target sequence for DOT1L (NM_032482.1,991-1009).
cgcaccatacttgaaaact

SEQ ID NO: 25552 - DNA, 19 bp, Homo sapiens
  siRNA target sequence for DOT1L (NM_032482.1,1381-1399).
ccccaggatgcctacagat

SEQ ID NO: 25553 - DNA, 19 bp, Homo sapiens
  siRNA target sequence for DOT1L (NM_032482.1,1484-1502).
cgctgcagaagcttctaga

SEQ ID NO: 25554 - DNA, 19 bp, Homo sapiens
  siRNA target sequence for DOT1L (NM_032482.1,1670-1688).
ggctgtttcagcaaaaatt

SEQ ID NO: 25555 - DNA, 19 bp, Homo sapiens
  siRNA target sequence for DOT1L (NM_032482.1,1715-1733).
cctacaacgacctgattca

SEQ ID NO: 25556 - DNA, 19 bp, Homo sapiens
  siRNA target sequence for DOT1L (NM_032482.1,2335-2353).
gccgcacccgactacacta

SEQ ID NO: 25557 - DNA, 19 bp, Homo sapiens
  siRNA target sequence for DOT1L (NM_032482.1,2763-2781).
cccctcgtccacacttgaa

SEQ ID NO: 25558 - DNA, 19 bp, Homo sapiens
  siRNA target sequence for DOT1L (NM_032482.1,3372-3390).
cgtcgctggccttttcaca

SEQ ID NO: 25559 - DNA, 19 bp, Homo sapiens
  siRNA target sequence for DOT1L (NM_032482.1,3422-3440).
ccatggtcagtaacatcaa

SEQ ID NO: 25560 - DNA, 19 bp, Homo sapiens
  siRNA target sequence for DOT1L (NM_032482.1,3657-3675).
ctccttagaaagcaaatct

SEQ ID NO: 25561 - DNA, 19 bp, Homo sapiens
  siRNA target sequence for DOT1L (NM_032482.1,3678-3696).
cccgaaaaccttggaaaat

SEQ ID NO: 25562 - DNA, 19 bp, Homo sapiens
  siRNA target sequence for DOT1L (NM_032482.1,3733-3751).
ggcgagccagtcaatagca

SEQ ID NO: 25563 - DNA, 19 bp, Homo sapiens
  siRNA target sequence for DOT1L (NM_032482.1,4006-4024).
gcggacctgagtttacaca

SEQ ID NO: 25564 - DNA, 19 bp, Homo sapiens
  siRNA target sequence for DPF1 (NM_004647.1,308-326).
gtgaagcacccctgaagaa

SEQ ID NO: 25565 - DNA, 19 bp, Homo sapiens
  siRNA target sequence for DPF1 (NM_004647.1,380-398).
cgggggagaagaagattga

SEQ ID NO: 25566 - DNA, 19 bp, Homo sapiens
  siRNA target sequence for DPF1 (NM_004647.1,577-595).
cgagacaagccgtatgtct

SEQ ID NO: 25567 - DNA, 19 bp, Homo sapiens
  siRNA target sequence for DPF1 (NM_004647.1,587-605).
cgtatgtctgtgataagtt

SEQ ID NO: 25568 - DNA, 19 bp, Homo sapiens
  siRNA target sequence for DPF1 (NM_004647.1,598-616).
gataagttttacaaagaat

SEQ ID NO: 25569 - DNA, 19 bp, Homo sapiens
  siRNA target sequence for DPF1 (NM_004647.1,773-791).
gacacccctcgtgtttaca

SEQ ID NO: 25570 - DNA, 19 bp, Homo sapiens
  siRNA target sequence for DPF1 (NM_004647.1,775-793).
cacccctcgtgtttacaat

SEQ ID NO: 25571 - DNA, 19 bp, Homo sapiens
  siRNA target sequence for DPF1 (NM_004647.1,778-796).
ccctcgtgtttacaattca

SEQ ID NO: 25572 - DNA, 19 bp, Homo sapiens
  siRNA target sequence for DPF1 (NM_004647.1,790-808).
caattcacggtgaacatga

SEQ ID NO: 25573 - DNA, 19 bp, Homo sapiens
  siRNA target sequence for DPF2 (NM_006268.3,20-38).
ctgtggtggagaatgtagt

SEQ ID NO: 25574 - DNA, 19 bp, Homo sapiens
  siRNA target sequence for DPF2 (NM_006268.3,151-169).
ggagtagcccagagcaatt

SEQ ID NO: 25575 - DNA, 19 bp, Homo sapiens
  siRNA target sequence for DPF2 (NM_006268.3,154-172).
gtagcccagagcaattgtt

SEQ ID NO: 25576 - DNA, 19 bp, Homo sapiens
  siRNA target sequence for DPF2 (NM_006268.3,287-305).
gactttccttcccatctat

SEQ ID NO: 25577 - DNA, 19 bp, Homo sapiens
  siRNA target sequence for DPF2 (NM_006268.3,413-431).
cggatccccgagttgatga

SEQ ID NO: 25578 - DNA, 19 bp, Homo sapiens
  siRNA target sequence for DPF2 (NM_006268.3,414-432).
ggatccccgagttgatgat

SEQ ID NO: 25579 - DNA, 19 bp, Homo sapiens
  siRNA target sequence for DPF2 (NM_006268.3,550-568).
cggggaaaggggaaatcca

SEQ ID NO: 25580 - DNA, 19 bp, Homo sapiens
  siRNA target sequence for DPF2 (NM_006268.3,811-829).
gccttgcccaacaactact

SEQ ID NO: 25581 - DNA, 19 bp, Homo sapiens
  siRNA target sequence for DPF2 (NM_006268.3,839-857).
gcctgggggactcaaagat

SEQ ID NO: 25582 - DNA, 19 bp, Homo sapiens
  siRNA target sequence for DPF2 (NM_006268.3,840-858).
cctgggggactcaaagatt

SEQ ID NO: 25583 - DNA, 19 bp, Homo sapiens
  siRNA target sequence for DPF2 (NM_006268.3,841-859).
ctgggggactcaaagatta

SEQ ID NO: 25584 - DNA, 19 bp, Homo sapiens
  siRNA target sequence for DPF2 (NM_006268.3,987-1005).
cgagtgcaaatgttgcaat

SEQ ID NO: 25585 - DNA, 19 bp, Homo sapiens
  siRNA target sequence for DR1 (NM_001938.1,558-576).
cgtctggcaacgatgatga

SEQ ID NO: 25586 - DNA, 19 bp, Homo sapiens
  siRNA target sequence for DR1 (NM_001938.1,559-577).
gtctggcaacgatgatgat

SEQ ID NO: 25587 - DNA, 19 bp, Homo sapiens
  siRNA target sequence for DR1 (NM_001938.1,561-579).
ctggcaacgatgatgatct

SEQ ID NO: 25588 - DNA, 19 bp, Homo sapiens
  siRNA target sequence for DR1 (NM_001938.1,587-605).
cccagagctgctatcaata

SEQ ID NO: 25589 - DNA, 19 bp, Homo sapiens
  siRNA target sequence for DR1 (NM_001938.1,588-606).
ccagagctgctatcaataa

SEQ ID NO: 25590 - DNA, 19 bp, Homo sapiens
  siRNA target sequence for DR1 (NM_001938.1,665-683).
gtgaactgctgcactgaat

SEQ ID NO: 25591 - DNA, 19 bp, Homo sapiens
  siRNA target sequence for DR1 (NM_001938.1,678-696).
ctgaattcattcaccttat

SEQ ID NO: 25592 - DNA, 19 bp, Homo sapiens
  siRNA target sequence for DR1 (NM_001938.1,685-703).
cattcaccttatatcttct

SEQ ID NO: 25593 - DNA, 19 bp, Homo sapiens
  siRNA target sequence for DR1 (NM_001938.1,747-765).
caccagagcatgtcataca

SEQ ID NO: 25594 - DNA, 19 bp, Homo sapiens
  siRNA target sequence for DR1 (NM_001938.1,856-874).
ggccagttctcgtttggaa

SEQ ID NO: 25595 - DNA, 19 bp, Homo sapiens
  siRNA target sequence for DR1 (NM_001938.1,857-875).
gccagttctcgtttggaaa

SEQ ID NO: 25596 - DNA, 19 bp, Homo sapiens
  siRNA target sequence for DR1 (NM_001938.1,858-876).
ccagttctcgtttggaaaa

SEQ ID NO: 25597 - DNA, 19 bp, Homo sapiens
  siRNA target sequence for DR1 (NM_001938.1,861-879).
gttctcgtttggaaaacct

SEQ ID NO: 25598 - DNA, 19 bp, Homo sapiens
  siRNA target sequence for DR1 (NM_001938.1,1014-1032).
cctcagccagtgcatctaa

SEQ ID NO: 25599 - DNA, 19 bp, Homo sapiens
  siRNA target sequence for DR1 (NM_001938.1,1017-1035).
cagccagtgcatctaatca

SEQ ID NO: 25600 - DNA, 19 bp, Homo sapiens
  siRNA target sequence for DR1 (NM_001938.1,1041-1059).
gatcttctcaggatgaaga

SEQ ID NO: 25601 - DNA, 19 bp, Homo sapiens
  siRNA target sequence for DRAP1 (NM_006442.2,342-360).
gcggtgcctgtcatcatct

SEQ ID NO: 25602 - DNA, 19 bp, Homo sapiens
  siRNA target sequence for DRAP1 (NM_006442.2,608-626).
cggtgggatgggaacgaaa

SEQ ID NO: 25603 - DNA, 19 bp, Homo sapiens
  siRNA target sequence for DRF1 (NM_025104.2,480-498).
gtccagccgcagagaagta

SEQ ID NO: 25604 - DNA, 19 bp, Homo sapiens
  siRNA target sequence for DRF1 (NM_025104.2,482-500).
ccagccgcagagaagtaaa

SEQ ID NO: 25605 - DNA, 19 bp, Homo sapiens
  siRNA target sequence for DRF1 (NM_025104.2,572-590).
cggccatggttgatccaaa

SEQ ID NO: 25606 - DNA, 19 bp, Homo sapiens
  siRNA target sequence for DRF1 (NM_025104.2,573-591).
ggccatggttgatccaaaa

SEQ ID NO: 25607 - DNA, 19 bp, Homo sapiens
  siRNA target sequence for DRF1 (NM_145663.1,760-778).
cacgtggatgaaatgatga

SEQ ID NO: 25608 - DNA, 19 bp, Homo sapiens
  siRNA target sequence for DRF1 (NM_145663.1,795-813).
gtctcttgcgtctttatgt

SEQ ID NO: 25609 - DNA, 19 bp, Homo sapiens
  siRNA target sequence for DRF1 (NM_145663.1,797-815).
ctcttgcgtctttatgtgt

SEQ ID NO: 25610 - DNA, 19 bp, Homo sapiens
  siRNA target sequence for DRF1 (NM_145663.1,802-820).
gcgtctttatgtgtgaaaa

SEQ ID NO: 25611 - DNA, 19 bp, Homo sapiens
  siRNA target sequence for DRF1 (NM_145663.1,903-921).
cctcaaaatcgaagatgaa

SEQ ID NO: 25612 - DNA, 19 bp, Homo sapiens
  siRNA target sequence for DRF1 (NM_145663.1,943-961).
catcatcagtttaaatcct

SEQ ID NO: 25613 - DNA, 19 bp, Homo sapiens
  siRNA target sequence for DRF1 (NM_145663.1,1184-1202).
ccctggaagcccatctata

SEQ ID NO: 25614 - DNA, 19 bp, Homo sapiens
  siRNA target sequence for DRF1 (NM_145663.1,1185-1203).
cctggaagcccatctatat

SEQ ID NO: 25615 - DNA, 19 bp, Homo sapiens
  siRNA target sequence for DRF1 (NM_145663.1,1428-1446).
gcagcgatggacagaatca

SEQ ID NO: 25616 - DNA, 19 bp, Homo sapiens
  siRNA target sequence for DRF1 (NM_145663.1,1708-1726).
gccagaccgtggcttatgt

SEQ ID NO: 25617 - DNA, 19 bp, Homo sapiens
  siRNA target sequence for DRF1 (NM_145663.1,1739-1757).
gggttcgtccctttccttt

SEQ ID NO: 25618 - DNA, 19 bp, Homo sapiens
  siRNA target sequence for DRF1 (NM_145663.1,1823-1841).
cctgtctcagacttggata

SEQ ID NO: 25619 - DNA, 19 bp, Homo sapiens
  siRNA target sequence for DRF1 (NM_145663.1,1828-1846).
ctcagacttggataccttt

SEQ ID NO: 25620 - DNA, 19 bp, Homo sapiens
  siRNA target sequence for DRF1 (NM_145663.1,1879-1897).
gttcgggtgccctcattgt

SEQ ID NO: 25621 - DNA, 19 bp, Homo sapiens
  siRNA target sequence for DRF1 (NM_145663.1,1882-1900).
cgggtgccctcattgtcaa

SEQ ID NO: 25622 - DNA, 19 bp, Homo sapiens
  siRNA target sequence for DRF1 (NM_145663.1,1947-1965).
cccctcctatctcaatgat

SEQ ID NO: 25623 - DNA, 19 bp, Homo sapiens
  siRNA target sequence for DRF1 (NM_145663.1,1950-1968).
ctcctatctcaatgatcat

SEQ ID NO: 25624 - DNA, 19 bp, Homo sapiens
  siRNA target sequence for DRF1 (NM_145663.1,1952-1970).
cctatctcaatgatcatga

SEQ ID NO: 25625 - DNA, 19 bp, Homo sapiens
  siRNA target sequence for DRIL2 (NM_006465.1,393-411).
cagtggcccaagtgtttga

SEQ ID NO: 25626 - DNA, 19 bp, Homo sapiens
  siRNA target sequence for DRIL2 (NM_006465.1,508-526).
ccaggctgcttcaaaatat

SEQ ID NO: 25627 - DNA, 19 bp, Homo sapiens
  siRNA target sequence for DRIL2 (NM_006465.1,565-583).
ggcacccatgtccaatcta

SEQ ID NO: 25628 - DNA, 19 bp, Homo sapiens
  siRNA target sequence for DRIL2 (NM_006465.1,601-619).
cccaccacatggacaacaa

SEQ ID NO: 25629 - DNA, 19 bp, Homo sapiens
  siRNA target sequence for DRIL2 (NM_006465.1,762-780).
gagagatctctcgagattt

SEQ ID NO: 25630 - DNA, 19 bp, Homo sapiens
  siRNA target sequence for DRIL2 (NM_006465.1,802-820).
cggtgatcctgaaaggaaa

SEQ ID NO: 25631 - DNA, 19 bp, Homo sapiens
  siRNA target sequence for DRIL2 (NM_006465.1,830-848).
gatgacctcttcgtcttta

SEQ ID NO: 25632 - DNA, 19 bp, Homo sapiens
  siRNA target sequence for DRLM (NM_153757.1,262-280).
ccaaagccgaaaaatgact

SEQ ID NO: 25633 - DNA, 19 bp, Homo sapiens
  siRNA target sequence for DRLM (NM_153757.1,269-287).
cgaaaaatgactttatcga

SEQ ID NO: 25634 - DNA, 19 bp, Homo sapiens
  siRNA target sequence for DRLM (NM_153757.1,292-310).
ctgcctaattcggtgaaat

SEQ ID NO: 25635 - DNA, 19 bp, Homo sapiens
  siRNA target sequence for DRLM (NM_153757.1,339-357).
gaagcgatgcgataagata

SEQ ID NO: 25636 - DNA, 19 bp, Homo sapiens
  siRNA target sequence for DRLM (NM_153757.1,342-360).
gcgatgcgataagatagaa

SEQ ID NO: 25637 - DNA, 19 bp, Homo sapiens
  siRNA target sequence for DRLM (NM_153757.1,363-381).
caaatttgataaggaattt

SEQ ID NO: 25638 - DNA, 19 bp, Homo sapiens
  siRNA target sequence for DRLM (NM_153757.1,604-622).
cctgatgacgccaagaagt

SEQ ID NO: 25639 - DNA, 19 bp, Homo sapiens
  siRNA target sequence for E1B-AP5 (NM_007040.2,506-524).
cgatacccaagtcatcaaa

SEQ ID NO: 25640 - DNA, 19 bp, Homo sapiens
  siRNA target sequence for E1B-AP5 (NM_007040.2,550-568).
ggagaccactggaaatgga

SEQ ID NO: 25641 - DNA, 19 bp, Homo sapiens
  siRNA target sequence for E1B-AP5 (NM_007040.2,580-598).
cctatcgtccagaaatgaa

SEQ ID NO: 25642 - DNA, 19 bp, Homo sapiens
  siRNA target sequence for E1B-AP5 (NM_007040.2,640-658).
ctgaagcttctcaactcaa

SEQ ID NO: 25643 - DNA, 19 bp, Homo sapiens
  siRNA target sequence for E1B-AP5 (NM_007040.2,661-679).
cagacaggcagcaattcca

SEQ ID NO: 25644 - DNA, 19 bp, Homo sapiens
  siRNA target sequence for E1B-AP5 (NM_007040.2,804-822).
gttgctattgacacctata

SEQ ID NO: 25645 - DNA, 19 bp, Homo sapiens
  siRNA target sequence for E1B-AP5 (NM_007040.2,807-825).
gctattgacacctataact

SEQ ID NO: 25646 - DNA, 19 bp, Homo sapiens
  siRNA target sequence for E1B-AP5 (NM_007040.2,865-883).
gctatccgctcacaattga

SEQ ID NO: 25647 - DNA, 19 bp, Homo sapiens
  siRNA target sequence for E1B-AP5 (NM_007040.2,877-895).
caattgagggctttgcata

SEQ ID NO: 25648 - DNA, 19 bp, Homo sapiens
  siRNA target sequence for E1B-AP5 (NM_007040.2,942-960).
gtatgcttcgagatgaaga

SEQ ID NO: 25649 - DNA, 19 bp, Homo sapiens
  siRNA target sequence for E1B-AP5 (NM_007040.2,1106-1124).
caccaatagccggtttgaa

SEQ ID NO: 25650 - DNA, 19 bp, Homo sapiens
  siRNA target sequence for E1B-AP5 (NM_007040.2,1108-1126).
ccaatagccggtttgaaaa

SEQ ID NO: 25651 - DNA, 19 bp, Homo sapiens
  siRNA target sequence for E1B-AP5 (NM_007040.2,1303-1321).
gcgcagtggagttcaactt

SEQ ID NO: 25652 - DNA, 19 bp, Homo sapiens
  siRNA target sequence for E1B-AP5 (NM_007040.2,1477-1495).
ccacatgggccatcaaaca

SEQ ID NO: 25653 - DNA, 19 bp, Homo sapiens
  siRNA target sequence for E1B-AP5 (NM_007040.2,1661-1679).
ccgcaagaaacgcaactat

SEQ ID NO: 25654 - DNA, 19 bp, Homo sapiens
  siRNA target sequence for E1B-AP5 (NM_007040.2,1662-1680).
cgcaagaaacgcaactata

SEQ ID NO: 25655 - DNA, 19 bp, Homo sapiens
  siRNA target sequence for E1B-AP5 (NM_007040.2,1663-1681).
gcaagaaacgcaactatat

SEQ ID NO: 25656 - DNA, 19 bp, Homo sapiens
  siRNA target sequence for E1B-AP5 (NM_007040.2,1667-1685).
gaaacgcaactatatccta

SEQ ID NO: 25657 - DNA, 19 bp, Homo sapiens
  siRNA target sequence for E1B-AP5 (NM_007040.2,1672-1690).
gcaactatatcctagatca

SEQ ID NO: 25658 - DNA, 19 bp, Homo sapiens
  siRNA target sequence for E1B-AP5 (NM_007040.2,1706-1724).
gtcagcccagagacgaaaa

SEQ ID NO: 25659 - DNA, 19 bp, Homo sapiens
  siRNA target sequence for E1B-AP5 (NM_007040.2,1708-1726).
cagcccagagacgaaaaat

SEQ ID NO: 25660 - DNA, 19 bp, Homo sapiens
  siRNA target sequence for E1B-AP5 (NM_007040.2,1748-1766).
gcgcaaagctattgtaatt

SEQ ID NO: 25661 - DNA, 19 bp, Homo sapiens
  siRNA target sequence for E1B-AP5 (NM_007040.2,1749-1767).
cgcaaagctattgtaattt

SEQ ID NO: 25662 - DNA, 19 bp, Homo sapiens
  siRNA target sequence for E1B-AP5 (NM_007040.2,1751-1769).
caaagctattgtaatttgt

SEQ ID NO: 25663 - DNA, 19 bp, Homo sapiens
  siRNA target sequence for E1B-AP5 (NM_007040.2,1784-1802).
cctaaaagaccgaacaata

SEQ ID NO: 25664 - DNA, 19 bp, Homo sapiens
  siRNA target sequence for E1B-AP5 (NM_007040.2,1785-1803).
ctaaaagaccgaacaataa

SEQ ID NO: 25665 - DNA, 19 bp, Homo sapiens
  siRNA target sequence for E1B-AP5 (NM_007040.2,1834-1852).
cagatcatgcggtcttaga

SEQ ID NO: 25666 - DNA, 19 bp, Homo sapiens
  siRNA target sequence for E1B-AP5 (NM_007040.2,1836-1854).
gatcatgcggtcttagaaa

SEQ ID NO: 25667 - DNA, 19 bp, Homo sapiens
  siRNA target sequence for E1B-AP5 (NM_007040.2,2046-2064).
ggcttccagcgctatgaaa

SEQ ID NO: 25668 - DNA, 19 bp, Homo sapiens
  siRNA target sequence for E1B-AP5 (NM_007040.2,2346-2364).
ggggccagcacctacaata

SEQ ID NO: 25669 - DNA, 19 bp, Homo sapiens
  siRNA target sequence for E1B-AP5 (NM_007040.2,2347-2365).
gggccagcacctacaataa

SEQ ID NO: 25670 - DNA, 19 bp, Homo sapiens
  siRNA target sequence for E1B-AP5 (NM_007040.2,2349-2367).
gccagcacctacaataaga

SEQ ID NO: 25671 - DNA, 19 bp, Homo sapiens
  siRNA target sequence for E1B-AP5 (NM_007040.2,2382-2400).
ggctcaagcgccaatacca

SEQ ID NO: 25672 - DNA, 19 bp, Homo sapiens
  siRNA target sequence for E1B-AP5 (NM_007040.2,2427-2445).
cctccacagccgagttaca

SEQ ID NO: 25673 - DNA, 19 bp, Homo sapiens
  siRNA target sequence for E1B-AP5 (NM_007040.2,2511-2529).
ccaccacctgcctacaact

SEQ ID NO: 25674 - DNA, 19 bp, Homo sapiens
  siRNA target sequence for E1B-AP5 (NM_007040.2,2512-2530).
caccacctgcctacaacta

SEQ ID NO: 25675 - DNA, 19 bp, Homo sapiens
  siRNA target sequence for E1B-AP5 (NM_007040.2,2533-2551).
ggagctacggcggttacaa

SEQ ID NO: 25676 - DNA, 19 bp, Homo sapiens
  siRNA target sequence for EBF (NM_024007.2,594-612).
ccaataacggaattcacta

SEQ ID NO: 25677 - DNA, 19 bp, Homo sapiens
  siRNA target sequence for EBF (NM_024007.2,812-830).
ccctcagatccagtgataa

SEQ ID NO: 25678 - DNA, 19 bp, Homo sapiens
  siRNA target sequence for EBF (NM_024007.2,856-874).
cctcaaatgtaaccaaaat

SEQ ID NO: 25679 - DNA, 19 bp, Homo sapiens
  siRNA target sequence for EBF (NM_024007.2,857-875).
ctcaaatgtaaccaaaatt

SEQ ID NO: 25680 - DNA, 19 bp, Homo sapiens
  siRNA target sequence for EBF (NM_024007.2,925-943).
ggtgtctacgacagtcaat

SEQ ID NO: 25681 - DNA, 19 bp, Homo sapiens
  siRNA target sequence for EBF (NM_024007.2,963-981).
cagtctctgataacatgtt

SEQ ID NO: 25682 - DNA, 19 bp, Homo sapiens
  siRNA target sequence for EBF (NM_024007.2,976-994).
catgtttgtccataataat

SEQ ID NO: 25683 - DNA, 19 bp, Homo sapiens
  siRNA target sequence for EBF (NM_024007.2,1033-1051).
ggaaggtacgccctcttat

SEQ ID NO: 25684 - DNA, 19 bp, Homo sapiens
  siRNA target sequence for EBF (NM_024007.2,1058-1076).
catgctactccctgtatca

SEQ ID NO: 25685 - DNA, 19 bp, Homo sapiens
  siRNA target sequence for EBF (NM_024007.2,1110-1128).
gaggtgcgactgtgatcat

SEQ ID NO: 25686 - DNA, 19 bp, Homo sapiens
  siRNA target sequence for EBF (NM_024007.2,1148-1166).
gatgggttacaggtcatat

SEQ ID NO: 25687 - DNA, 19 bp, Homo sapiens
  siRNA target sequence for EBF (NM_024007.2,1181-1199).
gtctggagtgagttgatca

SEQ ID NO: 25688 - DNA, 19 bp, Homo sapiens
  siRNA target sequence for EBF (NM_024007.2,1258-1276).
cacactgtcctacaaatct

SEQ ID NO: 25689 - DNA, 19 bp, Homo sapiens
  siRNA target sequence for EBF (NM_024007.2,1327-1345).
cgaacccaccatcgattat

SEQ ID NO: 25690 - DNA, 19 bp, Homo sapiens
  siRNA target sequence for EBF (NM_024007.2,1331-1349).
cccaccatcgattatggtt

SEQ ID NO: 25691 - DNA, 19 bp, Homo sapiens
  siRNA target sequence for EBF (NM_024007.2,1332-1350).
ccaccatcgattatggttt

SEQ ID NO: 25692 - DNA, 19 bp, Homo sapiens
  siRNA target sequence for EBF (NM_024007.2,1577-1595).
gggatgatgggcgtgaatt

SEQ ID NO: 25693 - DNA, 19 bp, Homo sapiens
  siRNA target sequence for EBF (NM_024007.2,1605-1623).
gacaactggccgtgaatgt

SEQ ID NO: 25694 - DNA, 19 bp, Homo sapiens
  siRNA target sequence for EBF (NM_024007.2,1709-1727).
ccccagcagaccaactata

SEQ ID NO: 25695 - DNA, 19 bp, Homo sapiens
  siRNA target sequence for EBF (NM_024007.2,1928-1946).
gtctcagccgtgaaacaga

SEQ ID NO: 25696 - DNA, 19 bp, Homo sapiens
  siRNA target sequence for EBF (NM_024007.2,2017-2035).
cagcctgcaagcgatatct

SEQ ID NO: 25697 - DNA, 19 bp, Homo sapiens
  siRNA target sequence for EBF2 (NM_022659.1,156-174).
ggtgtttgggactatgctt

SEQ ID NO: 25698 - DNA, 19 bp, Homo sapiens
  siRNA target sequence for EBF2 (NM_022659.1,247-265).
gaggtgacattatcttata

SEQ ID NO: 25699 - DNA, 19 bp, Homo sapiens
  siRNA target sequence for EBF2 (NM_022659.1,292-310).
ccaggaaggttcatttaca

SEQ ID NO: 25700 - DNA, 19 bp, Homo sapiens
  siRNA target sequence for EBF2 (NM_022659.1,382-400).
gatcctgagagattagcta

SEQ ID NO: 25701 - DNA, 19 bp, Homo sapiens
  siRNA target sequence for EBF2 (NM_022659.1,414-432).
gaaaagagctgcagatcta

SEQ ID NO: 25702 - DNA, 19 bp, Homo sapiens
  siRNA target sequence for EBF2 (NM_022659.1,480-498).
gaagcgagccgcagacatt

SEQ ID NO: 25703 - DNA, 19 bp, Homo sapiens
  siRNA target sequence for EBF2 (NM_022659.1,646-664).
gggtacatccgcaacacaa

SEQ ID NO: 25704 - DNA, 19 bp, Homo sapiens
  siRNA target sequence for EBF2 (NM_022659.1,698-716).
ccacgcctcaacagtctaa

SEQ ID NO: 25705 - DNA, 19 bp, Homo sapiens
  siRNA target sequence for EBF2 (NM_022659.1,699-717).
cacgcctcaacagtctaat

SEQ ID NO: 25706 - DNA, 19 bp, Homo sapiens
  siRNA target sequence for EBF2 (NM_022659.1,701-719).
cgcctcaacagtctaatta

SEQ ID NO: 25707 - DNA, 19 bp, Homo sapiens
  siRNA target sequence for EBF2 (NM_022659.1,703-721).
cctcaacagtctaattaca

SEQ ID NO: 25708 - DNA, 19 bp, Homo sapiens
  siRNA target sequence for EBF2 (NM_022659.1,722-740).
gtacctccagcaacagtat

SEQ ID NO: 25709 - DNA, 19 bp, Homo sapiens
  siRNA target sequence for EBF2 (NM_022659.1,813-831).
caccggctctccttatgga

SEQ ID NO: 25710 - DNA, 19 bp, Homo sapiens
  siRNA target sequence for EBF2 (NM_022659.1,823-841).
ccttatggaatcatgtcat

SEQ ID NO: 25711 - DNA, 19 bp, Homo sapiens
  siRNA target sequence for EBF2 (NM_022659.1,975-993).
cagcggcaatggaaatgga

SEQ ID NO: 25712 - DNA, 19 bp, Homo sapiens
  siRNA target sequence for EBF2 (NM_022659.1,977-995).
gcggcaatggaaatggatt

SEQ ID NO: 25713 - DNA, 19 bp, Homo sapiens
  siRNA target sequence for EBF2 (NM_022659.1,1001-1019).
ccatgaccggacttgttgt

SEQ ID NO: 25714 - DNA, 19 bp, Homo sapiens
  siRNA target sequence for EBF2 (NM_022659.1,1002-1020).
catgaccggacttgttgta

SEQ ID NO: 25715 - DNA, 19 bp, Homo sapiens
  siRNA target sequence for ECE2 (NM_014693.1,482-500).
gcccctgtgaggactttta

SEQ ID NO: 25716 - DNA, 19 bp, Homo sapiens
  siRNA target sequence for ECE2 (NM_014693.1,721-739).
ctgagagacctcattgaga

SEQ ID NO: 25717 - DNA, 19 bp, Homo sapiens
  siRNA target sequence for ECE2 (NM_014693.1,741-759).
gattggtggttggaacatt

SEQ ID NO: 25718 - DNA, 19 bp, Homo sapiens
  siRNA target sequence for ECE2 (NM_014693.1,866-884).
gttccaacagcaatgttat

SEQ ID NO: 25719 - DNA, 19 bp, Homo sapiens
  siRNA target sequence for ECE2 (NM_014693.1,914-932).
cctctcgggattactactt

SEQ ID NO: 25720 - DNA, 19 bp, Homo sapiens
  siRNA target sequence for ECE2 (NM_014693.1,915-933).
ctctcgggattactactta

SEQ ID NO: 25721 - DNA, 19 bp, Homo sapiens
  siRNA target sequence for ECE2 (NM_014693.1,917-935).
ctcgggattactacttaaa

SEQ ID NO: 25722 - DNA, 19 bp, Homo sapiens
  siRNA target sequence for ECE2 (NM_014693.1,921-939).
ggattactacttaaacaga

SEQ ID NO: 25723 - DNA, 19 bp, Homo sapiens
  siRNA target sequence for ECE2 (NM_014693.1,938-956).
gaactgccaatgagaaagt

SEQ ID NO: 25724 - DNA, 19 bp, Homo sapiens
  siRNA target sequence for ECE2 (NM_014693.1,962-980).
ctgcctatctggattacat

SEQ ID NO: 25725 - DNA, 19 bp, Homo sapiens
  siRNA target sequence for ECE2 (NM_014693.1,1157-1175).
ccatggactggcttgagtt

SEQ ID NO: 25726 - DNA, 19 bp, Homo sapiens
  siRNA target sequence for ECE2 (NM_014693.1,1227-1245).
ggtgtatgggatggattat

SEQ ID NO: 25727 - DNA, 19 bp, Homo sapiens
  siRNA target sequence for ECE2 (NM_014693.1,1228-1246).
gtgtatgggatggattatt

SEQ ID NO: 25728 - DNA, 19 bp, Homo sapiens
  siRNA target sequence for ECE2 (NM_014693.1,1283-1301).
caagcatcctgaacaatta

SEQ ID NO: 25729 - DNA, 19 bp, Homo sapiens
  siRNA target sequence for ECE2 (NM_014693.1,1339-1357).
ctggaccgacgctttgagt

SEQ ID NO: 25730 - DNA, 19 bp, Homo sapiens
  siRNA target sequence for ECE2 (NM_014693.1,1444-1462).
gacgcccttggctttgctt

SEQ ID NO: 25731 - DNA, 19 bp, Homo sapiens
  siRNA target sequence for ECE2 (NM_014693.1,1487-1505).
cgtttgaccggcaaagcaa

SEQ ID NO: 25732 - DNA, 19 bp, Homo sapiens
  siRNA target sequence for ECE2 (NM_014693.1,1488-1506).
gtttgaccggcaaagcaaa

SEQ ID NO: 25733 - DNA, 19 bp, Homo sapiens
  siRNA target sequence for ECE2 (NM_014693.1,1494-1512).
ccggcaaagcaaagaaatt

SEQ ID NO: 25734 - DNA, 19 bp, Homo sapiens
  siRNA target sequence for ECE2 (NM_014693.1,1612-1630).
gcagatgccatctatgata

SEQ ID NO: 25735 - DNA, 19 bp, Homo sapiens
  siRNA target sequence for ECE2 (NM_014693.1,1632-1650).
gattggtttcccagacttt

SEQ ID NO: 25736 - DNA, 19 bp, Homo sapiens
  siRNA target sequence for ECE2 (NM_014693.1,1678-1696).
gtttatgacgggtacgaaa

SEQ ID NO: 25737 - DNA, 19 bp, Homo sapiens
  siRNA target sequence for ECE2 (NM_014693.1,1823-1841).
cctactaccttccaactaa

SEQ ID NO: 25738 - DNA, 19 bp, Homo sapiens
  siRNA target sequence for ECE2 (NM_014693.1,1831-1849).
cttccaactaagaatgaga

SEQ ID NO: 25739 - DNA, 19 bp, Homo sapiens
  siRNA target sequence for ECE2 (NM_014693.1,1947-1965).
gttgacgcatgcctttgat

SEQ ID NO: 25740 - DNA, 19 bp, Homo sapiens
  siRNA target sequence for ECE2 (NM_014693.1,2054-2072).
gcatggaggaacagtacaa

SEQ ID NO: 25741 - DNA, 19 bp, Homo sapiens
  siRNA target sequence for ECE2 (NM_014693.1,2112-2130).
gacgctgggggagaacatt

SEQ ID NO: 25742 - DNA, 19 bp, Homo sapiens
  siRNA target sequence for ECE2 (NM_014693.1,2145-2163).
gctgaaggctgcctacaat

SEQ ID NO: 25743 - DNA, 19 bp, Homo sapiens
  siRNA target sequence for ECE2 (NM_014693.1,2153-2171).
ctgcctacaatgcttacaa

SEQ ID NO: 25744 - DNA, 19 bp, Homo sapiens
  siRNA target sequence for EDF1 (NM_003792.2,167-185).
ggccagaacaaacaacatt

SEQ ID NO: 25745 - DNA, 19 bp, Homo sapiens
  siRNA target sequence for EDF1 (NM_003792.2,182-200).
cattctattaccaagaaca

SEQ ID NO: 25746 - DNA, 19 bp, Homo sapiens
  siRNA target sequence for EDF1 (NM_003792.2,308-326).
gacctggccacgaaaatca

SEQ ID NO: 25747 - DNA, 19 bp, Homo sapiens
  siRNA target sequence for EDF1 (NM_003792.2,315-333).
ccacgaaaatcaatgagaa

SEQ ID NO: 25748 - DNA, 19 bp, Homo sapiens
  siRNA target sequence for EDF1 (NM_003792.2,341-359).
gtgatcgcggactatgaga

SEQ ID NO: 25749 - DNA, 19 bp, Homo sapiens
  siRNA target sequence for EDF1 (NM_003792.2,425-443).
cggggaaaggacattggaa

SEQ ID NO: 25750 - DNA, 19 bp, Homo sapiens
  siRNA target sequence for EGR2 (NM_000399.2,346-364).
ccgccaaggccgtagacaa

SEQ ID NO: 25751 - DNA, 19 bp, Homo sapiens
  siRNA target sequence for EGR2 (NM_000399.2,347-365).
cgccaaggccgtagacaaa

SEQ ID NO: 25752 - DNA, 19 bp, Homo sapiens
  siRNA target sequence for EGR2 (NM_000399.2,348-366).
gccaaggccgtagacaaaa

SEQ ID NO: 25753 - DNA, 19 bp, Homo sapiens
  siRNA target sequence for EGR2 (NM_000399.2,437-455).
cacgtcggtgaccatcttt

SEQ ID NO: 25754 - DNA, 19 bp, Homo sapiens
  siRNA target sequence for EGR2 (NM_000399.2,501-519).
gccggagatggcatgatca

SEQ ID NO: 25755 - DNA, 19 bp, Homo sapiens
  siRNA target sequence for EGR2 (NM_000399.2,502-520).
ccggagatggcatgatcaa

SEQ ID NO: 25756 - DNA, 19 bp, Homo sapiens
  siRNA target sequence for EGR2 (NM_000399.2,595-613).
gaaaccagaccttcactta

SEQ ID NO: 25757 - DNA, 19 bp, Homo sapiens
  siRNA target sequence for EGR2 (NM_000399.2,658-676).
gctacccagaaggcataat

SEQ ID NO: 25758 - DNA, 19 bp, Homo sapiens
  siRNA target sequence for EGR2 (NM_000399.2,664-682).
cagaaggcataatcaatat

SEQ ID NO: 25759 - DNA, 19 bp, Homo sapiens
  siRNA target sequence for EGR2 (NM_000399.2,988-1006).
caggtctcttcccaatgat

SEQ ID NO: 25760 - DNA, 19 bp, Homo sapiens
  siRNA target sequence for EGR2 (NM_000399.2,1009-1027).
cagactatcctggattctt

SEQ ID NO: 25761 - DNA, 19 bp, Homo sapiens
  siRNA target sequence for EGR2 (NM_000399.2,1133-1151).
ctctacaatccgtaacttt

SEQ ID NO: 25762 - DNA, 19 bp, Homo sapiens
  siRNA target sequence for EGR2 (NM_000399.2,1541-1559).
ctactgtggccgaaagttt

SEQ ID NO: 25763 - DNA, 19 bp, Homo sapiens
  siRNA target sequence for EIF4A1 (NM_001416.1,495-513).
gccgtgtgtttgatatgct

SEQ ID NO: 25764 - DNA, 19 bp, Homo sapiens
  siRNA target sequence for EIF4A1 (NM_001416.1,496-514).
ccgtgtgtttgatatgctt

SEQ ID NO: 25765 - DNA, 19 bp, Homo sapiens
  siRNA target sequence for EIF4A1 (NM_001416.1,522-540).
gatacctgtcccccaaata

SEQ ID NO: 25766 - DNA, 19 bp, Homo sapiens
  siRNA target sequence for EIF4A1 (NM_001416.1,944-962).
gaacgagacgtgattatga

SEQ ID NO: 25767 - DNA, 19 bp, Homo sapiens
  siRNA target sequence for EIF4A1 (NM_001416.1,1204-1222).
ggaaatgcccctcaatgtt

SEQ ID NO: 25768 - DNA, 19 bp, Homo sapiens
  siRNA target sequence for EIF4A2 (NM_001967.2,22-40).
ggtggctccgcggattata

SEQ ID NO: 25769 - DNA, 19 bp, Homo sapiens
  siRNA target sequence for EIF4A2 (NM_001967.2,23-41).
gtggctccgcggattataa

SEQ ID NO: 25770 - DNA, 19 bp, Homo sapiens
  siRNA target sequence for EIF4A2 (NM_001967.2,25-43).
ggctccgcggattataaca

SEQ ID NO: 25771 - DNA, 19 bp, Homo sapiens
  siRNA target sequence for EIF4A2 (NM_001967.2,27-45).
ctccgcggattataacaga

SEQ ID NO: 25772 - DNA, 19 bp, Homo sapiens
  siRNA target sequence for EIF4A2 (NM_001967.2,148-166).
cttcgtggcatctatgctt

SEQ ID NO: 25773 - DNA, 19 bp, Homo sapiens
  siRNA target sequence for EIF4A2 (NM_001967.2,202-220).
gctattattccctgtatta

SEQ ID NO: 25774 - DNA, 19 bp, Homo sapiens
  siRNA target sequence for EIF4A2 (NM_001967.2,203-221).
ctattattccctgtattaa

SEQ ID NO: 25775 - DNA, 19 bp, Homo sapiens
  siRNA target sequence for EIF4A2 (NM_001967.2,428-446).
gaacaaatgttcgaaatga

SEQ ID NO: 25776 - DNA, 19 bp, Homo sapiens
  siRNA target sequence for EIF4A2 (NM_001967.2,464-482).
ctgaagcaccacatattgt

SEQ ID NO: 25777 - DNA, 19 bp, Homo sapiens
  siRNA target sequence for EIF4A2 (NM_001967.2,491-509).
cacccgggagagtgtttga

SEQ ID NO: 25778 - DNA, 19 bp, Homo sapiens
  siRNA target sequence for EIF4A2 (NM_001967.2,493-511).
cccgggagagtgtttgata

SEQ ID NO: 25779 - DNA, 19 bp, Homo sapiens
  siRNA target sequence for EIF4A2 (NM_001967.2,494-512).
ccgggagagtgtttgatat

SEQ ID NO: 25780 - DNA, 19 bp, Homo sapiens
  siRNA target sequence for EIF4A2 (NM_001967.2,582-600).
gagccgtggttttaaggat

SEQ ID NO: 25781 - DNA, 19 bp, Homo sapiens
  siRNA target sequence for EIF4A2 (NM_001967.2,590-608).
gttttaaggatcaaatcta

SEQ ID NO: 25782 - DNA, 19 bp, Homo sapiens
  siRNA target sequence for EIF4A2 (NM_001967.2,699-717).
catgagagatccaattcga

SEQ ID NO: 25783 - DNA, 19 bp, Homo sapiens
  siRNA target sequence for EIF4A2 (NM_001967.2,702-720).
gagagatccaattcgaatt

SEQ ID NO: 25784 - DNA, 19 bp, Homo sapiens
  siRNA target sequence for EIF4A2 (NM_001967.2,704-722).
gagatccaattcgaattct

SEQ ID NO: 25785 - DNA, 19 bp, Homo sapiens
  siRNA target sequence for EIF4A2 (NM_001967.2,751-769).
ggaatcaaacagttttata

SEQ ID NO: 25786 - DNA, 19 bp, Homo sapiens
  siRNA target sequence for EIF4A2 (NM_001967.2,792-810).
gaagttggatacactttgt

SEQ ID NO: 25787 - DNA, 19 bp, Homo sapiens
  siRNA target sequence for EIF4A2 (NM_001967.2,819-837).
cgagacactgaccattaca

SEQ ID NO: 25788 - DNA, 19 bp, Homo sapiens
  siRNA target sequence for EIF4A2 (NM_001967.2,830-848).
ccattacacaggctgttat

SEQ ID NO: 25789 - DNA, 19 bp, Homo sapiens
  siRNA target sequence for EIF4A2 (NM_001967.2,831-849).
cattacacaggctgttatt

SEQ ID NO: 25790 - DNA, 19 bp, Homo sapiens
  siRNA target sequence for EIF4A2 (NM_001967.2,836-854).
cacaggctgttatttttct

SEQ ID NO: 25791 - DNA, 19 bp, Homo sapiens
  siRNA target sequence for EIF4A2 (NM_001967.2,844-862).
gttatttttctcaatacga

SEQ ID NO: 25792 - DNA, 19 bp, Homo sapiens
  siRNA target sequence for EIF4A2 (NM_001967.2,900-918).
cagagacttcacagtttct

SEQ ID NO: 25793 - DNA, 19 bp, Homo sapiens
  siRNA target sequence for EIF4A2 (NM_001967.2,980-998).
ggtcaagtcgtgttctgat

SEQ ID NO: 25794 - DNA, 19 bp, Homo sapiens
  siRNA target sequence for EIF4A2 (NM_001967.2,1011-1029).
gttggctcgcgggattgat

SEQ ID NO: 25795 - DNA, 19 bp, Homo sapiens
  siRNA target sequence for EIF4A2 (NM_001967.2,1032-1050).
gcaacaagtgtctttggtt

SEQ ID NO: 25796 - DNA, 19 bp, Homo sapiens
  siRNA target sequence for EIF4A2 (NM_001967.2,1033-1051).
caacaagtgtctttggtta

SEQ ID NO: 25797 - DNA, 19 bp, Homo sapiens
  siRNA target sequence for EIF4A2 (NM_001967.2,1041-1059).
gtctttggttataaattat

SEQ ID NO: 25798 - DNA, 19 bp, Homo sapiens
  siRNA target sequence for EIF4A2 (NM_001967.2,1066-1084).
cctaccaatcgtgaaaact

SEQ ID NO: 25799 - DNA, 19 bp, Homo sapiens
  siRNA target sequence for EIF4A2 (NM_001967.2,1067-1085).
ctaccaatcgtgaaaacta

SEQ ID NO: 25800 - DNA, 19 bp, Homo sapiens
  siRNA target sequence for EIF4A2 (NM_001967.2,1071-1089).
caatcgtgaaaactatatt

SEQ ID NO: 25801 - DNA, 19 bp, Homo sapiens
  siRNA target sequence for EIF4A2 (NM_001967.2,1129-1147).
gtggctataaactttgtta

SEQ ID NO: 25802 - DNA, 19 bp, Homo sapiens
  siRNA target sequence for EIF4A2 (NM_001967.2,1131-1149).
ggctataaactttgttact

SEQ ID NO: 25803 - DNA, 19 bp, Homo sapiens
  siRNA target sequence for EIF4A2 (NM_001967.2,1182-1200).
gactttctacaatactaca

SEQ ID NO: 25804 - DNA, 19 bp, Homo sapiens
  siRNA target sequence for ELYS (NM_015446.1,1912-1930).
ggaatttgacagactatgt

SEQ ID NO: 25805 - DNA, 19 bp, Homo sapiens
  siRNA target sequence for ELYS (NM_015446.1,1923-1941).
gactatgtgtgccattatt

SEQ ID NO: 25806 - DNA, 19 bp, Homo sapiens
  siRNA target sequence for ELYS (NM_015446.1,1960-1978).
catggatccacaaactata

SEQ ID NO: 25807 - DNA, 19 bp, Homo sapiens
  siRNA target sequence for ELYS (NM_015446.1,1964-1982).
gatccacaaactatacagt

SEQ ID NO: 25808 - DNA, 19 bp, Homo sapiens
  siRNA target sequence for ELYS (NM_015446.1,1968-1986).
cacaaactatacagtctat

SEQ ID NO: 25809 - DNA, 19 bp, Homo sapiens
  siRNA target sequence for ELYS (NM_015446.1,1981-1999).
gtctatccagcaatgctat

SEQ ID NO: 25810 - DNA, 19 bp, Homo sapiens
  siRNA target sequence for ELYS (NM_015446.1,1983-2001).
ctatccagcaatgctattt

SEQ ID NO: 25811 - DNA, 19 bp, Homo sapiens
  siRNA target sequence for ELYS (NM_015446.1,2003-2021).
cttcttagcaatcttaata

SEQ ID NO: 25812 - DNA, 19 bp, Homo sapiens
  siRNA target sequence for ELYS (NM_015446.1,2065-2083).
gagaggactgatagactta

SEQ ID NO: 25813 - DNA, 19 bp, Homo sapiens
  siRNA target sequence for ELYS (NM_015446.1,2070-2088).
gactgatagacttaagcaa

SEQ ID NO: 25814 - DNA, 19 bp, Homo sapiens
  siRNA target sequence for ELYS (NM_015446.1,2072-2090).
ctgatagacttaagcaata

SEQ ID NO: 25815 - DNA, 19 bp, Homo sapiens
  siRNA target sequence for ELYS (NM_015446.1,2162-2180).
ccagaaggcatagatgatt

SEQ ID NO: 25816 - DNA, 19 bp, Homo sapiens
  siRNA target sequence for ELYS (NM_015446.1,2193-2211).
caaggttatgctacaacta

SEQ ID NO: 25817 - DNA, 19 bp, Homo sapiens
  siRNA target sequence for ELYS (NM_015446.1,2203-2221).
ctacaactaccctgtaatt

SEQ ID NO: 25818 - DNA, 19 bp, Homo sapiens
  siRNA target sequence for ELYS (NM_015446.1,2236-2254).
cagtcgtcgacagaagttt

SEQ ID NO: 25819 - DNA, 19 bp, Homo sapiens
  siRNA target sequence for ELYS (NM_015446.1,2238-2256).
gtcgtcgacagaagtttga

SEQ ID NO: 25820 - DNA, 19 bp, Homo sapiens
  siRNA target sequence for ELYS (NM_015446.1,2246-2264).
cagaagtttgagcgtttat

SEQ ID NO: 25821 - DNA, 19 bp, Homo sapiens
  siRNA target sequence for ELYS (NM_015446.1,2248-2266).
gaagtttgagcgtttatca

SEQ ID NO: 25822 - DNA, 19 bp, Homo sapiens
  siRNA target sequence for ELYS (NM_015446.1,2251-2269).
gtttgagcgtttatcaaga

SEQ ID NO: 25823 - DNA, 19 bp, Homo sapiens
  siRNA target sequence for ELYS (NM_015446.1,2283-2301).
ccgattgcttgatgattga

SEQ ID NO: 25824 - DNA, 19 bp, Homo sapiens
  siRNA target sequence for ELYS (NM_015446.1,2338-2356).
gttgtggaaacgagatgaa

SEQ ID NO: 25825 - DNA, 19 bp, Homo sapiens
  siRNA target sequence for ELYS (NM_015446.1,2385-2403).
gtctgcatgcagtacttga

SEQ ID NO: 25826 - DNA, 19 bp, Homo sapiens
  siRNA target sequence for ELYS (NM_015446.1,2387-2405).
ctgcatgcagtacttgata

SEQ ID NO: 25827 - DNA, 19 bp, Homo sapiens
  siRNA target sequence for ELYS (NM_015446.1,2396-2414).
gtacttgatatgtacctat

SEQ ID NO: 25828 - DNA, 19 bp, Homo sapiens
  siRNA target sequence for ELYS (NM_015446.1,2432-2450).
gcagccaaacactctatta

SEQ ID NO: 25829 - DNA, 19 bp, Homo sapiens
  siRNA target sequence for ELYS (NM_015446.1,2435-2453).
gccaaacactctattacca

SEQ ID NO: 25830 - DNA, 19 bp, Homo sapiens
  siRNA target sequence for ELYS (NM_015446.1,2436-2454).
ccaaacactctattaccat

SEQ ID NO: 25831 - DNA, 19 bp, Homo sapiens
  siRNA target sequence for ELYS (NM_015446.1,2437-2455).
caaacactctattaccatt

SEQ ID NO: 25832 - DNA, 19 bp, Homo sapiens
  siRNA target sequence for ELYS (NM_015446.1,2461-2479).
gctacttgatattatgtat

SEQ ID NO: 25833 - DNA, 19 bp, Homo sapiens
  siRNA target sequence for ELYS (NM_015446.1,2462-2480).
ctacttgatattatgtatt

SEQ ID NO: 25834 - DNA, 19 bp, Homo sapiens
  siRNA target sequence for ELYS (NM_015446.1,2476-2494).
gtattcctttcccaacaaa

SEQ ID NO: 25835 - DNA, 19 bp, Homo sapiens
  siRNA target sequence for ELYS (NM_015446.1,2538-2556).
cttggggccaagttaaact

SEQ ID NO: 25836 - DNA, 19 bp, Homo sapiens
  siRNA target sequence for ELYS (NM_015446.1,2563-2581).
ggggttttggttgatagat

SEQ ID NO: 25837 - DNA, 19 bp, Homo sapiens
  siRNA target sequence for ELYS (NM_015446.1,2565-2583).
ggttttggttgatagatca

SEQ ID NO: 25838 - DNA, 19 bp, Homo sapiens
  siRNA target sequence for ELYS (NM_015446.1,2571-2589).
ggttgatagatcataatga

SEQ ID NO: 25839 - DNA, 19 bp, Homo sapiens
  siRNA target sequence for ELYS (NM_015446.1,2590-2608).
ctatgagagtggtttggat

SEQ ID NO: 25840 - DNA, 19 bp, Homo sapiens
  siRNA target sequence for ELYS (NM_015446.1,2646-2664).
ggcaacattcaaagattat

SEQ ID NO: 25841 - DNA, 19 bp, Homo sapiens
  siRNA target sequence for ELYS (NM_015446.1,2736-2754).
ccagtggtaacgatgttat

SEQ ID NO: 25842 - DNA, 19 bp, Homo sapiens
  siRNA target sequence for ELYS (NM_015446.1,2739-2757).
gtggtaacgatgttatcct

SEQ ID NO: 25843 - DNA, 19 bp, Homo sapiens
  siRNA target sequence for ELYS (NM_015446.1,2791-2809).
ggttgaagcctggaatttt

SEQ ID NO: 25844 - DNA, 19 bp, Homo sapiens
  siRNA target sequence for ELYS (NM_015446.1,2813-2831).
cggcaacattgcaataggt

SEQ ID NO: 25845 - DNA, 19 bp, Homo sapiens
  siRNA target sequence for ELYS (NM_015446.1,2814-2832).
ggcaacattgcaataggtt

SEQ ID NO: 25846 - DNA, 19 bp, Homo sapiens
  siRNA target sequence for ELYS (NM_015446.1,2819-2837).
cattgcaataggttgaata

SEQ ID NO: 25847 - DNA, 19 bp, Homo sapiens
  siRNA target sequence for ELYS (NM_015446.1,2823-2841).
gcaataggttgaatataga

SEQ ID NO: 25848 - DNA, 19 bp, Homo sapiens
  siRNA target sequence for ELYS (NM_015446.1,2883-2901).
gcttgatggaagatttact

SEQ ID NO: 25849 - DNA, 19 bp, Homo sapiens
  siRNA target sequence for ELYS (NM_015446.1,2922-2940).
ctgagcaggaatgtttagt

SEQ ID NO: 25850 - DNA, 19 bp, Homo sapiens
  siRNA target sequence for ELYS (NM_015446.1,2956-2974).
cagtgccagcgttcagaat

SEQ ID NO: 25851 - DNA, 19 bp, Homo sapiens
  siRNA target sequence for ELYS (NM_015446.1,3037-3055).
ccaaactctgaagattaat

SEQ ID NO: 25852 - DNA, 19 bp, Homo sapiens
  siRNA target sequence for ELYS (NM_015446.1,3088-3106).
gagatcactggctcgaaat

SEQ ID NO: 25853 - DNA, 19 bp, Homo sapiens
  siRNA target sequence for ELYS (NM_015446.1,3095-3113).
ctggctcgaaattctatat

SEQ ID NO: 25854 - DNA, 19 bp, Homo sapiens
  siRNA target sequence for ELYS (NM_015446.1,3099-3117).
ctcgaaattctatattaga

SEQ ID NO: 25855 - DNA, 19 bp, Homo sapiens
  siRNA target sequence for ELYS (NM_015446.1,3137-3155).
cctagagtccatcgaaaat

SEQ ID NO: 25856 - DNA, 19 bp, Homo sapiens
  siRNA target sequence for ELYS (NM_015446.1,3138-3156).
ctagagtccatcgaaaatt

SEQ ID NO: 25857 - DNA, 19 bp, Homo sapiens
  siRNA target sequence for ELYS (NM_015446.1,3176-3194).
ccttatcatctgtcaacat

SEQ ID NO: 25858 - DNA, 19 bp, Homo sapiens
  siRNA target sequence for ELYS (NM_015446.1,3185-3203).
ctgtcaacatcatcagttt

SEQ ID NO: 25859 - DNA, 19 bp, Homo sapiens
  siRNA target sequence for ELYS (NM_015446.1,3195-3213).
catcagtttttcgattagt

SEQ ID NO: 25860 - DNA, 19 bp, Homo sapiens
  siRNA target sequence for ELYS (NM_015446.1,3200-3218).
gtttttcgattagtttcta

SEQ ID NO: 25861 - DNA, 19 bp, Homo sapiens
  siRNA target sequence for ELYS (NM_015446.1,3237-3255).
cagttccaaagcaagttgt

SEQ ID NO: 25862 - DNA, 19 bp, Homo sapiens
  siRNA target sequence for ELYS (NM_015446.1,3281-3299).
gttttcatcaacaatgtgt

SEQ ID NO: 25863 - DNA, 19 bp, Homo sapiens
  siRNA target sequence for ELYS (NM_015446.1,3286-3304).
catcaacaatgtgttatct

SEQ ID NO: 25864 - DNA, 19 bp, Homo sapiens
  siRNA target sequence for ELYS (NM_015446.1,3322-3340).
ggcaagcaaagaacctata

SEQ ID NO: 25865 - DNA, 19 bp, Homo sapiens
  siRNA target sequence for ELYS (NM_015446.1,3323-3341).
gcaagcaaagaacctataa

SEQ ID NO: 25866 - DNA, 19 bp, Homo sapiens
  siRNA target sequence for ELYS (NM_015446.1,3346-3364).
caccacacctttcaatagt

SEQ ID NO: 25867 - DNA, 19 bp, Homo sapiens
  siRNA target sequence for ELYS (NM_015446.1,3349-3367).
cacacctttcaatagttct

SEQ ID NO: 25868 - DNA, 19 bp, Homo sapiens
  siRNA target sequence for ELYS (NM_015446.1,3351-3369).
cacctttcaatagttctaa

SEQ ID NO: 25869 - DNA, 19 bp, Homo sapiens
  siRNA target sequence for ELYS (NM_015446.1,3413-3431).
gagctgcctgaggcatttt

SEQ ID NO: 25870 - DNA, 19 bp, Homo sapiens
  siRNA target sequence for ELYS (NM_015446.1,3418-3436).
gcctgaggcattttttgga

SEQ ID NO: 25871 - DNA, 19 bp, Homo sapiens
  siRNA target sequence for ELYS (NM_015446.1,3452-3470).
gcatcacaaaaaatttcta

SEQ ID NO: 25872 - DNA, 19 bp, Homo sapiens
  siRNA target sequence for ELYS (NM_015446.1,3510-3528).
ctcagtgttcggagtttat

SEQ ID NO: 25873 - DNA, 19 bp, Homo sapiens
  siRNA target sequence for ELYS (NM_015446.1,4067-4085).
gatgagactaccttagagt

SEQ ID NO: 25874 - DNA, 19 bp, Homo sapiens
  siRNA target sequence for ELYS (NM_015446.1,4155-4173).
ccactgcactaactactaa

SEQ ID NO: 25875 - DNA, 19 bp, Homo sapiens
  siRNA target sequence for ELYS (NM_015446.1,4156-4174).
cactgcactaactactaat

SEQ ID NO: 25876 - DNA, 19 bp, Homo sapiens
  siRNA target sequence for ELYS (NM_015446.1,4158-4176).
ctgcactaactactaatgt

SEQ ID NO: 25877 - DNA, 19 bp, Homo sapiens
  siRNA target sequence for ELYS (NM_015446.1,4160-4178).
gcactaactactaatgtaa

SEQ ID NO: 25878 - DNA, 19 bp, Homo sapiens
  siRNA target sequence for ELYS (NM_015446.1,4305-4323).
cattttcagaattgaatca

SEQ ID NO: 25879 - DNA, 19 bp, Homo sapiens
  siRNA target sequence for ELYS (NM_015446.1,4330-4348).
cccggttcaaggaactgaa

SEQ ID NO: 25880 - DNA, 19 bp, Homo sapiens
  siRNA target sequence for ELYS (NM_015446.1,4359-4377).
gtgcaccatcagtctatga

SEQ ID NO: 25881 - DNA, 19 bp, Homo sapiens
  siRNA target sequence for ELYS (NM_015446.1,4412-4430).
gtgttggacgaaggattaa

SEQ ID NO: 25882 - DNA, 19 bp, Homo sapiens
  siRNA target sequence for ELYS (NM_015446.1,4414-4432).
gttggacgaaggattaaca

SEQ ID NO: 25883 - DNA, 19 bp, Homo sapiens
  siRNA target sequence for ELYS (NM_015446.1,4420-4438).
cgaaggattaacatctgtt

SEQ ID NO: 25884 - DNA, 19 bp, Homo sapiens
  siRNA target sequence for ELYS (NM_015446.1,4454-4472).
gcaattagagcaaatgaca

SEQ ID NO: 25885 - DNA, 19 bp, Homo sapiens
  siRNA target sequence for ELYS (NM_015446.1,4464-4482).
caaatgacaataaatctat

SEQ ID NO: 25886 - DNA, 19 bp, Homo sapiens
  siRNA target sequence for ELYS (NM_015446.1,4506-4524).
gaaactcctcgctcactat

SEQ ID NO: 25887 - DNA, 19 bp, Homo sapiens
  siRNA target sequence for ELYS (NM_015446.1,4510-4528).
ctcctcgctcactatctct

SEQ ID NO: 25888 - DNA, 19 bp, Homo sapiens
  siRNA target sequence for ELYS (NM_015446.1,4545-4563).
ctgagcgcaggcttaacca

SEQ ID NO: 25889 - DNA, 19 bp, Homo sapiens
  siRNA target sequence for ELYS (NM_015446.1,4564-4582).
ggaagtagcgctgaactta

SEQ ID NO: 25890 - DNA, 19 bp, Homo sapiens
  siRNA target sequence for ELYS (NM_015446.1,4565-4583).
gaagtagcgctgaacttaa

SEQ ID NO: 25891 - DNA, 19 bp, Homo sapiens
  siRNA target sequence for ELYS (NM_015446.1,4663-4681).
ccctcctgatactcaagaa

SEQ ID NO: 25892 - DNA, 19 bp, Homo sapiens
  siRNA target sequence for ELYS (NM_015446.1,4674-4692).
ctcaagaaattcatgtgat

SEQ ID NO: 25893 - DNA, 19 bp, Homo sapiens
  siRNA target sequence for ELYS (NM_015446.1,4730-4748).
gaggctaggaatctttcat

SEQ ID NO: 25894 - DNA, 19 bp, Homo sapiens
  siRNA target sequence for ELYS (NM_015446.1,4764-4782).
cctctggaacacttaagct

SEQ ID NO: 25895 - DNA, 19 bp, Homo sapiens
  siRNA target sequence for ELYS (NM_015446.1,4773-4791).
cacttaagcttcagtacaa

SEQ ID NO: 25896 - DNA, 19 bp, Homo sapiens
  siRNA target sequence for ELYS (NM_015446.1,4775-4793).
cttaagcttcagtacaatt

SEQ ID NO: 25897 - DNA, 19 bp, Homo sapiens
  siRNA target sequence for ELYS (NM_015446.1,4834-4852).
caaagacactgctgaatgt

SEQ ID NO: 25898 - DNA, 19 bp, Homo sapiens
  siRNA target sequence for ELYS (NM_015446.1,4883-4901).
gtggctcaaagcaacttta

SEQ ID NO: 25899 - DNA, 19 bp, Homo sapiens
  siRNA target sequence for ELYS (NM_015446.1,4953-4971).
catctgatgtgttacctaa

SEQ ID NO: 25900 - DNA, 19 bp, Homo sapiens
  siRNA target sequence for ELYS (NM_015446.1,5047-5065).
gccatctgccgtaactagt

SEQ ID NO: 25901 - DNA, 19 bp, Homo sapiens
  siRNA target sequence for ELYS (NM_015446.1,5055-5073).
ccgtaactagtgaccaaaa

SEQ ID NO: 25902 - DNA, 19 bp, Homo sapiens
  siRNA target sequence for ELYS (NM_015446.1,5057-5075).
gtaactagtgaccaaaagt

SEQ ID NO: 25903 - DNA, 19 bp, Homo sapiens
  siRNA target sequence for ELYS (NM_015446.1,5104-5122).
gcctgaacctattaaagta

SEQ ID NO: 25904 - DNA, 19 bp, Homo sapiens
  siRNA target sequence for ELYS (NM_015446.1,5132-5150).
gaaaatttactagatgtaa

SEQ ID NO: 25905 - DNA, 19 bp, Homo sapiens
  siRNA target sequence for ELYS (NM_015446.1,5191-5209).
ggaacagtccattcatgaa

SEQ ID NO: 25906 - DNA, 19 bp, Homo sapiens
  siRNA target sequence for ELYS (NM_015446.1,5192-5210).
gaacagtccattcatgaaa

SEQ ID NO: 25907 - DNA, 19 bp, Homo sapiens
  siRNA target sequence for ELYS (NM_015446.1,5197-5215).
gtccattcatgaaacaata

SEQ ID NO: 25908 - DNA, 19 bp, Homo sapiens
  siRNA target sequence for ELYS (NM_015446.1,5200-5218).
cattcatgaaacaatacct

SEQ ID NO: 25909 - DNA, 19 bp, Homo sapiens
  siRNA target sequence for ELYS (NM_015446.1,5216-5234).
cctttagtgagccaaaaca

SEQ ID NO: 25910 - DNA, 19 bp, Homo sapiens
  siRNA target sequence for ELYS (NM_015446.1,5224-5242).
gagccaaaacataatgtgt

SEQ ID NO: 25911 - DNA, 19 bp, Homo sapiens
  siRNA target sequence for ELYS (NM_015446.1,5245-5263).
cactaaattggtcaaatct

SEQ ID NO: 25912 - DNA, 19 bp, Homo sapiens
  siRNA target sequence for ELYS (NM_015446.1,5289-5307).
gcacaatgactatgaatgt

SEQ ID NO: 25913 - DNA, 19 bp, Homo sapiens
  siRNA target sequence for ELYS (NM_015446.1,5321-5339).
gacgtggtttcctccaaaa

SEQ ID NO: 25914 - DNA, 19 bp, Homo sapiens
  siRNA target sequence for ELYS (NM_015446.1,5323-5341).
cgtggtttcctccaaaact

SEQ ID NO: 25915 - DNA, 19 bp, Homo sapiens
  siRNA target sequence for ELYS (NM_015446.1,5347-5365).
gagaggtcaacgtatccaa

SEQ ID NO: 25916 - DNA, 19 bp, Homo sapiens
  siRNA target sequence for ELYS (NM_015446.1,5349-5367).
gaggtcaacgtatccaaaa

SEQ ID NO: 25917 - DNA, 19 bp, Homo sapiens
  siRNA target sequence for ELYS (NM_015446.1,5352-5370).
gtcaacgtatccaaaacgt

SEQ ID NO: 25918 - DNA, 19 bp, Homo sapiens
  siRNA target sequence for ELYS (NM_015446.1,5358-5376).
gtatccaaaacgtgaatgt

SEQ ID NO: 25919 - DNA, 19 bp, Homo sapiens
  siRNA target sequence for ELYS (NM_015446.1,5631-5649).
ctacaggtagggaatcaaa

SEQ ID NO: 25920 - DNA, 19 bp, Homo sapiens
  siRNA target sequence for ELYS (NM_015446.1,5636-5654).
ggtagggaatcaaaaagat

SEQ ID NO: 25921 - DNA, 19 bp, Homo sapiens
  siRNA target sequence for ELYS (NM_015446.1,5637-5655).
gtagggaatcaaaaagatt

SEQ ID NO: 25922 - DNA, 19 bp, Homo sapiens
  siRNA target sequence for ELYS (NM_015446.1,5697-5715).
ctaaaaaagaagttaaggt

SEQ ID NO: 25923 - DNA, 19 bp, Homo sapiens
  siRNA target sequence for ELYS (NM_015446.1,5814-5832).
caagtcctagcagaatgat

SEQ ID NO: 25924 - DNA, 19 bp, Homo sapiens
  siRNA target sequence for ELYS (NM_015446.1,5905-5923).
caagcagctgcgtattaaa

SEQ ID NO: 25925 - DNA, 19 bp, Homo sapiens
  siRNA target sequence for ELYS (NM_015446.1,5911-5929).
gctgcgtattaaacatgtt

SEQ ID NO: 25926 - DNA, 19 bp, Homo sapiens
  siRNA target sequence for ELYS (NM_015446.1,5912-5930).
ctgcgtattaaacatgtta

SEQ ID NO: 25927 - DNA, 19 bp, Homo sapiens
  siRNA target sequence for ELYS (NM_015446.1,5938-5956).
cagagggagagaagttagt

SEQ ID NO: 25928 - DNA, 19 bp, Homo sapiens
  siRNA target sequence for ELYS (NM_015446.1,6008-6026).
caagcagaatttgatatgt

SEQ ID NO: 25929 - DNA, 19 bp, Homo sapiens
  siRNA target sequence for ELYS (NM_015446.1,6020-6038).
gatatgtctgccataccta

SEQ ID NO: 25930 - DNA, 19 bp, Homo sapiens
  siRNA target sequence for ELYS (NM_015446.1,6025-6043).
gtctgccatacctagaaaa

SEQ ID NO: 25931 - DNA, 19 bp, Homo sapiens
  siRNA target sequence for ELYS (NM_015446.1,6044-6062).
cgtggtagaccaagaaaaa

SEQ ID NO: 25932 - DNA, 19 bp, Homo sapiens
  siRNA target sequence for ELYS (NM_015446.1,6045-6063).
gtggtagaccaagaaaaat

SEQ ID NO: 25933 - DNA, 19 bp, Homo sapiens
  siRNA target sequence for ELYS (NM_015446.1,6053-6071).
ccaagaaaaatcaatccat

SEQ ID NO: 25934 - DNA, 19 bp, Homo sapiens
  siRNA target sequence for ELYS (NM_015446.1,6084-6102).
gatctaaggctgttaagga

SEQ ID NO: 25935 - DNA, 19 bp, Homo sapiens
  siRNA target sequence for ELYS (NM_015446.1,6225-6243).
caaacgaggaactttcgat

SEQ ID NO: 25936 - DNA, 19 bp, Homo sapiens
  siRNA target sequence for ELYS (NM_015446.1,6812-6830).
ggagtcaagagcaaaccaa

SEQ ID NO: 25937 - DNA, 19 bp, Homo sapiens
  siRNA target sequence for ELYS (NM_015446.1,6883-6901).
gtcttcctatccaaagcaa

SEQ ID NO: 25938 - DNA, 19 bp, Homo sapiens
  siRNA target sequence for ENDOG (NM_004435.1,726-744).
cccgcagctaccaaaacgt

SEQ ID NO: 25939 - DNA, 19 bp, Homo sapiens
  siRNA target sequence for ENDOG (NM_004435.1,732-750).
gctaccaaaacgtctatgt

SEQ ID NO: 25940 - DNA, 19 bp, Homo sapiens
  siRNA target sequence for ENDOG (NM_004435.1,788-806).
gatgggaaatcctacgtaa

SEQ ID NO: 25941 - DNA, 19 bp, Homo sapiens
  siRNA target sequence for ENDOG (NM_004435.1,791-809).
gggaaatcctacgtaaagt

SEQ ID NO: 25942 - DNA, 19 bp, Homo sapiens
  siRNA target sequence for ENDOG (NM_004435.1,876-894).
cagcaggtgggcaaattga

SEQ ID NO: 25943 - DNA, 19 bp, Homo sapiens
  siRNA target sequence for EP400 (NM_015409.2,239-257).
ccgggcagaacgtgaacat

SEQ ID NO: 25944 - DNA, 19 bp, Homo sapiens
  siRNA target sequence for EP400 (NM_015409.2,379-397).
catgggtctccatcataca

SEQ ID NO: 25945 - DNA, 19 bp, Homo sapiens
  siRNA target sequence for EP400 (NM_015409.2,383-401).
ggtctccatcatacattca

SEQ ID NO: 25946 - DNA, 19 bp, Homo sapiens
  siRNA target sequence for EP400 (NM_015409.2,1417-1435).
gtagagacggacctgttta

SEQ ID NO: 25947 - DNA, 19 bp, Homo sapiens
  siRNA target sequence for EP400 (NM_015409.2,1501-1519).
ggtcaccaaggggtagttt

SEQ ID NO: 25948 - DNA, 19 bp, Homo sapiens
  siRNA target sequence for EP400 (NM_015409.2,1502-1520).
gtcaccaaggggtagtttt

SEQ ID NO: 25949 - DNA, 19 bp, Homo sapiens
  siRNA target sequence for EP400 (NM_015409.2,1793-1811).
cccagacacagctccaaat

SEQ ID NO: 25950 - DNA, 19 bp, Homo sapiens
  siRNA target sequence for EP400 (NM_015409.2,2084-2102).
ctcgatcctctccagtaaa

SEQ ID NO: 25951 - DNA, 19 bp, Homo sapiens
  siRNA target sequence for EP400 (NM_015409.2,2086-2104).
cgatcctctccagtaaata

SEQ ID NO: 25952 - DNA, 19 bp, Homo sapiens
  siRNA target sequence for EP400 (NM_015409.2,2118-2136).
caccaataaggcactatct

SEQ ID NO: 25953 - DNA, 19 bp, Homo sapiens
  siRNA target sequence for EP400 (NM_015409.2,2232-2250).
ggatacgctgacagaacaa

SEQ ID NO: 25954 - DNA, 19 bp, Homo sapiens
  siRNA target sequence for EP400 (NM_015409.2,2233-2251).
gatacgctgacagaacaaa

SEQ ID NO: 25955 - DNA, 19 bp, Homo sapiens
  siRNA target sequence for EP400 (NM_015409.2,2437-2455).
gcgaagaagctcgttagaa

SEQ ID NO: 25956 - DNA, 19 bp, Homo sapiens
  siRNA target sequence for EP400 (NM_015409.2,2439-2457).
gaagaagctcgttagaact

SEQ ID NO: 25957 - DNA, 19 bp, Homo sapiens
  siRNA target sequence for EP400 (NM_015409.2,2554-2572).
gagatagagtgcttttggt

SEQ ID NO: 25958 - DNA, 19 bp, Homo sapiens
  siRNA target sequence for EP400 (NM_015409.2,2560-2578).
gagtgcttttggtcgaata

SEQ ID NO: 25959 - DNA, 19 bp, Homo sapiens
  siRNA target sequence for EP400 (NM_015409.2,2562-2580).
gtgcttttggtcgaatatt

SEQ ID NO: 25960 - DNA, 19 bp, Homo sapiens
  siRNA target sequence for EP400 (NM_015409.2,2564-2582).
gcttttggtcgaatattga

SEQ ID NO: 25961 - DNA, 19 bp, Homo sapiens
  siRNA target sequence for EP400 (NM_015409.2,2565-2583).
cttttggtcgaatattgaa

SEQ ID NO: 25962 - DNA, 19 bp, Homo sapiens
  siRNA target sequence for EP400 (NM_015409.2,2833-2851).
caaacagaactttctaatt

SEQ ID NO: 25963 - DNA, 19 bp, Homo sapiens
  siRNA target sequence for EP400 (NM_015409.2,3005-3023).
gcaaggacttggttctcat

SEQ ID NO: 25964 - DNA, 19 bp, Homo sapiens
  siRNA target sequence for EP400 (NM_015409.2,3019-3037).
ctcatcgactcgcttttca

SEQ ID NO: 25965 - DNA, 19 bp, Homo sapiens
  siRNA target sequence for EP400 (NM_015409.2,3056-3074).
ctgccgagaggatgaatat

SEQ ID NO: 25966 - DNA, 19 bp, Homo sapiens
  siRNA target sequence for EP400 (NM_015409.2,3153-3171).
cacaacctcggtcaagttt

SEQ ID NO: 25967 - DNA, 19 bp, Homo sapiens
  siRNA target sequence for EP400 (NM_015409.2,3155-3173).
caacctcggtcaagtttaa

SEQ ID NO: 25968 - DNA, 19 bp, Homo sapiens
  siRNA target sequence for EP400 (NM_015409.2,3321-3339).
ccacctagcttgtaacgaa

SEQ ID NO: 25969 - DNA, 19 bp, Homo sapiens
  siRNA target sequence for EP400 (NM_015409.2,3328-3346).
gcttgtaacgaaggtaatt

SEQ ID NO: 25970 - DNA, 19 bp, Homo sapiens
  siRNA target sequence for EP400 (NM_015409.2,3385-3403).
ctcaagtgggagcttgaat

SEQ ID NO: 25971 - DNA, 19 bp, Homo sapiens
  siRNA target sequence for EP400 (NM_015409.2,3390-3408).
gtgggagcttgaattgaaa

SEQ ID NO: 25972 - DNA, 19 bp, Homo sapiens
  siRNA target sequence for EP400 (NM_015409.2,3394-3412).
gagcttgaattgaaacgtt

SEQ ID NO: 25973 - DNA, 19 bp, Homo sapiens
  siRNA target sequence for EP400 (NM_015409.2,3413-3431).
ggtgtcccggactcaaaat

SEQ ID NO: 25974 - DNA, 19 bp, Homo sapiens
  siRNA target sequence for EP400 (NM_015409.2,3416-3434).
gtcccggactcaaaatcct

SEQ ID NO: 25975 - DNA, 19 bp, Homo sapiens
  siRNA target sequence for EP400 (NM_015409.2,3422-3440).
gactcaaaatcctctcata

SEQ ID NO: 25976 - DNA, 19 bp, Homo sapiens
  siRNA target sequence for EP400 (NM_015409.2,3451-3469).
cacagagaactcaaagcaa

SEQ ID NO: 25977 - DNA, 19 bp, Homo sapiens
  siRNA target sequence for EP400 (NM_015409.2,3515-3533).
cgtcctacactcagttctt

SEQ ID NO: 25978 - DNA, 19 bp, Homo sapiens
  siRNA target sequence for EP400 (NM_015409.2,3566-3584).
ggaagtgcctggtcattga

SEQ ID NO: 25979 - DNA, 19 bp, Homo sapiens
  siRNA target sequence for EP400 (NM_015409.2,3619-3637).
cactgggaagcggttttca

SEQ ID NO: 25980 - DNA, 19 bp, Homo sapiens
  siRNA target sequence for EP400 (NM_015409.2,3670-3688).
gactcgccgctgcacaata

SEQ ID NO: 25981 - DNA, 19 bp, Homo sapiens
  siRNA target sequence for EP400 (NM_015409.2,3674-3692).
cgccgctgcacaatacctt

SEQ ID NO: 25982 - DNA, 19 bp, Homo sapiens
  siRNA target sequence for EP400 (NM_015409.2,3775-3793).
gaagagagccaggattact

SEQ ID NO: 25983 - DNA, 19 bp, Homo sapiens
  siRNA target sequence for EP400 (NM_015409.2,3782-3800).
gccaggattactaccataa

SEQ ID NO: 25984 - DNA, 19 bp, Homo sapiens
  siRNA target sequence for EP400 (NM_015409.2,3783-3801).
ccaggattactaccataaa

SEQ ID NO: 25985 - DNA, 19 bp, Homo sapiens
  siRNA target sequence for EP400 (NM_015409.2,3802-3820).
gtggtcataaggttacaca

SEQ ID NO: 25986 - DNA, 19 bp, Homo sapiens
  siRNA target sequence for EP400 (NM_015409.2,3908-3926).
gcctttctaaccgacaaaa

SEQ ID NO: 25987 - DNA, 19 bp, Homo sapiens
  siRNA target sequence for EP400 (NM_015409.2,3929-3947).
ccttatacgaggacgttat

SEQ ID NO: 25988 - DNA, 19 bp, Homo sapiens
  siRNA target sequence for EP400 (NM_015409.2,4095-4113).
gtatccgtccgcatctcta

SEQ ID NO: 25989 - DNA, 19 bp, Homo sapiens
  siRNA target sequence for EP400 (NM_015409.2,4100-4118).
cgtccgcatctctaatcct

SEQ ID NO: 25990 - DNA, 19 bp, Homo sapiens
  siRNA target sequence for EP400 (NM_015409.2,4147-4165).
gaagcagatctttctatgt

SEQ ID NO: 25991 - DNA, 19 bp, Homo sapiens
  siRNA target sequence for EP400 (NM_015409.2,4168-4186).
gatctcatcggcttagaaa

SEQ ID NO: 25992 - DNA, 19 bp, Homo sapiens
  siRNA target sequence for EP400 (NM_015409.2,4486-4504).
gcagcagccccgtttcaga

SEQ ID NO: 25993 - DNA, 19 bp, Homo sapiens
  siRNA target sequence for EP400 (NM_015409.2,4725-4743).
cagtggagaggtagtgaaa

SEQ ID NO: 25994 - DNA, 19 bp, Homo sapiens
  siRNA target sequence for EP400 (NM_015409.2,5170-5188).
gagcgcctggatcagattt

SEQ ID NO: 25995 - DNA, 19 bp, Homo sapiens
  siRNA target sequence for EP400 (NM_015409.2,5172-5190).
gcgcctggatcagatttat

SEQ ID NO: 25996 - DNA, 19 bp, Homo sapiens
  siRNA target sequence for EP400 (NM_015409.2,5179-5197).
gatcagatttatttagtca

SEQ ID NO: 25997 - DNA, 19 bp, Homo sapiens
  siRNA target sequence for EP400 (NM_015409.2,5231-5249).
gcagagacttgctaaggat

SEQ ID NO: 25998 - DNA, 19 bp, Homo sapiens
  siRNA target sequence for EP400 (NM_015409.2,5232-5250).
cagagacttgctaaggatt

SEQ ID NO: 25999 - DNA, 19 bp, Homo sapiens
  siRNA target sequence for EP400 (NM_015409.2,5322-5340).
gccagcgcacagttacact

SEQ ID NO: 26000 - DNA, 19 bp, Homo sapiens
  siRNA target sequence for EP400 (NM_015409.2,5323-5341).
ccagcgcacagttacactt

SEQ ID NO: 26001 - DNA, 19 bp, Homo sapiens
  siRNA target sequence for EP400 (NM_015409.2,5326-5344).
gcgcacagttacacttcat

SEQ ID NO: 26002 - DNA, 19 bp, Homo sapiens
  siRNA target sequence for EP400 (NM_015409.2,5354-5372).
gtccaagtgagctgatgtt

SEQ ID NO: 26003 - DNA, 19 bp, Homo sapiens
  siRNA target sequence for EP400 (NM_015409.2,5356-5374).
ccaagtgagctgatgttga

SEQ ID NO: 26004 - DNA, 19 bp, Homo sapiens
  siRNA target sequence for EP400 (NM_015409.2,5392-5410).
gagtctctgcaggatgtta

SEQ ID NO: 26005 - DNA, 19 bp, Homo sapiens
  siRNA target sequence for EP400 (NM_015409.2,5396-5414).
ctctgcaggatgttattga

SEQ ID NO: 26006 - DNA, 19 bp, Homo sapiens
  siRNA target sequence for EP400 (NM_015409.2,5413-5431).
gacagggtggcctttgtga

SEQ ID NO: 26007 - DNA, 19 bp, Homo sapiens
  siRNA target sequence for EP400 (NM_015409.2,5618-5636).
cagggaagttggaagcttt

SEQ ID NO: 26008 - DNA, 19 bp, Homo sapiens
  siRNA target sequence for EP400 (NM_015409.2,5668-5686).
ggacgtcgggtgctgattt

SEQ ID NO: 26009 - DNA, 19 bp, Homo sapiens
  siRNA target sequence for EP400 (NM_015409.2,5669-5687).
gacgtcgggtgctgatttt

SEQ ID NO: 26010 - DNA, 19 bp, Homo sapiens
  siRNA target sequence for EP400 (NM_015409.2,5671-5689).
cgtcgggtgctgattttat

SEQ ID NO: 26011 - DNA, 19 bp, Homo sapiens
  siRNA target sequence for EP400 (NM_015409.2,5675-5693).
gggtgctgattttatcaca

SEQ ID NO: 26012 - DNA, 19 bp, Homo sapiens
  siRNA target sequence for EP400 (NM_015409.2,5710-5728).
gacattttagagatgttct

SEQ ID NO: 26013 - DNA, 19 bp, Homo sapiens
  siRNA target sequence for EP400 (NM_015409.2,5745-5763).
cacctatgtaagaatcgat

SEQ ID NO: 26014 - DNA, 19 bp, Homo sapiens
  siRNA target sequence for EP400 (NM_015409.2,5811-5829).
cagagacaggcggattttt

SEQ ID NO: 26015 - DNA, 19 bp, Homo sapiens
  siRNA target sequence for EP400 (NM_015409.2,5850-5868).
cagccgtaccacaggtata

SEQ ID NO: 26016 - DNA, 19 bp, Homo sapiens
  siRNA target sequence for EP400 (NM_015409.2,5852-5870).
gccgtaccacaggtataaa

SEQ ID NO: 26017 - DNA, 19 bp, Homo sapiens
  siRNA target sequence for EP400 (NM_015409.2,5855-5873).
gtaccacaggtataaacct

SEQ ID NO: 26018 - DNA, 19 bp, Homo sapiens
  siRNA target sequence for EP400 (NM_015409.2,5881-5899).
gcggacaccgtcgtgtttt

SEQ ID NO: 26019 - DNA, 19 bp, Homo sapiens
  siRNA target sequence for EP400 (NM_015409.2,5882-5900).
cggacaccgtcgtgtttta

SEQ ID NO: 26020 - DNA, 19 bp, Homo sapiens
  siRNA target sequence for EP400 (NM_015409.2,5883-5901).
ggacaccgtcgtgttttat

SEQ ID NO: 26021 - DNA, 19 bp, Homo sapiens
  siRNA target sequence for EP400 (NM_015409.2,5888-5906).
ccgtcgtgttttatgacaa

SEQ ID NO: 26022 - DNA, 19 bp, Homo sapiens
  siRNA target sequence for EP400 (NM_015409.2,5889-5907).
cgtcgtgttttatgacaat

SEQ ID NO: 26023 - DNA, 19 bp, Homo sapiens
  siRNA target sequence for EP400 (NM_015409.2,5994-6012).
gagtggcaattccattgaa

SEQ ID NO: 26024 - DNA, 19 bp, Homo sapiens
  siRNA target sequence for EP400 (NM_015409.2,6075-6093).
ctactccatggctttctta

SEQ ID NO: 26025 - DNA, 19 bp, Homo sapiens
  siRNA target sequence for EP400 (NM_015409.2,6080-6098).
ccatggctttcttaactca

SEQ ID NO: 26026 - DNA, 19 bp, Homo sapiens
  siRNA target sequence for EP400 (NM_015409.2,6194-6212).
cttctgtcacggaaaccat

SEQ ID NO: 26027 - DNA, 19 bp, Homo sapiens
  siRNA target sequence for EP400 (NM_015409.2,6244-6262).
gccctcaagagtattgagt

SEQ ID NO: 26028 - DNA, 19 bp, Homo sapiens
  siRNA target sequence for EP400 (NM_015409.2,6245-6263).
ccctcaagagtattgagta

SEQ ID NO: 26029 - DNA, 19 bp, Homo sapiens
  siRNA target sequence for EP400 (NM_015409.2,6246-6264).
cctcaagagtattgagtat

SEQ ID NO: 26030 - DNA, 19 bp, Homo sapiens
  siRNA target sequence for EP400 (NM_015409.2,6342-6360).
gaacatgccgtgtgatgaa

SEQ ID NO: 26031 - DNA, 19 bp, Homo sapiens
  siRNA target sequence for EP400 (NM_015409.2,6396-6414).
ggagcagcttacaccaatt

SEQ ID NO: 26032 - DNA, 19 bp, Homo sapiens
  siRNA target sequence for EP400 (NM_015409.2,6399-6417).
gcagcttacaccaattgaa

SEQ ID NO: 26033 - DNA, 19 bp, Homo sapiens
  siRNA target sequence for EP400 (NM_015409.2,6400-6418).
cagcttacaccaattgaaa

SEQ ID NO: 26034 - DNA, 19 bp, Homo sapiens
  siRNA target sequence for EP400 (NM_015409.2,6439-6457).
gaattattccatacttcta

SEQ ID NO: 26035 - DNA, 19 bp, Homo sapiens
  siRNA target sequence for EP400 (NM_015409.2,6719-6737).
cggtcatgtgtctcatgta

SEQ ID NO: 26036 - DNA, 19 bp, Homo sapiens
  siRNA target sequence for EP400 (NM_015409.2,6720-6738).
ggtcatgtgtctcatgtat

SEQ ID NO: 26037 - DNA, 19 bp, Homo sapiens
  siRNA target sequence for EP400 (NM_015409.2,6723-6741).
catgtgtctcatgtatgaa

SEQ ID NO: 26038 - DNA, 19 bp, Homo sapiens
  siRNA target sequence for EP400 (NM_015409.2,6893-6911).
caccaggacttctgaaaat

SEQ ID NO: 26039 - DNA, 19 bp, Homo sapiens
  siRNA target sequence for EP400 (NM_015409.2,7121-7139).
cacctaattgggatcttgt

SEQ ID NO: 26040 - DNA, 19 bp, Homo sapiens
  siRNA target sequence for EP400 (NM_015409.2,7138-7156).
gtcagtgacgttgttaact

SEQ ID NO: 26041 - DNA, 19 bp, Homo sapiens
  siRNA target sequence for EP400 (NM_015409.2,7193-7211).
ggaatcgctacgagaatgt

SEQ ID NO: 26042 - DNA, 19 bp, Homo sapiens
  siRNA target sequence for EP400 (NM_015409.2,7199-7217).
gctacgagaatgtcatcat

SEQ ID NO: 26043 - DNA, 19 bp, Homo sapiens
  siRNA target sequence for EP400 (NM_015409.2,7257-7275).
ccgtacgagccagatctat

SEQ ID NO: 26044 - DNA, 19 bp, Homo sapiens
  siRNA target sequence for EP400 (NM_015409.2,7311-7329).
cacgagccactttgactta

SEQ ID NO: 26045 - DNA, 19 bp, Homo sapiens
  siRNA target sequence for EP400 (NM_015409.2,7313-7331).
cgagccactttgacttaat

SEQ ID NO: 26046 - DNA, 19 bp, Homo sapiens
  siRNA target sequence for EP400 (NM_015409.2,7350-7368).
gaggagtcccccaatcaaa

SEQ ID NO: 26047 - DNA, 19 bp, Homo sapiens
  siRNA target sequence for EP400 (NM_015409.2,7379-7397).
gcatgaatccctttcagaa

SEQ ID NO: 26048 - DNA, 19 bp, Homo sapiens
  siRNA target sequence for EP400 (NM_015409.2,7413-7431).
gtctgtgttggcagaaagt

SEQ ID NO: 26049 - DNA, 19 bp, Homo sapiens
  siRNA target sequence for EP400 (NM_015409.2,7484-7502).
cagagcgaatcgcaaaaga

SEQ ID NO: 26050 - DNA, 19 bp, Homo sapiens
  siRNA target sequence for EP400 (NM_015409.2,7486-7504).
gagcgaatcgcaaaagaga

SEQ ID NO: 26051 - DNA, 19 bp, Homo sapiens
  siRNA target sequence for EP400 (NM_015409.2,7488-7506).
gcgaatcgcaaaagagaaa

SEQ ID NO: 26052 - DNA, 19 bp, Homo sapiens
  siRNA target sequence for EP400 (NM_015409.2,7489-7507).
cgaatcgcaaaagagaaaa

SEQ ID NO: 26053 - DNA, 19 bp, Homo sapiens
  siRNA target sequence for EP400 (NM_015409.2,7758-7776).
cgtactggcaggaaccatt

SEQ ID NO: 26054 - DNA, 19 bp, Homo sapiens
  siRNA target sequence for EP400 (NM_015409.2,7811-7829).
gtgccgtgagtggaaatgt

SEQ ID NO: 26055 - DNA, 19 bp, Homo sapiens
  siRNA target sequence for EP400 (NM_015409.2,7813-7831).
gccgtgagtggaaatgtga

SEQ ID NO: 26056 - DNA, 19 bp, Homo sapiens
  siRNA target sequence for EP400 (NM_015409.2,7814-7832).
ccgtgagtggaaatgtgat

SEQ ID NO: 26057 - DNA, 19 bp, Homo sapiens
  siRNA target sequence for EP400 (NM_015409.2,7903-7921).
gctcctggggccttgacta

SEQ ID NO: 26058 - DNA, 19 bp, Homo sapiens
  siRNA target sequence for EP400 (NM_015409.2,8162-8180).
ccatcacacctgcacattt

SEQ ID NO: 26059 - DNA, 19 bp, Homo sapiens
  siRNA target sequence for EP400 (NM_015409.2,8369-8387).
cgccggaacacctcatcaa

SEQ ID NO: 26060 - DNA, 19 bp, Homo sapiens
  siRNA target sequence for EP400 (NM_015409.2,8370-8388).
gccggaacacctcatcaaa

SEQ ID NO: 26061 - DNA, 19 bp, Homo sapiens
  siRNA target sequence for EP400 (NM_015409.2,8371-8389).
ccggaacacctcatcaaaa

SEQ ID NO: 26062 - DNA, 19 bp, Homo sapiens
  siRNA target sequence for EP400 (NM_015409.2,8372-8390).
cggaacacctcatcaaaat

SEQ ID NO: 26063 - DNA, 19 bp, Homo sapiens
  siRNA target sequence for EP400 (NM_015409.2,9226-9244).
gtggttcagcagaaactca

SEQ ID NO: 26064 - DNA, 19 bp, Homo sapiens
  siRNA target sequence for EP400 (NM_015409.2,9228-9246).
ggttcagcagaaactcatt

SEQ ID NO: 26065 - DNA, 19 bp, Homo sapiens
  siRNA target sequence for EP400 (NM_015409.2,9377-9395).
ggctaaagacacctactaa

SEQ ID NO: 26066 - DNA, 19 bp, Homo sapiens
  siRNA target sequence for ERCC4 (NM_005236.1,249-267).
cctccctcgccgtgtaaca

SEQ ID NO: 26067 - DNA, 19 bp, Homo sapiens
  siRNA target sequence for ERCC4 (NM_005236.1,250-268).
ctccctcgccgtgtaacaa

SEQ ID NO: 26068 - DNA, 19 bp, Homo sapiens
  siRNA target sequence for ERCC4 (NM_005236.1,252-270).
ccctcgccgtgtaacaaat

SEQ ID NO: 26069 - DNA, 19 bp, Homo sapiens
  siRNA target sequence for ERCC4 (NM_005236.1,254-272).
ctcgccgtgtaacaaatga

SEQ ID NO: 26070 - DNA, 19 bp, Homo sapiens
  siRNA target sequence for ERCC4 (NM_005236.1,256-274).
cgccgtgtaacaaatgaaa

SEQ ID NO: 26071 - DNA, 19 bp, Homo sapiens
  siRNA target sequence for ERCC4 (NM_005236.1,259-277).
cgtgtaacaaatgaaatca

SEQ ID NO: 26072 - DNA, 19 bp, Homo sapiens
  siRNA target sequence for ERCC4 (NM_005236.1,281-299).
gcaacagtcgctatgaagt

SEQ ID NO: 26073 - DNA, 19 bp, Homo sapiens
  siRNA target sequence for ERCC4 (NM_005236.1,282-300).
caacagtcgctatgaagtt

SEQ ID NO: 26074 - DNA, 19 bp, Homo sapiens
  siRNA target sequence for ERCC4 (NM_005236.1,303-321).
cacacaaggtggtgttata

SEQ ID NO: 26075 - DNA, 19 bp, Homo sapiens
  siRNA target sequence for ERCC4 (NM_005236.1,316-334).
gttatatttgcgacaagta

SEQ ID NO: 26076 - DNA, 19 bp, Homo sapiens
  siRNA target sequence for ERCC4 (NM_005236.1,326-344).
cgacaagtaggatacttgt

SEQ ID NO: 26077 - DNA, 19 bp, Homo sapiens
  siRNA target sequence for ERCC4 (NM_005236.1,335-353).
ggatacttgtggttgactt

SEQ ID NO: 26078 - DNA, 19 bp, Homo sapiens
  siRNA target sequence for ERCC4 (NM_005236.1,349-367).
gacttcttgactgatagaa

SEQ ID NO: 26079 - DNA, 19 bp, Homo sapiens
  siRNA target sequence for ERCC4 (NM_005236.1,361-379).
gatagaataccttcagatt

SEQ ID NO: 26080 - DNA, 19 bp, Homo sapiens
  siRNA target sequence for ERCC4 (NM_005236.1,365-383).
gaataccttcagatttaat

SEQ ID NO: 26081 - DNA, 19 bp, Homo sapiens
  siRNA target sequence for ERCC4 (NM_005236.1,399-417).
gtatagagcccacagaata

SEQ ID NO: 26082 - DNA, 19 bp, Homo sapiens
  siRNA target sequence for ERCC4 (NM_005236.1,404-422).
gagcccacagaataatcga

SEQ ID NO: 26083 - DNA, 19 bp, Homo sapiens
  siRNA target sequence for ERCC4 (NM_005236.1,425-443).
cttgtcaagaagcattcat

SEQ ID NO: 26084 - DNA, 19 bp, Homo sapiens
  siRNA target sequence for ERCC4 (NM_005236.1,448-466).
cgcctctttcgccagaaaa

SEQ ID NO: 26085 - DNA, 19 bp, Homo sapiens
  siRNA target sequence for ERCC4 (NM_005236.1,449-467).
gcctctttcgccagaaaaa

SEQ ID NO: 26086 - DNA, 19 bp, Homo sapiens
  siRNA target sequence for ERCC4 (NM_005236.1,472-490).
cgtggttttattaaagctt

SEQ ID NO: 26087 - DNA, 19 bp, Homo sapiens
  siRNA target sequence for ERCC4 (NM_005236.1,589-607).
catgtagcagtaaactcat

SEQ ID NO: 26088 - DNA, 19 bp, Homo sapiens
  siRNA target sequence for ERCC4 (NM_005236.1,618-636).
gcacaaacctgaagttgta

SEQ ID NO: 26089 - DNA, 19 bp, Homo sapiens
  siRNA target sequence for ERCC4 (NM_005236.1,659-677).
ctaccatgcttgctataca

SEQ ID NO: 26090 - DNA, 19 bp, Homo sapiens
  siRNA target sequence for ERCC4 (NM_005236.1,671-689).
ctatacagactgctatact

SEQ ID NO: 26091 - DNA, 19 bp, Homo sapiens
  siRNA target sequence for ERCC4 (NM_005236.1,789-807).
caagacaatccgccattat

SEQ ID NO: 26092 - DNA, 19 bp, Homo sapiens
  siRNA target sequence for ERCC4 (NM_005236.1,833-851).
gagccaagactaaatcctt

SEQ ID NO: 26093 - DNA, 19 bp, Homo sapiens
  siRNA target sequence for ERCC4 (NM_005236.1,853-871).
gttcaggatttgaagatat

SEQ ID NO: 26094 - DNA, 19 bp, Homo sapiens
  siRNA target sequence for ERCC4 (NM_005236.1,858-876).
ggatttgaagatattacga

SEQ ID NO: 26095 - DNA, 19 bp, Homo sapiens
  siRNA target sequence for ERCC4 (NM_005236.1,885-903).
gcagtatctctctcagtat

SEQ ID NO: 26096 - DNA, 19 bp, Homo sapiens
  siRNA target sequence for ERCC4 (NM_005236.1,900-918).
gtatgattgtgtcacattt

SEQ ID NO: 26097 - DNA, 19 bp, Homo sapiens
  siRNA target sequence for ERCC4 (NM_005236.1,993-1011).
cagcacctcgatgtttata

SEQ ID NO: 26098 - DNA, 19 bp, Homo sapiens
  siRNA target sequence for ERCC4 (NM_005236.1,996-1014).
cacctcgatgtttataaat

SEQ ID NO: 26099 - DNA, 19 bp, Homo sapiens
  siRNA target sequence for ERCC4 (NM_005236.1,999-1017).
ctcgatgtttataaatgct

SEQ ID NO: 26100 - DNA, 19 bp, Homo sapiens
  siRNA target sequence for ERCC4 (NM_005236.1,1016-1034).
ctcgagcaagggtttatca

SEQ ID NO: 26101 - DNA, 19 bp, Homo sapiens
  siRNA target sequence for ERCC4 (NM_005236.1,1019-1037).
gagcaagggtttatcatct

SEQ ID NO: 26102 - DNA, 19 bp, Homo sapiens
  siRNA target sequence for ERCC4 (NM_005236.1,1039-1057).
ccagatgccaaaatgagta

SEQ ID NO: 26103 - DNA, 19 bp, Homo sapiens
  siRNA target sequence for ERCC4 (NM_005236.1,1042-1060).
gatgccaaaatgagtaaaa

SEQ ID NO: 26104 - DNA, 19 bp, Homo sapiens
  siRNA target sequence for ERCC4 (NM_005236.1,1047-1065).
caaaatgagtaaaaaagaa

SEQ ID NO: 26105 - DNA, 19 bp, Homo sapiens
  siRNA target sequence for ERCC4 (NM_005236.1,1144-1162).
gaggcactgactgaagtat

SEQ ID NO: 26106 - DNA, 19 bp, Homo sapiens
  siRNA target sequence for ERCC4 (NM_005236.1,1146-1164).
ggcactgactgaagtatta

SEQ ID NO: 26107 - DNA, 19 bp, Homo sapiens
  siRNA target sequence for ERCC4 (NM_005236.1,1205-1223).
gtggtccaggtcaagtact

SEQ ID NO: 26108 - DNA, 19 bp, Homo sapiens
  siRNA target sequence for ERCC4 (NM_005236.1,1208-1226).
gtccaggtcaagtactgat

SEQ ID NO: 26109 - DNA, 19 bp, Homo sapiens
  siRNA target sequence for ERCC4 (NM_005236.1,1257-1275).
gctgagagactatatcact

SEQ ID NO: 26110 - DNA, 19 bp, Homo sapiens
  siRNA target sequence for ERCC4 (NM_005236.1,1280-1298).
gagcggaggccttcttatt

SEQ ID NO: 26111 - DNA, 19 bp, Homo sapiens
  siRNA target sequence for ERCC4 (NM_005236.1,1282-1300).
gcggaggccttcttattga

SEQ ID NO: 26112 - DNA, 19 bp, Homo sapiens
  siRNA target sequence for ERCC4 (NM_005236.1,1345-1363).
gtctggatgaaatttagga

SEQ ID NO: 26113 - DNA, 19 bp, Homo sapiens
  siRNA target sequence for ERCC4 (NM_005236.1,1406-1424).
ctaaagacccccaaaacaa

SEQ ID NO: 26114 - DNA, 19 bp, Homo sapiens
  siRNA target sequence for ERCC4 (NM_005236.1,1429-1447).
cgggcttctaccaaagaaa

SEQ ID NO: 26115 - DNA, 19 bp, Homo sapiens
  siRNA target sequence for ERCC4 (NM_005236.1,1469-1487).
ggaagttgaccttaactca

SEQ ID NO: 26116 - DNA, 19 bp, Homo sapiens
  siRNA target sequence for ERCC4 (NM_005236.1,1470-1488).
gaagttgaccttaactcaa

SEQ ID NO: 26117 - DNA, 19 bp, Homo sapiens
  siRNA target sequence for ERCC4 (NM_005236.1,1476-1494).
gaccttaactcaaatggta

SEQ ID NO: 26118 - DNA, 19 bp, Homo sapiens
  siRNA target sequence for ERCC4 (NM_005236.1,1523-1541).
gagatgtcgaggaaggata

SEQ ID NO: 26119 - DNA, 19 bp, Homo sapiens
  siRNA target sequence for ERCC4 (NM_005236.1,1694-1712).
ctctgacaagggtactaca

SEQ ID NO: 26120 - DNA, 19 bp, Homo sapiens
  siRNA target sequence for ERCC4 (NM_005236.1,1700-1718).
caagggtactacatgaagt

SEQ ID NO: 26121 - DNA, 19 bp, Homo sapiens
  siRNA target sequence for ERCC4 (NM_005236.1,1723-1741).
ccaagatacgtggttcttt

SEQ ID NO: 26122 - DNA, 19 bp, Homo sapiens
  siRNA target sequence for ERCC4 (NM_005236.1,1746-1764).
cgcagagctaacctttgtt

SEQ ID NO: 26123 - DNA, 19 bp, Homo sapiens
  siRNA target sequence for ERCC4 (NM_005236.1,1762-1780).
gttcggcagcttgaaattt

SEQ ID NO: 26124 - DNA, 19 bp, Homo sapiens
  siRNA target sequence for ERCC4 (NM_005236.1,1765-1783).
cggcagcttgaaatttaca

SEQ ID NO: 26125 - DNA, 19 bp, Homo sapiens
  siRNA target sequence for ERCC4 (NM_005236.1,1843-1861).
gaggaacaacgctatctca

SEQ ID NO: 26126 - DNA, 19 bp, Homo sapiens
  siRNA target sequence for ERCC4 (NM_005236.1,1862-1880).
ctgctttgcggaaagaaaa

SEQ ID NO: 26127 - DNA, 19 bp, Homo sapiens
  siRNA target sequence for ERCC4 (NM_005236.1,1920-1938).
ggttgtccctgaagaaaga

SEQ ID NO: 26128 - DNA, 19 bp, Homo sapiens
  siRNA target sequence for ERCC4 (NM_005236.1,2058-2076).
ggatatgcgtgaatttcga

SEQ ID NO: 26129 - DNA, 19 bp, Homo sapiens
  siRNA target sequence for ERCC4 (NM_005236.1,2059-2077).
gatatgcgtgaatttcgaa

SEQ ID NO: 26130 - DNA, 19 bp, Homo sapiens
  siRNA target sequence for ERCC4 (NM_005236.1,2172-2190).
ggagcgcaagagtatcagt

SEQ ID NO: 26131 - DNA, 19 bp, Homo sapiens
  siRNA target sequence for ERCC4 (NM_005236.1,2176-2194).
cgcaagagtatcagtgatt

SEQ ID NO: 26132 - DNA, 19 bp, Homo sapiens
  siRNA target sequence for ERCC4 (NM_005236.1,2177-2195).
gcaagagtatcagtgattt

SEQ ID NO: 26133 - DNA, 19 bp, Homo sapiens
  siRNA target sequence for ERCC4 (NM_005236.1,2261-2279).
gtcccgtgcttctgattga

SEQ ID NO: 26134 - DNA, 19 bp, Homo sapiens
  siRNA target sequence for ERCC4 (NM_005236.1,2264-2282).
ccgtgcttctgattgagtt

SEQ ID NO: 26135 - DNA, 19 bp, Homo sapiens
  siRNA target sequence for ERCC4 (NM_005236.1,2423-2441).
caacggcggagttgtttga

SEQ ID NO: 26136 - DNA, 19 bp, Homo sapiens
  siRNA target sequence for ERCC4 (NM_005236.1,2478-2496).
gacagcactggccattaca

SEQ ID NO: 26137 - DNA, 19 bp, Homo sapiens
  siRNA target sequence for ERCC4 (NM_005236.1,2487-2505).
ggccattacagcagattct

SEQ ID NO: 26138 - DNA, 19 bp, Homo sapiens
  siRNA target sequence for ERCC4 (NM_005236.1,2489-2507).
ccattacagcagattctga

SEQ ID NO: 26139 - DNA, 19 bp, Homo sapiens
  siRNA target sequence for ERCC4 (NM_005236.1,2516-2534).
ccgagtcagagaagtataa

SEQ ID NO: 26140 - DNA, 19 bp, Homo sapiens
  siRNA target sequence for ERCC4 (NM_005236.1,2517-2535).
cgagtcagagaagtataat

SEQ ID NO: 26141 - DNA, 19 bp, Homo sapiens
  siRNA target sequence for ERCC4 (NM_005236.1,2520-2538).
gtcagagaagtataatcct

SEQ ID NO: 26142 - DNA, 19 bp, Homo sapiens
  siRNA target sequence for ERCC4 (NM_005236.1,2537-2555).
ctggtccccaagacttctt

SEQ ID NO: 26143 - DNA, 19 bp, Homo sapiens
  siRNA target sequence for ERCC4 (NM_005236.1,2539-2557).
ggtccccaagacttcttgt

SEQ ID NO: 26144 - DNA, 19 bp, Homo sapiens
  siRNA target sequence for ERCC4 (NM_005236.1,2540-2558).
gtccccaagacttcttgtt

SEQ ID NO: 26145 - DNA, 19 bp, Homo sapiens
  siRNA target sequence for ERCC4 (NM_005236.1,2567-2585).
caggggtgaatgccaaaaa

SEQ ID NO: 26146 - DNA, 19 bp, Homo sapiens
  siRNA target sequence for ERCC4 (NM_005236.1,2569-2587).
ggggtgaatgccaaaaact

SEQ ID NO: 26147 - DNA, 19 bp, Homo sapiens
  siRNA target sequence for ERCC4 (NM_005236.1,2594-2612).
ccttgatgcaccacgttaa

SEQ ID NO: 26148 - DNA, 19 bp, Homo sapiens
  siRNA target sequence for ERCC4 (NM_005236.1,2613-2631).
gaacatcgcagaattagca

SEQ ID NO: 26149 - DNA, 19 bp, Homo sapiens
  siRNA target sequence for ERCC4 (NM_005236.1,2675-2693).
caaatgccaaacagcttta

SEQ ID NO: 26150 - DNA, 19 bp, Homo sapiens
  siRNA target sequence for ERCC4 (NM_005236.1,2719-2737).
gaagtcgtatcaaaaggaa

SEQ ID NO: 26151 - DNA, 19 bp, Homo sapiens
  siRNA target sequence for ERN1 (NM_001433.1,142-160).
ggcctcgggatttttggaa

SEQ ID NO: 26152 - DNA, 19 bp, Homo sapiens
  siRNA target sequence for ERN1 (NM_001433.1,178-196).
cttcctgaaaccttgttgt

SEQ ID NO: 26153 - DNA, 19 bp, Homo sapiens
  siRNA target sequence for ERN1 (NM_001433.1,182-200).
ctgaaaccttgttgtttgt

SEQ ID NO: 26154 - DNA, 19 bp, Homo sapiens
  siRNA target sequence for ERN1 (NM_001433.1,203-221).
caacgctggatggaagttt

SEQ ID NO: 26155 - DNA, 19 bp, Homo sapiens
  siRNA target sequence for ERN1 (NM_001433.1,237-255).
gaggacaggctcaatcaaa

SEQ ID NO: 26156 - DNA, 19 bp, Homo sapiens
  siRNA target sequence for ERN1 (NM_001433.1,311-329).
cctttctcccagatcctaa

SEQ ID NO: 26157 - DNA, 19 bp, Homo sapiens
  siRNA target sequence for ERN1 (NM_001433.1,312-330).
ctttctcccagatcctaat

SEQ ID NO: 26158 - DNA, 19 bp, Homo sapiens
  siRNA target sequence for ERN1 (NM_001433.1,372-390).
cctgacgaaacttcctttt

SEQ ID NO: 26159 - DNA, 19 bp, Homo sapiens
  siRNA target sequence for ERN1 (NM_001433.1,373-391).
ctgacgaaacttcctttta

SEQ ID NO: 26160 - DNA, 19 bp, Homo sapiens
  siRNA target sequence for ERN1 (NM_001433.1,417-435).
cccatgccgaagttcagat

SEQ ID NO: 26161 - DNA, 19 bp, Homo sapiens
  siRNA target sequence for ERN1 (NM_001433.1,422-440).
gccgaagttcagatggaat

SEQ ID NO: 26162 - DNA, 19 bp, Homo sapiens
  siRNA target sequence for ERN1 (NM_001433.1,459-477).
gcaggacatctggtatgtt

SEQ ID NO: 26163 - DNA, 19 bp, Homo sapiens
  siRNA target sequence for ERN1 (NM_001433.1,518-536).
cggcctttgcagatagtct

SEQ ID NO: 26164 - DNA, 19 bp, Homo sapiens
  siRNA target sequence for ERN1 (NM_001433.1,545-563).
caacctctcttctgtatct

SEQ ID NO: 26165 - DNA, 19 bp, Homo sapiens
  siRNA target sequence for ERN1 (NM_001433.1,558-576).
gtatcttgggcgaacagaa

SEQ ID NO: 26166 - DNA, 19 bp, Homo sapiens
  siRNA target sequence for ERN1 (NM_001433.1,618-636).
gtggaatgccacctacttt

SEQ ID NO: 26167 - DNA, 19 bp, Homo sapiens
  siRNA target sequence for ERN1 (NM_001433.1,739-757).
gacgtcctgtggatccaaa

SEQ ID NO: 26168 - DNA, 19 bp, Homo sapiens
  siRNA target sequence for ERN1 (NM_001433.1,772-790).
gtggtggccttttatgtct

SEQ ID NO: 26169 - DNA, 19 bp, Homo sapiens
  siRNA target sequence for ERN1 (NM_001433.1,838-856).
gagaccctgcgctatctga

SEQ ID NO: 26170 - DNA, 19 bp, Homo sapiens
  siRNA target sequence for ERN1 (NM_001433.1,847-865).
cgctatctgaccttcatgt

SEQ ID NO: 26171 - DNA, 19 bp, Homo sapiens
  siRNA target sequence for ERN1 (NM_001433.1,933-951).
gctgacgcccactctgtat

SEQ ID NO: 26172 - DNA, 19 bp, Homo sapiens
  siRNA target sequence for ERN1 (NM_001433.1,936-954).
gacgcccactctgtatgtt

SEQ ID NO: 26173 - DNA, 19 bp, Homo sapiens
  siRNA target sequence for ERN1 (NM_001433.1,1104-1122).
cagcacggacgtcaagttt

SEQ ID NO: 26174 - DNA, 19 bp, Homo sapiens
  siRNA target sequence for ERN1 (NM_001433.1,1106-1124).
gcacggacgtcaagtttga

SEQ ID NO: 26175 - DNA, 19 bp, Homo sapiens
  siRNA target sequence for ERN1 (NM_001433.1,1107-1125).
cacggacgtcaagtttgat

SEQ ID NO: 26176 - DNA, 19 bp, Homo sapiens
  siRNA target sequence for ERN1 (NM_001433.1,1150-1168).
ctcaactacttgaggaatt

SEQ ID NO: 26177 - DNA, 19 bp, Homo sapiens
  siRNA target sequence for ERN1 (NM_001433.1,1177-1195).
ctgataggacaccatgaaa

SEQ ID NO: 26178 - DNA, 19 bp, Homo sapiens
  siRNA target sequence for ERN1 (NM_001433.1,1292-1310).
gctttgaggaagttatcaa

SEQ ID NO: 26179 - DNA, 19 bp, Homo sapiens
  siRNA target sequence for ERN1 (NM_001433.1,1402-1420).
cccgtggactccatgctta

SEQ ID NO: 26180 - DNA, 19 bp, Homo sapiens
  siRNA target sequence for ERN1 (NM_001433.1,1403-1421).
ccgtggactccatgcttaa

SEQ ID NO: 26181 - DNA, 19 bp, Homo sapiens
  siRNA target sequence for ERN1 (NM_001433.1,1463-1481).
gctgggtggccttcatcat

SEQ ID NO: 26182 - DNA, 19 bp, Homo sapiens
  siRNA target sequence for ERN1 (NM_001433.1,1835-1853).
gagctgagggcacaattgt

SEQ ID NO: 26183 - DNA, 19 bp, Homo sapiens
  siRNA target sequence for ERN1 (NM_001433.1,1837-1855).
gctgagggcacaattgtgt

SEQ ID NO: 26184 - DNA, 19 bp, Homo sapiens
  siRNA target sequence for ERN1 (NM_001433.1,1895-1913).
ggatcctccccgagtgttt

SEQ ID NO: 26185 - DNA, 19 bp, Homo sapiens
  siRNA target sequence for ERN1 (NM_001433.1,1896-1914).
gatcctccccgagtgtttt

SEQ ID NO: 26186 - DNA, 19 bp, Homo sapiens
  siRNA target sequence for ERN1 (NM_001433.1,2625-2643).
ggacgtgagcgacagaata

SEQ ID NO: 26187 - DNA, 19 bp, Homo sapiens
  siRNA target sequence for ERN1 (NM_001433.1,2628-2646).
cgtgagcgacagaatagaa

SEQ ID NO: 26188 - DNA, 19 bp, Homo sapiens
  siRNA target sequence for ERN1 (NM_001433.1,2629-2647).
gtgagcgacagaatagaaa

SEQ ID NO: 26189 - DNA, 19 bp, Homo sapiens
  siRNA target sequence for ERN1 (NM_001433.1,2666-2684).
cgatcgtgaagcagttaga

SEQ ID NO: 26190 - DNA, 19 bp, Homo sapiens
  siRNA target sequence for ERN1 (NM_001433.1,2713-2731).
gactggcgggagaacatca

SEQ ID NO: 26191 - DNA, 19 bp, Homo sapiens
  siRNA target sequence for ERN1 (NM_001433.1,2743-2761).
cagacagacctgcgtaaat

SEQ ID NO: 26192 - DNA, 19 bp, Homo sapiens
  siRNA target sequence for ERN1 (NM_001433.1,2755-2773).
cgtaaattcaggacctata

SEQ ID NO: 26193 - DNA, 19 bp, Homo sapiens
  siRNA target sequence for ERN1 (NM_001433.1,2794-2812).
ctcctccgagccatgagaa

SEQ ID NO: 26194 - DNA, 19 bp, Homo sapiens
  siRNA target sequence for EVI1 (NM_005241.1,277-295).
gaagactatccccatgaaa

SEQ ID NO: 26195 - DNA, 19 bp, Homo sapiens
  siRNA target sequence for EVI1 (NM_005241.1,280-298).
gactatccccatgaaacta

SEQ ID NO: 26196 - DNA, 19 bp, Homo sapiens
  siRNA target sequence for EVI1 (NM_005241.1,312-330).
ccacgaagaacggcaatat

SEQ ID NO: 26197 - DNA, 19 bp, Homo sapiens
  siRNA target sequence for EVI1 (NM_005241.1,346-364).
gaccagctctttgaatcta

SEQ ID NO: 26198 - DNA, 19 bp, Homo sapiens
  siRNA target sequence for EVI1 (NM_005241.1,379-397).
gatcaccaaaagtttccat

SEQ ID NO: 26199 - DNA, 19 bp, Homo sapiens
  siRNA target sequence for EVI1 (NM_005241.1,411-429).
ctcagcattttcaatggtt

SEQ ID NO: 26200 - DNA, 19 bp, Homo sapiens
  siRNA target sequence for EVI1 (NM_005241.1,779-797).
cttcgtcgggcctcaaaca

SEQ ID NO: 26201 - DNA, 19 bp, Homo sapiens
  siRNA target sequence for EVI1 (NM_005241.1,782-800).
cgtcgggcctcaaacaaca

SEQ ID NO: 26202 - DNA, 19 bp, Homo sapiens
  siRNA target sequence for EVI1 (NM_005241.1,841-859).
gtctgccataaatcctata

SEQ ID NO: 26203 - DNA, 19 bp, Homo sapiens
  siRNA target sequence for EVI1 (NM_005241.1,845-863).
gccataaatcctatactca

SEQ ID NO: 26204 - DNA, 19 bp, Homo sapiens
  siRNA target sequence for EVI1 (NM_005241.1,945-963).
cagcactacgtcttcctta

SEQ ID NO: 26205 - DNA, 19 bp, Homo sapiens
  siRNA target sequence for EVI1 (NM_005241.1,947-965).
gcactacgtcttccttaaa

SEQ ID NO: 26206 - DNA, 19 bp, Homo sapiens
  siRNA target sequence for EVI1 (NM_005241.1,948-966).
cactacgtcttccttaaat

SEQ ID NO: 26207 - DNA, 19 bp, Homo sapiens
  siRNA target sequence for EVI1 (NM_005241.1,950-968).
ctacgtcttccttaaataa

SEQ ID NO: 26208 - DNA, 19 bp, Homo sapiens
  siRNA target sequence for EVI1 (NM_005241.1,1048-1066).
ccagctatggataaaacgt

SEQ ID NO: 26209 - DNA, 19 bp, Homo sapiens
  siRNA target sequence for EVI1 (NM_005241.1,1057-1075).
gataaaacgtccatggtta

SEQ ID NO: 26210 - DNA, 19 bp, Homo sapiens
  siRNA target sequence for EVI1 (NM_005241.1,1065-1083).
gtccatggttaatatgagt

SEQ ID NO: 26211 - DNA, 19 bp, Homo sapiens
  siRNA target sequence for EVI1 (NM_005241.1,1203-1221).
ccacaggcctcctttgata

SEQ ID NO: 26212 - DNA, 19 bp, Homo sapiens
  siRNA target sequence for EVI1 (NM_005241.1,1223-1241).
ctgctagttctcctgttaa

SEQ ID NO: 26213 - DNA, 19 bp, Homo sapiens
  siRNA target sequence for EVI1 (NM_005241.1,1234-1252).
cctgttaaaggactatcaa

SEQ ID NO: 26214 - DNA, 19 bp, Homo sapiens
  siRNA target sequence for EVI1 (NM_005241.1,1287-1305).
catgacacatcctcagata

SEQ ID NO: 26215 - DNA, 19 bp, Homo sapiens
  siRNA target sequence for EVI1 (NM_005241.1,1348-1366).
ccatctgtaggggacaata

SEQ ID NO: 26216 - DNA, 19 bp, Homo sapiens
  siRNA target sequence for EVI1 (NM_005241.1,1584-1602).
gaatctggcttcaataaat

SEQ ID NO: 26217 - DNA, 19 bp, Homo sapiens
  siRNA target sequence for EVI1 (NM_005241.1,1662-1680).
ggtgtcaggagctgtgaat

SEQ ID NO: 26218 - DNA, 19 bp, Homo sapiens
  siRNA target sequence for EVI1 (NM_005241.1,1669-1687).
ggagctgtgaatgattcta

SEQ ID NO: 26219 - DNA, 19 bp, Homo sapiens
  siRNA target sequence for EVI1 (NM_005241.1,1670-1688).
gagctgtgaatgattctat

SEQ ID NO: 26220 - DNA, 19 bp, Homo sapiens
  siRNA target sequence for EVI1 (NM_005241.1,1692-1710).
ggctattgcttctattgct

SEQ ID NO: 26221 - DNA, 19 bp, Homo sapiens
  siRNA target sequence for EVI1 (NM_005241.1,1752-1770).
caaaaaagttggagcttta

SEQ ID NO: 26222 - DNA, 19 bp, Homo sapiens
  siRNA target sequence for EVI1 (NM_005241.1,1805-1823).
cagcattctctcaatcaat

SEQ ID NO: 26223 - DNA, 19 bp, Homo sapiens
  siRNA target sequence for EVI1 (NM_005241.1,1824-1842).
gtacccatttcctgataga

SEQ ID NO: 26224 - DNA, 19 bp, Homo sapiens
  siRNA target sequence for EVI1 (NM_005241.1,1834-1852).
cctgatagagacttgagat

SEQ ID NO: 26225 - DNA, 19 bp, Homo sapiens
  siRNA target sequence for EVI1 (NM_005241.1,1875-1893).
ccaatcaccaggtgaagta

SEQ ID NO: 26226 - DNA, 19 bp, Homo sapiens
  siRNA target sequence for EVI1 (NM_005241.1,1935-1953).
caccactaagcgaaaggat

SEQ ID NO: 26227 - DNA, 19 bp, Homo sapiens
  siRNA target sequence for EVI1 (NM_005241.1,1940-1958).
ctaagcgaaaggatgagaa

SEQ ID NO: 26228 - DNA, 19 bp, Homo sapiens
  siRNA target sequence for EVI1 (NM_005241.1,2011-2029).
gaccagcccctggatctaa

SEQ ID NO: 26229 - DNA, 19 bp, Homo sapiens
  siRNA target sequence for EVI1 (NM_005241.1,2064-2082).
gctgactgagcctcgaaaa

SEQ ID NO: 26230 - DNA, 19 bp, Homo sapiens
  siRNA target sequence for EVI1 (NM_005241.1,2069-2087).
ctgagcctcgaaaaaacca

SEQ ID NO: 26231 - DNA, 19 bp, Homo sapiens
  siRNA target sequence for EVI1 (NM_005241.1,2107-2125).
ggaagcaacgtcgaatcaa

SEQ ID NO: 26232 - DNA, 19 bp, Homo sapiens
  siRNA target sequence for EVI1 (NM_005241.1,2156-2174).
caagacccactcctttctt

SEQ ID NO: 26233 - DNA, 19 bp, Homo sapiens
  siRNA target sequence for EVI1 (NM_005241.1,2159-2177).
gacccactcctttctttat

SEQ ID NO: 26234 - DNA, 19 bp, Homo sapiens
  siRNA target sequence for EVI1 (NM_005241.1,2215-2233).
gacccacttgaagctttaa

SEQ ID NO: 26235 - DNA, 19 bp, Homo sapiens
  siRNA target sequence for EVI1 (NM_005241.1,2287-2305).
ctgcctgatcagagaactt

SEQ ID NO: 26236 - DNA, 19 bp, Homo sapiens
  siRNA target sequence for EVI1 (NM_005241.1,2303-2321).
cttggatgtcagctattga

SEQ ID NO: 26237 - DNA, 19 bp, Homo sapiens
  siRNA target sequence for EVI1 (NM_005241.1,2392-2410).
ccctctatgttcaacttca

SEQ ID NO: 26238 - DNA, 19 bp, Homo sapiens
  siRNA target sequence for EVI1 (NM_005241.1,2452-2470).
ggaaaggagcgctatacct

SEQ ID NO: 26239 - DNA, 19 bp, Homo sapiens
  siRNA target sequence for EVI1 (NM_005241.1,2461-2479).
cgctatacctgcagatact

SEQ ID NO: 26240 - DNA, 19 bp, Homo sapiens
  siRNA target sequence for EVI1 (NM_005241.1,2509-2527).
ctaacacggcacttgagaa

SEQ ID NO: 26241 - DNA, 19 bp, Homo sapiens
  siRNA target sequence for EVI1 (NM_005241.1,2545-2563).
ccttacagatgcaaatact

SEQ ID NO: 26242 - DNA, 19 bp, Homo sapiens
  siRNA target sequence for EVI1 (NM_005241.1,2566-2584).
gacagatcatttagcatat

SEQ ID NO: 26243 - DNA, 19 bp, Homo sapiens
  siRNA target sequence for EVI1 (NM_005241.1,2568-2586).
cagatcatttagcatatct

SEQ ID NO: 26244 - DNA, 19 bp, Homo sapiens
  siRNA target sequence for EVI1 (NM_005241.1,2605-2623).
gttcgcaacatccacaata

SEQ ID NO: 26245 - DNA, 19 bp, Homo sapiens
  siRNA target sequence for EVI1 (NM_005241.1,2732-2750).
catcgtcgcctcattctga

SEQ ID NO: 26246 - DNA, 19 bp, Homo sapiens
  siRNA target sequence for EVI1 (NM_005241.1,2765-2783).
gtgcgattctggatgacaa

SEQ ID NO: 26247 - DNA, 19 bp, Homo sapiens
  siRNA target sequence for EVI1 (NM_005241.1,2768-2786).
cgattctggatgacaaaga

SEQ ID NO: 26248 - DNA, 19 bp, Homo sapiens
  siRNA target sequence for EVI1 (NM_005241.1,2769-2787).
gattctggatgacaaagaa

SEQ ID NO: 26249 - DNA, 19 bp, Homo sapiens
  siRNA target sequence for EVI1 (NM_005241.1,3009-3027).
ggaaccagtgacaagtaat

SEQ ID NO: 26250 - DNA, 19 bp, Homo sapiens
  siRNA target sequence for EVI1 (NM_005241.1,3010-3028).
gaaccagtgacaagtaatt

SEQ ID NO: 26251 - DNA, 19 bp, Homo sapiens
  siRNA target sequence for EVI1 (NM_005241.1,3092-3110).
catccccagtgaggtataa

SEQ ID NO: 26252 - DNA, 19 bp, Homo sapiens
  siRNA target sequence for EVI1 (NM_005241.1,3095-3113).
ccccagtgaggtataaaga

SEQ ID NO: 26253 - DNA, 19 bp, Homo sapiens
  siRNA target sequence for EVI1 (NM_005241.1,3216-3234).
gctgtcttcttttagtact

SEQ ID NO: 26254 - DNA, 19 bp, Homo sapiens
  siRNA target sequence for EVI1 (NM_005241.1,3253-3271).
cttaagcagccgttacaca

SEQ ID NO: 26255 - DNA, 19 bp, Homo sapiens
  siRNA target sequence for EVI1 (NM_005241.1,3259-3277).
cagccgttacacagaaagt

SEQ ID NO: 26256 - DNA, 19 bp, Homo sapiens
  siRNA target sequence for EVI1 (NM_005241.1,3284-3302).
cgcaggcatatgctatgat

SEQ ID NO: 26257 - DNA, 19 bp, Homo sapiens
  siRNA target sequence for EVI1 (NM_005241.1,3321-3339).
ggagtccctccattctaca

SEQ ID NO: 26258 - DNA, 19 bp, Homo sapiens
  siRNA target sequence for EVI1 (NM_005241.1,3322-3340).
gagtccctccattctacat

SEQ ID NO: 26259 - DNA, 19 bp, Homo sapiens
  siRNA target sequence for EVI1 (NM_005241.1,3353-3371).
ccaacgtgtggcacagtat

SEQ ID NO: 26260 - DNA, 19 bp, Homo sapiens
  siRNA target sequence for EXO1 (NM_003686.3,438-456).
ggggatacagggattgcta

SEQ ID NO: 26261 - DNA, 19 bp, Homo sapiens
  siRNA target sequence for EXO1 (NM_003686.3,448-466).
ggattgctacaatttatca

SEQ ID NO: 26262 - DNA, 19 bp, Homo sapiens
  siRNA target sequence for EXO1 (NM_003686.3,483-501).
catccatgtgaggaagtat

SEQ ID NO: 26263 - DNA, 19 bp, Homo sapiens
  siRNA target sequence for EXO1 (NM_003686.3,486-504).
ccatgtgaggaagtataaa

SEQ ID NO: 26264 - DNA, 19 bp, Homo sapiens
  siRNA target sequence for EXO1 (NM_003686.3,511-529).
gtagtagctgtggatacat

SEQ ID NO: 26265 - DNA, 19 bp, Homo sapiens
  siRNA target sequence for EXO1 (NM_003686.3,514-532).
gtagctgtggatacatatt

SEQ ID NO: 26266 - DNA, 19 bp, Homo sapiens
  siRNA target sequence for EXO1 (NM_003686.3,527-545).
catattgctggcttcacaa

SEQ ID NO: 26267 - DNA, 19 bp, Homo sapiens
  siRNA target sequence for EXO1 (NM_003686.3,541-559).
cacaaaggagctattgctt

SEQ ID NO: 26268 - DNA, 19 bp, Homo sapiens
  siRNA target sequence for EXO1 (NM_003686.3,581-599).
gtgaacctactgataggta

SEQ ID NO: 26269 - DNA, 19 bp, Homo sapiens
  siRNA target sequence for EXO1 (NM_003686.3,596-614).
ggtatgtaggattttgtat

SEQ ID NO: 26270 - DNA, 19 bp, Homo sapiens
  siRNA target sequence for EXO1 (NM_003686.3,660-678).
cgtatttgatggatgtact

SEQ ID NO: 26271 - DNA, 19 bp, Homo sapiens
  siRNA target sequence for EXO1 (NM_003686.3,661-679).
gtatttgatggatgtactt

SEQ ID NO: 26272 - DNA, 19 bp, Homo sapiens
  siRNA target sequence for EXO1 (NM_003686.3,667-685).
gatggatgtactttacctt

SEQ ID NO: 26273 - DNA, 19 bp, Homo sapiens
  siRNA target sequence for EXO1 (NM_003686.3,700-718).
gagagatctagaagagaaa

SEQ ID NO: 26274 - DNA, 19 bp, Homo sapiens
  siRNA target sequence for EXO1 (NM_003686.3,719-737).
gacgacaagccaatcttct

SEQ ID NO: 26275 - DNA, 19 bp, Homo sapiens
  siRNA target sequence for EXO1 (NM_003686.3,721-739).
cgacaagccaatcttctta

SEQ ID NO: 26276 - DNA, 19 bp, Homo sapiens
  siRNA target sequence for EXO1 (NM_003686.3,754-772).
cttcgtgaggggaaagtct

SEQ ID NO: 26277 - DNA, 19 bp, Homo sapiens
  siRNA target sequence for EXO1 (NM_003686.3,773-791).
cggaagctcgagagtgttt

SEQ ID NO: 26278 - DNA, 19 bp, Homo sapiens
  siRNA target sequence for EXO1 (NM_003686.3,775-793).
gaagctcgagagtgtttca

SEQ ID NO: 26279 - DNA, 19 bp, Homo sapiens
  siRNA target sequence for EXO1 (NM_003686.3,788-806).
gtttcacccggtctatcaa

SEQ ID NO: 26280 - DNA, 19 bp, Homo sapiens
  siRNA target sequence for EXO1 (NM_003686.3,795-813).
ccggtctatcaatatcaca

SEQ ID NO: 26281 - DNA, 19 bp, Homo sapiens
  siRNA target sequence for EXO1 (NM_003686.3,818-836).
ccatggcccacaaagtaat

SEQ ID NO: 26282 - DNA, 19 bp, Homo sapiens
  siRNA target sequence for EXO1 (NM_003686.3,819-837).
catggcccacaaagtaatt

SEQ ID NO: 26283 - DNA, 19 bp, Homo sapiens
  siRNA target sequence for EXO1 (NM_003686.3,822-840).
ggcccacaaagtaattaaa

SEQ ID NO: 26284 - DNA, 19 bp, Homo sapiens
  siRNA target sequence for EXO1 (NM_003686.3,847-865).
cggtctcagggggtagatt

SEQ ID NO: 26285 - DNA, 19 bp, Homo sapiens
  siRNA target sequence for EXO1 (NM_003686.3,892-910).
gcgcagttggcctatctta

SEQ ID NO: 26286 - DNA, 19 bp, Homo sapiens
  siRNA target sequence for EXO1 (NM_003686.3,893-911).
cgcagttggcctatcttaa

SEQ ID NO: 26287 - DNA, 19 bp, Homo sapiens
  siRNA target sequence for EXO1 (NM_003686.3,895-913).
cagttggcctatcttaaca

SEQ ID NO: 26288 - DNA, 19 bp, Homo sapiens
  siRNA target sequence for EXO1 (NM_003686.3,1067-1085).
cggaagagaagtttcgtta

SEQ ID NO: 26289 - DNA, 19 bp, Homo sapiens
  siRNA target sequence for EXO1 (NM_003686.3,1077-1095).
gtttcgttacatgtgtatt

SEQ ID NO: 26290 - DNA, 19 bp, Homo sapiens
  siRNA target sequence for EXO1 (NM_003686.3,1121-1139).
cactgcgtgggattggatt

SEQ ID NO: 26291 - DNA, 19 bp, Homo sapiens
  siRNA target sequence for EXO1 (NM_003686.3,1126-1144).
cgtgggattggattagcaa

SEQ ID NO: 26292 - DNA, 19 bp, Homo sapiens
  siRNA target sequence for EXO1 (NM_003686.3,1127-1145).
gtgggattggattagcaaa

SEQ ID NO: 26293 - DNA, 19 bp, Homo sapiens
  siRNA target sequence for EXO1 (NM_003686.3,1148-1166).
catgcaaagtcctaagact

SEQ ID NO: 26294 - DNA, 19 bp, Homo sapiens
  siRNA target sequence for EXO1 (NM_003686.3,1158-1176).
cctaagactagccaataat

SEQ ID NO: 26295 - DNA, 19 bp, Homo sapiens
  siRNA target sequence for EXO1 (NM_003686.3,1169-1187).
ccaataatccagatatagt

SEQ ID NO: 26296 - DNA, 19 bp, Homo sapiens
  siRNA target sequence for EXO1 (NM_003686.3,1177-1195).
ccagatatagtaaaggtta

SEQ ID NO: 26297 - DNA, 19 bp, Homo sapiens
  siRNA target sequence for EXO1 (NM_003686.3,1178-1196).
cagatatagtaaaggttat

SEQ ID NO: 26298 - DNA, 19 bp, Homo sapiens
  siRNA target sequence for EXO1 (NM_003686.3,1180-1198).
gatatagtaaaggttatca

SEQ ID NO: 26299 - DNA, 19 bp, Homo sapiens
  siRNA target sequence for EXO1 (NM_003686.3,1232-1250).
cggtaccagaggattacat

SEQ ID NO: 26300 - DNA, 19 bp, Homo sapiens
  siRNA target sequence for EXO1 (NM_003686.3,1234-1252).
gtaccagaggattacatca

SEQ ID NO: 26301 - DNA, 19 bp, Homo sapiens
  siRNA target sequence for EXO1 (NM_003686.3,1257-1275).
gtttattcgggccaacaat

SEQ ID NO: 26302 - DNA, 19 bp, Homo sapiens
  siRNA target sequence for EXO1 (NM_003686.3,1294-1312).
gtttttgatcccatcaaaa

SEQ ID NO: 26303 - DNA, 19 bp, Homo sapiens
  siRNA target sequence for EXO1 (NM_003686.3,1325-1343).
ctctgaacgcctatgaaga

SEQ ID NO: 26304 - DNA, 19 bp, Homo sapiens
  siRNA target sequence for EXO1 (NM_003686.3,1348-1366).
gttgatcctgaaacactaa

SEQ ID NO: 26305 - DNA, 19 bp, Homo sapiens
  siRNA target sequence for EXO1 (NM_003686.3,1367-1385).
gctacgctgggcaatatgt

SEQ ID NO: 26306 - DNA, 19 bp, Homo sapiens
  siRNA target sequence for EXO1 (NM_003686.3,1368-1386).
ctacgctgggcaatatgtt

SEQ ID NO: 26307 - DNA, 19 bp, Homo sapiens
  siRNA target sequence for EXO1 (NM_003686.3,1371-1389).
cgctgggcaatatgttgat

SEQ ID NO: 26308 - DNA, 19 bp, Homo sapiens
  siRNA target sequence for EXO1 (NM_003686.3,1471-1489).
gctatgcctgcccattcaa

SEQ ID NO: 26309 - DNA, 19 bp, Homo sapiens
  siRNA target sequence for EXO1 (NM_003686.3,1480-1498).
gcccattcaagaagtcata

SEQ ID NO: 26310 - DNA, 19 bp, Homo sapiens
  siRNA target sequence for EXO1 (NM_003686.3,1493-1511).
gtcatagttgggatgacaa

SEQ ID NO: 26311 - DNA, 19 bp, Homo sapiens
  siRNA target sequence for EXO1 (NM_003686.3,1495-1513).
catagttgggatgacaaaa

SEQ ID NO: 26312 - DNA, 19 bp, Homo sapiens
  siRNA target sequence for EXO1 (NM_003686.3,1503-1521).
ggatgacaaaacatgtcaa

SEQ ID NO: 26313 - DNA, 19 bp, Homo sapiens
  siRNA target sequence for EXO1 (NM_003686.3,1517-1535).
gtcaaaagtcagctaatgt

SEQ ID NO: 26314 - DNA, 19 bp, Homo sapiens
  siRNA target sequence for EXO1 (NM_003686.3,1570-1588).
ccagagtcgggtactgttt

SEQ ID NO: 26315 - DNA, 19 bp, Homo sapiens
  siRNA target sequence for EXO1 (NM_003686.3,1575-1593).
gtcgggtactgtttcagat

SEQ ID NO: 26316 - DNA, 19 bp, Homo sapiens
  siRNA target sequence for EXO1 (NM_003686.3,1594-1612).
gccccacaattgaaggaaa

SEQ ID NO: 26317 - DNA, 19 bp, Homo sapiens
  siRNA target sequence for EXO1 (NM_003686.3,1627-1645).
ggagtggaacgagtgatta

SEQ ID NO: 26318 - DNA, 19 bp, Homo sapiens
  siRNA target sequence for EXO1 (NM_003686.3,1630-1648).
gtggaacgagtgattagta

SEQ ID NO: 26319 - DNA, 19 bp, Homo sapiens
  siRNA target sequence for EXO1 (NM_003686.3,1632-1650).
ggaacgagtgattagtact

SEQ ID NO: 26320 - DNA, 19 bp, Homo sapiens
  siRNA target sequence for EXO1 (NM_003686.3,1633-1651).
gaacgagtgattagtacta

SEQ ID NO: 26321 - DNA, 19 bp, Homo sapiens
  siRNA target sequence for EXO1 (NM_003686.3,1646-1664).
gtactaaagggttaaatct

SEQ ID NO: 26322 - DNA, 19 bp, Homo sapiens
  siRNA target sequence for EXO1 (NM_003686.3,1720-1738).
gacctgttgagtcagtatt

SEQ ID NO: 26323 - DNA, 19 bp, Homo sapiens
  siRNA target sequence for EXO1 (NM_003686.3,1725-1743).
gttgagtcagtattctctt

SEQ ID NO: 26324 - DNA, 19 bp, Homo sapiens
  siRNA target sequence for EXO1 (NM_003686.3,1741-1759).
ctttcatttacgaagaaga

SEQ ID NO: 26325 - DNA, 19 bp, Homo sapiens
  siRNA target sequence for EXO1 (NM_003686.3,1825-1843).
gtaaatggacctactaaca

SEQ ID NO: 26326 - DNA, 19 bp, Homo sapiens
  siRNA target sequence for EXO1 (NM_003686.3,1861-1879).
ccacctaggacgagaaata

SEQ ID NO: 26327 - DNA, 19 bp, Homo sapiens
  siRNA target sequence for EXO1 (NM_003686.3,1862-1880).
cacctaggacgagaaataa

SEQ ID NO: 26328 - DNA, 19 bp, Homo sapiens
  siRNA target sequence for EXO1 (NM_003686.3,1864-1882).
cctaggacgagaaataaat

SEQ ID NO: 26329 - DNA, 19 bp, Homo sapiens
  siRNA target sequence for EXO1 (NM_003686.3,1865-1883).
ctaggacgagaaataaatt

SEQ ID NO: 26330 - DNA, 19 bp, Homo sapiens
  siRNA target sequence for EXO1 (NM_003686.3,1950-1968).
gtttttttgcagttcagat

SEQ ID NO: 26331 - DNA, 19 bp, Homo sapiens
  siRNA target sequence for EXO1 (NM_003686.3,2035-2053).
gagaacaatctgcatgaat

SEQ ID NO: 26332 - DNA, 19 bp, Homo sapiens
  siRNA target sequence for EXO1 (NM_003686.3,2037-2055).
gaacaatctgcatgaatca

SEQ ID NO: 26333 - DNA, 19 bp, Homo sapiens
  siRNA target sequence for EXO1 (NM_003686.3,2095-2113).
gatgtagcacgtaattcaa

SEQ ID NO: 26334 - DNA, 19 bp, Homo sapiens
  siRNA target sequence for EXO1 (NM_003686.3,2105-2123).
gtaattcaagtgatgacat

SEQ ID NO: 26335 - DNA, 19 bp, Homo sapiens
  siRNA target sequence for EXO1 (NM_003686.3,2114-2132).
gtgatgacattccgaataa

SEQ ID NO: 26336 - DNA, 19 bp, Homo sapiens
  siRNA target sequence for EXO1 (NM_003686.3,2119-2137).
gacattccgaataatcata

SEQ ID NO: 26337 - DNA, 19 bp, Homo sapiens
  siRNA target sequence for EXO1 (NM_003686.3,2158-2176).
gacaaggcaacagtgttta

SEQ ID NO: 26338 - DNA, 19 bp, Homo sapiens
  siRNA target sequence for EXO1 (NM_003686.3,2179-2197).
gatgaagagtcctactctt

SEQ ID NO: 26339 - DNA, 19 bp, Homo sapiens
  siRNA target sequence for EXO1 (NM_003686.3,2185-2203).
gagtcctactcttttgaga

SEQ ID NO: 26340 - DNA, 19 bp, Homo sapiens
  siRNA target sequence for EXO1 (NM_003686.3,2200-2218).
gagagcagcaaatttacaa

SEQ ID NO: 26341 - DNA, 19 bp, Homo sapiens
  siRNA target sequence for EXO1 (NM_003686.3,2355-2373).
cacctctttgcctgagaat

SEQ ID NO: 26342 - DNA, 19 bp, Homo sapiens
  siRNA target sequence for EXO1 (NM_003686.3,2357-2375).
cctctttgcctgagaataa

SEQ ID NO: 26343 - DNA, 19 bp, Homo sapiens
  siRNA target sequence for EXO1 (NM_003686.3,2364-2382).
gcctgagaataatatgtct

SEQ ID NO: 26344 - DNA, 19 bp, Homo sapiens
  siRNA target sequence for EXO1 (NM_003686.3,2485-2503).
ctgcagagttcaaatgcat

SEQ ID NO: 26345 - DNA, 19 bp, Homo sapiens
  siRNA target sequence for EXO1 (NM_003686.3,2509-2527).
ctttctcagtgctctagta

SEQ ID NO: 26346 - DNA, 19 bp, Homo sapiens
  siRNA target sequence for EXO1 (NM_003686.3,2549-2567).
ctgattgcaatattaagtt

SEQ ID NO: 26347 - DNA, 19 bp, Homo sapiens
  siRNA target sequence for EXO1 (NM_003686.3,2565-2583).
gttacttgacagtcaaagt

SEQ ID NO: 26348 - DNA, 19 bp, Homo sapiens
  siRNA target sequence for EXO1 (NM_003686.3,2643-2661).
caaggttcctgggctatat

SEQ ID NO: 26349 - DNA, 19 bp, Homo sapiens
  siRNA target sequence for EXO1 (NM_003686.3,2647-2665).
gttcctgggctatataagt

SEQ ID NO: 26350 - DNA, 19 bp, Homo sapiens
  siRNA target sequence for EXO1 (NM_003686.3,2791-2809).
gggttacagatcaaactca

SEQ ID NO: 26351 - DNA, 19 bp, Homo sapiens
  siRNA target sequence for EXO1 (NM_006027.3,2853-2871).
gcttcctccttgtaagaaa

SEQ ID NO: 26352 - DNA, 19 bp, Homo sapiens
  siRNA target sequence for EXO1 (NM_006027.3,2875-2893).
ctgtccccagtcagagata

SEQ ID NO: 26353 - DNA, 19 bp, Homo sapiens
  siRNA target sequence for EXO1 (NM_006027.3,2879-2897).
ccccagtcagagataacat

SEQ ID NO: 26354 - DNA, 19 bp, Homo sapiens
  siRNA target sequence for EXO1 (NM_006027.3,2911-2929).
gaagcggaagaggatatat

SEQ ID NO: 26355 - DNA, 19 bp, Homo sapiens
  siRNA target sequence for EXO1 (NM_006027.3,2914-2932).
gcggaagaggatatattta

SEQ ID NO: 26356 - DNA, 19 bp, Homo sapiens
  siRNA target sequence for EXO1 (NM_006027.3,2915-2933).
cggaagaggatatatttaa

SEQ ID NO: 26357 - DNA, 19 bp, Homo sapiens
  siRNA target sequence for EXO1 (NM_006027.3,2950-2968).
cgtgttcaaagagcaatat

SEQ ID NO: 26358 - DNA, 19 bp, Homo sapiens
  siRNA target sequence for EZH2 (NM_004456.3,170-188).
ggccagactgggaagaaat

SEQ ID NO: 26359 - DNA, 19 bp, Homo sapiens
  siRNA target sequence for EZH2 (NM_004456.3,207-225).
gttggcggaagcgtgtaaa

SEQ ID NO: 26360 - DNA, 19 bp, Homo sapiens
  siRNA target sequence for EZH2 (NM_004456.3,269-287).
gctgatgaagtaaagagta

SEQ ID NO: 26361 - DNA, 19 bp, Homo sapiens
  siRNA target sequence for EZH2 (NM_004456.3,294-312).
gttccaatcgtcagaaaat

SEQ ID NO: 26362 - DNA, 19 bp, Homo sapiens
  siRNA target sequence for EZH2 (NM_004456.3,297-315).
ccaatcgtcagaaaatttt

SEQ ID NO: 26363 - DNA, 19 bp, Homo sapiens
  siRNA target sequence for EZH2 (NM_004456.3,321-339).
gaacggaaatcttaaacca

SEQ ID NO: 26364 - DNA, 19 bp, Homo sapiens
  siRNA target sequence for EZH2 (NM_004456.3,479-497).
gcttcagtacccataatgt

SEQ ID NO: 26365 - DNA, 19 bp, Homo sapiens
  siRNA target sequence for EZH2 (NM_004456.3,480-498).
cttcagtacccataatgta

SEQ ID NO: 26366 - DNA, 19 bp, Homo sapiens
  siRNA target sequence for EZH2 (NM_004456.3,509-527).
cccctacagcagaatttta

SEQ ID NO: 26367 - DNA, 19 bp, Homo sapiens
  siRNA target sequence for EZH2 (NM_004456.3,510-528).
ccctacagcagaattttat

SEQ ID NO: 26368 - DNA, 19 bp, Homo sapiens
  siRNA target sequence for EZH2 (NM_004456.3,545-563).
gttttacataacattcctt

SEQ ID NO: 26369 - DNA, 19 bp, Homo sapiens
  siRNA target sequence for EZH2 (NM_004456.3,570-588).
gagatgaagttttagatca

SEQ ID NO: 26370 - DNA, 19 bp, Homo sapiens
  siRNA target sequence for EZH2 (NM_004456.3,635-653).
gtacacggggatagagaat

SEQ ID NO: 26371 - DNA, 19 bp, Homo sapiens
  siRNA target sequence for EZH2 (NM_004456.3,656-674).
gggtttataaatgatgaaa

SEQ ID NO: 26372 - DNA, 19 bp, Homo sapiens
  siRNA target sequence for EZH2 (NM_004456.3,696-714).
cccttggtcaatataatga

SEQ ID NO: 26373 - DNA, 19 bp, Homo sapiens
  siRNA target sequence for EZH2 (NM_004456.3,776-794).
gaggatcaccgagatgata

SEQ ID NO: 26374 - DNA, 19 bp, Homo sapiens
  siRNA target sequence for EZH2 (NM_004456.3,782-800).
caccgagatgataaagaaa

SEQ ID NO: 26375 - DNA, 19 bp, Homo sapiens
  siRNA target sequence for EZH2 (NM_004456.3,806-824).
ccacctcggaaatttcctt

SEQ ID NO: 26376 - DNA, 19 bp, Homo sapiens
  siRNA target sequence for EZH2 (NM_004456.3,812-830).
cggaaatttccttctgata

SEQ ID NO: 26377 - DNA, 19 bp, Homo sapiens
  siRNA target sequence for EZH2 (NM_004456.3,849-867).
cctcaatgtttccagataa

SEQ ID NO: 26378 - DNA, 19 bp, Homo sapiens
  siRNA target sequence for EZH2 (NM_004456.3,959-977).
gatggaccaaatgctaaat

SEQ ID NO: 26379 - DNA, 19 bp, Homo sapiens
  siRNA target sequence for EZH2 (NM_004456.3,1028-1046).
cgatgttttaaatatgact

SEQ ID NO: 26380 - DNA, 19 bp, Homo sapiens
  siRNA target sequence for EZH2 (NM_004456.3,1059-1077).
gtaagtgcaattattcttt

SEQ ID NO: 26381 - DNA, 19 bp, Homo sapiens
  siRNA target sequence for EZH2 (NM_004456.3,1082-1100).
gcaacacccaacacttata

SEQ ID NO: 26382 - DNA, 19 bp, Homo sapiens
  siRNA target sequence for EZH2 (NM_004456.3,1083-1101).
caacacccaacacttataa

SEQ ID NO: 26383 - DNA, 19 bp, Homo sapiens
  siRNA target sequence for EZH2 (NM_004456.3,1395-1413).
cgagctcctctgaagcaaa

SEQ ID NO: 26384 - DNA, 19 bp, Homo sapiens
  siRNA target sequence for EZH2 (NM_004456.3,1396-1414).
gagctcctctgaagcaaat

SEQ ID NO: 26385 - DNA, 19 bp, Homo sapiens
  siRNA target sequence for EZH2 (NM_004456.3,1399-1417).
ctcctctgaagcaaattct

SEQ ID NO: 26386 - DNA, 19 bp, Homo sapiens
  siRNA target sequence for EZH2 (NM_004456.3,1409-1427).
gcaaattctcggtgtcaaa

SEQ ID NO: 26387 - DNA, 19 bp, Homo sapiens
  siRNA target sequence for EZH2 (NM_004456.3,1418-1436).
cggtgtcaaacaccaataa

SEQ ID NO: 26388 - DNA, 19 bp, Homo sapiens
  siRNA target sequence for EZH2 (NM_004456.3,1505-1523).
gtcctcattggcacttact

SEQ ID NO: 26389 - DNA, 19 bp, Homo sapiens
  siRNA target sequence for EZH2 (NM_004456.3,1507-1525).
cctcattggcacttactat

SEQ ID NO: 26390 - DNA, 19 bp, Homo sapiens
  siRNA target sequence for EZH2 (NM_004456.3,1514-1532).
ggcacttactatgacaatt

SEQ ID NO: 26391 - DNA, 19 bp, Homo sapiens
  siRNA target sequence for EZH2 (NM_004456.3,1566-1584).
catgtagacaggtgtatga

SEQ ID NO: 26392 - DNA, 19 bp, Homo sapiens
  siRNA target sequence for EZH2 (NM_004456.3,1569-1587).
gtagacaggtgtatgagtt

SEQ ID NO: 26393 - DNA, 19 bp, Homo sapiens
  siRNA target sequence for EZH2 (NM_004456.3,1594-1612).
caaagaatctagcatcata

SEQ ID NO: 26394 - DNA, 19 bp, Homo sapiens
  siRNA target sequence for EZH2 (NM_004456.3,1711-1729).
ggacggctcctctaaccat

SEQ ID NO: 26395 - DNA, 19 bp, Homo sapiens
  siRNA target sequence for EZH2 (NM_004456.3,1715-1733).
ggctcctctaaccatgttt

SEQ ID NO: 26396 - DNA, 19 bp, Homo sapiens
  siRNA target sequence for EZH2 (NM_004456.3,1953-1971).
ctgaccattgggacagtaa

SEQ ID NO: 26397 - DNA, 19 bp, Homo sapiens
  siRNA target sequence for EZH2 (NM_004456.3,1955-1973).
gaccattgggacagtaaaa

SEQ ID NO: 26398 - DNA, 19 bp, Homo sapiens
  siRNA target sequence for EZH2 (NM_004456.3,1983-2001).
gcaagaactgcagtattca

SEQ ID NO: 26399 - DNA, 19 bp, Homo sapiens
  siRNA target sequence for EZH2 (NM_004456.3,2006-2024).
ggctccaaaaagcatctat

SEQ ID NO: 26400 - DNA, 19 bp, Homo sapiens
  siRNA target sequence for EZH2 (NM_004456.3,2007-2025).
gctccaaaaagcatctatt

SEQ ID NO: 26401 - DNA, 19 bp, Homo sapiens
  siRNA target sequence for EZH2 (NM_004456.3,2052-2070).
gggggatttttatcaaaga

SEQ ID NO: 26402 - DNA, 19 bp, Homo sapiens
  siRNA target sequence for EZH2 (NM_004456.3,2053-2071).
ggggatttttatcaaagat

SEQ ID NO: 26403 - DNA, 19 bp, Homo sapiens
  siRNA target sequence for EZH2 (NM_004456.3,2211-2229).
caacccgcaagggtaacaa

SEQ ID NO: 26404 - DNA, 19 bp, Homo sapiens
  siRNA target sequence for EZH2 (NM_004456.3,2214-2232).
cccgcaagggtaacaaaat

SEQ ID NO: 26405 - DNA, 19 bp, Homo sapiens
  siRNA target sequence for EZH2 (NM_004456.3,2215-2233).
ccgcaagggtaacaaaatt

SEQ ID NO: 26406 - DNA, 19 bp, Homo sapiens
  siRNA target sequence for EZH2 (NM_004456.3,2218-2236).
caagggtaacaaaattcgt

SEQ ID NO: 26407 - DNA, 19 bp, Homo sapiens
  siRNA target sequence for EZH2 (NM_004456.3,2221-2239).
gggtaacaaaattcgtttt

SEQ ID NO: 26408 - DNA, 19 bp, Homo sapiens
  siRNA target sequence for EZH2 (NM_004456.3,2270-2288).
gcaaaagttatgatggtta

SEQ ID NO: 26409 - DNA, 19 bp, Homo sapiens
  siRNA target sequence for EZH2 (NM_004456.3,2390-2408).
gtcggcatcgaaagagaaa

SEQ ID NO: 26410 - DNA, 19 bp, Homo sapiens
  siRNA target sequence for FALZ (NM_004459.5,412-430).
ccggagggccgtcaacaaa

SEQ ID NO: 26411 - DNA, 19 bp, Homo sapiens
  siRNA target sequence for FALZ (NM_004459.5,671-689).
ccaggtaggcgaaaaccaa

SEQ ID NO: 26412 - DNA, 19 bp, Homo sapiens
  siRNA target sequence for FALZ (NM_004459.5,698-716).
cggcctcgttctcctatat

SEQ ID NO: 26413 - DNA, 19 bp, Homo sapiens
  siRNA target sequence for FALZ (NM_004459.5,699-717).
ggcctcgttctcctatatt

SEQ ID NO: 26414 - DNA, 19 bp, Homo sapiens
  siRNA target sequence for FALZ (NM_004459.5,702-720).
ctcgttctcctatattgga

SEQ ID NO: 26415 - DNA, 19 bp, Homo sapiens
  siRNA target sequence for FALZ (NM_004459.5,756-774).
cctctgaggatttaatggt

SEQ ID NO: 26416 - DNA, 19 bp, Homo sapiens
  siRNA target sequence for FALZ (NM_004459.5,772-790).
ggtgcctaatgagcatata

SEQ ID NO: 26417 - DNA, 19 bp, Homo sapiens
  siRNA target sequence for FALZ (NM_004459.5,773-791).
gtgcctaatgagcatataa

SEQ ID NO: 26418 - DNA, 19 bp, Homo sapiens
  siRNA target sequence for FALZ (NM_004459.5,776-794).
cctaatgagcatataatga

SEQ ID NO: 26419 - DNA, 19 bp, Homo sapiens
  siRNA target sequence for FALZ (NM_004459.5,811-829).
cgaggtactgcggaacttt

SEQ ID NO: 26420 - DNA, 19 bp, Homo sapiens
  siRNA target sequence for FALZ (NM_004459.5,950-968).
gaagaagacacttccaata

SEQ ID NO: 26421 - DNA, 19 bp, Homo sapiens
  siRNA target sequence for FALZ (NM_004459.5,1008-1026).
ccacactgtatttcataga

SEQ ID NO: 26422 - DNA, 19 bp, Homo sapiens
  siRNA target sequence for FALZ (NM_004459.5,1009-1027).
cacactgtatttcatagat

SEQ ID NO: 26423 - DNA, 19 bp, Homo sapiens
  siRNA target sequence for FALZ (NM_004459.5,1055-1073).
gtgtactgtgagagtgata

SEQ ID NO: 26424 - DNA, 19 bp, Homo sapiens
  siRNA target sequence for FALZ (NM_004459.5,1119-1137).
catatggaccagtagagaa

SEQ ID NO: 26425 - DNA, 19 bp, Homo sapiens
  siRNA target sequence for FALZ (NM_004459.5,1156-1174).
gtttctagtcgatcagttt

SEQ ID NO: 26426 - DNA, 19 bp, Homo sapiens
  siRNA target sequence for FALZ (NM_004459.5,1160-1178).
ctagtcgatcagtttctta

SEQ ID NO: 26427 - DNA, 19 bp, Homo sapiens
  siRNA target sequence for FALZ (NM_004459.5,1163-1181).
gtcgatcagtttcttacaa

SEQ ID NO: 26428 - DNA, 19 bp, Homo sapiens
  siRNA target sequence for FALZ (NM_004459.5,1165-1183).
cgatcagtttcttacaaca

SEQ ID NO: 26429 - DNA, 19 bp, Homo sapiens
  siRNA target sequence for FALZ (NM_004459.5,1190-1208).
gctcgagaggaattgatgt

SEQ ID NO: 26430 - DNA, 19 bp, Homo sapiens
  siRNA target sequence for FALZ (NM_004459.5,1209-1227).
ctgaaggggtgatacagta

SEQ ID NO: 26431 - DNA, 19 bp, Homo sapiens
  siRNA target sequence for FALZ (NM_004459.5,1215-1233).
gggtgatacagtatgatga

SEQ ID NO: 26432 - DNA, 19 bp, Homo sapiens
  siRNA target sequence for FALZ (NM_004459.5,1223-1241).
cagtatgatgaccattgta

SEQ ID NO: 26433 - DNA, 19 bp, Homo sapiens
  siRNA target sequence for FALZ (NM_004459.5,1239-1257).
gtagggtttgtcacaaact

SEQ ID NO: 26434 - DNA, 19 bp, Homo sapiens
  siRNA target sequence for FALZ (NM_004459.5,1268-1286).
ctttgctgtgagacatgtt

SEQ ID NO: 26435 - DNA, 19 bp, Homo sapiens
  siRNA target sequence for FALZ (NM_004459.5,1281-1299).
catgttcagcagtatacca

SEQ ID NO: 26436 - DNA, 19 bp, Homo sapiens
  siRNA target sequence for FALZ (NM_004459.5,1430-1448).
cgacatgaacctattggat

SEQ ID NO: 26437 - DNA, 19 bp, Homo sapiens
  siRNA target sequence for FALZ (NM_004459.5,1436-1454).
gaacctattggatatgata

SEQ ID NO: 26438 - DNA, 19 bp, Homo sapiens
  siRNA target sequence for FALZ (NM_004459.5,1451-1469).
gatagaagtcggaggaaat

SEQ ID NO: 26439 - DNA, 19 bp, Homo sapiens
  siRNA target sequence for FALZ (NM_004459.5,1480-1498).
gaaccgaagactcataata

SEQ ID NO: 26440 - DNA, 19 bp, Homo sapiens
  siRNA target sequence for FALZ (NM_004459.5,1483-1501).
ccgaagactcataatagaa

SEQ ID NO: 26441 - DNA, 19 bp, Homo sapiens
  siRNA target sequence for FALZ (NM_004459.5,1552-1570).
ggtccaacttgcagaatta

SEQ ID NO: 26442 - DNA, 19 bp, Homo sapiens
  siRNA target sequence for FALZ (NM_004459.5,1553-1571).
gtccaacttgcagaattaa

SEQ ID NO: 26443 - DNA, 19 bp, Homo sapiens
  siRNA target sequence for FALZ (NM_004459.5,1645-1663).
ccgacacatggacataact

SEQ ID NO: 26444 - DNA, 19 bp, Homo sapiens
  siRNA target sequence for FALZ (NM_004459.5,1662-1680).
ctgaagacctgaccaataa

SEQ ID NO: 26445 - DNA, 19 bp, Homo sapiens
  siRNA target sequence for FALZ (NM_004459.5,1681-1699).
ggctcggggcagtaacaaa

SEQ ID NO: 26446 - DNA, 19 bp, Homo sapiens
  siRNA target sequence for FALZ (NM_004459.5,1682-1700).
gctcggggcagtaacaaat

SEQ ID NO: 26447 - DNA, 19 bp, Homo sapiens
  siRNA target sequence for FALZ (NM_004459.5,1685-1703).
cggggcagtaacaaatcct

SEQ ID NO: 26448 - DNA, 19 bp, Homo sapiens
  siRNA target sequence for FALZ (NM_004459.5,1702-1720).
ctttctggcggcagctaat

SEQ ID NO: 26449 - DNA, 19 bp, Homo sapiens
  siRNA target sequence for FALZ (NM_004459.5,1710-1728).
cggcagctaatgaagaaat

SEQ ID NO: 26450 - DNA, 19 bp, Homo sapiens
  siRNA target sequence for FALZ (NM_004459.5,1711-1729).
ggcagctaatgaagaaatt

SEQ ID NO: 26451 - DNA, 19 bp, Homo sapiens
  siRNA target sequence for FALZ (NM_004459.5,1807-1825).
gactgagaatgactctaaa

SEQ ID NO: 26452 - DNA, 19 bp, Homo sapiens
  siRNA target sequence for FALZ (NM_004459.5,1809-1827).
ctgagaatgactctaaaga

SEQ ID NO: 26453 - DNA, 19 bp, Homo sapiens
  siRNA target sequence for FALZ (NM_004459.5,2173-2191).
gcctaatctggaaaacagt

SEQ ID NO: 26454 - DNA, 19 bp, Homo sapiens
  siRNA target sequence for FALZ (NM_004459.5,2271-2289).
ctcatacacctgtctctat

SEQ ID NO: 26455 - DNA, 19 bp, Homo sapiens
  siRNA target sequence for FALZ (NM_004459.5,2297-2315).
gagatagtaggtgatttca

SEQ ID NO: 26456 - DNA, 19 bp, Homo sapiens
  siRNA target sequence for FALZ (NM_004459.5,2328-2346).
ccaacggggagctaagtga

SEQ ID NO: 26457 - DNA, 19 bp, Homo sapiens
  siRNA target sequence for FALZ (NM_004459.5,2329-2347).
caacggggagctaagtgaa

SEQ ID NO: 26458 - DNA, 19 bp, Homo sapiens
  siRNA target sequence for FALZ (NM_004459.5,2332-2350).
cggggagctaagtgaatct

SEQ ID NO: 26459 - DNA, 19 bp, Homo sapiens
  siRNA target sequence for FALZ (NM_004459.5,2373-2391).
ctggctcaactcgaatcat

SEQ ID NO: 26460 - DNA, 19 bp, Homo sapiens
  siRNA target sequence for FALZ (NM_004459.5,2375-2393).
ggctcaactcgaatcatca

SEQ ID NO: 26461 - DNA, 19 bp, Homo sapiens
  siRNA target sequence for FALZ (NM_004459.5,2401-2419).
gcggaatccagatagcaaa

SEQ ID NO: 26462 - DNA, 19 bp, Homo sapiens
  siRNA target sequence for FALZ (NM_004459.5,2409-2427).
cagatagcaaacttagtca

SEQ ID NO: 26463 - DNA, 19 bp, Homo sapiens
  siRNA target sequence for FALZ (NM_004459.5,2989-3007).
ccggatgacatcaattgaa

SEQ ID NO: 26464 - DNA, 19 bp, Homo sapiens
  siRNA target sequence for FALZ (NM_004459.5,2990-3008).
cggatgacatcaattgaaa

SEQ ID NO: 26465 - DNA, 19 bp, Homo sapiens
  siRNA target sequence for FALZ (NM_004459.5,3070-3088).
gcaagcgacatgggtaaaa

SEQ ID NO: 26466 - DNA, 19 bp, Homo sapiens
  siRNA target sequence for FALZ (NM_004459.5,3076-3094).
gacatgggtaaaatacaca

SEQ ID NO: 26467 - DNA, 19 bp, Homo sapiens
  siRNA target sequence for FALZ (NM_004459.5,3163-3181).
gagctggattagtaaaact

SEQ ID NO: 26468 - DNA, 19 bp, Homo sapiens
  siRNA target sequence for FALZ (NM_004459.5,3165-3183).
gctggattagtaaaactca

SEQ ID NO: 26469 - DNA, 19 bp, Homo sapiens
  siRNA target sequence for FALZ (NM_004459.5,3166-3184).
ctggattagtaaaactcat

SEQ ID NO: 26470 - DNA, 19 bp, Homo sapiens
  siRNA target sequence for FALZ (NM_004459.5,3238-3256).
gtcgttagaaggaaccaaa

SEQ ID NO: 26471 - DNA, 19 bp, Homo sapiens
  siRNA target sequence for FALZ (NM_004459.5,3331-3349).
gcctgattctgaaaaagat

SEQ ID NO: 26472 - DNA, 19 bp, Homo sapiens
  siRNA target sequence for FALZ (NM_004459.5,3436-3454).
gaaggagctcttagattct

SEQ ID NO: 26473 - DNA, 19 bp, Homo sapiens
  siRNA target sequence for FALZ (NM_004459.5,3532-3550).
ggagagttctcaagtagat

SEQ ID NO: 26474 - DNA, 19 bp, Homo sapiens
  siRNA target sequence for FALZ (NM_004459.5,3575-3593).
catctaaggactagttaca

SEQ ID NO: 26475 - DNA, 19 bp, Homo sapiens
  siRNA target sequence for FALZ (NM_004459.5,3578-3596).
ctaaggactagttacaaaa

SEQ ID NO: 26476 - DNA, 19 bp, Homo sapiens
  siRNA target sequence for FALZ (NM_004459.5,3613-3631).
caaactagatggacttctt

SEQ ID NO: 26477 - DNA, 19 bp, Homo sapiens
  siRNA target sequence for FALZ (NM_004459.5,3668-3686).
cagcgactcgaaaaaatca

SEQ ID NO: 26478 - DNA, 19 bp, Homo sapiens
  siRNA target sequence for FALZ (NM_004459.5,3671-3689).
cgactcgaaaaaatcaagt

SEQ ID NO: 26479 - DNA, 19 bp, Homo sapiens
  siRNA target sequence for FALZ (NM_004459.5,3672-3690).
gactcgaaaaaatcaagtt

SEQ ID NO: 26480 - DNA, 19 bp, Homo sapiens
  siRNA target sequence for FALZ (NM_004459.5,3685-3703).
caagttggagggtggaatt

SEQ ID NO: 26481 - DNA, 19 bp, Homo sapiens
  siRNA target sequence for FALZ (NM_004459.5,3699-3717).
gaattaagggtataggaaa

SEQ ID NO: 26482 - DNA, 19 bp, Homo sapiens
  siRNA target sequence for FALZ (NM_004459.5,3806-3824).
gaacagagcccaaatgcaa

SEQ ID NO: 26483 - DNA, 19 bp, Homo sapiens
  siRNA target sequence for FALZ (NM_004459.5,3844-3862).
cttgattcagggatgttca

SEQ ID NO: 26484 - DNA, 19 bp, Homo sapiens
  siRNA target sequence for FALZ (NM_004459.5,3847-3865).
gattcagggatgttcagaa

SEQ ID NO: 26485 - DNA, 19 bp, Homo sapiens
  siRNA target sequence for FALZ (NM_004459.5,3853-3871).
gggatgttcagaaagtgat

SEQ ID NO: 26486 - DNA, 19 bp, Homo sapiens
  siRNA target sequence for FALZ (NM_004459.5,3869-3887).
gattcctcagttcttagaa

SEQ ID NO: 26487 - DNA, 19 bp, Homo sapiens
  siRNA target sequence for FALZ (NM_004459.5,3896-3914).
cctagtcataccacaaaca

SEQ ID NO: 26488 - DNA, 19 bp, Homo sapiens
  siRNA target sequence for FALZ (NM_004459.5,3900-3918).
gtcataccacaaacaaact

SEQ ID NO: 26489 - DNA, 19 bp, Homo sapiens
  siRNA target sequence for FALZ (NM_004459.5,3907-3925).
cacaaacaaactttatcca

SEQ ID NO: 26490 - DNA, 19 bp, Homo sapiens
  siRNA target sequence for FALZ (NM_004459.5,3924-3942).
caaaagatcgagtgttaga

SEQ ID NO: 26491 - DNA, 19 bp, Homo sapiens
  siRNA target sequence for FALZ (NM_004459.5,4081-4099).
catcgatgactctaaacta

SEQ ID NO: 26492 - DNA, 19 bp, Homo sapiens
  siRNA target sequence for FALZ (NM_004459.5,4107-4125).
cagatgatattggtacttt

SEQ ID NO: 26493 - DNA, 19 bp, Homo sapiens
  siRNA target sequence for FALZ (NM_004459.5,4112-4130).
gatattggtactttgatct

SEQ ID NO: 26494 - DNA, 19 bp, Homo sapiens
  siRNA target sequence for FALZ (NM_004459.5,4182-4200).
cttccaagagtgctttaca

SEQ ID NO: 26495 - DNA, 19 bp, Homo sapiens
  siRNA target sequence for FALZ (NM_004459.5,4211-4229).
cctaaaagtaccaatgaca

SEQ ID NO: 26496 - DNA, 19 bp, Homo sapiens
  siRNA target sequence for FALZ (NM_004459.5,4283-4301).
gactctgaatctaatagca

SEQ ID NO: 26497 - DNA, 19 bp, Homo sapiens
  siRNA target sequence for FALZ (NM_004459.5,4293-4311).
ctaatagcactttggaaaa

SEQ ID NO: 26498 - DNA, 19 bp, Homo sapiens
  siRNA target sequence for FALZ (NM_004459.5,4314-4332).
gttctgataccgtgtctat

SEQ ID NO: 26499 - DNA, 19 bp, Homo sapiens
  siRNA target sequence for FALZ (NM_004459.5,4317-4335).
ctgataccgtgtctattca

SEQ ID NO: 26500 - DNA, 19 bp, Homo sapiens
  siRNA target sequence for FALZ (NM_004459.5,4393-4411).
gttcagaactcgagaacaa

SEQ ID NO: 26501 - DNA, 19 bp, Homo sapiens
  siRNA target sequence for FALZ (NM_004459.5,4423-4441).
cttggagccgttaaagtgt

SEQ ID NO: 26502 - DNA, 19 bp, Homo sapiens
  siRNA target sequence for FALZ (NM_004459.5,4495-4513).
ggggactgaagcaaatggt

SEQ ID NO: 26503 - DNA, 19 bp, Homo sapiens
  siRNA target sequence for FALZ (NM_004459.5,4496-4514).
gggactgaagcaaatggta

SEQ ID NO: 26504 - DNA, 19 bp, Homo sapiens
  siRNA target sequence for FALZ (NM_004459.5,4541-4559).
gaggagagaccagttaata

SEQ ID NO: 26505 - DNA, 19 bp, Homo sapiens
  siRNA target sequence for FALZ (NM_004459.5,4563-4581).
gtagtgatcaaataaagct

SEQ ID NO: 26506 - DNA, 19 bp, Homo sapiens
  siRNA target sequence for FALZ (NM_004459.5,4566-4584).
gtgatcaaataaagctaaa

SEQ ID NO: 26507 - DNA, 19 bp, Homo sapiens
  siRNA target sequence for FALZ (NM_004459.5,4590-4608).
ccactgacaaaaagaataa

SEQ ID NO: 26508 - DNA, 19 bp, Homo sapiens
  siRNA target sequence for FALZ (NM_004459.5,4610-4628).
gaaaatcgagagtctgaaa

SEQ ID NO: 26509 - DNA, 19 bp, Homo sapiens
  siRNA target sequence for FALZ (NM_004459.5,4728-4746).
gagtagtaagtggtaatgt

SEQ ID NO: 26510 - DNA, 19 bp, Homo sapiens
  siRNA target sequence for FALZ (NM_004459.5,4987-5005).
cacaccctcagcatcttgt

SEQ ID NO: 26511 - DNA, 19 bp, Homo sapiens
  siRNA target sequence for FALZ (NM_004459.5,4998-5016).
catcttgtccagaaagcaa

SEQ ID NO: 26512 - DNA, 19 bp, Homo sapiens
  siRNA target sequence for FALZ (NM_004459.5,5052-5070).
cctcagaagttaagaaagt

SEQ ID NO: 26513 - DNA, 19 bp, Homo sapiens
  siRNA target sequence for FALZ (NM_004459.5,5053-5071).
ctcagaagttaagaaagtt

SEQ ID NO: 26514 - DNA, 19 bp, Homo sapiens
  siRNA target sequence for FALZ (NM_004459.5,5069-5087).
gttacttcatcacctatta

SEQ ID NO: 26515 - DNA, 19 bp, Homo sapiens
  siRNA target sequence for FALZ (NM_004459.5,5135-5153).
ggtctgcccatcaacaaaa

SEQ ID NO: 26516 - DNA, 19 bp, Homo sapiens
  siRNA target sequence for FALZ (NM_004459.5,5136-5154).
gtctgcccatcaacaaaaa

SEQ ID NO: 26517 - DNA, 19 bp, Homo sapiens
  siRNA target sequence for FALZ (NM_004459.5,5447-5465).
ggcacactggttacatcta

SEQ ID NO: 26518 - DNA, 19 bp, Homo sapiens
  siRNA target sequence for FALZ (NM_004459.5,5482-5500).
gtattccacacgagacaaa

SEQ ID NO: 26519 - DNA, 19 bp, Homo sapiens
  siRNA target sequence for FALZ (NM_004459.5,5487-5505).
ccacacgagacaaagtgaa

SEQ ID NO: 26520 - DNA, 19 bp, Homo sapiens
  siRNA target sequence for FALZ (NM_004459.5,5490-5508).
cacgagacaaagtgaaact

SEQ ID NO: 26521 - DNA, 19 bp, Homo sapiens
  siRNA target sequence for FALZ (NM_004459.5,5492-5510).
cgagacaaagtgaaactga

SEQ ID NO: 26522 - DNA, 19 bp, Homo sapiens
  siRNA target sequence for FALZ (NM_004459.5,5549-5567).
gctctgccatcctatagaa

SEQ ID NO: 26523 - DNA, 19 bp, Homo sapiens
  siRNA target sequence for FALZ (NM_004459.5,5550-5568).
ctctgccatcctatagaaa

SEQ ID NO: 26524 - DNA, 19 bp, Homo sapiens
  siRNA target sequence for FALZ (NM_004459.5,5552-5570).
ctgccatcctatagaaaat

SEQ ID NO: 26525 - DNA, 19 bp, Homo sapiens
  siRNA target sequence for FALZ (NM_004459.5,5650-5668).
ccgagaggtcccttatttt

SEQ ID NO: 26526 - DNA, 19 bp, Homo sapiens
  siRNA target sequence for FALZ (NM_004459.5,5657-5675).
gtcccttattttaattaca

SEQ ID NO: 26527 - DNA, 19 bp, Homo sapiens
  siRNA target sequence for FALZ (NM_004459.5,5692-5710).
ggatatatggccatatcct

SEQ ID NO: 26528 - DNA, 19 bp, Homo sapiens
  siRNA target sequence for FALZ (NM_004459.5,5720-5738).
ccgacctttggcatcactt

SEQ ID NO: 26529 - DNA, 19 bp, Homo sapiens
  siRNA target sequence for FALZ (NM_004459.5,5729-5747).
ggcatcacttggaggtata

SEQ ID NO: 26530 - DNA, 19 bp, Homo sapiens
  siRNA target sequence for FALZ (NM_004459.5,5852-5870).
gggactacacggacagaaa

SEQ ID NO: 26531 - DNA, 19 bp, Homo sapiens
  siRNA target sequence for FALZ (NM_004459.5,5854-5872).
gactacacggacagaaaca

SEQ ID NO: 26532 - DNA, 19 bp, Homo sapiens
  siRNA target sequence for FALZ (NM_004459.5,5865-5883).
cagaaacatccgaaactga

SEQ ID NO: 26533 - DNA, 19 bp, Homo sapiens
  siRNA target sequence for FALZ (NM_004459.5,5867-5885).
gaaacatccgaaactgaaa

SEQ ID NO: 26534 - DNA, 19 bp, Homo sapiens
  siRNA target sequence for FALZ (NM_004459.5,5921-5939).
ggtccttatggcattcgat

SEQ ID NO: 26535 - DNA, 19 bp, Homo sapiens
  siRNA target sequence for FALZ (NM_004459.5,5930-5948).
ggcattcgatctgaatatt

SEQ ID NO: 26536 - DNA, 19 bp, Homo sapiens
  siRNA target sequence for FALZ (NM_004459.5,5932-5950).
cattcgatctgaatattgt

SEQ ID NO: 26537 - DNA, 19 bp, Homo sapiens
  siRNA target sequence for FALZ (NM_004459.5,5936-5954).
cgatctgaatattgtatca

SEQ ID NO: 26538 - DNA, 19 bp, Homo sapiens
  siRNA target sequence for FALZ (NM_004459.5,6016-6034).
gaaaggccttcgatcaagt

SEQ ID NO: 26539 - DNA, 19 bp, Homo sapiens
  siRNA target sequence for FALZ (NM_004459.5,6067-6085).
gcaaactggccctgttatt

SEQ ID NO: 26540 - DNA, 19 bp, Homo sapiens
  siRNA target sequence for FALZ (NM_004459.5,6074-6092).
ggccctgttattattgaaa

SEQ ID NO: 26541 - DNA, 19 bp, Homo sapiens
  siRNA target sequence for FALZ (NM_004459.5,6124-6142).
ggagatcagggcatttgct

SEQ ID NO: 26542 - DNA, 19 bp, Homo sapiens
  siRNA target sequence for FALZ (NM_004459.5,6205-6223).
gcagaagccgacagtgatt

SEQ ID NO: 26543 - DNA, 19 bp, Homo sapiens
  siRNA target sequence for FALZ (NM_004459.5,6270-6288).
ctccagcacagaaggttat

SEQ ID NO: 26544 - DNA, 19 bp, Homo sapiens
  siRNA target sequence for FALZ (NM_004459.5,6273-6291).
cagcacagaaggttatggt

SEQ ID NO: 26545 - DNA, 19 bp, Homo sapiens
  siRNA target sequence for FALZ (NM_004459.5,6311-6329).
gttacaactggaaccaaaa

SEQ ID NO: 26546 - DNA, 19 bp, Homo sapiens
  siRNA target sequence for FALZ (NM_004459.5,6320-6338).
ggaaccaaaatggtactaa

SEQ ID NO: 26547 - DNA, 19 bp, Homo sapiens
  siRNA target sequence for FALZ (NM_004459.5,6325-6343).
caaaatggtactaactact

SEQ ID NO: 26548 - DNA, 19 bp, Homo sapiens
  siRNA target sequence for FALZ (NM_004459.5,6331-6349).
ggtactaactactaaagtt

SEQ ID NO: 26549 - DNA, 19 bp, Homo sapiens
  siRNA target sequence for FALZ (NM_004459.5,6350-6368).
ggatctccagctacagtaa

SEQ ID NO: 26550 - DNA, 19 bp, Homo sapiens
  siRNA target sequence for FALZ (NM_004459.5,6461-6479).
gtcctgggtatcattccat

SEQ ID NO: 26551 - DNA, 19 bp, Homo sapiens
  siRNA target sequence for FALZ (NM_004459.5,6466-6484).
gggtatcattccatcaagt

SEQ ID NO: 26552 - DNA, 19 bp, Homo sapiens
  siRNA target sequence for FALZ (NM_004459.5,6467-6485).
ggtatcattccatcaagta

SEQ ID NO: 26553 - DNA, 19 bp, Homo sapiens
  siRNA target sequence for FALZ (NM_004459.5,6489-6507).
gtaccagtcagcaaacctt

SEQ ID NO: 26554 - DNA, 19 bp, Homo sapiens
  siRNA target sequence for FALZ (NM_004459.5,6526-6544).
gacagcaacagtcacaatt

SEQ ID NO: 26555 - DNA, 19 bp, Homo sapiens
  siRNA target sequence for FALZ (NM_004459.5,6574-6592).
cacaagcaattcacaagta

SEQ ID NO: 26556 - DNA, 19 bp, Homo sapiens
  siRNA target sequence for FALZ (NM_004459.5,6617-6635).
ggtatgaccgtgattagaa

SEQ ID NO: 26557 - DNA, 19 bp, Homo sapiens
  siRNA target sequence for FALZ (NM_004459.5,6654-6672).
cactaggaaaggcaattat

SEQ ID NO: 26558 - DNA, 19 bp, Homo sapiens
  siRNA target sequence for FALZ (NM_004459.5,6659-6677).
ggaaaggcaattattcgaa

SEQ ID NO: 26559 - DNA, 19 bp, Homo sapiens
  siRNA target sequence for FALZ (NM_004459.5,6707-6725).
cagcaagtgatgactcaaa

SEQ ID NO: 26560 - DNA, 19 bp, Homo sapiens
  siRNA target sequence for FALZ (NM_004459.5,6788-6806).
gggcagaaaagcttaactt

SEQ ID NO: 26561 - DNA, 19 bp, Homo sapiens
  siRNA target sequence for FALZ (NM_004459.5,6809-6827).
gcaacgtccacttcaaata

SEQ ID NO: 26562 - DNA, 19 bp, Homo sapiens
  siRNA target sequence for FALZ (NM_004459.5,6810-6828).
caacgtccacttcaaatat

SEQ ID NO: 26563 - DNA, 19 bp, Homo sapiens
  siRNA target sequence for FALZ (NM_004459.5,6878-6896).
ctcaccatggctcaactta

SEQ ID NO: 26564 - DNA, 19 bp, Homo sapiens
  siRNA target sequence for FALZ (NM_004459.5,6880-6898).
caccatggctcaacttact

SEQ ID NO: 26565 - DNA, 19 bp, Homo sapiens
  siRNA target sequence for FALZ (NM_004459.5,6882-6900).
ccatggctcaacttactca

SEQ ID NO: 26566 - DNA, 19 bp, Homo sapiens
  siRNA target sequence for FALZ (NM_004459.5,6886-6904).
ggctcaacttactcagtta

SEQ ID NO: 26567 - DNA, 19 bp, Homo sapiens
  siRNA target sequence for FALZ (NM_004459.5,6887-6905).
gctcaacttactcagttaa

SEQ ID NO: 26568 - DNA, 19 bp, Homo sapiens
  siRNA target sequence for FALZ (NM_004459.5,6910-6928).
gggccacggtggcaatcaa

SEQ ID NO: 26569 - DNA, 19 bp, Homo sapiens
  siRNA target sequence for FALZ (NM_004459.5,6947-6965).
caaggacaaggtcaaacta

SEQ ID NO: 26570 - DNA, 19 bp, Homo sapiens
  siRNA target sequence for FALZ (NM_004459.5,7034-7052).
gctgcaatgccaaatggta

SEQ ID NO: 26571 - DNA, 19 bp, Homo sapiens
  siRNA target sequence for FALZ (NM_004459.5,7055-7073).
gttcagcgattcctcttta

SEQ ID NO: 26572 - DNA, 19 bp, Homo sapiens
  siRNA target sequence for FALZ (NM_004459.5,7174-7192).
ccagatgcaggtacatcaa

SEQ ID NO: 26573 - DNA, 19 bp, Homo sapiens
  siRNA target sequence for FALZ (NM_004459.5,7180-7198).
gcaggtacatcaagacaaa

SEQ ID NO: 26574 - DNA, 19 bp, Homo sapiens
  siRNA target sequence for FALZ (NM_004459.5,7181-7199).
caggtacatcaagacaaaa

SEQ ID NO: 26575 - DNA, 19 bp, Homo sapiens
  siRNA target sequence for FALZ (NM_004459.5,7423-7441).
gtctcagcctcaaagtaat

SEQ ID NO: 26576 - DNA, 19 bp, Homo sapiens
  siRNA target sequence for FALZ (NM_004459.5,7425-7443).
ctcagcctcaaagtaatgt

SEQ ID NO: 26577 - DNA, 19 bp, Homo sapiens
  siRNA target sequence for FALZ (NM_004459.5,7551-7569).
cctcacaaccgattccaat

SEQ ID NO: 26578 - DNA, 19 bp, Homo sapiens
  siRNA target sequence for FALZ (NM_004459.5,7552-7570).
ctcacaaccgattccaatt

SEQ ID NO: 26579 - DNA, 19 bp, Homo sapiens
  siRNA target sequence for FALZ (NM_004459.5,7554-7572).
cacaaccgattccaattca

SEQ ID NO: 26580 - DNA, 19 bp, Homo sapiens
  siRNA target sequence for FALZ (NM_004459.5,7630-7648).
ggtgatgaagcataatgct

SEQ ID NO: 26581 - DNA, 19 bp, Homo sapiens
  siRNA target sequence for FALZ (NM_004459.5,7636-7654).
gaagcataatgctgtaata

SEQ ID NO: 26582 - DNA, 19 bp, Homo sapiens
  siRNA target sequence for FALZ (NM_004459.5,7878-7896).
gagccgagatcctgaagaa

SEQ ID NO: 26583 - DNA, 19 bp, Homo sapiens
  siRNA target sequence for FALZ (NM_004459.5,8245-8263).
ctgtaaaacgccttatgat

SEQ ID NO: 26584 - DNA, 19 bp, Homo sapiens
  siRNA target sequence for FALZ (NM_004459.5,8247-8265).
gtaaaacgccttatgatga

SEQ ID NO: 26585 - DNA, 19 bp, Homo sapiens
  siRNA target sequence for FALZ (NM_004459.5,8571-8589).
gagtacaaagacgatatta

SEQ ID NO: 26586 - DNA, 19 bp, Homo sapiens
  siRNA target sequence for FALZ (NM_004459.5,8580-8598).
gacgatattatgaaaagct

SEQ ID NO: 26587 - DNA, 19 bp, Homo sapiens
  siRNA target sequence for FALZ (NM_004459.5,8601-8619).
cggaatttgtggcagatat

SEQ ID NO: 26588 - DNA, 19 bp, Homo sapiens
  siRNA target sequence for FALZ (NM_004459.5,8623-8641).
caaaatttttgataactgt

SEQ ID NO: 26589 - DNA, 19 bp, Homo sapiens
  siRNA target sequence for FALZ (NM_004459.5,8633-8651).
gataactgtcgttactaca

SEQ ID NO: 26590 - DNA, 19 bp, Homo sapiens
  siRNA target sequence for FALZ (NM_004459.5,8654-8672).
ccaagtgactccccatttt

SEQ ID NO: 26591 - DNA, 19 bp, Homo sapiens
  siRNA target sequence for FALZ (NM_004459.5,8681-8699).
gcagaagttctcgaatcat

SEQ ID NO: 26592 - DNA, 19 bp, Homo sapiens
  siRNA target sequence for FALZ (NM_004459.5,8682-8700).
cagaagttctcgaatcatt

SEQ ID NO: 26593 - DNA, 19 bp, Homo sapiens
  siRNA target sequence for FALZ (NM_004459.5,8684-8702).
gaagttctcgaatcattct

SEQ ID NO: 26594 - DNA, 19 bp, Homo sapiens
  siRNA target sequence for FALZ (NM_004459.5,8730-8748).
ctagcaggtctcataacaa

SEQ ID NO: 26595 - DNA, 19 bp, Homo sapiens
  siRNA target sequence for FALZ (NM_004459.5,8733-8751).
gcaggtctcataacaacaa

SEQ ID NO: 26596 - DNA, 19 bp, Homo sapiens
  siRNA target sequence for FALZ (NM_182641.2,1920-1938).
ctgaggtaggtgatttcaa

SEQ ID NO: 26597 - DNA, 19 bp, Homo sapiens
  siRNA target sequence for FALZ (NM_182641.2,7249-7267).
ggtacagtcttcaactcaa

SEQ ID NO: 26598 - DNA, 19 bp, Homo sapiens
  siRNA target sequence for FALZ (NM_182641.2,7250-7268).
gtacagtcttcaactcaaa

SEQ ID NO: 26599 - DNA, 19 bp, Homo sapiens
  siRNA target sequence for FALZ (NM_182641.2,7255-7273).
gtcttcaactcaaactctt

SEQ ID NO: 26600 - DNA, 19 bp, Homo sapiens
  siRNA target sequence for FALZ (NM_182641.2,7317-7335).
cccgtcctcagctacaaat

SEQ ID NO: 26601 - DNA, 19 bp, Homo sapiens
  siRNA target sequence for FALZ (NM_182641.2,7443-7461).
gtggtgtgccccagcaaat

SEQ ID NO: 26602 - DNA, 19 bp, Homo sapiens
  siRNA target sequence for FALZ (NM_182641.2,7445-7463).
ggtgtgccccagcaaatca

SEQ ID NO: 26603 - DNA, 19 bp, Homo sapiens
  siRNA target sequence for FALZ (NM_182641.2,7446-7464).
gtgtgccccagcaaatcaa

SEQ ID NO: 26604 - DNA, 19 bp, Homo sapiens
  siRNA target sequence for FALZ (NM_182641.2,7466-7484).
ctccagttacctatccaaa

SEQ ID NO: 26605 - DNA, 19 bp, Homo sapiens
  siRNA target sequence for FALZ (NM_182641.2,7550-7568).
gtgcaagagcagttgcaaa

SEQ ID NO: 26606 - DNA, 19 bp, Homo sapiens
  siRNA target sequence for FALZ (NM_182641.2,7640-7658).
ctccaagcttctaatcaaa

SEQ ID NO: 26607 - DNA, 19 bp, Homo sapiens
  siRNA target sequence for FALZ (NM_182641.2,7642-7660).
ccaagcttctaatcaaagt

SEQ ID NO: 26608 - DNA, 19 bp, Homo sapiens
  siRNA target sequence for FBXL11 (NM_012308.1,157-175).
catgcgacgacgctatgaa

SEQ ID NO: 26609 - DNA, 19 bp, Homo sapiens
  siRNA target sequence for FBXL11 (NM_012308.1,160-178).
gcgacgacgctatgaagat

SEQ ID NO: 26610 - DNA, 19 bp, Homo sapiens
  siRNA target sequence for FBXL11 (NM_012308.1,238-256).
gcacaccaacaaatataat

SEQ ID NO: 26611 - DNA, 19 bp, Homo sapiens
  siRNA target sequence for FBXL11 (NM_012308.1,287-305).
gattttaatgtagagtata

SEQ ID NO: 26612 - DNA, 19 bp, Homo sapiens
  siRNA target sequence for FBXL11 (NM_012308.1,324-342).
gagatcctctgattttcaa

SEQ ID NO: 26613 - DNA, 19 bp, Homo sapiens
  siRNA target sequence for FBXL11 (NM_012308.1,348-366).
ctgatggactcggaataaa

SEQ ID NO: 26614 - DNA, 19 bp, Homo sapiens
  siRNA target sequence for FBXL11 (NM_012308.1,385-403).
cactgtgaatgatgtcaaa

SEQ ID NO: 26615 - DNA, 19 bp, Homo sapiens
  siRNA target sequence for FBXL11 (NM_012308.1,420-438).
gtcgcatggtggatgtcat

SEQ ID NO: 26616 - DNA, 19 bp, Homo sapiens
  siRNA target sequence for FBXL11 (NM_012308.1,439-457).
ggacgtgaacacacagaaa

SEQ ID NO: 26617 - DNA, 19 bp, Homo sapiens
  siRNA target sequence for FBXL11 (NM_012308.1,582-600).
ggccctccacggtggattt

SEQ ID NO: 26618 - DNA, 19 bp, Homo sapiens
  siRNA target sequence for FBXL11 (NM_012308.1,584-602).
ccctccacggtggatttca

SEQ ID NO: 26619 - DNA, 19 bp, Homo sapiens
  siRNA target sequence for FBXL11 (NM_012308.1,585-603).
cctccacggtggatttcat

SEQ ID NO: 26620 - DNA, 19 bp, Homo sapiens
  siRNA target sequence for FBXL11 (NM_012308.1,626-644).
ccaaggcacttgaaggaaa

SEQ ID NO: 26621 - DNA, 19 bp, Homo sapiens
  siRNA target sequence for FBXL11 (NM_012308.1,692-710).
gtgcagaagtactgtctaa

SEQ ID NO: 26622 - DNA, 19 bp, Homo sapiens
  siRNA target sequence for FBXL11 (NM_012308.1,759-777).
cctctgtttggtatcacat

SEQ ID NO: 26623 - DNA, 19 bp, Homo sapiens
  siRNA target sequence for FBXL11 (NM_012308.1,827-845).
ctggagctgtacgagaatt

SEQ ID NO: 26624 - DNA, 19 bp, Homo sapiens
  siRNA target sequence for FBXL11 (NM_012308.1,880-898).
gggtgaccgggtatcagat

SEQ ID NO: 26625 - DNA, 19 bp, Homo sapiens
  siRNA target sequence for FBXL11 (NM_012308.1,881-899).
ggtgaccgggtatcagatt

SEQ ID NO: 26626 - DNA, 19 bp, Homo sapiens
  siRNA target sequence for FBXL11 (NM_012308.1,952-970).
gattcatgctgtgtatact

SEQ ID NO: 26627 - DNA, 19 bp, Homo sapiens
  siRNA target sequence for FBXL11 (NM_012308.1,969-987).
ctcctacagacacattagt

SEQ ID NO: 26628 - DNA, 19 bp, Homo sapiens
  siRNA target sequence for FBXL11 (NM_012308.1,992-1010).
gggggcaattttttgcata

SEQ ID NO: 26629 - DNA, 19 bp, Homo sapiens
  siRNA target sequence for FBXL11 (NM_012308.1,1055-1073).
cggacacgggttccaaata

SEQ ID NO: 26630 - DNA, 19 bp, Homo sapiens
  siRNA target sequence for FBXL11 (NM_012308.1,1080-1098).
gctatccattctactatga

SEQ ID NO: 26631 - DNA, 19 bp, Homo sapiens
  siRNA target sequence for FBXL11 (NM_012308.1,1112-1130).
gtgttggagcgctatgtgt

SEQ ID NO: 26632 - DNA, 19 bp, Homo sapiens
  siRNA target sequence for FBXL11 (NM_012308.1,1121-1139).
cgctatgtgtactgcataa

SEQ ID NO: 26633 - DNA, 19 bp, Homo sapiens
  siRNA target sequence for FBXL11 (NM_012308.1,1149-1167).
cccacctaactaaggaatt

SEQ ID NO: 26634 - DNA, 19 bp, Homo sapiens
  siRNA target sequence for FBXL11 (NM_012308.1,1150-1168).
ccacctaactaaggaattt

SEQ ID NO: 26635 - DNA, 19 bp, Homo sapiens
  siRNA target sequence for FBXL11 (NM_012308.1,1154-1172).
ctaactaaggaatttcaga

SEQ ID NO: 26636 - DNA, 19 bp, Homo sapiens
  siRNA target sequence for FBXL11 (NM_012308.1,1175-1193).
gagtccctcagcatggatt

SEQ ID NO: 26637 - DNA, 19 bp, Homo sapiens
  siRNA target sequence for FBXL11 (NM_012308.1,1185-1203).
gcatggatttggagttaaa

SEQ ID NO: 26638 - DNA, 19 bp, Homo sapiens
  siRNA target sequence for FBXL11 (NM_012308.1,1302-1320).
gagtcaacctggattatga

SEQ ID NO: 26639 - DNA, 19 bp, Homo sapiens
  siRNA target sequence for FBXL11 (NM_012308.1,1330-1348).
caaaacctgccgaagtctt

SEQ ID NO: 26640 - DNA, 19 bp, Homo sapiens
  siRNA target sequence for FBXL11 (NM_012308.1,1485-1503).
gccttcgctgccttgtaga

SEQ ID NO: 26641 - DNA, 19 bp, Homo sapiens
  siRNA target sequence for FBXL11 (NM_012308.1,1486-1504).
ccttcgctgccttgtagat

SEQ ID NO: 26642 - DNA, 19 bp, Homo sapiens
  siRNA target sequence for FBXL11 (NM_012308.1,1487-1505).
cttcgctgccttgtagata

SEQ ID NO: 26643 - DNA, 19 bp, Homo sapiens
  siRNA target sequence for FBXL11 (NM_012308.1,1490-1508).
cgctgccttgtagataagt

SEQ ID NO: 26644 - DNA, 19 bp, Homo sapiens
  siRNA target sequence for FBXL11 (NM_012308.1,1606-1624).
caacagcgatcccaagtta

SEQ ID NO: 26645 - DNA, 19 bp, Homo sapiens
  siRNA target sequence for FBXL11 (NM_012308.1,1627-1645).
cctcactggagttcctata

SEQ ID NO: 26646 - DNA, 19 bp, Homo sapiens
  siRNA target sequence for FBXL11 (NM_012308.1,1630-1648).
cactggagttcctatagta

SEQ ID NO: 26647 - DNA, 19 bp, Homo sapiens
  siRNA target sequence for FBXL11 (NM_012308.1,1653-1671).
ggccaaaaagggataagct

SEQ ID NO: 26648 - DNA, 19 bp, Homo sapiens
  siRNA target sequence for FBXL11 (NM_012308.1,1654-1672).
gccaaaaagggataagctt

SEQ ID NO: 26649 - DNA, 19 bp, Homo sapiens
  siRNA target sequence for FBXL11 (NM_012308.1,1655-1673).
ccaaaaagggataagctta

SEQ ID NO: 26650 - DNA, 19 bp, Homo sapiens
  siRNA target sequence for FBXL11 (NM_012308.1,1656-1674).
caaaaagggataagcttaa

SEQ ID NO: 26651 - DNA, 19 bp, Homo sapiens
  siRNA target sequence for FBXL11 (NM_012308.1,1808-1826).
cgagtgcgatgtcgaaaat

SEQ ID NO: 26652 - DNA, 19 bp, Homo sapiens
  siRNA target sequence for FBXL11 (NM_012308.1,1811-1829).
gtgcgatgtcgaaaatgca

SEQ ID NO: 26653 - DNA, 19 bp, Homo sapiens
  siRNA target sequence for FBXL11 (NM_012308.1,1813-1831).
gcgatgtcgaaaatgcaaa

SEQ ID NO: 26654 - DNA, 19 bp, Homo sapiens
  siRNA target sequence for FBXL11 (NM_012308.1,2084-2102).
gggttgcttaacgaagaat

SEQ ID NO: 26655 - DNA, 19 bp, Homo sapiens
  siRNA target sequence for FBXL11 (NM_012308.1,2085-2103).
ggttgcttaacgaagaatt

SEQ ID NO: 26656 - DNA, 19 bp, Homo sapiens
  siRNA target sequence for FBXL11 (NM_012308.1,2362-2380).
ccgcgatgagcgcttcaaa

SEQ ID NO: 26657 - DNA, 19 bp, Homo sapiens
  siRNA target sequence for FBXL11 (NM_012308.1,2533-2551).
gctccacgggacatccatt

SEQ ID NO: 26658 - DNA, 19 bp, Homo sapiens
  siRNA target sequence for FBXL11 (NM_012308.1,2821-2839).
cagccgcagagaactttgt

SEQ ID NO: 26659 - DNA, 19 bp, Homo sapiens
  siRNA target sequence for FBXL11 (NM_012308.1,2824-2842).
ccgcagagaactttgtgaa

SEQ ID NO: 26660 - DNA, 19 bp, Homo sapiens
  siRNA target sequence for FBXL11 (NM_012308.1,2825-2843).
cgcagagaactttgtgaat

SEQ ID NO: 26661 - DNA, 19 bp, Homo sapiens
  siRNA target sequence for FBXL11 (NM_012308.1,2852-2870).
gtgtgcaagacgtggtata

SEQ ID NO: 26662 - DNA, 19 bp, Homo sapiens
  siRNA target sequence for FBXL11 (NM_012308.1,2854-2872).
gtgcaagacgtggtataaa

SEQ ID NO: 26663 - DNA, 19 bp, Homo sapiens
  siRNA target sequence for FBXL11 (NM_012308.1,2985-3003).
gttggaccaacatctctaa

SEQ ID NO: 26664 - DNA, 19 bp, Homo sapiens
  siRNA target sequence for FBXL11 (NM_012308.1,3011-3029).
ctgacatggctcgtcaata

SEQ ID NO: 26665 - DNA, 19 bp, Homo sapiens
  siRNA target sequence for FBXL11 (NM_012308.1,3132-3150).
ggtgggcagtaggaatcaa

SEQ ID NO: 26666 - DNA, 19 bp, Homo sapiens
  siRNA target sequence for FBXL11 (NM_012308.1,3158-3176).
caaattcgggacttgctta

SEQ ID NO: 26667 - DNA, 19 bp, Homo sapiens
  siRNA target sequence for FBXL11 (NM_012308.1,3266-3284).
gccacgcttcgcctcataa

SEQ ID NO: 26668 - DNA, 19 bp, Homo sapiens
  siRNA target sequence for FBXL11 (NM_012308.1,3267-3285).
ccacgcttcgcctcataat

SEQ ID NO: 26669 - DNA, 19 bp, Homo sapiens
  siRNA target sequence for FBXL11 (NM_012308.1,3268-3286).
cacgcttcgcctcataatt

SEQ ID NO: 26670 - DNA, 19 bp, Homo sapiens
  siRNA target sequence for FBXL11 (NM_012308.1,3403-3421).
caatatggcaggttgcaat

SEQ ID NO: 26671 - DNA, 19 bp, Homo sapiens
  siRNA target sequence for FBXL11 (NM_012308.1,3429-3447).
cagaccagaccctgatcta

SEQ ID NO: 26672 - DNA, 19 bp, Homo sapiens
  siRNA target sequence for FBXL11 (NM_012308.1,3493-3511).
caagcagatcactcgaaaa

SEQ ID NO: 26673 - DNA, 19 bp, Homo sapiens
  siRNA target sequence for FBXL11 (NM_012308.1,3512-3530).
gcctgcgagcacttcatct

SEQ ID NO: 26674 - DNA, 19 bp, Homo sapiens
  siRNA target sequence for FCRH3 (NM_052939.2,349-367).
ggccccaaaagctgtactt

SEQ ID NO: 26675 - DNA, 19 bp, Homo sapiens
  siRNA target sequence for FCRH3 (NM_052939.2,351-369).
ccccaaaagctgtacttct

SEQ ID NO: 26676 - DNA, 19 bp, Homo sapiens
  siRNA target sequence for FCRH3 (NM_052939.2,404-422).
gaaaaagtggctctcatat

SEQ ID NO: 26677 - DNA, 19 bp, Homo sapiens
  siRNA target sequence for FCRH3 (NM_052939.2,418-436).
catatgcagcagcatatca

SEQ ID NO: 26678 - DNA, 19 bp, Homo sapiens
  siRNA target sequence for FCRH3 (NM_052939.2,451-469).
gggagacacatattggtat

SEQ ID NO: 26679 - DNA, 19 bp, Homo sapiens
  siRNA target sequence for FCRH3 (NM_052939.2,465-483).
ggtatcacgatgagaagtt

SEQ ID NO: 26680 - DNA, 19 bp, Homo sapiens
  siRNA target sequence for FCRH3 (NM_052939.2,472-490).
cgatgagaagttgttgaaa

SEQ ID NO: 26681 - DNA, 19 bp, Homo sapiens
  siRNA target sequence for FCRH3 (NM_052939.2,566-584).
gccgtgcatgtggaatttt

SEQ ID NO: 26682 - DNA, 19 bp, Homo sapiens
  siRNA target sequence for FCRH3 (NM_052939.2,568-586).
cgtgcatgtggaattttca

SEQ ID NO: 26683 - DNA, 19 bp, Homo sapiens
  siRNA target sequence for FCRH3 (NM_052939.2,609-627).
ctttacatcctgtctttga

SEQ ID NO: 26684 - DNA, 19 bp, Homo sapiens
  siRNA target sequence for FCRH3 (NM_052939.2,675-693).
ctcatcaaaaggtttacta

SEQ ID NO: 26685 - DNA, 19 bp, Homo sapiens
  siRNA target sequence for FCRH3 (NM_052939.2,709-727).
gcttcctaatagttataat

SEQ ID NO: 26686 - DNA, 19 bp, Homo sapiens
  siRNA target sequence for FCRH3 (NM_052939.2,720-738).
gttataatttagagaagat

SEQ ID NO: 26687 - DNA, 19 bp, Homo sapiens
  siRNA target sequence for FCRH3 (NM_052939.2,754-772).
ctccagggataatagcaaa

SEQ ID NO: 26688 - DNA, 19 bp, Homo sapiens
  siRNA target sequence for FCRH3 (NM_052939.2,756-774).
ccagggataatagcaaata

SEQ ID NO: 26689 - DNA, 19 bp, Homo sapiens
  siRNA target sequence for FCRH3 (NM_052939.2,757-775).
cagggataatagcaaatat

SEQ ID NO: 26690 - DNA, 19 bp, Homo sapiens
  siRNA target sequence for FCRH3 (NM_052939.2,759-777).
gggataatagcaaatatca

SEQ ID NO: 26691 - DNA, 19 bp, Homo sapiens
  siRNA target sequence for FCRH3 (NM_052939.2,783-801).
ctgcttataggaagtttta

SEQ ID NO: 26692 - DNA, 19 bp, Homo sapiens
  siRNA target sequence for FCRH3 (NM_052939.2,831-849).
ccctaaatatccaagttca

SEQ ID NO: 26693 - DNA, 19 bp, Homo sapiens
  siRNA target sequence for FCRH3 (NM_052939.2,832-850).
cctaaatatccaagttcaa

SEQ ID NO: 26694 - DNA, 19 bp, Homo sapiens
  siRNA target sequence for FCRH3 (NM_052939.2,1135-1153).
gagagtccctgtgtctaat

SEQ ID NO: 26695 - DNA, 19 bp, Homo sapiens
  siRNA target sequence for FCRH3 (NM_052939.2,1137-1155).
gagtccctgtgtctaatgt

SEQ ID NO: 26696 - DNA, 19 bp, Homo sapiens
  siRNA target sequence for FCRH3 (NM_052939.2,1141-1159).
ccctgtgtctaatgtgaat

SEQ ID NO: 26697 - DNA, 19 bp, Homo sapiens
  siRNA target sequence for FCRH3 (NM_052939.2,1149-1167).
ctaatgtgaatctagagat

SEQ ID NO: 26698 - DNA, 19 bp, Homo sapiens
  siRNA target sequence for FCRH3 (NM_052939.2,1176-1194).
ccggagggcagctgattga

SEQ ID NO: 26699 - DNA, 19 bp, Homo sapiens
  siRNA target sequence for FCRH3 (NM_052939.2,1177-1195).
cggagggcagctgattgaa

SEQ ID NO: 26700 - DNA, 19 bp, Homo sapiens
  siRNA target sequence for FCRH3 (NM_052939.2,1233-1251).
gttcagggactgtcacatt

SEQ ID NO: 26701 - DNA, 19 bp, Homo sapiens
  siRNA target sequence for FCRH3 (NM_052939.2,1961-1979).
gtggtgacactcaatgtta

SEQ ID NO: 26702 - DNA, 19 bp, Homo sapiens
  siRNA target sequence for FCRH3 (NM_052939.2,2194-2212).
gcccactcactctaaacca

SEQ ID NO: 26703 - DNA, 19 bp, Homo sapiens
  siRNA target sequence for FCRH3 (NM_052939.2,2233-2251).
gccaatgtacagcaatgta

SEQ ID NO: 26704 - DNA, 19 bp, Homo sapiens
  siRNA target sequence for FCRH3 (NM_052939.2,2234-2252).
ccaatgtacagcaatgtaa

SEQ ID NO: 26705 - DNA, 19 bp, Homo sapiens
  siRNA target sequence for FCRH3 (NM_052939.2,2235-2253).
caatgtacagcaatgtaaa

SEQ ID NO: 26706 - DNA, 19 bp, Homo sapiens
  siRNA target sequence for FCRH3 (NM_052939.2,2259-2277).
gagatagcaacccgattta

SEQ ID NO: 26707 - DNA, 19 bp, Homo sapiens
  siRNA target sequence for FCRH3 (NM_052939.2,2261-2279).
gatagcaacccgatttatt

SEQ ID NO: 26708 - DNA, 19 bp, Homo sapiens
  siRNA target sequence for FCRH3 (NM_052939.2,2292-2310).
gcatccagcatacaaaaga

SEQ ID NO: 26709 - DNA, 19 bp, Homo sapiens
  siRNA target sequence for FCRH3 (NM_052939.2,2293-2311).
catccagcatacaaaagaa

SEQ ID NO: 26710 - DNA, 19 bp, Homo sapiens
  siRNA target sequence for FCRH3 (NM_052939.2,2299-2317).
gcatacaaaagaaaactca

SEQ ID NO: 26711 - DNA, 19 bp, Homo sapiens
  siRNA target sequence for FCRH3 (NM_052939.2,2316-2334).
cagctaattgtccaatgat

SEQ ID NO: 26712 - DNA, 19 bp, Homo sapiens
  siRNA target sequence for FCRH3 (NM_052939.2,2351-2369).
gaacttacagtcctctatt

SEQ ID NO: 26713 - DNA, 19 bp, Homo sapiens
  siRNA target sequence for FLJ10876 (NM_018254.2,155-173).
ctcggatccctgaatttga

SEQ ID NO: 26714 - DNA, 19 bp, Homo sapiens
  siRNA target sequence for FLJ10876 (NM_018254.2,216-234).
gcttgtatggtctccatat

SEQ ID NO: 26715 - DNA, 19 bp, Homo sapiens
  siRNA target sequence for FLJ10876 (NM_018254.2,224-242).
ggtctccatatcacagtat

SEQ ID NO: 26716 - DNA, 19 bp, Homo sapiens
  siRNA target sequence for FLJ10876 (NM_018254.2,239-257).
gtatcccagatgccaaatt

SEQ ID NO: 26717 - DNA, 19 bp, Homo sapiens
  siRNA target sequence for FLJ10876 (NM_018254.2,243-261).
cccagatgccaaattggat

SEQ ID NO: 26718 - DNA, 19 bp, Homo sapiens
  siRNA target sequence for FLJ10876 (NM_018254.2,267-285).
cattgcaattgcaaaggaa

SEQ ID NO: 26719 - DNA, 19 bp, Homo sapiens
  siRNA target sequence for FLJ10876 (NM_018254.2,358-376).
gctgatctccctaatttca

SEQ ID NO: 26720 - DNA, 19 bp, Homo sapiens
  siRNA target sequence for FLJ10876 (NM_018254.2,485-503).
caattgcaagccttgtaaa

SEQ ID NO: 26721 - DNA, 19 bp, Homo sapiens
  siRNA target sequence for FLJ10876 (NM_018254.2,495-513).
ccttgtaaaatattactat

SEQ ID NO: 26722 - DNA, 19 bp, Homo sapiens
  siRNA target sequence for FLJ10876 (NM_018254.2,496-514).
cttgtaaaatattactatt

SEQ ID NO: 26723 - DNA, 19 bp, Homo sapiens
  siRNA target sequence for FLJ10876 (NM_018254.2,527-545).
ctcgctctaggacaagttt

SEQ ID NO: 26724 - DNA, 19 bp, Homo sapiens
  siRNA target sequence for FLJ10876 (NM_018254.2,549-567).
ggatcgccaggctcgtaaa

SEQ ID NO: 26725 - DNA, 19 bp, Homo sapiens
  siRNA target sequence for FLJ10876 (NM_018254.2,558-576).
ggctcgtaaactagctaat

SEQ ID NO: 26726 - DNA, 19 bp, Homo sapiens
  siRNA target sequence for FLJ10876 (NM_018254.2,559-577).
gctcgtaaactagctaata

SEQ ID NO: 26727 - DNA, 19 bp, Homo sapiens
  siRNA target sequence for FLJ10876 (NM_018254.2,563-581).
gtaaactagctaatagaca

SEQ ID NO: 26728 - DNA, 19 bp, Homo sapiens
  siRNA target sequence for FLJ10876 (NM_018254.2,666-684).
caaaaaagagggtaatact

SEQ ID NO: 26729 - DNA, 19 bp, Homo sapiens
  siRNA target sequence for FLJ10876 (NM_018254.2,685-703).
gaacaacctgtccaaacta

SEQ ID NO: 26730 - DNA, 19 bp, Homo sapiens
  siRNA target sequence for FLJ10876 (NM_018254.2,779-797).
cacctaagggcatgtattt

SEQ ID NO: 26731 - DNA, 19 bp, Homo sapiens
  siRNA target sequence for FLJ10876 (NM_018254.2,873-891).
gttgatctctctaaaacgt

SEQ ID NO: 26732 - DNA, 19 bp, Homo sapiens
  siRNA target sequence for FLJ10876 (NM_018254.2,889-907).
cgtcaggttcagaatgcta

SEQ ID NO: 26733 - DNA, 19 bp, Homo sapiens
  siRNA target sequence for FLJ10876 (NM_018254.2,943-961).
ggtggaattgaagaattca

SEQ ID NO: 26734 - DNA, 19 bp, Homo sapiens
  siRNA target sequence for FLJ10876 (NM_018254.2,1030-1048).
ggtgtccgcaaatatggta

SEQ ID NO: 26735 - DNA, 19 bp, Homo sapiens
  siRNA target sequence for FLJ10876 (NM_018254.2,1031-1049).
gtgtccgcaaatatggtaa

SEQ ID NO: 26736 - DNA, 19 bp, Homo sapiens
  siRNA target sequence for FLJ10876 (NM_018254.2,1122-1140).
caggcgtcggtttaactta

SEQ ID NO: 26737 - DNA, 19 bp, Homo sapiens
  siRNA target sequence for FLJ10876 (NM_018254.2,1124-1142).
ggcgtcggtttaacttaga

SEQ ID NO: 26738 - DNA, 19 bp, Homo sapiens
  siRNA target sequence for FLJ10876 (NM_018254.2,1205-1223).
ctttaggggaggagacaaa

SEQ ID NO: 26739 - DNA, 19 bp, Homo sapiens
  siRNA target sequence for FLJ10876 (NM_018254.2,1220-1238).
caaaaagtgcttctaatgt

SEQ ID NO: 26740 - DNA, 19 bp, Homo sapiens
  siRNA target sequence for FLJ10876 (NM_018254.2,1567-1585).
ccaccatcacttattggaa

SEQ ID NO: 26741 - DNA, 19 bp, Homo sapiens
  siRNA target sequence for FLJ10876 (NM_018254.2,1571-1589).
catcacttattggaattca

SEQ ID NO: 26742 - DNA, 19 bp, Homo sapiens
  siRNA target sequence for FLJ12178 (NM_025134.2,115-133).
cccagactacgttgaagta

SEQ ID NO: 26743 - DNA, 19 bp, Homo sapiens
  siRNA target sequence for FLJ12178 (NM_025134.2,117-135).
cagactacgttgaagtaga

SEQ ID NO: 26744 - DNA, 19 bp, Homo sapiens
  siRNA target sequence for FLJ12178 (NM_025134.2,140-158).
gtattagaagtctcttttt

SEQ ID NO: 26745 - DNA, 19 bp, Homo sapiens
  siRNA target sequence for FLJ12178 (NM_025134.2,181-199).
gcctgttatttactactta

SEQ ID NO: 26746 - DNA, 19 bp, Homo sapiens
  siRNA target sequence for FLJ12178 (NM_025134.2,227-245).
gatagtacttgggaactaa

SEQ ID NO: 26747 - DNA, 19 bp, Homo sapiens
  siRNA target sequence for FLJ12178 (NM_025134.2,319-337).
ggaccgtcctccttctaat

SEQ ID NO: 26748 - DNA, 19 bp, Homo sapiens
  siRNA target sequence for FLJ12178 (NM_025134.2,322-340).
ccgtcctccttctaatatt

SEQ ID NO: 26749 - DNA, 19 bp, Homo sapiens
  siRNA target sequence for FLJ12178 (NM_025134.2,323-341).
cgtcctccttctaatattt

SEQ ID NO: 26750 - DNA, 19 bp, Homo sapiens
  siRNA target sequence for FLJ12178 (NM_025134.2,353-371).
gatcaatccagggactata

SEQ ID NO: 26751 - DNA, 19 bp, Homo sapiens
  siRNA target sequence for FLJ12178 (NM_025134.2,379-397).
caatcaactcagggaatat

SEQ ID NO: 26752 - DNA, 19 bp, Homo sapiens
  siRNA target sequence for FLJ12178 (NM_025134.2,408-426).
gactcaactggctcttgtt

SEQ ID NO: 26753 - DNA, 19 bp, Homo sapiens
  siRNA target sequence for FLJ12178 (NM_025134.2,417-435).
ggctcttgttcaattggta

SEQ ID NO: 26754 - DNA, 19 bp, Homo sapiens
  siRNA target sequence for FLJ12178 (NM_025134.2,421-439).
cttgttcaattggtacaat

SEQ ID NO: 26755 - DNA, 19 bp, Homo sapiens
  siRNA target sequence for FLJ12178 (NM_025134.2,424-442).
gttcaattggtacaataga

SEQ ID NO: 26756 - DNA, 19 bp, Homo sapiens
  siRNA target sequence for FLJ12178 (NM_025134.2,471-489).
gtcttggcaaaactattca

SEQ ID NO: 26757 - DNA, 19 bp, Homo sapiens
  siRNA target sequence for FLJ12178 (NM_025134.2,473-491).
cttggcaaaactattcaat

SEQ ID NO: 26758 - DNA, 19 bp, Homo sapiens
  siRNA target sequence for FLJ12178 (NM_025134.2,531-549).
gaggacctttcctgattat

SEQ ID NO: 26759 - DNA, 19 bp, Homo sapiens
  siRNA target sequence for FLJ12178 (NM_025134.2,554-572).
ccactttctactattgcaa

SEQ ID NO: 26760 - DNA, 19 bp, Homo sapiens
  siRNA target sequence for FLJ12178 (NM_025134.2,555-573).
cactttctactattgcaaa

SEQ ID NO: 26761 - DNA, 19 bp, Homo sapiens
  siRNA target sequence for FLJ12178 (NM_025134.2,574-592).
ctgggagagagaatttcgt

SEQ ID NO: 26762 - DNA, 19 bp, Homo sapiens
  siRNA target sequence for FLJ12178 (NM_025134.2,590-608).
cgtacgtggactgatatta

SEQ ID NO: 26763 - DNA, 19 bp, Homo sapiens
  siRNA target sequence for FLJ12178 (NM_025134.2,591-609).
gtacgtggactgatattaa

SEQ ID NO: 26764 - DNA, 19 bp, Homo sapiens
  siRNA target sequence for FLJ12178 (NM_025134.2,594-612).
cgtggactgatattaacgt

SEQ ID NO: 26765 - DNA, 19 bp, Homo sapiens
  siRNA target sequence for FLJ12178 (NM_025134.2,595-613).
gtggactgatattaacgtt

SEQ ID NO: 26766 - DNA, 19 bp, Homo sapiens
  siRNA target sequence for FLJ12178 (NM_025134.2,630-648).
gcctgattagcagacaaat

SEQ ID NO: 26767 - DNA, 19 bp, Homo sapiens
  siRNA target sequence for FLJ12178 (NM_025134.2,656-674).
caatacgagatgtacttca

SEQ ID NO: 26768 - DNA, 19 bp, Homo sapiens
  siRNA target sequence for FLJ12178 (NM_025134.2,759-777).
gagagcttaatgcaattga

SEQ ID NO: 26769 - DNA, 19 bp, Homo sapiens
  siRNA target sequence for FLJ12178 (NM_025134.2,776-794).
gaatggcgatgtgtgatta

SEQ ID NO: 26770 - DNA, 19 bp, Homo sapiens
  siRNA target sequence for FLJ12178 (NM_025134.2,781-799).
gcgatgtgtgattattgat

SEQ ID NO: 26771 - DNA, 19 bp, Homo sapiens
  siRNA target sequence for FLJ12178 (NM_025134.2,841-859).
gggcctgaaactcatgaat

SEQ ID NO: 26772 - DNA, 19 bp, Homo sapiens
  siRNA target sequence for FLJ12178 (NM_025134.2,843-861).
gcctgaaactcatgaatct

SEQ ID NO: 26773 - DNA, 19 bp, Homo sapiens
  siRNA target sequence for FLJ12178 (NM_025134.2,954-972).
cttctgaatcaacatttat

SEQ ID NO: 26774 - DNA, 19 bp, Homo sapiens
  siRNA target sequence for FLJ12178 (NM_025134.2,1047-1065).
gacgattaaaagaagatgt

SEQ ID NO: 26775 - DNA, 19 bp, Homo sapiens
  siRNA target sequence for FLJ12178 (NM_025134.2,1072-1090).
gaagttggcacctaaagaa

SEQ ID NO: 26776 - DNA, 19 bp, Homo sapiens
  siRNA target sequence for FLJ12178 (NM_025134.2,1095-1113).
ccatcattgaagtagaact

SEQ ID NO: 26777 - DNA, 19 bp, Homo sapiens
  siRNA target sequence for FLJ12178 (NM_025134.2,1196-1214).
gtacctaacttggtcaata

SEQ ID NO: 26778 - DNA, 19 bp, Homo sapiens
  siRNA target sequence for FLJ12178 (NM_025134.2,1199-1217).
cctaacttggtcaatacca

SEQ ID NO: 26779 - DNA, 19 bp, Homo sapiens
  siRNA target sequence for FLJ12178 (NM_025134.2,1200-1218).
ctaacttggtcaataccat

SEQ ID NO: 26780 - DNA, 19 bp, Homo sapiens
  siRNA target sequence for FLJ12178 (NM_025134.2,1263-1281).
gtgctgaggagaaaatact

SEQ ID NO: 26781 - DNA, 19 bp, Homo sapiens
  siRNA target sequence for FLJ12178 (NM_025134.2,1339-1357).
gatccagtctgctggtaaa

SEQ ID NO: 26782 - DNA, 19 bp, Homo sapiens
  siRNA target sequence for FLJ12178 (NM_025134.2,1350-1368).
ctggtaaattggtccttat

SEQ ID NO: 26783 - DNA, 19 bp, Homo sapiens
  siRNA target sequence for FLJ12178 (NM_025134.2,1363-1381).
ccttattgataaattgctt

SEQ ID NO: 26784 - DNA, 19 bp, Homo sapiens
  siRNA target sequence for FLJ12178 (NM_025134.2,1390-1408).
gaaagccggaggtcataaa

SEQ ID NO: 26785 - DNA, 19 bp, Homo sapiens
  siRNA target sequence for FLJ12178 (NM_025134.2,1414-1432).
catcttctctcaaatggtt

SEQ ID NO: 26786 - DNA, 19 bp, Homo sapiens
  siRNA target sequence for FLJ12178 (NM_025134.2,1456-1474).
ctatctcatacataaaaga

SEQ ID NO: 26787 - DNA, 19 bp, Homo sapiens
  siRNA target sequence for FLJ12178 (NM_025134.2,1517-1535).
cggcaagctgctatagata

SEQ ID NO: 26788 - DNA, 19 bp, Homo sapiens
  siRNA target sequence for FLJ12178 (NM_025134.2,1519-1537).
gcaagctgctatagataga

SEQ ID NO: 26789 - DNA, 19 bp, Homo sapiens
  siRNA target sequence for FLJ12178 (NM_025134.2,1520-1538).
caagctgctatagatagat

SEQ ID NO: 26790 - DNA, 19 bp, Homo sapiens
  siRNA target sequence for FLJ12178 (NM_025134.2,1590-1608).
gtgggttgggcatcaactt

SEQ ID NO: 26791 - DNA, 19 bp, Homo sapiens
  siRNA target sequence for FLJ12178 (NM_025134.2,1592-1610).
gggttgggcatcaacttaa

SEQ ID NO: 26792 - DNA, 19 bp, Homo sapiens
  siRNA target sequence for FLJ12178 (NM_025134.2,1594-1612).
gttgggcatcaacttaact

SEQ ID NO: 26793 - DNA, 19 bp, Homo sapiens
  siRNA target sequence for FLJ12178 (NM_025134.2,1611-1629).
ctgcagctgatacatgtat

SEQ ID NO: 26794 - DNA, 19 bp, Homo sapiens
  siRNA target sequence for FLJ12178 (NM_025134.2,1687-1705).
cagaattggtcagaacaaa

SEQ ID NO: 26795 - DNA, 19 bp, Homo sapiens
  siRNA target sequence for FLJ12178 (NM_025134.2,1724-1742).
ctggtaactcgtaactcat

SEQ ID NO: 26796 - DNA, 19 bp, Homo sapiens
  siRNA target sequence for FLJ12178 (NM_025134.2,1726-1744).
ggtaactcgtaactcatat

SEQ ID NO: 26797 - DNA, 19 bp, Homo sapiens
  siRNA target sequence for FLJ12178 (NM_025134.2,1810-1828).
gagtggaagagaaagtaat

SEQ ID NO: 26798 - DNA, 19 bp, Homo sapiens
  siRNA target sequence for FLJ12178 (NM_025134.2,1824-1842).
gtaatgttggtggtattca

SEQ ID NO: 26799 - DNA, 19 bp, Homo sapiens
  siRNA target sequence for FLJ12178 (NM_025134.2,1836-1854).
gtattcagcagctttccaa

SEQ ID NO: 26800 - DNA, 19 bp, Homo sapiens
  siRNA target sequence for FLJ12178 (NM_025134.2,1873-1891).
gcttcgaagaggtgcttat

SEQ ID NO: 26801 - DNA, 19 bp, Homo sapiens
  siRNA target sequence for FLJ12178 (NM_025134.2,1883-1901).
ggtgcttatggtgctatta

SEQ ID NO: 26802 - DNA, 19 bp, Homo sapiens
  siRNA target sequence for FLJ12178 (NM_025134.2,1884-1902).
gtgcttatggtgctattat

SEQ ID NO: 26803 - DNA, 19 bp, Homo sapiens
  siRNA target sequence for FLJ12178 (NM_025134.2,1887-1905).
cttatggtgctattatgga

SEQ ID NO: 26804 - DNA, 19 bp, Homo sapiens
  siRNA target sequence for FLJ12178 (NM_025134.2,1937-1955).
gaggatatcgatcagattt

SEQ ID NO: 26805 - DNA, 19 bp, Homo sapiens
  siRNA target sequence for FLJ12178 (NM_025134.2,1958-1976).
ctacgtcgtacaaaaacta

SEQ ID NO: 26806 - DNA, 19 bp, Homo sapiens
  siRNA target sequence for FLJ12178 (NM_025134.2,1961-1979).
cgtcgtacaaaaactatta

SEQ ID NO: 26807 - DNA, 19 bp, Homo sapiens
  siRNA target sequence for FLJ12178 (NM_025134.2,1974-1992).
ctattacaattgaatcaga

SEQ ID NO: 26808 - DNA, 19 bp, Homo sapiens
  siRNA target sequence for FLJ12178 (NM_025134.2,1991-2009).
gaaggacgtgggtcaacat

SEQ ID NO: 26809 - DNA, 19 bp, Homo sapiens
  siRNA target sequence for FLJ12178 (NM_025134.2,2086-2104).
ggctaaaaaggcagaaata

SEQ ID NO: 26810 - DNA, 19 bp, Homo sapiens
  siRNA target sequence for FLJ12178 (NM_025134.2,2127-2145).
gaaacagcttggttattga

SEQ ID NO: 26811 - DNA, 19 bp, Homo sapiens
  siRNA target sequence for FLJ12178 (NM_025134.2,2144-2162).
gacactccaagaattagga

SEQ ID NO: 26812 - DNA, 19 bp, Homo sapiens
  siRNA target sequence for FLJ12178 (NM_025134.2,2150-2168).
ccaagaattaggaagcaaa

SEQ ID NO: 26813 - DNA, 19 bp, Homo sapiens
  siRNA target sequence for FLJ12178 (NM_025134.2,2164-2182).
gcaaacaagaccttttagt

SEQ ID NO: 26814 - DNA, 19 bp, Homo sapiens
  siRNA target sequence for FLJ12178 (NM_025134.2,2192-2210).
gatgaattggctgaattat

SEQ ID NO: 26815 - DNA, 19 bp, Homo sapiens
  siRNA target sequence for FLJ12178 (NM_025134.2,2283-2301).
gaactgaatgctttagagt

SEQ ID NO: 26816 - DNA, 19 bp, Homo sapiens
  siRNA target sequence for FLJ12178 (NM_025134.2,2305-2323).
gaaaaacctgctagtttat

SEQ ID NO: 26817 - DNA, 19 bp, Homo sapiens
  siRNA target sequence for FLJ12178 (NM_025134.2,2333-2351).
cgatggagagagattctat

SEQ ID NO: 26818 - DNA, 19 bp, Homo sapiens
  siRNA target sequence for FLJ12178 (NM_025134.2,2381-2399).
gaacacgatgtagagataa

SEQ ID NO: 26819 - DNA, 19 bp, Homo sapiens
  siRNA target sequence for FLJ12178 (NM_025134.2,2384-2402).
cacgatgtagagataattt

SEQ ID NO: 26820 - DNA, 19 bp, Homo sapiens
  siRNA target sequence for FLJ12178 (NM_025134.2,2403-2421).
gccgagctctcttagcata

SEQ ID NO: 26821 - DNA, 19 bp, Homo sapiens
  siRNA target sequence for FLJ12178 (NM_025134.2,2404-2422).
ccgagctctcttagcatat

SEQ ID NO: 26822 - DNA, 19 bp, Homo sapiens
  siRNA target sequence for FLJ12178 (NM_025134.2,2405-2423).
cgagctctcttagcatatt

SEQ ID NO: 26823 - DNA, 19 bp, Homo sapiens
  siRNA target sequence for FLJ12178 (NM_025134.2,2418-2436).
catattgccttgttcacta

SEQ ID NO: 26824 - DNA, 19 bp, Homo sapiens
  siRNA target sequence for FLJ12178 (NM_025134.2,2438-2456).
cgaggagatgagaagatta

SEQ ID NO: 26825 - DNA, 19 bp, Homo sapiens
  siRNA target sequence for FLJ12178 (NM_025134.2,2500-2518).
gacacgagagctacagaat

SEQ ID NO: 26826 - DNA, 19 bp, Homo sapiens
  siRNA target sequence for FLJ12178 (NM_025134.2,2505-2523).
gagagctacagaatcatct

SEQ ID NO: 26827 - DNA, 19 bp, Homo sapiens
  siRNA target sequence for FLJ12178 (NM_025134.2,2580-2598).
caagctcatttgatataca

SEQ ID NO: 26828 - DNA, 19 bp, Homo sapiens
  siRNA target sequence for FLJ12178 (NM_025134.2,2604-2622).
cagaatggcttcgaaaata

SEQ ID NO: 26829 - DNA, 19 bp, Homo sapiens
  siRNA target sequence for FLJ12178 (NM_025134.2,2707-2725).
gctgtattatctaaagcaa

SEQ ID NO: 26830 - DNA, 19 bp, Homo sapiens
  siRNA target sequence for FLJ12178 (NM_025134.2,2844-2862).
ctgataagtcactccttat

SEQ ID NO: 26831 - DNA, 19 bp, Homo sapiens
  siRNA target sequence for FLJ12178 (NM_025134.2,2969-2987).
gaacagagagcgaatgatt

SEQ ID NO: 26832 - DNA, 19 bp, Homo sapiens
  siRNA target sequence for FLJ12178 (NM_025134.2,2972-2990).
cagagagcgaatgattata

SEQ ID NO: 26833 - DNA, 19 bp, Homo sapiens
  siRNA target sequence for FLJ12178 (NM_025134.2,2976-2994).
gagcgaatgattatatgga

SEQ ID NO: 26834 - DNA, 19 bp, Homo sapiens
  siRNA target sequence for FLJ12178 (NM_025134.2,3024-3042).
ctgccccagccatctttaa

SEQ ID NO: 26835 - DNA, 19 bp, Homo sapiens
  siRNA target sequence for FLJ12178 (NM_025134.2,3032-3050).
gccatctttaaagatgata

SEQ ID NO: 26836 - DNA, 19 bp, Homo sapiens
  siRNA target sequence for FLJ12178 (NM_025134.2,3033-3051).
ccatctttaaagatgatat

SEQ ID NO: 26837 - DNA, 19 bp, Homo sapiens
  siRNA target sequence for FLJ12178 (NM_025134.2,3066-3084).
cctcaccaggagatcttgt

SEQ ID NO: 26838 - DNA, 19 bp, Homo sapiens
  siRNA target sequence for FLJ12178 (NM_025134.2,3125-3143).
gtatattggcctactcaat

SEQ ID NO: 26839 - DNA, 19 bp, Homo sapiens
  siRNA target sequence for FLJ12178 (NM_025134.2,3177-3195).
ctgcataccagcgtactaa

SEQ ID NO: 26840 - DNA, 19 bp, Homo sapiens
  siRNA target sequence for FLJ12178 (NM_025134.2,3179-3197).
gcataccagcgtactaata

SEQ ID NO: 26841 - DNA, 19 bp, Homo sapiens
  siRNA target sequence for FLJ12178 (NM_025134.2,3187-3205).
gcgtactaataaaaacaga

SEQ ID NO: 26842 - DNA, 19 bp, Homo sapiens
  siRNA target sequence for FLJ12178 (NM_025134.2,3215-3233).
cagatacaaccgactttct

SEQ ID NO: 26843 - DNA, 19 bp, Homo sapiens
  siRNA target sequence for FLJ12178 (NM_025134.2,3234-3252).
cggtgcctaccagtgtaat

SEQ ID NO: 26844 - DNA, 19 bp, Homo sapiens
  siRNA target sequence for FLJ12178 (NM_025134.2,3268-3286).
ggaagccactcttaatcct

SEQ ID NO: 26845 - DNA, 19 bp, Homo sapiens
  siRNA target sequence for FLJ12178 (NM_025134.2,3269-3287).
gaagccactcttaatccta

SEQ ID NO: 26846 - DNA, 19 bp, Homo sapiens
  siRNA target sequence for FLJ12178 (NM_025134.2,3272-3290).
gccactcttaatcctaaaa

SEQ ID NO: 26847 - DNA, 19 bp, Homo sapiens
  siRNA target sequence for FLJ12178 (NM_025134.2,3273-3291).
ccactcttaatcctaaaat

SEQ ID NO: 26848 - DNA, 19 bp, Homo sapiens
  siRNA target sequence for FLJ12178 (NM_025134.2,3332-3350).
gaagaagctgacttttata

SEQ ID NO: 26849 - DNA, 19 bp, Homo sapiens
  siRNA target sequence for FLJ12178 (NM_025134.2,3341-3359).
gacttttatagggttgtat

SEQ ID NO: 26850 - DNA, 19 bp, Homo sapiens
  siRNA target sequence for FLJ12178 (NM_025134.2,3343-3361).
cttttatagggttgtatct

SEQ ID NO: 26851 - DNA, 19 bp, Homo sapiens
  siRNA target sequence for FLJ12178 (NM_025134.2,3363-3381).
catttggagtggtttttga

SEQ ID NO: 26852 - DNA, 19 bp, Homo sapiens
  siRNA target sequence for FLJ12178 (NM_025134.2,3384-3402).
ctgacagaggccaatttga

SEQ ID NO: 26853 - DNA, 19 bp, Homo sapiens
  siRNA target sequence for FLJ12178 (NM_025134.2,3424-3442).
ggctaggctacataagaaa

SEQ ID NO: 26854 - DNA, 19 bp, Homo sapiens
  siRNA target sequence for FLJ12178 (NM_025134.2,3577-3595).
gactttgtatcgcattgaa

SEQ ID NO: 26855 - DNA, 19 bp, Homo sapiens
  siRNA target sequence for FLJ12178 (NM_025134.2,3583-3601).
gtatcgcattgaacttcta

SEQ ID NO: 26856 - DNA, 19 bp, Homo sapiens
  siRNA target sequence for FLJ12178 (NM_025134.2,3588-3606).
gcattgaacttctaaggaa

SEQ ID NO: 26857 - DNA, 19 bp, Homo sapiens
  siRNA target sequence for FLJ12178 (NM_025134.2,3589-3607).
cattgaacttctaaggaaa

SEQ ID NO: 26858 - DNA, 19 bp, Homo sapiens
  siRNA target sequence for FLJ12178 (NM_025134.2,3660-3678).
gccatccaaatccagattt

SEQ ID NO: 26859 - DNA, 19 bp, Homo sapiens
  siRNA target sequence for FLJ12178 (NM_025134.2,3742-3760).
ggtgagccgaacagactat

SEQ ID NO: 26860 - DNA, 19 bp, Homo sapiens
  siRNA target sequence for FLJ12178 (NM_025134.2,3747-3765).
gccgaacagactatcacat

SEQ ID NO: 26861 - DNA, 19 bp, Homo sapiens
  siRNA target sequence for FLJ12178 (NM_025134.2,3748-3766).
ccgaacagactatcacatt

SEQ ID NO: 26862 - DNA, 19 bp, Homo sapiens
  siRNA target sequence for FLJ12178 (NM_025134.2,3773-3791).
gatcctgaactctcattta

SEQ ID NO: 26863 - DNA, 19 bp, Homo sapiens
  siRNA target sequence for FLJ12178 (NM_025134.2,3800-3818).
cagaggaactacagtcaaa

SEQ ID NO: 26864 - DNA, 19 bp, Homo sapiens
  siRNA target sequence for FLJ12178 (NM_025134.2,3838-3856).
gacttctaccccacttcta

SEQ ID NO: 26865 - DNA, 19 bp, Homo sapiens
  siRNA target sequence for FLJ12178 (NM_025134.2,3840-3858).
cttctaccccacttctaca

SEQ ID NO: 26866 - DNA, 19 bp, Homo sapiens
  siRNA target sequence for FLJ12178 (NM_025134.2,3849-3867).
cacttctacagcaatatca

SEQ ID NO: 26867 - DNA, 19 bp, Homo sapiens
  siRNA target sequence for FLJ12178 (NM_025134.2,3910-3928).
cctagatgctaaaggtatt

SEQ ID NO: 26868 - DNA, 19 bp, Homo sapiens
  siRNA target sequence for FLJ12178 (NM_025134.2,3911-3929).
ctagatgctaaaggtatta

SEQ ID NO: 26869 - DNA, 19 bp, Homo sapiens
  siRNA target sequence for FLJ12178 (NM_025134.2,3918-3936).
ctaaaggtattattctaga

SEQ ID NO: 26870 - DNA, 19 bp, Homo sapiens
  siRNA target sequence for FLJ12178 (NM_025134.2,3932-3950).
ctagaggagatgaaagtta

SEQ ID NO: 26871 - DNA, 19 bp, Homo sapiens
  siRNA target sequence for FLJ12178 (NM_025134.2,3986-4004).
gaagaagaatctatgtctt

SEQ ID NO: 26872 - DNA, 19 bp, Homo sapiens
  siRNA target sequence for FLJ12178 (NM_025134.2,4015-4033).
caggacactaataaaatct

SEQ ID NO: 26873 - DNA, 19 bp, Homo sapiens
  siRNA target sequence for FLJ12178 (NM_025134.2,4017-4035).
ggacactaataaaatctga

SEQ ID NO: 26874 - DNA, 19 bp, Homo sapiens
  siRNA target sequence for FLJ12178 (NM_025134.2,4148-4166).
ccaaacccagcttctaaga

SEQ ID NO: 26875 - DNA, 19 bp, Homo sapiens
  siRNA target sequence for FLJ12178 (NM_025134.2,4154-4172).
ccagcttctaagaaaccaa

SEQ ID NO: 26876 - DNA, 19 bp, Homo sapiens
  siRNA target sequence for FLJ12178 (NM_025134.2,4177-4195).
ccacaaaaggggatcagaa

SEQ ID NO: 26877 - DNA, 19 bp, Homo sapiens
  siRNA target sequence for FLJ12178 (NM_025134.2,4178-4196).
cacaaaaggggatcagaat

SEQ ID NO: 26878 - DNA, 19 bp, Homo sapiens
  siRNA target sequence for FLJ12178 (NM_025134.2,4180-4198).
caaaaggggatcagaatct

SEQ ID NO: 26879 - DNA, 19 bp, Homo sapiens
  siRNA target sequence for FLJ12178 (NM_025134.2,4186-4204).
gggatcagaatctagttct

SEQ ID NO: 26880 - DNA, 19 bp, Homo sapiens
  siRNA target sequence for FLJ12178 (NM_025134.2,4286-4304).
cgatcaggctctagttctt

SEQ ID NO: 26881 - DNA, 19 bp, Homo sapiens
  siRNA target sequence for FLJ12178 (NM_025134.2,4380-4398).
cttcatcagaagaaagtga

SEQ ID NO: 26882 - DNA, 19 bp, Homo sapiens
  siRNA target sequence for FLJ12178 (NM_025134.2,4528-4546).
gacaccagagtctgcttat

SEQ ID NO: 26883 - DNA, 19 bp, Homo sapiens
  siRNA target sequence for FLJ12178 (NM_025134.2,4591-4609).
ggatcgtgtgatgatcaat

SEQ ID NO: 26884 - DNA, 19 bp, Homo sapiens
  siRNA target sequence for FLJ12178 (NM_025134.2,4595-4613).
cgtgtgatgatcaataggt

SEQ ID NO: 26885 - DNA, 19 bp, Homo sapiens
  siRNA target sequence for FLJ12178 (NM_025134.2,4611-4629).
ggttggacagtatttgtca

SEQ ID NO: 26886 - DNA, 19 bp, Homo sapiens
  siRNA target sequence for FLJ12178 (NM_025134.2,4612-4630).
gttggacagtatttgtcaa

SEQ ID NO: 26887 - DNA, 19 bp, Homo sapiens
  siRNA target sequence for FLJ12178 (NM_025134.2,4662-4680).
gaagaagttatgatgctaa

SEQ ID NO: 26888 - DNA, 19 bp, Homo sapiens
  siRNA target sequence for FLJ12178 (NM_025134.2,4764-4782).
ccccaggtgccggtgttaa

SEQ ID NO: 26889 - DNA, 19 bp, Homo sapiens
  siRNA target sequence for FLJ12178 (NM_025134.2,4765-4783).
cccaggtgccggtgttaaa

SEQ ID NO: 26890 - DNA, 19 bp, Homo sapiens
  siRNA target sequence for FLJ12178 (NM_025134.2,4767-4785).
caggtgccggtgttaaaga

SEQ ID NO: 26891 - DNA, 19 bp, Homo sapiens
  siRNA target sequence for FLJ12178 (NM_025134.2,4770-4788).
gtgccggtgttaaagaaga

SEQ ID NO: 26892 - DNA, 19 bp, Homo sapiens
  siRNA target sequence for FLJ12178 (NM_025134.2,4829-4847).
gtacgagaaaaggagttta

SEQ ID NO: 26893 - DNA, 19 bp, Homo sapiens
  siRNA target sequence for FLJ12178 (NM_025134.2,4862-4880).
gacgaaggtggtttgaagt

SEQ ID NO: 26894 - DNA, 19 bp, Homo sapiens
  siRNA target sequence for FLJ12178 (NM_025134.2,4868-4886).
ggtggtttgaagttgacat

SEQ ID NO: 26895 - DNA, 19 bp, Homo sapiens
  siRNA target sequence for FLJ12178 (NM_025134.2,4964-4982).
cggcttcgagagcttcaaa

SEQ ID NO: 26896 - DNA, 19 bp, Homo sapiens
  siRNA target sequence for FLJ12178 (NM_025134.2,4966-4984).
gcttcgagagcttcaaagt

SEQ ID NO: 26897 - DNA, 19 bp, Homo sapiens
  siRNA target sequence for FLJ12178 (NM_025134.2,5078-5096).
gacaaccagcctatagtca

SEQ ID NO: 26898 - DNA, 19 bp, Homo sapiens
  siRNA target sequence for FLJ12178 (NM_025134.2,5080-5098).
caaccagcctatagtcaaa

SEQ ID NO: 26899 - DNA, 19 bp, Homo sapiens
  siRNA target sequence for FLJ12178 (NM_025134.2,5126-5144).
gaaggtgttgacatcttct

SEQ ID NO: 26900 - DNA, 19 bp, Homo sapiens
  siRNA target sequence for FLJ12178 (NM_025134.2,5220-5238).
cagcactatcctatactca

SEQ ID NO: 26901 - DNA, 19 bp, Homo sapiens
  siRNA target sequence for FLJ12178 (NM_025134.2,5265-5283).
gtccagttccagttattaa

SEQ ID NO: 26902 - DNA, 19 bp, Homo sapiens
  siRNA target sequence for FLJ12178 (NM_025134.2,5445-5463).
gaaaccccaataaactaga

SEQ ID NO: 26903 - DNA, 19 bp, Homo sapiens
  siRNA target sequence for FLJ12178 (NM_025134.2,5486-5504).
gaacgtgttcaactgatta

SEQ ID NO: 26904 - DNA, 19 bp, Homo sapiens
  siRNA target sequence for FLJ12178 (NM_025134.2,5524-5542).
ggttggaggtgcatttgct

SEQ ID NO: 26905 - DNA, 19 bp, Homo sapiens
  siRNA target sequence for FLJ12178 (NM_025134.2,5535-5553).
catttgctccccctttgaa

SEQ ID NO: 26906 - DNA, 19 bp, Homo sapiens
  siRNA target sequence for FLJ12178 (NM_025134.2,5646-5664).
gcatgtatgaacgtattct

SEQ ID NO: 26907 - DNA, 19 bp, Homo sapiens
  siRNA target sequence for FLJ12178 (NM_025134.2,5701-5719).
ggggagacggcctaaaagt

SEQ ID NO: 26908 - DNA, 19 bp, Homo sapiens
  siRNA target sequence for FLJ12178 (NM_025134.2,5785-5803).
gttagccaatggactactt

SEQ ID NO: 26909 - DNA, 19 bp, Homo sapiens
  siRNA target sequence for FLJ12178 (NM_025134.2,5823-5841).
ctcttcaggccttacaaca

SEQ ID NO: 26910 - DNA, 19 bp, Homo sapiens
  siRNA target sequence for FLJ12178 (NM_025134.2,5960-5978).
ggaatggctggattaccaa

SEQ ID NO: 26911 - DNA, 19 bp, Homo sapiens
  siRNA target sequence for FLJ12178 (NM_025134.2,5966-5984).
gctggattaccaaatctgt

SEQ ID NO: 26912 - DNA, 19 bp, Homo sapiens
  siRNA target sequence for FLJ12178 (NM_025134.2,5967-5985).
ctggattaccaaatctgtt

SEQ ID NO: 26913 - DNA, 19 bp, Homo sapiens
  siRNA target sequence for FLJ12178 (NM_025134.2,6174-6192).
ccaacccattagctcttaa

SEQ ID NO: 26914 - DNA, 19 bp, Homo sapiens
  siRNA target sequence for FLJ12178 (NM_025134.2,6193-6211).
cccactattactatctaat

SEQ ID NO: 26915 - DNA, 19 bp, Homo sapiens
  siRNA target sequence for FLJ12178 (NM_025134.2,6194-6212).
ccactattactatctaata

SEQ ID NO: 26916 - DNA, 19 bp, Homo sapiens
  siRNA target sequence for FLJ12178 (NM_025134.2,6195-6213).
cactattactatctaatat

SEQ ID NO: 26917 - DNA, 19 bp, Homo sapiens
  siRNA target sequence for FLJ12178 (NM_025134.2,6240-6258).
caggccttaatcttcatat

SEQ ID NO: 26918 - DNA, 19 bp, Homo sapiens
  siRNA target sequence for FLJ12178 (NM_025134.2,6268-6286).
gtcccagtccaatactttt

SEQ ID NO: 26919 - DNA, 19 bp, Homo sapiens
  siRNA target sequence for FLJ12178 (NM_025134.2,6271-6289).
ccagtccaatacttttgat

SEQ ID NO: 26920 - DNA, 19 bp, Homo sapiens
  siRNA target sequence for FLJ12178 (NM_025134.2,6274-6292).
gtccaatacttttgatgta

SEQ ID NO: 26921 - DNA, 19 bp, Homo sapiens
  siRNA target sequence for FLJ12178 (NM_025134.2,6308-6326).
gacttaggctcgtctaagt

SEQ ID NO: 26922 - DNA, 19 bp, Homo sapiens
  siRNA target sequence for FLJ12178 (NM_025134.2,6316-6334).
ctcgtctaagtctgtagaa

SEQ ID NO: 26923 - DNA, 19 bp, Homo sapiens
  siRNA target sequence for FLJ12178 (NM_025134.2,6319-6337).
gtctaagtctgtagaagta

SEQ ID NO: 26924 - DNA, 19 bp, Homo sapiens
  siRNA target sequence for FLJ12800 (NM_022903.2,192-210).
gaggcactgcttgtcttta

SEQ ID NO: 26925 - DNA, 19 bp, Homo sapiens
  siRNA target sequence for FLJ12800 (NM_022903.2,315-333).
gtctatggctatagttcat

SEQ ID NO: 26926 - DNA, 19 bp, Homo sapiens
  siRNA target sequence for FLJ12800 (NM_022903.2,474-492).
ggcagactggccaaagcat

SEQ ID NO: 26927 - DNA, 19 bp, Homo sapiens
  siRNA target sequence for FLJ12800 (NM_022903.2,534-552).
ctgagctctctgaagcaat

SEQ ID NO: 26928 - DNA, 19 bp, Homo sapiens
  siRNA target sequence for FLJ12800 (NM_022903.2,648-666).
gccctggttccacttaaga

SEQ ID NO: 26929 - DNA, 19 bp, Homo sapiens
  siRNA target sequence for FLJ12800 (NM_022903.2,650-668).
cctggttccacttaagact

SEQ ID NO: 26930 - DNA, 19 bp, Homo sapiens
  siRNA target sequence for FLJ12800 (NM_022903.2,901-919).
ccagtgtccggcgaatgaa

SEQ ID NO: 26931 - DNA, 19 bp, Homo sapiens
  siRNA target sequence for FLJ12800 (NM_022903.2,902-920).
cagtgtccggcgaatgaaa

SEQ ID NO: 26932 - DNA, 19 bp, Homo sapiens
  siRNA target sequence for FLJ12800 (NM_022903.2,1215-1233).
gctaaggccagaactacaa

SEQ ID NO: 26933 - DNA, 19 bp, Homo sapiens
  siRNA target sequence for FLJ12800 (NM_022903.2,1366-1384).
cagcaaagctgctgaagtt

SEQ ID NO: 26934 - DNA, 19 bp, Homo sapiens
  siRNA target sequence for FLJ12800 (NM_022903.2,1382-1400).
gttccgtgccataaaggta

SEQ ID NO: 26935 - DNA, 19 bp, Homo sapiens
  siRNA target sequence for FLJ12800 (NM_022903.2,1386-1404).
cgtgccataaaggtagata

SEQ ID NO: 26936 - DNA, 19 bp, Homo sapiens
  siRNA target sequence for FLJ12800 (NM_022903.2,1405-1423).
ggcggtcctcggatgatga

SEQ ID NO: 26937 - DNA, 19 bp, Homo sapiens
  siRNA target sequence for FLJ12800 (NM_022903.2,1457-1475).
gaacctgtcacctgtaata

SEQ ID NO: 26938 - DNA, 19 bp, Homo sapiens
  siRNA target sequence for FLJ13111 (NM_025082.1,153-171).
cggagagccctgcttgaaa

SEQ ID NO: 26939 - DNA, 19 bp, Homo sapiens
  siRNA target sequence for FLJ13111 (NM_025082.1,247-265).
gcagatcggcccatattca

SEQ ID NO: 26940 - DNA, 19 bp, Homo sapiens
  siRNA target sequence for FLJ13111 (NM_025082.1,295-313).
ctcggacgctgctgaagaa

SEQ ID NO: 26941 - DNA, 19 bp, Homo sapiens
  siRNA target sequence for FLJ13111 (NM_025082.1,306-324).
ctgaagaacatcctactaa

SEQ ID NO: 26942 - DNA, 19 bp, Homo sapiens
  siRNA target sequence for FLJ13111 (NM_025082.1,308-326).
gaagaacatcctactaact

SEQ ID NO: 26943 - DNA, 19 bp, Homo sapiens
  siRNA target sequence for FLJ13111 (NM_025082.1,506-524).
gctgagactgtcagtgttt

SEQ ID NO: 26944 - DNA, 19 bp, Homo sapiens
  siRNA target sequence for FLJ13111 (NM_025082.1,708-726).
cgggatctgcgagatactt

SEQ ID NO: 26945 - DNA, 19 bp, Homo sapiens
  siRNA target sequence for FLJ13111 (NM_025082.1,787-805).
gctcccccaacgtgtatca

SEQ ID NO: 26946 - DNA, 19 bp, Homo sapiens
  siRNA target sequence for FLJ13111 (NM_025082.1,881-899).
gcctgggctgcagaagaat

SEQ ID NO: 26947 - DNA, 19 bp, Homo sapiens
  siRNA target sequence for FLJ13111 (NM_025082.1,886-904).
ggctgcagaagaatagtga

SEQ ID NO: 26948 - DNA, 19 bp, Homo sapiens
  siRNA target sequence for FLJ13111 (NM_025082.1,917-935).
ggtggcctggagccaaatt

SEQ ID NO: 26949 - DNA, 19 bp, Homo sapiens
  siRNA target sequence for FLJ13111 (NM_025082.1,918-936).
gtggcctggagccaaattt

SEQ ID NO: 26950 - DNA, 19 bp, Homo sapiens
  siRNA target sequence for FLJ13213 (NM_024755.1,237-255).
gtaatactagaccaaacta

SEQ ID NO: 26951 - DNA, 19 bp, Homo sapiens
  siRNA target sequence for FLJ13213 (NM_024755.1,323-341).
ggagagagctagtctagat

SEQ ID NO: 26952 - DNA, 19 bp, Homo sapiens
  siRNA target sequence for FLJ13213 (NM_024755.1,326-344).
gagagctagtctagataaa

SEQ ID NO: 26953 - DNA, 19 bp, Homo sapiens
  siRNA target sequence for FLJ13213 (NM_024755.1,328-346).
gagctagtctagataaaaa

SEQ ID NO: 26954 - DNA, 19 bp, Homo sapiens
  siRNA target sequence for FLJ13213 (NM_024755.1,437-455).
gctgcgacgagcaatggaa

SEQ ID NO: 26955 - DNA, 19 bp, Homo sapiens
  siRNA target sequence for FLJ13213 (NM_024755.1,495-513).
gagcgagaacgcattagaa

SEQ ID NO: 26956 - DNA, 19 bp, Homo sapiens
  siRNA target sequence for FLJ13213 (NM_024755.1,497-515).
gcgagaacgcattagaata

SEQ ID NO: 26957 - DNA, 19 bp, Homo sapiens
  siRNA target sequence for FLJ13213 (NM_024755.1,498-516).
cgagaacgcattagaataa

SEQ ID NO: 26958 - DNA, 19 bp, Homo sapiens
  siRNA target sequence for FLJ13213 (NM_024755.1,531-549).
gaacgggaacgcttacaga

SEQ ID NO: 26959 - DNA, 19 bp, Homo sapiens
  siRNA target sequence for FLJ13213 (NM_024755.1,603-621).
gaacgcgaacgcttggaaa

SEQ ID NO: 26960 - DNA, 19 bp, Homo sapiens
  siRNA target sequence for FLJ13213 (NM_024755.1,618-636).
gaaagggaacgcattcgta

SEQ ID NO: 26961 - DNA, 19 bp, Homo sapiens
  siRNA target sequence for FLJ13213 (NM_024755.1,622-640).
gggaacgcattcgtattga

SEQ ID NO: 26962 - DNA, 19 bp, Homo sapiens
  siRNA target sequence for FLJ13213 (NM_024755.1,623-641).
ggaacgcattcgtattgaa

SEQ ID NO: 26963 - DNA, 19 bp, Homo sapiens
  siRNA target sequence for FLJ13213 (NM_024755.1,707-725).
gcagcttcgttatgaacaa

SEQ ID NO: 26964 - DNA, 19 bp, Homo sapiens
  siRNA target sequence for FLJ13213 (NM_024755.1,710-728).
gcttcgttatgaacaagaa

SEQ ID NO: 26965 - DNA, 19 bp, Homo sapiens
  siRNA target sequence for FLJ13213 (NM_024755.1,711-729).
cttcgttatgaacaagaaa

SEQ ID NO: 26966 - DNA, 19 bp, Homo sapiens
  siRNA target sequence for FLJ13213 (NM_024755.1,748-766).
gcccacgtgatgtagatca

SEQ ID NO: 26967 - DNA, 19 bp, Homo sapiens
  siRNA target sequence for FLJ13213 (NM_024755.1,750-768).
ccacgtgatgtagatcata

SEQ ID NO: 26968 - DNA, 19 bp, Homo sapiens
  siRNA target sequence for FLJ13213 (NM_024755.1,780-798).
ccttactggagcgagaata

SEQ ID NO: 26969 - DNA, 19 bp, Homo sapiens
  siRNA target sequence for FLJ13213 (NM_024755.1,781-799).
cttactggagcgagaataa

SEQ ID NO: 26970 - DNA, 19 bp, Homo sapiens
  siRNA target sequence for FLJ13213 (NM_024755.1,787-805).
ggagcgagaataaaaagtt

SEQ ID NO: 26971 - DNA, 19 bp, Homo sapiens
  siRNA target sequence for FLJ13213 (NM_024755.1,850-868).
ctcgccaacagaacagatt

SEQ ID NO: 26972 - DNA, 19 bp, Homo sapiens
  siRNA target sequence for FLJ13213 (NM_024755.1,852-870).
cgccaacagaacagattta

SEQ ID NO: 26973 - DNA, 19 bp, Homo sapiens
  siRNA target sequence for FLJ13213 (NM_024755.1,1124-1142).
gagaacggtgattattcat

SEQ ID NO: 26974 - DNA, 19 bp, Homo sapiens
  siRNA target sequence for FLJ13213 (NM_024755.1,1126-1144).
gaacggtgattattcatga

SEQ ID NO: 26975 - DNA, 19 bp, Homo sapiens
  siRNA target sequence for FLJ13213 (NM_024755.1,1140-1158).
catgacaggcctgatatca

SEQ ID NO: 26976 - DNA, 19 bp, Homo sapiens
  siRNA target sequence for FLJ13213 (NM_024755.1,1272-1290).
cgatctgggagagaagtat

SEQ ID NO: 26977 - DNA, 19 bp, Homo sapiens
  siRNA target sequence for FLJ13213 (NM_024755.1,1311-1329).
gctccccctgggaatcgta

SEQ ID NO: 26978 - DNA, 19 bp, Homo sapiens
  siRNA target sequence for FLJ13213 (NM_024755.1,1445-1463).
cacaagcggaccaaggaaa

SEQ ID NO: 26979 - DNA, 19 bp, Homo sapiens
  siRNA target sequence for FLJ13213 (NM_024755.1,1488-1506).
gggcctagctatcatgata

SEQ ID NO: 26980 - DNA, 19 bp, Homo sapiens
  siRNA target sequence for FLJ13213 (NM_024755.1,1539-1557).
ggcatgataacccaacatt

SEQ ID NO: 26981 - DNA, 19 bp, Homo sapiens
  siRNA target sequence for FLJ13213 (NM_024755.1,1561-1579).
gtaacgcatccccaattaa

SEQ ID NO: 26982 - DNA, 19 bp, Homo sapiens
  siRNA target sequence for FLJ13213 (NM_024755.1,1565-1583).
cgcatccccaattaataga

SEQ ID NO: 26983 - DNA, 19 bp, Homo sapiens
  siRNA target sequence for FLJ13213 (NM_024755.1,1566-1584).
gcatccccaattaatagaa

SEQ ID NO: 26984 - DNA, 19 bp, Homo sapiens
  siRNA target sequence for FLJ13213 (NM_024755.1,1618-1636).
gaagtggctccggatttaa

SEQ ID NO: 26985 - DNA, 19 bp, Homo sapiens
  siRNA target sequence for FLJ13213 (NM_024755.1,1627-1645).
ccggatttaagccatttaa

SEQ ID NO: 26986 - DNA, 19 bp, Homo sapiens
  siRNA target sequence for FLJ14260 (NM_025027.2,1214-1232).
gcccttacggaccaatctt

SEQ ID NO: 26987 - DNA, 19 bp, Homo sapiens
  siRNA target sequence for FLJ14260 (NM_025027.2,1615-1633).
cccagcacagagcattttt

SEQ ID NO: 26988 - DNA, 19 bp, Homo sapiens
  siRNA target sequence for FLJ14260 (NM_025027.2,1690-1708).
gttctccaggttagaagtt

SEQ ID NO: 26989 - DNA, 19 bp, Homo sapiens
  siRNA target sequence for FLJ14260 (NM_025027.2,1713-1731).
gatgtaaagaccaattaga

SEQ ID NO: 26990 - DNA, 19 bp, Homo sapiens
  siRNA target sequence for FLJ14260 (NM_025027.2,1797-1815).
cccagagaagctctgaatt

SEQ ID NO: 26991 - DNA, 19 bp, Homo sapiens
  siRNA target sequence for FLJ14260 (NM_025027.2,1799-1817).
cagagaagctctgaattct

SEQ ID NO: 26992 - DNA, 19 bp, Homo sapiens
  siRNA target sequence for FLJ14260 (NM_025027.2,1820-1838).
ggacttggggcagagttta

SEQ ID NO: 26993 - DNA, 19 bp, Homo sapiens
  siRNA target sequence for FLJ14260 (NM_025027.2,1860-1878).
catctcagagagtttctca

SEQ ID NO: 26994 - DNA, 19 bp, Homo sapiens
  siRNA target sequence for FLJ14260 (NM_025027.2,1871-1889).
gtttctcagatagaacatt

SEQ ID NO: 26995 - DNA, 19 bp, Homo sapiens
  siRNA target sequence for FLJ14260 (NM_025027.2,1875-1893).
ctcagatagaacatttcta

SEQ ID NO: 26996 - DNA, 19 bp, Homo sapiens
  siRNA target sequence for FLJ14260 (NM_025027.2,1891-1909).
ctataagcctgatacacat

SEQ ID NO: 26997 - DNA, 19 bp, Homo sapiens
  siRNA target sequence for FLJ14260 (NM_025027.2,1926-1944).
gtgactcagccataatgta

SEQ ID NO: 26998 - DNA, 19 bp, Homo sapiens
  siRNA target sequence for FLJ14260 (NM_025027.2,1979-1997).
gacaaaactgtttatcagt

SEQ ID NO: 26999 - DNA, 19 bp, Homo sapiens
  siRNA target sequence for FLJ14260 (NM_025027.2,2057-2075).
gatgctgttaaatctttca

SEQ ID NO: 27000 - DNA, 19 bp, Homo sapiens
  siRNA target sequence for FLJ14260 (NM_025027.2,2145-2163).
gccatcaaatctttaacca

SEQ ID NO: 27001 - DNA, 19 bp, Homo sapiens
  siRNA target sequence for FLJ14260 (NM_025027.2,2161-2179).
ccagagcccatcatttaat

SEQ ID NO: 27002 - DNA, 19 bp, Homo sapiens
  siRNA target sequence for FLJ14260 (NM_025027.2,2831-2849).
gactactcagcccttagta

SEQ ID NO: 27003 - DNA, 19 bp, Homo sapiens
  siRNA target sequence for FLJ14260 (NM_025027.2,3085-3103).
gatggctcaccttgttaga

SEQ ID NO: 27004 - DNA, 19 bp, Homo sapiens
  siRNA target sequence for FLJ14260 (NM_025027.2,3088-3106).
ggctcaccttgttagacat

SEQ ID NO: 27005 - DNA, 19 bp, Homo sapiens
  siRNA target sequence for FLJ14260 (NM_025027.2,3337-3355).
gagttcatcccttattgta

SEQ ID NO: 27006 - DNA, 19 bp, Homo sapiens
  siRNA target sequence for FLJ14260 (NM_025027.2,3353-3371).
gtacacctaagaaaccata

SEQ ID NO: 27007 - DNA, 19 bp, Homo sapiens
  siRNA target sequence for FLJ14281 (NM_024920.3,2319-2337).
gtacctaacacacacataa

SEQ ID NO: 27008 - DNA, 19 bp, Homo sapiens
  siRNA target sequence for FLJ14281 (NM_024920.3,2344-2362).
gtaaaaattactatgaagt

SEQ ID NO: 27009 - DNA, 19 bp, Homo sapiens
  siRNA target sequence for FLJ14281 (NM_024920.3,2382-2400).
gctggtgatgaagatttga

SEQ ID NO: 27010 - DNA, 19 bp, Homo sapiens
  siRNA target sequence for FLJ14281 (NM_024920.3,2596-2614).
gaggttgtgaagctgatat

SEQ ID NO: 27011 - DNA, 19 bp, Homo sapiens
  siRNA target sequence for FLJ14281 (NM_024920.3,2598-2616).
ggttgtgaagctgatataa

SEQ ID NO: 27012 - DNA, 19 bp, Homo sapiens
  siRNA target sequence for FLJ20125 (NM_017676.1,83-101).
ggtccgtagtggaaaaaat

SEQ ID NO: 27013 - DNA, 19 bp, Homo sapiens
  siRNA target sequence for FLJ20125 (NM_017676.1,107-125).
ccttcatcttaaacagatt

SEQ ID NO: 27014 - DNA, 19 bp, Homo sapiens
  siRNA target sequence for FLJ20125 (NM_017676.1,134-152).
caaacgaactggtgaatat

SEQ ID NO: 27015 - DNA, 19 bp, Homo sapiens
  siRNA target sequence for FLJ20125 (NM_017676.1,138-156).
cgaactggtgaatatcatt

SEQ ID NO: 27016 - DNA, 19 bp, Homo sapiens
  siRNA target sequence for FLJ20125 (NM_017676.1,144-162).
ggtgaatatcattcaacta

SEQ ID NO: 27017 - DNA, 19 bp, Homo sapiens
  siRNA target sequence for FLJ20125 (NM_017676.1,185-203).
cataagaagagcagcaaaa

SEQ ID NO: 27018 - DNA, 19 bp, Homo sapiens
  siRNA target sequence for FLJ20125 (NM_017676.1,262-280).
gtttggtaattgtttcaga

SEQ ID NO: 27019 - DNA, 19 bp, Homo sapiens
  siRNA target sequence for FLJ20125 (NM_017676.1,330-348).
gctcatcatggtatatcca

SEQ ID NO: 27020 - DNA, 19 bp, Homo sapiens
  siRNA target sequence for FLJ20125 (NM_017676.1,356-374).
cactctggtagaatccaat

SEQ ID NO: 27021 - DNA, 19 bp, Homo sapiens
  siRNA target sequence for FLJ20125 (NM_017676.1,358-376).
ctctggtagaatccaatta

SEQ ID NO: 27022 - DNA, 19 bp, Homo sapiens
  siRNA target sequence for FLJ20125 (NM_017676.1,360-378).
ctggtagaatccaattatt

SEQ ID NO: 27023 - DNA, 19 bp, Homo sapiens
  siRNA target sequence for FLJ20125 (NM_017676.1,366-384).
gaatccaattattattgga

SEQ ID NO: 27024 - DNA, 19 bp, Homo sapiens
  siRNA target sequence for FLJ20125 (NM_017676.1,404-422).
caaacagtgggtatatgct

SEQ ID NO: 27025 - DNA, 19 bp, Homo sapiens
  siRNA target sequence for FLJ20125 (NM_017676.1,496-514).
catggagtttagttactgt

SEQ ID NO: 27026 - DNA, 19 bp, Homo sapiens
  siRNA target sequence for FLJ20125 (NM_017676.1,500-518).
gagtttagttactgttgat

SEQ ID NO: 27027 - DNA, 19 bp, Homo sapiens
  siRNA target sequence for FLJ20125 (NM_017676.1,519-537).
ctgatggggccttttcata

SEQ ID NO: 27028 - DNA, 19 bp, Homo sapiens
  siRNA target sequence for FLJ20125 (NM_017676.1,521-539).
gatggggccttttcataca

SEQ ID NO: 27029 - DNA, 19 bp, Homo sapiens
  siRNA target sequence for FLJ20125 (NM_017676.1,541-559).
gcaacagaagtcatgtata

SEQ ID NO: 27030 - DNA, 19 bp, Homo sapiens
  siRNA target sequence for FLJ20125 (NM_017676.1,547-565).
gaagtcatgtatatgctat

SEQ ID NO: 27031 - DNA, 19 bp, Homo sapiens
  siRNA target sequence for FLJ20125 (NM_017676.1,561-579).
gctataatcatgacagatt

SEQ ID NO: 27032 - DNA, 19 bp, Homo sapiens
  siRNA target sequence for FLJ20125 (NM_017676.1,584-602).
caccaaatggattgtgatt

SEQ ID NO: 27033 - DNA, 19 bp, Homo sapiens
  siRNA target sequence for FLJ20125 (NM_017676.1,586-604).
ccaaatggattgtgatttt

SEQ ID NO: 27034 - DNA, 19 bp, Homo sapiens
  siRNA target sequence for FLJ20125 (NM_017676.1,605-623).
gcctctatgtgatgtttca

SEQ ID NO: 27035 - DNA, 19 bp, Homo sapiens
  siRNA target sequence for FLJ20125 (NM_017676.1,630-648).
gaagtttctaaagctatta

SEQ ID NO: 27036 - DNA, 19 bp, Homo sapiens
  siRNA target sequence for FLJ20125 (NM_017676.1,739-757).
gattgtttggcataaagca

SEQ ID NO: 27037 - DNA, 19 bp, Homo sapiens
  siRNA target sequence for FLJ20125 (NM_017676.1,743-761).
gtttggcataaagcaaatt

SEQ ID NO: 27038 - DNA, 19 bp, Homo sapiens
  siRNA target sequence for FLJ20125 (NM_017676.1,747-765).
ggcataaagcaaattgtaa

SEQ ID NO: 27039 - DNA, 19 bp, Homo sapiens
  siRNA target sequence for FLJ20125 (NM_017676.1,807-825).
cctaacacaatcaaagcat

SEQ ID NO: 27040 - DNA, 19 bp, Homo sapiens
  siRNA target sequence for FLJ20125 (NM_017676.1,904-922).
ctcacttggaacctactaa

SEQ ID NO: 27041 - DNA, 19 bp, Homo sapiens
  siRNA target sequence for FLJ20125 (NM_017676.1,944-962).
gtttagtcgaaatccttat

SEQ ID NO: 27042 - DNA, 19 bp, Homo sapiens
  siRNA target sequence for FLJ20125 (NM_017676.1,971-989).
gacttcagatagtcttcat

SEQ ID NO: 27043 - DNA, 19 bp, Homo sapiens
  siRNA target sequence for FLJ20125 (NM_017676.1,999-1017).
ggtgataatacaagtatgt

SEQ ID NO: 27044 - DNA, 19 bp, Homo sapiens
  siRNA target sequence for FLJ20125 (NM_017676.1,1000-1018).
gtgataatacaagtatgtt

SEQ ID NO: 27045 - DNA, 19 bp, Homo sapiens
  siRNA target sequence for FLJ20125 (NM_017676.1,1178-1196).
gggtcatgaagttttaaga

SEQ ID NO: 27046 - DNA, 19 bp, Homo sapiens
  siRNA target sequence for FLJ20125 (NM_017676.1,1210-1228).
gtggaaggatggtcgtttt

SEQ ID NO: 27047 - DNA, 19 bp, Homo sapiens
  siRNA target sequence for FLJ20203 (NM_032292.3,86-104).
cagagtccctacagcataa

SEQ ID NO: 27048 - DNA, 19 bp, Homo sapiens
  siRNA target sequence for FLJ20203 (NM_032292.3,123-141).
caacgtagacctagaatca

SEQ ID NO: 27049 - DNA, 19 bp, Homo sapiens
  siRNA target sequence for FLJ20203 (NM_032292.3,132-150).
cctagaatcagccgttaaa

SEQ ID NO: 27050 - DNA, 19 bp, Homo sapiens
  siRNA target sequence for FLJ20203 (NM_032292.3,143-161).
ccgttaaaccagaatctga

SEQ ID NO: 27051 - DNA, 19 bp, Homo sapiens
  siRNA target sequence for FLJ20203 (NM_032292.3,163-181).
caggttaaggacttgagtt

SEQ ID NO: 27052 - DNA, 19 bp, Homo sapiens
  siRNA target sequence for FLJ20203 (NM_032292.3,224-242).
gcttcgaagtacagtcttt

SEQ ID NO: 27053 - DNA, 19 bp, Homo sapiens
  siRNA target sequence for FLJ20203 (NM_032292.3,309-327).
cacaaatgtaccaattcta

SEQ ID NO: 27054 - DNA, 19 bp, Homo sapiens
  siRNA target sequence for FLJ20203 (NM_032292.3,311-329).
caaatgtaccaattctaga

SEQ ID NO: 27055 - DNA, 19 bp, Homo sapiens
  siRNA target sequence for FLJ20203 (NM_032292.3,385-403).
cacccccttaatatacaca

SEQ ID NO: 27056 - DNA, 19 bp, Homo sapiens
  siRNA target sequence for FLJ20203 (NM_032292.3,387-405).
cccccttaatatacacatt

SEQ ID NO: 27057 - DNA, 19 bp, Homo sapiens
  siRNA target sequence for FLJ20203 (NM_032292.3,391-409).
cttaatatacacattggta

SEQ ID NO: 27058 - DNA, 19 bp, Homo sapiens
  siRNA target sequence for FLJ20203 (NM_032292.3,484-502).
gacagatgtgatcatctta

SEQ ID NO: 27059 - DNA, 19 bp, Homo sapiens
  siRNA target sequence for FLJ20203 (NM_032292.3,504-522).
cctaaaggagcctttttca

SEQ ID NO: 27060 - DNA, 19 bp, Homo sapiens
  siRNA target sequence for FLJ20203 (NM_032292.3,681-699).
gccactcaggactctgttt

SEQ ID NO: 27061 - DNA, 19 bp, Homo sapiens
  siRNA target sequence for FLJ20203 (NM_032292.3,727-745).
ggtggactcttcattccaa

SEQ ID NO: 27062 - DNA, 19 bp, Homo sapiens
  siRNA target sequence for FLJ20203 (NM_032292.3,890-908).
gtgccaagcagcacaatct

SEQ ID NO: 27063 - DNA, 19 bp, Homo sapiens
  siRNA target sequence for FLJ20203 (NM_032292.3,894-912).
caagcagcacaatctaaca

SEQ ID NO: 27064 - DNA, 19 bp, Homo sapiens
  siRNA target sequence for FLJ20203 (NM_032292.3,903-921).
caatctaacagcagtcaat

SEQ ID NO: 27065 - DNA, 19 bp, Homo sapiens
  siRNA target sequence for FLJ20203 (NM_032292.3,926-944).
gaaacatccttcatgaagt

SEQ ID NO: 27066 - DNA, 19 bp, Homo sapiens
  siRNA target sequence for FLJ20203 (NM_032292.3,995-1013).
cggaagatatgccaatgtt

SEQ ID NO: 27067 - DNA, 19 bp, Homo sapiens
  siRNA target sequence for FLJ20203 (NM_032292.3,1065-1083).
ggtaattccaacatggaat

SEQ ID NO: 27068 - DNA, 19 bp, Homo sapiens
  siRNA target sequence for FLJ20203 (NM_032292.3,1066-1084).
gtaattccaacatggaata

SEQ ID NO: 27069 - DNA, 19 bp, Homo sapiens
  siRNA target sequence for FLJ20203 (NM_032292.3,1131-1149).
ggatatccaccttgaagaa

SEQ ID NO: 27070 - DNA, 19 bp, Homo sapiens
  siRNA target sequence for FLJ20203 (NM_032292.3,1202-1220).
ctgctgaagagagcttatt

SEQ ID NO: 27071 - DNA, 19 bp, Homo sapiens
  siRNA target sequence for FLJ20203 (NM_032292.3,1252-1270).
ccacgtggggcaaagaaat

SEQ ID NO: 27072 - DNA, 19 bp, Homo sapiens
  siRNA target sequence for FLJ20203 (NM_032292.3,1255-1273).
cgtggggcaaagaaatcca

SEQ ID NO: 27073 - DNA, 19 bp, Homo sapiens
  siRNA target sequence for FLJ20203 (NM_032292.3,1309-1327).
gaggagagtggcatattat

SEQ ID NO: 27074 - DNA, 19 bp, Homo sapiens
  siRNA target sequence for FLJ20203 (NM_032292.3,1417-1435).
cagaccagagatagtactt

SEQ ID NO: 27075 - DNA, 19 bp, Homo sapiens
  siRNA target sequence for FLJ20203 (NM_032292.3,1421-1439).
ccagagatagtactttcat

SEQ ID NO: 27076 - DNA, 19 bp, Homo sapiens
  siRNA target sequence for FLJ20203 (NM_032292.3,1515-1533).
cagtctcattgcatttcga

SEQ ID NO: 27077 - DNA, 19 bp, Homo sapiens
  siRNA target sequence for FLJ20203 (NM_032292.3,1526-1544).
catttcgaacgcgttctaa

SEQ ID NO: 27078 - DNA, 19 bp, Homo sapiens
  siRNA target sequence for FLJ20203 (NM_032292.3,1545-1563).
gatgcccctgaaagatgtt

SEQ ID NO: 27079 - DNA, 19 bp, Homo sapiens
  siRNA target sequence for FLJ20203 (NM_032292.3,1598-1616).
cagacatcactccagatat

SEQ ID NO: 27080 - DNA, 19 bp, Homo sapiens
  siRNA target sequence for FLJ20203 (NM_032292.3,1600-1618).
gacatcactccagatatgt

SEQ ID NO: 27081 - DNA, 19 bp, Homo sapiens
  siRNA target sequence for FLJ20203 (NM_032292.3,1623-1641).
ccccaatacggcagatgat

SEQ ID NO: 27082 - DNA, 19 bp, Homo sapiens
  siRNA target sequence for FLJ20203 (NM_032292.3,1658-1676).
ggctggggggacttatgaa

SEQ ID NO: 27083 - DNA, 19 bp, Homo sapiens
  siRNA target sequence for FLJ20203 (NM_032292.3,1662-1680).
ggggggacttatgaatgat

SEQ ID NO: 27084 - DNA, 19 bp, Homo sapiens
  siRNA target sequence for FLJ20203 (NM_032292.3,1777-1795).
gaccgggcagtgagaatca

SEQ ID NO: 27085 - DNA, 19 bp, Homo sapiens
  siRNA target sequence for FLJ20203 (NM_032292.3,1783-1801).
gcagtgagaatcaccaaaa

SEQ ID NO: 27086 - DNA, 19 bp, Homo sapiens
  siRNA target sequence for FLJ20203 (NM_032292.3,1784-1802).
cagtgagaatcaccaaaaa

SEQ ID NO: 27087 - DNA, 19 bp, Homo sapiens
  siRNA target sequence for FLJ20203 (NM_032292.3,1904-1922).
ctgagcctcgtcctaactt

SEQ ID NO: 27088 - DNA, 19 bp, Homo sapiens
  siRNA target sequence for FLJ20203 (NM_032292.3,1906-1924).
gagcctcgtcctaacttta

SEQ ID NO: 27089 - DNA, 19 bp, Homo sapiens
  siRNA target sequence for FLJ20203 (NM_032292.3,1955-1973).
cactggccaacctgttaaa

SEQ ID NO: 27090 - DNA, 19 bp, Homo sapiens
  siRNA target sequence for FLJ20203 (NM_032292.3,1985-2003).
ggacagtgaaggagctatt

SEQ ID NO: 27091 - DNA, 19 bp, Homo sapiens
  siRNA target sequence for FLJ20203 (NM_032292.3,1986-2004).
gacagtgaaggagctattt

SEQ ID NO: 27092 - DNA, 19 bp, Homo sapiens
  siRNA target sequence for FLJ20203 (NM_032292.3,1988-2006).
cagtgaaggagctatttga

SEQ ID NO: 27093 - DNA, 19 bp, Homo sapiens
  siRNA target sequence for FLJ20203 (NM_032292.3,2207-2225).
ccactaccaccaggatatt

SEQ ID NO: 27094 - DNA, 19 bp, Homo sapiens
  siRNA target sequence for FLJ20203 (NM_032292.3,2210-2228).
ctaccaccaggatatttct

SEQ ID NO: 27095 - DNA, 19 bp, Homo sapiens
  siRNA target sequence for FLJ20203 (NM_032292.3,3363-3381).
ccttgccccttctaagttt

SEQ ID NO: 27096 - DNA, 19 bp, Homo sapiens
  siRNA target sequence for FLJ20203 (NM_032292.3,3368-3386).
ccccttctaagtttcgaaa

SEQ ID NO: 27097 - DNA, 19 bp, Homo sapiens
  siRNA target sequence for FLJ20203 (NM_032292.3,3429-3447).
ggcctctccctgtatgaaa

SEQ ID NO: 27098 - DNA, 19 bp, Homo sapiens
  siRNA target sequence for FLJ20203 (NM_032292.3,4064-4082).
gatcccctgagcgtgatat

SEQ ID NO: 27099 - DNA, 19 bp, Homo sapiens
  siRNA target sequence for FLJ20203 (NM_032292.3,4070-4088).
ctgagcgtgatatttgtga

SEQ ID NO: 27100 - DNA, 19 bp, Homo sapiens
  siRNA target sequence for FLJ20203 (NM_032292.3,4151-4169).
gtgctggagaagtaacgaa

SEQ ID NO: 27101 - DNA, 19 bp, Homo sapiens
  siRNA target sequence for FLJ20203 (NM_032292.3,4256-4274).
cagggacagatgtgaacaa

SEQ ID NO: 27102 - DNA, 19 bp, Homo sapiens
  siRNA target sequence for FLJ20203 (NM_032292.3,4267-4285).
gtgaacaaaggatcatcaa

SEQ ID NO: 27103 - DNA, 19 bp, Homo sapiens
  siRNA target sequence for FLJ20203 (NM_032292.3,4277-4295).
gatcatcaaagaatgcttt

SEQ ID NO: 27104 - DNA, 19 bp, Homo sapiens
  siRNA target sequence for FLJ21439 (NM_025137.2,285-303).
gcagcacaccaactgaaaa

SEQ ID NO: 27105 - DNA, 19 bp, Homo sapiens
  siRNA target sequence for FLJ21439 (NM_025137.2,316-334).
cgctcttggtgaaaattat

SEQ ID NO: 27106 - DNA, 19 bp, Homo sapiens
  siRNA target sequence for FLJ21439 (NM_025137.2,375-393).
gtgatgcaaccattttgta

SEQ ID NO: 27107 - DNA, 19 bp, Homo sapiens
  siRNA target sequence for FLJ21439 (NM_025137.2,380-398).
gcaaccattttgtatagct

SEQ ID NO: 27108 - DNA, 19 bp, Homo sapiens
  siRNA target sequence for FLJ21439 (NM_025137.2,422-440).
ctcattgacgatcaagata

SEQ ID NO: 27109 - DNA, 19 bp, Homo sapiens
  siRNA target sequence for FLJ21439 (NM_025137.2,472-490).
gtcatttcacaataacaca

SEQ ID NO: 27110 - DNA, 19 bp, Homo sapiens
  siRNA target sequence for FLJ21439 (NM_025137.2,492-510).
cattactgttcatcaacaa

SEQ ID NO: 27111 - DNA, 19 bp, Homo sapiens
  siRNA target sequence for FLJ21439 (NM_025137.2,597-615).
cagtggacatgattattga

SEQ ID NO: 27112 - DNA, 19 bp, Homo sapiens
  siRNA target sequence for FLJ21439 (NM_025137.2,654-672).
gtttaggctggatctacat

SEQ ID NO: 27113 - DNA, 19 bp, Homo sapiens
  siRNA target sequence for FLJ21439 (NM_025137.2,660-678).
gctggatctacatttttga

SEQ ID NO: 27114 - DNA, 19 bp, Homo sapiens
  siRNA target sequence for FLJ21439 (NM_025137.2,661-679).
ctggatctacatttttgat

SEQ ID NO: 27115 - DNA, 19 bp, Homo sapiens
  siRNA target sequence for FLJ21439 (NM_025137.2,837-855).
ccgcagttgctcttaactt

SEQ ID NO: 27116 - DNA, 19 bp, Homo sapiens
  siRNA target sequence for FLJ21439 (NM_025137.2,838-856).
cgcagttgctcttaactta

SEQ ID NO: 27117 - DNA, 19 bp, Homo sapiens
  siRNA target sequence for FLJ21439 (NM_025137.2,845-863).
gctcttaacttaaatttgt

SEQ ID NO: 27118 - DNA, 19 bp, Homo sapiens
  siRNA target sequence for FLJ21439 (NM_025137.2,927-945).
gacctaagggcgtagatga

SEQ ID NO: 27119 - DNA, 19 bp, Homo sapiens
  siRNA target sequence for FLJ21439 (NM_025137.2,1019-1037).
gcccagctatcatcattga

SEQ ID NO: 27120 - DNA, 19 bp, Homo sapiens
  siRNA target sequence for FLJ21439 (NM_025137.2,1024-1042).
gctatcatcattgaatgaa

SEQ ID NO: 27121 - DNA, 19 bp, Homo sapiens
  siRNA target sequence for FLJ21439 (NM_025137.2,1025-1043).
ctatcatcattgaatgaaa

SEQ ID NO: 27122 - DNA, 19 bp, Homo sapiens
  siRNA target sequence for FLJ21439 (NM_025137.2,1086-1104).
ggttccaggatattttgca

SEQ ID NO: 27123 - DNA, 19 bp, Homo sapiens
  siRNA target sequence for FLJ21439 (NM_025137.2,1267-1285).
ggaacccatagagcttaaa

SEQ ID NO: 27124 - DNA, 19 bp, Homo sapiens
  siRNA target sequence for FLJ21439 (NM_025137.2,1268-1286).
gaacccatagagcttaaat

SEQ ID NO: 27125 - DNA, 19 bp, Homo sapiens
  siRNA target sequence for FLJ21439 (NM_025137.2,1272-1290).
ccatagagcttaaatgtgt

SEQ ID NO: 27126 - DNA, 19 bp, Homo sapiens
  siRNA target sequence for FLJ21439 (NM_025137.2,1436-1454).
cagctgtgctttgttttga

SEQ ID NO: 27127 - DNA, 19 bp, Homo sapiens
  siRNA target sequence for FLJ21439 (NM_025137.2,1459-1477).
gaatggactctctctgatt

SEQ ID NO: 27128 - DNA, 19 bp, Homo sapiens
  siRNA target sequence for FLJ21439 (NM_025137.2,1463-1481).
ggactctctctgattttgt

SEQ ID NO: 27129 - DNA, 19 bp, Homo sapiens
  siRNA target sequence for FLJ21439 (NM_025137.2,1480-1498).
gtttggtttgactcaagaa

SEQ ID NO: 27130 - DNA, 19 bp, Homo sapiens
  siRNA target sequence for FLJ21439 (NM_025137.2,1546-1564).
cactctttgtcatctcaat

SEQ ID NO: 27131 - DNA, 19 bp, Homo sapiens
  siRNA target sequence for FLJ21439 (NM_025137.2,1576-1594).
gtgctcaattcccatacat

SEQ ID NO: 27132 - DNA, 19 bp, Homo sapiens
  siRNA target sequence for FLJ21439 (NM_025137.2,1622-1640).
cagctggacacagtaaatt

SEQ ID NO: 27133 - DNA, 19 bp, Homo sapiens
  siRNA target sequence for FLJ21439 (NM_025137.2,1625-1643).
ctggacacagtaaatttct

SEQ ID NO: 27134 - DNA, 19 bp, Homo sapiens
  siRNA target sequence for FLJ21439 (NM_025137.2,1678-1696).
ctcaaaatcttctgtatct

SEQ ID NO: 27135 - DNA, 19 bp, Homo sapiens
  siRNA target sequence for FLJ21439 (NM_025137.2,1709-1727).
cacttgtcatcccatttat

SEQ ID NO: 27136 - DNA, 19 bp, Homo sapiens
  siRNA target sequence for FLJ21439 (NM_025137.2,1711-1729).
cttgtcatcccatttatat

SEQ ID NO: 27137 - DNA, 19 bp, Homo sapiens
  siRNA target sequence for FLJ21439 (NM_025137.2,1747-1765).
gctgataccagcattggat

SEQ ID NO: 27138 - DNA, 19 bp, Homo sapiens
  siRNA target sequence for FLJ21439 (NM_025137.2,1750-1768).
gataccagcattggattta

SEQ ID NO: 27139 - DNA, 19 bp, Homo sapiens
  siRNA target sequence for FLJ21439 (NM_025137.2,1776-1794).
cggcaattagagaaagtta

SEQ ID NO: 27140 - DNA, 19 bp, Homo sapiens
  siRNA target sequence for FLJ21439 (NM_025137.2,1777-1795).
ggcaattagagaaagttat

SEQ ID NO: 27141 - DNA, 19 bp, Homo sapiens
  siRNA target sequence for FLJ21439 (NM_025137.2,1842-1860).
cactgtctttccttaacaa

SEQ ID NO: 27142 - DNA, 19 bp, Homo sapiens
  siRNA target sequence for FLJ21439 (NM_025137.2,1946-1964).
gaacttcgaaccttcatga

SEQ ID NO: 27143 - DNA, 19 bp, Homo sapiens
  siRNA target sequence for FLJ21439 (NM_025137.2,1949-1967).
cttcgaaccttcatgataa

SEQ ID NO: 27144 - DNA, 19 bp, Homo sapiens
  siRNA target sequence for FLJ21439 (NM_025137.2,1952-1970).
cgaaccttcatgataaagt

SEQ ID NO: 27145 - DNA, 19 bp, Homo sapiens
  siRNA target sequence for FLJ21439 (NM_025137.2,1953-1971).
gaaccttcatgataaagtt

SEQ ID NO: 27146 - DNA, 19 bp, Homo sapiens
  siRNA target sequence for FLJ21439 (NM_025137.2,1978-1996).
gaagctaacagatgctata

SEQ ID NO: 27147 - DNA, 19 bp, Homo sapiens
  siRNA target sequence for FLJ21439 (NM_025137.2,1981-1999).
gctaacagatgctatagat

SEQ ID NO: 27148 - DNA, 19 bp, Homo sapiens
  siRNA target sequence for FLJ21439 (NM_025137.2,1986-2004).
cagatgctatagatgaata

SEQ ID NO: 27149 - DNA, 19 bp, Homo sapiens
  siRNA target sequence for FLJ21439 (NM_025137.2,2030-2048).
gtaaaggagagcaatatat

SEQ ID NO: 27150 - DNA, 19 bp, Homo sapiens
  siRNA target sequence for FLJ21439 (NM_025137.2,2057-2075).
ctcagctttgaggaagtta

SEQ ID NO: 27151 - DNA, 19 bp, Homo sapiens
  siRNA target sequence for FLJ21439 (NM_025137.2,2079-2097).
ccagcgccattttaaacaa

SEQ ID NO: 27152 - DNA, 19 bp, Homo sapiens
  siRNA target sequence for FLJ21439 (NM_025137.2,2082-2100).
gcgccattttaaacaacaa

SEQ ID NO: 27153 - DNA, 19 bp, Homo sapiens
  siRNA target sequence for FLJ21439 (NM_025137.2,2116-2134).
gactttcttcaggattgat

SEQ ID NO: 27154 - DNA, 19 bp, Homo sapiens
  siRNA target sequence for FLJ21439 (NM_025137.2,2125-2143).
caggattgatagtcattct

SEQ ID NO: 27155 - DNA, 19 bp, Homo sapiens
  siRNA target sequence for FLJ21439 (NM_025137.2,2169-2187).
gcataggcctaaatttggt

SEQ ID NO: 27156 - DNA, 19 bp, Homo sapiens
  siRNA target sequence for FLJ21439 (NM_025137.2,2261-2279).
ggccaattgctcaagatct

SEQ ID NO: 27157 - DNA, 19 bp, Homo sapiens
  siRNA target sequence for FLJ21439 (NM_025137.2,2272-2290).
caagatctgcttctataca

SEQ ID NO: 27158 - DNA, 19 bp, Homo sapiens
  siRNA target sequence for FLJ21439 (NM_025137.2,2307-2325).
gtgactttttggttgaaat

SEQ ID NO: 27159 - DNA, 19 bp, Homo sapiens
  siRNA target sequence for FLJ21439 (NM_025137.2,2384-2402).
caagttgagaagctttatt

SEQ ID NO: 27160 - DNA, 19 bp, Homo sapiens
  siRNA target sequence for FLJ21439 (NM_025137.2,2443-2461).
caggtactggataaaggaa

SEQ ID NO: 27161 - DNA, 19 bp, Homo sapiens
  siRNA target sequence for FLJ21439 (NM_025137.2,2494-2512).
ctcattcctgaaatatgat

SEQ ID NO: 27162 - DNA, 19 bp, Homo sapiens
  siRNA target sequence for FLJ21439 (NM_025137.2,2534-2552).
caggaccatagaattgtgt

SEQ ID NO: 27163 - DNA, 19 bp, Homo sapiens
  siRNA target sequence for FLJ21439 (NM_025137.2,2537-2555).
gaccatagaattgtgttaa

SEQ ID NO: 27164 - DNA, 19 bp, Homo sapiens
  siRNA target sequence for FLJ21439 (NM_025137.2,2607-2625).
ggataagtccagaagaata

SEQ ID NO: 27165 - DNA, 19 bp, Homo sapiens
  siRNA target sequence for FLJ21439 (NM_025137.2,2660-2678).
ctcacagctcgccatgatt

SEQ ID NO: 27166 - DNA, 19 bp, Homo sapiens
  siRNA target sequence for FLJ21439 (NM_025137.2,2664-2682).
cagctcgccatgattggtt

SEQ ID NO: 27167 - DNA, 19 bp, Homo sapiens
  siRNA target sequence for FLJ21439 (NM_025137.2,2666-2684).
gctcgccatgattggttaa

SEQ ID NO: 27168 - DNA, 19 bp, Homo sapiens
  siRNA target sequence for FLJ21439 (NM_025137.2,2669-2687).
cgccatgattggttaaaca

SEQ ID NO: 27169 - DNA, 19 bp, Homo sapiens
  siRNA target sequence for FLJ21439 (NM_025137.2,2675-2693).
gattggttaaacattatct

SEQ ID NO: 27170 - DNA, 19 bp, Homo sapiens
  siRNA target sequence for FLJ21439 (NM_025137.2,2719-2737).
gcatagttatgcttcactt

SEQ ID NO: 27171 - DNA, 19 bp, Homo sapiens
  siRNA target sequence for FLJ21439 (NM_025137.2,2763-2781).
ctgttgatgttattaacca

SEQ ID NO: 27172 - DNA, 19 bp, Homo sapiens
  siRNA target sequence for FLJ21439 (NM_025137.2,2771-2789).
gttattaaccagaatactt

SEQ ID NO: 27173 - DNA, 19 bp, Homo sapiens
  siRNA target sequence for FLJ21439 (NM_025137.2,2895-2913).
gccgtattggaggtgtaat

SEQ ID NO: 27174 - DNA, 19 bp, Homo sapiens
  siRNA target sequence for FLJ21439 (NM_025137.2,2896-2914).
ccgtattggaggtgtaata

SEQ ID NO: 27175 - DNA, 19 bp, Homo sapiens
  siRNA target sequence for FLJ21439 (NM_025137.2,2917-2935).
ggataccctccctgttcaa

SEQ ID NO: 27176 - DNA, 19 bp, Homo sapiens
  siRNA target sequence for FLJ21439 (NM_025137.2,2918-2936).
gataccctccctgttcaaa

SEQ ID NO: 27177 - DNA, 19 bp, Homo sapiens
  siRNA target sequence for FLJ21439 (NM_025137.2,2922-2940).
ccctccctgttcaaaacta

SEQ ID NO: 27178 - DNA, 19 bp, Homo sapiens
  siRNA target sequence for FLJ21439 (NM_025137.2,2955-2973).
gttgggatttccattctca

SEQ ID NO: 27179 - DNA, 19 bp, Homo sapiens
  siRNA target sequence for FLJ21439 (NM_025137.2,2958-2976).
gggatttccattctcaatt

SEQ ID NO: 27180 - DNA, 19 bp, Homo sapiens
  siRNA target sequence for FLJ21439 (NM_025137.2,3022-3040).
ctaccttgactgttacaaa

SEQ ID NO: 27181 - DNA, 19 bp, Homo sapiens
  siRNA target sequence for FLJ21439 (NM_025137.2,3025-3043).
ccttgactgttacaaactt

SEQ ID NO: 27182 - DNA, 19 bp, Homo sapiens
  siRNA target sequence for FLJ21439 (NM_025137.2,3037-3055).
caaacttagtcctgaaaat

SEQ ID NO: 27183 - DNA, 19 bp, Homo sapiens
  siRNA target sequence for FLJ21439 (NM_025137.2,3125-3143).
caagttgccagtaacttaa

SEQ ID NO: 27184 - DNA, 19 bp, Homo sapiens
  siRNA target sequence for FLJ21439 (NM_025137.2,3247-3265).
cctggcccttgctactaca

SEQ ID NO: 27185 - DNA, 19 bp, Homo sapiens
  siRNA target sequence for FLJ21439 (NM_025137.2,3286-3304).
cagtcaggttgttcagaat

SEQ ID NO: 27186 - DNA, 19 bp, Homo sapiens
  siRNA target sequence for FLJ21439 (NM_025137.2,3288-3306).
gtcaggttgttcagaatga

SEQ ID NO: 27187 - DNA, 19 bp, Homo sapiens
  siRNA target sequence for FLJ21439 (NM_025137.2,3332-3350).
gtggatccccagctattga

SEQ ID NO: 27188 - DNA, 19 bp, Homo sapiens
  siRNA target sequence for FLJ21439 (NM_025137.2,3414-3432).
gtgtcctgccatctgatat

SEQ ID NO: 27189 - DNA, 19 bp, Homo sapiens
  siRNA target sequence for FLJ21439 (NM_025137.2,3416-3434).
gtcctgccatctgatatta

SEQ ID NO: 27190 - DNA, 19 bp, Homo sapiens
  siRNA target sequence for FLJ21439 (NM_025137.2,3442-3460).
ccaccttattcagtcatta

SEQ ID NO: 27191 - DNA, 19 bp, Homo sapiens
  siRNA target sequence for FLJ21439 (NM_025137.2,3443-3461).
caccttattcagtcattat

SEQ ID NO: 27192 - DNA, 19 bp, Homo sapiens
  siRNA target sequence for FLJ21439 (NM_025137.2,3445-3463).
ccttattcagtcattatca

SEQ ID NO: 27193 - DNA, 19 bp, Homo sapiens
  siRNA target sequence for FLJ21439 (NM_025137.2,3549-3567).
ctagccctgacctggttaa

SEQ ID NO: 27194 - DNA, 19 bp, Homo sapiens
  siRNA target sequence for FLJ21439 (NM_025137.2,3562-3580).
ggttaataaatatgctata

SEQ ID NO: 27195 - DNA, 19 bp, Homo sapiens
  siRNA target sequence for FLJ21439 (NM_025137.2,3584-3602).
gaacgtctgaattttgctt

SEQ ID NO: 27196 - DNA, 19 bp, Homo sapiens
  siRNA target sequence for FLJ21439 (NM_025137.2,3587-3605).
cgtctgaattttgcttatt

SEQ ID NO: 27197 - DNA, 19 bp, Homo sapiens
  siRNA target sequence for FLJ21439 (NM_025137.2,3623-3641).
ccatcatttgcatttggta

SEQ ID NO: 27198 - DNA, 19 bp, Homo sapiens
  siRNA target sequence for FLJ21439 (NM_025137.2,3647-3665).
ctggtccaggaattaatca

SEQ ID NO: 27199 - DNA, 19 bp, Homo sapiens
  siRNA target sequence for FLJ21439 (NM_025137.2,3691-3709).
ccagcaagtaggcaatgaa

SEQ ID NO: 27200 - DNA, 19 bp, Homo sapiens
  siRNA target sequence for FLJ21439 (NM_025137.2,3702-3720).
gcaatgaagcctatgttat

SEQ ID NO: 27201 - DNA, 19 bp, Homo sapiens
  siRNA target sequence for FLJ21439 (NM_025137.2,3703-3721).
caatgaagcctatgttata

SEQ ID NO: 27202 - DNA, 19 bp, Homo sapiens
  siRNA target sequence for FLJ21439 (NM_025137.2,3732-3750).
ccttccacataccttcaat

SEQ ID NO: 27203 - DNA, 19 bp, Homo sapiens
  siRNA target sequence for FLJ21439 (NM_025137.2,3796-3814).
cctcaagctcagagttgat

SEQ ID NO: 27204 - DNA, 19 bp, Homo sapiens
  siRNA target sequence for FLJ21439 (NM_025137.2,3863-3881).
gctcagtacagctttatca

SEQ ID NO: 27205 - DNA, 19 bp, Homo sapiens
  siRNA target sequence for FLJ21439 (NM_025137.2,3886-3904).
gtctgtagccgaaaaacta

SEQ ID NO: 27206 - DNA, 19 bp, Homo sapiens
  siRNA target sequence for FLJ21439 (NM_025137.2,4109-4127).
gattggctgcagttcatta

SEQ ID NO: 27207 - DNA, 19 bp, Homo sapiens
  siRNA target sequence for FLJ21439 (NM_025137.2,4113-4131).
ggctgcagttcattattca

SEQ ID NO: 27208 - DNA, 19 bp, Homo sapiens
  siRNA target sequence for FLJ21439 (NM_025137.2,4115-4133).
ctgcagttcattattcaca

SEQ ID NO: 27209 - DNA, 19 bp, Homo sapiens
  siRNA target sequence for FLJ21439 (NM_025137.2,4180-4198).
gtacttcagcccagtcatt

SEQ ID NO: 27210 - DNA, 19 bp, Homo sapiens
  siRNA target sequence for FLJ21439 (NM_025137.2,4236-4254).
cagtgcccacctccaaaat

SEQ ID NO: 27211 - DNA, 19 bp, Homo sapiens
  siRNA target sequence for FLJ21439 (NM_025137.2,4260-4278).
gcgatcaagtctgcaataa

SEQ ID NO: 27212 - DNA, 19 bp, Homo sapiens
  siRNA target sequence for FLJ21439 (NM_025137.2,4262-4280).
gatcaagtctgcaataagt

SEQ ID NO: 27213 - DNA, 19 bp, Homo sapiens
  siRNA target sequence for FLJ21439 (NM_025137.2,4307-4325).
caagagatgaccgatttat

SEQ ID NO: 27214 - DNA, 19 bp, Homo sapiens
  siRNA target sequence for FLJ21439 (NM_025137.2,4546-4564).
gaaccttgaggatctttca

SEQ ID NO: 27215 - DNA, 19 bp, Homo sapiens
  siRNA target sequence for FLJ21439 (NM_025137.2,4622-4640).
cagcttttctttaaggatt

SEQ ID NO: 27216 - DNA, 19 bp, Homo sapiens
  siRNA target sequence for FLJ21439 (NM_025137.2,4670-4688).
gaactgtgtatgttcttca

SEQ ID NO: 27217 - DNA, 19 bp, Homo sapiens
  siRNA target sequence for FLJ21439 (NM_025137.2,4677-4695).
gtatgttcttcaggaatta

SEQ ID NO: 27218 - DNA, 19 bp, Homo sapiens
  siRNA target sequence for FLJ21439 (NM_025137.2,4735-4753).
ccttgaaacgcttaacaca

SEQ ID NO: 27219 - DNA, 19 bp, Homo sapiens
  siRNA target sequence for FLJ21439 (NM_025137.2,4813-4831).
ccttttgaagcttatgcta

SEQ ID NO: 27220 - DNA, 19 bp, Homo sapiens
  siRNA target sequence for FLJ21439 (NM_025137.2,4902-4920).
ctgatggtccagatgtgaa

SEQ ID NO: 27221 - DNA, 19 bp, Homo sapiens
  siRNA target sequence for FLJ21439 (NM_025137.2,4908-4926).
gtccagatgtgaaaaagct

SEQ ID NO: 27222 - DNA, 19 bp, Homo sapiens
  siRNA target sequence for FLJ21439 (NM_025137.2,4940-4958).
cagattttgaaggatacat

SEQ ID NO: 27223 - DNA, 19 bp, Homo sapiens
  siRNA target sequence for FLJ21439 (NM_025137.2,4960-4978).
catagccattaatcataca

SEQ ID NO: 27224 - DNA, 19 bp, Homo sapiens
  siRNA target sequence for FLJ21439 (NM_025137.2,4964-4982).
gccattaatcatacaatta

SEQ ID NO: 27225 - DNA, 19 bp, Homo sapiens
  siRNA target sequence for FLJ21439 (NM_025137.2,4965-4983).
ccattaatcatacaattat

SEQ ID NO: 27226 - DNA, 19 bp, Homo sapiens
  siRNA target sequence for FLJ21439 (NM_025137.2,4989-5007).
gctacagcattgagaatct

SEQ ID NO: 27227 - DNA, 19 bp, Homo sapiens
  siRNA target sequence for FLJ21439 (NM_025137.2,4990-5008).
ctacagcattgagaatctt

SEQ ID NO: 27228 - DNA, 19 bp, Homo sapiens
  siRNA target sequence for FLJ21439 (NM_025137.2,5009-5027).
cagcatgaatgtagatcta

SEQ ID NO: 27229 - DNA, 19 bp, Homo sapiens
  siRNA target sequence for FLJ21439 (NM_025137.2,5011-5029).
gcatgaatgtagatctatt

SEQ ID NO: 27230 - DNA, 19 bp, Homo sapiens
  siRNA target sequence for FLJ21439 (NM_025137.2,5097-5115).
ctgtggacaacttggttat

SEQ ID NO: 27231 - DNA, 19 bp, Homo sapiens
  siRNA target sequence for FLJ21439 (NM_025137.2,5099-5117).
gtggacaacttggttatta

SEQ ID NO: 27232 - DNA, 19 bp, Homo sapiens
  siRNA target sequence for FLJ21439 (NM_025137.2,5101-5119).
ggacaacttggttattaaa

SEQ ID NO: 27233 - DNA, 19 bp, Homo sapiens
  siRNA target sequence for FLJ21439 (NM_025137.2,5131-5149).
ggaaatgcagaccctaaaa

SEQ ID NO: 27234 - DNA, 19 bp, Homo sapiens
  siRNA target sequence for FLJ21439 (NM_025137.2,5142-5160).
ccctaaaacacattgaaca

SEQ ID NO: 27235 - DNA, 19 bp, Homo sapiens
  siRNA target sequence for FLJ21439 (NM_025137.2,5479-5497).
ctcaactagtggtgaactt

SEQ ID NO: 27236 - DNA, 19 bp, Homo sapiens
  siRNA target sequence for FLJ21439 (NM_025137.2,5484-5502).
ctagtggtgaactttcctt

SEQ ID NO: 27237 - DNA, 19 bp, Homo sapiens
  siRNA target sequence for FLJ21439 (NM_025137.2,5492-5510).
gaactttcctttgatagtt

SEQ ID NO: 27238 - DNA, 19 bp, Homo sapiens
  siRNA target sequence for FLJ21439 (NM_025137.2,5540-5558).
gctgctctgaacacatcaa

SEQ ID NO: 27239 - DNA, 19 bp, Homo sapiens
  siRNA target sequence for FLJ21439 (NM_025137.2,5543-5561).
gctctgaacacatcaaaat

SEQ ID NO: 27240 - DNA, 19 bp, Homo sapiens
  siRNA target sequence for FLJ21439 (NM_025137.2,5546-5564).
ctgaacacatcaaaatact

SEQ ID NO: 27241 - DNA, 19 bp, Homo sapiens
  siRNA target sequence for FLJ21439 (NM_025137.2,5553-5571).
catcaaaatacttagaact

SEQ ID NO: 27242 - DNA, 19 bp, Homo sapiens
  siRNA target sequence for FLJ21439 (NM_025137.2,5591-5609).
gagacatgcgagaatagat

SEQ ID NO: 27243 - DNA, 19 bp, Homo sapiens
  siRNA target sequence for FLJ21439 (NM_025137.2,5621-5639).
gagcaggagtcactaaact

SEQ ID NO: 27244 - DNA, 19 bp, Homo sapiens
  siRNA target sequence for FLJ21439 (NM_025137.2,5623-5641).
gcaggagtcactaaacttt

SEQ ID NO: 27245 - DNA, 19 bp, Homo sapiens
  siRNA target sequence for FLJ21439 (NM_025137.2,5627-5645).
gagtcactaaactttttga

SEQ ID NO: 27246 - DNA, 19 bp, Homo sapiens
  siRNA target sequence for FLJ21439 (NM_025137.2,5675-5693).
catgaagcaagtagagtat

SEQ ID NO: 27247 - DNA, 19 bp, Homo sapiens
  siRNA target sequence for FLJ21439 (NM_025137.2,5685-5703).
gtagagtatgccggtattt

SEQ ID NO: 27248 - DNA, 19 bp, Homo sapiens
  siRNA target sequence for FLJ21439 (NM_025137.2,5690-5708).
gtatgccggtattttcatt

SEQ ID NO: 27249 - DNA, 19 bp, Homo sapiens
  siRNA target sequence for FLJ21439 (NM_025137.2,5717-5735).
ccagatgtcgccttggtat

SEQ ID NO: 27250 - DNA, 19 bp, Homo sapiens
  siRNA target sequence for FLJ21439 (NM_025137.2,5718-5736).
cagatgtcgccttggtatt

SEQ ID NO: 27251 - DNA, 19 bp, Homo sapiens
  siRNA target sequence for FLJ21439 (NM_025137.2,5868-5886).
cttcaagtctggatagtca

SEQ ID NO: 27252 - DNA, 19 bp, Homo sapiens
  siRNA target sequence for FLJ21439 (NM_025137.2,5898-5916).
cagtgccctccagtaatga

SEQ ID NO: 27253 - DNA, 19 bp, Homo sapiens
  siRNA target sequence for FLJ21439 (NM_025137.2,5933-5951).
gaagtgctgacaagcaaat

SEQ ID NO: 27254 - DNA, 19 bp, Homo sapiens
  siRNA target sequence for FLJ21439 (NM_025137.2,5952-5970).
gcctccatgggaagaacta

SEQ ID NO: 27255 - DNA, 19 bp, Homo sapiens
  siRNA target sequence for FLJ21439 (NM_025137.2,6129-6147).
gccttaagccagatactgt

SEQ ID NO: 27256 - DNA, 19 bp, Homo sapiens
  siRNA target sequence for FLJ21439 (NM_025137.2,6176-6194).
cgggagctgcttacttcat

SEQ ID NO: 27257 - DNA, 19 bp, Homo sapiens
  siRNA target sequence for FLJ21439 (NM_025137.2,6195-6213).
cacagggaacaggacataa

SEQ ID NO: 27258 - DNA, 19 bp, Homo sapiens
  siRNA target sequence for FLJ21439 (NM_025137.2,6485-6503).
ctcctcactggcattggaa

SEQ ID NO: 27259 - DNA, 19 bp, Homo sapiens
  siRNA target sequence for FLJ21439 (NM_025137.2,6504-6522).
ggtacaacgagatgacata

SEQ ID NO: 27260 - DNA, 19 bp, Homo sapiens
  siRNA target sequence for FLJ21439 (NM_025137.2,6508-6526).
caacgagatgacatacata

SEQ ID NO: 27261 - DNA, 19 bp, Homo sapiens
  siRNA target sequence for FLJ21439 (NM_025137.2,6511-6529).
cgagatgacatacatattt

SEQ ID NO: 27262 - DNA, 19 bp, Homo sapiens
  siRNA target sequence for FLJ21439 (NM_025137.2,6514-6532).
gatgacatacatatttgat

SEQ ID NO: 27263 - DNA, 19 bp, Homo sapiens
  siRNA target sequence for FLJ21439 (NM_025137.2,6538-6556).
gcataaaaagcactacttt

SEQ ID NO: 27264 - DNA, 19 bp, Homo sapiens
  siRNA target sequence for FLJ21439 (NM_025137.2,6584-6602).
ccgagtggtaccctgaaaa

SEQ ID NO: 27265 - DNA, 19 bp, Homo sapiens
  siRNA target sequence for FLJ21439 (NM_025137.2,6586-6604).
gagtggtaccctgaaaaca

SEQ ID NO: 27266 - DNA, 19 bp, Homo sapiens
  siRNA target sequence for FLJ21439 (NM_025137.2,6716-6734).
gcccgcatccaactgaaat

SEQ ID NO: 27267 - DNA, 19 bp, Homo sapiens
  siRNA target sequence for FLJ21439 (NM_025137.2,6719-6737).
cgcatccaactgaaattga

SEQ ID NO: 27268 - DNA, 19 bp, Homo sapiens
  siRNA target sequence for FLJ21439 (NM_025137.2,6720-6738).
gcatccaactgaaattgat

SEQ ID NO: 27269 - DNA, 19 bp, Homo sapiens
  siRNA target sequence for FLJ21439 (NM_025137.2,6721-6739).
catccaactgaaattgatt

SEQ ID NO: 27270 - DNA, 19 bp, Homo sapiens
  siRNA target sequence for FLJ21439 (NM_025137.2,6725-6743).
caactgaaattgattgagt

SEQ ID NO: 27271 - DNA, 19 bp, Homo sapiens
  siRNA target sequence for FLJ21439 (NM_025137.2,6774-6792).
ggcaccagctgaaacaact

SEQ ID NO: 27272 - DNA, 19 bp, Homo sapiens
  siRNA target sequence for FLJ21439 (NM_025137.2,6875-6893).
cagcggctcaccaagttga

SEQ ID NO: 27273 - DNA, 19 bp, Homo sapiens
  siRNA target sequence for FLJ21439 (NM_025137.2,6877-6895).
gcggctcaccaagttgata

SEQ ID NO: 27274 - DNA, 19 bp, Homo sapiens
  siRNA target sequence for FLJ21439 (NM_025137.2,6990-7008).
ggttctaccaggcttctat

SEQ ID NO: 27275 - DNA, 19 bp, Homo sapiens
  siRNA target sequence for FLJ21439 (NM_025137.2,6991-7009).
gttctaccaggcttctatt

SEQ ID NO: 27276 - DNA, 19 bp, Homo sapiens
  siRNA target sequence for FLJ21439 (NM_025137.2,7010-7028).
gtggctgaggcctacgatt

SEQ ID NO: 27277 - DNA, 19 bp, Homo sapiens
  siRNA target sequence for FLJ21439 (NM_025137.2,7012-7030).
ggctgaggcctacgatttt

SEQ ID NO: 27278 - DNA, 19 bp, Homo sapiens
  siRNA target sequence for FLJ21439 (NM_025137.2,7014-7032).
ctgaggcctacgattttgt

SEQ ID NO: 27279 - DNA, 19 bp, Homo sapiens
  siRNA target sequence for FLJ21439 (NM_025137.2,7060-7078).
gcaagtgattcttaaagga

SEQ ID NO: 27280 - DNA, 19 bp, Homo sapiens
  siRNA target sequence for FLJ21439 (NM_025137.2,7139-7157).
gagatttccaaaaaatata

SEQ ID NO: 27281 - DNA, 19 bp, Homo sapiens
  siRNA target sequence for FLJ21439 (NM_025137.2,7220-7238).
gatgtttacctgtattaca

SEQ ID NO: 27282 - DNA, 19 bp, Homo sapiens
  siRNA target sequence for FLJ21439 (NM_025137.2,7243-7261).
ggcatacgaacacaagttt

SEQ ID NO: 27283 - DNA, 19 bp, Homo sapiens
  siRNA target sequence for FLJ21439 (NM_025137.2,7244-7262).
gcatacgaacacaagtttt

SEQ ID NO: 27284 - DNA, 19 bp, Homo sapiens
  siRNA target sequence for FLJ21439 (NM_025137.2,7245-7263).
catacgaacacaagtttta

SEQ ID NO: 27285 - DNA, 19 bp, Homo sapiens
  siRNA target sequence for FLJ21439 (NM_025137.2,7249-7267).
cgaacacaagttttatgaa

SEQ ID NO: 27286 - DNA, 19 bp, Homo sapiens
  siRNA target sequence for FLJ21439 (NM_025137.2,7295-7313).
cagacaggttgctgtctaa

SEQ ID NO: 27287 - DNA, 19 bp, Homo sapiens
  siRNA target sequence for FLJ23017 (NM_022840.2,790-808).
ggtggttactggatcatct

SEQ ID NO: 27288 - DNA, 19 bp, Homo sapiens
  siRNA target sequence for FLJ23017 (NM_022840.2,791-809).
gtggttactggatcatctt

SEQ ID NO: 27289 - DNA, 19 bp, Homo sapiens
  siRNA target sequence for FLJ23017 (NM_022840.2,794-812).
gttactggatcatctttct

SEQ ID NO: 27290 - DNA, 19 bp, Homo sapiens
  siRNA target sequence for FLJ23017 (NM_022840.2,852-870).
gaaccttgttgccgtaaaa

SEQ ID NO: 27291 - DNA, 19 bp, Homo sapiens
  siRNA target sequence for FLJ23017 (NM_022840.2,856-874).
cttgttgccgtaaaaagga

SEQ ID NO: 27292 - DNA, 19 bp, Homo sapiens
  siRNA target sequence for FLJ23017 (NM_022840.2,872-890).
ggagttcactacttctgtt

SEQ ID NO: 27293 - DNA, 19 bp, Homo sapiens
  siRNA target sequence for FLJ23017 (NM_022840.2,891-909).
cactttgagtctcttcaaa

SEQ ID NO: 27294 - DNA, 19 bp, Homo sapiens
  siRNA target sequence for FLJ23017 (NM_022840.2,935-953).
ctgtgctgcatttattgct

SEQ ID NO: 27295 - DNA, 19 bp, Homo sapiens
  siRNA target sequence for FLJ23017 (NM_022840.2,965-983).
cactaagccagagaatgat

SEQ ID NO: 27296 - DNA, 19 bp, Homo sapiens
  siRNA target sequence for FLJ23017 (NM_022840.2,1041-1059).
gatgtcaccaaaccttata

SEQ ID NO: 27297 - DNA, 19 bp, Homo sapiens
  siRNA target sequence for FLJ23017 (NM_022840.2,1044-1062).
gtcaccaaaccttatataa

SEQ ID NO: 27298 - DNA, 19 bp, Homo sapiens
  siRNA target sequence for FLJ23017 (NM_022840.2,1046-1064).
caccaaaccttatataact

SEQ ID NO: 27299 - DNA, 19 bp, Homo sapiens
  siRNA target sequence for FLJ23017 (NM_022840.2,1157-1175).
gaagcgtaaaagatgtgtt

SEQ ID NO: 27300 - DNA, 19 bp, Homo sapiens
  siRNA target sequence for FLJ23017 (NM_022840.2,1181-1199).
caatcaaggtgaattggat

SEQ ID NO: 27301 - DNA, 19 bp, Homo sapiens
  siRNA target sequence for FLJ23017 (NM_022840.2,1197-1215).
gatgctatggaataccata

SEQ ID NO: 27302 - DNA, 19 bp, Homo sapiens
  siRNA target sequence for FLJ23017 (NM_022840.2,1200-1218).
gctatggaataccatacaa

SEQ ID NO: 27303 - DNA, 19 bp, Homo sapiens
  siRNA target sequence for FLJ23017 (NM_022840.2,1259-1277).
ccaggaaggtctcaaaagt

SEQ ID NO: 27304 - DNA, 19 bp, Homo sapiens
  siRNA target sequence for FLJ23017 (NM_022840.2,1313-1331).
gggtagtaagcccattact

SEQ ID NO: 27305 - DNA, 19 bp, Homo sapiens
  siRNA target sequence for FLJ23017 (NM_022840.2,1314-1332).
ggtagtaagcccattactt

SEQ ID NO: 27306 - DNA, 19 bp, Homo sapiens
  siRNA target sequence for FLJ23017 (NM_022840.2,1338-1356).
cttgacgcctgcagtttgt

SEQ ID NO: 27307 - DNA, 19 bp, Homo sapiens
  siRNA target sequence for FLJ23017 (NM_022840.2,1424-1442).
ggtggaagaggatacatct

SEQ ID NO: 27308 - DNA, 19 bp, Homo sapiens
  siRNA target sequence for FLJ23017 (NM_022840.2,1490-1508).
ctttacaaaagtgattact

SEQ ID NO: 27309 - DNA, 19 bp, Homo sapiens
  siRNA target sequence for FLJ23017 (NM_022840.2,1570-1588).
gtatgcaaccacttctaaa

SEQ ID NO: 27310 - DNA, 19 bp, Homo sapiens
  siRNA target sequence for FLJ23017 (NM_022840.2,1717-1735).
ctccaaactgtcttcttgt

SEQ ID NO: 27311 - DNA, 19 bp, Homo sapiens
  siRNA target sequence for FLJ23017 (NM_022840.2,1734-1752).
gttacttgggtgaccaata

SEQ ID NO: 27312 - DNA, 19 bp, Homo sapiens
  siRNA target sequence for FLJ23017 (NM_022840.2,1738-1756).
cttgggtgaccaatagaca

SEQ ID NO: 27313 - DNA, 19 bp, Homo sapiens
  siRNA target sequence for FLJ23017 (NM_022840.2,1753-1771).
gacagaagcacctacgttt

SEQ ID NO: 27314 - DNA, 19 bp, Homo sapiens
  siRNA target sequence for FLJ23017 (NM_022840.2,1757-1775).
gaagcacctacgttttata

SEQ ID NO: 27315 - DNA, 19 bp, Homo sapiens
  siRNA target sequence for FLJ23017 (NM_022840.2,1763-1781).
cctacgttttataaaggaa

SEQ ID NO: 27316 - DNA, 19 bp, Homo sapiens
  siRNA target sequence for FLJ23017 (NM_022840.2,1886-1904).
gccctacgaaggtcttata

SEQ ID NO: 27317 - DNA, 19 bp, Homo sapiens
  siRNA target sequence for FLJ23017 (NM_022840.2,1888-1906).
cctacgaaggtcttatact

SEQ ID NO: 27318 - DNA, 19 bp, Homo sapiens
  siRNA target sequence for FLJ23017 (NM_022840.2,1942-1960).
ggaatgcagatgtaaacgt

SEQ ID NO: 27319 - DNA, 19 bp, Homo sapiens
  siRNA target sequence for FLJ23017 (NM_022840.2,1972-1990).
cagaccacaaattaattgt

SEQ ID NO: 27320 - DNA, 19 bp, Homo sapiens
  siRNA target sequence for FLJ23017 (NM_022840.2,1974-1992).
gaccacaaattaattgtca

SEQ ID NO: 27321 - DNA, 19 bp, Homo sapiens
  siRNA target sequence for FLJ23017 (NM_022840.2,2023-2041).
caccgcttgctgaggtttt

SEQ ID NO: 27322 - DNA, 19 bp, Homo sapiens
  siRNA target sequence for FLJ23017 (NM_022840.2,2025-2043).
ccgcttgctgaggttttaa

SEQ ID NO: 27323 - DNA, 19 bp, Homo sapiens
  siRNA target sequence for FLJ23017 (NM_022840.2,2075-2093).
ggagttgtttgctcgaaat

SEQ ID NO: 27324 - DNA, 19 bp, Homo sapiens
  siRNA target sequence for FLJ23017 (NM_022840.2,2076-2094).
gagttgtttgctcgaaatt

SEQ ID NO: 27325 - DNA, 19 bp, Homo sapiens
  siRNA target sequence for FLJ23017 (NM_022840.2,2108-2126).
gactagttggggcaatgaa

SEQ ID NO: 27326 - DNA, 19 bp, Homo sapiens
  siRNA target sequence for FLJ23017 (NM_022840.2,2116-2134).
ggggcaatgaagttctcaa

SEQ ID NO: 27327 - DNA, 19 bp, Homo sapiens
  siRNA target sequence for FLJ23119 (NM_024652.2,189-207).
gtcaaccagtgcttcttca

SEQ ID NO: 27328 - DNA, 19 bp, Homo sapiens
  siRNA target sequence for FLJ23119 (NM_024652.2,329-347).
cgggacgcacctggattta

SEQ ID NO: 27329 - DNA, 19 bp, Homo sapiens
  siRNA target sequence for FLJ23119 (NM_024652.2,330-348).
gggacgcacctggatttaa

SEQ ID NO: 27330 - DNA, 19 bp, Homo sapiens
  siRNA target sequence for FLJ23119 (NM_024652.2,331-349).
ggacgcacctggatttaat

SEQ ID NO: 27331 - DNA, 19 bp, Homo sapiens
  siRNA target sequence for FLJ23119 (NM_024652.2,332-350).
gacgcacctggatttaatt

SEQ ID NO: 27332 - DNA, 19 bp, Homo sapiens
  siRNA target sequence for FLJ23119 (NM_024652.2,335-353).
gcacctggatttaattgaa

SEQ ID NO: 27333 - DNA, 19 bp, Homo sapiens
  siRNA target sequence for FLJ23119 (NM_024652.2,454-472).
ccttcaaacacttacatga

SEQ ID NO: 27334 - DNA, 19 bp, Homo sapiens
  siRNA target sequence for FLJ23119 (NM_024652.2,462-480).
cacttacatgagatttcct

SEQ ID NO: 27335 - DNA, 19 bp, Homo sapiens
  siRNA target sequence for FLJ23119 (NM_024652.2,504-522).
gggctgcgacagctgattt

SEQ ID NO: 27336 - DNA, 19 bp, Homo sapiens
  siRNA target sequence for FLJ23119 (NM_024652.2,505-523).
ggctgcgacagctgatttt

SEQ ID NO: 27337 - DNA, 19 bp, Homo sapiens
  siRNA target sequence for FLJ23119 (NM_024652.2,709-727).
cgcccgacaacgacatcaa

SEQ ID NO: 27338 - DNA, 19 bp, Homo sapiens
  siRNA target sequence for FLJ23119 (NM_024652.2,857-875).
gcagaggatctttaatatt

SEQ ID NO: 27339 - DNA, 19 bp, Homo sapiens
  siRNA target sequence for FLJ23119 (NM_024652.2,1100-1118).
caccattcagagggtattt

SEQ ID NO: 27340 - DNA, 19 bp, Homo sapiens
  siRNA target sequence for FLJ23119 (NM_024652.2,1102-1120).
ccattcagagggtatttaa

SEQ ID NO: 27341 - DNA, 19 bp, Homo sapiens
  siRNA target sequence for FLJ23119 (NM_024652.2,1141-1159).
gcttctggcaaaggtttat

SEQ ID NO: 27342 - DNA, 19 bp, Homo sapiens
  siRNA target sequence for FLJ23119 (NM_024652.2,1187-1205).
gatggacctgcagcttttt

SEQ ID NO: 27343 - DNA, 19 bp, Homo sapiens
  siRNA target sequence for FLJ23119 (NM_024652.2,1242-1260).
gtcaccatttacagtttta

SEQ ID NO: 27344 - DNA, 19 bp, Homo sapiens
  siRNA target sequence for FLJ23119 (NM_024652.2,1244-1262).
caccatttacagttttaca

SEQ ID NO: 27345 - DNA, 19 bp, Homo sapiens
  siRNA target sequence for FLJ23119 (NM_024652.2,1331-1349).
gctcctggtcacttttgat

SEQ ID NO: 27346 - DNA, 19 bp, Homo sapiens
  siRNA target sequence for FLJ23119 (NM_024652.2,1375-1393).
ccgacgtgaactggaaaaa

SEQ ID NO: 27347 - DNA, 19 bp, Homo sapiens
  siRNA target sequence for FLJ23119 (NM_024652.2,1403-1421).
cggaggaatgaaaattgtt

SEQ ID NO: 27348 - DNA, 19 bp, Homo sapiens
  siRNA target sequence for FLJ23119 (NM_024652.2,1465-1483).
cggaccacgtcaattcctt

SEQ ID NO: 27349 - DNA, 19 bp, Homo sapiens
  siRNA target sequence for FLJ23119 (NM_024652.2,1472-1490).
cgtcaattccttgattgat

SEQ ID NO: 27350 - DNA, 19 bp, Homo sapiens
  siRNA target sequence for FLJ23119 (NM_024652.2,1589-1607).
cacggaccccagtgagaaa

SEQ ID NO: 27351 - DNA, 19 bp, Homo sapiens
  siRNA target sequence for FLJ23119 (NM_024652.2,1609-1627).
cagaggatgtgcagtactt

SEQ ID NO: 27352 - DNA, 19 bp, Homo sapiens
  siRNA target sequence for FLJ23119 (NM_024652.2,1871-1889).
caagcgcttccacatcaaa

SEQ ID NO: 27353 - DNA, 19 bp, Homo sapiens
  siRNA target sequence for FLJ23119 (NM_024652.2,1876-1894).
gcttccacatcaaaaaatt

SEQ ID NO: 27354 - DNA, 19 bp, Homo sapiens
  siRNA target sequence for FLJ23119 (NM_024652.2,1895-1913).
caagaactttgctaacgta

SEQ ID NO: 27355 - DNA, 19 bp, Homo sapiens
  siRNA target sequence for FLJ23119 (NM_024652.2,2105-2123).
cgagaacgccagagattct

SEQ ID NO: 27356 - DNA, 19 bp, Homo sapiens
  siRNA target sequence for FLJ23119 (NM_024652.2,2106-2124).
gagaacgccagagattctt

SEQ ID NO: 27357 - DNA, 19 bp, Homo sapiens
  siRNA target sequence for FLJ23119 (NM_024652.2,2142-2160).
cacatgctcacccaaaaaa

SEQ ID NO: 27358 - DNA, 19 bp, Homo sapiens
  siRNA target sequence for FLJ23119 (NM_024652.2,2296-2314).
ggatttcgaggcagtcatt

SEQ ID NO: 27359 - DNA, 19 bp, Homo sapiens
  siRNA target sequence for FLJ23119 (NM_024652.2,2366-2384).
gatcaggcctcgcattgta

SEQ ID NO: 27360 - DNA, 19 bp, Homo sapiens
  siRNA target sequence for FLJ23119 (NM_024652.2,2369-2387).
caggcctcgcattgtatat

SEQ ID NO: 27361 - DNA, 19 bp, Homo sapiens
  siRNA target sequence for FLJ23119 (NM_024652.2,2371-2389).
ggcctcgcattgtatatga

SEQ ID NO: 27362 - DNA, 19 bp, Homo sapiens
  siRNA target sequence for FLJ23119 (NM_024652.2,2372-2390).
gcctcgcattgtatatgat

SEQ ID NO: 27363 - DNA, 19 bp, Homo sapiens
  siRNA target sequence for FLJ23119 (NM_024652.2,2374-2392).
ctcgcattgtatatgatga

SEQ ID NO: 27364 - DNA, 19 bp, Homo sapiens
  siRNA target sequence for FLJ23119 (NM_024652.2,2641-2659).
ccaccttcatgtatgaact

SEQ ID NO: 27365 - DNA, 19 bp, Homo sapiens
  siRNA target sequence for FLJ23119 (NM_024652.2,2857-2875).
ccgaggaccagaaaatcta

SEQ ID NO: 27366 - DNA, 19 bp, Homo sapiens
  siRNA target sequence for FLJ23119 (NM_024652.2,2913-2931).
ccccaacaggccttggata

SEQ ID NO: 27367 - DNA, 19 bp, Homo sapiens
  siRNA target sequence for FLJ23119 (NM_024652.2,2954-2972).
cttggccgtgcctgttatt

SEQ ID NO: 27368 - DNA, 19 bp, Homo sapiens
  siRNA target sequence for FLJ23119 (NM_024652.2,3084-3102).
gccaacaggtccaagttca

SEQ ID NO: 27369 - DNA, 19 bp, Homo sapiens
  siRNA target sequence for FLJ23119 (NM_024652.2,3337-3355).
ccaactccttggtgatgta

SEQ ID NO: 27370 - DNA, 19 bp, Homo sapiens
  siRNA target sequence for FLJ23119 (NM_024652.2,3406-3424).
gccccctcagggacatgtt

SEQ ID NO: 27371 - DNA, 19 bp, Homo sapiens
  siRNA target sequence for FLJ23119 (NM_024652.2,3407-3425).
ccccctcagggacatgttt

SEQ ID NO: 27372 - DNA, 19 bp, Homo sapiens
  siRNA target sequence for FLJ23119 (NM_024652.2,3504-3522).
gcggacgtgagcatcatgt

SEQ ID NO: 27373 - DNA, 19 bp, Homo sapiens
  siRNA target sequence for FLJ23119 (NM_024652.2,3693-3711).
gactcagacatgctacata

SEQ ID NO: 27374 - DNA, 19 bp, Homo sapiens
  siRNA target sequence for FLJ23119 (NM_024652.2,3835-3853).
gcggtggagatgttatcgt

SEQ ID NO: 27375 - DNA, 19 bp, Homo sapiens
  siRNA target sequence for FLJ23119 (NM_024652.2,3891-3909).
cgagtcattgccgtcttaa

SEQ ID NO: 27376 - DNA, 19 bp, Homo sapiens
  siRNA target sequence for FLJ23119 (NM_024652.2,3977-3995).
gtgcacctttgaaaatgaa

SEQ ID NO: 27377 - DNA, 19 bp, Homo sapiens
  siRNA target sequence for FLJ23119 (NM_024652.2,4035-4053).
gccagggagttcgacattt

SEQ ID NO: 27378 - DNA, 19 bp, Homo sapiens
  siRNA target sequence for FLJ23119 (NM_024652.2,4036-4054).
ccagggagttcgacatttt

SEQ ID NO: 27379 - DNA, 19 bp, Homo sapiens
  siRNA target sequence for FLJ23119 (NM_024652.2,4039-4057).
gggagttcgacattttcta

SEQ ID NO: 27380 - DNA, 19 bp, Homo sapiens
  siRNA target sequence for FLJ23436 (NM_024671.2,324-342).
gaagtcgaagagataccat

SEQ ID NO: 27381 - DNA, 19 bp, Homo sapiens
  siRNA target sequence for FLJ23436 (NM_024671.2,374-392).
gccacaaagcccagagttt

SEQ ID NO: 27382 - DNA, 19 bp, Homo sapiens
  siRNA target sequence for FLJ23436 (NM_024671.2,487-505).
gccctgaatcagattctca

SEQ ID NO: 27383 - DNA, 19 bp, Homo sapiens
  siRNA target sequence for FLJ23436 (NM_024671.2,592-610).
gccctggctatgaatctga

SEQ ID NO: 27384 - DNA, 19 bp, Homo sapiens
  siRNA target sequence for FLJ23436 (NM_024671.2,603-621).
gaatctgagagctctagat

SEQ ID NO: 27385 - DNA, 19 bp, Homo sapiens
  siRNA target sequence for FLJ23436 (NM_024671.2,607-625).
ctgagagctctagatatga

SEQ ID NO: 27386 - DNA, 19 bp, Homo sapiens
  siRNA target sequence for FLJ23436 (NM_024671.2,694-712).
gtgcggagatgcttctgaa

SEQ ID NO: 27387 - DNA, 19 bp, Homo sapiens
  siRNA target sequence for FLJ23436 (NM_024671.2,850-868).
ctacaccgcagtttgagat

SEQ ID NO: 27388 - DNA, 19 bp, Homo sapiens
  siRNA target sequence for FLJ23436 (NM_024671.2,945-963).
ggccctcggcctaacatct

SEQ ID NO: 27389 - DNA, 19 bp, Homo sapiens
  siRNA target sequence for FLJ36070 (NM_182574.1,801-819).
ggaacttcagacccttaaa

SEQ ID NO: 27390 - DNA, 19 bp, Homo sapiens
  siRNA target sequence for FLJ36070 (NM_182574.1,877-895).
gtgtcggggaccaagtcta

SEQ ID NO: 27391 - DNA, 19 bp, Homo sapiens
  siRNA target sequence for FLJ36070 (NM_182574.1,1208-1226).
gggcgcagttgcttcctaa

SEQ ID NO: 27392 - DNA, 19 bp, Homo sapiens
  siRNA target sequence for FLJ38964 (NM_173527.1,163-181).
cagatgccacgctactaaa

SEQ ID NO: 27393 - DNA, 19 bp, Homo sapiens
  siRNA target sequence for FLJ38964 (NM_173527.1,165-183).
gatgccacgctactaaaga

SEQ ID NO: 27394 - DNA, 19 bp, Homo sapiens
  siRNA target sequence for FLJ38964 (NM_173527.1,168-186).
gccacgctactaaagaagt

SEQ ID NO: 27395 - DNA, 19 bp, Homo sapiens
  siRNA target sequence for FLJ38964 (NM_173527.1,494-512).
gaacccagaggatacctat

SEQ ID NO: 27396 - DNA, 19 bp, Homo sapiens
  siRNA target sequence for FLJ38964 (NM_173527.1,517-535).
gacgcatcatggtggataa

SEQ ID NO: 27397 - DNA, 19 bp, Homo sapiens
  siRNA target sequence for FLJ38964 (NM_173527.1,616-634).
ccggggacgcctttctcat

SEQ ID NO: 27398 - DNA, 19 bp, Homo sapiens
  siRNA target sequence for FLJ38964 (NM_173527.1,724-742).
ccgttatcctcgttggaaa

SEQ ID NO: 27399 - DNA, 19 bp, Homo sapiens
  siRNA target sequence for FLJ38964 (NM_173527.1,760-778).
gctcccgggaggtatcact

SEQ ID NO: 27400 - DNA, 19 bp, Homo sapiens
  siRNA target sequence for FLJ38964 (NM_173527.1,1020-1038).
cgcaacgccaagttcttca

SEQ ID NO: 27401 - DNA, 19 bp, Homo sapiens
  siRNA target sequence for FOS (NM_005252.2,225-243).
ggggatagcctctcttact

SEQ ID NO: 27402 - DNA, 19 bp, Homo sapiens
  siRNA target sequence for FOS (NM_005252.2,226-244).
gggatagcctctcttacta

SEQ ID NO: 27403 - DNA, 19 bp, Homo sapiens
  siRNA target sequence for FOS (NM_005252.2,475-493).
ccagggctggcgttgtgaa

SEQ ID NO: 27404 - DNA, 19 bp, Homo sapiens
  siRNA target sequence for FOS (NM_005252.2,534-552).
ggcaaggtggaacagttat

SEQ ID NO: 27405 - DNA, 19 bp, Homo sapiens
  siRNA target sequence for FOS (NM_005252.2,536-554).
caaggtggaacagttatct

SEQ ID NO: 27406 - DNA, 19 bp, Homo sapiens
  siRNA target sequence for FOS (NM_005252.2,582-600).
cgaagggaaaggaataaga

SEQ ID NO: 27407 - DNA, 19 bp, Homo sapiens
  siRNA target sequence for FOS (NM_005252.2,655-673).
cggagacagaccaactaga

SEQ ID NO: 27408 - DNA, 19 bp, Homo sapiens
  siRNA target sequence for FOS (NM_005252.2,952-970).
ccgagccctttgatgactt

SEQ ID NO: 27409 - DNA, 19 bp, Homo sapiens
  siRNA target sequence for FOSB (NM_006732.1,648-666).
ccctctgccgagtctcaat

SEQ ID NO: 27410 - DNA, 19 bp, Homo sapiens
  siRNA target sequence for FOSB (NM_006732.1,649-667).
cctctgccgagtctcaata

SEQ ID NO: 27411 - DNA, 19 bp, Homo sapiens
  siRNA target sequence for FOSB (NM_006732.1,652-670).
ctgccgagtctcaatatct

SEQ ID NO: 27412 - DNA, 19 bp, Homo sapiens
  siRNA target sequence for FOSB (NM_006732.1,654-672).
gccgagtctcaatatctgt

SEQ ID NO: 27413 - DNA, 19 bp, Homo sapiens
  siRNA target sequence for FOSB (NM_006732.1,1296-1314).
ctggcggaggtgagagatt

SEQ ID NO: 27414 - DNA, 19 bp, Homo sapiens
  siRNA target sequence for FOSB (NM_006732.1,1322-1340).
ctcagcaccggctaaggaa

SEQ ID NO: 27415 - DNA, 19 bp, Homo sapiens
  siRNA target sequence for FOSB (NM_006732.1,1423-1441).
cggcttctctctttacaca

SEQ ID NO: 27416 - DNA, 19 bp, Homo sapiens
  siRNA target sequence for FOSB (NM_006732.1,1433-1451).
ctttacacacagtgaagtt

SEQ ID NO: 27417 - DNA, 19 bp, Homo sapiens
  siRNA target sequence for FOSB (NM_006732.1,1464-1482).
gaccccttccccgttgtta

SEQ ID NO: 27418 - DNA, 19 bp, Homo sapiens
  siRNA target sequence for FOSB (NM_006732.1,1479-1497).
gttaacccttcgtacactt

SEQ ID NO: 27419 - DNA, 19 bp, Homo sapiens
  siRNA target sequence for FUS (NM_004960.1,173-191).
cctacggacagcagagtta

SEQ ID NO: 27420 - DNA, 19 bp, Homo sapiens
  siRNA target sequence for FUS (NM_004960.1,184-202).
cagagttacagtggttata

SEQ ID NO: 27421 - DNA, 19 bp, Homo sapiens
  siRNA target sequence for FUS (NM_004960.1,231-249).
ccagagcagctattcttct

SEQ ID NO: 27422 - DNA, 19 bp, Homo sapiens
  siRNA target sequence for FUS (NM_004960.1,468-486).
cagccagcagcctagctat

SEQ ID NO: 27423 - DNA, 19 bp, Homo sapiens
  siRNA target sequence for FUS (NM_004960.1,653-671).
gcggttatggcaatcaaga

SEQ ID NO: 27424 - DNA, 19 bp, Homo sapiens
  siRNA target sequence for FUS (NM_004960.1,852-870).
ccgtggtggcttcaataaa

SEQ ID NO: 27425 - DNA, 19 bp, Homo sapiens
  siRNA target sequence for FUS (NM_004960.1,906-924).
ctccgaacaggataattca

SEQ ID NO: 27426 - DNA, 19 bp, Homo sapiens
  siRNA target sequence for FUS (NM_004960.1,908-926).
ccgaacaggataattcaga

SEQ ID NO: 27427 - DNA, 19 bp, Homo sapiens
  siRNA target sequence for FUS (NM_004960.1,1028-1046).
cgggacagcccatgattaa

SEQ ID NO: 27428 - DNA, 19 bp, Homo sapiens
  siRNA target sequence for FUS (NM_004960.1,1029-1047).
gggacagcccatgattaat

SEQ ID NO: 27429 - DNA, 19 bp, Homo sapiens
  siRNA target sequence for FUS (NM_004960.1,1030-1048).
ggacagcccatgattaatt

SEQ ID NO: 27430 - DNA, 19 bp, Homo sapiens
  siRNA target sequence for FUS (NM_004960.1,1031-1049).
gacagcccatgattaattt

SEQ ID NO: 27431 - DNA, 19 bp, Homo sapiens
  siRNA target sequence for FUS (NM_004960.1,1369-1387).
cccacctgtgagaatatga

SEQ ID NO: 27432 - DNA, 19 bp, Homo sapiens
  siRNA target sequence for FUS (NM_004960.1,1370-1388).
ccacctgtgagaatatgaa

SEQ ID NO: 27433 - DNA, 19 bp, Homo sapiens
  siRNA target sequence for FUS (NM_004960.1,1416-1434).
gtgtaaggcccctaaacca

SEQ ID NO: 27434 - DNA, 19 bp, Homo sapiens
  siRNA target sequence for FUS (NM_004960.1,1463-1481).
ctcacatggggggtaacta

SEQ ID NO: 27435 - DNA, 19 bp, Homo sapiens
  siRNA target sequence for GASC1 (NM_015061.1,225-243).
gttccgggagttcaacaaa

SEQ ID NO: 27436 - DNA, 19 bp, Homo sapiens
  siRNA target sequence for GASC1 (NM_015061.1,351-369).
gctcattccagcaccaatt

SEQ ID NO: 27437 - DNA, 19 bp, Homo sapiens
  siRNA target sequence for GASC1 (NM_015061.1,456-474).
ggccaacagtggcaaatat

SEQ ID NO: 27438 - DNA, 19 bp, Homo sapiens
  siRNA target sequence for GASC1 (NM_015061.1,479-497).
ctccaagatacttggatta

SEQ ID NO: 27439 - DNA, 19 bp, Homo sapiens
  siRNA target sequence for GASC1 (NM_015061.1,482-500).
caagatacttggattacga

SEQ ID NO: 27440 - DNA, 19 bp, Homo sapiens
  siRNA target sequence for GASC1 (NM_015061.1,533-551).
cttttgtggcacctatcta

SEQ ID NO: 27441 - DNA, 19 bp, Homo sapiens
  siRNA target sequence for GASC1 (NM_015061.1,559-577).
gatattaatgggagcatat

SEQ ID NO: 27442 - DNA, 19 bp, Homo sapiens
  siRNA target sequence for GASC1 (NM_015061.1,667-685).
gtaaataccccatatctct

SEQ ID NO: 27443 - DNA, 19 bp, Homo sapiens
  siRNA target sequence for GASC1 (NM_015061.1,732-750).
ggacctctatagcattaat

SEQ ID NO: 27444 - DNA, 19 bp, Homo sapiens
  siRNA target sequence for GASC1 (NM_015061.1,733-751).
gacctctatagcattaatt

SEQ ID NO: 27445 - DNA, 19 bp, Homo sapiens
  siRNA target sequence for GASC1 (NM_015061.1,769-787).
cccaagtcttggtatgcta

SEQ ID NO: 27446 - DNA, 19 bp, Homo sapiens
  siRNA target sequence for GASC1 (NM_015061.1,770-788).
ccaagtcttggtatgctat

SEQ ID NO: 27447 - DNA, 19 bp, Homo sapiens
  siRNA target sequence for GASC1 (NM_015061.1,771-789).
caagtcttggtatgctata

SEQ ID NO: 27448 - DNA, 19 bp, Homo sapiens
  siRNA target sequence for GASC1 (NM_015061.1,798-816).
gcatggaaaacgacttgaa

SEQ ID NO: 27449 - DNA, 19 bp, Homo sapiens
  siRNA target sequence for GASC1 (NM_015061.1,803-821).
gaaaacgacttgaaagact

SEQ ID NO: 27450 - DNA, 19 bp, Homo sapiens
  siRNA target sequence for GASC1 (NM_015061.1,818-836).
gactagctcaaggtttttt

SEQ ID NO: 27451 - DNA, 19 bp, Homo sapiens
  siRNA target sequence for GASC1 (NM_015061.1,1010-1028).
gtgcagaatctacaaattt

SEQ ID NO: 27452 - DNA, 19 bp, Homo sapiens
  siRNA target sequence for GASC1 (NM_015061.1,1034-1052).
ctgtcagatggattgacta

SEQ ID NO: 27453 - DNA, 19 bp, Homo sapiens
  siRNA target sequence for GASC1 (NM_015061.1,1044-1062).
gattgactatggaaaagtt

SEQ ID NO: 27454 - DNA, 19 bp, Homo sapiens
  siRNA target sequence for GASC1 (NM_015061.1,1054-1072).
ggaaaagttgccaaattgt

SEQ ID NO: 27455 - DNA, 19 bp, Homo sapiens
  siRNA target sequence for GASC1 (NM_015061.1,1073-1091).
gcacttgcaggaaagacat

SEQ ID NO: 27456 - DNA, 19 bp, Homo sapiens
  siRNA target sequence for GASC1 (NM_015061.1,1098-1116).
gatttcaatggatatcttt

SEQ ID NO: 27457 - DNA, 19 bp, Homo sapiens
  siRNA target sequence for GASC1 (NM_015061.1,1465-1483).
caggtggagcagaatttat

SEQ ID NO: 27458 - DNA, 19 bp, Homo sapiens
  siRNA target sequence for GASC1 (NM_015061.1,1504-1522).
ggaaacagctgcttaagta

SEQ ID NO: 27459 - DNA, 19 bp, Homo sapiens
  siRNA target sequence for GASC1 (NM_015061.1,1515-1533).
cttaagtacatctgtaaca

SEQ ID NO: 27460 - DNA, 19 bp, Homo sapiens
  siRNA target sequence for GASC1 (NM_015061.1,1547-1565).
ctgaggatgacaaagctta

SEQ ID NO: 27461 - DNA, 19 bp, Homo sapiens
  siRNA target sequence for GASC1 (NM_015061.1,1707-1725).
gagtaatggtgtgttaaca

SEQ ID NO: 27462 - DNA, 19 bp, Homo sapiens
  siRNA target sequence for GASC1 (NM_015061.1,1709-1727).
gtaatggtgtgttaacaga

SEQ ID NO: 27463 - DNA, 19 bp, Homo sapiens
  siRNA target sequence for GASC1 (NM_015061.1,1895-1913).
ctccgatgactcttgtgaa

SEQ ID NO: 27464 - DNA, 19 bp, Homo sapiens
  siRNA target sequence for GASC1 (NM_015061.1,1914-1932).
gcagcaggcgccaagtgat

SEQ ID NO: 27465 - DNA, 19 bp, Homo sapiens
  siRNA target sequence for GASC1 (NM_015061.1,1917-1935).
gcaggcgccaagtgatgaa

SEQ ID NO: 27466 - DNA, 19 bp, Homo sapiens
  siRNA target sequence for GASC1 (NM_015061.1,1920-1938).
ggcgccaagtgatgaagaa

SEQ ID NO: 27467 - DNA, 19 bp, Homo sapiens
  siRNA target sequence for GASC1 (NM_015061.1,1922-1940).
cgccaagtgatgaagaatt

SEQ ID NO: 27468 - DNA, 19 bp, Homo sapiens
  siRNA target sequence for GASC1 (NM_015061.1,2034-2052).
cgcagctgagcaagagtat

SEQ ID NO: 27469 - DNA, 19 bp, Homo sapiens
  siRNA target sequence for GASC1 (NM_015061.1,2118-2136).
gccagatagcagcaatgaa

SEQ ID NO: 27470 - DNA, 19 bp, Homo sapiens
  siRNA target sequence for GASC1 (NM_015061.1,2146-2164).
gctagatgggagacaaaat

SEQ ID NO: 27471 - DNA, 19 bp, Homo sapiens
  siRNA target sequence for GASC1 (NM_015061.1,2320-2338).
cgggttcatgcaagttgtt

SEQ ID NO: 27472 - DNA, 19 bp, Homo sapiens
  siRNA target sequence for GASC1 (NM_015061.1,2321-2339).
gggttcatgcaagttgtta

SEQ ID NO: 27473 - DNA, 19 bp, Homo sapiens
  siRNA target sequence for GASC1 (NM_015061.1,2342-2360).
gtattccttctcatgagat

SEQ ID NO: 27474 - DNA, 19 bp, Homo sapiens
  siRNA target sequence for GASC1 (NM_015061.1,2374-2392).
ctgtgtgcccggtgcaaaa

SEQ ID NO: 27475 - DNA, 19 bp, Homo sapiens
  siRNA target sequence for GASC1 (NM_015061.1,2376-2394).
gtgtgcccggtgcaaaaga

SEQ ID NO: 27476 - DNA, 19 bp, Homo sapiens
  siRNA target sequence for GASC1 (NM_015061.1,2434-2452).
ggaggtgctcttaagcaaa

SEQ ID NO: 27477 - DNA, 19 bp, Homo sapiens
  siRNA target sequence for GASC1 (NM_015061.1,2438-2456).
gtgctcttaagcaaacgaa

SEQ ID NO: 27478 - DNA, 19 bp, Homo sapiens
  siRNA target sequence for GASC1 (NM_015061.1,2487-2505).
cgttgcggtcccagaagtt

SEQ ID NO: 27479 - DNA, 19 bp, Homo sapiens
  siRNA target sequence for GASC1 (NM_015061.1,2496-2514).
cccagaagttcgattcact

SEQ ID NO: 27480 - DNA, 19 bp, Homo sapiens
  siRNA target sequence for GASC1 (NM_015061.1,2498-2516).
cagaagttcgattcactaa

SEQ ID NO: 27481 - DNA, 19 bp, Homo sapiens
  siRNA target sequence for GASC1 (NM_015061.1,2554-2572).
cctttacagaggttaaaat

SEQ ID NO: 27482 - DNA, 19 bp, Homo sapiens
  siRNA target sequence for GASC1 (NM_015061.1,2710-2728).
ccttatgtggtgaacatta

SEQ ID NO: 27483 - DNA, 19 bp, Homo sapiens
  siRNA target sequence for GASC1 (NM_015061.1,2729-2747).
catgctttcgacataaggt

SEQ ID NO: 27484 - DNA, 19 bp, Homo sapiens
  siRNA target sequence for GASC1 (NM_015061.1,2770-2788).
gcttgcgagaaggtcattt

SEQ ID NO: 27485 - DNA, 19 bp, Homo sapiens
  siRNA target sequence for GASC1 (NM_015061.1,2818-2836).
cggaacacccggtattaca

SEQ ID NO: 27486 - DNA, 19 bp, Homo sapiens
  siRNA target sequence for GASC1 (NM_015061.1,2820-2838).
gaacacccggtattacagt

SEQ ID NO: 27487 - DNA, 19 bp, Homo sapiens
  siRNA target sequence for GASC1 (NM_015061.1,2867-2885).
ccttctatgaggtcatgtt

SEQ ID NO: 27488 - DNA, 19 bp, Homo sapiens
  siRNA target sequence for GASC1 (NM_015061.1,2868-2886).
cttctatgaggtcatgttt

SEQ ID NO: 27489 - DNA, 19 bp, Homo sapiens
  siRNA target sequence for GASC1 (NM_015061.1,2969-2987).
gagaagtcgtccaagtcaa

SEQ ID NO: 27490 - DNA, 19 bp, Homo sapiens
  siRNA target sequence for GASC1 (NM_015061.1,2990-3008).
ggcccgatggcaaactcta

SEQ ID NO: 27491 - DNA, 19 bp, Homo sapiens
  siRNA target sequence for GASC1 (NM_015061.1,2991-3009).
gcccgatggcaaactctat

SEQ ID NO: 27492 - DNA, 19 bp, Homo sapiens
  siRNA target sequence for GASC1 (NM_015061.1,3000-3018).
caaactctatggagcaaaa

SEQ ID NO: 27493 - DNA, 19 bp, Homo sapiens
  siRNA target sequence for GASC1 (NM_015061.1,3029-3047).
caaatattgcccacatgta

SEQ ID NO: 27494 - DNA, 19 bp, Homo sapiens
  siRNA target sequence for GASC1 (NM_015061.1,3064-3082).
gatggatcccagatagcaa

SEQ ID NO: 27495 - DNA, 19 bp, Homo sapiens
  siRNA target sequence for GASC1 (NM_015061.1,3096-3114).
catctacactttagatgaa

SEQ ID NO: 27496 - DNA, 19 bp, Homo sapiens
  siRNA target sequence for GASC1 (NM_015061.1,3102-3120).
cactttagatgaagagtta

SEQ ID NO: 27497 - DNA, 19 bp, Homo sapiens
  siRNA target sequence for GASC1 (NM_015061.1,3117-3135).
gttacccaagagagtgaaa

SEQ ID NO: 27498 - DNA, 19 bp, Homo sapiens
  siRNA target sequence for GASC1 (NM_015061.1,3130-3148).
gtgaaagctcgattttcca

SEQ ID NO: 27499 - DNA, 19 bp, Homo sapiens
  siRNA target sequence for GASC1 (NM_015061.1,3153-3171).
ctctgacatgcgatttgaa

SEQ ID NO: 27500 - DNA, 19 bp, Homo sapiens
  siRNA target sequence for GASC1 (NM_015061.1,3163-3181).
cgatttgaagacacgtttt

SEQ ID NO: 27501 - DNA, 19 bp, Homo sapiens
  siRNA target sequence for GASC1 (NM_015061.1,3230-3248).
gctccaggtttaagaatga

SEQ ID NO: 27502 - DNA, 19 bp, Homo sapiens
  siRNA target sequence for GASC1 (NM_015061.1,3234-3252).
caggtttaagaatgaatat

SEQ ID NO: 27503 - DNA, 19 bp, Homo sapiens
  siRNA target sequence for GASC1 (NM_015061.1,3261-3279).
ccctgtataccgcactttt

SEQ ID NO: 27504 - DNA, 19 bp, Homo sapiens
  siRNA target sequence for GASC1 (NM_015061.1,3262-3280).
cctgtataccgcacttttt

SEQ ID NO: 27505 - DNA, 19 bp, Homo sapiens
  siRNA target sequence for GASC1 (NM_015061.1,3263-3281).
ctgtataccgcactttttt

SEQ ID NO: 27506 - DNA, 19 bp, Homo sapiens
  siRNA target sequence for GASC1 (NM_015061.1,3265-3283).
gtataccgcacttttttga

SEQ ID NO: 27507 - DNA, 19 bp, Homo sapiens
  siRNA target sequence for GCM1 (NM_003643.1,259-277).
gggatattaatgatgtgaa

SEQ ID NO: 27508 - DNA, 19 bp, Homo sapiens
  siRNA target sequence for GCM1 (NM_003643.1,328-346).
cctatgccaaacacatcta

SEQ ID NO: 27509 - DNA, 19 bp, Homo sapiens
  siRNA target sequence for GCM1 (NM_003643.1,347-365).
cagctcggaggacaagaat

SEQ ID NO: 27510 - DNA, 19 bp, Homo sapiens
  siRNA target sequence for GCM1 (NM_003643.1,625-643).
ggcacgacggacgctttat

SEQ ID NO: 27511 - DNA, 19 bp, Homo sapiens
  siRNA target sequence for GCM1 (NM_003643.1,629-647).
cgacggacgctttatattt

SEQ ID NO: 27512 - DNA, 19 bp, Homo sapiens
  siRNA target sequence for GCM1 (NM_003643.1,630-648).
gacggacgctttatatttt

SEQ ID NO: 27513 - DNA, 19 bp, Homo sapiens
  siRNA target sequence for GCM1 (NM_003643.1,655-673).
caaagggagagcatgatca

SEQ ID NO: 27514 - DNA, 19 bp, Homo sapiens
  siRNA target sequence for GCM1 (NM_003643.1,805-823).
gtcaggggagtttaccttt

SEQ ID NO: 27515 - DNA, 19 bp, Homo sapiens
  siRNA target sequence for GCM1 (NM_003643.1,849-867).
caattgcctggtagttaca

SEQ ID NO: 27516 - DNA, 19 bp, Homo sapiens
  siRNA target sequence for GCM1 (NM_003643.1,868-886).
gtggacatttaatagctaa

SEQ ID NO: 27517 - DNA, 19 bp, Homo sapiens
  siRNA target sequence for GCM1 (NM_003643.1,986-1004).
ccccatgaagctctatgaa

SEQ ID NO: 27518 - DNA, 19 bp, Homo sapiens
  siRNA target sequence for GCM1 (NM_003643.1,987-1005).
cccatgaagctctatgaaa

SEQ ID NO: 27519 - DNA, 19 bp, Homo sapiens
  siRNA target sequence for GCM1 (NM_003643.1,1067-1085).
cggagtctactctgatcat

SEQ ID NO: 27520 - DNA, 19 bp, Homo sapiens
  siRNA target sequence for GCM1 (NM_003643.1,1078-1096).
ctgatcatggcgatctaca

SEQ ID NO: 27521 - DNA, 19 bp, Homo sapiens
  siRNA target sequence for GCM1 (NM_003643.1,1092-1110).
ctacaagcgtggagtaaaa

SEQ ID NO: 27522 - DNA, 19 bp, Homo sapiens
  siRNA target sequence for GCM1 (NM_003643.1,1131-1149).
catcttgctgacaactgtt

SEQ ID NO: 27523 - DNA, 19 bp, Homo sapiens
  siRNA target sequence for GCM1 (NM_003643.1,1145-1163).
ctgttattccaattatcct

SEQ ID NO: 27524 - DNA, 19 bp, Homo sapiens
  siRNA target sequence for GCM1 (NM_003643.1,1288-1306).
cagcgggtaatctttatga

SEQ ID NO: 27525 - DNA, 19 bp, Homo sapiens
  siRNA target sequence for GCM1 (NM_003643.1,1294-1312).
gtaatctttatgaagagaa

SEQ ID NO: 27526 - DNA, 19 bp, Homo sapiens
  siRNA target sequence for GCM1 (NM_003643.1,1340-1358).
ccagtctcctgcataccat

SEQ ID NO: 27527 - DNA, 19 bp, Homo sapiens
  siRNA target sequence for GCM1 (NM_003643.1,1341-1359).
cagtctcctgcataccatt

SEQ ID NO: 27528 - DNA, 19 bp, Homo sapiens
  siRNA target sequence for GCM1 (NM_003643.1,1422-1440).
ccaagcaagagcagcaaat

SEQ ID NO: 27529 - DNA, 19 bp, Homo sapiens
  siRNA target sequence for GCM1 (NM_003643.1,1430-1448).
gagcagcaaatgggatttt

SEQ ID NO: 27530 - DNA, 19 bp, Homo sapiens
  siRNA target sequence for GCM1 (NM_003643.1,1432-1450).
gcagcaaatgggattttga

SEQ ID NO: 27531 - DNA, 19 bp, Homo sapiens
  siRNA target sequence for GCM2 (NM_004752.1,202-220).
ggctatgtgcgcttcatct

SEQ ID NO: 27532 - DNA, 19 bp, Homo sapiens
  siRNA target sequence for GCM2 (NM_004752.1,203-221).
gctatgtgcgcttcatcta

SEQ ID NO: 27533 - DNA, 19 bp, Homo sapiens
  siRNA target sequence for GCM2 (NM_004752.1,417-435).
gaaggcatgccctaactgt

SEQ ID NO: 27534 - DNA, 19 bp, Homo sapiens
  siRNA target sequence for GCM2 (NM_004752.1,421-439).
gcatgccctaactgtcatt

SEQ ID NO: 27535 - DNA, 19 bp, Homo sapiens
  siRNA target sequence for GCM2 (NM_004752.1,473-491).
gcggataccccgtaaccaa

SEQ ID NO: 27536 - DNA, 19 bp, Homo sapiens
  siRNA target sequence for GCM2 (NM_004752.1,505-523).
gatggcaacgcgatctttt

SEQ ID NO: 27537 - DNA, 19 bp, Homo sapiens
  siRNA target sequence for GCM2 (NM_004752.1,509-527).
gcaacgcgatcttttttca

SEQ ID NO: 27538 - DNA, 19 bp, Homo sapiens
  siRNA target sequence for GCM2 (NM_004752.1,528-546).
ggccaagggagttcatgat

SEQ ID NO: 27539 - DNA, 19 bp, Homo sapiens
  siRNA target sequence for GCM2 (NM_004752.1,531-549).
caagggagttcatgatcat

SEQ ID NO: 27540 - DNA, 19 bp, Homo sapiens
  siRNA target sequence for GCM2 (NM_004752.1,590-608).
gcgccatcaagagacaaat

SEQ ID NO: 27541 - DNA, 19 bp, Homo sapiens
  siRNA target sequence for GCM2 (NM_004752.1,602-620).
gacaaatggcctctttcta

SEQ ID NO: 27542 - DNA, 19 bp, Homo sapiens
  siRNA target sequence for GCM2 (NM_004752.1,903-921).
ggcaaaccctggttataca

SEQ ID NO: 27543 - DNA, 19 bp, Homo sapiens
  siRNA target sequence for GCM2 (NM_004752.1,904-922).
gcaaaccctggttatacaa

SEQ ID NO: 27544 - DNA, 19 bp, Homo sapiens
  siRNA target sequence for GCM2 (NM_004752.1,909-927).
ccctggttatacaaattca

SEQ ID NO: 27545 - DNA, 19 bp, Homo sapiens
  siRNA target sequence for GCM2 (NM_004752.1,910-928).
cctggttatacaaattcaa

SEQ ID NO: 27546 - DNA, 19 bp, Homo sapiens
  siRNA target sequence for GCM2 (NM_004752.1,930-948).
cccatatcccaccctttat

SEQ ID NO: 27547 - DNA, 19 bp, Homo sapiens
  siRNA target sequence for GCM2 (NM_004752.1,937-955).
cccaccctttataaggatt

SEQ ID NO: 27548 - DNA, 19 bp, Homo sapiens
  siRNA target sequence for GCM2 (NM_004752.1,956-974).
ccaccagtatccctaatga

SEQ ID NO: 27549 - DNA, 19 bp, Homo sapiens
  siRNA target sequence for GCM2 (NM_004752.1,988-1006).
catctgaacacactacaat

SEQ ID NO: 27550 - DNA, 19 bp, Homo sapiens
  siRNA target sequence for GCM2 (NM_004752.1,993-1011).
gaacacactacaatgtaat

SEQ ID NO: 27551 - DNA, 19 bp, Homo sapiens
  siRNA target sequence for GCM2 (NM_004752.1,1003-1021).
caatgtaatgtcaattcat

SEQ ID NO: 27552 - DNA, 19 bp, Homo sapiens
  siRNA target sequence for GCM2 (NM_004752.1,1026-1044).
cagctatgagagaagcttt

SEQ ID NO: 27553 - DNA, 19 bp, Homo sapiens
  siRNA target sequence for GCM2 (NM_004752.1,1109-1127).
ctaaccatgggcagtttca

SEQ ID NO: 27554 - DNA, 19 bp, Homo sapiens
  siRNA target sequence for GCM2 (NM_004752.1,1134-1152).
ggccactcgcccttattat

SEQ ID NO: 27555 - DNA, 19 bp, Homo sapiens
  siRNA target sequence for GCM2 (NM_004752.1,1135-1153).
gccactcgcccttattata

SEQ ID NO: 27556 - DNA, 19 bp, Homo sapiens
  siRNA target sequence for GCM2 (NM_004752.1,1136-1154).
ccactcgcccttattataa

SEQ ID NO: 27557 - DNA, 19 bp, Homo sapiens
  siRNA target sequence for GCM2 (NM_004752.1,1218-1236).
gatcaccaccaccactaaa

SEQ ID NO: 27558 - DNA, 19 bp, Homo sapiens
  siRNA target sequence for GCM2 (NM_004752.1,1255-1273).
cagccccctgctatgaaat

SEQ ID NO: 27559 - DNA, 19 bp, Homo sapiens
  siRNA target sequence for GCM2 (NM_004752.1,1258-1276).
ccccctgctatgaaataca

SEQ ID NO: 27560 - DNA, 19 bp, Homo sapiens
  siRNA target sequence for GCM2 (NM_004752.1,1260-1278).
ccctgctatgaaatacagt

SEQ ID NO: 27561 - DNA, 19 bp, Homo sapiens
  siRNA target sequence for GCM2 (NM_004752.1,1301-1319).
gcctttcgagctgtaacta

SEQ ID NO: 27562 - DNA, 19 bp, Homo sapiens
  siRNA target sequence for GCM2 (NM_004752.1,1302-1320).
cctttcgagctgtaactat

SEQ ID NO: 27563 - DNA, 19 bp, Homo sapiens
  siRNA target sequence for GCM2 (NM_004752.1,1402-1420).
gggccacctcctatgaaaa

SEQ ID NO: 27564 - DNA, 19 bp, Homo sapiens
  siRNA target sequence for GCM2 (NM_004752.1,1528-1546).
ggctccgcagtcagttact

SEQ ID NO: 27565 - DNA, 19 bp, Homo sapiens
  siRNA target sequence for GCM2 (NM_004752.1,1530-1548).
ctccgcagtcagttactca

SEQ ID NO: 27566 - DNA, 19 bp, Homo sapiens
  siRNA target sequence for GCM2 (NM_004752.1,1551-1569).
cagagtgggtcccttcttt

SEQ ID NO: 27567 - DNA, 19 bp, Homo sapiens
  siRNA target sequence for GCM2 (NM_004752.1,1555-1573).
gtgggtcccttctttacct

SEQ ID NO: 27568 - DNA, 19 bp, Homo sapiens
  siRNA target sequence for GCM2 (NM_004752.1,1572-1590).
ctacaacaatgaggatttt

SEQ ID NO: 27569 - DNA, 19 bp, Homo sapiens
  siRNA target sequence for GFI1 (NM_005263.1,274-292).
cgctcatttctcgtcaaaa

SEQ ID NO: 27570 - DNA, 19 bp, Homo sapiens
  siRNA target sequence for GFI1 (NM_005263.1,278-296).
catttctcgtcaaaagcaa

SEQ ID NO: 27571 - DNA, 19 bp, Homo sapiens
  siRNA target sequence for GFI1 (NM_005263.1,562-580).
ccagcctcggagaagtcaa

SEQ ID NO: 27572 - DNA, 19 bp, Homo sapiens
  siRNA target sequence for GFI1 (NM_005263.1,563-581).
cagcctcggagaagtcaat

SEQ ID NO: 27573 - DNA, 19 bp, Homo sapiens
  siRNA target sequence for GFI1 (NM_005263.1,565-583).
gcctcggagaagtcaatgt

SEQ ID NO: 27574 - DNA, 19 bp, Homo sapiens
  siRNA target sequence for GFI1 (NM_005263.1,619-637).
cctttcaaaccgtactcat

SEQ ID NO: 27575 - DNA, 19 bp, Homo sapiens
  siRNA target sequence for GFI1 (NM_005263.1,1189-1207).
caggaacggagctttgact

SEQ ID NO: 27576 - DNA, 19 bp, Homo sapiens
  siRNA target sequence for GFI1 (NM_005263.1,1195-1213).
cggagctttgactgtaaga

SEQ ID NO: 27577 - DNA, 19 bp, Homo sapiens
  siRNA target sequence for GFI1 (NM_005263.1,1196-1214).
ggagctttgactgtaagat

SEQ ID NO: 27578 - DNA, 19 bp, Homo sapiens
  siRNA target sequence for GIOT-1 (NM_153257.1,505-523).
gacaagaggagggttattt

SEQ ID NO: 27579 - DNA, 19 bp, Homo sapiens
  siRNA target sequence for GIOT-1 (NM_153257.1,515-533).
gggttattttagacaactt

SEQ ID NO: 27580 - DNA, 19 bp, Homo sapiens
  siRNA target sequence for GIOT-1 (NM_153257.1,526-544).
gacaacttatgattaacca

SEQ ID NO: 27581 - DNA, 19 bp, Homo sapiens
  siRNA target sequence for GIOT-1 (NM_153257.1,710-728).
cacagaaattgttaataca

SEQ ID NO: 27582 - DNA, 19 bp, Homo sapiens
  siRNA target sequence for GIOT-1 (NM_153257.1,812-830).
ctcacaacttaaacatcta

SEQ ID NO: 27583 - DNA, 19 bp, Homo sapiens
  siRNA target sequence for GIOT-1 (NM_153257.1,816-834).
caacttaaacatctaagaa

SEQ ID NO: 27584 - DNA, 19 bp, Homo sapiens
  siRNA target sequence for GIOT-1 (NM_153257.1,1139-1157).
gcatcgctcacatcttact

SEQ ID NO: 27585 - DNA, 19 bp, Homo sapiens
  siRNA target sequence for GIOT-1 (NM_153257.1,1140-1158).
catcgctcacatcttacta

SEQ ID NO: 27586 - DNA, 19 bp, Homo sapiens
  siRNA target sequence for GIOT-1 (NM_153257.1,1394-1412).
gtgttcacacctcaaaaga

SEQ ID NO: 27587 - DNA, 19 bp, Homo sapiens
  siRNA target sequence for GIOT-1 (NM_153257.1,1625-1643).
ggcgtttaatcatagatta

SEQ ID NO: 27588 - DNA, 19 bp, Homo sapiens
  siRNA target sequence for GIOT-1 (NM_153257.1,1627-1645).
cgtttaatcatagattaca

SEQ ID NO: 27589 - DNA, 19 bp, Homo sapiens
  siRNA target sequence for GIOT-1 (NM_153257.1,1635-1653).
catagattacaacttaact

SEQ ID NO: 27590 - DNA, 19 bp, Homo sapiens
  siRNA target sequence for GIT1 (NM_014030.1,562-580).
ccgagctgcttgtagtgta

SEQ ID NO: 27591 - DNA, 19 bp, Homo sapiens
  siRNA target sequence for GIT1 (NM_014030.1,563-581).
cgagctgcttgtagtgtat

SEQ ID NO: 27592 - DNA, 19 bp, Homo sapiens
  siRNA target sequence for GIT1 (NM_014030.1,612-630).
ggccgcacacccattgact

SEQ ID NO: 27593 - DNA, 19 bp, Homo sapiens
  siRNA target sequence for GIT1 (NM_014030.1,668-686).
gctggttgagtgccaatat

SEQ ID NO: 27594 - DNA, 19 bp, Homo sapiens
  siRNA target sequence for GIT1 (NM_014030.1,721-739).
gacgcaagccggatcacaa

SEQ ID NO: 27595 - DNA, 19 bp, Homo sapiens
  siRNA target sequence for GIT1 (NM_014030.1,725-743).
caagccggatcacaagaat

SEQ ID NO: 27596 - DNA, 19 bp, Homo sapiens
  siRNA target sequence for GIT1 (NM_014030.1,767-785).
ggctgacagccttgactta

SEQ ID NO: 27597 - DNA, 19 bp, Homo sapiens
  siRNA target sequence for GIT1 (NM_014030.1,768-786).
gctgacagccttgacttat

SEQ ID NO: 27598 - DNA, 19 bp, Homo sapiens
  siRNA target sequence for GIT1 (NM_014030.1,872-890).
ggtggatcgaagagaaaat

SEQ ID NO: 27599 - DNA, 19 bp, Homo sapiens
  siRNA target sequence for GIT1 (NM_014030.1,960-978).
cctgttaacccggaatact

SEQ ID NO: 27600 - DNA, 19 bp, Homo sapiens
  siRNA target sequence for GIT1 (NM_014030.1,988-1006).
ggaatcaggggcgacaaaa

SEQ ID NO: 27601 - DNA, 19 bp, Homo sapiens
  siRNA target sequence for GIT1 (NM_014030.1,1016-1034).
ctttaatgcccgagagttt

SEQ ID NO: 27602 - DNA, 19 bp, Homo sapiens
  siRNA target sequence for GIT1 (NM_014030.1,1039-1057).
ccttgatcatcgacattct

SEQ ID NO: 27603 - DNA, 19 bp, Homo sapiens
  siRNA target sequence for GIT1 (NM_014030.1,1634-1652).
ggacgacgccatctattca

SEQ ID NO: 27604 - DNA, 19 bp, Homo sapiens
  siRNA target sequence for GIT1 (NM_014030.1,1758-1776).
cgccacacgagcaagcttt

SEQ ID NO: 27605 - DNA, 19 bp, Homo sapiens
  siRNA target sequence for GIT1 (NM_014030.1,1795-1813).
ccgacagtgactatgagaa

SEQ ID NO: 27606 - DNA, 19 bp, Homo sapiens
  siRNA target sequence for GIT1 (NM_014030.1,1941-1959).
gaggatgtcatcttgaaga

SEQ ID NO: 27607 - DNA, 19 bp, Homo sapiens
  siRNA target sequence for GIT2 (NM_014776.2,257-275).
gatggttgagaccttgtat

SEQ ID NO: 27608 - DNA, 19 bp, Homo sapiens
  siRNA target sequence for GIT2 (NM_014776.2,292-310).
ctatatgggagcattcttt

SEQ ID NO: 27609 - DNA, 19 bp, Homo sapiens
  siRNA target sequence for GIT2 (NM_014776.2,312-330).
ctggaccctgcgtctatta

SEQ ID NO: 27610 - DNA, 19 bp, Homo sapiens
  siRNA target sequence for GIT2 (NM_014776.2,317-335).
ccctgcgtctattatgagt

SEQ ID NO: 27611 - DNA, 19 bp, Homo sapiens
  siRNA target sequence for GIT2 (NM_014776.2,332-350).
gagtggaagacgtaaagct

SEQ ID NO: 27612 - DNA, 19 bp, Homo sapiens
  siRNA target sequence for GIT2 (NM_014776.2,334-352).
gtggaagacgtaaagctaa

SEQ ID NO: 27613 - DNA, 19 bp, Homo sapiens
  siRNA target sequence for GIT2 (NM_014776.2,349-367).
ctaatccacaggataaagt

SEQ ID NO: 27614 - DNA, 19 bp, Homo sapiens
  siRNA target sequence for GIT2 (NM_014776.2,372-390).
cccaataaagcggaattca

SEQ ID NO: 27615 - DNA, 19 bp, Homo sapiens
  siRNA target sequence for GIT2 (NM_014776.2,373-391).
ccaataaagcggaattcat

SEQ ID NO: 27616 - DNA, 19 bp, Homo sapiens
  siRNA target sequence for GIT2 (NM_014776.2,436-454).
gccgggatgacgatagtgt

SEQ ID NO: 27617 - DNA, 19 bp, Homo sapiens
  siRNA target sequence for GIT2 (NM_014776.2,537-555).
ggagcacaagccaacttct

SEQ ID NO: 27618 - DNA, 19 bp, Homo sapiens
  siRNA target sequence for GIT2 (NM_014776.2,538-556).
gagcacaagccaacttctt

SEQ ID NO: 27619 - DNA, 19 bp, Homo sapiens
  siRNA target sequence for GIT2 (NM_014776.2,541-559).
cacaagccaacttctttca

SEQ ID NO: 27620 - DNA, 19 bp, Homo sapiens
  siRNA target sequence for GIT2 (NM_014776.2,596-614).
caaagcagggcagatttta

SEQ ID NO: 27621 - DNA, 19 bp, Homo sapiens
  siRNA target sequence for GIT2 (NM_014776.2,659-677).
ggattctagtgggaaaact

SEQ ID NO: 27622 - DNA, 19 bp, Homo sapiens
  siRNA target sequence for GIT2 (NM_014776.2,669-687).
gggaaaactcccgttgatt

SEQ ID NO: 27623 - DNA, 19 bp, Homo sapiens
  siRNA target sequence for GIT2 (NM_014776.2,670-688).
ggaaaactcccgttgatta

SEQ ID NO: 27624 - DNA, 19 bp, Homo sapiens
  siRNA target sequence for GIT2 (NM_014776.2,671-689).
gaaaactcccgttgattat

SEQ ID NO: 27625 - DNA, 19 bp, Homo sapiens
  siRNA target sequence for GIT2 (NM_014776.2,718-736).
cagagcgcctcgtggaaat

SEQ ID NO: 27626 - DNA, 19 bp, Homo sapiens
  siRNA target sequence for GIT2 (NM_014776.2,752-770).
ggacagactagccttctat

SEQ ID NO: 27627 - DNA, 19 bp, Homo sapiens
  siRNA target sequence for GIT2 (NM_014776.2,848-866).
gtctgaattggcaaaagct

SEQ ID NO: 27628 - DNA, 19 bp, Homo sapiens
  siRNA target sequence for GIT2 (NM_014776.2,964-982).
ggcttgccacgcaaaacca

SEQ ID NO: 27629 - DNA, 19 bp, Homo sapiens
  siRNA target sequence for GIT2 (NM_014776.2,1026-1044).
gtcaatcctgagtactcat

SEQ ID NO: 27630 - DNA, 19 bp, Homo sapiens
  siRNA target sequence for GIT2 (NM_014776.2,1037-1055).
gtactcatcaacacgaaat

SEQ ID NO: 27631 - DNA, 19 bp, Homo sapiens
  siRNA target sequence for GIT2 (NM_014776.2,1078-1096).
ggttcaacgcccatgagtt

SEQ ID NO: 27632 - DNA, 19 bp, Homo sapiens
  siRNA target sequence for GIT2 (NM_014776.2,1079-1097).
gttcaacgcccatgagttt

SEQ ID NO: 27633 - DNA, 19 bp, Homo sapiens
  siRNA target sequence for GIT2 (NM_014776.2,1150-1168).
gttctctctcgggttcaaa

SEQ ID NO: 27634 - DNA, 19 bp, Homo sapiens
  siRNA target sequence for GIT2 (NM_014776.2,1155-1173).
ctctcgggttcaaaagaca

SEQ ID NO: 27635 - DNA, 19 bp, Homo sapiens
  siRNA target sequence for GIT2 (NM_014776.2,1304-1322).
ccggcagaagcttcaaaca

SEQ ID NO: 27636 - DNA, 19 bp, Homo sapiens
  siRNA target sequence for GIT2 (NM_014776.2,1323-1341).
ctccagagtgaaaattcga

SEQ ID NO: 27637 - DNA, 19 bp, Homo sapiens
  siRNA target sequence for GIT2 (NM_014776.2,1357-1375).
ccacaaccaatgtatatca

SEQ ID NO: 27638 - DNA, 19 bp, Homo sapiens
  siRNA target sequence for GIT2 (NM_014776.2,1408-1426).
ccaaccactcttccttaaa

SEQ ID NO: 27639 - DNA, 19 bp, Homo sapiens
  siRNA target sequence for GIT2 (NM_014776.2,1412-1430).
ccactcttccttaaagaga

SEQ ID NO: 27640 - DNA, 19 bp, Homo sapiens
  siRNA target sequence for GIT2 (NM_014776.2,1472-1490).
gaccggatcaggtcagaaa

SEQ ID NO: 27641 - DNA, 19 bp, Homo sapiens
  siRNA target sequence for GIT2 (NM_014776.2,1476-1494).
ggatcaggtcagaaaccat

SEQ ID NO: 27642 - DNA, 19 bp, Homo sapiens
  siRNA target sequence for GIT2 (NM_014776.2,1653-1671).
cgaaagggacggcaaagaa

SEQ ID NO: 27643 - DNA, 19 bp, Homo sapiens
  siRNA target sequence for GIT2 (NM_014776.2,1856-1874).
gatacacgtagctgttaca

SEQ ID NO: 27644 - DNA, 19 bp, Homo sapiens
  siRNA target sequence for GIT2 (NM_014776.2,1882-1900).
cagcattattccccaaaaa

SEQ ID NO: 27645 - DNA, 19 bp, Homo sapiens
  siRNA target sequence for GIT2 (NM_014776.2,1919-1937).
gaggacttcccttcgttta

SEQ ID NO: 27646 - DNA, 19 bp, Homo sapiens
  siRNA target sequence for GIT2 (NM_057169.2,1313-1331).
gagcctagattcagattta

SEQ ID NO: 27647 - DNA, 19 bp, Homo sapiens
  siRNA target sequence for GIT2 (NM_057169.2,1316-1334).
cctagattcagatttatca

SEQ ID NO: 27648 - DNA, 19 bp, Homo sapiens
  siRNA target sequence for GIT2 (NM_057169.2,1342-1360).
cagtcactgtacaggaatt

SEQ ID NO: 27649 - DNA, 19 bp, Homo sapiens
  siRNA target sequence for GIT2 (NM_057169.2,1433-1451).
gagtgacgagctgagaatt

SEQ ID NO: 27650 - DNA, 19 bp, Homo sapiens
  siRNA target sequence for GIT2 (NM_057169.2,1435-1453).
gtgacgagctgagaattat

SEQ ID NO: 27651 - DNA, 19 bp, Homo sapiens
  siRNA target sequence for GLI (NM_005269.1,264-282).
caccgagggcccactcttt

SEQ ID NO: 27652 - DNA, 19 bp, Homo sapiens
  siRNA target sequence for GLI (NM_005269.1,268-286).
gagggcccactcttttctt

SEQ ID NO: 27653 - DNA, 19 bp, Homo sapiens
  siRNA target sequence for GLI (NM_005269.1,290-308).
cccggagtgcagtcaagtt

SEQ ID NO: 27654 - DNA, 19 bp, Homo sapiens
  siRNA target sequence for GLI (NM_005269.1,292-310).
cggagtgcagtcaagttga

SEQ ID NO: 27655 - DNA, 19 bp, Homo sapiens
  siRNA target sequence for GLI (NM_005269.1,488-506).
cccagatgaatcaccaaaa

SEQ ID NO: 27656 - DNA, 19 bp, Homo sapiens
  siRNA target sequence for GLI (NM_005269.1,762-780).
gcctgaatctgtgtatgaa

SEQ ID NO: 27657 - DNA, 19 bp, Homo sapiens
  siRNA target sequence for GLI (NM_005269.1,994-1012).
gaagggtgccggaagtcat

SEQ ID NO: 27658 - DNA, 19 bp, Homo sapiens
  siRNA target sequence for GLI (NM_005269.1,997-1015).
gggtgccggaagtcatact

SEQ ID NO: 27659 - DNA, 19 bp, Homo sapiens
  siRNA target sequence for GLI (NM_005269.1,999-1017).
gtgccggaagtcatactca

SEQ ID NO: 27660 - DNA, 19 bp, Homo sapiens
  siRNA target sequence for GLI (NM_005269.1,1010-1028).
catactcacgcctcgaaaa

SEQ ID NO: 27661 - DNA, 19 bp, Homo sapiens
  siRNA target sequence for GLI (NM_005269.1,1138-1156).
cggacccattccaatgaga

SEQ ID NO: 27662 - DNA, 19 bp, Homo sapiens
  siRNA target sequence for GLI (NM_005269.1,1149-1167).
caatgagaagccgtatgta

SEQ ID NO: 27663 - DNA, 19 bp, Homo sapiens
  siRNA target sequence for GLI (NM_005269.1,1182-1200).
ctgcaccaaacgctataca

SEQ ID NO: 27664 - DNA, 19 bp, Homo sapiens
  siRNA target sequence for GLI (NM_005269.1,1185-1203).
caccaaacgctatacagat

SEQ ID NO: 27665 - DNA, 19 bp, Homo sapiens
  siRNA target sequence for GLI (NM_005269.1,1205-1223).
ctagctcgctgcgaaaaca

SEQ ID NO: 27666 - DNA, 19 bp, Homo sapiens
  siRNA target sequence for GLI (NM_005269.1,1208-1226).
gctcgctgcgaaaacatgt

SEQ ID NO: 27667 - DNA, 19 bp, Homo sapiens
  siRNA target sequence for GLI (NM_005269.1,1211-1229).
cgctgcgaaaacatgtcaa

SEQ ID NO: 27668 - DNA, 19 bp, Homo sapiens
  siRNA target sequence for GLI (NM_005269.1,1287-1305).
gcctcgggcaccatccatt

SEQ ID NO: 27669 - DNA, 19 bp, Homo sapiens
  siRNA target sequence for GLI (NM_005269.1,1288-1306).
cctcgggcaccatccattt

SEQ ID NO: 27670 - DNA, 19 bp, Homo sapiens
  siRNA target sequence for GLI (NM_005269.1,1291-1309).
cgggcaccatccatttcta

SEQ ID NO: 27671 - DNA, 19 bp, Homo sapiens
  siRNA target sequence for GLI (NM_005269.1,1293-1311).
ggcaccatccatttctaca

SEQ ID NO: 27672 - DNA, 19 bp, Homo sapiens
  siRNA target sequence for GLI (NM_005269.1,1445-1463).
ggagtgcagccaatacaga

SEQ ID NO: 27673 - DNA, 19 bp, Homo sapiens
  siRNA target sequence for GLI (NM_005269.1,1521-1539).
ggacgagggaccttgcatt

SEQ ID NO: 27674 - DNA, 19 bp, Homo sapiens
  siRNA target sequence for GLI (NM_005269.1,1839-1857).
cctgcttcgggcaagatat

SEQ ID NO: 27675 - DNA, 19 bp, Homo sapiens
  siRNA target sequence for GLI (NM_005269.1,1842-1860).
gcttcgggcaagatatgct

SEQ ID NO: 27676 - DNA, 19 bp, Homo sapiens
  siRNA target sequence for GLI (NM_005269.1,1843-1861).
cttcgggcaagatatgctt

SEQ ID NO: 27677 - DNA, 19 bp, Homo sapiens
  siRNA target sequence for GLI (NM_005269.1,1949-1967).
ccgagtatccaggatacaa

SEQ ID NO: 27678 - DNA, 19 bp, Homo sapiens
  siRNA target sequence for GLI (NM_005269.1,2225-2243).
gtggtctgaacccctatat

SEQ ID NO: 27679 - DNA, 19 bp, Homo sapiens
  siRNA target sequence for GLI (NM_005269.1,2228-2246).
gtctgaacccctatatgga

SEQ ID NO: 27680 - DNA, 19 bp, Homo sapiens
  siRNA target sequence for GLI (NM_005269.1,2244-2262).
ggacttcccacctactgat

SEQ ID NO: 27681 - DNA, 19 bp, Homo sapiens
  siRNA target sequence for GLI (NM_005269.1,2398-2416).
gaccccacccaagaaacat

SEQ ID NO: 27682 - DNA, 19 bp, Homo sapiens
  siRNA target sequence for GLI (NM_005269.1,2761-2779).
gctcagcttgtgtgtaatt

SEQ ID NO: 27683 - DNA, 19 bp, Homo sapiens
  siRNA target sequence for GLI (NM_005269.1,2762-2780).
ctcagcttgtgtgtaatta

SEQ ID NO: 27684 - DNA, 19 bp, Homo sapiens
  siRNA target sequence for GLI (NM_005269.1,2850-2868).
ctaccagagtcccaagttt

SEQ ID NO: 27685 - DNA, 19 bp, Homo sapiens
  siRNA target sequence for GLI (NM_005269.1,2889-2907).
cccaagccgtgctaaagct

SEQ ID NO: 27686 - DNA, 19 bp, Homo sapiens
  siRNA target sequence for GLI (NM_005269.1,3163-3181).
cccgaaggacaggtatgta

SEQ ID NO: 27687 - DNA, 19 bp, Homo sapiens
  siRNA target sequence for GLI (NM_005269.1,3164-3182).
ccgaaggacaggtatgtaa

SEQ ID NO: 27688 - DNA, 19 bp, Homo sapiens
  siRNA target sequence for GLI (NM_005269.1,3333-3351).
gggcaacatgagtgtctta

SEQ ID NO: 27689 - DNA, 19 bp, Homo sapiens
  siRNA target sequence for GLI (NM_005269.1,3335-3353).
gcaacatgagtgtcttact

SEQ ID NO: 27690 - DNA, 19 bp, Homo sapiens
  siRNA target sequence for GLI4 (NM_138465.2,56-74).
cagccctaggggacattca

SEQ ID NO: 27691 - DNA, 19 bp, Homo sapiens
  siRNA target sequence for GLI4 (NM_138465.2,539-557).
ccgagctgggagtcaactt

SEQ ID NO: 27692 - DNA, 19 bp, Homo sapiens
  siRNA target sequence for GLI4 (NM_138465.2,617-635).
gcaagagtttcaagtataa

SEQ ID NO: 27693 - DNA, 19 bp, Homo sapiens
  siRNA target sequence for GMEB1 (NM_006582.2,256-274).
gtgcaacaaggtttgttta

SEQ ID NO: 27694 - DNA, 19 bp, Homo sapiens
  siRNA target sequence for GMEB1 (NM_006582.2,270-288).
gtttatcgatggacacttt

SEQ ID NO: 27695 - DNA, 19 bp, Homo sapiens
  siRNA target sequence for GMEB1 (NM_006582.2,375-393).
gattgatacaggcactata

SEQ ID NO: 27696 - DNA, 19 bp, Homo sapiens
  siRNA target sequence for GMEB1 (NM_006582.2,490-508).
gtgaagtgtgtcaagttca

SEQ ID NO: 27697 - DNA, 19 bp, Homo sapiens
  siRNA target sequence for GMEB1 (NM_006582.2,495-513).
gtgtgtcaagttcaatgat

SEQ ID NO: 27698 - DNA, 19 bp, Homo sapiens
  siRNA target sequence for GMEB1 (NM_006582.2,497-515).
gtgtcaagttcaatgatca

SEQ ID NO: 27699 - DNA, 19 bp, Homo sapiens
  siRNA target sequence for GMEB1 (NM_006582.2,524-542).
gccccaagcactttgttca

SEQ ID NO: 27700 - DNA, 19 bp, Homo sapiens
  siRNA target sequence for GMEB1 (NM_006582.2,615-633).
gatggactccggacagatt

SEQ ID NO: 27701 - DNA, 19 bp, Homo sapiens
  siRNA target sequence for GMEB1 (NM_006582.2,618-636).
ggactccggacagattgat

SEQ ID NO: 27702 - DNA, 19 bp, Homo sapiens
  siRNA target sequence for GMEB1 (NM_006582.2,619-637).
gactccggacagattgatt

SEQ ID NO: 27703 - DNA, 19 bp, Homo sapiens
  siRNA target sequence for GMEB1 (NM_006582.2,649-667).
gacaaagtttgctccaata

SEQ ID NO: 27704 - DNA, 19 bp, Homo sapiens
  siRNA target sequence for GMEB1 (NM_006582.2,898-916).
gaggacactttgatgttct

SEQ ID NO: 27705 - DNA, 19 bp, Homo sapiens
  siRNA target sequence for GMEB1 (NM_006582.2,912-930).
gttctggaaaggaatagct

SEQ ID NO: 27706 - DNA, 19 bp, Homo sapiens
  siRNA target sequence for GMEB1 (NM_006582.2,918-936).
gaaaggaatagctgatgta

SEQ ID NO: 27707 - DNA, 19 bp, Homo sapiens
  siRNA target sequence for GMEB1 (NM_006582.2,952-970).
gttgtctgcaatatacaga

SEQ ID NO: 27708 - DNA, 19 bp, Homo sapiens
  siRNA target sequence for GMEB1 (NM_006582.2,1085-1103).
cagtcaagaaggttttaga

SEQ ID NO: 27709 - DNA, 19 bp, Homo sapiens
  siRNA target sequence for GMEB1 (NM_006582.2,1200-1218).
ggatcacaggctgaaatct

SEQ ID NO: 27710 - DNA, 19 bp, Homo sapiens
  siRNA target sequence for GMEB1 (NM_006582.2,1371-1389).
cccagtgggtcagtcattt

SEQ ID NO: 27711 - DNA, 19 bp, Homo sapiens
  siRNA target sequence for GMEB1 (NM_006582.2,1372-1390).
ccagtgggtcagtcatttt

SEQ ID NO: 27712 - DNA, 19 bp, Homo sapiens
  siRNA target sequence for GMEB1 (NM_006582.2,1646-1664).
gcctaacctcggcaattca

SEQ ID NO: 27713 - DNA, 19 bp, Homo sapiens
  siRNA target sequence for GMEB1 (NM_006582.2,1692-1710).
gcagaccatcattgagatt

SEQ ID NO: 27714 - DNA, 19 bp, Homo sapiens
  siRNA target sequence for GMEB1 (NM_006582.2,1778-1796).
ggactgaggagaaagttgt

SEQ ID NO: 27715 - DNA, 19 bp, Homo sapiens
  siRNA target sequence for GMEB2 (NM_012384.2,612-630).
ggcgacctgacggaagata

SEQ ID NO: 27716 - DNA, 19 bp, Homo sapiens
  siRNA target sequence for GMEB2 (NM_012384.2,613-631).
gcgacctgacggaagataa

SEQ ID NO: 27717 - DNA, 19 bp, Homo sapiens
  siRNA target sequence for GMEB2 (NM_012384.2,615-633).
gacctgacggaagataaca

SEQ ID NO: 27718 - DNA, 19 bp, Homo sapiens
  siRNA target sequence for GMEB2 (NM_012384.2,808-826).
gtcccggcatcaatgtgaa

SEQ ID NO: 27719 - DNA, 19 bp, Homo sapiens
  siRNA target sequence for GMEB2 (NM_012384.2,810-828).
cccggcatcaatgtgaaat

SEQ ID NO: 27720 - DNA, 19 bp, Homo sapiens
  siRNA target sequence for GMEB2 (NM_012384.2,812-830).
cggcatcaatgtgaaatgt

SEQ ID NO: 27721 - DNA, 19 bp, Homo sapiens
  siRNA target sequence for GMEB2 (NM_012384.2,834-852).
cagtacgacgagcatgtaa

SEQ ID NO: 27722 - DNA, 19 bp, Homo sapiens
  siRNA target sequence for GMEB2 (NM_012384.2,955-973).
ccggggaactggacttcta

SEQ ID NO: 27723 - DNA, 19 bp, Homo sapiens
  siRNA target sequence for GMEB2 (NM_012384.2,1001-1019).
ctgccgcagcacaaagatt

SEQ ID NO: 27724 - DNA, 19 bp, Homo sapiens
  siRNA target sequence for GMEB2 (NM_012384.2,1003-1021).
gccgcagcacaaagattga

SEQ ID NO: 27725 - DNA, 19 bp, Homo sapiens
  siRNA target sequence for GMEB2 (NM_012384.2,1054-1072).
ccacgtcggccgagtacat

SEQ ID NO: 27726 - DNA, 19 bp, Homo sapiens
  siRNA target sequence for GMEB2 (NM_012384.2,1055-1073).
cacgtcggccgagtacatt

SEQ ID NO: 27727 - DNA, 19 bp, Homo sapiens
  siRNA target sequence for GMEB2 (NM_012384.2,1113-1131).
gcgaccatcaccatagaga

SEQ ID NO: 27728 - DNA, 19 bp, Homo sapiens
  siRNA target sequence for GMEB2 (NM_012384.2,1663-1681).
gcgtgccccttggtaaagt

SEQ ID NO: 27729 - DNA, 19 bp, Homo sapiens
  siRNA target sequence for GMEB2 (NM_012384.2,1965-1983).
ggctccagcacaattgtga

SEQ ID NO: 27730 - DNA, 19 bp, Homo sapiens
  siRNA target sequence for GTF2F1 (NM_002096.1,192-210).
gccctagcagccagaatgt

SEQ ID NO: 27731 - DNA, 19 bp, Homo sapiens
  siRNA target sequence for GTF2F1 (NM_002096.1,194-212).
cctagcagccagaatgtca

SEQ ID NO: 27732 - DNA, 19 bp, Homo sapiens
  siRNA target sequence for GTF2F1 (NM_002096.1,201-219).
gccagaatgtcactgaata

SEQ ID NO: 27733 - DNA, 19 bp, Homo sapiens
  siRNA target sequence for GTF2F1 (NM_002096.1,223-241).
cgttcgagttcctaagaat

SEQ ID NO: 27734 - DNA, 19 bp, Homo sapiens
  siRNA target sequence for GTF2F1 (NM_002096.1,224-242).
gttcgagttcctaagaata

SEQ ID NO: 27735 - DNA, 19 bp, Homo sapiens
  siRNA target sequence for GTF2F1 (NM_002096.1,227-245).
cgagttcctaagaatacaa

SEQ ID NO: 27736 - DNA, 19 bp, Homo sapiens
  siRNA target sequence for GTF2F1 (NM_002096.1,276-294).
cagccgacaaagtcaactt

SEQ ID NO: 27737 - DNA, 19 bp, Homo sapiens
  siRNA target sequence for GTF2F1 (NM_002096.1,478-496).
ccgggtcaacggcaaatca

SEQ ID NO: 27738 - DNA, 19 bp, Homo sapiens
  siRNA target sequence for GTF2F1 (NM_002096.1,601-619).
caactggtacaatttcaca

SEQ ID NO: 27739 - DNA, 19 bp, Homo sapiens
  siRNA target sequence for GTF2F1 (NM_002096.1,983-1001).
caagaggtggactacatgt

SEQ ID NO: 27740 - DNA, 19 bp, Homo sapiens
  siRNA target sequence for GTF2F1 (NM_002096.1,1587-1605).
ctaaggacctgctgaaaaa

SEQ ID NO: 27741 - DNA, 19 bp, Homo sapiens
  siRNA target sequence for GTF2F2 (NM_004128.1,175-193).
ggctagtcaaggttcctaa

SEQ ID NO: 27742 - DNA, 19 bp, Homo sapiens
  siRNA target sequence for GTF2F2 (NM_004128.1,293-311).
gaatgaggatcttgcaaat

SEQ ID NO: 27743 - DNA, 19 bp, Homo sapiens
  siRNA target sequence for GTF2F2 (NM_004128.1,385-403).
gaggacagacattaacagt

SEQ ID NO: 27744 - DNA, 19 bp, Homo sapiens
  siRNA target sequence for GTF2F2 (NM_004128.1,387-405).
ggacagacattaacagtat

SEQ ID NO: 27745 - DNA, 19 bp, Homo sapiens
  siRNA target sequence for GTF2F2 (NM_004128.1,390-408).
cagacattaacagtattta

SEQ ID NO: 27746 - DNA, 19 bp, Homo sapiens
  siRNA target sequence for GTF2F2 (NM_004128.1,468-486).
cgaccagctgccagtgaaa

SEQ ID NO: 27747 - DNA, 19 bp, Homo sapiens
  siRNA target sequence for GTF2F2 (NM_004128.1,475-493).
ctgccagtgaaaactacat

SEQ ID NO: 27748 - DNA, 19 bp, Homo sapiens
  siRNA target sequence for GTF2F2 (NM_004128.1,483-501).
gaaaactacatgcgattaa

SEQ ID NO: 27749 - DNA, 19 bp, Homo sapiens
  siRNA target sequence for GTF2F2 (NM_004128.1,561-579).
gttgtaacaaccaattaca

SEQ ID NO: 27750 - DNA, 19 bp, Homo sapiens
  siRNA target sequence for GTF2F2 (NM_004128.1,582-600).
cctgttgctaatcatcaat

SEQ ID NO: 27751 - DNA, 19 bp, Homo sapiens
  siRNA target sequence for GTF2F2 (NM_004128.1,583-601).
ctgttgctaatcatcaata

SEQ ID NO: 27752 - DNA, 19 bp, Homo sapiens
  siRNA target sequence for GTF2F2 (NM_004128.1,585-603).
gttgctaatcatcaataca

SEQ ID NO: 27753 - DNA, 19 bp, Homo sapiens
  siRNA target sequence for GTF2F2 (NM_004128.1,588-606).
gctaatcatcaatacaata

SEQ ID NO: 27754 - DNA, 19 bp, Homo sapiens
  siRNA target sequence for GTF2F2 (NM_004128.1,594-612).
catcaatacaatatcgaat

SEQ ID NO: 27755 - DNA, 19 bp, Homo sapiens
  siRNA target sequence for GTF2F2 (NM_004128.1,641-659).
gcgagctcgagctgataaa

SEQ ID NO: 27756 - DNA, 19 bp, Homo sapiens
  siRNA target sequence for GTF2F2 (NM_004128.1,643-661).
gagctcgagctgataaaca

SEQ ID NO: 27757 - DNA, 19 bp, Homo sapiens
  siRNA target sequence for GTF2F2 (NM_004128.1,646-664).
ctcgagctgataaacaaca

SEQ ID NO: 27758 - DNA, 19 bp, Homo sapiens
  siRNA target sequence for GTF2F2 (NM_004128.1,652-670).
ctgataaacaacatgtttt

SEQ ID NO: 27759 - DNA, 19 bp, Homo sapiens
  siRNA target sequence for GTF2F2 (NM_004128.1,693-711).
gagaaacatcaatactata

SEQ ID NO: 27760 - DNA, 19 bp, Homo sapiens
  siRNA target sequence for GTF2F2 (NM_004128.1,720-738).
gacttggtggacatcacaa

SEQ ID NO: 27761 - DNA, 19 bp, Homo sapiens
  siRNA target sequence for GTF2F2 (NM_004128.1,752-770).
gtacctgaaggaaatctta

SEQ ID NO: 27762 - DNA, 19 bp, Homo sapiens
  siRNA target sequence for GTF3A (NM_002097.1,238-256).
catcgccgacgcgttcatt

SEQ ID NO: 27763 - DNA, 19 bp, Homo sapiens
  siRNA target sequence for GTF3A (NM_002097.1,327-345).
ctgactgcagcgccaatta

SEQ ID NO: 27764 - DNA, 19 bp, Homo sapiens
  siRNA target sequence for GTF3A (NM_002097.1,329-347).
gactgcagcgccaattaca

SEQ ID NO: 27765 - DNA, 19 bp, Homo sapiens
  siRNA target sequence for GTF3A (NM_002097.1,505-523).
caatggctgtgatcaaaaa

SEQ ID NO: 27766 - DNA, 19 bp, Homo sapiens
  siRNA target sequence for GTF3A (NM_002097.1,515-533).
gatcaaaaattcaacacaa

SEQ ID NO: 27767 - DNA, 19 bp, Homo sapiens
  siRNA target sequence for GTF3A (NM_002097.1,663-681).
ccaatgaacctctattcaa

SEQ ID NO: 27768 - DNA, 19 bp, Homo sapiens
  siRNA target sequence for GTF3A (NM_002097.1,668-686).
gaacctctattcaagtgta

SEQ ID NO: 27769 - DNA, 19 bp, Homo sapiens
  siRNA target sequence for GTF3A (NM_002097.1,745-763).
ggcccacgagggctatgta

SEQ ID NO: 27770 - DNA, 19 bp, Homo sapiens
  siRNA target sequence for GTF3A (NM_002097.1,746-764).
gcccacgagggctatgtat

SEQ ID NO: 27771 - DNA, 19 bp, Homo sapiens
  siRNA target sequence for GTF3A (NM_002097.1,748-766).
ccacgagggctatgtatgt

SEQ ID NO: 27772 - DNA, 19 bp, Homo sapiens
  siRNA target sequence for GTF3A (NM_002097.1,751-769).
cgagggctatgtatgtcaa

SEQ ID NO: 27773 - DNA, 19 bp, Homo sapiens
  siRNA target sequence for GTF3A (NM_002097.1,752-770).
gagggctatgtatgtcaaa

SEQ ID NO: 27774 - DNA, 19 bp, Homo sapiens
  siRNA target sequence for GTF3A (NM_002097.1,754-772).
gggctatgtatgtcaaaaa

SEQ ID NO: 27775 - DNA, 19 bp, Homo sapiens
  siRNA target sequence for GTF3A (NM_002097.1,799-817).
gacggaacttctgaaacat

SEQ ID NO: 27776 - DNA, 19 bp, Homo sapiens
  siRNA target sequence for GTF3A (NM_002097.1,838-856).
ggaaatactatgtgaagta

SEQ ID NO: 27777 - DNA, 19 bp, Homo sapiens
  siRNA target sequence for GTF3A (NM_002097.1,854-872).
gtatgccggaaaacattta

SEQ ID NO: 27778 - DNA, 19 bp, Homo sapiens
  siRNA target sequence for GTF3A (NM_002097.1,949-967).
ctgtggaagaacctataca

SEQ ID NO: 27779 - DNA, 19 bp, Homo sapiens
  siRNA target sequence for GTF3A (NM_002097.1,960-978).
cctatacaactgtgtttaa

SEQ ID NO: 27780 - DNA, 19 bp, Homo sapiens
  siRNA target sequence for GTF3A (NM_002097.1,1075-1093).
cactaggcatgctgttgta

SEQ ID NO: 27781 - DNA, 19 bp, Homo sapiens
  siRNA target sequence for GTF3A (NM_002097.1,1077-1095).
ctaggcatgctgttgtaca

SEQ ID NO: 27782 - DNA, 19 bp, Homo sapiens
  siRNA target sequence for GTF3A (NM_002097.1,1080-1098).
ggcatgctgttgtacatga

SEQ ID NO: 27783 - DNA, 19 bp, Homo sapiens
  siRNA target sequence for GTF3A (NM_002097.1,1081-1099).
gcatgctgttgtacatgat

SEQ ID NO: 27784 - DNA, 19 bp, Homo sapiens
  siRNA target sequence for GTF3A (NM_002097.1,1094-1112).
catgatcctgacaagaaga

SEQ ID NO: 27785 - DNA, 19 bp, Homo sapiens
  siRNA target sequence for GTF3A (NM_002097.1,1160-1178).
ctctcatctcagtggatat

SEQ ID NO: 27786 - DNA, 19 bp, Homo sapiens
  siRNA target sequence for GTF3A (NM_002097.1,1162-1180).
ctcatctcagtggatatat

SEQ ID NO: 27787 - DNA, 19 bp, Homo sapiens
  siRNA target sequence for GTF3A (NM_002097.1,1196-1214).
caagggcaaggcttatctt

SEQ ID NO: 27788 - DNA, 19 bp, Homo sapiens
  siRNA target sequence for GTF3A (NM_002097.1,1201-1219).
gcaaggcttatctttgtgt

SEQ ID NO: 27789 - DNA, 19 bp, Homo sapiens
  siRNA target sequence for GTF3A (NM_002097.1,1261-1279).
ctcgacagttgcagtactt

SEQ ID NO: 27790 - DNA, 19 bp, Homo sapiens
  siRNA target sequence for GTF3C1 (NM_001520.1,273-291).
ccaggaccggtatgaagaa

SEQ ID NO: 27791 - DNA, 19 bp, Homo sapiens
  siRNA target sequence for GTF3C1 (NM_001520.1,274-292).
caggaccggtatgaagaaa

SEQ ID NO: 27792 - DNA, 19 bp, Homo sapiens
  siRNA target sequence for GTF3C1 (NM_001520.1,276-294).
ggaccggtatgaagaaatt

SEQ ID NO: 27793 - DNA, 19 bp, Homo sapiens
  siRNA target sequence for GTF3C1 (NM_001520.1,279-297).
ccggtatgaagaaattgat

SEQ ID NO: 27794 - DNA, 19 bp, Homo sapiens
  siRNA target sequence for GTF3C1 (NM_001520.1,280-298).
cggtatgaagaaattgatt

SEQ ID NO: 27795 - DNA, 19 bp, Homo sapiens
  siRNA target sequence for GTF3C1 (NM_001520.1,345-363).
ggatgtctaccccattcat

SEQ ID NO: 27796 - DNA, 19 bp, Homo sapiens
  siRNA target sequence for GTF3C1 (NM_001520.1,346-364).
gatgtctaccccattcata

SEQ ID NO: 27797 - DNA, 19 bp, Homo sapiens
  siRNA target sequence for GTF3C1 (NM_001520.1,349-367).
gtctaccccattcatatga

SEQ ID NO: 27798 - DNA, 19 bp, Homo sapiens
  siRNA target sequence for GTF3C1 (NM_001520.1,361-379).
catatgatcttagagaata

SEQ ID NO: 27799 - DNA, 19 bp, Homo sapiens
  siRNA target sequence for GTF3C1 (NM_001520.1,393-411).
gggctcatgccgctacttt

SEQ ID NO: 27800 - DNA, 19 bp, Homo sapiens
  siRNA target sequence for GTF3C1 (NM_001520.1,394-412).
ggctcatgccgctacttta

SEQ ID NO: 27801 - DNA, 19 bp, Homo sapiens
  siRNA target sequence for GTF3C1 (NM_001520.1,395-413).
gctcatgccgctactttaa

SEQ ID NO: 27802 - DNA, 19 bp, Homo sapiens
  siRNA target sequence for GTF3C1 (NM_001520.1,398-416).
catgccgctactttaagga

SEQ ID NO: 27803 - DNA, 19 bp, Homo sapiens
  siRNA target sequence for GTF3C1 (NM_001520.1,491-509).
ggtgggggaagaaactgat

SEQ ID NO: 27804 - DNA, 19 bp, Homo sapiens
  siRNA target sequence for GTF3C1 (NM_001520.1,494-512).
gggggaagaaactgatcat

SEQ ID NO: 27805 - DNA, 19 bp, Homo sapiens
  siRNA target sequence for GTF3C1 (NM_001520.1,679-697).
gggaagctgcactatcaca

SEQ ID NO: 27806 - DNA, 19 bp, Homo sapiens
  siRNA target sequence for GTF3C1 (NM_001520.1,687-705).
gcactatcacagaaaaatt

SEQ ID NO: 27807 - DNA, 19 bp, Homo sapiens
  siRNA target sequence for GTF3C1 (NM_001520.1,728-746).
caatgcagtcccatgtgat

SEQ ID NO: 27808 - DNA, 19 bp, Homo sapiens
  siRNA target sequence for GTF3C1 (NM_001520.1,786-804).
cctactgaaccggtttcat

SEQ ID NO: 27809 - DNA, 19 bp, Homo sapiens
  siRNA target sequence for GTF3C1 (NM_001520.1,863-881).
cacggactaaccacataga

SEQ ID NO: 27810 - DNA, 19 bp, Homo sapiens
  siRNA target sequence for GTF3C1 (NM_001520.1,865-883).
cggactaaccacatagaga

SEQ ID NO: 27811 - DNA, 19 bp, Homo sapiens
  siRNA target sequence for GTF3C1 (NM_001520.1,913-931).
ctgtgcgaaaggacgttta

SEQ ID NO: 27812 - DNA, 19 bp, Homo sapiens
  siRNA target sequence for GTF3C1 (NM_001520.1,935-953).
gtctgtaccagtatatgct

SEQ ID NO: 27813 - DNA, 19 bp, Homo sapiens
  siRNA target sequence for GTF3C1 (NM_001520.1,980-998).
ctcttcgcttgcaagagat

SEQ ID NO: 27814 - DNA, 19 bp, Homo sapiens
  siRNA target sequence for GTF3C1 (NM_001520.1,1006-1024).
gaatgtggaccttgtaaga

SEQ ID NO: 27815 - DNA, 19 bp, Homo sapiens
  siRNA target sequence for GTF3C1 (NM_001520.1,1010-1028).
gtggaccttgtaagacaaa

SEQ ID NO: 27816 - DNA, 19 bp, Homo sapiens
  siRNA target sequence for GTF3C1 (NM_001520.1,1012-1030).
ggaccttgtaagacaaaga

SEQ ID NO: 27817 - DNA, 19 bp, Homo sapiens
  siRNA target sequence for GTF3C1 (NM_001520.1,1271-1289).
gccgacttcttcaaagatt

SEQ ID NO: 27818 - DNA, 19 bp, Homo sapiens
  siRNA target sequence for GTF3C1 (NM_001520.1,1273-1291).
cgacttcttcaaagattca

SEQ ID NO: 27819 - DNA, 19 bp, Homo sapiens
  siRNA target sequence for GTF3C1 (NM_001520.1,1327-1345).
cagcgaaccaccaagtaca

SEQ ID NO: 27820 - DNA, 19 bp, Homo sapiens
  siRNA target sequence for GTF3C1 (NM_001520.1,1329-1347).
gcgaaccaccaagtacatt

SEQ ID NO: 27821 - DNA, 19 bp, Homo sapiens
  siRNA target sequence for GTF3C1 (NM_001520.1,1330-1348).
cgaaccaccaagtacattt

SEQ ID NO: 27822 - DNA, 19 bp, Homo sapiens
  siRNA target sequence for GTF3C1 (NM_001520.1,1375-1393).
ctaagccggcagtaccaaa

SEQ ID NO: 27823 - DNA, 19 bp, Homo sapiens
  siRNA target sequence for GTF3C1 (NM_001520.1,1611-1629).
gggtgggtggaaagttgta

SEQ ID NO: 27824 - DNA, 19 bp, Homo sapiens
  siRNA target sequence for GTF3C1 (NM_001520.1,1612-1630).
ggtgggtggaaagttgtaa

SEQ ID NO: 27825 - DNA, 19 bp, Homo sapiens
  siRNA target sequence for GTF3C1 (NM_001520.1,1616-1634).
ggtggaaagttgtaaacct

SEQ ID NO: 27826 - DNA, 19 bp, Homo sapiens
  siRNA target sequence for GTF3C1 (NM_001520.1,1707-1725).
cagggacagcctcttagat

SEQ ID NO: 27827 - DNA, 19 bp, Homo sapiens
  siRNA target sequence for GTF3C1 (NM_001520.1,1937-1955).
ccaatcttcgcttaatcga

SEQ ID NO: 27828 - DNA, 19 bp, Homo sapiens
  siRNA target sequence for GTF3C1 (NM_001520.1,1945-1963).
cgcttaatcgagagtttat

SEQ ID NO: 27829 - DNA, 19 bp, Homo sapiens
  siRNA target sequence for GTF3C1 (NM_001520.1,1958-1976).
gtttattcacgattcagaa

SEQ ID NO: 27830 - DNA, 19 bp, Homo sapiens
  siRNA target sequence for GTF3C1 (NM_001520.1,2082-2100).
gtatcggaccactgtcatt

SEQ ID NO: 27831 - DNA, 19 bp, Homo sapiens
  siRNA target sequence for GTF3C1 (NM_001520.1,2087-2105).
ggaccactgtcattcaaga

SEQ ID NO: 27832 - DNA, 19 bp, Homo sapiens
  siRNA target sequence for GTF3C1 (NM_001520.1,2088-2106).
gaccactgtcattcaagat

SEQ ID NO: 27833 - DNA, 19 bp, Homo sapiens
  siRNA target sequence for GTF3C1 (NM_001520.1,2193-2211).
cttccggatctccaattca

SEQ ID NO: 27834 - DNA, 19 bp, Homo sapiens
  siRNA target sequence for GTF3C1 (NM_001520.1,2375-2393).
gcataaccccgcttagaaa

SEQ ID NO: 27835 - DNA, 19 bp, Homo sapiens
  siRNA target sequence for GTF3C1 (NM_001520.1,2376-2394).
cataaccccgcttagaaat

SEQ ID NO: 27836 - DNA, 19 bp, Homo sapiens
  siRNA target sequence for GTF3C1 (NM_001520.1,2381-2399).
ccccgcttagaaattatca

SEQ ID NO: 27837 - DNA, 19 bp, Homo sapiens
  siRNA target sequence for GTF3C1 (NM_001520.1,2421-2439).
ggggcgttctctaggattt

SEQ ID NO: 27838 - DNA, 19 bp, Homo sapiens
  siRNA target sequence for GTF3C1 (NM_001520.1,2538-2556).
cagtgaacggagaacgata

SEQ ID NO: 27839 - DNA, 19 bp, Homo sapiens
  siRNA target sequence for GTF3C1 (NM_001520.1,2618-2636).
gctctgaagccccatctaa

SEQ ID NO: 27840 - DNA, 19 bp, Homo sapiens
  siRNA target sequence for GTF3C1 (NM_001520.1,2619-2637).
ctctgaagccccatctaaa

SEQ ID NO: 27841 - DNA, 19 bp, Homo sapiens
  siRNA target sequence for GTF3C1 (NM_001520.1,2681-2699).
ccacggagacagtgtatgt

SEQ ID NO: 27842 - DNA, 19 bp, Homo sapiens
  siRNA target sequence for GTF3C1 (NM_001520.1,2917-2935).
cagcagcttctgtacaaga

SEQ ID NO: 27843 - DNA, 19 bp, Homo sapiens
  siRNA target sequence for GTF3C1 (NM_001520.1,2931-2949).
caagaggcgttacattttt

SEQ ID NO: 27844 - DNA, 19 bp, Homo sapiens
  siRNA target sequence for GTF3C1 (NM_001520.1,3002-3020).
gtcccacggaaaagtttca

SEQ ID NO: 27845 - DNA, 19 bp, Homo sapiens
  siRNA target sequence for GTF3C1 (NM_001520.1,3572-3590).
gcaacagcaggttgaatat

SEQ ID NO: 27846 - DNA, 19 bp, Homo sapiens
  siRNA target sequence for GTF3C1 (NM_001520.1,3573-3591).
caacagcaggttgaatatt

SEQ ID NO: 27847 - DNA, 19 bp, Homo sapiens
  siRNA target sequence for GTF3C1 (NM_001520.1,3788-3806).
ggctgcgctaccatgatga

SEQ ID NO: 27848 - DNA, 19 bp, Homo sapiens
  siRNA target sequence for GTF3C1 (NM_001520.1,3943-3961).
caggtggtacgggacattt

SEQ ID NO: 27849 - DNA, 19 bp, Homo sapiens
  siRNA target sequence for GTF3C1 (NM_001520.1,3948-3966).
ggtacgggacattttgcat

SEQ ID NO: 27850 - DNA, 19 bp, Homo sapiens
  siRNA target sequence for GTF3C1 (NM_001520.1,3981-3999).
gtctttggataaaacatct

SEQ ID NO: 27851 - DNA, 19 bp, Homo sapiens
  siRNA target sequence for GTF3C1 (NM_001520.1,4013-4031).
gaagagctcgctacatagt

SEQ ID NO: 27852 - DNA, 19 bp, Homo sapiens
  siRNA target sequence for GTF3C1 (NM_001520.1,4018-4036).
gctcgctacatagtcaaaa

SEQ ID NO: 27853 - DNA, 19 bp, Homo sapiens
  siRNA target sequence for GTF3C1 (NM_001520.1,4040-4058).
cacaggcctatctcaacta

SEQ ID NO: 27854 - DNA, 19 bp, Homo sapiens
  siRNA target sequence for GTF3C1 (NM_001520.1,4042-4060).
caggcctatctcaactata

SEQ ID NO: 27855 - DNA, 19 bp, Homo sapiens
  siRNA target sequence for GTF3C1 (NM_001520.1,4083-4101).
ccaggataaagcacttgtt

SEQ ID NO: 27856 - DNA, 19 bp, Homo sapiens
  siRNA target sequence for GTF3C1 (NM_001520.1,4113-4131).
gaatcgaagaggtgactat

SEQ ID NO: 27857 - DNA, 19 bp, Homo sapiens
  siRNA target sequence for GTF3C1 (NM_001520.1,4128-4146).
ctatgatgacccaaaggtt

SEQ ID NO: 27858 - DNA, 19 bp, Homo sapiens
  siRNA target sequence for GTF3C1 (NM_001520.1,4144-4162).
gtttgtgccaacgagttta

SEQ ID NO: 27859 - DNA, 19 bp, Homo sapiens
  siRNA target sequence for GTF3C1 (NM_001520.1,4148-4166).
gtgccaacgagtttaaaga

SEQ ID NO: 27860 - DNA, 19 bp, Homo sapiens
  siRNA target sequence for GTF3C1 (NM_001520.1,4150-4168).
gccaacgagtttaaagaat

SEQ ID NO: 27861 - DNA, 19 bp, Homo sapiens
  siRNA target sequence for GTF3C1 (NM_001520.1,4151-4169).
ccaacgagtttaaagaatt

SEQ ID NO: 27862 - DNA, 19 bp, Homo sapiens
  siRNA target sequence for GTF3C1 (NM_001520.1,4194-4212).
cagttcagccctaaggaat

SEQ ID NO: 27863 - DNA, 19 bp, Homo sapiens
  siRNA target sequence for GTF3C1 (NM_001520.1,4203-4221).
cctaaggaattctaacctt

SEQ ID NO: 27864 - DNA, 19 bp, Homo sapiens
  siRNA target sequence for GTF3C1 (NM_001520.1,4622-4640).
cggagtcattccagttttt

SEQ ID NO: 27865 - DNA, 19 bp, Homo sapiens
  siRNA target sequence for GTF3C1 (NM_001520.1,4671-4689).
ccagcctgatcgtttctct

SEQ ID NO: 27866 - DNA, 19 bp, Homo sapiens
  siRNA target sequence for GTF3C1 (NM_001520.1,4672-4690).
cagcctgatcgtttctctt

SEQ ID NO: 27867 - DNA, 19 bp, Homo sapiens
  siRNA target sequence for GTF3C1 (NM_001520.1,4676-4694).
ctgatcgtttctctttcaa

SEQ ID NO: 27868 - DNA, 19 bp, Homo sapiens
  siRNA target sequence for GTF3C1 (NM_001520.1,4814-4832).
ggatcccggagcagatcat

SEQ ID NO: 27869 - DNA, 19 bp, Homo sapiens
  siRNA target sequence for GTF3C1 (NM_001520.1,4844-4862).
gctcaatggtggagaatga

SEQ ID NO: 27870 - DNA, 19 bp, Homo sapiens
  siRNA target sequence for GTF3C1 (NM_001520.1,5140-5158).
cctctggaagagctaacaa

SEQ ID NO: 27871 - DNA, 19 bp, Homo sapiens
  siRNA target sequence for GTF3C1 (NM_001520.1,5183-5201).
cgttcaccaagctgataaa

SEQ ID NO: 27872 - DNA, 19 bp, Homo sapiens
  siRNA target sequence for GTF3C1 (NM_001520.1,5292-5310).
gatcttggaagccattata

SEQ ID NO: 27873 - DNA, 19 bp, Homo sapiens
  siRNA target sequence for GTF3C1 (NM_001520.1,5317-5335).
ggttgttttgggattgaca

SEQ ID NO: 27874 - DNA, 19 bp, Homo sapiens
  siRNA target sequence for GTF3C1 (NM_001520.1,5393-5411).
ggacattcgcagattgcat

SEQ ID NO: 27875 - DNA, 19 bp, Homo sapiens
  siRNA target sequence for GTF3C1 (NM_001520.1,5719-5737).
gcgctccaggactcaaatt

SEQ ID NO: 27876 - DNA, 19 bp, Homo sapiens
  siRNA target sequence for GTF3C1 (NM_001520.1,5720-5738).
cgctccaggactcaaattt

SEQ ID NO: 27877 - DNA, 19 bp, Homo sapiens
  siRNA target sequence for GTF3C1 (NM_001520.1,5851-5869).
ggtgtcggtgagttcagtt

SEQ ID NO: 27878 - DNA, 19 bp, Homo sapiens
  siRNA target sequence for GTF3C1 (NM_001520.1,6291-6309).
gagccccatggctttctat

SEQ ID NO: 27879 - DNA, 19 bp, Homo sapiens
  siRNA target sequence for GTF3C1 (NM_001520.1,6293-6311).
gccccatggctttctatga

SEQ ID NO: 27880 - DNA, 19 bp, Homo sapiens
  siRNA target sequence for H1F0 (NM_005318.2,559-577).
gactcgcagatcaagttgt

SEQ ID NO: 27881 - DNA, 19 bp, Homo sapiens
  siRNA target sequence for H1FOO (NM_153833.1,220-238).
cgtcggtggcagctatcaa

SEQ ID NO: 27882 - DNA, 19 bp, Homo sapiens
  siRNA target sequence for H1FOO (NM_153833.1,229-247).
cagctatcaagctctacat

SEQ ID NO: 27883 - DNA, 19 bp, Homo sapiens
  siRNA target sequence for H1FOO (NM_153833.1,270-288).
gacgtcctccgcttcaagt

SEQ ID NO: 27884 - DNA, 19 bp, Homo sapiens
  siRNA target sequence for H1FOO (NM_153833.1,778-796).
ctgagagtaagagttcaaa

SEQ ID NO: 27885 - DNA, 19 bp, Homo sapiens
  siRNA target sequence for H1FOO (NM_153833.1,828-846).
gcttccccgaccaaaaaga

SEQ ID NO: 27886 - DNA, 19 bp, Homo sapiens
  siRNA target sequence for H1FOO (NM_153833.1,996-1014).
cccatcaaggcctcatcat

SEQ ID NO: 27887 - DNA, 19 bp, Homo sapiens
  siRNA target sequence for H1FOO (NM_153833.1,1001-1019).
caaggcctcatcatccaaa

SEQ ID NO: 27888 - DNA, 19 bp, Homo sapiens
  siRNA target sequence for H1FOO (NM_153833.1,1005-1023).
gcctcatcatccaaagtgt

SEQ ID NO: 27889 - DNA, 19 bp, Homo sapiens
  siRNA target sequence for H1FX (NM_006026.2,457-475).
gcgttgtccccatctaaga

SEQ ID NO: 27890 - DNA, 19 bp, Homo sapiens
  siRNA target sequence for H1FX (NM_006026.2,458-476).
cgttgtccccatctaagaa

SEQ ID NO: 27891 - DNA, 19 bp, Homo sapiens
  siRNA target sequence for H2AFJ (NM_018267.2,452-470).
cgtgctgctgccagtttgt

SEQ ID NO: 27892 - DNA, 19 bp, Homo sapiens
  siRNA target sequence for H2AFJ (NM_018267.2,473-491).
gcactcaggaccaagttct

SEQ ID NO: 27893 - DNA, 19 bp, Homo sapiens
  siRNA target sequence for H2AFY (NM_004893.2,224-242).
caaagcaggagtcatcttt

SEQ ID NO: 27894 - DNA, 19 bp, Homo sapiens
  siRNA target sequence for H2AFY (NM_004893.2,252-270).
cggatgctgcggtacatca

SEQ ID NO: 27895 - DNA, 19 bp, Homo sapiens
  siRNA target sequence for H2AFY (NM_004893.2,518-536).
gaagaagcggggatccaaa

SEQ ID NO: 27896 - DNA, 19 bp, Homo sapiens
  siRNA target sequence for H2AFY (NM_004893.2,750-768).
ggccagaagctgaacctta

SEQ ID NO: 27897 - DNA, 19 bp, Homo sapiens
  siRNA target sequence for H2AFY (NM_004893.2,751-769).
gccagaagctgaaccttat

SEQ ID NO: 27898 - DNA, 19 bp, Homo sapiens
  siRNA target sequence for H2AFY (NM_004893.2,765-783).
cttattcacagtgaaatca

SEQ ID NO: 27899 - DNA, 19 bp, Homo sapiens
  siRNA target sequence for H2AFY (NM_004893.2,803-821).
ggtggaggccataatcaat

SEQ ID NO: 27900 - DNA, 19 bp, Homo sapiens
  siRNA target sequence for H2AFY (NM_004893.2,1066-1084).
ccctggctgatgataagaa

SEQ ID NO: 27901 - DNA, 19 bp, Homo sapiens
  siRNA target sequence for H2AFY (NM_004893.2,1118-1136).
cggcaggaacggttttcca

SEQ ID NO: 27902 - DNA, 19 bp, Homo sapiens
  siRNA target sequence for H2AFY (NM_004893.2,1120-1138).
gcaggaacggttttccaaa

SEQ ID NO: 27903 - DNA, 19 bp, Homo sapiens
  siRNA target sequence for H2AFY (NM_004893.2,1177-1195).
gttacttcgtgtctacaat

SEQ ID NO: 27904 - DNA, 19 bp, Homo sapiens
  siRNA target sequence for H2AFY (NM_004893.2,1204-1222).
ccatcaaaacggtgtactt

SEQ ID NO: 27905 - DNA, 19 bp, Homo sapiens
  siRNA target sequence for H2AFY (NM_004893.2,1213-1231).
cggtgtacttcgtgctttt

SEQ ID NO: 27906 - DNA, 19 bp, Homo sapiens
  siRNA target sequence for H2AFY (NM_004893.2,1214-1232).
ggtgtacttcgtgcttttt

SEQ ID NO: 27907 - DNA, 19 bp, Homo sapiens
  siRNA target sequence for H2AFY (NM_004893.2,1238-1256).
cgagagtataggcatctat

SEQ ID NO: 27908 - DNA, 19 bp, Homo sapiens
  siRNA target sequence for H2AFY (NM_138609.1,819-837).
gtcgttcacccgacaaaca

SEQ ID NO: 27909 - DNA, 19 bp, Homo sapiens
  siRNA target sequence for H2AFY (NM_138609.1,829-847).
cgacaaacactgacttcta

SEQ ID NO: 27910 - DNA, 19 bp, Homo sapiens
  siRNA target sequence for H2AFY (NM_138609.1,832-850).
caaacactgacttctacat

SEQ ID NO: 27911 - DNA, 19 bp, Homo sapiens
  siRNA target sequence for H2AFY (NM_138609.1,845-863).
ctacatcggtggtgaagta

SEQ ID NO: 27912 - DNA, 19 bp, Homo sapiens
  siRNA target sequence for H2AFY2 (NM_018649.1,263-281).
ctagggcaggtgtcatctt

SEQ ID NO: 27913 - DNA, 19 bp, Homo sapiens
  siRNA target sequence for H2AFY2 (NM_018649.1,290-308).
ggaggctgatgcgttatct

SEQ ID NO: 27914 - DNA, 19 bp, Homo sapiens
  siRNA target sequence for H2AFY2 (NM_018649.1,293-311).
ggctgatgcgttatctgaa

SEQ ID NO: 27915 - DNA, 19 bp, Homo sapiens
  siRNA target sequence for H2AFY2 (NM_018649.1,297-315).
gatgcgttatctgaagaaa

SEQ ID NO: 27916 - DNA, 19 bp, Homo sapiens
  siRNA target sequence for H2AFY2 (NM_018649.1,378-396).
cctggcagcggaaattcta

SEQ ID NO: 27917 - DNA, 19 bp, Homo sapiens
  siRNA target sequence for H2AFY2 (NM_018649.1,545-563).
ccgaactgctggccaaaaa

SEQ ID NO: 27918 - DNA, 19 bp, Homo sapiens
  siRNA target sequence for H2AFY2 (NM_018649.1,600-618).
cccacccccagagaaaaga

SEQ ID NO: 27919 - DNA, 19 bp, Homo sapiens
  siRNA target sequence for H2AFY2 (NM_018649.1,754-772).
gatggattcaccattctgt

SEQ ID NO: 27920 - DNA, 19 bp, Homo sapiens
  siRNA target sequence for H2AFY2 (NM_018649.1,816-834).
gagtgacatcagccatatt

SEQ ID NO: 27921 - DNA, 19 bp, Homo sapiens
  siRNA target sequence for H2AFY2 (NM_018649.1,885-903).
cctcaaagaagatataggt

SEQ ID NO: 27922 - DNA, 19 bp, Homo sapiens
  siRNA target sequence for H2AFY2 (NM_018649.1,1013-1031).
gactcgcagccaaatttgt

SEQ ID NO: 27923 - DNA, 19 bp, Homo sapiens
  siRNA target sequence for H2AFY2 (NM_018649.1,1051-1069).
cagtggggctccgacaaat

SEQ ID NO: 27924 - DNA, 19 bp, Homo sapiens
  siRNA target sequence for H2AFY2 (NM_018649.1,1053-1071).
gtggggctccgacaaatgt

SEQ ID NO: 27925 - DNA, 19 bp, Homo sapiens
  siRNA target sequence for H2AFY2 (NM_018649.1,1055-1073).
ggggctccgacaaatgtga

SEQ ID NO: 27926 - DNA, 19 bp, Homo sapiens
  siRNA target sequence for H2AFY2 (NM_018649.1,1056-1074).
gggctccgacaaatgtgaa

SEQ ID NO: 27927 - DNA, 19 bp, Homo sapiens
  siRNA target sequence for H2AFY2 (NM_018649.1,1238-1256).
gcgcgtcctcgctgaagaa

SEQ ID NO: 27928 - DNA, 19 bp, Homo sapiens
  siRNA target sequence for H3F3B (NM_005324.3,441-459).
gtctgttcgaagataccaa

SEQ ID NO: 27929 - DNA, 19 bp, Homo sapiens
  siRNA target sequence for HBP1 (NM_012257.2,310-328).
ccatcttcacctggatata

SEQ ID NO: 27930 - DNA, 19 bp, Homo sapiens
  siRNA target sequence for HBP1 (NM_012257.2,408-426).
gtaccagctgagttcagat

SEQ ID NO: 27931 - DNA, 19 bp, Homo sapiens
  siRNA target sequence for HBP1 (NM_012257.2,439-457).
gaatacccaagatcatctt

SEQ ID NO: 27932 - DNA, 19 bp, Homo sapiens
  siRNA target sequence for HBP1 (NM_012257.2,475-493).
gacataccagaaactactt

SEQ ID NO: 27933 - DNA, 19 bp, Homo sapiens
  siRNA target sequence for HBP1 (NM_012257.2,537-555).
cgcgaccagtccacaaagt

SEQ ID NO: 27934 - DNA, 19 bp, Homo sapiens
  siRNA target sequence for HBP1 (NM_012257.2,584-602).
gatcatctcctgtacacat

SEQ ID NO: 27935 - DNA, 19 bp, Homo sapiens
  siRNA target sequence for HBP1 (NM_012257.2,600-618).
catcatagccactagcaaa

SEQ ID NO: 27936 - DNA, 19 bp, Homo sapiens
  siRNA target sequence for HBP1 (NM_012257.2,603-621).
catagccactagcaaaagt

SEQ ID NO: 27937 - DNA, 19 bp, Homo sapiens
  siRNA target sequence for HBP1 (NM_012257.2,609-627).
cactagcaaaagtttacat

SEQ ID NO: 27938 - DNA, 19 bp, Homo sapiens
  siRNA target sequence for HBP1 (NM_012257.2,614-632).
gcaaaagtttacattccta

SEQ ID NO: 27939 - DNA, 19 bp, Homo sapiens
  siRNA target sequence for HBP1 (NM_012257.2,699-717).
ggaggaaacaccagtaaga

SEQ ID NO: 27940 - DNA, 19 bp, Homo sapiens
  siRNA target sequence for HBP1 (NM_012257.2,812-830).
caactgtctggcactgttt

SEQ ID NO: 27941 - DNA, 19 bp, Homo sapiens
  siRNA target sequence for HBP1 (NM_012257.2,842-860).
cacgactgtgctttcataa

SEQ ID NO: 27942 - DNA, 19 bp, Homo sapiens
  siRNA target sequence for HBP1 (NM_012257.2,852-870).
ctttcataagggaagcaat

SEQ ID NO: 27943 - DNA, 19 bp, Homo sapiens
  siRNA target sequence for HBP1 (NM_012257.2,948-966).
caagggctatggttctgat

SEQ ID NO: 27944 - DNA, 19 bp, Homo sapiens
  siRNA target sequence for HBP1 (NM_012257.2,962-980).
ctgatggtctaaagttgtt

SEQ ID NO: 27945 - DNA, 19 bp, Homo sapiens
  siRNA target sequence for HBP1 (NM_012257.2,1007-1025).
gcgagtctgtactgaagtt

SEQ ID NO: 27946 - DNA, 19 bp, Homo sapiens
  siRNA target sequence for HBP1 (NM_012257.2,1009-1027).
gagtctgtactgaagttga

SEQ ID NO: 27947 - DNA, 19 bp, Homo sapiens
  siRNA target sequence for HBP1 (NM_012257.2,1080-1098).
ggaccaccctttctatgtt

SEQ ID NO: 27948 - DNA, 19 bp, Homo sapiens
  siRNA target sequence for HBP1 (NM_012257.2,1081-1099).
gaccaccctttctatgtta

SEQ ID NO: 27949 - DNA, 19 bp, Homo sapiens
  siRNA target sequence for HBP1 (NM_012257.2,1083-1101).
ccaccctttctatgttaaa

SEQ ID NO: 27950 - DNA, 19 bp, Homo sapiens
  siRNA target sequence for HBP1 (NM_012257.2,1156-1174).
ccatgttgtgaagttcata

SEQ ID NO: 27951 - DNA, 19 bp, Homo sapiens
  siRNA target sequence for HBP1 (NM_012257.2,1199-1217).
gacaccccgatgccattaa

SEQ ID NO: 27952 - DNA, 19 bp, Homo sapiens
  siRNA target sequence for HBP1 (NM_012257.2,1201-1219).
caccccgatgccattaatt

SEQ ID NO: 27953 - DNA, 19 bp, Homo sapiens
  siRNA target sequence for HBP1 (NM_012257.2,1203-1221).
ccccgatgccattaatttt

SEQ ID NO: 27954 - DNA, 19 bp, Homo sapiens
  siRNA target sequence for HBP1 (NM_012257.2,1205-1223).
ccgatgccattaattttga

SEQ ID NO: 27955 - DNA, 19 bp, Homo sapiens
  siRNA target sequence for HBP1 (NM_012257.2,1231-1249).
ggtgtttttgatacattta

SEQ ID NO: 27956 - DNA, 19 bp, Homo sapiens
  siRNA target sequence for HBP1 (NM_012257.2,1272-1290).
ggattcttctgcagtttat

SEQ ID NO: 27957 - DNA, 19 bp, Homo sapiens
  siRNA target sequence for HBP1 (NM_012257.2,1282-1300).
gcagtttatgtgttaagta

SEQ ID NO: 27958 - DNA, 19 bp, Homo sapiens
  siRNA target sequence for HBP1 (NM_012257.2,1310-1328).
gccagcgtcgtgcatcttt

SEQ ID NO: 27959 - DNA, 19 bp, Homo sapiens
  siRNA target sequence for HBP1 (NM_012257.2,1312-1330).
cagcgtcgtgcatctttgt

SEQ ID NO: 27960 - DNA, 19 bp, Homo sapiens
  siRNA target sequence for HBP1 (NM_012257.2,1315-1333).
cgtcgtgcatctttgtctt

SEQ ID NO: 27961 - DNA, 19 bp, Homo sapiens
  siRNA target sequence for HBP1 (NM_012257.2,1405-1423).
cagctctcttccaattctt

SEQ ID NO: 27962 - DNA, 19 bp, Homo sapiens
  siRNA target sequence for HBP1 (NM_012257.2,1425-1443).
gtatgctaaagctgtcaaa

SEQ ID NO: 27963 - DNA, 19 bp, Homo sapiens
  siRNA target sequence for HBP1 (NM_012257.2,1466-1484).
gtgccacttctcctaataa

SEQ ID NO: 27964 - DNA, 19 bp, Homo sapiens
  siRNA target sequence for HBP1 (NM_012257.2,1468-1486).
gccacttctcctaataagt

SEQ ID NO: 27965 - DNA, 19 bp, Homo sapiens
  siRNA target sequence for HBXAP (NM_016578.3,296-314).
gcaacggagaagtaccaaa

SEQ ID NO: 27966 - DNA, 19 bp, Homo sapiens
  siRNA target sequence for HBXAP (NM_016578.3,297-315).
caacggagaagtaccaaaa

SEQ ID NO: 27967 - DNA, 19 bp, Homo sapiens
  siRNA target sequence for HBXAP (NM_016578.3,462-480).
gagtgttgaatgcaaacta

SEQ ID NO: 27968 - DNA, 19 bp, Homo sapiens
  siRNA target sequence for HBXAP (NM_016578.3,506-524).
gtcagtttgatgacaatct

SEQ ID NO: 27969 - DNA, 19 bp, Homo sapiens
  siRNA target sequence for HBXAP (NM_016578.3,567-585).
gcgtctccagccaattggt

SEQ ID NO: 27970 - DNA, 19 bp, Homo sapiens
  siRNA target sequence for HBXAP (NM_016578.3,576-594).
gccaattggtcgagacaaa

SEQ ID NO: 27971 - DNA, 19 bp, Homo sapiens
  siRNA target sequence for HBXAP (NM_016578.3,578-596).
caattggtcgagacaaaga

SEQ ID NO: 27972 - DNA, 19 bp, Homo sapiens
  siRNA target sequence for HBXAP (NM_016578.3,606-624).
gtactggtaccaattggat

SEQ ID NO: 27973 - DNA, 19 bp, Homo sapiens
  siRNA target sequence for HBXAP (NM_016578.3,611-629).
ggtaccaattggatcaaga

SEQ ID NO: 27974 - DNA, 19 bp, Homo sapiens
  siRNA target sequence for HBXAP (NM_016578.3,612-630).
gtaccaattggatcaagat

SEQ ID NO: 27975 - DNA, 19 bp, Homo sapiens
  siRNA target sequence for HBXAP (NM_016578.3,673-691).
ggctcttcatggaaatgca

SEQ ID NO: 27976 - DNA, 19 bp, Homo sapiens
  siRNA target sequence for HBXAP (NM_016578.3,674-692).
gctcttcatggaaatgcat

SEQ ID NO: 27977 - DNA, 19 bp, Homo sapiens
  siRNA target sequence for HBXAP (NM_016578.3,689-707).
gcattgtcagaaatcgaaa

SEQ ID NO: 27978 - DNA, 19 bp, Homo sapiens
  siRNA target sequence for HBXAP (NM_016578.3,912-930).
ccgttctacagccaatgtt

SEQ ID NO: 27979 - DNA, 19 bp, Homo sapiens
  siRNA target sequence for HBXAP (NM_016578.3,914-932).
gttctacagccaatgttct

SEQ ID NO: 27980 - DNA, 19 bp, Homo sapiens
  siRNA target sequence for HBXAP (NM_016578.3,934-952).
gaagagactactgtgaaaa

SEQ ID NO: 27981 - DNA, 19 bp, Homo sapiens
  siRNA target sequence for HBXAP (NM_016578.3,991-1009).
gtcatagtgaagctagaaa

SEQ ID NO: 27982 - DNA, 19 bp, Homo sapiens
  siRNA target sequence for HBXAP (NM_016578.3,1154-1172).
cacaggagcctgaaaggat

SEQ ID NO: 27983 - DNA, 19 bp, Homo sapiens
  siRNA target sequence for HBXAP (NM_016578.3,1159-1177).
gagcctgaaaggatcgaat

SEQ ID NO: 27984 - DNA, 19 bp, Homo sapiens
  siRNA target sequence for HBXAP (NM_016578.3,1161-1179).
gcctgaaaggatcgaattt

SEQ ID NO: 27985 - DNA, 19 bp, Homo sapiens
  siRNA target sequence for HBXAP (NM_016578.3,1173-1191).
cgaatttggtggcaatatt

SEQ ID NO: 27986 - DNA, 19 bp, Homo sapiens
  siRNA target sequence for HBXAP (NM_016578.3,1174-1192).
gaatttggtggcaatatta

SEQ ID NO: 27987 - DNA, 19 bp, Homo sapiens
  siRNA target sequence for HBXAP (NM_016578.3,1203-1221).
cgaaattactgagaaatct

SEQ ID NO: 27988 - DNA, 19 bp, Homo sapiens
  siRNA target sequence for HBXAP (NM_016578.3,1258-1276).
gccaagataccactaaaaa

SEQ ID NO: 27989 - DNA, 19 bp, Homo sapiens
  siRNA target sequence for HBXAP (NM_016578.3,1268-1286).
cactaaaaaaacgagaaat

SEQ ID NO: 27990 - DNA, 19 bp, Homo sapiens
  siRNA target sequence for HBXAP (NM_016578.3,1315-1333).
gtcaagggacctttgtgta

SEQ ID NO: 27991 - DNA, 19 bp, Homo sapiens
  siRNA target sequence for HBXAP (NM_016578.3,1378-1396).
caagaggaagagacttgta

SEQ ID NO: 27992 - DNA, 19 bp, Homo sapiens
  siRNA target sequence for HBXAP (NM_016578.3,1443-1461).
ggtaaatggagaagttagt

SEQ ID NO: 27993 - DNA, 19 bp, Homo sapiens
  siRNA target sequence for HBXAP (NM_016578.3,1465-1483).
gaaagggtagctccaaatt

SEQ ID NO: 27994 - DNA, 19 bp, Homo sapiens
  siRNA target sequence for HBXAP (NM_016578.3,1471-1489).
gtagctccaaattttaaga

SEQ ID NO: 27995 - DNA, 19 bp, Homo sapiens
  siRNA target sequence for HBXAP (NM_016578.3,1492-1510).
gaaccaatagagacaaagt

SEQ ID NO: 27996 - DNA, 19 bp, Homo sapiens
  siRNA target sequence for HBXAP (NM_016578.3,1539-1557).
cccctctaaggacagaaat

SEQ ID NO: 27997 - DNA, 19 bp, Homo sapiens
  siRNA target sequence for HBXAP (NM_016578.3,1540-1558).
ccctctaaggacagaaata

SEQ ID NO: 27998 - DNA, 19 bp, Homo sapiens
  siRNA target sequence for HBXAP (NM_016578.3,1560-1578).
catcacggagggaaatgga

SEQ ID NO: 27999 - DNA, 19 bp, Homo sapiens
  siRNA target sequence for HBXAP (NM_016578.3,1650-1668).
gaaagatgcagatagttca

SEQ ID NO: 28000 - DNA, 19 bp, Homo sapiens
  siRNA target sequence for HBXAP (NM_016578.3,1654-1672).
gatgcagatagttcaatat

SEQ ID NO: 28001 - DNA, 19 bp, Homo sapiens
  siRNA target sequence for HBXAP (NM_016578.3,1658-1676).
cagatagttcaatatcagt

SEQ ID NO: 28002 - DNA, 19 bp, Homo sapiens
  siRNA target sequence for HBXAP (NM_016578.3,1664-1682).
gttcaatatcagtcttaga

SEQ ID NO: 28003 - DNA, 19 bp, Homo sapiens
  siRNA target sequence for HBXAP (NM_016578.3,1683-1701).
gatccatagtcaaaaagca

SEQ ID NO: 28004 - DNA, 19 bp, Homo sapiens
  siRNA target sequence for HBXAP (NM_016578.3,1715-1733).
ccgatcctccagaaatgga

SEQ ID NO: 28005 - DNA, 19 bp, Homo sapiens
  siRNA target sequence for HBXAP (NM_016578.3,1716-1734).
cgatcctccagaaatggaa

SEQ ID NO: 28006 - DNA, 19 bp, Homo sapiens
  siRNA target sequence for HBXAP (NM_016578.3,1797-1815).
cgagtcgtgtaccatgaaa

SEQ ID NO: 28007 - DNA, 19 bp, Homo sapiens
  siRNA target sequence for HBXAP (NM_016578.3,1822-1840).
gagaagtctcccaaaacta

SEQ ID NO: 28008 - DNA, 19 bp, Homo sapiens
  siRNA target sequence for HBXAP (NM_016578.3,1852-1870).
cgcccaccaatcctagaat

SEQ ID NO: 28009 - DNA, 19 bp, Homo sapiens
  siRNA target sequence for HBXAP (NM_016578.3,1856-1874).
caccaatcctagaatgtct

SEQ ID NO: 28010 - DNA, 19 bp, Homo sapiens
  siRNA target sequence for HBXAP (NM_016578.3,1909-1927).
gataaggacgcacaaagat

SEQ ID NO: 28011 - DNA, 19 bp, Homo sapiens
  siRNA target sequence for HBXAP (NM_016578.3,1914-1932).
ggacgcacaaagattgagt

SEQ ID NO: 28012 - DNA, 19 bp, Homo sapiens
  siRNA target sequence for HBXAP (NM_016578.3,2006-2024).
ctccaccatctaatatcat

SEQ ID NO: 28013 - DNA, 19 bp, Homo sapiens
  siRNA target sequence for HBXAP (NM_016578.3,2089-2107).
ggtggccagtctgtgaaaa

SEQ ID NO: 28014 - DNA, 19 bp, Homo sapiens
  siRNA target sequence for HBXAP (NM_016578.3,2204-2222).
ctgagacaaagggttctat

SEQ ID NO: 28015 - DNA, 19 bp, Homo sapiens
  siRNA target sequence for HBXAP (NM_016578.3,2208-2226).
gacaaagggttctatgcaa

SEQ ID NO: 28016 - DNA, 19 bp, Homo sapiens
  siRNA target sequence for HBXAP (NM_016578.3,2311-2329).
gagggcatcaaattaacaa

SEQ ID NO: 28017 - DNA, 19 bp, Homo sapiens
  siRNA target sequence for HBXAP (NM_016578.3,2374-2392).
gttctagaaccagaaaaca

SEQ ID NO: 28018 - DNA, 19 bp, Homo sapiens
  siRNA target sequence for HBXAP (NM_016578.3,2426-2444).
caaatgtgggtcgtacttt

SEQ ID NO: 28019 - DNA, 19 bp, Homo sapiens
  siRNA target sequence for HBXAP (NM_016578.3,2431-2449).
gtgggtcgtactttaagaa

SEQ ID NO: 28020 - DNA, 19 bp, Homo sapiens
  siRNA target sequence for HBXAP (NM_016578.3,2434-2452).
ggtcgtactttaagaagat

SEQ ID NO: 28021 - DNA, 19 bp, Homo sapiens
  siRNA target sequence for HBXAP (NM_016578.3,2495-2513).
gagatcagaaagctgataa

SEQ ID NO: 28022 - DNA, 19 bp, Homo sapiens
  siRNA target sequence for HBXAP (NM_016578.3,2615-2633).
ctaaagtaagcaaggtaaa

SEQ ID NO: 28023 - DNA, 19 bp, Homo sapiens
  siRNA target sequence for HBXAP (NM_016578.3,2667-2685).
gacacgtggcagatggaaa

SEQ ID NO: 28024 - DNA, 19 bp, Homo sapiens
  siRNA target sequence for HBXAP (NM_016578.3,2669-2687).
cacgtggcagatggaaata

SEQ ID NO: 28025 - DNA, 19 bp, Homo sapiens
  siRNA target sequence for HBXAP (NM_016578.3,2671-2689).
cgtggcagatggaaatatt

SEQ ID NO: 28026 - DNA, 19 bp, Homo sapiens
  siRNA target sequence for HBXAP (NM_016578.3,2682-2700).
gaaatattccagcaatgat

SEQ ID NO: 28027 - DNA, 19 bp, Homo sapiens
  siRNA target sequence for HBXAP (NM_016578.3,2712-2730).
gtctggcagtgaaaaatca

SEQ ID NO: 28028 - DNA, 19 bp, Homo sapiens
  siRNA target sequence for HBXAP (NM_016578.3,2885-2903).
gccctcctctgatgatcat

SEQ ID NO: 28029 - DNA, 19 bp, Homo sapiens
  siRNA target sequence for HBXAP (NM_016578.3,3006-3024).
gcgtgccgaacgaagaaaa

SEQ ID NO: 28030 - DNA, 19 bp, Homo sapiens
  siRNA target sequence for HBXAP (NM_016578.3,3008-3026).
gtgccgaacgaagaaaaga

SEQ ID NO: 28031 - DNA, 19 bp, Homo sapiens
  siRNA target sequence for HBXAP (NM_016578.3,3033-3051).
ggtgtatgttggtatcagt

SEQ ID NO: 28032 - DNA, 19 bp, Homo sapiens
  siRNA target sequence for HBXAP (NM_016578.3,3034-3052).
gtgtatgttggtatcagta

SEQ ID NO: 28033 - DNA, 19 bp, Homo sapiens
  siRNA target sequence for HBXAP (NM_016578.3,3036-3054).
gtatgttggtatcagtatt

SEQ ID NO: 28034 - DNA, 19 bp, Homo sapiens
  siRNA target sequence for HBXAP (NM_016578.3,3142-3160).
cttgaaaggaggtcaacaa

SEQ ID NO: 28035 - DNA, 19 bp, Homo sapiens
  siRNA target sequence for HBXAP (NM_016578.3,3164-3182).
caaggaaatgtataagcta

SEQ ID NO: 28036 - DNA, 19 bp, Homo sapiens
  siRNA target sequence for HBXAP (NM_016578.3,3173-3191).
gtataagctacagatttga

SEQ ID NO: 28037 - DNA, 19 bp, Homo sapiens
  siRNA target sequence for HBXAP (NM_016578.3,3179-3197).
gctacagatttgatgagtt

SEQ ID NO: 28038 - DNA, 19 bp, Homo sapiens
  siRNA target sequence for HBXAP (NM_016578.3,3259-3277).
ggccgaggaaaagatatct

SEQ ID NO: 28039 - DNA, 19 bp, Homo sapiens
  siRNA target sequence for HBXAP (NM_016578.3,3290-3308).
gtcatcgtgggaaagacat

SEQ ID NO: 28040 - DNA, 19 bp, Homo sapiens
  siRNA target sequence for HBXAP (NM_016578.3,3295-3313).
cgtgggaaagacatctcta

SEQ ID NO: 28041 - DNA, 19 bp, Homo sapiens
  siRNA target sequence for HBXAP (NM_016578.3,3299-3317).
ggaaagacatctctactat

SEQ ID NO: 28042 - DNA, 19 bp, Homo sapiens
  siRNA target sequence for HBXAP (NM_016578.3,3300-3318).
gaaagacatctctactatt

SEQ ID NO: 28043 - DNA, 19 bp, Homo sapiens
  siRNA target sequence for HBXAP (NM_016578.3,3430-3448).
gagagcgaggatgaattca

SEQ ID NO: 28044 - DNA, 19 bp, Homo sapiens
  siRNA target sequence for HBXAP (NM_016578.3,3804-3822).
gagtttgcgacgtggtaaa

SEQ ID NO: 28045 - DNA, 19 bp, Homo sapiens
  siRNA target sequence for HBXAP (NM_016578.3,3806-3824).
gtttgcgacgtggtaaaga

SEQ ID NO: 28046 - DNA, 19 bp, Homo sapiens
  siRNA target sequence for HBXAP (NM_016578.3,3811-3829).
cgacgtggtaaagaaataa

SEQ ID NO: 28047 - DNA, 19 bp, Homo sapiens
  siRNA target sequence for HBXAP (NM_016578.3,3904-3922).
gagctagctaaagaatcaa

SEQ ID NO: 28048 - DNA, 19 bp, Homo sapiens
  siRNA target sequence for HBXAP (NM_016578.3,3946-3964).
cgaagcacagacgagtatt

SEQ ID NO: 28049 - DNA, 19 bp, Homo sapiens
  siRNA target sequence for HBXAP (NM_016578.3,3950-3968).
gcacagacgagtattcaga

SEQ ID NO: 28050 - DNA, 19 bp, Homo sapiens
  siRNA target sequence for HBXAP (NM_016578.3,4015-4033).
cggctacaccggattgaga

SEQ ID NO: 28051 - DNA, 19 bp, Homo sapiens
  siRNA target sequence for HBXAP (NM_016578.3,4041-4059).
ggaggagagttgtgacaat

SEQ ID NO: 28052 - DNA, 19 bp, Homo sapiens
  siRNA target sequence for HBXAP (NM_016578.3,4061-4079).
ctcatggagatgcaaatca

SEQ ID NO: 28053 - DNA, 19 bp, Homo sapiens
  siRNA target sequence for HBXAP (NM_016578.3,4134-4152).
gaagccctaccggatagaa

SEQ ID NO: 28054 - DNA, 19 bp, Homo sapiens
  siRNA target sequence for HBXAP (NM_016578.3,4137-4155).
gccctaccggatagaaagt

SEQ ID NO: 28055 - DNA, 19 bp, Homo sapiens
  siRNA target sequence for HBXAP (NM_016578.3,4139-4157).
cctaccggatagaaagtga

SEQ ID NO: 28056 - DNA, 19 bp, Homo sapiens
  siRNA target sequence for HBXAP (NM_016578.3,4140-4158).
ctaccggatagaaagtgat

SEQ ID NO: 28057 - DNA, 19 bp, Homo sapiens
  siRNA target sequence for HBXAP (NM_016578.3,4196-4214).
gcccattggactatagctt

SEQ ID NO: 28058 - DNA, 19 bp, Homo sapiens
  siRNA target sequence for HBXAP (NM_016578.3,4218-4236).
ggacttaccttcaaccaat

SEQ ID NO: 28059 - DNA, 19 bp, Homo sapiens
  siRNA target sequence for HBXAP (NM_016578.3,4400-4418).
gagtgactgaccttgttga

SEQ ID NO: 28060 - DNA, 19 bp, Homo sapiens
  siRNA target sequence for HBXAP (NM_016578.3,4404-4422).
gactgaccttgttgattat

SEQ ID NO: 28061 - DNA, 19 bp, Homo sapiens
  siRNA target sequence for HELLS (NM_018063.3,141-159).
ggaggctccagcaatggtt

SEQ ID NO: 28062 - DNA, 19 bp, Homo sapiens
  siRNA target sequence for HELLS (NM_018063.3,146-164).
ctccagcaatggttgaaca

SEQ ID NO: 28063 - DNA, 19 bp, Homo sapiens
  siRNA target sequence for HELLS (NM_018063.3,166-184).
ctggacactgctgtgatta

SEQ ID NO: 28064 - DNA, 19 bp, Homo sapiens
  siRNA target sequence for HELLS (NM_018063.3,263-281).
gcatgtcttgggatagaga

SEQ ID NO: 28065 - DNA, 19 bp, Homo sapiens
  siRNA target sequence for HELLS (NM_018063.3,296-314).
ggtaccgtagacttcaaca

SEQ ID NO: 28066 - DNA, 19 bp, Homo sapiens
  siRNA target sequence for HELLS (NM_018063.3,297-315).
gtaccgtagacttcaacat

SEQ ID NO: 28067 - DNA, 19 bp, Homo sapiens
  siRNA target sequence for HELLS (NM_018063.3,637-655).
gattcgaatagtataatta

SEQ ID NO: 28068 - DNA, 19 bp, Homo sapiens
  siRNA target sequence for HELLS (NM_018063.3,641-659).
cgaatagtataattaaaga

SEQ ID NO: 28069 - DNA, 19 bp, Homo sapiens
  siRNA target sequence for HELLS (NM_018063.3,647-665).
gtataattaaagatagatt

SEQ ID NO: 28070 - DNA, 19 bp, Homo sapiens
  siRNA target sequence for HELLS (NM_018063.3,670-688).
gaaacggttaggcagaata

SEQ ID NO: 28071 - DNA, 19 bp, Homo sapiens
  siRNA target sequence for HELLS (NM_018063.3,674-692).
cggttaggcagaatactaa

SEQ ID NO: 28072 - DNA, 19 bp, Homo sapiens
  siRNA target sequence for HELLS (NM_018063.3,675-693).
ggttaggcagaatactaaa

SEQ ID NO: 28073 - DNA, 19 bp, Homo sapiens
  siRNA target sequence for HELLS (NM_018063.3,676-694).
gttaggcagaatactaaat

SEQ ID NO: 28074 - DNA, 19 bp, Homo sapiens
  siRNA target sequence for HELLS (NM_018063.3,703-721).
gacccagtccggaagtgta

SEQ ID NO: 28075 - DNA, 19 bp, Homo sapiens
  siRNA target sequence for HELLS (NM_018063.3,705-723).
cccagtccggaagtgtaat

SEQ ID NO: 28076 - DNA, 19 bp, Homo sapiens
  siRNA target sequence for HELLS (NM_018063.3,725-743).
gtcagccagtaccttttca

SEQ ID NO: 28077 - DNA, 19 bp, Homo sapiens
  siRNA target sequence for HELLS (NM_018063.3,774-792).
gcgatggtaccaagtagaa

SEQ ID NO: 28078 - DNA, 19 bp, Homo sapiens
  siRNA target sequence for HELLS (NM_018063.3,794-812).
gcatggaatggcttaggat

SEQ ID NO: 28079 - DNA, 19 bp, Homo sapiens
  siRNA target sequence for HELLS (NM_018063.3,883-901).
gctactattgcattgatga

SEQ ID NO: 28080 - DNA, 19 bp, Homo sapiens
  siRNA target sequence for HELLS (NM_018063.3,884-902).
ctactattgcattgatgat

SEQ ID NO: 28081 - DNA, 19 bp, Homo sapiens
  siRNA target sequence for HELLS (NM_018063.3,931-949).
gtctgtggccctttgtcta

SEQ ID NO: 28082 - DNA, 19 bp, Homo sapiens
  siRNA target sequence for HELLS (NM_018063.3,966-984).
ggctgaattcaaaagattt

SEQ ID NO: 28083 - DNA, 19 bp, Homo sapiens
  siRNA target sequence for HELLS (NM_018063.3,986-1004).
caccagatatccctacaat

SEQ ID NO: 28084 - DNA, 19 bp, Homo sapiens
  siRNA target sequence for HELLS (NM_018063.3,988-1006).
ccagatatccctacaatgt

SEQ ID NO: 28085 - DNA, 19 bp, Homo sapiens
  siRNA target sequence for HELLS (NM_018063.3,989-1007).
cagatatccctacaatgtt

SEQ ID NO: 28086 - DNA, 19 bp, Homo sapiens
  siRNA target sequence for HELLS (NM_018063.3,991-1009).
gatatccctacaatgttat

SEQ ID NO: 28087 - DNA, 19 bp, Homo sapiens
  siRNA target sequence for HELLS (NM_018063.3,1026-1044).
ggaacgtcaaaaattggta

SEQ ID NO: 28088 - DNA, 19 bp, Homo sapiens
  siRNA target sequence for HELLS (NM_018063.3,1027-1045).
gaacgtcaaaaattggtaa

SEQ ID NO: 28089 - DNA, 19 bp, Homo sapiens
  siRNA target sequence for HELLS (NM_018063.3,1030-1048).
cgtcaaaaattggtaagaa

SEQ ID NO: 28090 - DNA, 19 bp, Homo sapiens
  siRNA target sequence for HELLS (NM_018063.3,1089-1107).
ggtaatcacgtcatttgaa

SEQ ID NO: 28091 - DNA, 19 bp, Homo sapiens
  siRNA target sequence for HELLS (NM_018063.3,1174-1192).
cacaggattaagaatatga

SEQ ID NO: 28092 - DNA, 19 bp, Homo sapiens
  siRNA target sequence for HELLS (NM_018063.3,1198-1216).
cgtctaatcagggagttaa

SEQ ID NO: 28093 - DNA, 19 bp, Homo sapiens
  siRNA target sequence for HELLS (NM_018063.3,1208-1226).
gggagttaaaacgattcaa

SEQ ID NO: 28094 - DNA, 19 bp, Homo sapiens
  siRNA target sequence for HELLS (NM_018063.3,1209-1227).
ggagttaaaacgattcaat

SEQ ID NO: 28095 - DNA, 19 bp, Homo sapiens
  siRNA target sequence for HELLS (NM_018063.3,1228-1246).
gctgataacaaacttcttt

SEQ ID NO: 28096 - DNA, 19 bp, Homo sapiens
  siRNA target sequence for HELLS (NM_018063.3,1250-1268).
ctggtactcccttgcaaaa

SEQ ID NO: 28097 - DNA, 19 bp, Homo sapiens
  siRNA target sequence for HELLS (NM_018063.3,1279-1297).
gaactttggtcattgctaa

SEQ ID NO: 28098 - DNA, 19 bp, Homo sapiens
  siRNA target sequence for HELLS (NM_018063.3,1282-1300).
ctttggtcattgctaaact

SEQ ID NO: 28099 - DNA, 19 bp, Homo sapiens
  siRNA target sequence for HELLS (NM_018063.3,1286-1304).
ggtcattgctaaacttttt

SEQ ID NO: 28100 - DNA, 19 bp, Homo sapiens
  siRNA target sequence for HELLS (NM_018063.3,1464-1482).
gtctgatgttgctcttgaa

SEQ ID NO: 28101 - DNA, 19 bp, Homo sapiens
  siRNA target sequence for HELLS (NM_018063.3,1466-1484).
ctgatgttgctcttgaagt

SEQ ID NO: 28102 - DNA, 19 bp, Homo sapiens
  siRNA target sequence for HELLS (NM_018063.3,1487-1505).
ctcctaaacgagaagtagt

SEQ ID NO: 28103 - DNA, 19 bp, Homo sapiens
  siRNA target sequence for HELLS (NM_018063.3,1506-1524).
cgtttatgctccactttca

SEQ ID NO: 28104 - DNA, 19 bp, Homo sapiens
  siRNA target sequence for HELLS (NM_018063.3,1550-1568).
ccattgtgaaccgtacaat

SEQ ID NO: 28105 - DNA, 19 bp, Homo sapiens
  siRNA target sequence for HELLS (NM_018063.3,1551-1569).
cattgtgaaccgtacaatt

SEQ ID NO: 28106 - DNA, 19 bp, Homo sapiens
  siRNA target sequence for HELLS (NM_018063.3,1627-1645).
ccaaaacgacgaactagaa

SEQ ID NO: 28107 - DNA, 19 bp, Homo sapiens
  siRNA target sequence for HELLS (NM_018063.3,1628-1646).
caaaacgacgaactagaaa

SEQ ID NO: 28108 - DNA, 19 bp, Homo sapiens
  siRNA target sequence for HELLS (NM_018063.3,1634-1652).
gacgaactagaaaatcaat

SEQ ID NO: 28109 - DNA, 19 bp, Homo sapiens
  siRNA target sequence for HELLS (NM_018063.3,1690-1708).
gaaaaactgatcagtcaaa

SEQ ID NO: 28110 - DNA, 19 bp, Homo sapiens
  siRNA target sequence for HELLS (NM_018063.3,1797-1815).
gatgctacttcgtaaatgt

SEQ ID NO: 28111 - DNA, 19 bp, Homo sapiens
  siRNA target sequence for HELLS (NM_018063.3,1800-1818).
gctacttcgtaaatgttgt

SEQ ID NO: 28112 - DNA, 19 bp, Homo sapiens
  siRNA target sequence for HELLS (NM_018063.3,1852-1870).
cctgttacacaagaattta

SEQ ID NO: 28113 - DNA, 19 bp, Homo sapiens
  siRNA target sequence for HELLS (NM_018063.3,1921-1939).
cgaatgctgccagaactaa

SEQ ID NO: 28114 - DNA, 19 bp, Homo sapiens
  siRNA target sequence for HELLS (NM_018063.3,1982-2000).
gcatgttggacattttgat

SEQ ID NO: 28115 - DNA, 19 bp, Homo sapiens
  siRNA target sequence for HELLS (NM_018063.3,2041-2059).
gatgggtccatgtcttact

SEQ ID NO: 28116 - DNA, 19 bp, Homo sapiens
  siRNA target sequence for HELLS (NM_018063.3,2095-2113).
gatccagaggtgtttatct

SEQ ID NO: 28117 - DNA, 19 bp, Homo sapiens
  siRNA target sequence for HELLS (NM_018063.3,2159-2177).
cagcagatacagttatcat

SEQ ID NO: 28118 - DNA, 19 bp, Homo sapiens
  siRNA target sequence for HELLS (NM_018063.3,2161-2179).
gcagatacagttatcattt

SEQ ID NO: 28119 - DNA, 19 bp, Homo sapiens
  siRNA target sequence for HELLS (NM_018063.3,2257-2275).
gttgtttatcgccttgtta

SEQ ID NO: 28120 - DNA, 19 bp, Homo sapiens
  siRNA target sequence for HELLS (NM_018063.3,2266-2284).
cgccttgttacagcaaata

SEQ ID NO: 28121 - DNA, 19 bp, Homo sapiens
  siRNA target sequence for HELLS (NM_018063.3,2268-2286).
ccttgttacagcaaatact

SEQ ID NO: 28122 - DNA, 19 bp, Homo sapiens
  siRNA target sequence for HELLS (NM_018063.3,2279-2297).
caaatactatcgatcagaa

SEQ ID NO: 28123 - DNA, 19 bp, Homo sapiens
  siRNA target sequence for HELLS (NM_018063.3,2365-2383).
ggtggtcagtctggattaa

SEQ ID NO: 28124 - DNA, 19 bp, Homo sapiens
  siRNA target sequence for HELLS (NM_018063.3,2369-2387).
gtcagtctggattaaatct

SEQ ID NO: 28125 - DNA, 19 bp, Homo sapiens
  siRNA target sequence for HELLS (NM_018063.3,2375-2393).
ctggattaaatctgtctaa

SEQ ID NO: 28126 - DNA, 19 bp, Homo sapiens
  siRNA target sequence for HELLS (NM_018063.3,2502-2520).
gttgttagatcgaagtgat

SEQ ID NO: 28127 - DNA, 19 bp, Homo sapiens
  siRNA target sequence for HELLS (NM_018063.3,2505-2523).
gttagatcgaagtgatctt

SEQ ID NO: 28128 - DNA, 19 bp, Homo sapiens
  siRNA target sequence for HELLS (NM_018063.3,2513-2531).
gaagtgatcttattgatca

SEQ ID NO: 28129 - DNA, 19 bp, Homo sapiens
  siRNA target sequence for HELLS (NM_018063.3,2516-2534).
gtgatcttattgatcaaat

SEQ ID NO: 28130 - DNA, 19 bp, Homo sapiens
  siRNA target sequence for HELLS (NM_018063.3,2518-2536).
gatcttattgatcaaatga

SEQ ID NO: 28131 - DNA, 19 bp, Homo sapiens
  siRNA target sequence for HELLS (NM_018063.3,2535-2553).
gaatgcttcaggaccaatt

SEQ ID NO: 28132 - DNA, 19 bp, Homo sapiens
  siRNA target sequence for HELLS (NM_018063.3,2540-2558).
cttcaggaccaattaaaga

SEQ ID NO: 28133 - DNA, 19 bp, Homo sapiens
  siRNA target sequence for HELLS (NM_018063.3,2543-2561).
caggaccaattaaagagaa

SEQ ID NO: 28134 - DNA, 19 bp, Homo sapiens
  siRNA target sequence for HELLS (NM_018063.3,2565-2583).
ggggatattcaagatatta

SEQ ID NO: 28135 - DNA, 19 bp, Homo sapiens
  siRNA target sequence for HELLS (NM_018063.3,2567-2585).
ggatattcaagatattaga

SEQ ID NO: 28136 - DNA, 19 bp, Homo sapiens
  siRNA target sequence for HEMK (NM_016173.1,308-326).
gttatccagtgccatagaa

SEQ ID NO: 28137 - DNA, 19 bp, Homo sapiens
  siRNA target sequence for HEMK (NM_016173.1,517-535).
ggatgccggtgcagtacat

SEQ ID NO: 28138 - DNA, 19 bp, Homo sapiens
  siRNA target sequence for HEMK (NM_016173.1,816-834).
cggttgcaggacaggattt

SEQ ID NO: 28139 - DNA, 19 bp, Homo sapiens
  siRNA target sequence for HEMK (NM_016173.1,846-864).
ctcgacatgacctcagaaa

SEQ ID NO: 28140 - DNA, 19 bp, Homo sapiens
  siRNA target sequence for HEMK (NM_016173.1,1058-1076).
ctctggtagtatcttctta

SEQ ID NO: 28141 - DNA, 19 bp, Homo sapiens
  siRNA target sequence for HEMK (NM_016173.1,1063-1081).
gtagtatcttcttagaagt

SEQ ID NO: 28142 - DNA, 19 bp, Homo sapiens
  siRNA target sequence for HEMK (NM_016173.1,1126-1144).
ggcctgacctgtaccttaa

SEQ ID NO: 28143 - DNA, 19 bp, Homo sapiens
  siRNA target sequence for HEMK (NM_016173.1,1127-1145).
gcctgacctgtaccttaat

SEQ ID NO: 28144 - DNA, 19 bp, Homo sapiens
  siRNA target sequence for HES1 (NM_005524.2,299-317).
caacacgacaccggataaa

SEQ ID NO: 28145 - DNA, 19 bp, Homo sapiens
  siRNA target sequence for HES1 (NM_005524.2,302-320).
cacgacaccggataaacca

SEQ ID NO: 28146 - DNA, 19 bp, Homo sapiens
  siRNA target sequence for HES1 (NM_005524.2,304-322).
cgacaccggataaaccaaa

SEQ ID NO: 28147 - DNA, 19 bp, Homo sapiens
  siRNA target sequence for HES1 (NM_005524.2,614-632).
cacgtgcgagggcgttaat

SEQ ID NO: 28148 - DNA, 19 bp, Homo sapiens
  siRNA target sequence for HES1 (NM_005524.2,909-927).
cccgatggccagtttgctt

SEQ ID NO: 28149 - DNA, 19 bp, Homo sapiens
  siRNA target sequence for HES1 (NM_005524.2,910-928).
ccgatggccagtttgcttt

SEQ ID NO: 28150 - DNA, 19 bp, Homo sapiens
  siRNA target sequence for Hes4 (NM_021170.2,254-272).
gccgagcgcgtattaacga

SEQ ID NO: 28151 - DNA, 19 bp, Homo sapiens
  siRNA target sequence for HES7 (NM_032580.1,10-28).
cgggatcgagctgagaata

SEQ ID NO: 28152 - DNA, 19 bp, Homo sapiens
  siRNA target sequence for HES7 (NM_032580.1,157-175).
ctggagaaagcggagatat

SEQ ID NO: 28153 - DNA, 19 bp, Homo sapiens
  siRNA target sequence for HES7 (NM_032580.1,262-280).
ctcgccagctgctacttgt

SEQ ID NO: 28154 - DNA, 19 bp, Homo sapiens
  siRNA target sequence for HIC2 (NM_015094.1,820-838).
cagacgatgaactctttct

SEQ ID NO: 28155 - DNA, 19 bp, Homo sapiens
  siRNA target sequence for HIC2 (NM_015094.1,1433-1451).
cggcaaggatgcaagtgaa

SEQ ID NO: 28156 - DNA, 19 bp, Homo sapiens
  siRNA target sequence for HIC2 (NM_015094.1,1537-1555).
cctacggggacaacttgta

SEQ ID NO: 28157 - DNA, 19 bp, Homo sapiens
  siRNA target sequence for HIC2 (NM_015094.1,1538-1556).
ctacggggacaacttgtat

SEQ ID NO: 28158 - DNA, 19 bp, Homo sapiens
  siRNA target sequence for HIPK1 (NM_152696.3,243-261).
ccctctggctgggatgttt

SEQ ID NO: 28159 - DNA, 19 bp, Homo sapiens
  siRNA target sequence for HIPK1 (NM_152696.3,267-285).
cagagtagcaacgacaaat

SEQ ID NO: 28160 - DNA, 19 bp, Homo sapiens
  siRNA target sequence for HIPK1 (NM_152696.3,269-287).
gagtagcaacgacaaatat

SEQ ID NO: 28161 - DNA, 19 bp, Homo sapiens
  siRNA target sequence for HIPK1 (NM_152696.3,271-289).
gtagcaacgacaaatatta

SEQ ID NO: 28162 - DNA, 19 bp, Homo sapiens
  siRNA target sequence for HIPK1 (NM_152696.3,334-352).
cctctcaccaggtagcaaa

SEQ ID NO: 28163 - DNA, 19 bp, Homo sapiens
  siRNA target sequence for HIPK1 (NM_152696.3,337-355).
ctcaccaggtagcaaattt

SEQ ID NO: 28164 - DNA, 19 bp, Homo sapiens
  siRNA target sequence for HIPK1 (NM_152696.3,339-357).
caccaggtagcaaatttca

SEQ ID NO: 28165 - DNA, 19 bp, Homo sapiens
  siRNA target sequence for HIPK1 (NM_152696.3,342-360).
caggtagcaaatttcaaca

SEQ ID NO: 28166 - DNA, 19 bp, Homo sapiens
  siRNA target sequence for HIPK1 (NM_152696.3,397-415).
ctgcagtggagcatattgt

SEQ ID NO: 28167 - DNA, 19 bp, Homo sapiens
  siRNA target sequence for HIPK1 (NM_152696.3,400-418).
cagtggagcatattgttgt

SEQ ID NO: 28168 - DNA, 19 bp, Homo sapiens
  siRNA target sequence for HIPK1 (NM_152696.3,402-420).
gtggagcatattgttgtaa

SEQ ID NO: 28169 - DNA, 19 bp, Homo sapiens
  siRNA target sequence for HIPK1 (NM_152696.3,404-422).
ggagcatattgttgtaaca

SEQ ID NO: 28170 - DNA, 19 bp, Homo sapiens
  siRNA target sequence for HIPK1 (NM_152696.3,438-456).
ggcagtgctgctacatcaa

SEQ ID NO: 28171 - DNA, 19 bp, Homo sapiens
  siRNA target sequence for HIPK1 (NM_152696.3,560-578).
cggtagtgtgcagatcata

SEQ ID NO: 28172 - DNA, 19 bp, Homo sapiens
  siRNA target sequence for HIPK1 (NM_152696.3,591-609).
cctctcatgctgcaaaaca

SEQ ID NO: 28173 - DNA, 19 bp, Homo sapiens
  siRNA target sequence for HIPK1 (NM_152696.3,641-659).
cactgtgaccacaaagagt

SEQ ID NO: 28174 - DNA, 19 bp, Homo sapiens
  siRNA target sequence for HIPK1 (NM_152696.3,670-688).
gcggagaaggggattacca

SEQ ID NO: 28175 - DNA, 19 bp, Homo sapiens
  siRNA target sequence for HIPK1 (NM_152696.3,713-731).
ctctatgaccaatagctat

SEQ ID NO: 28176 - DNA, 19 bp, Homo sapiens
  siRNA target sequence for HIPK1 (NM_152696.3,807-825).
gtggctattaaaatcttga

SEQ ID NO: 28177 - DNA, 19 bp, Homo sapiens
  siRNA target sequence for HIPK1 (NM_152696.3,877-895).
cccgcctaagcagtgaaaa

SEQ ID NO: 28178 - DNA, 19 bp, Homo sapiens
  siRNA target sequence for HIPK1 (NM_152696.3,927-945).
gagtgctttcagcataaga

SEQ ID NO: 28179 - DNA, 19 bp, Homo sapiens
  siRNA target sequence for HIPK1 (NM_152696.3,929-947).
gtgctttcagcataagaat

SEQ ID NO: 28180 - DNA, 19 bp, Homo sapiens
  siRNA target sequence for HIPK1 (NM_152696.3,1015-1033).
gcccactgccactcaagta

SEQ ID NO: 28181 - DNA, 19 bp, Homo sapiens
  siRNA target sequence for HIPK1 (NM_152696.3,1180-1198).
ctgctagtcacgtttccaa

SEQ ID NO: 28182 - DNA, 19 bp, Homo sapiens
  siRNA target sequence for HIPK1 (NM_152696.3,1387-1405).
gcttgccagctgaatatct

SEQ ID NO: 28183 - DNA, 19 bp, Homo sapiens
  siRNA target sequence for HIPK1 (NM_152696.3,1388-1406).
cttgccagctgaatatctt

SEQ ID NO: 28184 - DNA, 19 bp, Homo sapiens
  siRNA target sequence for HIPK1 (NM_152696.3,1475-1493).
gcttaagacacctgaagaa

SEQ ID NO: 28185 - DNA, 19 bp, Homo sapiens
  siRNA target sequence for HIPK1 (NM_152696.3,1524-1542).
gaagctcggaagtacattt

SEQ ID NO: 28186 - DNA, 19 bp, Homo sapiens
  siRNA target sequence for HIPK1 (NM_152696.3,1563-1581).
gctcaggtgaatatgtcta

SEQ ID NO: 28187 - DNA, 19 bp, Homo sapiens
  siRNA target sequence for HIPK1 (NM_152696.3,1617-1635).
gcagaccgaagagaataca

SEQ ID NO: 28188 - DNA, 19 bp, Homo sapiens
  siRNA target sequence for HIPK1 (NM_152696.3,1618-1636).
cagaccgaagagaatacat

SEQ ID NO: 28189 - DNA, 19 bp, Homo sapiens
  siRNA target sequence for HIPK1 (NM_152696.3,1627-1645).
gagaatacattgatctgtt

SEQ ID NO: 28190 - DNA, 19 bp, Homo sapiens
  siRNA target sequence for HIPK1 (NM_152696.3,1649-1667).
gaaaatgctcacaattgat

SEQ ID NO: 28191 - DNA, 19 bp, Homo sapiens
  siRNA target sequence for HIPK1 (NM_152696.3,1687-1705).
ctctaaaaactcttaacca

SEQ ID NO: 28192 - DNA, 19 bp, Homo sapiens
  siRNA target sequence for HIPK1 (NM_152696.3,1704-1722).
catcagtttgtgacaatga

SEQ ID NO: 28193 - DNA, 19 bp, Homo sapiens
  siRNA target sequence for HIPK1 (NM_152696.3,1740-1758).
ccacatagcaatcatgtta

SEQ ID NO: 28194 - DNA, 19 bp, Homo sapiens
  siRNA target sequence for HIPK1 (NM_152696.3,1741-1759).
cacatagcaatcatgttaa

SEQ ID NO: 28195 - DNA, 19 bp, Homo sapiens
  siRNA target sequence for HIPK1 (NM_152696.3,1786-1804).
gcaagcggagggttcacat

SEQ ID NO: 28196 - DNA, 19 bp, Homo sapiens
  siRNA target sequence for HIPK1 (NM_152696.3,1790-1808).
gcggagggttcacatgtat

SEQ ID NO: 28197 - DNA, 19 bp, Homo sapiens
  siRNA target sequence for HIPK1 (NM_152696.3,1792-1810).
ggagggttcacatgtatga

SEQ ID NO: 28198 - DNA, 19 bp, Homo sapiens
  siRNA target sequence for HIPK1 (NM_152696.3,1793-1811).
gagggttcacatgtatgat

SEQ ID NO: 28199 - DNA, 19 bp, Homo sapiens
  siRNA target sequence for HIPK1 (NM_152696.3,1796-1814).
ggttcacatgtatgataca

SEQ ID NO: 28200 - DNA, 19 bp, Homo sapiens
  siRNA target sequence for HIPK1 (NM_152696.3,1886-1904).
cagcaatcagctcaataca

SEQ ID NO: 28201 - DNA, 19 bp, Homo sapiens
  siRNA target sequence for HIPK1 (NM_152696.3,1888-1906).
gcaatcagctcaatacagt

SEQ ID NO: 28202 - DNA, 19 bp, Homo sapiens
  siRNA target sequence for HIPK1 (NM_152696.3,1923-1941).
gttctagcttccagttcta

SEQ ID NO: 28203 - DNA, 19 bp, Homo sapiens
  siRNA target sequence for HIPK1 (NM_152696.3,1975-1993).
cagatgtctcactactaaa

SEQ ID NO: 28204 - DNA, 19 bp, Homo sapiens
  siRNA target sequence for HIPK1 (NM_152696.3,2086-2104).
gcactcagacagatccatt

SEQ ID NO: 28205 - DNA, 19 bp, Homo sapiens
  siRNA target sequence for HIPK1 (NM_152696.3,2135-2153).
gtttcaaactggactacaa

SEQ ID NO: 28206 - DNA, 19 bp, Homo sapiens
  siRNA target sequence for HIPK1 (NM_152696.3,2146-2164).
gactacaagcaacaacaaa

SEQ ID NO: 28207 - DNA, 19 bp, Homo sapiens
  siRNA target sequence for HIPK1 (NM_152696.3,2151-2169).
caagcaacaacaaagcatt

SEQ ID NO: 28208 - DNA, 19 bp, Homo sapiens
  siRNA target sequence for HIPK1 (NM_152696.3,2229-2247).
cagccactacagattcagt

SEQ ID NO: 28209 - DNA, 19 bp, Homo sapiens
  siRNA target sequence for HIPK1 (NM_152696.3,2266-2284).
gaagctgtacaccactaat

SEQ ID NO: 28210 - DNA, 19 bp, Homo sapiens
  siRNA target sequence for HIPK1 (NM_152696.3,2269-2287).
gctgtacaccactaatggt

SEQ ID NO: 28211 - DNA, 19 bp, Homo sapiens
  siRNA target sequence for HIPK1 (NM_152696.3,2270-2288).
ctgtacaccactaatggta

SEQ ID NO: 28212 - DNA, 19 bp, Homo sapiens
  siRNA target sequence for HIPK1 (NM_152696.3,2327-2345).
gtatgcggtgccctttact

SEQ ID NO: 28213 - DNA, 19 bp, Homo sapiens
  siRNA target sequence for HIPK1 (NM_152696.3,2437-2455).
cttcaacttggcaacagtt

SEQ ID NO: 28214 - DNA, 19 bp, Homo sapiens
  siRNA target sequence for HIPK1 (NM_152696.3,2458-2476).
ctggggtagctctacacaa

SEQ ID NO: 28215 - DNA, 19 bp, Homo sapiens
  siRNA target sequence for HIPK1 (NM_152696.3,2651-2669).
ccatgttgtcagacaacaa

SEQ ID NO: 28216 - DNA, 19 bp, Homo sapiens
  siRNA target sequence for HIPK1 (NM_152696.3,2681-2699).
cctcccttcgaagaagaat

SEQ ID NO: 28217 - DNA, 19 bp, Homo sapiens
  siRNA target sequence for HIPK1 (NM_152696.3,2682-2700).
ctcccttcgaagaagaata

SEQ ID NO: 28218 - DNA, 19 bp, Homo sapiens
  siRNA target sequence for HIPK1 (NM_152696.3,2746-2764).
cttcccaagtctattctct

SEQ ID NO: 28219 - DNA, 19 bp, Homo sapiens
  siRNA target sequence for HIPK1 (NM_152696.3,2781-2799).
ctccgcaccacatcttctt

SEQ ID NO: 28220 - DNA, 19 bp, Homo sapiens
  siRNA target sequence for HIPK1 (NM_152696.3,2783-2801).
ccgcaccacatcttcttat

SEQ ID NO: 28221 - DNA, 19 bp, Homo sapiens
  siRNA target sequence for HIPK1 (NM_152696.3,2784-2802).
cgcaccacatcttcttata

SEQ ID NO: 28222 - DNA, 19 bp, Homo sapiens
  siRNA target sequence for HIPK1 (NM_152696.3,2785-2803).
gcaccacatcttcttataa

SEQ ID NO: 28223 - DNA, 19 bp, Homo sapiens
  siRNA target sequence for HIPK1 (NM_152696.3,2791-2809).
catcttcttataattcctt

SEQ ID NO: 28224 - DNA, 19 bp, Homo sapiens
  siRNA target sequence for HIPK1 (NM_152696.3,2826-2844).
cagcatcagcccatcatca

SEQ ID NO: 28225 - DNA, 19 bp, Homo sapiens
  siRNA target sequence for HIPK1 (NM_152696.3,2828-2846).
gcatcagcccatcatcatt

SEQ ID NO: 28226 - DNA, 19 bp, Homo sapiens
  siRNA target sequence for HIPK1 (NM_152696.3,3100-3118).
ctggcacccgcactatcat

SEQ ID NO: 28227 - DNA, 19 bp, Homo sapiens
  siRNA target sequence for HIPK1 (NM_152696.3,3103-3121).
gcacccgcactatcattgt

SEQ ID NO: 28228 - DNA, 19 bp, Homo sapiens
  siRNA target sequence for HIPK1 (NM_152696.3,3336-3354).
gggccctgcactgttgtta

SEQ ID NO: 28229 - DNA, 19 bp, Homo sapiens
  siRNA target sequence for HIPK1 (NM_181358.1,72-90).
gatgtttcagattcgttat

SEQ ID NO: 28230 - DNA, 19 bp, Homo sapiens
  siRNA target sequence for HIPK1 (NM_181358.1,75-93).
gtttcagattcgttatatt

SEQ ID NO: 28231 - DNA, 19 bp, Homo sapiens
  siRNA target sequence for HIPK1 (NM_181358.1,2259-2277).
cagctccattgctcatctt

SEQ ID NO: 28232 - DNA, 19 bp, Homo sapiens
  siRNA target sequence for HIPK1 (NM_181358.1,2302-2320).
catgctgcagcctatacca

SEQ ID NO: 28233 - DNA, 19 bp, Homo sapiens
  siRNA target sequence for HIST1H1A (NM_005325.2,236-254).
gtcgttggcagctcttaaa

SEQ ID NO: 28234 - DNA, 19 bp, Homo sapiens
  siRNA target sequence for HIST1H1A (NM_005325.2,238-256).
cgttggcagctcttaaaaa

SEQ ID NO: 28235 - DNA, 19 bp, Homo sapiens
  siRNA target sequence for HIST1H1A (NM_005325.2,425-443).
ctcaaaggtggctacaaaa

SEQ ID NO: 28236 - DNA, 19 bp, Homo sapiens
  siRNA target sequence for HIST1H1A (NM_005325.2,449-467).
ggcaacgggtgcatctaaa

SEQ ID NO: 28237 - DNA, 19 bp, Homo sapiens
  siRNA target sequence for HIST1H1A (NM_005325.2,450-468).
gcaacgggtgcatctaaaa

SEQ ID NO: 28238 - DNA, 19 bp, Homo sapiens
  siRNA target sequence for HIST1H1A (NM_005325.2,451-469).
caacgggtgcatctaaaaa

SEQ ID NO: 28239 - DNA, 19 bp, Homo sapiens
  siRNA target sequence for HIST1H1A (NM_005325.2,454-472).
cgggtgcatctaaaaagct

SEQ ID NO: 28240 - DNA, 19 bp, Homo sapiens
  siRNA target sequence for HIST1H1A (NM_005325.2,502-520).
gcgtcaagactccgaaaaa

SEQ ID NO: 28241 - DNA, 19 bp, Homo sapiens
  siRNA target sequence for HIST1H1A (NM_005325.2,530-548).
gcctgcggcaacaaggaaa

SEQ ID NO: 28242 - DNA, 19 bp, Homo sapiens
  siRNA target sequence for HIST1H1A (NM_005325.2,610-628).
ctaaagctaaggctgtaaa

SEQ ID NO: 28243 - DNA, 19 bp, Homo sapiens
  siRNA target sequence for HIST1H1A (NM_005325.2,650-668).
ggtgacgaagccaaagact

SEQ ID NO: 28244 - DNA, 19 bp, Homo sapiens
  siRNA target sequence for HIST1H1A (NM_005325.2,665-683).
gactgccaaacccaagaaa

SEQ ID NO: 28245 - DNA, 19 bp, Homo sapiens
  siRNA target sequence for HIST1H1B (NM_005322.2,218-236).
gagcgcaatggcctttctt

SEQ ID NO: 28246 - DNA, 19 bp, Homo sapiens
  siRNA target sequence for HIST1H1B (NM_005322.2,543-561).
cggctggcgtcaaaaaggt

SEQ ID NO: 28247 - DNA, 19 bp, Homo sapiens
  siRNA target sequence for HIST1H1B (NM_005322.2,588-606).
ccgctgccaaaccgaaaaa

SEQ ID NO: 28248 - DNA, 19 bp, Homo sapiens
  siRNA target sequence for HIST1H1B (NM_005322.2,673-691).
gcccaaagcagcaaaacct

SEQ ID NO: 28249 - DNA, 19 bp, Homo sapiens
  siRNA target sequence for HIST1H1C (NM_005319.3,87-105).
cggagaaggcccctgtaaa

SEQ ID NO: 28250 - DNA, 19 bp, Homo sapiens
  siRNA target sequence for HIST1H1C (NM_005319.3,315-333).
gcactctggtgcaaacgaa

SEQ ID NO: 28251 - DNA, 19 bp, Homo sapiens
  siRNA target sequence for HIST1H1C (NM_005319.3,316-334).
cactctggtgcaaacgaaa

SEQ ID NO: 28252 - DNA, 19 bp, Homo sapiens
  siRNA target sequence for HIST1H1C (NM_005319.3,414-432).
gcggaaccaaacctaagaa

SEQ ID NO: 28253 - DNA, 19 bp, Homo sapiens
  siRNA target sequence for HIST1H1C (NM_005319.3,487-505).
gaagagcgctaagaaaaca

SEQ ID NO: 28254 - DNA, 19 bp, Homo sapiens
  siRNA target sequence for HIST1H1C (NM_005319.3,532-550).
ggccactgtaaccaagaaa

SEQ ID NO: 28255 - DNA, 19 bp, Homo sapiens
  siRNA target sequence for HIST1H1C (NM_005319.3,636-654).
ctaagcccaaggttgtcaa

SEQ ID NO: 28256 - DNA, 19 bp, Homo sapiens
  siRNA target sequence for HIST1H1D (NM_005320.2,171-189).
ccccagtatctgagcttat

SEQ ID NO: 28257 - DNA, 19 bp, Homo sapiens
  siRNA target sequence for HIST1H1D (NM_005320.2,173-191).
ccagtatctgagcttatca

SEQ ID NO: 28258 - DNA, 19 bp, Homo sapiens
  siRNA target sequence for HIST1H1D (NM_005320.2,498-516).
cgaagaaaagcatcaaaaa

SEQ ID NO: 28259 - DNA, 19 bp, Homo sapiens
  siRNA target sequence for HIST1H1D (NM_005320.2,547-565).
cgctgctgggaccaagaaa

SEQ ID NO: 28260 - DNA, 19 bp, Homo sapiens
  siRNA target sequence for HIST1H1D (NM_005320.2,672-690).
ggaagccgaaggttacaaa

SEQ ID NO: 28261 - DNA, 19 bp, Homo sapiens
  siRNA target sequence for HIST1H1E (NM_005321.2,177-195).
ggtgtccgagctcattact

SEQ ID NO: 28262 - DNA, 19 bp, Homo sapiens
  siRNA target sequence for HIST1H1E (NM_005321.2,178-196).
gtgtccgagctcattacta

SEQ ID NO: 28263 - DNA, 19 bp, Homo sapiens
  siRNA target sequence for HIST1H1E (NM_005321.2,180-198).
gtccgagctcattactaaa

SEQ ID NO: 28264 - DNA, 19 bp, Homo sapiens
  siRNA target sequence for HIST1H1E (NM_005321.2,183-201).
cgagctcattactaaagct

SEQ ID NO: 28265 - DNA, 19 bp, Homo sapiens
  siRNA target sequence for HIST1H1E (NM_005321.2,360-378).
cgcgtcgggttccttcaaa

SEQ ID NO: 28266 - DNA, 19 bp, Homo sapiens
  siRNA target sequence for HIST1H1E (NM_005321.2,626-644).
cgaaggccaaagcagttaa

SEQ ID NO: 28267 - DNA, 19 bp, Homo sapiens
  siRNA target sequence for HIST1H1T (NM_005323.3,124-142).
gaagccggctggcttgata

SEQ ID NO: 28268 - DNA, 19 bp, Homo sapiens
  siRNA target sequence for HIST1H1T (NM_005323.3,212-230).
gaacgagtaggtatgtctt

SEQ ID NO: 28269 - DNA, 19 bp, Homo sapiens
  siRNA target sequence for HIST1H1T (NM_005323.3,357-375).
cttccggttcctttaagct

SEQ ID NO: 28270 - DNA, 19 bp, Homo sapiens
  siRNA target sequence for HIST1H1T (NM_005323.3,362-380).
ggttcctttaagcttagta

SEQ ID NO: 28271 - DNA, 19 bp, Homo sapiens
  siRNA target sequence for HIST1H1T (NM_005323.3,363-381).
gttcctttaagcttagtaa

SEQ ID NO: 28272 - DNA, 19 bp, Homo sapiens
  siRNA target sequence for HIST1H1T (NM_005323.3,378-396).
gtaagaaggtgattcctaa

SEQ ID NO: 28273 - DNA, 19 bp, Homo sapiens
  siRNA target sequence for HIST1H1T (NM_005323.3,382-400).
gaaggtgattcctaaatct

SEQ ID NO: 28274 - DNA, 19 bp, Homo sapiens
  siRNA target sequence for HIST1H1T (NM_005323.3,412-430).
ggctaaaaagtcagtttct

SEQ ID NO: 28275 - DNA, 19 bp, Homo sapiens
  siRNA target sequence for HIST1H1T (NM_005323.3,541-559).
cgggagaaaggctaaagga

SEQ ID NO: 28276 - DNA, 19 bp, Homo sapiens
  siRNA target sequence for HIST1H1T (NM_005323.3,600-618).
gggcttcgaagtcaaaatt

SEQ ID NO: 28277 - DNA, 19 bp, Homo sapiens
  siRNA target sequence for HIST1H1T (NM_005323.3,602-620).
gcttcgaagtcaaaattga

SEQ ID NO: 28278 - DNA, 19 bp, Homo sapiens
  siRNA target sequence for HIST1H1T (NM_005323.3,619-637).
gacccaacatcatgaagtt

SEQ ID NO: 28279 - DNA, 19 bp, Homo sapiens
  siRNA target sequence for HIST1H1T (NM_005323.3,621-639).
cccaacatcatgaagttaa

SEQ ID NO: 28280 - DNA, 19 bp, Homo sapiens
  siRNA target sequence for HIST1H2AA (NM_170745.2,102-120).
gcttcgtaagggaaactat

SEQ ID NO: 28281 - DNA, 19 bp, Homo sapiens
  siRNA target sequence for HIST1H2AA (NM_170745.2,136-154).
gcaggcgcaccagtgtatt

SEQ ID NO: 28282 - DNA, 19 bp, Homo sapiens
  siRNA target sequence for HIST1H2AA (NM_170745.2,137-155).
caggcgcaccagtgtattt

SEQ ID NO: 28283 - DNA, 19 bp, Homo sapiens
  siRNA target sequence for HIST1H2AA (NM_170745.2,150-168).
gtatttggcggcagtgtta

SEQ ID NO: 28284 - DNA, 19 bp, Homo sapiens
  siRNA target sequence for HIST1H2AA (NM_170745.2,208-226).
gcgtctcgcgataacaaaa

SEQ ID NO: 28285 - DNA, 19 bp, Homo sapiens
  siRNA target sequence for HIST1H2AA (NM_170745.2,209-227).
cgtctcgcgataacaaaaa

SEQ ID NO: 28286 - DNA, 19 bp, Homo sapiens
  siRNA target sequence for HIST1H2AA (NM_170745.2,222-240).
caaaaaaactcgcattatt

SEQ ID NO: 28287 - DNA, 19 bp, Homo sapiens
  siRNA target sequence for HIST1H2AA (NM_170745.2,255-273).
gctagcgatccgcaatgat

SEQ ID NO: 28288 - DNA, 19 bp, Homo sapiens
  siRNA target sequence for HIST1H2AA (NM_170745.2,274-292).
gaggaactcaataagcttt

SEQ ID NO: 28289 - DNA, 19 bp, Homo sapiens
  siRNA target sequence for HIST1H2AA (NM_170745.2,362-380).
ctgagagtcaccaccataa

SEQ ID NO: 28290 - DNA, 19 bp, Homo sapiens
  siRNA target sequence for HIST1H2AE (NM_021052.2,86-104).
gctcgggcaaaagctaaaa

SEQ ID NO: 28291 - DNA, 19 bp, Homo sapiens
  siRNA target sequence for HIST1H2AK (NM_003510.2,43-61).
gctaagacccgttcttcaa

SEQ ID NO: 28292 - DNA, 19 bp, Homo sapiens
  siRNA target sequence for HIST1H2AM (NM_003514.2,95-113).
ctagagctgggctccaatt

SEQ ID NO: 28293 - DNA, 19 bp, Homo sapiens
  siRNA target sequence for HIST1H2BA (NM_170610.2,3-21).
gccggaggtgtcatctaaa

SEQ ID NO: 28294 - DNA, 19 bp, Homo sapiens
  siRNA target sequence for HIST1H2BA (NM_170610.2,98-116).
ggacccgtaaggagagtta

SEQ ID NO: 28295 - DNA, 19 bp, Homo sapiens
  siRNA target sequence for HIST1H2BA (NM_170610.2,99-117).
gacccgtaaggagagttat

SEQ ID NO: 28296 - DNA, 19 bp, Homo sapiens
  siRNA target sequence for HIST1H2BA (NM_170610.2,119-137).
ctatttacatctacaaagt

SEQ ID NO: 28297 - DNA, 19 bp, Homo sapiens
  siRNA target sequence for HIST1H2BA (NM_170610.2,173-191).
cgaaagctatgagcattat

SEQ ID NO: 28298 - DNA, 19 bp, Homo sapiens
  siRNA target sequence for HIST1H2BA (NM_170610.2,178-196).
gctatgagcattatgaatt

SEQ ID NO: 28299 - DNA, 19 bp, Homo sapiens
  siRNA target sequence for HIST1H2BB (NM_021062.2,44-62).
ctaagaaggctatcactaa

SEQ ID NO: 28300 - DNA, 19 bp, Homo sapiens
  siRNA target sequence for HIST1H2BJ (NM_021058.3,240-258).
cgtttgtgaacgacatttt

SEQ ID NO: 28301 - DNA, 19 bp, Homo sapiens
  siRNA target sequence for HIST1H2BM (NM_003521.2,41-59).
gctccaagaaggccattaa

SEQ ID NO: 28302 - DNA, 19 bp, Homo sapiens
  siRNA target sequence for HIST1H2BO (NM_003527.4,41-59).
gcccgacccggctaaatct

SEQ ID NO: 28303 - DNA, 19 bp, Homo sapiens
  siRNA target sequence for HIST1H3A (NM_003529.2,174-192).
cactgaactgcttattcgt

SEQ ID NO: 28304 - DNA, 19 bp, Homo sapiens
  siRNA target sequence for HIST1H3A (NM_003529.2,176-194).
ctgaactgcttattcgtaa

SEQ ID NO: 28305 - DNA, 19 bp, Homo sapiens
  siRNA target sequence for HIST1H3C (NM_003531.2,54-72).
caagcagcttgctactaaa

SEQ ID NO: 28306 - DNA, 19 bp, Homo sapiens
  siRNA target sequence for HIST1H3C (NM_003531.2,57-75).
gcagcttgctactaaagca

SEQ ID NO: 28307 - DNA, 19 bp, Homo sapiens
  siRNA target sequence for HIST1H4A (NM_003538.3,137-155).
ggatctctggtctgatcta

SEQ ID NO: 28308 - DNA, 19 bp, Homo sapiens
  siRNA target sequence for HIST1H4A (NM_003538.3,169-187).
ggggtgctcaaggtgtttt

SEQ ID NO: 28309 - DNA, 19 bp, Homo sapiens
  siRNA target sequence for HIST1H4A (NM_003538.3,170-188).
gggtgctcaaggtgttttt

SEQ ID NO: 28310 - DNA, 19 bp, Homo sapiens
  siRNA target sequence for HIST1H4D (NM_003539.3,166-184).
cgcggagtgctgaaagttt

SEQ ID NO: 28311 - DNA, 19 bp, Homo sapiens
  siRNA target sequence for HIST1H4F (NM_003540.3,19-37).
ggtggtaaaggtttaggaa

SEQ ID NO: 28312 - DNA, 19 bp, Homo sapiens
  siRNA target sequence for HIST2H2AB (NM_175065.2,273-291).
cgaagagctcaacaagtta

SEQ ID NO: 28313 - DNA, 19 bp, Homo sapiens
  siRNA target sequence for HIST2H2AB (NM_175065.2,370-388).
cacaagcctggcaagaaca

SEQ ID NO: 28314 - DNA, 19 bp, Homo sapiens
  siRNA target sequence for HIST2H2AC (NM_003517.2,333-351).
catccaggccgttctgtta

SEQ ID NO: 28315 - DNA, 19 bp, Homo sapiens
  siRNA target sequence for HIST2H2AC (NM_003517.2,337-355).
caggccgttctgttaccaa

SEQ ID NO: 28316 - DNA, 19 bp, Homo sapiens
  siRNA target sequence for HIST3H2BB (NM_175055.2,53-71).
gcccaagaagggttctaaa

SEQ ID NO: 28317 - DNA, 19 bp, Homo sapiens
  siRNA target sequence for HIVEP1 (NM_002114.1,327-345).
gcctcgaactaaacaaatt

SEQ ID NO: 28318 - DNA, 19 bp, Homo sapiens
  siRNA target sequence for HIVEP1 (NM_002114.1,329-347).
ctcgaactaaacaaattca

SEQ ID NO: 28319 - DNA, 19 bp, Homo sapiens
  siRNA target sequence for HIVEP1 (NM_002114.1,376-394).
gaagcacaaaaagaactta

SEQ ID NO: 28320 - DNA, 19 bp, Homo sapiens
  siRNA target sequence for HIVEP1 (NM_002114.1,423-441).
cttacaggctggtgttaaa

SEQ ID NO: 28321 - DNA, 19 bp, Homo sapiens
  siRNA target sequence for HIVEP1 (NM_002114.1,427-445).
caggctggtgttaaaggaa

SEQ ID NO: 28322 - DNA, 19 bp, Homo sapiens
  siRNA target sequence for HIVEP1 (NM_002114.1,463-481).
ggtgtgaaacgcaaaaaga

SEQ ID NO: 28323 - DNA, 19 bp, Homo sapiens
  siRNA target sequence for HIVEP1 (NM_002114.1,464-482).
gtgtgaaacgcaaaaagat

SEQ ID NO: 28324 - DNA, 19 bp, Homo sapiens
  siRNA target sequence for HIVEP1 (NM_002114.1,533-551).
ctcttcaggcaaaacataa

SEQ ID NO: 28325 - DNA, 19 bp, Homo sapiens
  siRNA target sequence for HIVEP1 (NM_002114.1,773-791).
gcgctgatcctgccaaatt

SEQ ID NO: 28326 - DNA, 19 bp, Homo sapiens
  siRNA target sequence for HIVEP1 (NM_002114.1,775-793).
gctgatcctgccaaattca

SEQ ID NO: 28327 - DNA, 19 bp, Homo sapiens
  siRNA target sequence for HIVEP1 (NM_002114.1,792-810).
cagtgacctcgatgaacaa

SEQ ID NO: 28328 - DNA, 19 bp, Homo sapiens
  siRNA target sequence for HIVEP1 (NM_002114.1,845-863).
ctgacaatagcgaatgcat

SEQ ID NO: 28329 - DNA, 19 bp, Homo sapiens
  siRNA target sequence for HIVEP1 (NM_002114.1,884-902).
cgtccccctcctatacaaa

SEQ ID NO: 28330 - DNA, 19 bp, Homo sapiens
  siRNA target sequence for HIVEP1 (NM_002114.1,888-906).
cccctcctatacaaacact

SEQ ID NO: 28331 - DNA, 19 bp, Homo sapiens
  siRNA target sequence for HIVEP1 (NM_002114.1,903-921).
cactgcattcgatgtctta

SEQ ID NO: 28332 - DNA, 19 bp, Homo sapiens
  siRNA target sequence for HIVEP1 (NM_002114.1,905-923).
ctgcattcgatgtcttact

SEQ ID NO: 28333 - DNA, 19 bp, Homo sapiens
  siRNA target sequence for HIVEP1 (NM_002114.1,943-961).
ctgagcaccttgtcacaaa

SEQ ID NO: 28334 - DNA, 19 bp, Homo sapiens
  siRNA target sequence for HIVEP1 (NM_002114.1,963-981).
gggctcaccttgtgcaatt

SEQ ID NO: 28335 - DNA, 19 bp, Homo sapiens
  siRNA target sequence for HIVEP1 (NM_002114.1,964-982).
ggctcaccttgtgcaatta

SEQ ID NO: 28336 - DNA, 19 bp, Homo sapiens
  siRNA target sequence for HIVEP1 (NM_002114.1,965-983).
gctcaccttgtgcaattaa

SEQ ID NO: 28337 - DNA, 19 bp, Homo sapiens
  siRNA target sequence for HIVEP1 (NM_002114.1,1013-1031).
cacgttcccctcccaaatt

SEQ ID NO: 28338 - DNA, 19 bp, Homo sapiens
  siRNA target sequence for HIVEP1 (NM_002114.1,1084-1102).
gaatcacagtcttcttgta

SEQ ID NO: 28339 - DNA, 19 bp, Homo sapiens
  siRNA target sequence for HIVEP1 (NM_002114.1,1103-1121).
cctcatacacagtccatat

SEQ ID NO: 28340 - DNA, 19 bp, Homo sapiens
  siRNA target sequence for HIVEP1 (NM_002114.1,1230-1248).
ggggtgttcaggtttcaca

SEQ ID NO: 28341 - DNA, 19 bp, Homo sapiens
  siRNA target sequence for HIVEP1 (NM_002114.1,1247-1265).
caggatcactgacaaatct

SEQ ID NO: 28342 - DNA, 19 bp, Homo sapiens
  siRNA target sequence for HIVEP1 (NM_002114.1,1385-1403).
ctgcttcacctttgtcaat

SEQ ID NO: 28343 - DNA, 19 bp, Homo sapiens
  siRNA target sequence for HIVEP1 (NM_002114.1,1437-1455).
gccaatctataattcaact

SEQ ID NO: 28344 - DNA, 19 bp, Homo sapiens
  siRNA target sequence for HIVEP1 (NM_002114.1,1443-1461).
ctataattcaactcatgtt

SEQ ID NO: 28345 - DNA, 19 bp, Homo sapiens
  siRNA target sequence for HIVEP1 (NM_002114.1,1456-1474).
catgttgcctctgttgtta

SEQ ID NO: 28346 - DNA, 19 bp, Homo sapiens
  siRNA target sequence for HIVEP1 (NM_002114.1,1462-1480).
gcctctgttgttaatcaaa

SEQ ID NO: 28347 - DNA, 19 bp, Homo sapiens
  siRNA target sequence for HIVEP1 (NM_002114.1,1477-1495).
caaagcgtagagcaaatgt

SEQ ID NO: 28348 - DNA, 19 bp, Homo sapiens
  siRNA target sequence for HIVEP1 (NM_002114.1,1571-1589).
caaagcctagtgtgctttt

SEQ ID NO: 28349 - DNA, 19 bp, Homo sapiens
  siRNA target sequence for HIVEP1 (NM_002114.1,1656-1674).
gactaaaagtaatctgtat

SEQ ID NO: 28350 - DNA, 19 bp, Homo sapiens
  siRNA target sequence for HIVEP1 (NM_002114.1,1669-1687).
ctgtataagcacaagaaat

SEQ ID NO: 28351 - DNA, 19 bp, Homo sapiens
  siRNA target sequence for HIVEP1 (NM_002114.1,1683-1701).
gaaatcccacgcacatact

SEQ ID NO: 28352 - DNA, 19 bp, Homo sapiens
  siRNA target sequence for HIVEP1 (NM_002114.1,1688-1706).
cccacgcacatactatcaa

SEQ ID NO: 28353 - DNA, 19 bp, Homo sapiens
  siRNA target sequence for HIVEP1 (NM_002114.1,1689-1707).
ccacgcacatactatcaaa

SEQ ID NO: 28354 - DNA, 19 bp, Homo sapiens
  siRNA target sequence for HIVEP1 (NM_002114.1,1758-1776).
gtcccccaaagcacttagt

SEQ ID NO: 28355 - DNA, 19 bp, Homo sapiens
  siRNA target sequence for HIVEP1 (NM_002114.1,1760-1778).
cccccaaagcacttagtat

SEQ ID NO: 28356 - DNA, 19 bp, Homo sapiens
  siRNA target sequence for HIVEP1 (NM_002114.1,1764-1782).
caaagcacttagtattcat

SEQ ID NO: 28357 - DNA, 19 bp, Homo sapiens
  siRNA target sequence for HIVEP1 (NM_002114.1,1995-2013).
gacagagttaccgaaagtt

SEQ ID NO: 28358 - DNA, 19 bp, Homo sapiens
  siRNA target sequence for HIVEP1 (NM_002114.1,1997-2015).
cagagttaccgaaagttgt

SEQ ID NO: 28359 - DNA, 19 bp, Homo sapiens
  siRNA target sequence for HIVEP1 (NM_002114.1,2109-2127).
ccttcaggtgacaaacgta

SEQ ID NO: 28360 - DNA, 19 bp, Homo sapiens
  siRNA target sequence for HIVEP1 (NM_002114.1,2131-2149).
ccactttcagccaacatgt

SEQ ID NO: 28361 - DNA, 19 bp, Homo sapiens
  siRNA target sequence for HIVEP1 (NM_002114.1,2163-2181).
ctccaggttggagactaat

SEQ ID NO: 28362 - DNA, 19 bp, Homo sapiens
  siRNA target sequence for HIVEP1 (NM_002114.1,2169-2187).
gttggagactaatgagaat

SEQ ID NO: 28363 - DNA, 19 bp, Homo sapiens
  siRNA target sequence for HIVEP1 (NM_002114.1,2269-2287).
cagcaggctaccgattact

SEQ ID NO: 28364 - DNA, 19 bp, Homo sapiens
  siRNA target sequence for HIVEP1 (NM_002114.1,2310-2328).
cctgagtcctcgaagttta

SEQ ID NO: 28365 - DNA, 19 bp, Homo sapiens
  siRNA target sequence for HIVEP1 (NM_002114.1,2313-2331).
gagtcctcgaagtttagga

SEQ ID NO: 28366 - DNA, 19 bp, Homo sapiens
  siRNA target sequence for HIVEP1 (NM_002114.1,2551-2569).
cttgaggagcggatatcga

SEQ ID NO: 28367 - DNA, 19 bp, Homo sapiens
  siRNA target sequence for HIVEP1 (NM_002114.1,2557-2575).
gagcggatatcgaagctta

SEQ ID NO: 28368 - DNA, 19 bp, Homo sapiens
  siRNA target sequence for HIVEP1 (NM_002114.1,2560-2578).
cggatatcgaagcttatct

SEQ ID NO: 28369 - DNA, 19 bp, Homo sapiens
  siRNA target sequence for HIVEP1 (NM_002114.1,2571-2589).
gcttatctcagacaatgaa

SEQ ID NO: 28370 - DNA, 19 bp, Homo sapiens
  siRNA target sequence for HIVEP1 (NM_002114.1,2662-2680).
gattcccccaaatcataca

SEQ ID NO: 28371 - DNA, 19 bp, Homo sapiens
  siRNA target sequence for HIVEP1 (NM_002114.1,2667-2685).
ccccaaatcatacatattt

SEQ ID NO: 28372 - DNA, 19 bp, Homo sapiens
  siRNA target sequence for HIVEP1 (NM_002114.1,2697-2715).
ccagtttgatttaaaacca

SEQ ID NO: 28373 - DNA, 19 bp, Homo sapiens
  siRNA target sequence for HIVEP1 (NM_002114.1,2716-2734).
gtgggacggagaacaagtt

SEQ ID NO: 28374 - DNA, 19 bp, Homo sapiens
  siRNA target sequence for HIVEP1 (NM_002114.1,2729-2747).
caagttcaagctctgatat

SEQ ID NO: 28375 - DNA, 19 bp, Homo sapiens
  siRNA target sequence for HIVEP1 (NM_002114.1,2758-2776).
cctttcacccctactgaaa

SEQ ID NO: 28376 - DNA, 19 bp, Homo sapiens
  siRNA target sequence for HIVEP1 (NM_002114.1,2759-2777).
ctttcacccctactgaaaa

SEQ ID NO: 28377 - DNA, 19 bp, Homo sapiens
  siRNA target sequence for HIVEP1 (NM_002114.1,2763-2781).
cacccctactgaaaaatca

SEQ ID NO: 28378 - DNA, 19 bp, Homo sapiens
  siRNA target sequence for HIVEP1 (NM_002114.1,2815-2833).
gactgtttacctatcacaa

SEQ ID NO: 28379 - DNA, 19 bp, Homo sapiens
  siRNA target sequence for HIVEP1 (NM_002114.1,2824-2842).
cctatcacaagaagtaatt

SEQ ID NO: 28380 - DNA, 19 bp, Homo sapiens
  siRNA target sequence for HIVEP1 (NM_002114.1,2844-2862).
catgccgaccacaggttat

SEQ ID NO: 28381 - DNA, 19 bp, Homo sapiens
  siRNA target sequence for HIVEP1 (NM_002114.1,2847-2865).
gccgaccacaggttattca

SEQ ID NO: 28382 - DNA, 19 bp, Homo sapiens
  siRNA target sequence for HIVEP1 (NM_002114.1,2867-2885).
cagtacctgcaaatataat

SEQ ID NO: 28383 - DNA, 19 bp, Homo sapiens
  siRNA target sequence for HIVEP1 (NM_002114.1,3141-3159).
ggcacaaggcccacatata

SEQ ID NO: 28384 - DNA, 19 bp, Homo sapiens
  siRNA target sequence for HIVEP1 (NM_002114.1,3143-3161).
cacaaggcccacatataga

SEQ ID NO: 28385 - DNA, 19 bp, Homo sapiens
  siRNA target sequence for HIVEP1 (NM_002114.1,3148-3166).
ggcccacatatagaaaaaa

SEQ ID NO: 28386 - DNA, 19 bp, Homo sapiens
  siRNA target sequence for HIVEP1 (NM_002114.1,3182-3200).
ggcgagggacaatgtttga

SEQ ID NO: 28387 - DNA, 19 bp, Homo sapiens
  siRNA target sequence for HIVEP1 (NM_002114.1,3184-3202).
cgagggacaatgtttgagt

SEQ ID NO: 28388 - DNA, 19 bp, Homo sapiens
  siRNA target sequence for HIVEP1 (NM_002114.1,3250-3268).
cataagaaattttactgtt

SEQ ID NO: 28389 - DNA, 19 bp, Homo sapiens
  siRNA target sequence for HIVEP1 (NM_002114.1,3466-3484).
ggaacatctccaaaaagtt

SEQ ID NO: 28390 - DNA, 19 bp, Homo sapiens
  siRNA target sequence for HIVEP1 (NM_002114.1,3523-3541).
cccagtttgcctaaacata

SEQ ID NO: 28391 - DNA, 19 bp, Homo sapiens
  siRNA target sequence for HIVEP1 (NM_002114.1,3561-3579).
ccagcagcataaaaatata

SEQ ID NO: 28392 - DNA, 19 bp, Homo sapiens
  siRNA target sequence for HIVEP1 (NM_002114.1,3582-3600).
gttgcaaaactcccatatt

SEQ ID NO: 28393 - DNA, 19 bp, Homo sapiens
  siRNA target sequence for HIVEP1 (NM_002114.1,3647-3665).
cgaccatcatggaacaaca

SEQ ID NO: 28394 - DNA, 19 bp, Homo sapiens
  siRNA target sequence for HIVEP1 (NM_002114.1,3749-3767).
gcaggcccaactcatttga

SEQ ID NO: 28395 - DNA, 19 bp, Homo sapiens
  siRNA target sequence for HIVEP1 (NM_002114.1,3752-3770).
ggcccaactcatttgacaa

SEQ ID NO: 28396 - DNA, 19 bp, Homo sapiens
  siRNA target sequence for HIVEP1 (NM_002114.1,3768-3786).
caagcctgagccttttgaa

SEQ ID NO: 28397 - DNA, 19 bp, Homo sapiens
  siRNA target sequence for HIVEP1 (NM_002114.1,3771-3789).
gcctgagccttttgaaaga

SEQ ID NO: 28398 - DNA, 19 bp, Homo sapiens
  siRNA target sequence for HIVEP1 (NM_002114.1,3833-3851).
ccgggtctctaaaagtgat

SEQ ID NO: 28399 - DNA, 19 bp, Homo sapiens
  siRNA target sequence for HIVEP1 (NM_002114.1,3834-3852).
cgggtctctaaaagtgata

SEQ ID NO: 28400 - DNA, 19 bp, Homo sapiens
  siRNA target sequence for HIVEP1 (NM_002114.1,3951-3969).
cagaaagagtccaagtgaa

SEQ ID NO: 28401 - DNA, 19 bp, Homo sapiens
  siRNA target sequence for HIVEP1 (NM_002114.1,4109-4127).
cccagcgtagtgaaacctt

SEQ ID NO: 28402 - DNA, 19 bp, Homo sapiens
  siRNA target sequence for HIVEP1 (NM_002114.1,4114-4132).
cgtagtgaaaccttgtcaa

SEQ ID NO: 28403 - DNA, 19 bp, Homo sapiens
  siRNA target sequence for HIVEP1 (NM_002114.1,4115-4133).
gtagtgaaaccttgtcaaa

SEQ ID NO: 28404 - DNA, 19 bp, Homo sapiens
  siRNA target sequence for HIVEP1 (NM_002114.1,4170-4188).
gctccgtctggctgagata

SEQ ID NO: 28405 - DNA, 19 bp, Homo sapiens
  siRNA target sequence for HIVEP1 (NM_002114.1,4177-4195).
ctggctgagatagaacatt

SEQ ID NO: 28406 - DNA, 19 bp, Homo sapiens
  siRNA target sequence for HIVEP1 (NM_002114.1,4288-4306).
gacatagaggacgtttcta

SEQ ID NO: 28407 - DNA, 19 bp, Homo sapiens
  siRNA target sequence for HIVEP1 (NM_002114.1,4410-4428).
gaggcgtactgcatcagaa

SEQ ID NO: 28408 - DNA, 19 bp, Homo sapiens
  siRNA target sequence for HIVEP1 (NM_002114.1,4602-4620).
cccactggtacggcaaata

SEQ ID NO: 28409 - DNA, 19 bp, Homo sapiens
  siRNA target sequence for HIVEP1 (NM_002114.1,4603-4621).
ccactggtacggcaaatat

SEQ ID NO: 28410 - DNA, 19 bp, Homo sapiens
  siRNA target sequence for HIVEP1 (NM_002114.1,4606-4624).
ctggtacggcaaatatctt

SEQ ID NO: 28411 - DNA, 19 bp, Homo sapiens
  siRNA target sequence for HIVEP1 (NM_002114.1,4655-4673).
ctgtacacccaacatcttt

SEQ ID NO: 28412 - DNA, 19 bp, Homo sapiens
  siRNA target sequence for HIVEP1 (NM_002114.1,4662-4680).
cccaacatctttccaaaat

SEQ ID NO: 28413 - DNA, 19 bp, Homo sapiens
  siRNA target sequence for HIVEP1 (NM_002114.1,4717-4735).
gggcctcagctcactagta

SEQ ID NO: 28414 - DNA, 19 bp, Homo sapiens
  siRNA target sequence for HIVEP1 (NM_002114.1,4720-4738).
cctcagctcactagtacat

SEQ ID NO: 28415 - DNA, 19 bp, Homo sapiens
  siRNA target sequence for HIVEP1 (NM_002114.1,4723-4741).
cagctcactagtacatctt

SEQ ID NO: 28416 - DNA, 19 bp, Homo sapiens
  siRNA target sequence for HIVEP1 (NM_002114.1,4725-4743).
gctcactagtacatcttta

SEQ ID NO: 28417 - DNA, 19 bp, Homo sapiens
  siRNA target sequence for HIVEP1 (NM_002114.1,4772-4790).
ctcagactcaggttaagga

SEQ ID NO: 28418 - DNA, 19 bp, Homo sapiens
  siRNA target sequence for HIVEP1 (NM_002114.1,4795-4813).
caggcagaaacatcaaact

SEQ ID NO: 28419 - DNA, 19 bp, Homo sapiens
  siRNA target sequence for HIVEP1 (NM_002114.1,4824-4842).
caacgtttttcctgttcaa

SEQ ID NO: 28420 - DNA, 19 bp, Homo sapiens
  siRNA target sequence for HIVEP1 (NM_002114.1,4848-4866).
ctgtgatatcaatttgtta

SEQ ID NO: 28421 - DNA, 19 bp, Homo sapiens
  siRNA target sequence for HIVEP1 (NM_002114.1,4929-4947).
gggtagcaagccagataaa

SEQ ID NO: 28422 - DNA, 19 bp, Homo sapiens
  siRNA target sequence for HIVEP1 (NM_002114.1,5045-5063).
ctaatcctgtgcattcttt

SEQ ID NO: 28423 - DNA, 19 bp, Homo sapiens
  siRNA target sequence for HIVEP1 (NM_002114.1,5064-5082).
gccaaatcaagttatttca

SEQ ID NO: 28424 - DNA, 19 bp, Homo sapiens
  siRNA target sequence for HIVEP1 (NM_002114.1,5109-5127).
gacatcagcaacattacca

SEQ ID NO: 28425 - DNA, 19 bp, Homo sapiens
  siRNA target sequence for HIVEP1 (NM_002114.1,5116-5134).
gcaacattaccaaccaaat

SEQ ID NO: 28426 - DNA, 19 bp, Homo sapiens
  siRNA target sequence for HIVEP1 (NM_002114.1,5117-5135).
caacattaccaaccaaatt

SEQ ID NO: 28427 - DNA, 19 bp, Homo sapiens
  siRNA target sequence for HIVEP1 (NM_002114.1,5249-5267).
gtgttcctgcttactgttt

SEQ ID NO: 28428 - DNA, 19 bp, Homo sapiens
  siRNA target sequence for HIVEP1 (NM_002114.1,5279-5297).
catccctgccacaaatact

SEQ ID NO: 28429 - DNA, 19 bp, Homo sapiens
  siRNA target sequence for HIVEP1 (NM_002114.1,5282-5300).
ccctgccacaaatactagt

SEQ ID NO: 28430 - DNA, 19 bp, Homo sapiens
  siRNA target sequence for HIVEP1 (NM_002114.1,5322-5340).
gccaatttgccagactaat

SEQ ID NO: 28431 - DNA, 19 bp, Homo sapiens
  siRNA target sequence for HIVEP1 (NM_002114.1,5324-5342).
caatttgccagactaatca

SEQ ID NO: 28432 - DNA, 19 bp, Homo sapiens
  siRNA target sequence for HIVEP1 (NM_002114.1,5330-5348).
gccagactaatcatagtgt

SEQ ID NO: 28433 - DNA, 19 bp, Homo sapiens
  siRNA target sequence for HIVEP1 (NM_002114.1,5331-5349).
ccagactaatcatagtgta

SEQ ID NO: 28434 - DNA, 19 bp, Homo sapiens
  siRNA target sequence for HIVEP1 (NM_002114.1,5352-5370).
gccaatcagtgaagaacaa

SEQ ID NO: 28435 - DNA, 19 bp, Homo sapiens
  siRNA target sequence for HIVEP1 (NM_002114.1,5490-5508).
gcccataactcagaaaata

SEQ ID NO: 28436 - DNA, 19 bp, Homo sapiens
  siRNA target sequence for HIVEP1 (NM_002114.1,5491-5509).
cccataactcagaaaatat

SEQ ID NO: 28437 - DNA, 19 bp, Homo sapiens
  siRNA target sequence for HIVEP1 (NM_002114.1,5543-5561).
cagcttcgagtaaaaggat

SEQ ID NO: 28438 - DNA, 19 bp, Homo sapiens
  siRNA target sequence for HIVEP1 (NM_002114.1,5567-5585).
ccccagcaaatagtttaga

SEQ ID NO: 28439 - DNA, 19 bp, Homo sapiens
  siRNA target sequence for HIVEP1 (NM_002114.1,5569-5587).
ccagcaaatagtttagaca

SEQ ID NO: 28440 - DNA, 19 bp, Homo sapiens
  siRNA target sequence for HIVEP1 (NM_002114.1,5570-5588).
cagcaaatagtttagacat

SEQ ID NO: 28441 - DNA, 19 bp, Homo sapiens
  siRNA target sequence for HIVEP1 (NM_002114.1,5645-5663).
cagacgtgagacctttaga

SEQ ID NO: 28442 - DNA, 19 bp, Homo sapiens
  siRNA target sequence for HIVEP1 (NM_002114.1,5656-5674).
cctttagaggctttgagtt

SEQ ID NO: 28443 - DNA, 19 bp, Homo sapiens
  siRNA target sequence for HIVEP1 (NM_002114.1,5665-5683).
gctttgagttcgagagtta

SEQ ID NO: 28444 - DNA, 19 bp, Homo sapiens
  siRNA target sequence for HIVEP1 (NM_002114.1,5666-5684).
ctttgagttcgagagttaa

SEQ ID NO: 28445 - DNA, 19 bp, Homo sapiens
  siRNA target sequence for HIVEP1 (NM_002114.1,5716-5734).
gtgagacaggtttgtacta

SEQ ID NO: 28446 - DNA, 19 bp, Homo sapiens
  siRNA target sequence for HIVEP1 (NM_002114.1,5741-5759).
ccctggacggtgtgatgtt

SEQ ID NO: 28447 - DNA, 19 bp, Homo sapiens
  siRNA target sequence for HIVEP1 (NM_002114.1,5746-5764).
gacggtgtgatgttggaaa

SEQ ID NO: 28448 - DNA, 19 bp, Homo sapiens
  siRNA target sequence for HIVEP1 (NM_002114.1,5777-5795).
ctcaacctgaaattagtaa

SEQ ID NO: 28449 - DNA, 19 bp, Homo sapiens
  siRNA target sequence for HIVEP1 (NM_002114.1,5799-5817).
ggctgttaatttgacaaat

SEQ ID NO: 28450 - DNA, 19 bp, Homo sapiens
  siRNA target sequence for HIVEP1 (NM_002114.1,5803-5821).
gttaatttgacaaatgttt

SEQ ID NO: 28451 - DNA, 19 bp, Homo sapiens
  siRNA target sequence for HIVEP1 (NM_002114.1,5849-5867).
gctctaaatttgtcgttat

SEQ ID NO: 28452 - DNA, 19 bp, Homo sapiens
  siRNA target sequence for HIVEP1 (NM_002114.1,5850-5868).
ctctaaatttgtcgttata

SEQ ID NO: 28453 - DNA, 19 bp, Homo sapiens
  siRNA target sequence for HIVEP1 (NM_002114.1,5852-5870).
ctaaatttgtcgttataga

SEQ ID NO: 28454 - DNA, 19 bp, Homo sapiens
  siRNA target sequence for HIVEP1 (NM_002114.1,5860-5878).
gtcgttatagaacctataa

SEQ ID NO: 28455 - DNA, 19 bp, Homo sapiens
  siRNA target sequence for HIVEP1 (NM_002114.1,5862-5880).
cgttatagaacctataagt

SEQ ID NO: 28456 - DNA, 19 bp, Homo sapiens
  siRNA target sequence for HIVEP1 (NM_002114.1,5904-5922).
caagtcatccacatcatta

SEQ ID NO: 28457 - DNA, 19 bp, Homo sapiens
  siRNA target sequence for HIVEP1 (NM_002114.1,5913-5931).
cacatcattaactcttaca

SEQ ID NO: 28458 - DNA, 19 bp, Homo sapiens
  siRNA target sequence for HIVEP1 (NM_002114.1,5915-5933).
catcattaactcttacagt

SEQ ID NO: 28459 - DNA, 19 bp, Homo sapiens
  siRNA target sequence for HIVEP1 (NM_002114.1,6006-6024).
gaagtctccaggggttaaa

SEQ ID NO: 28460 - DNA, 19 bp, Homo sapiens
  siRNA target sequence for HIVEP1 (NM_002114.1,6129-6147).
gaaaactacaaccaacttt

SEQ ID NO: 28461 - DNA, 19 bp, Homo sapiens
  siRNA target sequence for HIVEP1 (NM_002114.1,6167-6185).
ggcagaagtcgttgcattt

SEQ ID NO: 28462 - DNA, 19 bp, Homo sapiens
  siRNA target sequence for HIVEP1 (NM_002114.1,6225-6243).
gacagtaagcgccagtaat

SEQ ID NO: 28463 - DNA, 19 bp, Homo sapiens
  siRNA target sequence for HIVEP1 (NM_002114.1,6229-6247).
gtaagcgccagtaatccaa

SEQ ID NO: 28464 - DNA, 19 bp, Homo sapiens
  siRNA target sequence for HIVEP1 (NM_002114.1,6255-6273).
cggtttgcccacaaaagtt

SEQ ID NO: 28465 - DNA, 19 bp, Homo sapiens
  siRNA target sequence for HIVEP1 (NM_002114.1,6274-6292).
gcacttgctctccttaatt

SEQ ID NO: 28466 - DNA, 19 bp, Homo sapiens
  siRNA target sequence for HIVEP1 (NM_002114.1,6283-6301).
ctccttaattcaaaacaga

SEQ ID NO: 28467 - DNA, 19 bp, Homo sapiens
  siRNA target sequence for HIVEP1 (NM_002114.1,6329-6347).
caataactacccattccaa

SEQ ID NO: 28468 - DNA, 19 bp, Homo sapiens
  siRNA target sequence for HIVEP1 (NM_002114.1,6339-6357).
ccattccaagtcagactta

SEQ ID NO: 28469 - DNA, 19 bp, Homo sapiens
  siRNA target sequence for HIVEP1 (NM_002114.1,6340-6358).
cattccaagtcagacttat

SEQ ID NO: 28470 - DNA, 19 bp, Homo sapiens
  siRNA target sequence for HIVEP1 (NM_002114.1,6344-6362).
ccaagtcagacttattggt

SEQ ID NO: 28471 - DNA, 19 bp, Homo sapiens
  siRNA target sequence for HIVEP1 (NM_002114.1,6352-6370).
gacttattggtctattcaa

SEQ ID NO: 28472 - DNA, 19 bp, Homo sapiens
  siRNA target sequence for HIVEP1 (NM_002114.1,6377-6395).
ggaaaagcagcttaagcaa

SEQ ID NO: 28473 - DNA, 19 bp, Homo sapiens
  siRNA target sequence for HIVEP1 (NM_002114.1,6387-6405).
cttaagcaagagagcatta

SEQ ID NO: 28474 - DNA, 19 bp, Homo sapiens
  siRNA target sequence for HIVEP1 (NM_002114.1,6392-6410).
gcaagagagcattaggtaa

SEQ ID NO: 28475 - DNA, 19 bp, Homo sapiens
  siRNA target sequence for HIVEP1 (NM_002114.1,6393-6411).
caagagagcattaggtaat

SEQ ID NO: 28476 - DNA, 19 bp, Homo sapiens
  siRNA target sequence for HIVEP1 (NM_002114.1,6523-6541).
gatggaggatataagtcaa

SEQ ID NO: 28477 - DNA, 19 bp, Homo sapiens
  siRNA target sequence for HIVEP1 (NM_002114.1,6599-6617).
gtggaatacgttgtaagaa

SEQ ID NO: 28478 - DNA, 19 bp, Homo sapiens
  siRNA target sequence for HIVEP1 (NM_002114.1,6639-6657).
catacgaacccatacagat

SEQ ID NO: 28479 - DNA, 19 bp, Homo sapiens
  siRNA target sequence for HIVEP1 (NM_002114.1,6670-6688).
cactgcacttactgtaact

SEQ ID NO: 28480 - DNA, 19 bp, Homo sapiens
  siRNA target sequence for HIVEP1 (NM_002114.1,6768-6786).
ctcagtaggtttaatagat

SEQ ID NO: 28481 - DNA, 19 bp, Homo sapiens
  siRNA target sequence for HIVEP1 (NM_002114.1,6834-6852).
gcgatctggatatgatctt

SEQ ID NO: 28482 - DNA, 19 bp, Homo sapiens
  siRNA target sequence for HIVEP1 (NM_002114.1,6963-6981).
gcaccttccatctagaagt

SEQ ID NO: 28483 - DNA, 19 bp, Homo sapiens
  siRNA target sequence for HIVEP1 (NM_002114.1,7017-7035).
caggatcaccgattgcttt

SEQ ID NO: 28484 - DNA, 19 bp, Homo sapiens
  siRNA target sequence for HIVEP1 (NM_002114.1,7106-7124).
cagcacagtctgactacaa

SEQ ID NO: 28485 - DNA, 19 bp, Homo sapiens
  siRNA target sequence for HIVEP1 (NM_002114.1,7159-7177).
cgtgctgcgagagatgaaa

SEQ ID NO: 28486 - DNA, 19 bp, Homo sapiens
  siRNA target sequence for HIVEP1 (NM_002114.1,7163-7181).
ctgcgagagatgaaaacga

SEQ ID NO: 28487 - DNA, 19 bp, Homo sapiens
  siRNA target sequence for HIVEP1 (NM_002114.1,7208-7226).
ggtccccgtgtcatcagat

SEQ ID NO: 28488 - DNA, 19 bp, Homo sapiens
  siRNA target sequence for HIVEP1 (NM_002114.1,7491-7509).
gcaatcgaggacaccttat

SEQ ID NO: 28489 - DNA, 19 bp, Homo sapiens
  siRNA target sequence for HIVEP1 (NM_002114.1,7492-7510).
caatcgaggacaccttata

SEQ ID NO: 28490 - DNA, 19 bp, Homo sapiens
  siRNA target sequence for HIVEP1 (NM_002114.1,7499-7517).
ggacaccttataatatggt

SEQ ID NO: 28491 - DNA, 19 bp, Homo sapiens
  siRNA target sequence for HIVEP1 (NM_002114.1,7500-7518).
gacaccttataatatggtt

SEQ ID NO: 28492 - DNA, 19 bp, Homo sapiens
  siRNA target sequence for HIVEP1 (NM_002114.1,7616-7634).
gtgtcgttcacagaacttt

SEQ ID NO: 28493 - DNA, 19 bp, Homo sapiens
  siRNA target sequence for HIVEP1 (NM_002114.1,7682-7700).
ctgctggagtggctgaatt

SEQ ID NO: 28494 - DNA, 19 bp, Homo sapiens
  siRNA target sequence for HIVEP1 (NM_002114.1,7684-7702).
gctggagtggctgaattaa

SEQ ID NO: 28495 - DNA, 19 bp, Homo sapiens
  siRNA target sequence for HIVEP1 (NM_002114.1,7777-7795).
cagtcactcccctcgttaa

SEQ ID NO: 28496 - DNA, 19 bp, Homo sapiens
  siRNA target sequence for HIVEP1 (NM_002114.1,7781-7799).
cactcccctcgttaagcat

SEQ ID NO: 28497 - DNA, 19 bp, Homo sapiens
  siRNA target sequence for HIVEP1 (NM_002114.1,7796-7814).
gcatggaaaccgtcaatat

SEQ ID NO: 28498 - DNA, 19 bp, Homo sapiens
  siRNA target sequence for HIVEP1 (NM_002114.1,7797-7815).
catggaaaccgtcaatatt

SEQ ID NO: 28499 - DNA, 19 bp, Homo sapiens
  siRNA target sequence for HIVEP1 (NM_002114.1,7800-7818).
ggaaaccgtcaatattgta

SEQ ID NO: 28500 - DNA, 19 bp, Homo sapiens
  siRNA target sequence for HIVEP1 (NM_002114.1,7816-7834).
gtaggcctagccaatacaa

SEQ ID NO: 28501 - DNA, 19 bp, Homo sapiens
  siRNA target sequence for HIVEP1 (NM_002114.1,7819-7837).
ggcctagccaatacaaata

SEQ ID NO: 28502 - DNA, 19 bp, Homo sapiens
  siRNA target sequence for HIVEP1 (NM_002114.1,7986-8004).
cccctcagtcagtcaagta

SEQ ID NO: 28503 - DNA, 19 bp, Homo sapiens
  siRNA target sequence for HIVEP1 (NM_002114.1,8262-8280).
gcctgaactcacttccata

SEQ ID NO: 28504 - DNA, 19 bp, Homo sapiens
  siRNA target sequence for HIVEP1 (NM_002114.1,8319-8337).
ggcacattctgaagttttt

SEQ ID NO: 28505 - DNA, 19 bp, Homo sapiens
  siRNA target sequence for HIVEP1 (NM_002114.1,8320-8338).
gcacattctgaagttttta

SEQ ID NO: 28506 - DNA, 19 bp, Homo sapiens
  siRNA target sequence for HIVEP1 (NM_002114.1,8451-8469).
cgaggacaggcttgtgata

SEQ ID NO: 28507 - DNA, 19 bp, Homo sapiens
  siRNA target sequence for HIVEP1 (NM_002114.1,8455-8473).
gacaggcttgtgatagcaa

SEQ ID NO: 28508 - DNA, 19 bp, Homo sapiens
  siRNA target sequence for HKR1 (NM_181786.2,455-473).
gctggagacttataaccat

SEQ ID NO: 28509 - DNA, 19 bp, Homo sapiens
  siRNA target sequence for HKR1 (NM_181786.2,713-731).
ccacctgggaaaacactat

SEQ ID NO: 28510 - DNA, 19 bp, Homo sapiens
  siRNA target sequence for HKR1 (NM_181786.2,753-771).
caggatccattctgcttta

SEQ ID NO: 28511 - DNA, 19 bp, Homo sapiens
  siRNA target sequence for HKR1 (NM_181786.2,1075-1093).
gggagacaccttacatgta

SEQ ID NO: 28512 - DNA, 19 bp, Homo sapiens
  siRNA target sequence for HKR1 (NM_181786.2,1289-1307).
gaagtcgaacctctttaca

SEQ ID NO: 28513 - DNA, 19 bp, Homo sapiens
  siRNA target sequence for HKR1 (NM_181786.2,1292-1310).
gtcgaacctctttacacat

SEQ ID NO: 28514 - DNA, 19 bp, Homo sapiens
  siRNA target sequence for HKR1 (NM_181786.2,1324-1342).
cagggctcaagccttatgt

SEQ ID NO: 28515 - DNA, 19 bp, Homo sapiens
  siRNA target sequence for HKR1 (NM_181786.2,1326-1344).
gggctcaagccttatgtgt

SEQ ID NO: 28516 - DNA, 19 bp, Homo sapiens
  siRNA target sequence for HKR1 (NM_181786.2,1548-1566).
cacctcatcagacacttaa

SEQ ID NO: 28517 - DNA, 19 bp, Homo sapiens
  siRNA target sequence for HKR1 (NM_181786.2,1551-1569).
ctcatcagacacttaagga

SEQ ID NO: 28518 - DNA, 19 bp, Homo sapiens
  siRNA target sequence for HKR1 (NM_181786.2,1611-1629).
cgtcactttagctggaaat

SEQ ID NO: 28519 - DNA, 19 bp, Homo sapiens
  siRNA target sequence for HKR1 (NM_181786.2,1662-1680).
ggggttaaaccttatgtct

SEQ ID NO: 28520 - DNA, 19 bp, Homo sapiens
  siRNA target sequence for HKR1 (NM_181786.2,1875-1893).
gataagtccaccctcattt

SEQ ID NO: 28521 - DNA, 19 bp, Homo sapiens
  siRNA target sequence for HKR1 (NM_181786.2,1959-1977).
cagaagcctaacctgttta

SEQ ID NO: 28522 - DNA, 19 bp, Homo sapiens
  siRNA target sequence for HKR1 (NM_181786.2,2121-2139).
cggcagtcacacctcatta

SEQ ID NO: 28523 - DNA, 19 bp, Homo sapiens
  siRNA target sequence for HKR1 (NM_181786.2,2203-2221).
gtcggaagtccaaccttat

SEQ ID NO: 28524 - DNA, 19 bp, Homo sapiens
  siRNA target sequence for HMG2L1 (NM_005487.2,571-589).
cctgttgaaagctatcact

SEQ ID NO: 28525 - DNA, 19 bp, Homo sapiens
  siRNA target sequence for HMG2L1 (NM_005487.2,651-669).
caagccattcggagagtaa

SEQ ID NO: 28526 - DNA, 19 bp, Homo sapiens
  siRNA target sequence for HMG2L1 (NM_005487.2,654-672).
gccattcggagagtaaaaa

SEQ ID NO: 28527 - DNA, 19 bp, Homo sapiens
  siRNA target sequence for HMG2L1 (NM_005487.2,728-746).
ggtggctcccacaaatcga

SEQ ID NO: 28528 - DNA, 19 bp, Homo sapiens
  siRNA target sequence for HMG2L1 (NM_005487.2,729-747).
gtggctcccacaaatcgaa

SEQ ID NO: 28529 - DNA, 19 bp, Homo sapiens
  siRNA target sequence for HMG2L1 (NM_005487.2,731-749).
ggctcccacaaatcgaaaa

SEQ ID NO: 28530 - DNA, 19 bp, Homo sapiens
  siRNA target sequence for HMG2L1 (NM_005487.2,733-751).
ctcccacaaatcgaaaaaa

SEQ ID NO: 28531 - DNA, 19 bp, Homo sapiens
  siRNA target sequence for HMG2L1 (NM_005487.2,737-755).
cacaaatcgaaaaaaatga

SEQ ID NO: 28532 - DNA, 19 bp, Homo sapiens
  siRNA target sequence for HMG2L1 (NM_005487.2,791-809).
cgggagcctgatggtttaa

SEQ ID NO: 28533 - DNA, 19 bp, Homo sapiens
  siRNA target sequence for HMG2L1 (NM_005487.2,793-811).
ggagcctgatggtttaaaa

SEQ ID NO: 28534 - DNA, 19 bp, Homo sapiens
  siRNA target sequence for HMG2L1 (NM_005487.2,883-901).
ccaacaagcgactgtgaaa

SEQ ID NO: 28535 - DNA, 19 bp, Homo sapiens
  siRNA target sequence for HMG2L1 (NM_005487.2,890-908).
gcgactgtgaaaaaatcct

SEQ ID NO: 28536 - DNA, 19 bp, Homo sapiens
  siRNA target sequence for HMG2L1 (NM_005487.2,925-943).
ggatgagcagggtgcttta

SEQ ID NO: 28537 - DNA, 19 bp, Homo sapiens
  siRNA target sequence for HMG2L1 (NM_005487.2,947-965).
ctaggacatgagttacaga

SEQ ID NO: 28538 - DNA, 19 bp, Homo sapiens
  siRNA target sequence for HMG2L1 (NM_005487.2,1003-1021).
ctcagacgcacattcatct

SEQ ID NO: 28539 - DNA, 19 bp, Homo sapiens
  siRNA target sequence for HMG2L1 (NM_005487.2,1066-1084).
gtcccacagtgctaacctt

SEQ ID NO: 28540 - DNA, 19 bp, Homo sapiens
  siRNA target sequence for HMG2L1 (NM_005487.2,1092-1110).
cagggcttgaacctattct

SEQ ID NO: 28541 - DNA, 19 bp, Homo sapiens
  siRNA target sequence for HMG2L1 (NM_005487.2,1100-1118).
gaacctattctggtagaat

SEQ ID NO: 28542 - DNA, 19 bp, Homo sapiens
  siRNA target sequence for HMG2L1 (NM_005487.2,1169-1187).
gattcttaccgagaaatca

SEQ ID NO: 28543 - DNA, 19 bp, Homo sapiens
  siRNA target sequence for HMG2L1 (NM_005487.2,1261-1279).
gtccaagagaagtttagga

SEQ ID NO: 28544 - DNA, 19 bp, Homo sapiens
  siRNA target sequence for HMG2L1 (NM_005487.2,1384-1402).
cacagatgggcatagtgaa

SEQ ID NO: 28545 - DNA, 19 bp, Homo sapiens
  siRNA target sequence for HMG2L1 (NM_005487.2,1454-1472).
ccaaaaaagaagaacatgt

SEQ ID NO: 28546 - DNA, 19 bp, Homo sapiens
  siRNA target sequence for HMG2L1 (NM_005487.2,1475-1493).
gcctaccaggtgttctgta

SEQ ID NO: 28547 - DNA, 19 bp, Homo sapiens
  siRNA target sequence for HMG2L1 (NM_005487.2,1476-1494).
cctaccaggtgttctgtaa

SEQ ID NO: 28548 - DNA, 19 bp, Homo sapiens
  siRNA target sequence for HMG2L1 (NM_005487.2,1483-1501).
ggtgttctgtaaagagtat

SEQ ID NO: 28549 - DNA, 19 bp, Homo sapiens
  siRNA target sequence for HMG2L1 (NM_005487.2,1520-1538).
gaccatccaggtatagatt

SEQ ID NO: 28550 - DNA, 19 bp, Homo sapiens
  siRNA target sequence for HMG2L1 (NM_005487.2,1535-1553).
gattttggggaacttagta

SEQ ID NO: 28551 - DNA, 19 bp, Homo sapiens
  siRNA target sequence for HMG2L1 (NM_005487.2,1567-1585).
ggtgtggaagcaattacca

SEQ ID NO: 28552 - DNA, 19 bp, Homo sapiens
  siRNA target sequence for HMG2L1 (NM_005487.2,1685-1703).
gaaggttccatgaaagtca

SEQ ID NO: 28553 - DNA, 19 bp, Homo sapiens
  siRNA target sequence for HMG2L1 (NM_005487.2,1956-1974).
ccacacaactacctgaatt

SEQ ID NO: 28554 - DNA, 19 bp, Homo sapiens
  siRNA target sequence for HMG2L1 (NM_005487.2,1985-2003).
cccaaacaggtcttgtcaa

SEQ ID NO: 28555 - DNA, 19 bp, Homo sapiens
  siRNA target sequence for HMG2L1 (NM_005487.2,1986-2004).
ccaaacaggtcttgtcaaa

SEQ ID NO: 28556 - DNA, 19 bp, Homo sapiens
  siRNA target sequence for HMG2L1 (NM_005487.2,1991-2009).
caggtcttgtcaaacacat

SEQ ID NO: 28557 - DNA, 19 bp, Homo sapiens
  siRNA target sequence for HMG2L1 (NM_005487.2,1993-2011).
ggtcttgtcaaacacatta

SEQ ID NO: 28558 - DNA, 19 bp, Homo sapiens
  siRNA target sequence for HMG2L1 (NM_005487.2,2001-2019).
caaacacattagacaacat

SEQ ID NO: 28559 - DNA, 19 bp, Homo sapiens
  siRNA target sequence for HMG4L (NM_178467.1,221-239).
gaggcaagaacgatcctaa

SEQ ID NO: 28560 - DNA, 19 bp, Homo sapiens
  siRNA target sequence for HMG4L (NM_178467.1,459-477).
gttggacggcacaaaaggt

SEQ ID NO: 28561 - DNA, 19 bp, Homo sapiens
  siRNA target sequence for HMGN3 (NM_004242.2,211-229).
gggcaaagatggatccaaa

SEQ ID NO: 28562 - DNA, 19 bp, Homo sapiens
  siRNA target sequence for HMGN3 (NM_004242.2,222-240).
gatccaaagtaactaaaca

SEQ ID NO: 28563 - DNA, 19 bp, Homo sapiens
  siRNA target sequence for HNRPD (NM_002138.2,562-580).
cagcgggaagaatggaaaa

SEQ ID NO: 28564 - DNA, 19 bp, Homo sapiens
  siRNA target sequence for HNRPD (NM_002138.2,565-583).
cgggaagaatggaaaatgt

SEQ ID NO: 28565 - DNA, 19 bp, Homo sapiens
  siRNA target sequence for HNRPD (NM_002138.2,595-613).
cttagctgggacactacaa

SEQ ID NO: 28566 - DNA, 19 bp, Homo sapiens
  siRNA target sequence for HNRPD (NM_002138.2,603-621).
ggacactacaaagaaagat

SEQ ID NO: 28567 - DNA, 19 bp, Homo sapiens
  siRNA target sequence for HNRPD (NM_002138.2,660-678).
ctgcactctgaagttagat

SEQ ID NO: 28568 - DNA, 19 bp, Homo sapiens
  siRNA target sequence for HNRPD (NM_002138.2,665-683).
ctctgaagttagatcctat

SEQ ID NO: 28569 - DNA, 19 bp, Homo sapiens
  siRNA target sequence for HNRPD (NM_002138.2,669-687).
gaagttagatcctatcaca

SEQ ID NO: 28570 - DNA, 19 bp, Homo sapiens
  siRNA target sequence for HNRPD (NM_002138.2,724-742).
gaatcggagagtgtagata

SEQ ID NO: 28571 - DNA, 19 bp, Homo sapiens
  siRNA target sequence for HNRPD (NM_002138.2,728-746).
cggagagtgtagataaggt

SEQ ID NO: 28572 - DNA, 19 bp, Homo sapiens
  siRNA target sequence for HNRPD (NM_002138.2,739-757).
gataaggtcatggatcaaa

SEQ ID NO: 28573 - DNA, 19 bp, Homo sapiens
  siRNA target sequence for HNRPD (NM_002138.2,744-762).
ggtcatggatcaaaaagaa

SEQ ID NO: 28574 - DNA, 19 bp, Homo sapiens
  siRNA target sequence for HNRPD (NM_002138.2,777-795).
gaaggtgattgatcctaaa

SEQ ID NO: 28575 - DNA, 19 bp, Homo sapiens
  siRNA target sequence for HNRPD (NM_002138.2,885-903).
gtactttggtggttttggt

SEQ ID NO: 28576 - DNA, 19 bp, Homo sapiens
  siRNA target sequence for HNRPD (NM_002138.2,950-968).
ggcgtgggttctgctttat

SEQ ID NO: 28577 - DNA, 19 bp, Homo sapiens
  siRNA target sequence for HNRPD (NM_002138.2,951-969).
gcgtgggttctgctttatt

SEQ ID NO: 28578 - DNA, 19 bp, Homo sapiens
  siRNA target sequence for HNRPD (NM_002138.2,955-973).
gggttctgctttattacct

SEQ ID NO: 28579 - DNA, 19 bp, Homo sapiens
  siRNA target sequence for HNRPD (NM_002138.2,956-974).
ggttctgctttattacctt

SEQ ID NO: 28580 - DNA, 19 bp, Homo sapiens
  siRNA target sequence for HNRPD (NM_002138.2,1054-1072).
gccatgtcgaaggaacaat

SEQ ID NO: 28581 - DNA, 19 bp, Homo sapiens
  siRNA target sequence for HNRPD (NM_002138.2,1055-1073).
ccatgtcgaaggaacaata

SEQ ID NO: 28582 - DNA, 19 bp, Homo sapiens
  siRNA target sequence for HNRPD (NM_002138.2,1056-1074).
catgtcgaaggaacaatat

SEQ ID NO: 28583 - DNA, 19 bp, Homo sapiens
  siRNA target sequence for HNRPD (NM_002138.2,1083-1101).
gcaacagtggggatctaga

SEQ ID NO: 28584 - DNA, 19 bp, Homo sapiens
  siRNA target sequence for HNRPD (NM_031369.1,1190-1208).
ctggttacaacaactacta

SEQ ID NO: 28585 - DNA, 19 bp, Homo sapiens
  siRNA target sequence for HNRPK (NM_002140.2,459-477).
cccgagcgcatattgagta

SEQ ID NO: 28586 - DNA, 19 bp, Homo sapiens
  siRNA target sequence for HNRPK (NM_002140.2,460-478).
ccgagcgcatattgagtat

SEQ ID NO: 28587 - DNA, 19 bp, Homo sapiens
  siRNA target sequence for HNRPK (NM_002140.2,462-480).
gagcgcatattgagtatca

SEQ ID NO: 28588 - DNA, 19 bp, Homo sapiens
  siRNA target sequence for HNRPU (NM_004501.2,221-239).
gagttcctcgcctgttaat

SEQ ID NO: 28589 - DNA, 19 bp, Homo sapiens
  siRNA target sequence for HNRPU (NM_004501.2,223-241).
gttcctcgcctgttaatgt

SEQ ID NO: 28590 - DNA, 19 bp, Homo sapiens
  siRNA target sequence for HNRPU (NM_004501.2,226-244).
cctcgcctgttaatgtaaa

SEQ ID NO: 28591 - DNA, 19 bp, Homo sapiens
  siRNA target sequence for HNRPU (NM_004501.2,227-245).
ctcgcctgttaatgtaaaa

SEQ ID NO: 28592 - DNA, 19 bp, Homo sapiens
  siRNA target sequence for HNRPU (NM_004501.2,870-888).
cagaaaggcggagataaaa

SEQ ID NO: 28593 - DNA, 19 bp, Homo sapiens
  siRNA target sequence for HNRPU (NM_004501.2,915-933).
gatcatggccgtggatatt

SEQ ID NO: 28594 - DNA, 19 bp, Homo sapiens
  siRNA target sequence for HNRPU (NM_004501.2,1022-1040).
ggtttgtcttgatacttat

SEQ ID NO: 28595 - DNA, 19 bp, Homo sapiens
  siRNA target sequence for HNRPU (NM_004501.2,1135-1153).
catcctatggtgtgtcaaa

SEQ ID NO: 28596 - DNA, 19 bp, Homo sapiens
  siRNA target sequence for HNRPU (NM_004501.2,1146-1164).
gtgtcaaaaggcaaagtgt

SEQ ID NO: 28597 - DNA, 19 bp, Homo sapiens
  siRNA target sequence for HNRPU (NM_004501.2,1193-1211).
cccagtaaggcatttatat

SEQ ID NO: 28598 - DNA, 19 bp, Homo sapiens
  siRNA target sequence for HNRPU (NM_004501.2,1194-1212).
ccagtaaggcatttatata

SEQ ID NO: 28599 - DNA, 19 bp, Homo sapiens
  siRNA target sequence for HNRPU (NM_004501.2,1226-1244).
catacatgaagttcgtatt

SEQ ID NO: 28600 - DNA, 19 bp, Homo sapiens
  siRNA target sequence for HNRPU (NM_004501.2,1239-1257).
cgtattggctggtcactaa

SEQ ID NO: 28601 - DNA, 19 bp, Homo sapiens
  siRNA target sequence for HNRPU (NM_004501.2,1247-1265).
ctggtcactaactacaagt

SEQ ID NO: 28602 - DNA, 19 bp, Homo sapiens
  siRNA target sequence for HNRPU (NM_004501.2,1258-1276).
ctacaagtggaatgttact

SEQ ID NO: 28603 - DNA, 19 bp, Homo sapiens
  siRNA target sequence for HNRPU (NM_004501.2,1300-1318).
ggtattctctaaaaggaat

SEQ ID NO: 28604 - DNA, 19 bp, Homo sapiens
  siRNA target sequence for HNRPU (NM_004501.2,1301-1319).
gtattctctaaaaggaata

SEQ ID NO: 28605 - DNA, 19 bp, Homo sapiens
  siRNA target sequence for HNRPU (NM_004501.2,1410-1428).
gtagaactctcgtatgcta

SEQ ID NO: 28606 - DNA, 19 bp, Homo sapiens
  siRNA target sequence for HNRPU (NM_004501.2,1448-1466).
cgttgccttcaaaatcagt

SEQ ID NO: 28607 - DNA, 19 bp, Homo sapiens
  siRNA target sequence for HNRPU (NM_004501.2,1449-1467).
gttgccttcaaaatcagta

SEQ ID NO: 28608 - DNA, 19 bp, Homo sapiens
  siRNA target sequence for HNRPU (NM_004501.2,1454-1472).
cttcaaaatcagtaaggaa

SEQ ID NO: 28609 - DNA, 19 bp, Homo sapiens
  siRNA target sequence for HNRPU (NM_004501.2,1489-1507).
cactgttcccgcatgttct

SEQ ID NO: 28610 - DNA, 19 bp, Homo sapiens
  siRNA target sequence for HNRPU (NM_004501.2,1512-1530).
cacaactgtgcagttgaat

SEQ ID NO: 28611 - DNA, 19 bp, Homo sapiens
  siRNA target sequence for HNRPU (NM_004501.2,1553-1571).
gccatattttccaatacct

SEQ ID NO: 28612 - DNA, 19 bp, Homo sapiens
  siRNA target sequence for HNRPU (NM_004501.2,1563-1581).
ccaatacctgaagagtata

SEQ ID NO: 28613 - DNA, 19 bp, Homo sapiens
  siRNA target sequence for HNRPU (NM_004501.2,1624-1642).
caaaggggcctgaagagaa

SEQ ID NO: 28614 - DNA, 19 bp, Homo sapiens
  siRNA target sequence for HNRPU (NM_004501.2,1693-1711).
ctacctgggttactaaaca

SEQ ID NO: 28615 - DNA, 19 bp, Homo sapiens
  siRNA target sequence for HNRPU (NM_004501.2,1739-1757).
cattcttggcacaaatact

SEQ ID NO: 28616 - DNA, 19 bp, Homo sapiens
  siRNA target sequence for HNRPU (NM_004501.2,1747-1765).
gcacaaatactattatgga

SEQ ID NO: 28617 - DNA, 19 bp, Homo sapiens
  siRNA target sequence for HNRPU (NM_004501.2,1790-1808).
gaagcaaatggcagatact

SEQ ID NO: 28618 - DNA, 19 bp, Homo sapiens
  siRNA target sequence for HNRPU (NM_004501.2,1874-1892).
ccgaaagaagcgaaatttt

SEQ ID NO: 28619 - DNA, 19 bp, Homo sapiens
  siRNA target sequence for HNRPU (NM_004501.2,1875-1893).
cgaaagaagcgaaatttta

SEQ ID NO: 28620 - DNA, 19 bp, Homo sapiens
  siRNA target sequence for HNRPU (NM_004501.2,1961-1979).
gcgaaaagctgttgtagtt

SEQ ID NO: 28621 - DNA, 19 bp, Homo sapiens
  siRNA target sequence for HNRPU (NM_004501.2,1981-1999).
gcccaaaagatgaagacta

SEQ ID NO: 28622 - DNA, 19 bp, Homo sapiens
  siRNA target sequence for HNRPU (NM_004501.2,2049-2067).
gaacatgcggtcctcaaaa

SEQ ID NO: 28623 - DNA, 19 bp, Homo sapiens
  siRNA target sequence for HNRPU (NM_004501.2,2052-2070).
catgcggtcctcaaaatga

SEQ ID NO: 28624 - DNA, 19 bp, Homo sapiens
  siRNA target sequence for HNRPU (NM_004501.2,2093-2111).
ggtagctgagtgctttgat

SEQ ID NO: 28625 - DNA, 19 bp, Homo sapiens
  siRNA target sequence for HNRPU (NM_004501.2,2245-2263).
gtggcaagaaccagtttaa

SEQ ID NO: 28626 - DNA, 19 bp, Homo sapiens
  siRNA target sequence for HNRPU (NM_004501.2,2297-2315).
caatatgcgtggtggaaat

SEQ ID NO: 28627 - DNA, 19 bp, Homo sapiens
  siRNA target sequence for HNRPU (NM_004501.2,2303-2321).
gcgtggtggaaatttcaga

SEQ ID NO: 28628 - DNA, 19 bp, Homo sapiens
  siRNA target sequence for HNRPU (NM_004501.2,2334-2352).
gggaatcgtggcggatata

SEQ ID NO: 28629 - DNA, 19 bp, Homo sapiens
  siRNA target sequence for HNRPU (NM_004501.2,2335-2353).
ggaatcgtggcggatataa

SEQ ID NO: 28630 - DNA, 19 bp, Homo sapiens
  siRNA target sequence for HNRPU (NM_004501.2,2336-2354).
gaatcgtggcggatataat

SEQ ID NO: 28631 - DNA, 19 bp, Homo sapiens
  siRNA target sequence for HNRPU (NM_004501.2,2340-2358).
cgtggcggatataatagga

SEQ ID NO: 28632 - DNA, 19 bp, Homo sapiens
  siRNA target sequence for HNRPU (NM_004501.2,2400-2418).
ggtggaatcggctatccat

SEQ ID NO: 28633 - DNA, 19 bp, Homo sapiens
  siRNA target sequence for HNRPU (NM_004501.2,2401-2419).
gtggaatcggctatccata

SEQ ID NO: 28634 - DNA, 19 bp, Homo sapiens
  siRNA target sequence for HNRPU (NM_004501.2,2439-2457).
cctggccgtggtagttact

SEQ ID NO: 28635 - DNA, 19 bp, Homo sapiens
  siRNA target sequence for HNRPU (NM_004501.2,2442-2460).
ggccgtggtagttactcaa

SEQ ID NO: 28636 - DNA, 19 bp, Homo sapiens
  siRNA target sequence for HNRPU (NM_004501.2,2445-2463).
cgtggtagttactcaaaca

SEQ ID NO: 28637 - DNA, 19 bp, Homo sapiens
  siRNA target sequence for HNRPU (NM_004501.2,2603-2621).
gccatggagtcagcattat

SEQ ID NO: 28638 - DNA, 19 bp, Homo sapiens
  siRNA target sequence for HNRPU (NM_031844.1,842-860).
caggcgggaggtaagaaga

SEQ ID NO: 28639 - DNA, 19 bp, Homo sapiens
  siRNA target sequence for HP1-BP74 (NM_016287.1,93-111).
gtgaactcgtccatcctaa

SEQ ID NO: 28640 - DNA, 19 bp, Homo sapiens
  siRNA target sequence for HP1-BP74 (NM_016287.1,108-126).
ctaaggcactcccacttat

SEQ ID NO: 28641 - DNA, 19 bp, Homo sapiens
  siRNA target sequence for HP1-BP74 (NM_016287.1,112-130).
ggcactcccacttatagta

SEQ ID NO: 28642 - DNA, 19 bp, Homo sapiens
  siRNA target sequence for HP1-BP74 (NM_016287.1,142-160).
gatccacgcggacaagtta

SEQ ID NO: 28643 - DNA, 19 bp, Homo sapiens
  siRNA target sequence for HP1-BP74 (NM_016287.1,161-179).
ggtgagaaggtagaagata

SEQ ID NO: 28644 - DNA, 19 bp, Homo sapiens
  siRNA target sequence for HP1-BP74 (NM_016287.1,190-208).
gattcgtcgaactgtgaat

SEQ ID NO: 28645 - DNA, 19 bp, Homo sapiens
  siRNA target sequence for HP1-BP74 (NM_016287.1,194-212).
cgtcgaactgtgaattcta

SEQ ID NO: 28646 - DNA, 19 bp, Homo sapiens
  siRNA target sequence for HP1-BP74 (NM_016287.1,262-280).
gccagaaccagacataagt

SEQ ID NO: 28647 - DNA, 19 bp, Homo sapiens
  siRNA target sequence for HP1-BP74 (NM_016287.1,291-309).
ctgtctccactgtagaaga

SEQ ID NO: 28648 - DNA, 19 bp, Homo sapiens
  siRNA target sequence for HP1-BP74 (NM_016287.1,295-313).
ctccactgtagaagaacaa

SEQ ID NO: 28649 - DNA, 19 bp, Homo sapiens
  siRNA target sequence for HP1-BP74 (NM_016287.1,505-523).
cagggcccagaaacaaaca

SEQ ID NO: 28650 - DNA, 19 bp, Homo sapiens
  siRNA target sequence for HP1-BP74 (NM_016287.1,606-624).
cagtggttgctattcgaaa

SEQ ID NO: 28651 - DNA, 19 bp, Homo sapiens
  siRNA target sequence for HP1-BP74 (NM_016287.1,608-626).
gtggttgctattcgaaaat

SEQ ID NO: 28652 - DNA, 19 bp, Homo sapiens
  siRNA target sequence for HP1-BP74 (NM_016287.1,611-629).
gttgctattcgaaaataca

SEQ ID NO: 28653 - DNA, 19 bp, Homo sapiens
  siRNA target sequence for HP1-BP74 (NM_016287.1,614-632).
gctattcgaaaatacatca

SEQ ID NO: 28654 - DNA, 19 bp, Homo sapiens
  siRNA target sequence for HP1-BP74 (NM_016287.1,667-685).
gggttatctccttaaacaa

SEQ ID NO: 28655 - DNA, 19 bp, Homo sapiens
  siRNA target sequence for HP1-BP74 (NM_016287.1,711-729).
gagtcatcaaacaggttaa

SEQ ID NO: 28656 - DNA, 19 bp, Homo sapiens
  siRNA target sequence for HP1-BP74 (NM_016287.1,826-844).
ggatccagaaccacaagta

SEQ ID NO: 28657 - DNA, 19 bp, Homo sapiens
  siRNA target sequence for HP1-BP74 (NM_016287.1,827-845).
gatccagaaccacaagtaa

SEQ ID NO: 28658 - DNA, 19 bp, Homo sapiens
  siRNA target sequence for HP1-BP74 (NM_016287.1,870-888).
cctttactcgcctttgtga

SEQ ID NO: 28659 - DNA, 19 bp, Homo sapiens
  siRNA target sequence for HP1-BP74 (NM_016287.1,879-897).
gcctttgtgaacctaaaga

SEQ ID NO: 28660 - DNA, 19 bp, Homo sapiens
  siRNA target sequence for HP1-BP74 (NM_016287.1,919-937).
gaaatatgtgtctcagtat

SEQ ID NO: 28661 - DNA, 19 bp, Homo sapiens
  siRNA target sequence for HP1-BP74 (NM_016287.1,926-944).
gtgtctcagtattatccta

SEQ ID NO: 28662 - DNA, 19 bp, Homo sapiens
  siRNA target sequence for HP1-BP74 (NM_016287.1,932-950).
cagtattatcctaagctta

SEQ ID NO: 28663 - DNA, 19 bp, Homo sapiens
  siRNA target sequence for HP1-BP74 (NM_016287.1,1005-1023).
ggggccagttagaacagat

SEQ ID NO: 28664 - DNA, 19 bp, Homo sapiens
  siRNA target sequence for HP1-BP74 (NM_016287.1,1155-1173).
ccactgctctgaagaagta

SEQ ID NO: 28665 - DNA, 19 bp, Homo sapiens
  siRNA target sequence for HP1-BP74 (NM_016287.1,1190-1208).
ccaggaaccaattctaact

SEQ ID NO: 28666 - DNA, 19 bp, Homo sapiens
  siRNA target sequence for HP1-BP74 (NM_016287.1,1203-1221).
ctaactatcaaatgcattt

SEQ ID NO: 28667 - DNA, 19 bp, Homo sapiens
  siRNA target sequence for HP1-BP74 (NM_016287.1,1421-1439).
gagccgccacctaagagaa

SEQ ID NO: 28668 - DNA, 19 bp, Homo sapiens
  siRNA target sequence for HP1-BP74 (NM_016287.1,1501-1519).
gtccaaacctgcacctaaa

SEQ ID NO: 28669 - DNA, 19 bp, Homo sapiens
  siRNA target sequence for HRB (NM_004504.3,205-223).
cccacctacgttaacatga

SEQ ID NO: 28670 - DNA, 19 bp, Homo sapiens
  siRNA target sequence for HRB (NM_004504.3,255-273).
cggcagcctgcgaggatta

SEQ ID NO: 28671 - DNA, 19 bp, Homo sapiens
  siRNA target sequence for HRB (NM_004504.3,256-274).
ggcagcctgcgaggattaa

SEQ ID NO: 28672 - DNA, 19 bp, Homo sapiens
  siRNA target sequence for HRB (NM_004504.3,257-275).
gcagcctgcgaggattaaa

SEQ ID NO: 28673 - DNA, 19 bp, Homo sapiens
  siRNA target sequence for HRB (NM_004504.3,258-276).
cagcctgcgaggattaaat

SEQ ID NO: 28674 - DNA, 19 bp, Homo sapiens
  siRNA target sequence for HRB (NM_004504.3,420-438).
ggatccacaaaaagtgaaa

SEQ ID NO: 28675 - DNA, 19 bp, Homo sapiens
  siRNA target sequence for HRB (NM_004504.3,495-513).
caaagtcgtggcatcagtt

SEQ ID NO: 28676 - DNA, 19 bp, Homo sapiens
  siRNA target sequence for HRB (NM_004504.3,599-617).
caccaacactgcacttaaa

SEQ ID NO: 28677 - DNA, 19 bp, Homo sapiens
  siRNA target sequence for HRB (NM_004504.3,681-699).
gcaatttgaccttttaagt

SEQ ID NO: 28678 - DNA, 19 bp, Homo sapiens
  siRNA target sequence for HRB (NM_004504.3,745-763).
gctacagccaattttgcta

SEQ ID NO: 28679 - DNA, 19 bp, Homo sapiens
  siRNA target sequence for HRB (NM_004504.3,746-764).
ctacagccaattttgctaa

SEQ ID NO: 28680 - DNA, 19 bp, Homo sapiens
  siRNA target sequence for HRB (NM_004504.3,749-767).
cagccaattttgctaactt

SEQ ID NO: 28681 - DNA, 19 bp, Homo sapiens
  siRNA target sequence for HRB (NM_004504.3,842-860).
ctagtggttcgagtaattt

SEQ ID NO: 28682 - DNA, 19 bp, Homo sapiens
  siRNA target sequence for HRB (NM_004504.3,878-896).
caagtcactctccttttca

SEQ ID NO: 28683 - DNA, 19 bp, Homo sapiens
  siRNA target sequence for HRB (NM_004504.3,913-931).
ggaagtgctgcatcagtaa

SEQ ID NO: 28684 - DNA, 19 bp, Homo sapiens
  siRNA target sequence for HRB (NM_004504.3,919-937).
gctgcatcagtaaatgcta

SEQ ID NO: 28685 - DNA, 19 bp, Homo sapiens
  siRNA target sequence for HRB (NM_004504.3,920-938).
ctgcatcagtaaatgctaa

SEQ ID NO: 28686 - DNA, 19 bp, Homo sapiens
  siRNA target sequence for HRB (NM_004504.3,1019-1037).
catcagctgttagtaaagt

SEQ ID NO: 28687 - DNA, 19 bp, Homo sapiens
  siRNA target sequence for HRB (NM_004504.3,1043-1061).
cgaacaaagctggtttaca

SEQ ID NO: 28688 - DNA, 19 bp, Homo sapiens
  siRNA target sequence for HRB (NM_004504.3,1079-1097).
cagcacttgctaatttaga

SEQ ID NO: 28689 - DNA, 19 bp, Homo sapiens
  siRNA target sequence for HRB (NM_004504.3,1082-1100).
cacttgctaatttagacaa

SEQ ID NO: 28690 - DNA, 19 bp, Homo sapiens
  siRNA target sequence for HRB (NM_004504.3,1088-1106).
ctaatttagacaatatctt

SEQ ID NO: 28691 - DNA, 19 bp, Homo sapiens
  siRNA target sequence for HRB (NM_004504.3,1231-1249).
gaactagacagcgttttca

SEQ ID NO: 28692 - DNA, 19 bp, Homo sapiens
  siRNA target sequence for HRB (NM_004504.3,1234-1252).
ctagacagcgttttcagtt

SEQ ID NO: 28693 - DNA, 19 bp, Homo sapiens
  siRNA target sequence for HRB (NM_004504.3,1273-1291).
gcgtatacttccacaagta

SEQ ID NO: 28694 - DNA, 19 bp, Homo sapiens
  siRNA target sequence for HRB (NM_004504.3,1274-1292).
cgtatacttccacaagtaa

SEQ ID NO: 28695 - DNA, 19 bp, Homo sapiens
  siRNA target sequence for HRB (NM_004504.3,1275-1293).
gtatacttccacaagtaat

SEQ ID NO: 28696 - DNA, 19 bp, Homo sapiens
  siRNA target sequence for HRB (NM_004504.3,1424-1442).
ctgtggcatcttctacaaa

SEQ ID NO: 28697 - DNA, 19 bp, Homo sapiens
  siRNA target sequence for HRB (NM_004504.3,1629-1647).
caatggtgcaggttttgca

SEQ ID NO: 28698 - DNA, 19 bp, Homo sapiens
  siRNA target sequence for HRB (NM_004504.3,1645-1663).
gcagcatttggacaaacaa

SEQ ID NO: 28699 - DNA, 19 bp, Homo sapiens
  siRNA target sequence for HRB (NM_004504.3,1696-1714).
gctgctggagtatctagta

SEQ ID NO: 28700 - DNA, 19 bp, Homo sapiens
  siRNA target sequence for HRB (NM_004504.3,1703-1721).
gagtatctagtaatccttt

SEQ ID NO: 28701 - DNA, 19 bp, Homo sapiens
  siRNA target sequence for HRB (NM_004504.3,1730-1748).
gtgcaccaacaggacaatt

SEQ ID NO: 28702 - DNA, 19 bp, Homo sapiens
  siRNA target sequence for HRB (NM_004504.3,1760-1778).
gctcatcaaccaatccttt

SEQ ID NO: 28703 - DNA, 19 bp, Homo sapiens
  siRNA target sequence for HRB (NM_004504.3,1763-1781).
catcaaccaatcctttctt

SEQ ID NO: 28704 - DNA, 19 bp, Homo sapiens
  siRNA target sequence for HRBL (NM_006076.3,249-267).
gggtcacctacgtggatat

SEQ ID NO: 28705 - DNA, 19 bp, Homo sapiens
  siRNA target sequence for HRBL (NM_006076.3,326-344).
cctcatcgtgtcaagtcaa

SEQ ID NO: 28706 - DNA, 19 bp, Homo sapiens
  siRNA target sequence for HRBL (NM_006076.3,329-347).
catcgtgtcaagtcaatct

SEQ ID NO: 28707 - DNA, 19 bp, Homo sapiens
  siRNA target sequence for HRBL (NM_006076.3,382-400).
cctgcaatcccgtggaaat

SEQ ID NO: 28708 - DNA, 19 bp, Homo sapiens
  siRNA target sequence for HRBL (NM_006076.3,892-910).
ccccagctcttctgtgttt

SEQ ID NO: 28709 - DNA, 19 bp, Homo sapiens
  siRNA target sequence for HRBL (NM_006076.3,970-988).
cagccaggggactccattt

SEQ ID NO: 28710 - DNA, 19 bp, Homo sapiens
  siRNA target sequence for HRBL (NM_006076.3,973-991).
ccaggggactccatttggt

SEQ ID NO: 28711 - DNA, 19 bp, Homo sapiens
  siRNA target sequence for HRBL (NM_006076.3,1359-1377).
cgcagaccccgcttgttca

SEQ ID NO: 28712 - DNA, 19 bp, Homo sapiens
  siRNA target sequence for HSPC133 (NM_014168.1,180-198).
cgcacattgcagcatgtat

SEQ ID NO: 28713 - DNA, 19 bp, Homo sapiens
  siRNA target sequence for HSPC133 (NM_014168.1,188-206).
gcagcatgtatgctctata

SEQ ID NO: 28714 - DNA, 19 bp, Homo sapiens
  siRNA target sequence for HSPC133 (NM_014168.1,192-210).
catgtatgctctatacaat

SEQ ID NO: 28715 - DNA, 19 bp, Homo sapiens
  siRNA target sequence for HSPC133 (NM_014168.1,202-220).
ctatacaatccataacact

SEQ ID NO: 28716 - DNA, 19 bp, Homo sapiens
  siRNA target sequence for HSPC133 (NM_014168.1,280-298).
catcggaactgcaatgtta

SEQ ID NO: 28717 - DNA, 19 bp, Homo sapiens
  siRNA target sequence for HSPC133 (NM_014168.1,332-350).
gaagacgcattggaaatat

SEQ ID NO: 28718 - DNA, 19 bp, Homo sapiens
  siRNA target sequence for HSPC133 (NM_014168.1,335-353).
gacgcattggaaatattta

SEQ ID NO: 28719 - DNA, 19 bp, Homo sapiens
  siRNA target sequence for HSPC133 (NM_014168.1,337-355).
cgcattggaaatatttaat

SEQ ID NO: 28720 - DNA, 19 bp, Homo sapiens
  siRNA target sequence for HSPC133 (NM_014168.1,431-449).
ccaagtcattcgatacagt

SEQ ID NO: 28721 - DNA, 19 bp, Homo sapiens
  siRNA target sequence for HSPC195 (NM_016463.5,1481-1499).
gcagttgtaggaatcgaaa

SEQ ID NO: 28722 - DNA, 19 bp, Homo sapiens
  siRNA target sequence for HT001 (NM_014065.2,446-464).
ggtatccgaggactaatga

SEQ ID NO: 28723 - DNA, 19 bp, Homo sapiens
  siRNA target sequence for HT001 (NM_014065.2,451-469).
ccgaggactaatgagtttt

SEQ ID NO: 28724 - DNA, 19 bp, Homo sapiens
  siRNA target sequence for HT001 (NM_014065.2,463-481).
gagttttgtggaagatcat

SEQ ID NO: 28725 - DNA, 19 bp, Homo sapiens
  siRNA target sequence for HT001 (NM_014065.2,512-530).
cgggacacaaaaattgtca

SEQ ID NO: 28726 - DNA, 19 bp, Homo sapiens
  siRNA target sequence for HT001 (NM_014065.2,551-569).
caccgtctttgcttcagtt

SEQ ID NO: 28727 - DNA, 19 bp, Homo sapiens
  siRNA target sequence for HT001 (NM_014065.2,660-678).
gcccatatgttgtattaga

SEQ ID NO: 28728 - DNA, 19 bp, Homo sapiens
  siRNA target sequence for HT001 (NM_014065.2,661-679).
cccatatgttgtattagat

SEQ ID NO: 28729 - DNA, 19 bp, Homo sapiens
  siRNA target sequence for HT001 (NM_014065.2,707-725).
cttacaactttaaaggata

SEQ ID NO: 28730 - DNA, 19 bp, Homo sapiens
  siRNA target sequence for HT001 (NM_014065.2,796-814).
catccgggaagtattcata

SEQ ID NO: 28731 - DNA, 19 bp, Homo sapiens
  siRNA target sequence for HT001 (NM_014065.2,826-844).
caagctgcgggtgtgtttt

SEQ ID NO: 28732 - DNA, 19 bp, Homo sapiens
  siRNA target sequence for HT001 (NM_014065.2,860-878).
gaagcagatcgggacatta

SEQ ID NO: 28733 - DNA, 19 bp, Homo sapiens
  siRNA target sequence for HT001 (NM_014065.2,882-900).
cacttgctaaccattggaa

SEQ ID NO: 28734 - DNA, 19 bp, Homo sapiens
  siRNA target sequence for HT001 (NM_014065.2,884-902).
cttgctaaccattggaatt

SEQ ID NO: 28735 - DNA, 19 bp, Homo sapiens
  siRNA target sequence for HT001 (NM_014065.2,904-922).
ccctgtgttatcatcagat

SEQ ID NO: 28736 - DNA, 19 bp, Homo sapiens
  siRNA target sequence for HT001 (NM_014065.2,918-936).
cagatagtgacttttgcat

SEQ ID NO: 28737 - DNA, 19 bp, Homo sapiens
  siRNA target sequence for HT001 (NM_014065.2,962-980).
ccattgaatagctttcagt

SEQ ID NO: 28738 - DNA, 19 bp, Homo sapiens
  siRNA target sequence for HT001 (NM_014065.2,996-1014).
ctattaagggcacacaaaa

SEQ ID NO: 28739 - DNA, 19 bp, Homo sapiens
  siRNA target sequence for HT001 (NM_014065.2,1053-1071).
gccatcacttcagcaatat

SEQ ID NO: 28740 - DNA, 19 bp, Homo sapiens
  siRNA target sequence for HT001 (NM_014065.2,1063-1081).
cagcaatatgaataaagct

SEQ ID NO: 28741 - DNA, 19 bp, Homo sapiens
  siRNA target sequence for HT001 (NM_014065.2,1110-1128).
gaaatgaccatgttaatct

SEQ ID NO: 28742 - DNA, 19 bp, Homo sapiens
  siRNA target sequence for HT001 (NM_014065.2,1211-1229).
ctgggacttctgaattggt

SEQ ID NO: 28743 - DNA, 19 bp, Homo sapiens
  siRNA target sequence for HT001 (NM_014065.2,1220-1238).
ctgaattggttgtctcatt

SEQ ID NO: 28744 - DNA, 19 bp, Homo sapiens
  siRNA target sequence for HT001 (NM_014065.2,1246-1264).
ccctaccgaagcactagat

SEQ ID NO: 28745 - DNA, 19 bp, Homo sapiens
  siRNA target sequence for HT001 (NM_014065.2,1247-1265).
cctaccgaagcactagata

SEQ ID NO: 28746 - DNA, 19 bp, Homo sapiens
  siRNA target sequence for HT001 (NM_014065.2,1248-1266).
ctaccgaagcactagataa

SEQ ID NO: 28747 - DNA, 19 bp, Homo sapiens
  siRNA target sequence for HT001 (NM_014065.2,1251-1269).
ccgaagcactagataatgt

SEQ ID NO: 28748 - DNA, 19 bp, Homo sapiens
  siRNA target sequence for HT001 (NM_014065.2,1252-1270).
cgaagcactagataatgtt

SEQ ID NO: 28749 - DNA, 19 bp, Homo sapiens
  siRNA target sequence for HT001 (NM_014065.2,1369-1387).
cttccagtgtggtacttat

SEQ ID NO: 28750 - DNA, 19 bp, Homo sapiens
  siRNA target sequence for HT001 (NM_014065.2,1373-1391).
cagtgtggtacttatgtct

SEQ ID NO: 28751 - DNA, 19 bp, Homo sapiens
  siRNA target sequence for HT001 (NM_014065.2,1402-1420).
cttgaatcttggtttacca

SEQ ID NO: 28752 - DNA, 19 bp, Homo sapiens
  siRNA target sequence for HT001 (NM_014065.2,1426-1444).
ggtattagtggctttagct

SEQ ID NO: 28753 - DNA, 19 bp, Homo sapiens
  siRNA target sequence for HT001 (NM_014065.2,1449-1467).
gccagctatctcctttcat

SEQ ID NO: 28754 - DNA, 19 bp, Homo sapiens
  siRNA target sequence for HT001 (NM_014065.2,1483-1501).
cctaagacggaccattctt

SEQ ID NO: 28755 - DNA, 19 bp, Homo sapiens
  siRNA target sequence for HT001 (NM_014065.2,1550-1568).
cagcccatcaggcaaatca

SEQ ID NO: 28756 - DNA, 19 bp, Homo sapiens
  siRNA target sequence for HT001 (NM_014065.2,1567-1585).
catctatgggcttctttta

SEQ ID NO: 28757 - DNA, 19 bp, Homo sapiens
  siRNA target sequence for HT001 (NM_014065.2,1678-1696).
cagaacctcaatcattgat

SEQ ID NO: 28758 - DNA, 19 bp, Homo sapiens
  siRNA target sequence for HT001 (NM_014065.2,1759-1777).
gcggcagatgcttctgtta

SEQ ID NO: 28759 - DNA, 19 bp, Homo sapiens
  siRNA target sequence for HT001 (NM_014065.2,1870-1888).
cgagaccaaagcaaagcta

SEQ ID NO: 28760 - DNA, 19 bp, Homo sapiens
  siRNA target sequence for HT001 (NM_014065.2,1875-1893).
ccaaagcaaagctacatca

SEQ ID NO: 28761 - DNA, 19 bp, Homo sapiens
  siRNA target sequence for HT001 (NM_014065.2,1881-1899).
caaagctacatcatctaca

SEQ ID NO: 28762 - DNA, 19 bp, Homo sapiens
  siRNA target sequence for HT001 (NM_014065.2,1928-1946).
cccttgattgccataatca

SEQ ID NO: 28763 - DNA, 19 bp, Homo sapiens
  siRNA target sequence for HT001 (NM_014065.2,2051-2069).
gacacagctcacatcttct

SEQ ID NO: 28764 - DNA, 19 bp, Homo sapiens
  siRNA target sequence for HT001 (NM_014065.2,2198-2216).
gcatcgacctctgtagaaa

SEQ ID NO: 28765 - DNA, 19 bp, Homo sapiens
  siRNA target sequence for HT001 (NM_014065.2,2202-2220).
cgacctctgtagaaagtct

SEQ ID NO: 28766 - DNA, 19 bp, Homo sapiens
  siRNA target sequence for HT001 (NM_014065.2,2213-2231).
gaaagtctcctgagcatat

SEQ ID NO: 28767 - DNA, 19 bp, Homo sapiens
  siRNA target sequence for HT001 (NM_014065.2,2234-2252).
cctgaggctaagcaacttt

SEQ ID NO: 28768 - DNA, 19 bp, Homo sapiens
  siRNA target sequence for HT001 (NM_014065.2,2235-2253).
ctgaggctaagcaacttta

SEQ ID NO: 28769 - DNA, 19 bp, Homo sapiens
  siRNA target sequence for HT001 (NM_014065.2,2241-2259).
ctaagcaactttatgaata

SEQ ID NO: 28770 - DNA, 19 bp, Homo sapiens
  siRNA target sequence for HT001 (NM_014065.2,2266-2284).
caatgccacaaggtcatat

SEQ ID NO: 28771 - DNA, 19 bp, Homo sapiens
  siRNA target sequence for HT001 (NM_014065.2,2416-2434).
caaccggtttgggttgtta

SEQ ID NO: 28772 - DNA, 19 bp, Homo sapiens
  siRNA target sequence for HT001 (NM_014065.2,2421-2439).
ggtttgggttgttaatggt

SEQ ID NO: 28773 - DNA, 19 bp, Homo sapiens
  siRNA target sequence for HT001 (NM_014065.2,2431-2449).
gttaatggttgaaaactta

SEQ ID NO: 28774 - DNA, 19 bp, Homo sapiens
  siRNA target sequence for HT001 (NM_014065.2,2460-2478).
gtgaggcctccaacattga

SEQ ID NO: 28775 - DNA, 19 bp, Homo sapiens
  siRNA target sequence for HTR3A (NM_000869.1,324-342).
gaggctgtcggattacctt

SEQ ID NO: 28776 - DNA, 19 bp, Homo sapiens
  siRNA target sequence for HTR3A (NM_000869.1,326-344).
ggctgtcggattacctttt

SEQ ID NO: 28777 - DNA, 19 bp, Homo sapiens
  siRNA target sequence for HTR3A (NM_000869.1,390-408).
gccaaccaccgtatccatt

SEQ ID NO: 28778 - DNA, 19 bp, Homo sapiens
  siRNA target sequence for HTR3A (NM_000869.1,404-422).
ccattgacgtcattgtcta

SEQ ID NO: 28779 - DNA, 19 bp, Homo sapiens
  siRNA target sequence for HTR3A (NM_000869.1,566-584).
gggtcccggacattctcat

SEQ ID NO: 28780 - DNA, 19 bp, Homo sapiens
  siRNA target sequence for HTR3A (NM_000869.1,570-588).
cccggacattctcatcaat

SEQ ID NO: 28781 - DNA, 19 bp, Homo sapiens
  siRNA target sequence for HTR3A (NM_000869.1,646-664).
ggcgaagttcagaactaca

SEQ ID NO: 28782 - DNA, 19 bp, Homo sapiens
  siRNA target sequence for HTR3A (NM_000869.1,647-665).
gcgaagttcagaactacaa

SEQ ID NO: 28783 - DNA, 19 bp, Homo sapiens
  siRNA target sequence for HTR3A (NM_000869.1,686-704).
cctgtagcctcgacatcta

SEQ ID NO: 28784 - DNA, 19 bp, Homo sapiens
  siRNA target sequence for HTR3A (NM_000869.1,689-707).
gtagcctcgacatctacaa

SEQ ID NO: 28785 - DNA, 19 bp, Homo sapiens
  siRNA target sequence for HTR3A (NM_000869.1,812-830).
ccgacaggagtgtcttcat

SEQ ID NO: 28786 - DNA, 19 bp, Homo sapiens
  siRNA target sequence for HTR3A (NM_000869.1,814-832).
gacaggagtgtcttcatga

SEQ ID NO: 28787 - DNA, 19 bp, Homo sapiens
  siRNA target sequence for HTR3A (NM_000869.1,874-892).
cgggagttcagcatggaaa

SEQ ID NO: 28788 - DNA, 19 bp, Homo sapiens
  siRNA target sequence for HTR3A (NM_000869.1,888-906).
ggaaagcagtaactactat

SEQ ID NO: 28789 - DNA, 19 bp, Homo sapiens
  siRNA target sequence for HTR3A (NM_000869.1,1031-1049).
gcgagagggtctctttcaa

SEQ ID NO: 28790 - DNA, 19 bp, Homo sapiens
  siRNA target sequence for HTR3A (NM_000869.1,1038-1056).
ggtctctttcaagattaca

SEQ ID NO: 28791 - DNA, 19 bp, Homo sapiens
  siRNA target sequence for HTR3A (NM_000869.1,1075-1093).
gtcttcctgatcatcgttt

SEQ ID NO: 28792 - DNA, 19 bp, Homo sapiens
  siRNA target sequence for HTR3A (NM_000869.1,1116-1134).
catcggcactcctctcatt

SEQ ID NO: 28793 - DNA, 19 bp, Homo sapiens
  siRNA target sequence for HTR3A (NM_000869.1,1487-1505).
cctccatccggcaattcct

SEQ ID NO: 28794 - DNA, 19 bp, Homo sapiens
  siRNA target sequence for IDAX (NM_025212.1,198-216).
cgagcgcgtggggactttt

SEQ ID NO: 28795 - DNA, 19 bp, Homo sapiens
  siRNA target sequence for IDAX (NM_025212.1,199-217).
gagcgcgtggggacttttt

SEQ ID NO: 28796 - DNA, 19 bp, Homo sapiens
  siRNA target sequence for IDAX (NM_025212.1,230-248).
ctttagggggcatctcatt

SEQ ID NO: 28797 - DNA, 19 bp, Homo sapiens
  siRNA target sequence for IDAX (NM_025212.1,309-327).
cacagacagtgcgtttcaa

SEQ ID NO: 28798 - DNA, 19 bp, Homo sapiens
  siRNA target sequence for IDAX (NM_025212.1,311-329).
cagacagtgcgtttcaaat

SEQ ID NO: 28799 - DNA, 19 bp, Homo sapiens
  siRNA target sequence for IDAX (NM_025212.1,341-359).
cagactgcccgcagaatca

SEQ ID NO: 28800 - DNA, 19 bp, Homo sapiens
  siRNA target sequence for IDAX (NM_025212.1,343-361).
gactgcccgcagaatcatt

SEQ ID NO: 28801 - DNA, 19 bp, Homo sapiens
  siRNA target sequence for IDAX (NM_025212.1,502-520).
ggacaccagatctgcaaat

SEQ ID NO: 28802 - DNA, 19 bp, Homo sapiens
  siRNA target sequence for IDAX (NM_025212.1,507-525).
ccagatctgcaaatttaga

SEQ ID NO: 28803 - DNA, 19 bp, Homo sapiens
  siRNA target sequence for IL12RB1 (NM_005535.1,1151-1169).
cagagcatgacgtattgca

SEQ ID NO: 28804 - DNA, 19 bp, Homo sapiens
  siRNA target sequence for IL12RB1 (NM_005535.1,1153-1171).
gagcatgacgtattgcatt

SEQ ID NO: 28805 - DNA, 19 bp, Homo sapiens
  siRNA target sequence for IL12RB1 (NM_005535.1,1156-1174).
catgacgtattgcattgaa

SEQ ID NO: 28806 - DNA, 19 bp, Homo sapiens
  siRNA target sequence for IL12RB1 (NM_005535.1,1294-1312).
ggaaaagtgttactacatt

SEQ ID NO: 28807 - DNA, 19 bp, Homo sapiens
  siRNA target sequence for IL12RB1 (NM_005535.1,1295-1313).
gaaaagtgttactacatta

SEQ ID NO: 28808 - DNA, 19 bp, Homo sapiens
  siRNA target sequence for IL12RB1 (NM_005535.1,1418-1436).
gtctcggtgaagaatcata

SEQ ID NO: 28809 - DNA, 19 bp, Homo sapiens
  siRNA target sequence for IL12RB1 (NM_005535.1,1491-1509).
gcgtcctaaaggagtatgt

SEQ ID NO: 28810 - DNA, 19 bp, Homo sapiens
  siRNA target sequence for IL12RB1 (NM_005535.1,1492-1510).
cgtcctaaaggagtatgtt

SEQ ID NO: 28811 - DNA, 19 bp, Homo sapiens
  siRNA target sequence for IL12RB1 (NM_005535.1,1821-1839).
ccagctccgccattgagtt

SEQ ID NO: 28812 - DNA, 19 bp, Homo sapiens
  siRNA target sequence for ILF3 (NM_004516.2,269-287).
gcgtccaatgcgaattttt

SEQ ID NO: 28813 - DNA, 19 bp, Homo sapiens
  siRNA target sequence for ILF3 (NM_004516.2,271-289).
gtccaatgcgaatttttgt

SEQ ID NO: 28814 - DNA, 19 bp, Homo sapiens
  siRNA target sequence for ILF3 (NM_004516.2,273-291).
ccaatgcgaatttttgtga

SEQ ID NO: 28815 - DNA, 19 bp, Homo sapiens
  siRNA target sequence for ILF3 (NM_004516.2,317-335).
gcattcttccgtttatcca

SEQ ID NO: 28816 - DNA, 19 bp, Homo sapiens
  siRNA target sequence for ILF3 (NM_004516.2,318-336).
cattcttccgtttatccaa

SEQ ID NO: 28817 - DNA, 19 bp, Homo sapiens
  siRNA target sequence for ILF3 (NM_004516.2,441-459).
caggcagagtccgataaca

SEQ ID NO: 28818 - DNA, 19 bp, Homo sapiens
  siRNA target sequence for ILF3 (NM_004516.2,685-703).
cagaagacaagtacgaaat

SEQ ID NO: 28819 - DNA, 19 bp, Homo sapiens
  siRNA target sequence for ILF3 (NM_004516.2,717-735).
gacgatgctgcgattgtga

SEQ ID NO: 28820 - DNA, 19 bp, Homo sapiens
  siRNA target sequence for ILF3 (NM_004516.2,719-737).
cgatgctgcgattgtgata

SEQ ID NO: 28821 - DNA, 19 bp, Homo sapiens
  siRNA target sequence for ILF3 (NM_004516.2,820-838).
ctggagaaacgctatcagt

SEQ ID NO: 28822 - DNA, 19 bp, Homo sapiens
  siRNA target sequence for ILF3 (NM_004516.2,924-942).
gccaacgggctgaagtctt

SEQ ID NO: 28823 - DNA, 19 bp, Homo sapiens
  siRNA target sequence for ILF3 (NM_004516.2,1123-1141).
cagatggttctggcattta

SEQ ID NO: 28824 - DNA, 19 bp, Homo sapiens
  siRNA target sequence for ILF3 (NM_004516.2,1193-1211).
gcaacgggaagatatcaca

SEQ ID NO: 28825 - DNA, 19 bp, Homo sapiens
  siRNA target sequence for ILF3 (NM_004516.2,1404-1422).
gagaagtcgcccagcaaaa

SEQ ID NO: 28826 - DNA, 19 bp, Homo sapiens
  siRNA target sequence for ILF3 (NM_004516.2,1545-1563).
gtccatgcccccatcttta

SEQ ID NO: 28827 - DNA, 19 bp, Homo sapiens
  siRNA target sequence for ILF3 (NM_004516.2,1574-1592).
ggaggttgatggcaattca

SEQ ID NO: 28828 - DNA, 19 bp, Homo sapiens
  siRNA target sequence for ILF3 (NM_004516.2,1575-1593).
gaggttgatggcaattcat

SEQ ID NO: 28829 - DNA, 19 bp, Homo sapiens
  siRNA target sequence for ILF3 (NM_004516.2,1969-1987).
gtgctggttccaacaaaaa

SEQ ID NO: 28830 - DNA, 19 bp, Homo sapiens
  siRNA target sequence for ILF3 (NM_004516.2,2048-2066).
cgcccttgatgccaacaaa

SEQ ID NO: 28831 - DNA, 19 bp, Homo sapiens
  siRNA target sequence for ILF3 (NM_004516.2,2249-2267).
ccatggaggctacatgaat

SEQ ID NO: 28832 - DNA, 19 bp, Homo sapiens
  siRNA target sequence for ILF3 (NM_004516.2,2268-2286).
gccggtgctgggtatggaa

SEQ ID NO: 28833 - DNA, 19 bp, Homo sapiens
  siRNA target sequence for ILF3 (NM_004516.2,2316-2334).
gcaggctacagtgactttt

SEQ ID NO: 28834 - DNA, 19 bp, Homo sapiens
  siRNA target sequence for ILF3 (NM_012218.2,2418-2436).
caaggtgacaactacaact

SEQ ID NO: 28835 - DNA, 19 bp, Homo sapiens
  siRNA target sequence for ILF3 (NM_012218.2,2549-2567).
gagcccctacagcaactat

SEQ ID NO: 28836 - DNA, 19 bp, Homo sapiens
  siRNA target sequence for ILF3 (NM_012218.2,2581-2599).
gcaagcagaaaggctataa

SEQ ID NO: 28837 - DNA, 19 bp, Homo sapiens
  siRNA target sequence for ILF3 (NM_012218.2,2656-2674).
gcggatccgactacaacta

SEQ ID NO: 28838 - DNA, 19 bp, Homo sapiens
  siRNA target sequence for ILF3 (NM_012218.2,2850-2868).
gggtccggccagaactaca

SEQ ID NO: 28839 - DNA, 19 bp, Homo sapiens
  siRNA target sequence for ILF3 (NM_012218.2,2920-2938).
cagaccacagcatgaacta

SEQ ID NO: 28840 - DNA, 19 bp, Homo sapiens
  siRNA target sequence for ING1 (NM_005537.3,441-459).
cgtggaatgtccttatcat

SEQ ID NO: 28841 - DNA, 19 bp, Homo sapiens
  siRNA target sequence for ING1 (NM_005537.3,442-460).
gtggaatgtccttatcatt

SEQ ID NO: 28842 - DNA, 19 bp, Homo sapiens
  siRNA target sequence for ING1 (NM_005537.3,528-546).
gtgtttccgctgtcttctt

SEQ ID NO: 28843 - DNA, 19 bp, Homo sapiens
  siRNA target sequence for ING1 (NM_005537.3,573-591).
ggagggtggacgagttgat

SEQ ID NO: 28844 - DNA, 19 bp, Homo sapiens
  siRNA target sequence for ING1 (NM_005537.3,574-592).
gagggtggacgagttgatt

SEQ ID NO: 28845 - DNA, 19 bp, Homo sapiens
  siRNA target sequence for ING1 (NM_005537.3,578-596).
gtggacgagttgatttgaa

SEQ ID NO: 28846 - DNA, 19 bp, Homo sapiens
  siRNA target sequence for ING1 (NM_005537.3,929-947).
cggctcggagacagtttca

SEQ ID NO: 28847 - DNA, 19 bp, Homo sapiens
  siRNA target sequence for ING1 (NM_005537.3,1577-1595).
cgtgcgtggggctcaatca

SEQ ID NO: 28848 - DNA, 19 bp, Homo sapiens
  siRNA target sequence for ING1 (NM_005537.3,1578-1596).
gtgcgtggggctcaatcat

SEQ ID NO: 28849 - DNA, 19 bp, Homo sapiens
  siRNA target sequence for ING1 (NM_005537.3,1580-1598).
gcgtggggctcaatcataa

SEQ ID NO: 28850 - DNA, 19 bp, Homo sapiens
  siRNA target sequence for ING1 (NM_005537.3,1581-1599).
cgtggggctcaatcataaa

SEQ ID NO: 28851 - DNA, 19 bp, Homo sapiens
  siRNA target sequence for ING1 (NM_198219.1,899-917).
gctccacctggtgaactat

SEQ ID NO: 28852 - DNA, 19 bp, Homo sapiens
  siRNA target sequence for ING1 (NM_198219.1,952-970).
ctttcgacttgcagagaaa

SEQ ID NO: 28853 - DNA, 19 bp, Homo sapiens
  siRNA target sequence for ING1 (NM_198219.1,985-1003).
gggagatcgacgcgaaata

SEQ ID NO: 28854 - DNA, 19 bp, Homo sapiens
  siRNA target sequence for ING1 (NM_198219.1,989-1007).
gatcgacgcgaaataccaa

SEQ ID NO: 28855 - DNA, 19 bp, Homo sapiens
  siRNA target sequence for ING3 (NM_019071.2,233-251).
gaatgcaatggatcaacta

SEQ ID NO: 28856 - DNA, 19 bp, Homo sapiens
  siRNA target sequence for ING3 (NM_019071.2,238-256).
caatggatcaactagaaca

SEQ ID NO: 28857 - DNA, 19 bp, Homo sapiens
  siRNA target sequence for ING3 (NM_019071.2,259-277).
gagtcagtgaattctttat

SEQ ID NO: 28858 - DNA, 19 bp, Homo sapiens
  siRNA target sequence for ING3 (NM_019071.2,321-339).
gcatccatcaaaaaagact

SEQ ID NO: 28859 - DNA, 19 bp, Homo sapiens
  siRNA target sequence for ING3 (NM_019071.2,326-344).
catcaaaaaagactactat

SEQ ID NO: 28860 - DNA, 19 bp, Homo sapiens
  siRNA target sequence for ING3 (NM_019071.2,377-395).
gttggcaaaccagatatat

SEQ ID NO: 28861 - DNA, 19 bp, Homo sapiens
  siRNA target sequence for ING3 (NM_019071.2,381-399).
gcaaaccagatatatgact

SEQ ID NO: 28862 - DNA, 19 bp, Homo sapiens
  siRNA target sequence for ING3 (NM_019071.2,402-420).
gtagatcgacacttgagaa

SEQ ID NO: 28863 - DNA, 19 bp, Homo sapiens
  siRNA target sequence for ING3 (NM_019071.2,455-473).
gctggaagctgataatgct

SEQ ID NO: 28864 - DNA, 19 bp, Homo sapiens
  siRNA target sequence for ING3 (NM_019071.2,492-510).
gagaggcgatctttggaat

SEQ ID NO: 28865 - DNA, 19 bp, Homo sapiens
  siRNA target sequence for ING3 (NM_019071.2,494-512).
gaggcgatctttggaatta

SEQ ID NO: 28866 - DNA, 19 bp, Homo sapiens
  siRNA target sequence for ING3 (NM_019071.2,496-514).
ggcgatctttggaattaga

SEQ ID NO: 28867 - DNA, 19 bp, Homo sapiens
  siRNA target sequence for ING3 (NM_019071.2,536-554).
caatcaccatgctcattca

SEQ ID NO: 28868 - DNA, 19 bp, Homo sapiens
  siRNA target sequence for ING3 (NM_019071.2,540-558).
caccatgctcattcacata

SEQ ID NO: 28869 - DNA, 19 bp, Homo sapiens
  siRNA target sequence for ING3 (NM_019071.2,596-614).
ccatacgacaacagatcat

SEQ ID NO: 28870 - DNA, 19 bp, Homo sapiens
  siRNA target sequence for ING3 (NM_019071.2,597-615).
catacgacaacagatcata

SEQ ID NO: 28871 - DNA, 19 bp, Homo sapiens
  siRNA target sequence for ING3 (NM_019071.2,607-625).
cagatcatattcctgaaaa

SEQ ID NO: 28872 - DNA, 19 bp, Homo sapiens
  siRNA target sequence for ING3 (NM_019071.2,685-703).
cactaggttgtcgaaataa

SEQ ID NO: 28873 - DNA, 19 bp, Homo sapiens
  siRNA target sequence for ING3 (NM_019071.2,721-739).
ctaacaatgcctacaatgt

SEQ ID NO: 28874 - DNA, 19 bp, Homo sapiens
  siRNA target sequence for ING3 (NM_019071.2,729-747).
gcctacaatgtgaattcct

SEQ ID NO: 28875 - DNA, 19 bp, Homo sapiens
  siRNA target sequence for ING3 (NM_019071.2,770-788).
cattggctcgttatcttca

SEQ ID NO: 28876 - DNA, 19 bp, Homo sapiens
  siRNA target sequence for ING3 (NM_019071.2,795-813).
ggtgcaggggcaattacca

SEQ ID NO: 28877 - DNA, 19 bp, Homo sapiens
  siRNA target sequence for ING3 (NM_019071.2,945-963).
gaaacagttggctattcat

SEQ ID NO: 28878 - DNA, 19 bp, Homo sapiens
  siRNA target sequence for ING3 (NM_019071.2,961-979).
catcatcttcggcacttat

SEQ ID NO: 28879 - DNA, 19 bp, Homo sapiens
  siRNA target sequence for ING3 (NM_019071.2,970-988).
cggcacttatgacaacatt

SEQ ID NO: 28880 - DNA, 19 bp, Homo sapiens
  siRNA target sequence for ING3 (NM_019071.2,1114-1132).
catcatcaactgttgtaca

SEQ ID NO: 28881 - DNA, 19 bp, Homo sapiens
  siRNA target sequence for ING3 (NM_019071.2,1117-1135).
catcaactgttgtacaaga

SEQ ID NO: 28882 - DNA, 19 bp, Homo sapiens
  siRNA target sequence for ING3 (NM_019071.2,1155-1173).
gtagtgccagaatctgatt

SEQ ID NO: 28883 - DNA, 19 bp, Homo sapiens
  siRNA target sequence for ING3 (NM_019071.2,1158-1176).
gtgccagaatctgattcaa

SEQ ID NO: 28884 - DNA, 19 bp, Homo sapiens
  siRNA target sequence for ING3 (NM_019071.2,1192-1210).
ggacttacgacccaaatga

SEQ ID NO: 28885 - DNA, 19 bp, Homo sapiens
  siRNA target sequence for ING3 (NM_019071.2,1193-1211).
gacttacgacccaaatgaa

SEQ ID NO: 28886 - DNA, 19 bp, Homo sapiens
  siRNA target sequence for ING3 (NM_019071.2,1209-1227).
gaacctcgatactgcattt

SEQ ID NO: 28887 - DNA, 19 bp, Homo sapiens
  siRNA target sequence for ING3 (NM_019071.2,1212-1230).
cctcgatactgcatttgta

SEQ ID NO: 28888 - DNA, 19 bp, Homo sapiens
  siRNA target sequence for ING3 (NM_019071.2,1213-1231).
ctcgatactgcatttgtaa

SEQ ID NO: 28889 - DNA, 19 bp, Homo sapiens
  siRNA target sequence for ING3 (NM_019071.2,1253-1271).
ggtgggatgtgataaccaa

SEQ ID NO: 28890 - DNA, 19 bp, Homo sapiens
  siRNA target sequence for ING3 (NM_019071.2,1278-1296).
cctatagaatggttccatt

SEQ ID NO: 28891 - DNA, 19 bp, Homo sapiens
  siRNA target sequence for ING3 (NM_019071.2,1279-1297).
ctatagaatggttccatta

SEQ ID NO: 28892 - DNA, 19 bp, Homo sapiens
  siRNA target sequence for ING4 (NM_016162.2,42-60).
ctgcggggatgtatttgga

SEQ ID NO: 28893 - DNA, 19 bp, Homo sapiens
  siRNA target sequence for ING4 (NM_016162.2,124-142).
ggacctagaccaaagaaca

SEQ ID NO: 28894 - DNA, 19 bp, Homo sapiens
  siRNA target sequence for ING4 (NM_016162.2,172-190).
ggccactgagtatatgagt

SEQ ID NO: 28895 - DNA, 19 bp, Homo sapiens
  siRNA target sequence for ING4 (NM_016162.2,173-191).
gccactgagtatatgagta

SEQ ID NO: 28896 - DNA, 19 bp, Homo sapiens
  siRNA target sequence for ING4 (NM_016162.2,203-221).
ctgagctccgaggaaaaat

SEQ ID NO: 28897 - DNA, 19 bp, Homo sapiens
  siRNA target sequence for ING4 (NM_016162.2,256-274).
caagtgcaaggaatttggt

SEQ ID NO: 28898 - DNA, 19 bp, Homo sapiens
  siRNA target sequence for ING4 (NM_016162.2,386-404).
gagtcaagtgactatgaca

SEQ ID NO: 28899 - DNA, 19 bp, Homo sapiens
  siRNA target sequence for ING4 (NM_016162.2,529-547).
gcgcacaagtcctgagtat

SEQ ID NO: 28900 - DNA, 19 bp, Homo sapiens
  siRNA target sequence for ING4 (NM_016162.2,621-639).
ccacctattgcctttgtca

SEQ ID NO: 28901 - DNA, 19 bp, Homo sapiens
  siRNA target sequence for INSM1 (NM_002196.1,166-184).
gtgaagcgcagcaagaagt

SEQ ID NO: 28902 - DNA, 19 bp, Homo sapiens
  siRNA target sequence for INSM1 (NM_002196.1,475-493).
cacgagaagcacaagtact

SEQ ID NO: 28903 - DNA, 19 bp, Homo sapiens
  siRNA target sequence for INSM1 (NM_002196.1,1595-1613).
gccttacgcggcacatcaa

SEQ ID NO: 28904 - DNA, 19 bp, Homo sapiens
  siRNA target sequence for INSM1 (NM_002196.1,1597-1615).
cttacgcggcacatcaaca

SEQ ID NO: 28905 - DNA, 19 bp, Homo sapiens
  siRNA target sequence for INSM1 (NM_002196.1,1620-1638).
ccacccatccgaaaacaga

SEQ ID NO: 28906 - DNA, 19 bp, Homo sapiens
  siRNA target sequence for IRLB (NM_005848.1,430-448).
cttcaatgatgcttgtcat

SEQ ID NO: 28907 - DNA, 19 bp, Homo sapiens
  siRNA target sequence for IRLB (NM_005848.1,433-451).
caatgatgcttgtcataaa

SEQ ID NO: 28908 - DNA, 19 bp, Homo sapiens
  siRNA target sequence for IRLB (NM_005848.1,441-459).
cttgtcataaagtagctaa

SEQ ID NO: 28909 - DNA, 19 bp, Homo sapiens
  siRNA target sequence for IRLB (NM_005848.1,462-480).
caaaagaacctattacaga

SEQ ID NO: 28910 - DNA, 19 bp, Homo sapiens
  siRNA target sequence for IRLB (NM_005848.1,467-485).
gaacctattacagatgttt

SEQ ID NO: 28911 - DNA, 19 bp, Homo sapiens
  siRNA target sequence for IRLB (NM_005848.1,482-500).
gtttcagttattatcaaat

SEQ ID NO: 28912 - DNA, 19 bp, Homo sapiens
  siRNA target sequence for IRLB (NM_005848.1,515-533).
gtcccacaggattatatct

SEQ ID NO: 28913 - DNA, 19 bp, Homo sapiens
  siRNA target sequence for IRLB (NM_005848.1,517-535).
cccacaggattatatctgt

SEQ ID NO: 28914 - DNA, 19 bp, Homo sapiens
  siRNA target sequence for IRLB (NM_005848.1,518-536).
ccacaggattatatctgta

SEQ ID NO: 28915 - DNA, 19 bp, Homo sapiens
  siRNA target sequence for IRLB (NM_005848.1,554-572).
ggattgtcagctgatctta

SEQ ID NO: 28916 - DNA, 19 bp, Homo sapiens
  siRNA target sequence for IRLB (NM_005848.1,563-581).
gctgatcttaataatggaa

SEQ ID NO: 28917 - DNA, 19 bp, Homo sapiens
  siRNA target sequence for IRLB (NM_005848.1,589-607).
ggggccacagatttacctt

SEQ ID NO: 28918 - DNA, 19 bp, Homo sapiens
  siRNA target sequence for IRLB (NM_005848.1,590-608).
gggccacagatttaccttt

SEQ ID NO: 28919 - DNA, 19 bp, Homo sapiens
  siRNA target sequence for IRLB (NM_005848.1,594-612).
cacagatttacctttgcta

SEQ ID NO: 28920 - DNA, 19 bp, Homo sapiens
  siRNA target sequence for IRLB (NM_005848.1,647-665).
ctgggggttttatatgact

SEQ ID NO: 28921 - DNA, 19 bp, Homo sapiens
  siRNA target sequence for IRLB (NM_005848.1,737-755).
gggagtacctcatcacaaa

SEQ ID NO: 28922 - DNA, 19 bp, Homo sapiens
  siRNA target sequence for IRLB (NM_005848.1,744-762).
cctcatcacaaagaattta

SEQ ID NO: 28923 - DNA, 19 bp, Homo sapiens
  siRNA target sequence for IRLB (NM_005848.1,868-886).
ctgcaaagtcgacaagaat

SEQ ID NO: 28924 - DNA, 19 bp, Homo sapiens
  siRNA target sequence for IRLB (NM_005848.1,870-888).
gcaaagtcgacaagaatct

SEQ ID NO: 28925 - DNA, 19 bp, Homo sapiens
  siRNA target sequence for IRLB (NM_005848.1,875-893).
gtcgacaagaatctcaata

SEQ ID NO: 28926 - DNA, 19 bp, Homo sapiens
  siRNA target sequence for IRLB (NM_005848.1,903-921).
ggggatcagcagtatactt

SEQ ID NO: 28927 - DNA, 19 bp, Homo sapiens
  siRNA target sequence for IRLB (NM_005848.1,905-923).
ggatcagcagtatacttgt

SEQ ID NO: 28928 - DNA, 19 bp, Homo sapiens
  siRNA target sequence for IRLB (NM_005848.1,909-927).
cagcagtatacttgtgtta

SEQ ID NO: 28929 - DNA, 19 bp, Homo sapiens
  siRNA target sequence for IRLB (NM_005848.1,941-959).
gcaaagacgaacactgtat

SEQ ID NO: 28930 - DNA, 19 bp, Homo sapiens
  siRNA target sequence for IRLB (NM_005848.1,948-966).
cgaacactgtatcttacaa

SEQ ID NO: 28931 - DNA, 19 bp, Homo sapiens
  siRNA target sequence for IRLB (NM_005848.1,964-982).
caaagctggcctaatttgt

SEQ ID NO: 28932 - DNA, 19 bp, Homo sapiens
  siRNA target sequence for IRLB (NM_005848.1,968-986).
gctggcctaatttgtagat

SEQ ID NO: 28933 - DNA, 19 bp, Homo sapiens
  siRNA target sequence for IRLB (NM_005848.1,969-987).
ctggcctaatttgtagata

SEQ ID NO: 28934 - DNA, 19 bp, Homo sapiens
  siRNA target sequence for IRLB (NM_005848.1,973-991).
cctaatttgtagatatcct

SEQ ID NO: 28935 - DNA, 19 bp, Homo sapiens
  siRNA target sequence for IRLB (NM_005848.1,981-999).
gtagatatcctcaagaaga

SEQ ID NO: 28936 - DNA, 19 bp, Homo sapiens
  siRNA target sequence for IRLB (NM_005848.1,989-1007).
cctcaagaagattatgagt

SEQ ID NO: 28937 - DNA, 19 bp, Homo sapiens
  siRNA target sequence for IRLB (NM_005848.1,1012-1030).
ctcactaccggaatctgtt

SEQ ID NO: 28938 - DNA, 19 bp, Homo sapiens
  siRNA target sequence for IRLB (NM_005848.1,1051-1069).
gggtgcaaccattgaatgt

SEQ ID NO: 28939 - DNA, 19 bp, Homo sapiens
  siRNA target sequence for IRLB (NM_005848.1,1091-1109).
cctctgcctgtattttcta

SEQ ID NO: 28940 - DNA, 19 bp, Homo sapiens
  siRNA target sequence for IRLB (NM_005848.1,1125-1143).
gagcctcagctgaaaaggt

SEQ ID NO: 28941 - DNA, 19 bp, Homo sapiens
  siRNA target sequence for IRLB (NM_005848.1,1128-1146).
cctcagctgaaaaggttta

SEQ ID NO: 28942 - DNA, 19 bp, Homo sapiens
  siRNA target sequence for IRLB (NM_005848.1,1148-1166).
ggtgctgctattcagtttt

SEQ ID NO: 28943 - DNA, 19 bp, Homo sapiens
  siRNA target sequence for IRLB (NM_005848.1,1149-1167).
gtgctgctattcagtttta

SEQ ID NO: 28944 - DNA, 19 bp, Homo sapiens
  siRNA target sequence for IRLB (NM_005848.1,1229-1247).
gcagatgggaagtctgata

SEQ ID NO: 28945 - DNA, 19 bp, Homo sapiens
  siRNA target sequence for IRLB (NM_005848.1,1232-1250).
gatgggaagtctgatagtt

SEQ ID NO: 28946 - DNA, 19 bp, Homo sapiens
  siRNA target sequence for IRLB (NM_005848.1,1240-1258).
gtctgatagttccaaaaca

SEQ ID NO: 28947 - DNA, 19 bp, Homo sapiens
  siRNA target sequence for IRLB (NM_005848.1,1242-1260).
ctgatagttccaaaacaat

SEQ ID NO: 28948 - DNA, 19 bp, Homo sapiens
  siRNA target sequence for IRLB (NM_005848.1,1325-1343).
ctgacttttctgtatcgtt

SEQ ID NO: 28949 - DNA, 19 bp, Homo sapiens
  siRNA target sequence for IRLB (NM_005848.1,1327-1345).
gacttttctgtatcgttat

SEQ ID NO: 28950 - DNA, 19 bp, Homo sapiens
  siRNA target sequence for IRLB (NM_005848.1,1356-1374).
ggcctcatgtccttccaat

SEQ ID NO: 28951 - DNA, 19 bp, Homo sapiens
  siRNA target sequence for IRLB (NM_005848.1,1426-1444).
gagaccacggattttagtt

SEQ ID NO: 28952 - DNA, 19 bp, Homo sapiens
  siRNA target sequence for IRLB (NM_005848.1,1428-1446).
gaccacggattttagttca

SEQ ID NO: 28953 - DNA, 19 bp, Homo sapiens
  siRNA target sequence for IRLB (NM_005848.1,1433-1451).
cggattttagttcagttat

SEQ ID NO: 28954 - DNA, 19 bp, Homo sapiens
  siRNA target sequence for IRLB (NM_005848.1,1452-1470).
caccacatgataatctgat

SEQ ID NO: 28955 - DNA, 19 bp, Homo sapiens
  siRNA target sequence for IRLB (NM_005848.1,1502-1520).
ctaagtggtggcaagtttt

SEQ ID NO: 28956 - DNA, 19 bp, Homo sapiens
  siRNA target sequence for IRLB (NM_005848.1,1521-1539).
caacactactgcagaattt

SEQ ID NO: 28957 - DNA, 19 bp, Homo sapiens
  siRNA target sequence for IRLB (NM_005848.1,1570-1588).
gtttgcagtaacagaacat

SEQ ID NO: 28958 - DNA, 19 bp, Homo sapiens
  siRNA target sequence for IRLB (NM_005848.1,1610-1628).
cggccatccgtgcttacta

SEQ ID NO: 28959 - DNA, 19 bp, Homo sapiens
  siRNA target sequence for IRLB (NM_005848.1,1612-1630).
gccatccgtgcttactagt

SEQ ID NO: 28960 - DNA, 19 bp, Homo sapiens
  siRNA target sequence for IRLB (NM_005848.1,1631-1649).
gtgacagaagcattagtgt

SEQ ID NO: 28961 - DNA, 19 bp, Homo sapiens
  siRNA target sequence for IRLB (NM_005848.1,1635-1653).
cagaagcattagtgtctat

SEQ ID NO: 28962 - DNA, 19 bp, Homo sapiens
  siRNA target sequence for IRLB (NM_005848.1,1637-1655).
gaagcattagtgtctatga

SEQ ID NO: 28963 - DNA, 19 bp, Homo sapiens
  siRNA target sequence for IRLB (NM_005848.1,1669-1687).
ctggccatgcccgtatgtt

SEQ ID NO: 28964 - DNA, 19 bp, Homo sapiens
  siRNA target sequence for IRLB (NM_005848.1,1797-1815).
gtgttgatgtagataccaa

SEQ ID NO: 28965 - DNA, 19 bp, Homo sapiens
  siRNA target sequence for IRLB (NM_005848.1,1802-1820).
gatgtagataccaacacta

SEQ ID NO: 28966 - DNA, 19 bp, Homo sapiens
  siRNA target sequence for IRLB (NM_005848.1,1805-1823).
gtagataccaacactattt

SEQ ID NO: 28967 - DNA, 19 bp, Homo sapiens
  siRNA target sequence for IRLB (NM_005848.1,1813-1831).
caacactatttctcagatt

SEQ ID NO: 28968 - DNA, 19 bp, Homo sapiens
  siRNA target sequence for IRLB (NM_005848.1,1952-1970).
ggactcatggatttagcaa

SEQ ID NO: 28969 - DNA, 19 bp, Homo sapiens
  siRNA target sequence for IRLB (NM_005848.1,1953-1971).
gactcatggatttagcaat

SEQ ID NO: 28970 - DNA, 19 bp, Homo sapiens
  siRNA target sequence for IRLB (NM_005848.1,1961-1979).
gatttagcaataaatgact

SEQ ID NO: 28971 - DNA, 19 bp, Homo sapiens
  siRNA target sequence for IRLB (NM_005848.1,1967-1985).
gcaataaatgactatgatt

SEQ ID NO: 28972 - DNA, 19 bp, Homo sapiens
  siRNA target sequence for IRLB (NM_005848.1,2080-2098).
cttaaggccaataacacaa

SEQ ID NO: 28973 - DNA, 19 bp, Homo sapiens
  siRNA target sequence for IRLB (NM_005848.1,2138-2156).
gccctacaagctttcttaa

SEQ ID NO: 28974 - DNA, 19 bp, Homo sapiens
  siRNA target sequence for IRLB (NM_005848.1,2140-2158).
cctacaagctttcttaaga

SEQ ID NO: 28975 - DNA, 19 bp, Homo sapiens
  siRNA target sequence for IRLB (NM_005848.1,2161-2179).
ccgggaccggtcacatcaa

SEQ ID NO: 28976 - DNA, 19 bp, Homo sapiens
  siRNA target sequence for IRLB (NM_005848.1,2162-2180).
cgggaccggtcacatcaaa

SEQ ID NO: 28977 - DNA, 19 bp, Homo sapiens
  siRNA target sequence for IRLB (NM_005848.1,2163-2181).
gggaccggtcacatcaaaa

SEQ ID NO: 28978 - DNA, 19 bp, Homo sapiens
  siRNA target sequence for IRLB (NM_005848.1,2164-2182).
ggaccggtcacatcaaaaa

SEQ ID NO: 28979 - DNA, 19 bp, Homo sapiens
  siRNA target sequence for IRLB (NM_005848.1,2165-2183).
gaccggtcacatcaaaaat

SEQ ID NO: 28980 - DNA, 19 bp, Homo sapiens
  siRNA target sequence for IRLB (NM_005848.1,2197-2215).
gaccaaaacacaaatgttt

SEQ ID NO: 28981 - DNA, 19 bp, Homo sapiens
  siRNA target sequence for IRLB (NM_005848.1,2266-2284).
ggcattttttgatgattgt

SEQ ID NO: 28982 - DNA, 19 bp, Homo sapiens
  siRNA target sequence for IRLB (NM_005848.1,2268-2286).
cattttttgatgattgtgt

SEQ ID NO: 28983 - DNA, 19 bp, Homo sapiens
  siRNA target sequence for IRLB (NM_005848.1,2310-2328).
gcggtgaagtacgacttat

SEQ ID NO: 28984 - DNA, 19 bp, Homo sapiens
  siRNA target sequence for IRLB (NM_005848.1,2311-2329).
cggtgaagtacgacttata

SEQ ID NO: 28985 - DNA, 19 bp, Homo sapiens
  siRNA target sequence for IRLB (NM_005848.1,2313-2331).
gtgaagtacgacttataga

SEQ ID NO: 28986 - DNA, 19 bp, Homo sapiens
  siRNA target sequence for IRLB (NM_005848.1,2335-2353).
ggatgaatctttcaaaagt

SEQ ID NO: 28987 - DNA, 19 bp, Homo sapiens
  siRNA target sequence for IRLB (NM_005848.1,2392-2410).
cctacccaatggtgaagaa

SEQ ID NO: 28988 - DNA, 19 bp, Homo sapiens
  siRNA target sequence for IRLB (NM_005848.1,2540-2558).
cccatgttcagaagaacaa

SEQ ID NO: 28989 - DNA, 19 bp, Homo sapiens
  siRNA target sequence for IRLB (NM_005848.1,2574-2592).
cagcccataaaattgcaaa

SEQ ID NO: 28990 - DNA, 19 bp, Homo sapiens
  siRNA target sequence for IRLB (NM_005848.1,2628-2646).
gtctactgcgccactgtta

SEQ ID NO: 28991 - DNA, 19 bp, Homo sapiens
  siRNA target sequence for IRLB (NM_005848.1,2643-2661).
gttatggactgtggtttat

SEQ ID NO: 28992 - DNA, 19 bp, Homo sapiens
  siRNA target sequence for IRLB (NM_005848.1,2669-2687).
ccagcttatgtgaaagtct

SEQ ID NO: 28993 - DNA, 19 bp, Homo sapiens
  siRNA target sequence for IRLB (NM_005848.1,2678-2696).
gtgaaagtctgtcattcaa

SEQ ID NO: 28994 - DNA, 19 bp, Homo sapiens
  siRNA target sequence for IRLB (NM_005848.1,2770-2788).
ggtatgctaccgcattctt

SEQ ID NO: 28995 - DNA, 19 bp, Homo sapiens
  siRNA target sequence for IRLB (NM_005848.1,2775-2793).
gctaccgcattcttatgca

SEQ ID NO: 28996 - DNA, 19 bp, Homo sapiens
  siRNA target sequence for IRLB (NM_005848.1,2776-2794).
ctaccgcattcttatgcaa

SEQ ID NO: 28997 - DNA, 19 bp, Homo sapiens
  siRNA target sequence for IRLB (NM_005848.1,2791-2809).
gcaactctgtggacaatat

SEQ ID NO: 28998 - DNA, 19 bp, Homo sapiens
  siRNA target sequence for IRLB (NM_005848.1,2826-2844).
cagttcgagtgctttttga

SEQ ID NO: 28999 - DNA, 19 bp, Homo sapiens
  siRNA target sequence for IRLB (NM_005848.1,2864-2882).
gaccccaatgccattactt

SEQ ID NO: 29000 - DNA, 19 bp, Homo sapiens
  siRNA target sequence for IRLB (NM_005848.1,2866-2884).
ccccaatgccattacttat

SEQ ID NO: 29001 - DNA, 19 bp, Homo sapiens
  siRNA target sequence for IRLB (NM_005848.1,2928-2946).
gaagtcgtagtggctattt

SEQ ID NO: 29002 - DNA, 19 bp, Homo sapiens
  siRNA target sequence for IRLB (NM_005848.1,2931-2949).
gtcgtagtggctattttct

SEQ ID NO: 29003 - DNA, 19 bp, Homo sapiens
  siRNA target sequence for IRLB (NM_005848.1,2933-2951).
cgtagtggctattttcttt

SEQ ID NO: 29004 - DNA, 19 bp, Homo sapiens
  siRNA target sequence for IRLB (NM_005848.1,3010-3028).
gcatgcacacttatcacaa

SEQ ID NO: 29005 - DNA, 19 bp, Homo sapiens
  siRNA target sequence for IRLB (NM_005848.1,3011-3029).
catgcacacttatcacaaa

SEQ ID NO: 29006 - DNA, 19 bp, Homo sapiens
  siRNA target sequence for IRLB (NM_005848.1,3046-3064).
ccagtctgatcttggatat

SEQ ID NO: 29007 - DNA, 19 bp, Homo sapiens
  siRNA target sequence for IRLB (NM_005848.1,3049-3067).
gtctgatcttggatataat

SEQ ID NO: 29008 - DNA, 19 bp, Homo sapiens
  siRNA target sequence for IRLB (NM_005848.1,3053-3071).
gatcttggatataattcat

SEQ ID NO: 29009 - DNA, 19 bp, Homo sapiens
  siRNA target sequence for IRLB (NM_005848.1,3056-3074).
cttggatataattcattat

SEQ ID NO: 29010 - DNA, 19 bp, Homo sapiens
  siRNA target sequence for IRLB (NM_005848.1,3059-3077).
ggatataattcattatcta

SEQ ID NO: 29011 - DNA, 19 bp, Homo sapiens
  siRNA target sequence for IRLB (NM_005848.1,3060-3078).
gatataattcattatctaa

SEQ ID NO: 29012 - DNA, 19 bp, Homo sapiens
  siRNA target sequence for IRLB (NM_005848.1,3086-3104).
gttagaagaggggatacat

SEQ ID NO: 29013 - DNA, 19 bp, Homo sapiens
  siRNA target sequence for IRLB (NM_005848.1,3200-3218).
cctaagctcagttatcaaa

SEQ ID NO: 29014 - DNA, 19 bp, Homo sapiens
  siRNA target sequence for IRLB (NM_005848.1,3236-3254).
cgcctcactggtacaagta

SEQ ID NO: 29015 - DNA, 19 bp, Homo sapiens
  siRNA target sequence for IRLB (NM_005848.1,3281-3299).
gaaagcatgggtaaggaaa

SEQ ID NO: 29016 - DNA, 19 bp, Homo sapiens
  siRNA target sequence for IRLB (NM_005848.1,3313-3331).
gctcttaatatcatctctt

SEQ ID NO: 29017 - DNA, 19 bp, Homo sapiens
  siRNA target sequence for IRLB (NM_005848.1,3350-3368).
cgaaacattcaaagtagat

SEQ ID NO: 29018 - DNA, 19 bp, Homo sapiens
  siRNA target sequence for IRLB (NM_005848.1,3390-3408).
gtgacaatgaaactaattt

SEQ ID NO: 29019 - DNA, 19 bp, Homo sapiens
  siRNA target sequence for IRLB (NM_005848.1,3429-3447).
gaaatagaaaccgtaatct

SEQ ID NO: 29020 - DNA, 19 bp, Homo sapiens
  siRNA target sequence for IRLB (NM_005848.1,3455-3473).
ggggtactgatgggattta

SEQ ID NO: 29021 - DNA, 19 bp, Homo sapiens
  siRNA target sequence for IRLB (NM_005848.1,3467-3485).
ggatttatgctcaatagaa

SEQ ID NO: 29022 - DNA, 19 bp, Homo sapiens
  siRNA target sequence for IRLB (NM_005848.1,3468-3486).
gatttatgctcaatagaat

SEQ ID NO: 29023 - DNA, 19 bp, Homo sapiens
  siRNA target sequence for IRLB (NM_005848.1,3498-3516).
caacccctggagatatagt

SEQ ID NO: 29024 - DNA, 19 bp, Homo sapiens
  siRNA target sequence for IRLB (NM_005848.1,3501-3519).
cccctggagatatagttga

SEQ ID NO: 29025 - DNA, 19 bp, Homo sapiens
  siRNA target sequence for IRLB (NM_005848.1,3502-3520).
ccctggagatatagttgaa

SEQ ID NO: 29026 - DNA, 19 bp, Homo sapiens
  siRNA target sequence for IRLB (NM_005848.1,3503-3521).
cctggagatatagttgaaa

SEQ ID NO: 29027 - DNA, 19 bp, Homo sapiens
  siRNA target sequence for IRLB (NM_005848.1,3504-3522).
ctggagatatagttgaaaa

SEQ ID NO: 29028 - DNA, 19 bp, Homo sapiens
  siRNA target sequence for IRLB (NM_005848.1,3526-3544).
gggagctgatgcaaaaatt

SEQ ID NO: 29029 - DNA, 19 bp, Homo sapiens
  siRNA target sequence for IRLB (NM_005848.1,3567-3585).
gcacgagaccaaatactct

SEQ ID NO: 29030 - DNA, 19 bp, Homo sapiens
  siRNA target sequence for IRLB (NM_005848.1,3568-3586).
cacgagaccaaatactctt

SEQ ID NO: 29031 - DNA, 19 bp, Homo sapiens
  siRNA target sequence for IRLB (NM_005848.1,3598-3616).
gccacctttaagatcaaaa

SEQ ID NO: 29032 - DNA, 19 bp, Homo sapiens
  siRNA target sequence for IRLB (NM_005848.1,3654-3672).
caccttttgatggttctaa

SEQ ID NO: 29033 - DNA, 19 bp, Homo sapiens
  siRNA target sequence for IRLB (NM_005848.1,3656-3674).
ccttttgatggttctaact

SEQ ID NO: 29034 - DNA, 19 bp, Homo sapiens
  siRNA target sequence for IRLB (NM_005848.1,3696-3714).
ctcctgttatttttgactt

SEQ ID NO: 29035 - DNA, 19 bp, Homo sapiens
  siRNA target sequence for IRLB (NM_005848.1,3699-3717).
ctgttatttttgacttaga

SEQ ID NO: 29036 - DNA, 19 bp, Homo sapiens
  siRNA target sequence for IRLB (NM_005848.1,3752-3770).
ggatgtgttgctacacaaa

SEQ ID NO: 29037 - DNA, 19 bp, Homo sapiens
  siRNA target sequence for IRLB (NM_005848.1,3753-3771).
gatgtgttgctacacaaaa

SEQ ID NO: 29038 - DNA, 19 bp, Homo sapiens
  siRNA target sequence for IRLB (NM_005848.1,3774-3792).
ccaagaggattcaacgtat

SEQ ID NO: 29039 - DNA, 19 bp, Homo sapiens
  siRNA target sequence for IRLB (NM_005848.1,3939-3957).
catctgctaggcgtgattt

SEQ ID NO: 29040 - DNA, 19 bp, Homo sapiens
  siRNA target sequence for IRLB (NM_005848.1,3949-3967).
gcgtgatttagctgaagaa

SEQ ID NO: 29041 - DNA, 19 bp, Homo sapiens
  siRNA target sequence for IRLB (NM_005848.1,4011-4029).
gtacaccaagcattgattt

SEQ ID NO: 29042 - DNA, 19 bp, Homo sapiens
  siRNA target sequence for IRLB (NM_005848.1,4031-4049).
caacgggcatgtgatgata

SEQ ID NO: 29043 - DNA, 19 bp, Homo sapiens
  siRNA target sequence for IRLB (NM_005848.1,4036-4054).
ggcatgtgatgataaatta

SEQ ID NO: 29044 - DNA, 19 bp, Homo sapiens
  siRNA target sequence for IRLB (NM_005848.1,4076-4094).
gtcaaggcatgcagaagat

SEQ ID NO: 29045 - DNA, 19 bp, Homo sapiens
  siRNA target sequence for IRLB (NM_005848.1,4121-4139).
ccagtgagacttaccaaat

SEQ ID NO: 29046 - DNA, 19 bp, Homo sapiens
  siRNA target sequence for IRLB (NM_005848.1,4124-4142).
gtgagacttaccaaatcta

SEQ ID NO: 29047 - DNA, 19 bp, Homo sapiens
  siRNA target sequence for IRLB (NM_005848.1,4126-4144).
gagacttaccaaatctaaa

SEQ ID NO: 29048 - DNA, 19 bp, Homo sapiens
  siRNA target sequence for IRLB (NM_005848.1,4213-4231).
cccatttagggaagaatct

SEQ ID NO: 29049 - DNA, 19 bp, Homo sapiens
  siRNA target sequence for IRLB (NM_005848.1,4260-4278).
catttaacttagatacact

SEQ ID NO: 29050 - DNA, 19 bp, Homo sapiens
  siRNA target sequence for IRLB (NM_005848.1,4267-4285).
cttagatacactactagta

SEQ ID NO: 29051 - DNA, 19 bp, Homo sapiens
  siRNA target sequence for IRLB (NM_005848.1,4275-4293).
cactactagtacctaaact

SEQ ID NO: 29052 - DNA, 19 bp, Homo sapiens
  siRNA target sequence for IRLB (NM_005848.1,4342-4360).
gaaagcaagcaaatggtat

SEQ ID NO: 29053 - DNA, 19 bp, Homo sapiens
  siRNA target sequence for IRLB (NM_005848.1,4350-4368).
gcaaatggtattcaagatt

SEQ ID NO: 29054 - DNA, 19 bp, Homo sapiens
  siRNA target sequence for IRLB (NM_005848.1,4524-4542).
cagggactaagagaattga

SEQ ID NO: 29055 - DNA, 19 bp, Homo sapiens
  siRNA target sequence for IRLB (NM_005848.1,4527-4545).
ggactaagagaattgatct

SEQ ID NO: 29056 - DNA, 19 bp, Homo sapiens
  siRNA target sequence for IRLB (NM_005848.1,4550-4568).
cgaataagcctggaaagtt

SEQ ID NO: 29057 - DNA, 19 bp, Homo sapiens
  siRNA target sequence for IRLB (NM_005848.1,4633-4651).
cttcaacgcgagtaataca

SEQ ID NO: 29058 - DNA, 19 bp, Homo sapiens
  siRNA target sequence for IRLB (NM_005848.1,4636-4654).
caacgcgagtaatacaaat

SEQ ID NO: 29059 - DNA, 19 bp, Homo sapiens
  siRNA target sequence for IRLB (NM_005848.1,4640-4658).
gcgagtaatacaaatatct

SEQ ID NO: 29060 - DNA, 19 bp, Homo sapiens
  siRNA target sequence for IRLB (NM_005848.1,4641-4659).
cgagtaatacaaatatctt

SEQ ID NO: 29061 - DNA, 19 bp, Homo sapiens
  siRNA target sequence for IRLB (NM_005848.1,4676-4694).
gaggttctcatctcaagtt

SEQ ID NO: 29062 - DNA, 19 bp, Homo sapiens
  siRNA target sequence for IRLB (NM_005848.1,4696-4714).
ctctcggtgtagaacttgt

SEQ ID NO: 29063 - DNA, 19 bp, Homo sapiens
  siRNA target sequence for IRLB (NM_005848.1,4700-4718).
cggtgtagaacttgtgatt

SEQ ID NO: 29064 - DNA, 19 bp, Homo sapiens
  siRNA target sequence for IRLB (NM_005848.1,4702-4720).
gtgtagaacttgtgattgt

SEQ ID NO: 29065 - DNA, 19 bp, Homo sapiens
  siRNA target sequence for IRLB (NM_005848.1,4704-4722).
gtagaacttgtgattgtct

SEQ ID NO: 29066 - DNA, 19 bp, Homo sapiens
  siRNA target sequence for IRLB (NM_005848.1,4785-4803).
gcccattctgtggcaatat

SEQ ID NO: 29067 - DNA, 19 bp, Homo sapiens
  siRNA target sequence for IRLB (NM_005848.1,4787-4805).
ccattctgtggcaatatct

SEQ ID NO: 29068 - DNA, 19 bp, Homo sapiens
  siRNA target sequence for IRLB (NM_005848.1,4788-4806).
cattctgtggcaatatctt

SEQ ID NO: 29069 - DNA, 19 bp, Homo sapiens
  siRNA target sequence for IRLB (NM_005848.1,4872-4890).
gcccatcaacagaaaatat

SEQ ID NO: 29070 - DNA, 19 bp, Homo sapiens
  siRNA target sequence for IRLB (NM_005848.1,4918-4936).
gacgaggcagtcttgcatt

SEQ ID NO: 29071 - DNA, 19 bp, Homo sapiens
  siRNA target sequence for IRLB (NM_005848.1,4924-4942).
gcagtcttgcatttcaaca

SEQ ID NO: 29072 - DNA, 19 bp, Homo sapiens
  siRNA target sequence for IRLB (NM_005848.1,4979-4997).
caagggaattttgatctaa

SEQ ID NO: 29073 - DNA, 19 bp, Homo sapiens
  siRNA target sequence for IRLB (NM_005848.1,4982-5000).
gggaattttgatctaaata

SEQ ID NO: 29074 - DNA, 19 bp, Homo sapiens
  siRNA target sequence for IRLB (NM_005848.1,4991-5009).
gatctaaatagcaaatcta

SEQ ID NO: 29075 - DNA, 19 bp, Homo sapiens
  siRNA target sequence for IRLB (NM_005848.1,5044-5062).
gatccctgctaatagatca

SEQ ID NO: 29076 - DNA, 19 bp, Homo sapiens
  siRNA target sequence for IRLB (NM_005848.1,5047-5065).
ccctgctaatagatcaaaa

SEQ ID NO: 29077 - DNA, 19 bp, Homo sapiens
  siRNA target sequence for IRLB (NM_005848.1,5048-5066).
cctgctaatagatcaaaaa

SEQ ID NO: 29078 - DNA, 19 bp, Homo sapiens
  siRNA target sequence for IRLB (NM_005848.1,5093-5111).
ccaatggccaggagtatta

SEQ ID NO: 29079 - DNA, 19 bp, Homo sapiens
  siRNA target sequence for IRLB (NM_005848.1,5098-5116).
ggccaggagtattagtact

SEQ ID NO: 29080 - DNA, 19 bp, Homo sapiens
  siRNA target sequence for IRLB (NM_005848.1,5099-5117).
gccaggagtattagtactt

SEQ ID NO: 29081 - DNA, 19 bp, Homo sapiens
  siRNA target sequence for IRLB (NM_005848.1,5101-5119).
caggagtattagtacttct

SEQ ID NO: 29082 - DNA, 19 bp, Homo sapiens
  siRNA target sequence for IRLB (NM_005848.1,5123-5141).
cccttggataaggaagata

SEQ ID NO: 29083 - DNA, 19 bp, Homo sapiens
  siRNA target sequence for IRLB (NM_005848.1,5172-5190).
gcctgccagctactttaca

SEQ ID NO: 29084 - DNA, 19 bp, Homo sapiens
  siRNA target sequence for IRLB (NM_005848.1,5173-5191).
cctgccagctactttacaa

SEQ ID NO: 29085 - DNA, 19 bp, Homo sapiens
  siRNA target sequence for IRLB (NM_005848.1,5195-5213).
gctacagattctttaggtt

SEQ ID NO: 29086 - DNA, 19 bp, Homo sapiens
  siRNA target sequence for IRLB (NM_005848.1,5201-5219).
gattctttaggtttagaat

SEQ ID NO: 29087 - DNA, 19 bp, Homo sapiens
  siRNA target sequence for IRLB (NM_005848.1,5243-5261).
gtcactgttccgtatctta

SEQ ID NO: 29088 - DNA, 19 bp, Homo sapiens
  siRNA target sequence for IRLB (NM_005848.1,5245-5263).
cactgttccgtatcttagt

SEQ ID NO: 29089 - DNA, 19 bp, Homo sapiens
  siRNA target sequence for IRLB (NM_005848.1,5253-5271).
cgtatcttagtcctttagt

SEQ ID NO: 29090 - DNA, 19 bp, Homo sapiens
  siRNA target sequence for IRLB (NM_005848.1,5262-5280).
gtcctttagtggtatggaa

SEQ ID NO: 29091 - DNA, 19 bp, Homo sapiens
  siRNA target sequence for IRLB (NM_005848.1,5285-5303).
cttgaaagcttattggaaa

SEQ ID NO: 29092 - DNA, 19 bp, Homo sapiens
  siRNA target sequence for IRLB (NM_005848.1,5306-5324).
gaaggtgatcatgcaataa

SEQ ID NO: 29093 - DNA, 19 bp, Homo sapiens
  siRNA target sequence for IRLB (NM_005848.1,5341-5359).
ggaccatcatccaattgtt

SEQ ID NO: 29094 - DNA, 19 bp, Homo sapiens
  siRNA target sequence for IRLB (NM_005848.1,5342-5360).
gaccatcatccaattgttt

SEQ ID NO: 29095 - DNA, 19 bp, Homo sapiens
  siRNA target sequence for IRLB (NM_005848.1,5344-5362).
ccatcatccaattgttttt

SEQ ID NO: 29096 - DNA, 19 bp, Homo sapiens
  siRNA target sequence for IRLB (NM_005848.1,5345-5363).
catcatccaattgtttttt

SEQ ID NO: 29097 - DNA, 19 bp, Homo sapiens
  siRNA target sequence for IRLB (NM_005848.1,5434-5452).
gcactgtaacaagtattca

SEQ ID NO: 29098 - DNA, 19 bp, Homo sapiens
  siRNA target sequence for IRLB (NM_005848.1,5538-5556).
cgggacagcccttgtacat

SEQ ID NO: 29099 - DNA, 19 bp, Homo sapiens
  siRNA target sequence for IRLB (NM_005848.1,5539-5557).
gggacagcccttgtacatt

SEQ ID NO: 29100 - DNA, 19 bp, Homo sapiens
  siRNA target sequence for IRLB (NM_005848.1,5541-5559).
gacagcccttgtacattct

SEQ ID NO: 29101 - DNA, 19 bp, Homo sapiens
  siRNA target sequence for IRLB (NM_005848.1,5570-5588).
cacacccaaaaatatccaa

SEQ ID NO: 29102 - DNA, 19 bp, Homo sapiens
  siRNA target sequence for IRLB (NM_005848.1,5586-5604).
caatggtccatttattgca

SEQ ID NO: 29103 - DNA, 19 bp, Homo sapiens
  siRNA target sequence for IRLB (NM_005848.1,5590-5608).
ggtccatttattgcaaaaa

SEQ ID NO: 29104 - DNA, 19 bp, Homo sapiens
  siRNA target sequence for IRLB (NM_005848.1,5602-5620).
gcaaaaaagtgataactca

SEQ ID NO: 29105 - DNA, 19 bp, Homo sapiens
  siRNA target sequence for IRLB (NM_005848.1,5610-5628).
gtgataactcatttaacca

SEQ ID NO: 29106 - DNA, 19 bp, Homo sapiens
  siRNA target sequence for IRLB (NM_005848.1,5619-5637).
catttaaccaggaactgtt

SEQ ID NO: 29107 - DNA, 19 bp, Homo sapiens
  siRNA target sequence for IRLB (NM_005848.1,5626-5644).
ccaggaactgttgaaaagt

SEQ ID NO: 29108 - DNA, 19 bp, Homo sapiens
  siRNA target sequence for IRLB (NM_005848.1,5627-5645).
caggaactgttgaaaagta

SEQ ID NO: 29109 - DNA, 19 bp, Homo sapiens
  siRNA target sequence for IRLB (NM_005848.1,5678-5696).
ggaccaatgagtcagattt

SEQ ID NO: 29110 - DNA, 19 bp, Homo sapiens
  siRNA target sequence for JADE1 (NM_024900.2,393-411).
gaatccggatgagtactat

SEQ ID NO: 29111 - DNA, 19 bp, Homo sapiens
  siRNA target sequence for JADE1 (NM_024900.2,397-415).
ccggatgagtactatgtgt

SEQ ID NO: 29112 - DNA, 19 bp, Homo sapiens
  siRNA target sequence for JADE1 (NM_024900.2,398-416).
cggatgagtactatgtgtt

SEQ ID NO: 29113 - DNA, 19 bp, Homo sapiens
  siRNA target sequence for JADE1 (NM_024900.2,617-635).
gtcgctatgacctcaatga

SEQ ID NO: 29114 - DNA, 19 bp, Homo sapiens
  siRNA target sequence for JADE1 (NM_024900.2,684-702).
gggaatgcctgaactagat

SEQ ID NO: 29115 - DNA, 19 bp, Homo sapiens
  siRNA target sequence for JADE1 (NM_024900.2,717-735).
gagggtcctagaggaattt

SEQ ID NO: 29116 - DNA, 19 bp, Homo sapiens
  siRNA target sequence for JADE1 (NM_024900.2,739-757).
cagcgatgctacgacaata

SEQ ID NO: 29117 - DNA, 19 bp, Homo sapiens
  siRNA target sequence for JADE1 (NM_024900.2,742-760).
cgatgctacgacaatatga

SEQ ID NO: 29118 - DNA, 19 bp, Homo sapiens
  siRNA target sequence for JADE1 (NM_024900.2,743-761).
gatgctacgacaatatgaa

SEQ ID NO: 29119 - DNA, 19 bp, Homo sapiens
  siRNA target sequence for JADE1 (NM_024900.2,747-765).
ctacgacaatatgaatcat

SEQ ID NO: 29120 - DNA, 19 bp, Homo sapiens
  siRNA target sequence for JADE1 (NM_024900.2,781-799).
gaaggcctggggatcgaat

SEQ ID NO: 29121 - DNA, 19 bp, Homo sapiens
  siRNA target sequence for JADE1 (NM_024900.2,792-810).
gatcgaatatgatgaagat

SEQ ID NO: 29122 - DNA, 19 bp, Homo sapiens
  siRNA target sequence for JADE1 (NM_024900.2,841-859).
ggtgaggacggcaatgaga

SEQ ID NO: 29123 - DNA, 19 bp, Homo sapiens
  siRNA target sequence for JADE1 (NM_024900.2,842-860).
gtgaggacggcaatgagat

SEQ ID NO: 29124 - DNA, 19 bp, Homo sapiens
  siRNA target sequence for JADE1 (NM_024900.2,892-910).
caccaggcctgttatggaa

SEQ ID NO: 29125 - DNA, 19 bp, Homo sapiens
  siRNA target sequence for JADE1 (NM_024900.2,955-973).
ctgggggttcagccaaaat

SEQ ID NO: 29126 - DNA, 19 bp, Homo sapiens
  siRNA target sequence for JADE1 (NM_024900.2,1101-1119).
caccaaggtgtcacacatt

SEQ ID NO: 29127 - DNA, 19 bp, Homo sapiens
  siRNA target sequence for JADE1 (NM_024900.2,1148-1166).
gcctctgcaatgagaagtt

SEQ ID NO: 29128 - DNA, 19 bp, Homo sapiens
  siRNA target sequence for JADE1 (NM_024900.2,1302-1320).
gcacagctcacataggaaa

SEQ ID NO: 29129 - DNA, 19 bp, Homo sapiens
  siRNA target sequence for JADE1 (NM_024900.2,1595-1613).
ccctgatcaccccaaagaa

SEQ ID NO: 29130 - DNA, 19 bp, Homo sapiens
  siRNA target sequence for JADE1 (NM_024900.2,1596-1614).
cctgatcaccccaaagaaa

SEQ ID NO: 29131 - DNA, 19 bp, Homo sapiens
  siRNA target sequence for JADE1 (NM_024900.2,1599-1617).
gatcaccccaaagaaagat

SEQ ID NO: 29132 - DNA, 19 bp, Homo sapiens
  siRNA target sequence for JADE1 (NM_024900.2,1638-1656).
gcgggagcaggatgtctta

SEQ ID NO: 29133 - DNA, 19 bp, Homo sapiens
  siRNA target sequence for JADE1 (NM_024900.2,1639-1657).
cgggagcaggatgtcttat

SEQ ID NO: 29134 - DNA, 19 bp, Homo sapiens
  siRNA target sequence for JADE1 (NM_024900.2,1640-1658).
gggagcaggatgtcttatt

SEQ ID NO: 29135 - DNA, 19 bp, Homo sapiens
  siRNA target sequence for JADE1 (NM_024900.2,1641-1659).
ggagcaggatgtcttattt

SEQ ID NO: 29136 - DNA, 19 bp, Homo sapiens
  siRNA target sequence for JADE1 (NM_024900.2,1642-1660).
gagcaggatgtcttattta

SEQ ID NO: 29137 - DNA, 19 bp, Homo sapiens
  siRNA target sequence for JADE1 (NM_024900.2,1645-1663).
caggatgtcttatttagga

SEQ ID NO: 29138 - DNA, 19 bp, Homo sapiens
  siRNA target sequence for JADE1 (NM_024900.2,1695-1713).
cctggagagggtaatgatt

SEQ ID NO: 29139 - DNA, 19 bp, Homo sapiens
  siRNA target sequence for JDP2 (NM_130469.2,406-424).
gccccagcccgtgaaaagt

SEQ ID NO: 29140 - DNA, 19 bp, Homo sapiens
  siRNA target sequence for JDP2 (NM_130469.2,485-503).
gcccgatgccggaacaaga

SEQ ID NO: 29141 - DNA, 19 bp, Homo sapiens
  siRNA target sequence for JDP2 (NM_130469.2,486-504).
cccgatgccggaacaagaa

SEQ ID NO: 29142 - DNA, 19 bp, Homo sapiens
  siRNA target sequence for JDP2 (NM_130469.2,488-506).
cgatgccggaacaagaaga

SEQ ID NO: 29143 - DNA, 19 bp, Homo sapiens
  siRNA target sequence for JDP2 (NM_130469.2,489-507).
gatgccggaacaagaagaa

SEQ ID NO: 29144 - DNA, 19 bp, Homo sapiens
  siRNA target sequence for JMJ (NM_004973.2,258-276).
gacccaagaggaatatcat

SEQ ID NO: 29145 - DNA, 19 bp, Homo sapiens
  siRNA target sequence for JMJ (NM_004973.2,329-347).
gtacgtaaagtcctttatt

SEQ ID NO: 29146 - DNA, 19 bp, Homo sapiens
  siRNA target sequence for JMJ (NM_004973.2,421-439).
gaatgggctccttggtaat

SEQ ID NO: 29147 - DNA, 19 bp, Homo sapiens
  siRNA target sequence for JMJ (NM_004973.2,442-460).
ccagtctaagggattagga

SEQ ID NO: 29148 - DNA, 19 bp, Homo sapiens
  siRNA target sequence for JMJ (NM_004973.2,514-532).
cactagcaacgatgttagt

SEQ ID NO: 29149 - DNA, 19 bp, Homo sapiens
  siRNA target sequence for JMJ (NM_004973.2,520-538).
caacgatgttagttcttca

SEQ ID NO: 29150 - DNA, 19 bp, Homo sapiens
  siRNA target sequence for JMJ (NM_004973.2,658-676).
ccctccagctactcagata

SEQ ID NO: 29151 - DNA, 19 bp, Homo sapiens
  siRNA target sequence for JMJ (NM_004973.2,659-677).
cctccagctactcagatat

SEQ ID NO: 29152 - DNA, 19 bp, Homo sapiens
  siRNA target sequence for JMJ (NM_004973.2,678-696).
cagacctctctaaaaggaa

SEQ ID NO: 29153 - DNA, 19 bp, Homo sapiens
  siRNA target sequence for JMJ (NM_004973.2,752-770).
cccaacagcatggtgtatt

SEQ ID NO: 29154 - DNA, 19 bp, Homo sapiens
  siRNA target sequence for JMJ (NM_004973.2,817-835).
gacagaagacgtcaaaaca

SEQ ID NO: 29155 - DNA, 19 bp, Homo sapiens
  siRNA target sequence for JMJ (NM_004973.2,902-920).
cacaacgggcatgttttca

SEQ ID NO: 29156 - DNA, 19 bp, Homo sapiens
  siRNA target sequence for JMJ (NM_004973.2,904-922).
caacgggcatgttttcaat

SEQ ID NO: 29157 - DNA, 19 bp, Homo sapiens
  siRNA target sequence for JMJ (NM_004973.2,908-926).
gggcatgttttcaatggtt

SEQ ID NO: 29158 - DNA, 19 bp, Homo sapiens
  siRNA target sequence for JMJ (NM_004973.2,1165-1183).
cggagtcactcgaatgtca

SEQ ID NO: 29159 - DNA, 19 bp, Homo sapiens
  siRNA target sequence for JMJ (NM_004973.2,1166-1184).
ggagtcactcgaatgtcat

SEQ ID NO: 29160 - DNA, 19 bp, Homo sapiens
  siRNA target sequence for JMJ (NM_004973.2,1197-1215).
gtgtaaccagtgccaaaaa

SEQ ID NO: 29161 - DNA, 19 bp, Homo sapiens
  siRNA target sequence for JMJ (NM_004973.2,1272-1290).
cgaagggggctgtcacata

SEQ ID NO: 29162 - DNA, 19 bp, Homo sapiens
  siRNA target sequence for JMJ (NM_004973.2,1350-1368).
ccgctgtcaaccacacaat

SEQ ID NO: 29163 - DNA, 19 bp, Homo sapiens
  siRNA target sequence for JMJ (NM_004973.2,1382-1400).
gaaagtagcaatgcaaaaa

SEQ ID NO: 29164 - DNA, 19 bp, Homo sapiens
  siRNA target sequence for JMJ (NM_004973.2,1801-1819).
cgcctcctgtgaaaatcgt

SEQ ID NO: 29165 - DNA, 19 bp, Homo sapiens
  siRNA target sequence for JMJ (NM_004973.2,1946-1964).
cacgatccgctcatctaca

SEQ ID NO: 29166 - DNA, 19 bp, Homo sapiens
  siRNA target sequence for JMJ (NM_004973.2,2040-2058).
gcaagctcaacgatgagat

SEQ ID NO: 29167 - DNA, 19 bp, Homo sapiens
  siRNA target sequence for JMJ (NM_004973.2,2051-2069).
gatgagatgcggtttgtca

SEQ ID NO: 29168 - DNA, 19 bp, Homo sapiens
  siRNA target sequence for JMJ (NM_004973.2,2061-2079).
ggtttgtcacgcagattca

SEQ ID NO: 29169 - DNA, 19 bp, Homo sapiens
  siRNA target sequence for JMJ (NM_004973.2,2214-2232).
gctttttccggctgattaa

SEQ ID NO: 29170 - DNA, 19 bp, Homo sapiens
  siRNA target sequence for JMJ (NM_004973.2,2255-2273).
gtgactgacctcaaaaaat

SEQ ID NO: 29171 - DNA, 19 bp, Homo sapiens
  siRNA target sequence for JMJ (NM_004973.2,2708-2726).
ctaacaactttttatcgaa

SEQ ID NO: 29172 - DNA, 19 bp, Homo sapiens
  siRNA target sequence for JMJ (NM_004973.2,2723-2741).
cgaacagcgaggaatatca

SEQ ID NO: 29173 - DNA, 19 bp, Homo sapiens
  siRNA target sequence for JMJ (NM_004973.2,2724-2742).
gaacagcgaggaatatcat

SEQ ID NO: 29174 - DNA, 19 bp, Homo sapiens
  siRNA target sequence for JMJ (NM_004973.2,2775-2793).
ccgaaatcgagcaagagta

SEQ ID NO: 29175 - DNA, 19 bp, Homo sapiens
  siRNA target sequence for JMJ (NM_004973.2,2923-2941).
cgtcctccccaataacaca

SEQ ID NO: 29176 - DNA, 19 bp, Homo sapiens
  siRNA target sequence for JMJ (NM_004973.2,2980-2998).
gactattccctggctaaat

SEQ ID NO: 29177 - DNA, 19 bp, Homo sapiens
  siRNA target sequence for JMJ (NM_004973.2,3044-3062).
caccttccatacattgact

SEQ ID NO: 29178 - DNA, 19 bp, Homo sapiens
  siRNA target sequence for JMJ (NM_004973.2,3051-3069).
catacattgactacttaca

SEQ ID NO: 29179 - DNA, 19 bp, Homo sapiens
  siRNA target sequence for JMJ (NM_004973.2,3075-3093).
gtgctgactgcatttggta

SEQ ID NO: 29180 - DNA, 19 bp, Homo sapiens
  siRNA target sequence for JMJ (NM_004973.2,3082-3100).
ctgcatttggtattgcatt

SEQ ID NO: 29181 - DNA, 19 bp, Homo sapiens
  siRNA target sequence for JMJ (NM_004973.2,3182-3200).
gaaagcaacgtcatgatct

SEQ ID NO: 29182 - DNA, 19 bp, Homo sapiens
  siRNA target sequence for JMJ (NM_004973.2,3368-3386).
gagaccgccaaggaaatga

SEQ ID NO: 29183 - DNA, 19 bp, Homo sapiens
  siRNA target sequence for JMJ (NM_004973.2,3385-3403).
gaagcgtcgccatatagct

SEQ ID NO: 29184 - DNA, 19 bp, Homo sapiens
  siRNA target sequence for JMJ (NM_004973.2,3695-3713).
gtggtacaagagaacgaaa

SEQ ID NO: 29185 - DNA, 19 bp, Homo sapiens
  siRNA target sequence for JMJ (NM_004973.2,3792-3810).
gctacgatgaggaacagat

SEQ ID NO: 29186 - DNA, 19 bp, Homo sapiens
  siRNA target sequence for JMJ (NM_004973.2,3793-3811).
ctacgatgaggaacagatt

SEQ ID NO: 29187 - DNA, 19 bp, Homo sapiens
  siRNA target sequence for JMJ (NM_004973.2,3835-3853).
cggcaaagtgtctggtaaa

SEQ ID NO: 29188 - DNA, 19 bp, Homo sapiens
  siRNA target sequence for JMJ (NM_004973.2,3836-3854).
ggcaaagtgtctggtaaaa

SEQ ID NO: 29189 - DNA, 19 bp, Homo sapiens
  siRNA target sequence for JMJD2 (NM_014663.1,149-167).
gaatcccagtgctaggata

SEQ ID NO: 29190 - DNA, 19 bp, Homo sapiens
  siRNA target sequence for JMJD2 (NM_014663.1,160-178).
ctaggataatgacctttta

SEQ ID NO: 29191 - DNA, 19 bp, Homo sapiens
  siRNA target sequence for JMJD2 (NM_014663.1,189-207).
gaagagttccgaaacttca

SEQ ID NO: 29192 - DNA, 19 bp, Homo sapiens
  siRNA target sequence for JMJD2 (NM_014663.1,192-210).
gagttccgaaacttcagta

SEQ ID NO: 29193 - DNA, 19 bp, Homo sapiens
  siRNA target sequence for JMJD2 (NM_014663.1,198-216).
cgaaacttcagtagataca

SEQ ID NO: 29194 - DNA, 19 bp, Homo sapiens
  siRNA target sequence for JMJD2 (NM_014663.1,199-217).
gaaacttcagtagatacat

SEQ ID NO: 29195 - DNA, 19 bp, Homo sapiens
  siRNA target sequence for JMJD2 (NM_014663.1,287-305).
gccacgagcatcctatgat

SEQ ID NO: 29196 - DNA, 19 bp, Homo sapiens
  siRNA target sequence for JMJD2 (NM_014663.1,289-307).
cacgagcatcctatgatga

SEQ ID NO: 29197 - DNA, 19 bp, Homo sapiens
  siRNA target sequence for JMJD2 (NM_014663.1,292-310).
gagcatcctatgatgacat

SEQ ID NO: 29198 - DNA, 19 bp, Homo sapiens
  siRNA target sequence for JMJD2 (NM_014663.1,295-313).
catcctatgatgacattga

SEQ ID NO: 29199 - DNA, 19 bp, Homo sapiens
  siRNA target sequence for JMJD2 (NM_014663.1,354-372).
gggcagtctggcctcttta

SEQ ID NO: 29200 - DNA, 19 bp, Homo sapiens
  siRNA target sequence for JMJD2 (NM_014663.1,356-374).
gcagtctggcctctttact

SEQ ID NO: 29201 - DNA, 19 bp, Homo sapiens
  siRNA target sequence for JMJD2 (NM_014663.1,443-461).
ctgtaccccacgctatagt

SEQ ID NO: 29202 - DNA, 19 bp, Homo sapiens
  siRNA target sequence for JMJD2 (NM_014663.1,445-463).
gtaccccacgctatagtga

SEQ ID NO: 29203 - DNA, 19 bp, Homo sapiens
  siRNA target sequence for JMJD2 (NM_014663.1,449-467).
cccacgctatagtgagttt

SEQ ID NO: 29204 - DNA, 19 bp, Homo sapiens
  siRNA target sequence for JMJD2 (NM_014663.1,451-469).
cacgctatagtgagtttga

SEQ ID NO: 29205 - DNA, 19 bp, Homo sapiens
  siRNA target sequence for JMJD2 (NM_014663.1,471-489).
gagctcgagcggaaatact

SEQ ID NO: 29206 - DNA, 19 bp, Homo sapiens
  siRNA target sequence for JMJD2 (NM_014663.1,533-551).
gaatggtaccctctatgaa

SEQ ID NO: 29207 - DNA, 19 bp, Homo sapiens
  siRNA target sequence for JMJD2 (NM_014663.1,662-680).
catgtggaagacatccttt

SEQ ID NO: 29208 - DNA, 19 bp, Homo sapiens
  siRNA target sequence for JMJD2 (NM_014663.1,787-805).
gcctcgccaaaggcttttt

SEQ ID NO: 29209 - DNA, 19 bp, Homo sapiens
  siRNA target sequence for JMJD2 (NM_014663.1,853-871).
ccctgatttccccgttaat

SEQ ID NO: 29210 - DNA, 19 bp, Homo sapiens
  siRNA target sequence for JMJD2 (NM_014663.1,946-964).
gttaccatgccggctttaa

SEQ ID NO: 29211 - DNA, 19 bp, Homo sapiens
  siRNA target sequence for JMJD2 (NM_014663.1,956-974).
cggctttaaccatggtttt

SEQ ID NO: 29212 - DNA, 19 bp, Homo sapiens
  siRNA target sequence for JMJD2 (NM_014663.1,1003-1021).
cccgtcggtggattgagta

SEQ ID NO: 29213 - DNA, 19 bp, Homo sapiens
  siRNA target sequence for JMJD2 (NM_014663.1,1100-1118).
gccagaaaggtacaaactt

SEQ ID NO: 29214 - DNA, 19 bp, Homo sapiens
  siRNA target sequence for JMJD2 (NM_014663.1,1128-1146).
gggaaggacaacacagtta

SEQ ID NO: 29215 - DNA, 19 bp, Homo sapiens
  siRNA target sequence for JMJD2 (NM_014663.1,1141-1159).
cagttattgaccatactct

SEQ ID NO: 29216 - DNA, 19 bp, Homo sapiens
  siRNA target sequence for JMJD2 (NM_014663.1,1170-1188).
gaagcagctgagtttctta

SEQ ID NO: 29217 - DNA, 19 bp, Homo sapiens
  siRNA target sequence for JMJD2 (NM_014663.1,1299-1317).
caccgaatagggacaaaga

SEQ ID NO: 29218 - DNA, 19 bp, Homo sapiens
  siRNA target sequence for JMJD2 (NM_014663.1,1476-1494).
cttaccttcccagattatt

SEQ ID NO: 29219 - DNA, 19 bp, Homo sapiens
  siRNA target sequence for JMJD2 (NM_014663.1,1523-1541).
gcttaaaaatgtcaaacta

SEQ ID NO: 29220 - DNA, 19 bp, Homo sapiens
  siRNA target sequence for JMJD2 (NM_014663.1,1580-1598).
cttggatctttctgtgaat

SEQ ID NO: 29221 - DNA, 19 bp, Homo sapiens
  siRNA target sequence for JMJD2 (NM_014663.1,1668-1686).
ggctcttcacgggattcta

SEQ ID NO: 29222 - DNA, 19 bp, Homo sapiens
  siRNA target sequence for JMJD2 (NM_014663.1,1669-1687).
gctcttcacgggattctat

SEQ ID NO: 29223 - DNA, 19 bp, Homo sapiens
  siRNA target sequence for JMJD2 (NM_014663.1,1911-1929).
cgccgtcagcctttaagca

SEQ ID NO: 29224 - DNA, 19 bp, Homo sapiens
  siRNA target sequence for JMJD2 (NM_014663.1,1912-1930).
gccgtcagcctttaagcaa

SEQ ID NO: 29225 - DNA, 19 bp, Homo sapiens
  siRNA target sequence for JMJD2 (NM_014663.1,2060-2078).
gaaccgacctccaaacttt

SEQ ID NO: 29226 - DNA, 19 bp, Homo sapiens
  siRNA target sequence for JMJD2 (NM_014663.1,2081-2099).
ggctgagaaggaattcaat

SEQ ID NO: 29227 - DNA, 19 bp, Homo sapiens
  siRNA target sequence for JMJD2 (NM_014663.1,2137-2155).
gtatgatcttccagactta

SEQ ID NO: 29228 - DNA, 19 bp, Homo sapiens
  siRNA target sequence for JMJD2 (NM_014663.1,2152-2170).
cttatcatcaggttgaatt

SEQ ID NO: 29229 - DNA, 19 bp, Homo sapiens
  siRNA target sequence for JMJD2 (NM_014663.1,2279-2297).
ggacatcaacctttctact

SEQ ID NO: 29230 - DNA, 19 bp, Homo sapiens
  siRNA target sequence for JMJD2 (NM_014663.1,2328-2346).
ctcgtttcctgcaagaagt

SEQ ID NO: 29231 - DNA, 19 bp, Homo sapiens
  siRNA target sequence for JMJD2 (NM_014663.1,2442-2460).
gaggactgctgtttatgct

SEQ ID NO: 29232 - DNA, 19 bp, Homo sapiens
  siRNA target sequence for JMJD2 (NM_014663.1,2447-2465).
ctgctgtttatgctcatta

SEQ ID NO: 29233 - DNA, 19 bp, Homo sapiens
  siRNA target sequence for JMJD2 (NM_014663.1,2477-2495).
cctgcagagagcaaatgat

SEQ ID NO: 29234 - DNA, 19 bp, Homo sapiens
  siRNA target sequence for JMJD2 (NM_014663.1,2568-2586).
ccggtggatgtgagcaaaa

SEQ ID NO: 29235 - DNA, 19 bp, Homo sapiens
  siRNA target sequence for JMJD2 (NM_014663.1,2597-2615).
ccgcttcaaactgaaatgt

SEQ ID NO: 29236 - DNA, 19 bp, Homo sapiens
  siRNA target sequence for JMJD2 (NM_014663.1,2743-2761).
ggccttttgtggtcttcat

SEQ ID NO: 29237 - DNA, 19 bp, Homo sapiens
  siRNA target sequence for JMJD2 (NM_014663.1,2744-2762).
gccttttgtggtcttcatt

SEQ ID NO: 29238 - DNA, 19 bp, Homo sapiens
  siRNA target sequence for JMJD2 (NM_014663.1,2764-2782).
cctgctttcggcacaagat

SEQ ID NO: 29239 - DNA, 19 bp, Homo sapiens
  siRNA target sequence for JMJD2 (NM_014663.1,2765-2783).
ctgctttcggcacaagatt

SEQ ID NO: 29240 - DNA, 19 bp, Homo sapiens
  siRNA target sequence for JMJD2 (NM_014663.1,2772-2790).
cggcacaagattcctaatt

SEQ ID NO: 29241 - DNA, 19 bp, Homo sapiens
  siRNA target sequence for JMJD2 (NM_014663.1,2829-2847).
ggccagaaagtcattagca

SEQ ID NO: 29242 - DNA, 19 bp, Homo sapiens
  siRNA target sequence for JMJD2 (NM_014663.1,2830-2848).
gccagaaagtcattagcaa

SEQ ID NO: 29243 - DNA, 19 bp, Homo sapiens
  siRNA target sequence for JMJD2 (NM_014663.1,2838-2856).
gtcattagcaagcataaga

SEQ ID NO: 29244 - DNA, 19 bp, Homo sapiens
  siRNA target sequence for JMJD2 (NM_014663.1,2896-2914).
ccgagaccttctatgaagt

SEQ ID NO: 29245 - DNA, 19 bp, Homo sapiens
  siRNA target sequence for JMJD2 (NM_014663.1,2936-2954).
cagcgacaatctttatcct

SEQ ID NO: 29246 - DNA, 19 bp, Homo sapiens
  siRNA target sequence for JMJD2 (NM_014663.1,3025-3043).
ggacagacggccaagtcta

SEQ ID NO: 29247 - DNA, 19 bp, Homo sapiens
  siRNA target sequence for JMJD2 (NM_014663.1,3026-3044).
gacagacggccaagtctat

SEQ ID NO: 29248 - DNA, 19 bp, Homo sapiens
  siRNA target sequence for JMJD2 (NM_014663.1,3059-3077).
ggcctcccaccctatccaa

SEQ ID NO: 29249 - DNA, 19 bp, Homo sapiens
  siRNA target sequence for JMJD2 (NM_014663.1,3064-3082).
cccaccctatccaaatgta

SEQ ID NO: 29250 - DNA, 19 bp, Homo sapiens
  siRNA target sequence for JMJD2 (NM_014663.1,3152-3170).
gcttcccaagagagtcaaa

SEQ ID NO: 29251 - DNA, 19 bp, Homo sapiens
  siRNA target sequence for JMJD2 (NM_014663.1,3153-3171).
cttcccaagagagtcaaat

SEQ ID NO: 29252 - DNA, 19 bp, Homo sapiens
  siRNA target sequence for JMJD2 (NM_014663.1,3192-3210).
gacatgcgcttcaatgaga

SEQ ID NO: 29253 - DNA, 19 bp, Homo sapiens
  siRNA target sequence for JMJD2 (NM_014663.1,3246-3264).
cggcaacgagttatcaact

SEQ ID NO: 29254 - DNA, 19 bp, Homo sapiens
  siRNA target sequence for JMJD2 (NM_014663.1,3253-3271).
gagttatcaactcaagata

SEQ ID NO: 29255 - DNA, 19 bp, Homo sapiens
  siRNA target sequence for JMJD2 (NM_014663.1,3265-3283).
caagataccgggaagatta

SEQ ID NO: 29256 - DNA, 19 bp, Homo sapiens
  siRNA target sequence for JMJD2 (NM_014663.1,3268-3286).
gataccgggaagattatat

SEQ ID NO: 29257 - DNA, 19 bp, Homo sapiens
  siRNA target sequence for JRK (NM_003724.1,569-587).
cactgatgcaggagtacaa

SEQ ID NO: 29258 - DNA, 19 bp, Homo sapiens
  siRNA target sequence for JRK (NM_003724.1,851-869).
ggtggctttggcgctttaa

SEQ ID NO: 29259 - DNA, 19 bp, Homo sapiens
  siRNA target sequence for JRK (NM_003724.1,875-893).
gacacggcattaaaaagct

SEQ ID NO: 29260 - DNA, 19 bp, Homo sapiens
  siRNA target sequence for JRK (NM_003724.1,986-1004).
ccgccgagcaggtttacaa

SEQ ID NO: 29261 - DNA, 19 bp, Homo sapiens
  siRNA target sequence for JRK (NM_003724.1,1167-1185).
cggtcccagggctttcaaa

SEQ ID NO: 29262 - DNA, 19 bp, Homo sapiens
  siRNA target sequence for JRK (NM_003724.1,1253-1271).
ccgattggttccatcatat

SEQ ID NO: 29263 - DNA, 19 bp, Homo sapiens
  siRNA target sequence for JRK (NM_003724.1,1294-1312).
cacttcagaaccataggtt

SEQ ID NO: 29264 - DNA, 19 bp, Homo sapiens
  siRNA target sequence for JRK (NM_003724.1,1447-1465).
cagggcattcggagagatt

SEQ ID NO: 29265 - DNA, 19 bp, Homo sapiens
  siRNA target sequence for JRK (NM_003724.1,1450-1468).
ggcattcggagagatttca

SEQ ID NO: 29266 - DNA, 19 bp, Homo sapiens
  siRNA target sequence for JRK (NM_003724.1,1451-1469).
gcattcggagagatttcat

SEQ ID NO: 29267 - DNA, 19 bp, Homo sapiens
  siRNA target sequence for JRKL (NM_003772.2,24-42).
ggtgttgactattaaagat

SEQ ID NO: 29268 - DNA, 19 bp, Homo sapiens
  siRNA target sequence for JRKL (NM_003772.2,72-90).
cggaggttcttccaaacaa

SEQ ID NO: 29269 - DNA, 19 bp, Homo sapiens
  siRNA target sequence for JRKL (NM_003772.2,91-109).
ctggcagtgatttatggaa

SEQ ID NO: 29270 - DNA, 19 bp, Homo sapiens
  siRNA target sequence for JRKL (NM_003772.2,93-111).
ggcagtgatttatggaatt

SEQ ID NO: 29271 - DNA, 19 bp, Homo sapiens
  siRNA target sequence for JRKL (NM_003772.2,122-140).
cagttcgggatataagaaa

SEQ ID NO: 29272 - DNA, 19 bp, Homo sapiens
  siRNA target sequence for JRKL (NM_003772.2,288-306).
catatctggaccaatttgt

SEQ ID NO: 29273 - DNA, 19 bp, Homo sapiens
  siRNA target sequence for JRKL (NM_003772.2,295-313).
ggaccaatttgtgcaaaaa

SEQ ID NO: 29274 - DNA, 19 bp, Homo sapiens
  siRNA target sequence for JRKL (NM_003772.2,314-332).
gggcagagttcttctttta

SEQ ID NO: 29275 - DNA, 19 bp, Homo sapiens
  siRNA target sequence for JRKL (NM_003772.2,315-333).
ggcagagttcttcttttat

SEQ ID NO: 29276 - DNA, 19 bp, Homo sapiens
  siRNA target sequence for JRKL (NM_003772.2,397-415).
cacagcattagagagatta

SEQ ID NO: 29277 - DNA, 19 bp, Homo sapiens
  siRNA target sequence for JRKL (NM_003772.2,447-465).
gactgcggtggaagatttt

SEQ ID NO: 29278 - DNA, 19 bp, Homo sapiens
  siRNA target sequence for JRKL (NM_003772.2,451-469).
gcggtggaagatttttgta

SEQ ID NO: 29279 - DNA, 19 bp, Homo sapiens
  siRNA target sequence for JRKL (NM_003772.2,467-485).
gtaataactttcgagattt

SEQ ID NO: 29280 - DNA, 19 bp, Homo sapiens
  siRNA target sequence for JRKL (NM_003772.2,505-523).
cagcctgaacaaatctaca

SEQ ID NO: 29281 - DNA, 19 bp, Homo sapiens
  siRNA target sequence for JRKL (NM_003772.2,507-525).
gcctgaacaaatctacaat

SEQ ID NO: 29282 - DNA, 19 bp, Homo sapiens
  siRNA target sequence for JRKL (NM_003772.2,558-576).
gccttctaggatttcagta

SEQ ID NO: 29283 - DNA, 19 bp, Homo sapiens
  siRNA target sequence for JRKL (NM_003772.2,559-577).
ccttctaggatttcagtaa

SEQ ID NO: 29284 - DNA, 19 bp, Homo sapiens
  siRNA target sequence for JRKL (NM_003772.2,595-613).
gtccctgggcacaaatcaa

SEQ ID NO: 29285 - DNA, 19 bp, Homo sapiens
  siRNA target sequence for JRKL (NM_003772.2,597-615).
ccctgggcacaaatcaatt

SEQ ID NO: 29286 - DNA, 19 bp, Homo sapiens
  siRNA target sequence for JRKL (NM_003772.2,619-637).
gaaagagtcacaatcatgt

SEQ ID NO: 29287 - DNA, 19 bp, Homo sapiens
  siRNA target sequence for JRKL (NM_003772.2,760-778).
ggtgcatggatggatcttt

SEQ ID NO: 29288 - DNA, 19 bp, Homo sapiens
  siRNA target sequence for JRKL (NM_003772.2,764-782).
catggatggatctttccat

SEQ ID NO: 29289 - DNA, 19 bp, Homo sapiens
  siRNA target sequence for JRKL (NM_003772.2,779-797).
ccattttccgacaatggtt

SEQ ID NO: 29290 - DNA, 19 bp, Homo sapiens
  siRNA target sequence for JRKL (NM_003772.2,780-798).
cattttccgacaatggttt

SEQ ID NO: 29291 - DNA, 19 bp, Homo sapiens
  siRNA target sequence for JRKL (NM_003772.2,813-831).
gccgcaagttcgagagtat

SEQ ID NO: 29292 - DNA, 19 bp, Homo sapiens
  siRNA target sequence for JRKL (NM_003772.2,814-832).
ccgcaagttcgagagtatt

SEQ ID NO: 29293 - DNA, 19 bp, Homo sapiens
  siRNA target sequence for JRKL (NM_003772.2,815-833).
cgcaagttcgagagtattt

SEQ ID NO: 29294 - DNA, 19 bp, Homo sapiens
  siRNA target sequence for JRKL (NM_003772.2,816-834).
gcaagttcgagagtattta

SEQ ID NO: 29295 - DNA, 19 bp, Homo sapiens
  siRNA target sequence for JRKL (NM_003772.2,820-838).
gttcgagagtatttaagat

SEQ ID NO: 29296 - DNA, 19 bp, Homo sapiens
  siRNA target sequence for JRKL (NM_003772.2,823-841).
cgagagtatttaagatcta

SEQ ID NO: 29297 - DNA, 19 bp, Homo sapiens
  siRNA target sequence for JRKL (NM_003772.2,824-842).
gagagtatttaagatctaa

SEQ ID NO: 29298 - DNA, 19 bp, Homo sapiens
  siRNA target sequence for JRKL (NM_003772.2,862-880).
gtgctcttgttggataatt

SEQ ID NO: 29299 - DNA, 19 bp, Homo sapiens
  siRNA target sequence for JRKL (NM_003772.2,949-967).
cctaatgtggcctcattga

SEQ ID NO: 29300 - DNA, 19 bp, Homo sapiens
  siRNA target sequence for JRKL (NM_003772.2,988-1006).
gtcatagcaacgatgaaga

SEQ ID NO: 29301 - DNA, 19 bp, Homo sapiens
  siRNA target sequence for JRKL (NM_003772.2,995-1013).
caacgatgaagagaaatta

SEQ ID NO: 29302 - DNA, 19 bp, Homo sapiens
  siRNA target sequence for JRKL (NM_003772.2,1022-1040).
gtcttctccagaacaactt

SEQ ID NO: 29303 - DNA, 19 bp, Homo sapiens
  siRNA target sequence for JRKL (NM_003772.2,1048-1066).
ggtaatgacctgaaatcat

SEQ ID NO: 29304 - DNA, 19 bp, Homo sapiens
  siRNA target sequence for JRKL (NM_003772.2,1094-1112).
cactttatgaaatagcaat

SEQ ID NO: 29305 - DNA, 19 bp, Homo sapiens
  siRNA target sequence for JRKL (NM_003772.2,1113-1131).
ggcatggaacttagtaaaa

SEQ ID NO: 29306 - DNA, 19 bp, Homo sapiens
  siRNA target sequence for JRKL (NM_003772.2,1158-1176).
gaagattctccctatggta

SEQ ID NO: 29307 - DNA, 19 bp, Homo sapiens
  siRNA target sequence for JRKL (NM_003772.2,1246-1264).
cacaccaaaggattggaaa

SEQ ID NO: 29308 - DNA, 19 bp, Homo sapiens
  siRNA target sequence for JRKL (NM_003772.2,1315-1333).
ccaggctatgaagtgttaa

SEQ ID NO: 29309 - DNA, 19 bp, Homo sapiens
  siRNA target sequence for JRKL (NM_003772.2,1319-1337).
gctatgaagtgttaactga

SEQ ID NO: 29310 - DNA, 19 bp, Homo sapiens
  siRNA target sequence for JRKL (NM_003772.2,1336-1354).
gatagcgaaatcatcagaa

SEQ ID NO: 29311 - DNA, 19 bp, Homo sapiens
  siRNA target sequence for JRKL (NM_003772.2,1408-1426).
ctaattccagagaaacata

SEQ ID NO: 29312 - DNA, 19 bp, Homo sapiens
  siRNA target sequence for JRKL (NM_003772.2,1415-1433).
cagagaaacatattaatca

SEQ ID NO: 29313 - DNA, 19 bp, Homo sapiens
  siRNA target sequence for JRKL (NM_003772.2,1504-1522).
gatagactggtaatacgta

SEQ ID NO: 29314 - DNA, 19 bp, Homo sapiens
  siRNA target sequence for JRKL (NM_003772.2,1508-1526).
gactggtaatacgtaaact

SEQ ID NO: 29315 - DNA, 19 bp, Homo sapiens
  siRNA target sequence for JRKL (NM_003772.2,1528-1546).
cgagccaccatcagaaata

SEQ ID NO: 29316 - DNA, 19 bp, Homo sapiens
  siRNA target sequence for KCNMA1 (NM_002247.2,233-251).
gaggcagcagtcttagaat

SEQ ID NO: 29317 - DNA, 19 bp, Homo sapiens
  siRNA target sequence for KCNMA1 (NM_002247.2,244-262).
cttagaatgagtagcaata

SEQ ID NO: 29318 - DNA, 19 bp, Homo sapiens
  siRNA target sequence for KCNMA1 (NM_002247.2,556-574).
gaggcccagaagattaaca

SEQ ID NO: 29319 - DNA, 19 bp, Homo sapiens
  siRNA target sequence for KCNMA1 (NM_002247.2,558-576).
ggcccagaagattaacaat

SEQ ID NO: 29320 - DNA, 19 bp, Homo sapiens
  siRNA target sequence for KCNMA1 (NM_002247.2,588-606).
ggcggatggcactctcaaa

SEQ ID NO: 29321 - DNA, 19 bp, Homo sapiens
  siRNA target sequence for KCNMA1 (NM_002247.2,712-730).
gtcctggttgtcttagtct

SEQ ID NO: 29322 - DNA, 19 bp, Homo sapiens
  siRNA target sequence for KCNMA1 (NM_002247.2,738-756).
cagcatcggtgcacttgta

SEQ ID NO: 29323 - DNA, 19 bp, Homo sapiens
  siRNA target sequence for KCNMA1 (NM_002247.2,740-758).
gcatcggtgcacttgtaat

SEQ ID NO: 29324 - DNA, 19 bp, Homo sapiens
  siRNA target sequence for KCNMA1 (NM_002247.2,741-759).
catcggtgcacttgtaata

SEQ ID NO: 29325 - DNA, 19 bp, Homo sapiens
  siRNA target sequence for KCNMA1 (NM_002247.2,745-763).
ggtgcacttgtaatatact

SEQ ID NO: 29326 - DNA, 19 bp, Homo sapiens
  siRNA target sequence for KCNMA1 (NM_002247.2,746-764).
gtgcacttgtaatatactt

SEQ ID NO: 29327 - DNA, 19 bp, Homo sapiens
  siRNA target sequence for KCNMA1 (NM_002247.2,748-766).
gcacttgtaatatacttca

SEQ ID NO: 29328 - DNA, 19 bp, Homo sapiens
  siRNA target sequence for KCNMA1 (NM_002247.2,749-767).
cacttgtaatatacttcat

SEQ ID NO: 29329 - DNA, 19 bp, Homo sapiens
  siRNA target sequence for KCNMA1 (NM_002247.2,787-805).
gaatcctgccagaatttct

SEQ ID NO: 29330 - DNA, 19 bp, Homo sapiens
  siRNA target sequence for KCNMA1 (NM_002247.2,804-822).
ctacaaagatttcacatta

SEQ ID NO: 29331 - DNA, 19 bp, Homo sapiens
  siRNA target sequence for KCNMA1 (NM_002247.2,861-879).
cttcggcttgcggtttatt

SEQ ID NO: 29332 - DNA, 19 bp, Homo sapiens
  siRNA target sequence for KCNMA1 (NM_002247.2,864-882).
cggcttgcggtttattgca

SEQ ID NO: 29333 - DNA, 19 bp, Homo sapiens
  siRNA target sequence for KCNMA1 (NM_002247.2,961-979).
gtgtacttaaacagaagtt

SEQ ID NO: 29334 - DNA, 19 bp, Homo sapiens
  siRNA target sequence for KCNMA1 (NM_002247.2,1006-1024).
ctgagactgatacagtttt

SEQ ID NO: 29335 - DNA, 19 bp, Homo sapiens
  siRNA target sequence for KCNMA1 (NM_002247.2,1010-1028).
gactgatacagttttcaga

SEQ ID NO: 29336 - DNA, 19 bp, Homo sapiens
  siRNA target sequence for KCNMA1 (NM_002247.2,1078-1096).
gtgaatctgctctccatat

SEQ ID NO: 29337 - DNA, 19 bp, Homo sapiens
  siRNA target sequence for KCNMA1 (NM_002247.2,1121-1139).
ccgggttcatccatttggt

SEQ ID NO: 29338 - DNA, 19 bp, Homo sapiens
  siRNA target sequence for KCNMA1 (NM_002247.2,1131-1149).
ccatttggtggagaattca

SEQ ID NO: 29339 - DNA, 19 bp, Homo sapiens
  siRNA target sequence for KCNMA1 (NM_002247.2,1223-1241).
caatgtccaccgttggtta

SEQ ID NO: 29340 - DNA, 19 bp, Homo sapiens
  siRNA target sequence for KCNMA1 (NM_002247.2,1234-1252).
gttggttatggggatgttt

SEQ ID NO: 29341 - DNA, 19 bp, Homo sapiens
  siRNA target sequence for KCNMA1 (NM_002247.2,1246-1264).
gatgtttatgcaaaaacca

SEQ ID NO: 29342 - DNA, 19 bp, Homo sapiens
  siRNA target sequence for KCNMA1 (NM_002247.2,1299-1317).
cgggggactggccatgttt

SEQ ID NO: 29343 - DNA, 19 bp, Homo sapiens
  siRNA target sequence for KCNMA1 (NM_002247.2,1327-1345).
gtccctgaaatcatagagt

SEQ ID NO: 29344 - DNA, 19 bp, Homo sapiens
  siRNA target sequence for KCNMA1 (NM_002247.2,1329-1347).
ccctgaaatcatagagtta

SEQ ID NO: 29345 - DNA, 19 bp, Homo sapiens
  siRNA target sequence for KCNMA1 (NM_002247.2,1483-1501).
gtcaatgtggagatcgttt

SEQ ID NO: 29346 - DNA, 19 bp, Homo sapiens
  siRNA target sequence for KCNMA1 (NM_002247.2,1485-1503).
caatgtggagatcgttttt

SEQ ID NO: 29347 - DNA, 19 bp, Homo sapiens
  siRNA target sequence for KCNMA1 (NM_002247.2,1559-1577).
ctcaggtggaattttatca

SEQ ID NO: 29348 - DNA, 19 bp, Homo sapiens
  siRNA target sequence for KCNMA1 (NM_002247.2,1584-1602).
cgtcctcaatccacatgat

SEQ ID NO: 29349 - DNA, 19 bp, Homo sapiens
  siRNA target sequence for KCNMA1 (NM_002247.2,1587-1605).
cctcaatccacatgatctt

SEQ ID NO: 29350 - DNA, 19 bp, Homo sapiens
  siRNA target sequence for KCNMA1 (NM_002247.2,1606-1624).
gcaagagtcaagatagagt

SEQ ID NO: 29351 - DNA, 19 bp, Homo sapiens
  siRNA target sequence for KCNMA1 (NM_002247.2,1688-1706).
cgaatatcatgagagtaat

SEQ ID NO: 29352 - DNA, 19 bp, Homo sapiens
  siRNA target sequence for KCNMA1 (NM_002247.2,1702-1720).
gtaatctccataaagaact

SEQ ID NO: 29353 - DNA, 19 bp, Homo sapiens
  siRNA target sequence for KCNMA1 (NM_002247.2,1716-1734).
gaactaccatccgaagata

SEQ ID NO: 29354 - DNA, 19 bp, Homo sapiens
  siRNA target sequence for KCNMA1 (NM_002247.2,1719-1737).
ctaccatccgaagataaga

SEQ ID NO: 29355 - DNA, 19 bp, Homo sapiens
  siRNA target sequence for KCNMA1 (NM_002247.2,1723-1741).
catccgaagataagaatca

SEQ ID NO: 29356 - DNA, 19 bp, Homo sapiens
  siRNA target sequence for KCNMA1 (NM_002247.2,2094-2112).
ccgagagagccgtatatta

SEQ ID NO: 29357 - DNA, 19 bp, Homo sapiens
  siRNA target sequence for KCNMA1 (NM_002247.2,2096-2114).
gagagagccgtatattaat

SEQ ID NO: 29358 - DNA, 19 bp, Homo sapiens
  siRNA target sequence for KCNMA1 (NM_002247.2,2098-2116).
gagagccgtatattaatta

SEQ ID NO: 29359 - DNA, 19 bp, Homo sapiens
  siRNA target sequence for KCNMA1 (NM_002247.2,2100-2118).
gagccgtatattaattaat

SEQ ID NO: 29360 - DNA, 19 bp, Homo sapiens
  siRNA target sequence for KCNMA1 (NM_002247.2,2166-2184).
cgcaagtgatgccaaagaa

SEQ ID NO: 29361 - DNA, 19 bp, Homo sapiens
  siRNA target sequence for KCNMA1 (NM_002247.2,2258-2276).
gctgcaaacggcttgaaga

SEQ ID NO: 29362 - DNA, 19 bp, Homo sapiens
  siRNA target sequence for KCNMA1 (NM_002247.2,2259-2277).
ctgcaaacggcttgaagat

SEQ ID NO: 29363 - DNA, 19 bp, Homo sapiens
  siRNA target sequence for KCNMA1 (NM_002247.2,2280-2298).
gcagccgtcaacactatca

SEQ ID NO: 29364 - DNA, 19 bp, Homo sapiens
  siRNA target sequence for KCNMA1 (NM_002247.2,2361-2379).
gaggcatgaccccttgtta

SEQ ID NO: 29365 - DNA, 19 bp, Homo sapiens
  siRNA target sequence for KCNMA1 (NM_002247.2,2363-2381).
ggcatgaccccttgttaat

SEQ ID NO: 29366 - DNA, 19 bp, Homo sapiens
  siRNA target sequence for KCNMA1 (NM_002247.2,2430-2448).
cgactctactgggatgttt

SEQ ID NO: 29367 - DNA, 19 bp, Homo sapiens
  siRNA target sequence for KCNMA1 (NM_002247.2,2481-2499).
catcctgactcgaagtgaa

SEQ ID NO: 29368 - DNA, 19 bp, Homo sapiens
  siRNA target sequence for KCNMA1 (NM_002247.2,2592-2610).
gctccgtgccagcaacttt

SEQ ID NO: 29369 - DNA, 19 bp, Homo sapiens
  siRNA target sequence for KCNMA1 (NM_002247.2,2595-2613).
ccgtgccagcaactttcat

SEQ ID NO: 29370 - DNA, 19 bp, Homo sapiens
  siRNA target sequence for KCNMA1 (NM_002247.2,2596-2614).
cgtgccagcaactttcatt

SEQ ID NO: 29371 - DNA, 19 bp, Homo sapiens
  siRNA target sequence for KCNMA1 (NM_002247.2,2597-2615).
gtgccagcaactttcatta

SEQ ID NO: 29372 - DNA, 19 bp, Homo sapiens
  siRNA target sequence for KCNMA1 (NM_002247.2,2600-2618).
ccagcaactttcattacca

SEQ ID NO: 29373 - DNA, 19 bp, Homo sapiens
  siRNA target sequence for KCNMA1 (NM_002247.2,2601-2619).
cagcaactttcattaccat

SEQ ID NO: 29374 - DNA, 19 bp, Homo sapiens
  siRNA target sequence for KCNMA1 (NM_002247.2,2668-2686).
gaatgggagacgcttcata

SEQ ID NO: 29375 - DNA, 19 bp, Homo sapiens
  siRNA target sequence for KCNMA1 (NM_002247.2,2672-2690).
gggagacgcttcataactt

SEQ ID NO: 29376 - DNA, 19 bp, Homo sapiens
  siRNA target sequence for KCNMA1 (NM_002247.2,2683-2701).
cataacttccccaaagtgt

SEQ ID NO: 29377 - DNA, 19 bp, Homo sapiens
  siRNA target sequence for KCNMA1 (NM_002247.2,2720-2738).
cattaagtcgggctgattt

SEQ ID NO: 29378 - DNA, 19 bp, Homo sapiens
  siRNA target sequence for KCNMA1 (NM_002247.2,2762-2780).
gtgacatgtgcgttatcct

SEQ ID NO: 29379 - DNA, 19 bp, Homo sapiens
  siRNA target sequence for KCNMA1 (NM_002247.2,2779-2797).
ctgtcagccaatcagaata

SEQ ID NO: 29380 - DNA, 19 bp, Homo sapiens
  siRNA target sequence for KCNMA1 (NM_002247.2,2781-2799).
gtcagccaatcagaataat

SEQ ID NO: 29381 - DNA, 19 bp, Homo sapiens
  siRNA target sequence for KCNMA1 (NM_002247.2,2786-2804).
ccaatcagaataatattga

SEQ ID NO: 29382 - DNA, 19 bp, Homo sapiens
  siRNA target sequence for KCNMA1 (NM_002247.2,2838-2856).
ggcgtcactcaacatcaaa

SEQ ID NO: 29383 - DNA, 19 bp, Homo sapiens
  siRNA target sequence for KCNMA1 (NM_002247.2,2881-2899).
ggagtcttgcaggctaatt

SEQ ID NO: 29384 - DNA, 19 bp, Homo sapiens
  siRNA target sequence for KCNMA1 (NM_002247.2,2910-2928).
cacacctccaggaatggat

SEQ ID NO: 29385 - DNA, 19 bp, Homo sapiens
  siRNA target sequence for KCNMA1 (NM_002247.2,2949-2967).
cccagtgcacgggatgtta

SEQ ID NO: 29386 - DNA, 19 bp, Homo sapiens
  siRNA target sequence for KCNMA1 (NM_002247.2,2968-2986).
cgtcaaccatccatcacaa

SEQ ID NO: 29387 - DNA, 19 bp, Homo sapiens
  siRNA target sequence for KCNMA1 (NM_002247.2,3000-3018).
ccccatcatcactgaacta

SEQ ID NO: 29388 - DNA, 19 bp, Homo sapiens
  siRNA target sequence for KCNMA1 (NM_002247.2,3013-3031).
gaactagtgaacgatacta

SEQ ID NO: 29389 - DNA, 19 bp, Homo sapiens
  siRNA target sequence for KCNMA1 (NM_002247.2,3144-3162).
gagcgcgacgtacttcaat

SEQ ID NO: 29390 - DNA, 19 bp, Homo sapiens
  siRNA target sequence for KCNMA1 (NM_002247.2,3146-3164).
gcgcgacgtacttcaatga

SEQ ID NO: 29391 - DNA, 19 bp, Homo sapiens
  siRNA target sequence for KCNMA1 (NM_002247.2,3148-3166).
gcgacgtacttcaatgaca

SEQ ID NO: 29392 - DNA, 19 bp, Homo sapiens
  siRNA target sequence for KCNMA1 (NM_002247.2,3149-3167).
cgacgtacttcaatgacaa

SEQ ID NO: 29393 - DNA, 19 bp, Homo sapiens
  siRNA target sequence for KCNMA1 (NM_002247.2,3150-3168).
gacgtacttcaatgacaat

SEQ ID NO: 29394 - DNA, 19 bp, Homo sapiens
  siRNA target sequence for KCNMA1 (NM_002247.2,3152-3170).
cgtacttcaatgacaatat

SEQ ID NO: 29395 - DNA, 19 bp, Homo sapiens
  siRNA target sequence for KCNMA1 (NM_002247.2,3455-3473).
gcacaaagaggtatgtcat

SEQ ID NO: 29396 - DNA, 19 bp, Homo sapiens
  siRNA target sequence for KCNMA1 (NM_002247.2,3511-3529).
gacctgatcttctgcttaa

SEQ ID NO: 29397 - DNA, 19 bp, Homo sapiens
  siRNA target sequence for KIAA0211 (NM_014630.1,763-781).
gccgtgagtgtcattgtca

SEQ ID NO: 29398 - DNA, 19 bp, Homo sapiens
  siRNA target sequence for KIAA0211 (NM_014630.1,811-829).
gcggagaaagaccacatta

SEQ ID NO: 29399 - DNA, 19 bp, Homo sapiens
  siRNA target sequence for KIAA0211 (NM_014630.1,830-848).
ctcccagtctcctacacaa

SEQ ID NO: 29400 - DNA, 19 bp, Homo sapiens
  siRNA target sequence for KIAA0211 (NM_014630.1,1045-1063).
gggataaagcccaaacact

SEQ ID NO: 29401 - DNA, 19 bp, Homo sapiens
  siRNA target sequence for KIAA0211 (NM_014630.1,1139-1157).
cggttccagagctgcatat

SEQ ID NO: 29402 - DNA, 19 bp, Homo sapiens
  siRNA target sequence for KIAA0211 (NM_014630.1,1145-1163).
cagagctgcatatgtttga

SEQ ID NO: 29403 - DNA, 19 bp, Homo sapiens
  siRNA target sequence for KIAA0211 (NM_014630.1,1149-1167).
gctgcatatgtttgatcat

SEQ ID NO: 29404 - DNA, 19 bp, Homo sapiens
  siRNA target sequence for KIAA0211 (NM_014630.1,1265-1283).
cggatgccactcgattctt

SEQ ID NO: 29405 - DNA, 19 bp, Homo sapiens
  siRNA target sequence for KIAA0211 (NM_014630.1,1286-1304).
gggaagctttggagttcaa

SEQ ID NO: 29406 - DNA, 19 bp, Homo sapiens
  siRNA target sequence for KIAA0211 (NM_014630.1,1307-1325).
gccatcctagcaacagtat

SEQ ID NO: 29407 - DNA, 19 bp, Homo sapiens
  siRNA target sequence for KIAA0211 (NM_014630.1,1376-1394).
cccctaggcagcgtctaaa

SEQ ID NO: 29408 - DNA, 19 bp, Homo sapiens
  siRNA target sequence for KIAA0211 (NM_014630.1,1437-1455).
ggccttgcaggccaaaaga

SEQ ID NO: 29409 - DNA, 19 bp, Homo sapiens
  siRNA target sequence for KIAA0211 (NM_014630.1,1574-1592).
ctctggaggccactagaaa

SEQ ID NO: 29410 - DNA, 19 bp, Homo sapiens
  siRNA target sequence for KIAA0211 (NM_014630.1,1583-1601).
ccactagaaaaagtatcaa

SEQ ID NO: 29411 - DNA, 19 bp, Homo sapiens
  siRNA target sequence for KIAA0211 (NM_014630.1,1762-1780).
cctgatgatccaagtaagt

SEQ ID NO: 29412 - DNA, 19 bp, Homo sapiens
  siRNA target sequence for KIAA0211 (NM_014630.1,2210-2228).
ctgccccactgattgtaga

SEQ ID NO: 29413 - DNA, 19 bp, Homo sapiens
  siRNA target sequence for KIAA0211 (NM_014630.1,2267-2285).
ccctctatgcgccaaatct

SEQ ID NO: 29414 - DNA, 19 bp, Homo sapiens
  siRNA target sequence for KIAA0211 (NM_014630.1,2269-2287).
ctctatgcgccaaatctca

SEQ ID NO: 29415 - DNA, 19 bp, Homo sapiens
  siRNA target sequence for KIAA0211 (NM_014630.1,2432-2450).
ccaagacgctgctcttctt

SEQ ID NO: 29416 - DNA, 19 bp, Homo sapiens
  siRNA target sequence for KIAA0211 (NM_014630.1,2523-2541).
gctggtgaagcctatctct

SEQ ID NO: 29417 - DNA, 19 bp, Homo sapiens
  siRNA target sequence for KIAA0211 (NM_014630.1,2534-2552).
ctatctctgcggaccaaat

SEQ ID NO: 29418 - DNA, 19 bp, Homo sapiens
  siRNA target sequence for KIAA0211 (NM_014630.1,2697-2715).
ctcaatcaagtgtcttgaa

SEQ ID NO: 29419 - DNA, 19 bp, Homo sapiens
  siRNA target sequence for KIAA0211 (NM_014630.1,2820-2838).
caaccagtgcagtttctgt

SEQ ID NO: 29420 - DNA, 19 bp, Homo sapiens
  siRNA target sequence for KIAA0211 (NM_014630.1,3139-3157).
ccctcccagctcatttata

SEQ ID NO: 29421 - DNA, 19 bp, Homo sapiens
  siRNA target sequence for KIAA0211 (NM_014630.1,3167-3185).
gtgaaatggtcttcaacaa

SEQ ID NO: 29422 - DNA, 19 bp, Homo sapiens
  siRNA target sequence for KIAA0211 (NM_014630.1,3191-3209).
ggcacattcagcagcattt

SEQ ID NO: 29423 - DNA, 19 bp, Homo sapiens
  siRNA target sequence for KIAA0211 (NM_014630.1,3584-3602).
gccacggtcggacattgaa

SEQ ID NO: 29424 - DNA, 19 bp, Homo sapiens
  siRNA target sequence for KIAA0211 (NM_014630.1,3679-3697).
gacacagtaaagaagttct

SEQ ID NO: 29425 - DNA, 19 bp, Homo sapiens
  siRNA target sequence for KIAA0211 (NM_014630.1,3758-3776).
gccacatcagccttatgca

SEQ ID NO: 29426 - DNA, 19 bp, Homo sapiens
  siRNA target sequence for KIAA0211 (NM_014630.1,3759-3777).
ccacatcagccttatgcat

SEQ ID NO: 29427 - DNA, 19 bp, Homo sapiens
  siRNA target sequence for KIAA0211 (NM_014630.1,3800-3818).
gccagacgtccaaagtgaa

SEQ ID NO: 29428 - DNA, 19 bp, Homo sapiens
  siRNA target sequence for KIAA0211 (NM_014630.1,3801-3819).
ccagacgtccaaagtgaaa

SEQ ID NO: 29429 - DNA, 19 bp, Homo sapiens
  siRNA target sequence for KIAA0211 (NM_014630.1,3926-3944).
ggcacaagtccctttttca

SEQ ID NO: 29430 - DNA, 19 bp, Homo sapiens
  siRNA target sequence for KIAA0211 (NM_014630.1,3943-3961).
cagtgcgcgaaatgtagtt

SEQ ID NO: 29431 - DNA, 19 bp, Homo sapiens
  siRNA target sequence for KIAA0211 (NM_014630.1,3945-3963).
gtgcgcgaaatgtagtttt

SEQ ID NO: 29432 - DNA, 19 bp, Homo sapiens
  siRNA target sequence for KIAA0211 (NM_014630.1,4296-4314).
cgatggtggccacaatgat

SEQ ID NO: 29433 - DNA, 19 bp, Homo sapiens
  siRNA target sequence for KIAA0222 (NM_014643.1,541-559).
ggcaacctgaagattcaca

SEQ ID NO: 29434 - DNA, 19 bp, Homo sapiens
  siRNA target sequence for KIAA0222 (NM_014643.1,570-588).
ccgcacggggactctgatt

SEQ ID NO: 29435 - DNA, 19 bp, Homo sapiens
  siRNA target sequence for KIAA0222 (NM_014643.1,860-878).
gccagttcgagcgtaagaa

SEQ ID NO: 29436 - DNA, 19 bp, Homo sapiens
  siRNA target sequence for KIAA0222 (NM_014643.1,1335-1353).
gtgcgggaacctgtttaca

SEQ ID NO: 29437 - DNA, 19 bp, Homo sapiens
  siRNA target sequence for KIAA0222 (NM_014643.1,1337-1355).
gcgggaacctgtttacaaa

SEQ ID NO: 29438 - DNA, 19 bp, Homo sapiens
  siRNA target sequence for KIAA0222 (NM_014643.1,1884-1902).
gatcttccgcacctatcat

SEQ ID NO: 29439 - DNA, 19 bp, Homo sapiens
  siRNA target sequence for KIAA0222 (NM_014643.1,2306-2324).
ggcaagagcagcacagatt

SEQ ID NO: 29440 - DNA, 19 bp, Homo sapiens
  siRNA target sequence for KIAA0222 (NM_014643.1,2503-2521).
gacctcatgccgctagatt

SEQ ID NO: 29441 - DNA, 19 bp, Homo sapiens
  siRNA target sequence for KIAA0222 (NM_014643.1,2505-2523).
cctcatgccgctagattta

SEQ ID NO: 29442 - DNA, 19 bp, Homo sapiens
  siRNA target sequence for KIAA0222 (NM_014643.1,2506-2524).
ctcatgccgctagatttaa

SEQ ID NO: 29443 - DNA, 19 bp, Homo sapiens
  siRNA target sequence for KIAA0222 (NM_014643.1,2508-2526).
catgccgctagatttaagt

SEQ ID NO: 29444 - DNA, 19 bp, Homo sapiens
  siRNA target sequence for KIAA0222 (NM_014643.1,2539-2557).
cgggatgaccccagcaata

SEQ ID NO: 29445 - DNA, 19 bp, Homo sapiens
  siRNA target sequence for KIAA0222 (NM_014643.1,2699-2717).
ggattcagcccaatggtta

SEQ ID NO: 29446 - DNA, 19 bp, Homo sapiens
  siRNA target sequence for KIAA0222 (NM_014643.1,2707-2725).
cccaatggttacaaaagca

SEQ ID NO: 29447 - DNA, 19 bp, Homo sapiens
  siRNA target sequence for KIAA0222 (NM_014643.1,2708-2726).
ccaatggttacaaaagcat

SEQ ID NO: 29448 - DNA, 19 bp, Homo sapiens
  siRNA target sequence for KIAA0222 (NM_014643.1,2897-2915).
ccgctagcatgcctaagaa

SEQ ID NO: 29449 - DNA, 19 bp, Homo sapiens
  siRNA target sequence for KIAA0222 (NM_014643.1,2898-2916).
cgctagcatgcctaagaat

SEQ ID NO: 29450 - DNA, 19 bp, Homo sapiens
  siRNA target sequence for KIAA0222 (NM_014643.1,2899-2917).
gctagcatgcctaagaata

SEQ ID NO: 29451 - DNA, 19 bp, Homo sapiens
  siRNA target sequence for KIAA0222 (NM_014643.1,2900-2918).
ctagcatgcctaagaataa

SEQ ID NO: 29452 - DNA, 19 bp, Homo sapiens
  siRNA target sequence for KIAA0222 (NM_014643.1,3199-3217).
ggctttgcccccacaaata

SEQ ID NO: 29453 - DNA, 19 bp, Homo sapiens
  siRNA target sequence for KIAA0222 (NM_014643.1,3429-3447).
cgtcctacactccatcaaa

SEQ ID NO: 29454 - DNA, 19 bp, Homo sapiens
  siRNA target sequence for KIAA0222 (NM_014643.1,3674-3692).
cacactcagtggtgtttga

SEQ ID NO: 29455 - DNA, 19 bp, Homo sapiens
  siRNA target sequence for KIAA0222 (NM_014643.1,3702-3720).
gcctcggggttctgaagtt

SEQ ID NO: 29456 - DNA, 19 bp, Homo sapiens
  siRNA target sequence for KIAA0222 (NM_014643.1,3706-3724).
cggggttctgaagttcata

SEQ ID NO: 29457 - DNA, 19 bp, Homo sapiens
  siRNA target sequence for KIAA0222 (NM_014643.1,3751-3769).
gggagagaccattctaaca

SEQ ID NO: 29458 - DNA, 19 bp, Homo sapiens
  siRNA target sequence for KIAA0222 (NM_014643.1,3753-3771).
gagagaccattctaacaca

SEQ ID NO: 29459 - DNA, 19 bp, Homo sapiens
  siRNA target sequence for KIAA0296 (NM_014699.1,688-706).
gctctcaagagccatatga

SEQ ID NO: 29460 - DNA, 19 bp, Homo sapiens
  siRNA target sequence for KIAA0296 (NM_014699.1,859-877).
gagacacctgactgtgaat

SEQ ID NO: 29461 - DNA, 19 bp, Homo sapiens
  siRNA target sequence for KIAA0296 (NM_014699.1,902-920).
cgggtacgtgggaagatct

SEQ ID NO: 29462 - DNA, 19 bp, Homo sapiens
  siRNA target sequence for KIAA0296 (NM_014699.1,1046-1064).
gcaacttggaacagtatct

SEQ ID NO: 29463 - DNA, 19 bp, Homo sapiens
  siRNA target sequence for KIAA0296 (NM_014699.1,1067-1085).
ctgaatcagtagtgaactt

SEQ ID NO: 29464 - DNA, 19 bp, Homo sapiens
  siRNA target sequence for KIAA0296 (NM_014699.1,1069-1087).
gaatcagtagtgaacttca

SEQ ID NO: 29465 - DNA, 19 bp, Homo sapiens
  siRNA target sequence for KIAA0296 (NM_014699.1,1222-1240).
ccctgtgccatctgtttca

SEQ ID NO: 29466 - DNA, 19 bp, Homo sapiens
  siRNA target sequence for KIAA0296 (NM_014699.1,1553-1571).
gggactgtggccgtactta

SEQ ID NO: 29467 - DNA, 19 bp, Homo sapiens
  siRNA target sequence for KIAA0296 (NM_014699.1,1586-1604).
gcctcatcaaccatcgaaa

SEQ ID NO: 29468 - DNA, 19 bp, Homo sapiens
  siRNA target sequence for KIAA0296 (NM_014699.1,1804-1822).
gaccatcggccctataagt

SEQ ID NO: 29469 - DNA, 19 bp, Homo sapiens
  siRNA target sequence for KIAA0296 (NM_014699.1,1918-1936).
cgcaagtaccccaatctca

SEQ ID NO: 29470 - DNA, 19 bp, Homo sapiens
  siRNA target sequence for KIAA0296 (NM_014699.1,1919-1937).
gcaagtaccccaatctcat

SEQ ID NO: 29471 - DNA, 19 bp, Homo sapiens
  siRNA target sequence for KIAA0296 (NM_014699.1,2015-2033).
gccacctcaaggtagaact

SEQ ID NO: 29472 - DNA, 19 bp, Homo sapiens
  siRNA target sequence for KIAA0296 (NM_014699.1,2079-2097).
ggaccatgtgtgcaaacat

SEQ ID NO: 29473 - DNA, 19 bp, Homo sapiens
  siRNA target sequence for KIAA0296 (NM_014699.1,2609-2627).
gtttgcaggctgaatctga

SEQ ID NO: 29474 - DNA, 19 bp, Homo sapiens
  siRNA target sequence for KIAA0296 (NM_014699.1,2660-2678).
cccatttccagggtgataa

SEQ ID NO: 29475 - DNA, 19 bp, Homo sapiens
  siRNA target sequence for KIAA0296 (NM_014699.1,2661-2679).
ccatttccagggtgataaa

SEQ ID NO: 29476 - DNA, 19 bp, Homo sapiens
  siRNA target sequence for KIAA0296 (NM_014699.1,2894-2912).
ctgactgtgggcattcttt

SEQ ID NO: 29477 - DNA, 19 bp, Homo sapiens
  siRNA target sequence for KIAA0296 (NM_014699.1,2953-2971).
ccaccaggcatctatcagt

SEQ ID NO: 29478 - DNA, 19 bp, Homo sapiens
  siRNA target sequence for KIAA0296 (NM_014699.1,3696-3714).
ggctgcctaccgtaatcat

SEQ ID NO: 29479 - DNA, 19 bp, Homo sapiens
  siRNA target sequence for KIAA0296 (NM_014699.1,4830-4848).
gggactggggaatcatagt

SEQ ID NO: 29480 - DNA, 19 bp, Homo sapiens
  siRNA target sequence for KIAA0296 (NM_014699.1,5079-5097).
caagacagaccgacactat

SEQ ID NO: 29481 - DNA, 19 bp, Homo sapiens
  siRNA target sequence for KIAA0296 (NM_014699.1,5108-5126).
gctccaaggagttcttaaa

SEQ ID NO: 29482 - DNA, 19 bp, Homo sapiens
  siRNA target sequence for KIAA0296 (NM_014699.1,5563-5581).
cctaacctgctgtctctta

SEQ ID NO: 29483 - DNA, 19 bp, Homo sapiens
  siRNA target sequence for KIAA0352 (NM_014830.1,434-452).
ggcctgtcactctaccttt

SEQ ID NO: 29484 - DNA, 19 bp, Homo sapiens
  siRNA target sequence for KIAA0352 (NM_014830.1,578-596).
ctaccttggtgctgataga

SEQ ID NO: 29485 - DNA, 19 bp, Homo sapiens
  siRNA target sequence for KIAA0352 (NM_014830.1,582-600).
cttggtgctgatagaaact

SEQ ID NO: 29486 - DNA, 19 bp, Homo sapiens
  siRNA target sequence for KIAA0352 (NM_014830.1,586-604).
gtgctgatagaaactatgt

SEQ ID NO: 29487 - DNA, 19 bp, Homo sapiens
  siRNA target sequence for KIAA0352 (NM_014830.1,588-606).
gctgatagaaactatgtgt

SEQ ID NO: 29488 - DNA, 19 bp, Homo sapiens
  siRNA target sequence for KIAA0352 (NM_014830.1,654-672).
gccagtgacgctaaccata

SEQ ID NO: 29489 - DNA, 19 bp, Homo sapiens
  siRNA target sequence for KIAA0352 (NM_014830.1,735-753).
cccttcacgtccattccta

SEQ ID NO: 29490 - DNA, 19 bp, Homo sapiens
  siRNA target sequence for KIAA0352 (NM_014830.1,815-833).
ctgccagccatacaaagtt

SEQ ID NO: 29491 - DNA, 19 bp, Homo sapiens
  siRNA target sequence for KIAA0352 (NM_014830.1,817-835).
gccagccatacaaagttca

SEQ ID NO: 29492 - DNA, 19 bp, Homo sapiens
  siRNA target sequence for KIAA0352 (NM_014830.1,843-861).
ggagacttcagtaaaaaca

SEQ ID NO: 29493 - DNA, 19 bp, Homo sapiens
  siRNA target sequence for KIAA0352 (NM_014830.1,1121-1139).
ccaggtgtgcaagaaagtt

SEQ ID NO: 29494 - DNA, 19 bp, Homo sapiens
  siRNA target sequence for KIAA0352 (NM_014830.1,1124-1142).
ggtgtgcaagaaagttcta

SEQ ID NO: 29495 - DNA, 19 bp, Homo sapiens
  siRNA target sequence for KIAA0352 (NM_014830.1,1237-1255).
gaaactcccgggtaactca

SEQ ID NO: 29496 - DNA, 19 bp, Homo sapiens
  siRNA target sequence for KIAA0352 (NM_014830.1,1257-1275).
gtcctgtcccacattggta

SEQ ID NO: 29497 - DNA, 19 bp, Homo sapiens
  siRNA target sequence for KIAA0352 (NM_014830.1,1259-1277).
cctgtcccacattggtatt

SEQ ID NO: 29498 - DNA, 19 bp, Homo sapiens
  siRNA target sequence for KIAA0352 (NM_014830.1,1289-1307).
ctgcgacatgtgtgaaact

SEQ ID NO: 29499 - DNA, 19 bp, Homo sapiens
  siRNA target sequence for KIAA0352 (NM_014830.1,1291-1309).
gcgacatgtgtgaaactaa

SEQ ID NO: 29500 - DNA, 19 bp, Homo sapiens
  siRNA target sequence for KIAA0352 (NM_014830.1,1298-1316).
gtgtgaaactaagttcttt

SEQ ID NO: 29501 - DNA, 19 bp, Homo sapiens
  siRNA target sequence for KIAA0352 (NM_014830.1,1338-1356).
caccgacgggatggaatat

SEQ ID NO: 29502 - DNA, 19 bp, Homo sapiens
  siRNA target sequence for KIAA0352 (NM_014830.1,1445-1463).
cgctgcctgtgggaaagta

SEQ ID NO: 29503 - DNA, 19 bp, Homo sapiens
  siRNA target sequence for KIAA0352 (NM_014830.1,1446-1464).
gctgcctgtgggaaagtat

SEQ ID NO: 29504 - DNA, 19 bp, Homo sapiens
  siRNA target sequence for KIAA0352 (NM_014830.1,1494-1512).
cacatccttgaccatctaa

SEQ ID NO: 29505 - DNA, 19 bp, Homo sapiens
  siRNA target sequence for KIAA0352 (NM_014830.1,1540-1558).
gcgaccagcgtcaccttaa

SEQ ID NO: 29506 - DNA, 19 bp, Homo sapiens
  siRNA target sequence for KIAA0352 (NM_014830.1,1752-1770).
cacgtcagccagcacaaat

SEQ ID NO: 29507 - DNA, 19 bp, Homo sapiens
  siRNA target sequence for KIAA0352 (NM_014830.1,1930-1948).
cccacacaagcgaattcaa

SEQ ID NO: 29508 - DNA, 19 bp, Homo sapiens
  siRNA target sequence for KIAA0352 (NM_014830.1,2030-2048).
caagtgccacctaaagaca

SEQ ID NO: 29509 - DNA, 19 bp, Homo sapiens
  siRNA target sequence for KIAA0352 (NM_014830.1,2079-2097).
gtctgtgggcactacagtt

SEQ ID NO: 29510 - DNA, 19 bp, Homo sapiens
  siRNA target sequence for KIAA0478 (NM_014870.2,303-321).
ccattggtaccatttactt

SEQ ID NO: 29511 - DNA, 19 bp, Homo sapiens
  siRNA target sequence for KIAA0478 (NM_014870.2,448-466).
gatgtacacgggcaaacta

SEQ ID NO: 29512 - DNA, 19 bp, Homo sapiens
  siRNA target sequence for KIAA0478 (NM_014870.2,507-525).
cagacagtctacagatgtt

SEQ ID NO: 29513 - DNA, 19 bp, Homo sapiens
  siRNA target sequence for KIAA0478 (NM_014870.2,530-548).
gtagctgttagctgcaaaa

SEQ ID NO: 29514 - DNA, 19 bp, Homo sapiens
  siRNA target sequence for KIAA0478 (NM_014870.2,554-572).
ctgaccagccttgtaaact

SEQ ID NO: 29515 - DNA, 19 bp, Homo sapiens
  siRNA target sequence for KIAA0478 (NM_014870.2,646-664).
gcctcaagtagaaatcctt

SEQ ID NO: 29516 - DNA, 19 bp, Homo sapiens
  siRNA target sequence for KIAA0478 (NM_014870.2,677-695).
gctggagagcctcattctt

SEQ ID NO: 29517 - DNA, 19 bp, Homo sapiens
  siRNA target sequence for KIAA0478 (NM_014870.2,864-882).
cccctgctgtgcaaacctt

SEQ ID NO: 29518 - DNA, 19 bp, Homo sapiens
  siRNA target sequence for KIAA0478 (NM_014870.2,870-888).
ctgtgcaaacctttagtga

SEQ ID NO: 29519 - DNA, 19 bp, Homo sapiens
  siRNA target sequence for KIAA0478 (NM_014870.2,1035-1053).
gtccacagaaggagatgat

SEQ ID NO: 29520 - DNA, 19 bp, Homo sapiens
  siRNA target sequence for KIAA0478 (NM_014870.2,1046-1064).
gagatgatagtgaaatgtt

SEQ ID NO: 29521 - DNA, 19 bp, Homo sapiens
  siRNA target sequence for KIAA0478 (NM_014870.2,1096-1114).
gagaatcctgggtaaagta

SEQ ID NO: 29522 - DNA, 19 bp, Homo sapiens
  siRNA target sequence for KIAA0478 (NM_014870.2,1120-1138).
ggaaagcctggatgttcaa

SEQ ID NO: 29523 - DNA, 19 bp, Homo sapiens
  siRNA target sequence for KIAA0478 (NM_014870.2,1121-1139).
gaaagcctggatgttcaaa

SEQ ID NO: 29524 - DNA, 19 bp, Homo sapiens
  siRNA target sequence for KIAA0478 (NM_014870.2,1151-1169).
ctgttgaggctgtaccaat

SEQ ID NO: 29525 - DNA, 19 bp, Homo sapiens
  siRNA target sequence for KIAA0478 (NM_014870.2,1156-1174).
gaggctgtaccaatattct

SEQ ID NO: 29526 - DNA, 19 bp, Homo sapiens
  siRNA target sequence for KIAA0478 (NM_014870.2,1182-1200).
cagtaaaaacagcactatt

SEQ ID NO: 29527 - DNA, 19 bp, Homo sapiens
  siRNA target sequence for KIAA0478 (NM_014870.2,1468-1486).
gactgctgagggtttggta

SEQ ID NO: 29528 - DNA, 19 bp, Homo sapiens
  siRNA target sequence for KIAA0478 (NM_014870.2,1580-1598).
caaccaagccctgatgatt

SEQ ID NO: 29529 - DNA, 19 bp, Homo sapiens
  siRNA target sequence for KIAA0478 (NM_014870.2,1864-1882).
gctcatggaggaaatacga

SEQ ID NO: 29530 - DNA, 19 bp, Homo sapiens
  siRNA target sequence for KIAA0478 (NM_014870.2,1865-1883).
ctcatggaggaaatacgaa

SEQ ID NO: 29531 - DNA, 19 bp, Homo sapiens
  siRNA target sequence for KIAA0478 (NM_014870.2,1956-1974).
ggcataaccagttgatctt

SEQ ID NO: 29532 - DNA, 19 bp, Homo sapiens
  siRNA target sequence for KIAA0478 (NM_014870.2,2331-2349).
ctggggaacagaatgatca

SEQ ID NO: 29533 - DNA, 19 bp, Homo sapiens
  siRNA target sequence for KIAA0478 (NM_014870.2,2439-2457).
gcgacaaaagcttccattt

SEQ ID NO: 29534 - DNA, 19 bp, Homo sapiens
  siRNA target sequence for KIAA0478 (NM_014870.2,2466-2484).
gcctaaaggtgcacatgaa

SEQ ID NO: 29535 - DNA, 19 bp, Homo sapiens
  siRNA target sequence for KIAA0478 (NM_014870.2,2505-2523).
gcaaacaggtgcagtgtaa

SEQ ID NO: 29536 - DNA, 19 bp, Homo sapiens
  siRNA target sequence for KIAA0478 (NM_014870.2,2600-2618).
cccgatgcccccaagaaga

SEQ ID NO: 29537 - DNA, 19 bp, Homo sapiens
  siRNA target sequence for KIAA0478 (NM_014870.2,2855-2873).
gcctatcacaccaagaaga

SEQ ID NO: 29538 - DNA, 19 bp, Homo sapiens
  siRNA target sequence for KIAA0478 (NM_014870.2,3256-3274).
ggcctaccagcaattgtct

SEQ ID NO: 29539 - DNA, 19 bp, Homo sapiens
  siRNA target sequence for KIAA0478 (NM_014870.2,3297-3315).
cccaccaccctgacgtatt

SEQ ID NO: 29540 - DNA, 19 bp, Homo sapiens
  siRNA target sequence for KIAA0478 (NM_014870.2,3298-3316).
ccaccaccctgacgtattt

SEQ ID NO: 29541 - DNA, 19 bp, Homo sapiens
  siRNA target sequence for KIAA0478 (NM_014870.2,3301-3319).
ccaccctgacgtatttgct

SEQ ID NO: 29542 - DNA, 19 bp, Homo sapiens
  siRNA target sequence for KIAA0478 (NM_014870.2,3332-3350).
cgatcttccaagttctcat

SEQ ID NO: 29543 - DNA, 19 bp, Homo sapiens
  siRNA target sequence for KIAA0478 (NM_014870.2,3419-3437).
gaacatgcagatatgaagt

SEQ ID NO: 29544 - DNA, 19 bp, Homo sapiens
  siRNA target sequence for KIAA0478 (NM_014870.2,3480-3498).
ccttgctgcaggttcatgt

SEQ ID NO: 29545 - DNA, 19 bp, Homo sapiens
  siRNA target sequence for KIAA0478 (NM_014870.2,3524-3542).
ccattccggtgcttgtact

SEQ ID NO: 29546 - DNA, 19 bp, Homo sapiens
  siRNA target sequence for KIAA0628 (NM_014789.1,598-616).
ggcaaaaccttcacgttta

SEQ ID NO: 29547 - DNA, 19 bp, Homo sapiens
  siRNA target sequence for KIAA0628 (NM_014789.1,599-617).
gcaaaaccttcacgtttaa

SEQ ID NO: 29548 - DNA, 19 bp, Homo sapiens
  siRNA target sequence for KIAA0628 (NM_014789.1,741-759).
gagactctacgtctgtaat

SEQ ID NO: 29549 - DNA, 19 bp, Homo sapiens
  siRNA target sequence for KIAA0628 (NM_014789.1,743-761).
gactctacgtctgtaatgt

SEQ ID NO: 29550 - DNA, 19 bp, Homo sapiens
  siRNA target sequence for KIAA0628 (NM_014789.1,745-763).
ctctacgtctgtaatgtgt

SEQ ID NO: 29551 - DNA, 19 bp, Homo sapiens
  siRNA target sequence for KIAA0628 (NM_014789.1,799-817).
gagcatcagcgcgttcatt

SEQ ID NO: 29552 - DNA, 19 bp, Homo sapiens
  siRNA target sequence for KIAA0628 (NM_014789.1,1041-1059).
gagcctcattcgccattat

SEQ ID NO: 29553 - DNA, 19 bp, Homo sapiens
  siRNA target sequence for KIAA0628 (NM_014789.1,1043-1061).
gcctcattcgccattatca

SEQ ID NO: 29554 - DNA, 19 bp, Homo sapiens
  siRNA target sequence for KIAA0628 (NM_014789.1,1045-1063).
ctcattcgccattatcaga

SEQ ID NO: 29555 - DNA, 19 bp, Homo sapiens
  siRNA target sequence for KIAA0628 (NM_014789.1,1245-1263).
gaggccttacgtatgcaat

SEQ ID NO: 29556 - DNA, 19 bp, Homo sapiens
  siRNA target sequence for KIAA0628 (NM_014789.1,1549-1567).
ctgcttctgcaccagatta

SEQ ID NO: 29557 - DNA, 19 bp, Homo sapiens
  siRNA target sequence for KIAA0628 (NM_014789.1,1625-1643).
ggtcaaacttccttcaaca

SEQ ID NO: 29558 - DNA, 19 bp, Homo sapiens
  siRNA target sequence for KIAA0628 (NM_014789.1,1682-1700).
gtcagtatgggagagattt

SEQ ID NO: 29559 - DNA, 19 bp, Homo sapiens
  siRNA target sequence for KIAA0628 (NM_014789.1,1704-1722).
ctcaactacaaacgttaaa

SEQ ID NO: 29560 - DNA, 19 bp, Homo sapiens
  siRNA target sequence for KIAA0945 (NM_014952.1,1084-1102).
gcaaggctgccctgatgaa

SEQ ID NO: 29561 - DNA, 19 bp, Homo sapiens
  siRNA target sequence for KIAA0945 (NM_014952.1,1656-1674).
gtggcggctgcccatacaa

SEQ ID NO: 29562 - DNA, 19 bp, Homo sapiens
  siRNA target sequence for KIAA0945 (NM_014952.1,1659-1677).
gcggctgcccatacaaaat

SEQ ID NO: 29563 - DNA, 19 bp, Homo sapiens
  siRNA target sequence for KIAA0945 (NM_014952.1,1701-1719).
ccctgggccagttggaatt

SEQ ID NO: 29564 - DNA, 19 bp, Homo sapiens
  siRNA target sequence for KIAA0945 (NM_014952.1,1702-1720).
cctgggccagttggaattt

SEQ ID NO: 29565 - DNA, 19 bp, Homo sapiens
  siRNA target sequence for KIAA0945 (NM_014952.1,1705-1723).
gggccagttggaatttcct

SEQ ID NO: 29566 - DNA, 19 bp, Homo sapiens
  siRNA target sequence for KIAA0945 (NM_014952.1,1877-1895).
cctcccagcggttctaagt

SEQ ID NO: 29567 - DNA, 19 bp, Homo sapiens
  siRNA target sequence for KIAA0945 (NM_014952.1,2047-2065).
gtgtgagaaggctgtgtat

SEQ ID NO: 29568 - DNA, 19 bp, Homo sapiens
  siRNA target sequence for KIAA0945 (NM_014952.1,2143-2161).
ggacaccgtccttctcaaa

SEQ ID NO: 29569 - DNA, 19 bp, Homo sapiens
  siRNA target sequence for KIAA0945 (NM_014952.1,2146-2164).
caccgtccttctcaaatca

SEQ ID NO: 29570 - DNA, 19 bp, Homo sapiens
  siRNA target sequence for KIAA0945 (NM_014952.1,2248-2266).
cctcctgtggtattacaga

SEQ ID NO: 29571 - DNA, 19 bp, Homo sapiens
  siRNA target sequence for KIAA0945 (NM_014952.1,2305-2323).
cgagcccttgcagaatgaa

SEQ ID NO: 29572 - DNA, 19 bp, Homo sapiens
  siRNA target sequence for KIAA0945 (NM_014952.1,2315-2333).
cagaatgaagtgtttgcat

SEQ ID NO: 29573 - DNA, 19 bp, Homo sapiens
  siRNA target sequence for KIAA0945 (NM_014952.1,2471-2489).
cccccctctgcagactatt

SEQ ID NO: 29574 - DNA, 19 bp, Homo sapiens
  siRNA target sequence for KIAA0945 (NM_014952.1,2542-2560).
cctttgccgccatgtctat

SEQ ID NO: 29575 - DNA, 19 bp, Homo sapiens
  siRNA target sequence for KIAA0945 (NM_014952.1,2547-2565).
gccgccatgtctatgactt

SEQ ID NO: 29576 - DNA, 19 bp, Homo sapiens
  siRNA target sequence for KIAA1111 (NM_015107.1,213-231).
gcctcggtgccggtgtatt

SEQ ID NO: 29577 - DNA, 19 bp, Homo sapiens
  siRNA target sequence for KIAA1111 (NM_015107.1,236-254).
ctgccggctgccttacgat

SEQ ID NO: 29578 - DNA, 19 bp, Homo sapiens
  siRNA target sequence for KIAA1111 (NM_015107.1,378-396).
catgggccctccattatga

SEQ ID NO: 29579 - DNA, 19 bp, Homo sapiens
  siRNA target sequence for KIAA1111 (NM_015107.1,381-399).
gggccctccattatgaaaa

SEQ ID NO: 29580 - DNA, 19 bp, Homo sapiens
  siRNA target sequence for KIAA1111 (NM_015107.1,382-400).
ggccctccattatgaaaaa

SEQ ID NO: 29581 - DNA, 19 bp, Homo sapiens
  siRNA target sequence for KIAA1111 (NM_015107.1,479-497).
gctccggagtaggactttt

SEQ ID NO: 29582 - DNA, 19 bp, Homo sapiens
  siRNA target sequence for KIAA1111 (NM_015107.1,616-634).
cgctgccctcgccatcatt

SEQ ID NO: 29583 - DNA, 19 bp, Homo sapiens
  siRNA target sequence for KIAA1111 (NM_015107.1,620-638).
gccctcgccatcattcact

SEQ ID NO: 29584 - DNA, 19 bp, Homo sapiens
  siRNA target sequence for KIAA1111 (NM_015107.1,641-659).
gagggatgttgaacactat

SEQ ID NO: 29585 - DNA, 19 bp, Homo sapiens
  siRNA target sequence for KIAA1111 (NM_015107.1,644-662).
ggatgttgaacactatgtt

SEQ ID NO: 29586 - DNA, 19 bp, Homo sapiens
  siRNA target sequence for KIAA1111 (NM_015107.1,760-778).
gggagaaagtcctcaatgt

SEQ ID NO: 29587 - DNA, 19 bp, Homo sapiens
  siRNA target sequence for KIAA1111 (NM_015107.1,768-786).
gtcctcaatgtcattagtt

SEQ ID NO: 29588 - DNA, 19 bp, Homo sapiens
  siRNA target sequence for KIAA1111 (NM_015107.1,777-795).
gtcattagtttggaattct

SEQ ID NO: 29589 - DNA, 19 bp, Homo sapiens
  siRNA target sequence for KIAA1111 (NM_015107.1,794-812).
ctctgataccagactttct

SEQ ID NO: 29590 - DNA, 19 bp, Homo sapiens
  siRNA target sequence for KIAA1111 (NM_015107.1,796-814).
ctgataccagactttctaa

SEQ ID NO: 29591 - DNA, 19 bp, Homo sapiens
  siRNA target sequence for KIAA1111 (NM_015107.1,821-839).
ggagacaccgaagattgtt

SEQ ID NO: 29592 - DNA, 19 bp, Homo sapiens
  siRNA target sequence for KIAA1111 (NM_015107.1,826-844).
caccgaagattgttcgaaa

SEQ ID NO: 29593 - DNA, 19 bp, Homo sapiens
  siRNA target sequence for KIAA1111 (NM_015107.1,894-912).
cccaatgtacagaagtact

SEQ ID NO: 29594 - DNA, 19 bp, Homo sapiens
  siRNA target sequence for KIAA1111 (NM_015107.1,920-938).
gagtgtgcgagatagctat

SEQ ID NO: 29595 - DNA, 19 bp, Homo sapiens
  siRNA target sequence for KIAA1111 (NM_015107.1,1052-1070).
ctggagcagttcctctaat

SEQ ID NO: 29596 - DNA, 19 bp, Homo sapiens
  siRNA target sequence for KIAA1111 (NM_015107.1,1054-1072).
ggagcagttcctctaatca

SEQ ID NO: 29597 - DNA, 19 bp, Homo sapiens
  siRNA target sequence for KIAA1111 (NM_015107.1,1057-1075).
gcagttcctctaatcagaa

SEQ ID NO: 29598 - DNA, 19 bp, Homo sapiens
  siRNA target sequence for KIAA1111 (NM_015107.1,1058-1076).
cagttcctctaatcagaat

SEQ ID NO: 29599 - DNA, 19 bp, Homo sapiens
  siRNA target sequence for KIAA1111 (NM_015107.1,1060-1078).
gttcctctaatcagaatga

SEQ ID NO: 29600 - DNA, 19 bp, Homo sapiens
  siRNA target sequence for KIAA1111 (NM_015107.1,1063-1081).
cctctaatcagaatgagat

SEQ ID NO: 29601 - DNA, 19 bp, Homo sapiens
  siRNA target sequence for KIAA1111 (NM_015107.1,1236-1254).
cagctcaaagcctatgaga

SEQ ID NO: 29602 - DNA, 19 bp, Homo sapiens
  siRNA target sequence for KIAA1111 (NM_015107.1,1238-1256).
gctcaaagcctatgagatt

SEQ ID NO: 29603 - DNA, 19 bp, Homo sapiens
  siRNA target sequence for KIAA1111 (NM_015107.1,1328-1346).
gcacatcctggacatcttt

SEQ ID NO: 29604 - DNA, 19 bp, Homo sapiens
  siRNA target sequence for KIAA1111 (NM_015107.1,1482-1500).
cgaaccgtacagctcatta

SEQ ID NO: 29605 - DNA, 19 bp, Homo sapiens
  siRNA target sequence for KIAA1111 (NM_015107.1,1483-1501).
gaaccgtacagctcattaa

SEQ ID NO: 29606 - DNA, 19 bp, Homo sapiens
  siRNA target sequence for KIAA1111 (NM_015107.1,1487-1505).
cgtacagctcattaaagat

SEQ ID NO: 29607 - DNA, 19 bp, Homo sapiens
  siRNA target sequence for KIAA1111 (NM_015107.1,1555-1573).
ggaagacgagcaatatctt

SEQ ID NO: 29608 - DNA, 19 bp, Homo sapiens
  siRNA target sequence for KIAA1111 (NM_015107.1,1758-1776).
gctggccagttgagctata

SEQ ID NO: 29609 - DNA, 19 bp, Homo sapiens
  siRNA target sequence for KIAA1111 (NM_015107.1,1844-1862).
cactggtgcctgcttgaat

SEQ ID NO: 29610 - DNA, 19 bp, Homo sapiens
  siRNA target sequence for KIAA1111 (NM_015107.1,1846-1864).
ctggtgcctgcttgaatga

SEQ ID NO: 29611 - DNA, 19 bp, Homo sapiens
  siRNA target sequence for KIAA1111 (NM_015107.1,1909-1927).
gcccattggccctattgat

SEQ ID NO: 29612 - DNA, 19 bp, Homo sapiens
  siRNA target sequence for KIAA1111 (NM_015107.1,1928-1946).
gtctaacggcagtacgaaa

SEQ ID NO: 29613 - DNA, 19 bp, Homo sapiens
  siRNA target sequence for KIAA1111 (NM_015107.1,1942-1960).
cgaaaagggtgaagagttt

SEQ ID NO: 29614 - DNA, 19 bp, Homo sapiens
  siRNA target sequence for KIAA1111 (NM_015107.1,1948-1966).
gggtgaagagtttatccaa

SEQ ID NO: 29615 - DNA, 19 bp, Homo sapiens
  siRNA target sequence for KIAA1111 (NM_015107.1,1971-1989).
cggcgaaccaagatagcaa

SEQ ID NO: 29616 - DNA, 19 bp, Homo sapiens
  siRNA target sequence for KIAA1111 (NM_015107.1,1972-1990).
ggcgaaccaagatagcaaa

SEQ ID NO: 29617 - DNA, 19 bp, Homo sapiens
  siRNA target sequence for KIAA1111 (NM_015107.1,2034-2052).
gacgaatttgacttggatt

SEQ ID NO: 29618 - DNA, 19 bp, Homo sapiens
  siRNA target sequence for KIAA1111 (NM_015107.1,2093-2111).
gaaggcgaccctgataata

SEQ ID NO: 29619 - DNA, 19 bp, Homo sapiens
  siRNA target sequence for KIAA1111 (NM_015107.1,2096-2114).
ggcgaccctgataataaga

SEQ ID NO: 29620 - DNA, 19 bp, Homo sapiens
  siRNA target sequence for KIAA1111 (NM_015107.1,2116-2134).
caaaatttccccggaaatt

SEQ ID NO: 29621 - DNA, 19 bp, Homo sapiens
  siRNA target sequence for KIAA1111 (NM_015107.1,2204-2222).
ggaggactatacaacagat

SEQ ID NO: 29622 - DNA, 19 bp, Homo sapiens
  siRNA target sequence for KIAA1111 (NM_015107.1,2247-2265).
ggcaagcttgggaatggta

SEQ ID NO: 29623 - DNA, 19 bp, Homo sapiens
  siRNA target sequence for KIAA1111 (NM_015107.1,2269-2287).
gcgctggtggcattcttga

SEQ ID NO: 29624 - DNA, 19 bp, Homo sapiens
  siRNA target sequence for KIAA1111 (NM_015107.1,2270-2288).
cgctggtggcattcttgat

SEQ ID NO: 29625 - DNA, 19 bp, Homo sapiens
  siRNA target sequence for KIAA1111 (NM_015107.1,2639-2657).
ggatgcagagtatatctat

SEQ ID NO: 29626 - DNA, 19 bp, Homo sapiens
  siRNA target sequence for KIAA1111 (NM_015107.1,2798-2816).
gacccgggtagcctctatt

SEQ ID NO: 29627 - DNA, 19 bp, Homo sapiens
  siRNA target sequence for KIAA1111 (NM_015107.1,2800-2818).
cccgggtagcctctattga

SEQ ID NO: 29628 - DNA, 19 bp, Homo sapiens
  siRNA target sequence for KIAA1111 (NM_015107.1,2802-2820).
cgggtagcctctattgaga

SEQ ID NO: 29629 - DNA, 19 bp, Homo sapiens
  siRNA target sequence for KIAA1111 (NM_015107.1,2931-2949).
cctcaagactccaatctca

SEQ ID NO: 29630 - DNA, 19 bp, Homo sapiens
  siRNA target sequence for KIAA1111 (NM_015107.1,3016-3034).
ctcctcctgagcctaaaca

SEQ ID NO: 29631 - DNA, 19 bp, Homo sapiens
  siRNA target sequence for KIAA1111 (NM_015107.1,3019-3037).
ctcctgagcctaaacaaga

SEQ ID NO: 29632 - DNA, 19 bp, Homo sapiens
  siRNA target sequence for KIAA1111 (NM_015107.1,3052-3070).
gtctcgctgaccatgagta

SEQ ID NO: 29633 - DNA, 19 bp, Homo sapiens
  siRNA target sequence for KIAA1196 (NM_020713.1,407-425).
gcatctacgggctcaagta

SEQ ID NO: 29634 - DNA, 19 bp, Homo sapiens
  siRNA target sequence for KIAA1196 (NM_020713.1,493-511).
gccgcattcacctctaaga

SEQ ID NO: 29635 - DNA, 19 bp, Homo sapiens
  siRNA target sequence for KIAA1196 (NM_020713.1,636-654).
gagcaaacctgtcactatt

SEQ ID NO: 29636 - DNA, 19 bp, Homo sapiens
  siRNA target sequence for KIAA1196 (NM_020713.1,976-994).
gtcagcaggcccattgcta

SEQ ID NO: 29637 - DNA, 19 bp, Homo sapiens
  siRNA target sequence for KIAA1196 (NM_020713.1,1007-1025).
caccgccctgcaaaatggt

SEQ ID NO: 29638 - DNA, 19 bp, Homo sapiens
  siRNA target sequence for KIAA1196 (NM_020713.1,1104-1122).
ggacacctgcccaattcca

SEQ ID NO: 29639 - DNA, 19 bp, Homo sapiens
  siRNA target sequence for KIAA1196 (NM_020713.1,2262-2280).
gctagaggcatggaagaat

SEQ ID NO: 29640 - DNA, 19 bp, Homo sapiens
  siRNA target sequence for KIAA1196 (NM_020713.1,2438-2456).
ctgagagtggcgtcaaata

SEQ ID NO: 29641 - DNA, 19 bp, Homo sapiens
  siRNA target sequence for KIAA1259 (NM_017553.1,296-314).
ccctccggttggaccattt

SEQ ID NO: 29642 - DNA, 19 bp, Homo sapiens
  siRNA target sequence for KIAA1259 (NM_017553.1,297-315).
cctccggttggaccatttt

SEQ ID NO: 29643 - DNA, 19 bp, Homo sapiens
  siRNA target sequence for KIAA1259 (NM_017553.1,320-338).
gacaaacgtcagctatctt

SEQ ID NO: 29644 - DNA, 19 bp, Homo sapiens
  siRNA target sequence for KIAA1259 (NM_017553.1,322-340).
caaacgtcagctatcttca

SEQ ID NO: 29645 - DNA, 19 bp, Homo sapiens
  siRNA target sequence for KIAA1259 (NM_017553.1,329-347).
cagctatcttcaataggaa

SEQ ID NO: 29646 - DNA, 19 bp, Homo sapiens
  siRNA target sequence for KIAA1259 (NM_017553.1,331-349).
gctatcttcaataggaata

SEQ ID NO: 29647 - DNA, 19 bp, Homo sapiens
  siRNA target sequence for KIAA1259 (NM_017553.1,376-394).
ctggatgacagtaatccat

SEQ ID NO: 29648 - DNA, 19 bp, Homo sapiens
  siRNA target sequence for KIAA1259 (NM_017553.1,378-396).
ggatgacagtaatccatta

SEQ ID NO: 29649 - DNA, 19 bp, Homo sapiens
  siRNA target sequence for KIAA1259 (NM_017553.1,379-397).
gatgacagtaatccattat

SEQ ID NO: 29650 - DNA, 19 bp, Homo sapiens
  siRNA target sequence for KIAA1259 (NM_017553.1,405-423).
gtctggggatcccttaata

SEQ ID NO: 29651 - DNA, 19 bp, Homo sapiens
  siRNA target sequence for KIAA1259 (NM_017553.1,407-425).
ctggggatcccttaataca

SEQ ID NO: 29652 - DNA, 19 bp, Homo sapiens
  siRNA target sequence for KIAA1259 (NM_017553.1,410-428).
gggatcccttaatacaagt

SEQ ID NO: 29653 - DNA, 19 bp, Homo sapiens
  siRNA target sequence for KIAA1259 (NM_017553.1,411-429).
ggatcccttaatacaagtt

SEQ ID NO: 29654 - DNA, 19 bp, Homo sapiens
  siRNA target sequence for KIAA1259 (NM_017553.1,412-430).
gatcccttaatacaagtta

SEQ ID NO: 29655 - DNA, 19 bp, Homo sapiens
  siRNA target sequence for KIAA1259 (NM_017553.1,416-434).
ccttaatacaagttaagga

SEQ ID NO: 29656 - DNA, 19 bp, Homo sapiens
  siRNA target sequence for KIAA1259 (NM_017553.1,417-435).
cttaatacaagttaaggaa

SEQ ID NO: 29657 - DNA, 19 bp, Homo sapiens
  siRNA target sequence for KIAA1259 (NM_017553.1,473-491).
caggcagttctggaatgtt

SEQ ID NO: 29658 - DNA, 19 bp, Homo sapiens
  siRNA target sequence for KIAA1259 (NM_017553.1,503-521).
ctctgaatggagttctaca

SEQ ID NO: 29659 - DNA, 19 bp, Homo sapiens
  siRNA target sequence for KIAA1259 (NM_017553.1,511-529).
ggagttctacagtcagaat

SEQ ID NO: 29660 - DNA, 19 bp, Homo sapiens
  siRNA target sequence for KIAA1259 (NM_017553.1,538-556).
gataaggggaatttatata

SEQ ID NO: 29661 - DNA, 19 bp, Homo sapiens
  siRNA target sequence for KIAA1259 (NM_017553.1,594-612).
gagcattctgctaagtgat

SEQ ID NO: 29662 - DNA, 19 bp, Homo sapiens
  siRNA target sequence for KIAA1259 (NM_017553.1,690-708).
catgcttcgactacacaaa

SEQ ID NO: 29663 - DNA, 19 bp, Homo sapiens
  siRNA target sequence for KIAA1259 (NM_017553.1,693-711).
gcttcgactacacaaatat

SEQ ID NO: 29664 - DNA, 19 bp, Homo sapiens
  siRNA target sequence for KIAA1259 (NM_017553.1,721-739).
caccaaaataagtatagta

SEQ ID NO: 29665 - DNA, 19 bp, Homo sapiens
  siRNA target sequence for KIAA1259 (NM_017553.1,744-762).
caaggagttgcagcaatat

SEQ ID NO: 29666 - DNA, 19 bp, Homo sapiens
  siRNA target sequence for KIAA1259 (NM_017553.1,791-809).
catatgaccctttctatga

SEQ ID NO: 29667 - DNA, 19 bp, Homo sapiens
  siRNA target sequence for KIAA1259 (NM_017553.1,989-1007).
ctccccctggcactaagaa

SEQ ID NO: 29668 - DNA, 19 bp, Homo sapiens
  siRNA target sequence for KIAA1259 (NM_017553.1,1036-1054).
gctcgtcgcaggaaagtat

SEQ ID NO: 29669 - DNA, 19 bp, Homo sapiens
  siRNA target sequence for KIAA1259 (NM_017553.1,1051-1069).
gtatggctcagcattgtga

SEQ ID NO: 29670 - DNA, 19 bp, Homo sapiens
  siRNA target sequence for KIAA1259 (NM_017553.1,1055-1073).
ggctcagcattgtgaaaaa

SEQ ID NO: 29671 - DNA, 19 bp, Homo sapiens
  siRNA target sequence for KIAA1259 (NM_017553.1,1106-1124).
cagctcgtaacctgtttct

SEQ ID NO: 29672 - DNA, 19 bp, Homo sapiens
  siRNA target sequence for KIAA1259 (NM_017553.1,1108-1126).
gctcgtaacctgtttctca

SEQ ID NO: 29673 - DNA, 19 bp, Homo sapiens
  siRNA target sequence for KIAA1259 (NM_017553.1,1183-1201).
caggcccagaagaactgta

SEQ ID NO: 29674 - DNA, 19 bp, Homo sapiens
  siRNA target sequence for KIAA1259 (NM_017553.1,1359-1377).
gcgaaaactcaacttctta

SEQ ID NO: 29675 - DNA, 19 bp, Homo sapiens
  siRNA target sequence for KIAA1259 (NM_017553.1,1390-1408).
gagttgtatgcccatttca

SEQ ID NO: 29676 - DNA, 19 bp, Homo sapiens
  siRNA target sequence for KIAA1259 (NM_017553.1,1439-1457).
gtatccaggaagaaatcct

SEQ ID NO: 29677 - DNA, 19 bp, Homo sapiens
  siRNA target sequence for KIAA1259 (NM_017553.1,1475-1493).
gttctacccagagacaaat

SEQ ID NO: 29678 - DNA, 19 bp, Homo sapiens
  siRNA target sequence for KIAA1259 (NM_017553.1,1478-1496).
ctacccagagacaaatcga

SEQ ID NO: 29679 - DNA, 19 bp, Homo sapiens
  siRNA target sequence for KIAA1259 (NM_017553.1,1481-1499).
cccagagacaaatcgatat

SEQ ID NO: 29680 - DNA, 19 bp, Homo sapiens
  siRNA target sequence for KIAA1259 (NM_017553.1,1482-1500).
ccagagacaaatcgatata

SEQ ID NO: 29681 - DNA, 19 bp, Homo sapiens
  siRNA target sequence for KIAA1259 (NM_017553.1,1502-1520).
gtggaggagtggtagttaa

SEQ ID NO: 29682 - DNA, 19 bp, Homo sapiens
  siRNA target sequence for KIAA1259 (NM_017553.1,1507-1525).
ggagtggtagttaacatca

SEQ ID NO: 29683 - DNA, 19 bp, Homo sapiens
  siRNA target sequence for KIAA1259 (NM_017553.1,1604-1622).
ctcggacaaggtcatttga

SEQ ID NO: 29684 - DNA, 19 bp, Homo sapiens
  siRNA target sequence for KIAA1259 (NM_017553.1,1777-1795).
caactgaaaggcatgaatt

SEQ ID NO: 29685 - DNA, 19 bp, Homo sapiens
  siRNA target sequence for KIAA1259 (NM_017553.1,1780-1798).
ctgaaaggcatgaattggt

SEQ ID NO: 29686 - DNA, 19 bp, Homo sapiens
  siRNA target sequence for KIAA1259 (NM_017553.1,1796-1814).
ggttggccaatctatatga

SEQ ID NO: 29687 - DNA, 19 bp, Homo sapiens
  siRNA target sequence for KIAA1259 (NM_017553.1,1797-1815).
gttggccaatctatatgaa

SEQ ID NO: 29688 - DNA, 19 bp, Homo sapiens
  siRNA target sequence for KIAA1259 (NM_017553.1,1807-1825).
ctatatgaacagggtatta

SEQ ID NO: 29689 - DNA, 19 bp, Homo sapiens
  siRNA target sequence for KIAA1259 (NM_017553.1,1818-1836).
gggtattaatggcattctt

SEQ ID NO: 29690 - DNA, 19 bp, Homo sapiens
  siRNA target sequence for KIAA1259 (NM_017553.1,1913-1931).
ggggacctttcttaataat

SEQ ID NO: 29691 - DNA, 19 bp, Homo sapiens
  siRNA target sequence for KIAA1259 (NM_017553.1,1914-1932).
gggacctttcttaataatt

SEQ ID NO: 29692 - DNA, 19 bp, Homo sapiens
  siRNA target sequence for KIAA1259 (NM_017553.1,1915-1933).
ggacctttcttaataattt

SEQ ID NO: 29693 - DNA, 19 bp, Homo sapiens
  siRNA target sequence for KIAA1259 (NM_017553.1,1934-1952).
cacctgcgtctacacttaa

SEQ ID NO: 29694 - DNA, 19 bp, Homo sapiens
  siRNA target sequence for KIAA1259 (NM_017553.1,1937-1955).
ctgcgtctacacttaacaa

SEQ ID NO: 29695 - DNA, 19 bp, Homo sapiens
  siRNA target sequence for KIAA1259 (NM_017553.1,1962-1980).
ccaggagtttactagattt

SEQ ID NO: 29696 - DNA, 19 bp, Homo sapiens
  siRNA target sequence for KIAA1259 (NM_017553.1,1965-1983).
ggagtttactagatttgtt

SEQ ID NO: 29697 - DNA, 19 bp, Homo sapiens
  siRNA target sequence for KIAA1259 (NM_017553.1,2017-2035).
cctcatgatagaaaagtca

SEQ ID NO: 29698 - DNA, 19 bp, Homo sapiens
  siRNA target sequence for KIAA1259 (NM_017553.1,2113-2131).
gtggtgcaggatgtaaagt

SEQ ID NO: 29699 - DNA, 19 bp, Homo sapiens
  siRNA target sequence for KIAA1259 (NM_017553.1,2115-2133).
ggtgcaggatgtaaagtat

SEQ ID NO: 29700 - DNA, 19 bp, Homo sapiens
  siRNA target sequence for KIAA1259 (NM_017553.1,2140-2158).
cgggtcaagtggcaataca

SEQ ID NO: 29701 - DNA, 19 bp, Homo sapiens
  siRNA target sequence for KIAA1259 (NM_017553.1,2141-2159).
gggtcaagtggcaatacat

SEQ ID NO: 29702 - DNA, 19 bp, Homo sapiens
  siRNA target sequence for KIAA1259 (NM_017553.1,2173-2191).
gctcaggcgctcaagagta

SEQ ID NO: 29703 - DNA, 19 bp, Homo sapiens
  siRNA target sequence for KIAA1259 (NM_017553.1,2176-2194).
caggcgctcaagagtagtt

SEQ ID NO: 29704 - DNA, 19 bp, Homo sapiens
  siRNA target sequence for KIAA1259 (NM_017553.1,2231-2249).
gtcggaatcggcttttgct

SEQ ID NO: 29705 - DNA, 19 bp, Homo sapiens
  siRNA target sequence for KIAA1259 (NM_017553.1,2233-2251).
cggaatcggcttttgctaa

SEQ ID NO: 29706 - DNA, 19 bp, Homo sapiens
  siRNA target sequence for KIAA1259 (NM_017553.1,2310-2328).
gccaacattatttgattca

SEQ ID NO: 29707 - DNA, 19 bp, Homo sapiens
  siRNA target sequence for KIAA1259 (NM_017553.1,2329-2347).
catgaggaatttaatgaat

SEQ ID NO: 29708 - DNA, 19 bp, Homo sapiens
  siRNA target sequence for KIAA1259 (NM_017553.1,2370-2388).
ccatgccgaaaacaaatct

SEQ ID NO: 29709 - DNA, 19 bp, Homo sapiens
  siRNA target sequence for KIAA1259 (NM_017553.1,2376-2394).
cgaaaacaaatctgctatt

SEQ ID NO: 29710 - DNA, 19 bp, Homo sapiens
  siRNA target sequence for KIAA1259 (NM_017553.1,2520-2538).
ccgacagaagctgctatat

SEQ ID NO: 29711 - DNA, 19 bp, Homo sapiens
  siRNA target sequence for KIAA1259 (NM_017553.1,2522-2540).
gacagaagctgctatatca

SEQ ID NO: 29712 - DNA, 19 bp, Homo sapiens
  siRNA target sequence for KIAA1259 (NM_017553.1,2561-2579).
ccattgaggatttattgca

SEQ ID NO: 29713 - DNA, 19 bp, Homo sapiens
  siRNA target sequence for KIAA1259 (NM_017553.1,2660-2678).
gtaatcacccggagttatt

SEQ ID NO: 29714 - DNA, 19 bp, Homo sapiens
  siRNA target sequence for KIAA1259 (NM_017553.1,2716-2734).
ctaaagccataccacattt

SEQ ID NO: 29715 - DNA, 19 bp, Homo sapiens
  siRNA target sequence for KIAA1259 (NM_017553.1,2728-2746).
cacatttcaaagtttatct

SEQ ID NO: 29716 - DNA, 19 bp, Homo sapiens
  siRNA target sequence for KIAA1259 (NM_017553.1,2760-2778).
gatcagggtcttcaatcat

SEQ ID NO: 29717 - DNA, 19 bp, Homo sapiens
  siRNA target sequence for KIAA1259 (NM_017553.1,2790-2808).
gtggttaagggttctttct

SEQ ID NO: 29718 - DNA, 19 bp, Homo sapiens
  siRNA target sequence for KIAA1259 (NM_017553.1,2809-2827).
ccatttgcaccagactata

SEQ ID NO: 29719 - DNA, 19 bp, Homo sapiens
  siRNA target sequence for KIAA1259 (NM_017553.1,2810-2828).
catttgcaccagactatat

SEQ ID NO: 29720 - DNA, 19 bp, Homo sapiens
  siRNA target sequence for KIAA1259 (NM_017553.1,3269-3287).
cagtgccattggattctta

SEQ ID NO: 29721 - DNA, 19 bp, Homo sapiens
  siRNA target sequence for KIAA1259 (NM_017553.1,3271-3289).
gtgccattggattcttact

SEQ ID NO: 29722 - DNA, 19 bp, Homo sapiens
  siRNA target sequence for KIAA1259 (NM_017553.1,3562-3580).
gggcatagggtccttatct

SEQ ID NO: 29723 - DNA, 19 bp, Homo sapiens
  siRNA target sequence for KIAA1259 (NM_017553.1,3563-3581).
ggcatagggtccttatcta

SEQ ID NO: 29724 - DNA, 19 bp, Homo sapiens
  siRNA target sequence for KIAA1259 (NM_017553.1,3604-3622).
gacctactggaggaataca

SEQ ID NO: 29725 - DNA, 19 bp, Homo sapiens
  siRNA target sequence for KIAA1259 (NM_017553.1,3613-3631).
gaggaatacatggtttaca

SEQ ID NO: 29726 - DNA, 19 bp, Homo sapiens
  siRNA target sequence for KIAA1259 (NM_017553.1,3683-3701).
gagacatggttgctgattt

SEQ ID NO: 29727 - DNA, 19 bp, Homo sapiens
  siRNA target sequence for KIAA1259 (NM_017553.1,3746-3764).
ctggaggactgggtatcaa

SEQ ID NO: 29728 - DNA, 19 bp, Homo sapiens
  siRNA target sequence for KIAA1259 (NM_017553.1,3876-3894).
gtaccggctcatctgtaaa

SEQ ID NO: 29729 - DNA, 19 bp, Homo sapiens
  siRNA target sequence for KIAA1259 (NM_017553.1,3995-4013).
ccaaagaggtggttagtct

SEQ ID NO: 29730 - DNA, 19 bp, Homo sapiens
  siRNA target sequence for KIAA1259 (NM_017553.1,4002-4020).
ggtggttagtcttcttcta

SEQ ID NO: 29731 - DNA, 19 bp, Homo sapiens
  siRNA target sequence for KIAA1259 (NM_017553.1,4080-4098).
ggaaaccaaccgagtgaaa

SEQ ID NO: 29732 - DNA, 19 bp, Homo sapiens
  siRNA target sequence for KIAA1259 (NM_017553.1,4107-4125).
gcggaagcgggaaaagtat

SEQ ID NO: 29733 - DNA, 19 bp, Homo sapiens
  siRNA target sequence for KIAA1259 (NM_017553.1,4404-4422).
caactctcccgcatccata

SEQ ID NO: 29734 - DNA, 19 bp, Homo sapiens
  siRNA target sequence for KIAA1259 (NM_017553.1,4407-4425).
ctctcccgcatccataaca

SEQ ID NO: 29735 - DNA, 19 bp, Homo sapiens
  siRNA target sequence for KIAA1259 (NM_017553.1,4436-4454).
cagataccgtgaatggaat

SEQ ID NO: 29736 - DNA, 19 bp, Homo sapiens
  siRNA target sequence for KIAA1259 (NM_017553.1,4438-4456).
gataccgtgaatggaattt

SEQ ID NO: 29737 - DNA, 19 bp, Homo sapiens
  siRNA target sequence for KIAA1259 (NM_017553.1,4442-4460).
ccgtgaatggaatttccat

SEQ ID NO: 29738 - DNA, 19 bp, Homo sapiens
  siRNA target sequence for KIAA1259 (NM_017553.1,4443-4461).
cgtgaatggaatttccatt

SEQ ID NO: 29739 - DNA, 19 bp, Homo sapiens
  siRNA target sequence for KIAA1259 (NM_017553.1,4647-4665).
cgggtacaacgtgtctaaa

SEQ ID NO: 29740 - DNA, 19 bp, Homo sapiens
  siRNA target sequence for KIAA1259 (NM_017553.1,4650-4668).
gtacaacgtgtctaaagga

SEQ ID NO: 29741 - DNA, 19 bp, Homo sapiens
  siRNA target sequence for KIAA1333 (NM_017769.2,213-231).
ggaatctcactgtacatta

SEQ ID NO: 29742 - DNA, 19 bp, Homo sapiens
  siRNA target sequence for KIAA1333 (NM_017769.2,224-242).
gtacattactactgtttgt

SEQ ID NO: 29743 - DNA, 19 bp, Homo sapiens
  siRNA target sequence for KIAA1333 (NM_017769.2,361-379).
gaaaaatggtgcttcaatt

SEQ ID NO: 29744 - DNA, 19 bp, Homo sapiens
  siRNA target sequence for KIAA1333 (NM_017769.2,384-402).
gtgttgcaccccgatgtaa

SEQ ID NO: 29745 - DNA, 19 bp, Homo sapiens
  siRNA target sequence for KIAA1333 (NM_017769.2,389-407).
gcaccccgatgtaaacgaa

SEQ ID NO: 29746 - DNA, 19 bp, Homo sapiens
  siRNA target sequence for KIAA1333 (NM_017769.2,393-411).
cccgatgtaaacgaagtta

SEQ ID NO: 29747 - DNA, 19 bp, Homo sapiens
  siRNA target sequence for KIAA1333 (NM_017769.2,394-412).
ccgatgtaaacgaagttat

SEQ ID NO: 29748 - DNA, 19 bp, Homo sapiens
  siRNA target sequence for KIAA1333 (NM_017769.2,396-414).
gatgtaaacgaagttatca

SEQ ID NO: 29749 - DNA, 19 bp, Homo sapiens
  siRNA target sequence for KIAA1333 (NM_017769.2,399-417).
gtaaacgaagttatcattt

SEQ ID NO: 29750 - DNA, 19 bp, Homo sapiens
  siRNA target sequence for KIAA1333 (NM_017769.2,448-466).
ccagtttactggcaatttt

SEQ ID NO: 29751 - DNA, 19 bp, Homo sapiens
  siRNA target sequence for KIAA1333 (NM_017769.2,460-478).
caattttgcgtcattttgt

SEQ ID NO: 29752 - DNA, 19 bp, Homo sapiens
  siRNA target sequence for KIAA1333 (NM_017769.2,482-500).
gaccatcgacctgttcaaa

SEQ ID NO: 29753 - DNA, 19 bp, Homo sapiens
  siRNA target sequence for KIAA1333 (NM_017769.2,488-506).
cgacctgttcaaataatta

SEQ ID NO: 29754 - DNA, 19 bp, Homo sapiens
  siRNA target sequence for KIAA1333 (NM_017769.2,537-555).
gcaccatttgcttggaatt

SEQ ID NO: 29755 - DNA, 19 bp, Homo sapiens
  siRNA target sequence for KIAA1333 (NM_017769.2,604-622).
gaacgcttggtttcataga

SEQ ID NO: 29756 - DNA, 19 bp, Homo sapiens
  siRNA target sequence for KIAA1333 (NM_017769.2,612-630).
ggtttcatagagactgttt

SEQ ID NO: 29757 - DNA, 19 bp, Homo sapiens
  siRNA target sequence for KIAA1333 (NM_017769.2,613-631).
gtttcatagagactgttta

SEQ ID NO: 29758 - DNA, 19 bp, Homo sapiens
  siRNA target sequence for KIAA1333 (NM_017769.2,650-668).
gcgggagtgtttttcttta

SEQ ID NO: 29759 - DNA, 19 bp, Homo sapiens
  siRNA target sequence for KIAA1333 (NM_017769.2,669-687).
ggtgtacaatatgcaataa

SEQ ID NO: 29760 - DNA, 19 bp, Homo sapiens
  siRNA target sequence for KIAA1333 (NM_017769.2,926-944).
cggtcatgggagcaaaatt

SEQ ID NO: 29761 - DNA, 19 bp, Homo sapiens
  siRNA target sequence for KIAA1333 (NM_017769.2,960-978).
gtaggggtattatctacaa

SEQ ID NO: 29762 - DNA, 19 bp, Homo sapiens
  siRNA target sequence for KIAA1333 (NM_017769.2,964-982).
gggtattatctacaattca

SEQ ID NO: 29763 - DNA, 19 bp, Homo sapiens
  siRNA target sequence for KIAA1333 (NM_017769.2,1010-1028).
gtattacccaattctaata

SEQ ID NO: 29764 - DNA, 19 bp, Homo sapiens
  siRNA target sequence for KIAA1333 (NM_017769.2,1034-1052).
gggattacagattgtttgt

SEQ ID NO: 29765 - DNA, 19 bp, Homo sapiens
  siRNA target sequence for KIAA1333 (NM_017769.2,1114-1132).
gaggcaaggcagcaaattt

SEQ ID NO: 29766 - DNA, 19 bp, Homo sapiens
  siRNA target sequence for KIAA1333 (NM_017769.2,1117-1135).
gcaaggcagcaaatttaga

SEQ ID NO: 29767 - DNA, 19 bp, Homo sapiens
  siRNA target sequence for KIAA1333 (NM_017769.2,1118-1136).
caaggcagcaaatttagaa

SEQ ID NO: 29768 - DNA, 19 bp, Homo sapiens
  siRNA target sequence for KIAA1333 (NM_017769.2,1137-1155).
gaaatgtatcaacactatt

SEQ ID NO: 29769 - DNA, 19 bp, Homo sapiens
  siRNA target sequence for KIAA1333 (NM_017769.2,1146-1164).
caacactattaatagagtt

SEQ ID NO: 29770 - DNA, 19 bp, Homo sapiens
  siRNA target sequence for KIAA1333 (NM_017769.2,1151-1169).
ctattaatagagttaggat

SEQ ID NO: 29771 - DNA, 19 bp, Homo sapiens
  siRNA target sequence for KIAA1333 (NM_017769.2,1160-1178).
gagttaggattccaaatta

SEQ ID NO: 29772 - DNA, 19 bp, Homo sapiens
  siRNA target sequence for KIAA1333 (NM_017769.2,1188-1206).
ctaaaagattgtatatcaa

SEQ ID NO: 29773 - DNA, 19 bp, Homo sapiens
  siRNA target sequence for KIAA1333 (NM_017769.2,1230-1248).
ccttagatgcattcagaaa

SEQ ID NO: 29774 - DNA, 19 bp, Homo sapiens
  siRNA target sequence for KIAA1333 (NM_017769.2,1235-1253).
gatgcattcagaaatcgaa

SEQ ID NO: 29775 - DNA, 19 bp, Homo sapiens
  siRNA target sequence for KIAA1333 (NM_017769.2,1239-1257).
cattcagaaatcgaaactt

SEQ ID NO: 29776 - DNA, 19 bp, Homo sapiens
  siRNA target sequence for KIAA1333 (NM_017769.2,1251-1269).
gaaactttaatccttcata

SEQ ID NO: 29777 - DNA, 19 bp, Homo sapiens
  siRNA target sequence for KIAA1333 (NM_017769.2,1255-1273).
ctttaatccttcatatgca

SEQ ID NO: 29778 - DNA, 19 bp, Homo sapiens
  siRNA target sequence for KIAA1333 (NM_017769.2,1347-1365).
gtctcttaatgcaacatct

SEQ ID NO: 29779 - DNA, 19 bp, Homo sapiens
  siRNA target sequence for KIAA1333 (NM_017769.2,1361-1379).
catcttgagaactcatcat

SEQ ID NO: 29780 - DNA, 19 bp, Homo sapiens
  siRNA target sequence for KIAA1333 (NM_017769.2,1364-1382).
cttgagaactcatcattgt

SEQ ID NO: 29781 - DNA, 19 bp, Homo sapiens
  siRNA target sequence for KIAA1333 (NM_017769.2,1388-1406).
gggtccttgtcaaagaact

SEQ ID NO: 29782 - DNA, 19 bp, Homo sapiens
  siRNA target sequence for KIAA1333 (NM_017769.2,1389-1407).
ggtccttgtcaaagaactt

SEQ ID NO: 29783 - DNA, 19 bp, Homo sapiens
  siRNA target sequence for KIAA1333 (NM_017769.2,1405-1423).
cttgtctctaaattctcaa

SEQ ID NO: 29784 - DNA, 19 bp, Homo sapiens
  siRNA target sequence for KIAA1333 (NM_017769.2,1429-1447).
gaaagagaatctttactat

SEQ ID NO: 29785 - DNA, 19 bp, Homo sapiens
  siRNA target sequence for KIAA1333 (NM_017769.2,1579-1597).
ctttgatgtggcacagatt

SEQ ID NO: 29786 - DNA, 19 bp, Homo sapiens
  siRNA target sequence for KIAA1333 (NM_017769.2,1586-1604).
gtggcacagattataatca

SEQ ID NO: 29787 - DNA, 19 bp, Homo sapiens
  siRNA target sequence for KIAA1333 (NM_017769.2,1592-1610).
cagattataatcaggataa

SEQ ID NO: 29788 - DNA, 19 bp, Homo sapiens
  siRNA target sequence for KIAA1333 (NM_017769.2,1620-1638).
caactgtagctgacttaaa

SEQ ID NO: 29789 - DNA, 19 bp, Homo sapiens
  siRNA target sequence for KIAA1333 (NM_017769.2,1625-1643).
gtagctgacttaaagtcaa

SEQ ID NO: 29790 - DNA, 19 bp, Homo sapiens
  siRNA target sequence for KIAA1333 (NM_017769.2,1631-1649).
gacttaaagtcaataataa

SEQ ID NO: 29791 - DNA, 19 bp, Homo sapiens
  siRNA target sequence for KIAA1333 (NM_017769.2,1663-1681).
ctaccttgagttaattgga

SEQ ID NO: 29792 - DNA, 19 bp, Homo sapiens
  siRNA target sequence for KIAA1333 (NM_017769.2,1687-1705).
cagacttataacgacatta

SEQ ID NO: 29793 - DNA, 19 bp, Homo sapiens
  siRNA target sequence for KIAA1333 (NM_017769.2,1698-1716).
cgacattaagtgataaata

SEQ ID NO: 29794 - DNA, 19 bp, Homo sapiens
  siRNA target sequence for KIAA1333 (NM_017769.2,1874-1892).
ctttctgcaaaaatcctta

SEQ ID NO: 29795 - DNA, 19 bp, Homo sapiens
  siRNA target sequence for KIAA1333 (NM_017769.2,1888-1906).
ccttagtgagctttttaca

SEQ ID NO: 29796 - DNA, 19 bp, Homo sapiens
  siRNA target sequence for KIAA1333 (NM_017769.2,1937-1955).
gggttttggaacagttact

SEQ ID NO: 29797 - DNA, 19 bp, Homo sapiens
  siRNA target sequence for KIAA1333 (NM_017769.2,1938-1956).
ggttttggaacagttactt

SEQ ID NO: 29798 - DNA, 19 bp, Homo sapiens
  siRNA target sequence for KIAA1333 (NM_017769.2,2098-2116).
caagtgtaataactgttta

SEQ ID NO: 29799 - DNA, 19 bp, Homo sapiens
  siRNA target sequence for KIAA1333 (NM_017769.2,2101-2119).
gtgtaataactgtttagca

SEQ ID NO: 29800 - DNA, 19 bp, Homo sapiens
  siRNA target sequence for KIAA1333 (NM_017769.2,2130-2148).
ccaatacatataaagagtt

SEQ ID NO: 29801 - DNA, 19 bp, Homo sapiens
  siRNA target sequence for KIAA1333 (NM_017769.2,2136-2154).
catataaagagtttcaaga

SEQ ID NO: 29802 - DNA, 19 bp, Homo sapiens
  siRNA target sequence for KIAA1706 (NM_030636.1,805-823).
gtggagtaccgagagtata

SEQ ID NO: 29803 - DNA, 19 bp, Homo sapiens
  siRNA target sequence for KIAA1706 (NM_030636.1,1007-1025).
ccctcaccccacgtgttaa

SEQ ID NO: 29804 - DNA, 19 bp, Homo sapiens
  siRNA target sequence for KIAA1706 (NM_030636.1,1009-1027).
ctcaccccacgtgttaaca

SEQ ID NO: 29805 - DNA, 19 bp, Homo sapiens
  siRNA target sequence for KIAA1706 (NM_030636.1,1013-1031).
ccccacgtgttaacatcaa

SEQ ID NO: 29806 - DNA, 19 bp, Homo sapiens
  siRNA target sequence for KIAA1706 (NM_030636.1,1146-1164).
gaggatggatggtatcaat

SEQ ID NO: 29807 - DNA, 19 bp, Homo sapiens
  siRNA target sequence for KIAA1706 (NM_030636.1,1660-1678).
gggtatgcaggattcctat

SEQ ID NO: 29808 - DNA, 19 bp, Homo sapiens
  siRNA target sequence for KIAA1706 (NM_030636.1,1798-1816).
cacgacctgacccttgtta

SEQ ID NO: 29809 - DNA, 19 bp, Homo sapiens
  siRNA target sequence for KIAA1706 (NM_030636.1,1968-1986).
gccagacagcaatgactat

SEQ ID NO: 29810 - DNA, 19 bp, Homo sapiens
  siRNA target sequence for KIAA1706 (NM_030636.1,1976-1994).
gcaatgactatgatatcct

SEQ ID NO: 29811 - DNA, 19 bp, Homo sapiens
  siRNA target sequence for KIAA1706 (NM_030636.1,2148-2166).
cctcacgaacccttggatt

SEQ ID NO: 29812 - DNA, 19 bp, Homo sapiens
  siRNA target sequence for KIAA1706 (NM_030636.1,2158-2176).
ccttggattccggataact

SEQ ID NO: 29813 - DNA, 19 bp, Homo sapiens
  siRNA target sequence for KIAA1706 (NM_030636.1,2212-2230).
gtgctagccgagttctaca

SEQ ID NO: 29814 - DNA, 19 bp, Homo sapiens
  siRNA target sequence for KIAA1706 (NM_030636.1,2218-2236).
gccgagttctacactgaaa

SEQ ID NO: 29815 - DNA, 19 bp, Homo sapiens
  siRNA target sequence for KIAA1706 (NM_030636.1,2219-2237).
ccgagttctacactgaaaa

SEQ ID NO: 29816 - DNA, 19 bp, Homo sapiens
  siRNA target sequence for KIAA1706 (NM_030636.1,2290-2308).
cgaagtgaagccaacatca

SEQ ID NO: 29817 - DNA, 19 bp, Homo sapiens
  siRNA target sequence for KIAA1706 (NM_030636.1,2291-2309).
gaagtgaagccaacatcaa

SEQ ID NO: 29818 - DNA, 19 bp, Homo sapiens
  siRNA target sequence for KIAA1750 (NM_033512.1,487-505).
ccgtgggaaggccgaaaaa

SEQ ID NO: 29819 - DNA, 19 bp, Homo sapiens
  siRNA target sequence for KIAA1750 (NM_033512.1,488-506).
cgtgggaaggccgaaaaat

SEQ ID NO: 29820 - DNA, 19 bp, Homo sapiens
  siRNA target sequence for KIAA1750 (NM_033512.1,827-845).
gaaccacctcatccaaaat

SEQ ID NO: 29821 - DNA, 19 bp, Homo sapiens
  siRNA target sequence for KIAA1750 (NM_033512.1,885-903).
cagctagcatcctttctga

SEQ ID NO: 29822 - DNA, 19 bp, Homo sapiens
  siRNA target sequence for KIAA1750 (NM_033512.1,887-905).
gctagcatcctttctgaat

SEQ ID NO: 29823 - DNA, 19 bp, Homo sapiens
  siRNA target sequence for KIAA1750 (NM_033512.1,918-936).
gaggtactgagctacttaa

SEQ ID NO: 29824 - DNA, 19 bp, Homo sapiens
  siRNA target sequence for KIAA1750 (NM_033512.1,970-988).
gattgggctacaaaatcaa

SEQ ID NO: 29825 - DNA, 19 bp, Homo sapiens
  siRNA target sequence for KIAA1750 (NM_033512.1,1002-1020).
cgcaacccgtatttccaaa

SEQ ID NO: 29826 - DNA, 19 bp, Homo sapiens
  siRNA target sequence for KIAA1750 (NM_033512.1,1003-1021).
gcaacccgtatttccaaaa

SEQ ID NO: 29827 - DNA, 19 bp, Homo sapiens
  siRNA target sequence for KIAA1750 (NM_033512.1,1004-1022).
caacccgtatttccaaaat

SEQ ID NO: 29828 - DNA, 19 bp, Homo sapiens
  siRNA target sequence for KIAA1750 (NM_033512.1,1093-1111).
ggctcccagggcatgatct

SEQ ID NO: 29829 - DNA, 19 bp, Homo sapiens
  siRNA target sequence for KIAA1750 (NM_033512.1,1203-1221).
gagataatcaacgaagaat

SEQ ID NO: 29830 - DNA, 19 bp, Homo sapiens
  siRNA target sequence for KIAA1750 (NM_033512.1,1228-1246).
ccaatcccttgcagttcta

SEQ ID NO: 29831 - DNA, 19 bp, Homo sapiens
  siRNA target sequence for KIAA1750 (NM_033512.1,1234-1252).
ccttgcagttctacctttt

SEQ ID NO: 29832 - DNA, 19 bp, Homo sapiens
  siRNA target sequence for KIAA1750 (NM_033512.1,1238-1256).
gcagttctaccttttgagt

SEQ ID NO: 29833 - DNA, 19 bp, Homo sapiens
  siRNA target sequence for KIAA1946 (NM_177454.2,348-366).
cggttccagtgtctgtatt

SEQ ID NO: 29834 - DNA, 19 bp, Homo sapiens
  siRNA target sequence for KIAA1946 (NM_177454.2,349-367).
ggttccagtgtctgtattt

SEQ ID NO: 29835 - DNA, 19 bp, Homo sapiens
  siRNA target sequence for KIAA1946 (NM_177454.2,409-427).
cctgagccaagcagttgta

SEQ ID NO: 29836 - DNA, 19 bp, Homo sapiens
  siRNA target sequence for KIAA1946 (NM_177454.2,519-537).
gtttaactattattgctta

SEQ ID NO: 29837 - DNA, 19 bp, Homo sapiens
  siRNA target sequence for KIAA1946 (NM_177454.2,525-543).
ctattattgcttacaaaga

SEQ ID NO: 29838 - DNA, 19 bp, Homo sapiens
  siRNA target sequence for KIAA1946 (NM_177454.2,597-615).
catcagttacactttcact

SEQ ID NO: 29839 - DNA, 19 bp, Homo sapiens
  siRNA target sequence for KIAA1946 (NM_177454.2,633-651).
caaatatatggctatttga

SEQ ID NO: 29840 - DNA, 19 bp, Homo sapiens
  siRNA target sequence for KIAA1946 (NM_177454.2,644-662).
ctatttgaagacactgttt

SEQ ID NO: 29841 - DNA, 19 bp, Homo sapiens
  siRNA target sequence for KIAA1946 (NM_177454.2,734-752).
cctgacaaccatcatatta

SEQ ID NO: 29842 - DNA, 19 bp, Homo sapiens
  siRNA target sequence for KIAA1946 (NM_177454.2,737-755).
gacaaccatcatattagca

SEQ ID NO: 29843 - DNA, 19 bp, Homo sapiens
  siRNA target sequence for KIAA1946 (NM_177454.2,743-761).
catcatattagcaacgtta

SEQ ID NO: 29844 - DNA, 19 bp, Homo sapiens
  siRNA target sequence for KIAA1946 (NM_177454.2,754-772).
caacgttactggctatctt

SEQ ID NO: 29845 - DNA, 19 bp, Homo sapiens
  siRNA target sequence for KIAA1946 (NM_177454.2,757-775).
cgttactggctatcttaca

SEQ ID NO: 29846 - DNA, 19 bp, Homo sapiens
  siRNA target sequence for KIAA1946 (NM_177454.2,765-783).
gctatcttacagttctaca

SEQ ID NO: 29847 - DNA, 19 bp, Homo sapiens
  siRNA target sequence for KIAA1946 (NM_177454.2,766-784).
ctatcttacagttctacaa

SEQ ID NO: 29848 - DNA, 19 bp, Homo sapiens
  siRNA target sequence for KIAA1946 (NM_177454.2,800-818).
gacaattttctgcatacaa

SEQ ID NO: 29849 - DNA, 19 bp, Homo sapiens
  siRNA target sequence for KIAA1946 (NM_177454.2,916-934).
ggtcaatggctctattcaa

SEQ ID NO: 29850 - DNA, 19 bp, Homo sapiens
  siRNA target sequence for KIAA1946 (NM_177454.2,924-942).
gctctattcaagtttctct

SEQ ID NO: 29851 - DNA, 19 bp, Homo sapiens
  siRNA target sequence for KIAA1946 (NM_177454.2,947-965).
cttctacgtctgaatgata

SEQ ID NO: 29852 - DNA, 19 bp, Homo sapiens
  siRNA target sequence for KIAA1946 (NM_177454.2,950-968).
ctacgtctgaatgatataa

SEQ ID NO: 29853 - DNA, 19 bp, Homo sapiens
  siRNA target sequence for KIAA1946 (NM_177454.2,982-1000).
catacctgcttggacattt

SEQ ID NO: 29854 - DNA, 19 bp, Homo sapiens
  siRNA target sequence for KIAA1946 (NM_177454.2,986-1004).
cctgcttggacatttgata

SEQ ID NO: 29855 - DNA, 19 bp, Homo sapiens
  siRNA target sequence for KIAA1946 (NM_177454.2,1037-1055).
ggaatggtcaaggaacata

SEQ ID NO: 29856 - DNA, 19 bp, Homo sapiens
  siRNA target sequence for KIAA1946 (NM_177454.2,1125-1143).
ctagaggttcaggtataaa

SEQ ID NO: 29857 - DNA, 19 bp, Homo sapiens
  siRNA target sequence for KIAA1946 (NM_177454.2,1128-1146).
gaggttcaggtataaatga

SEQ ID NO: 29858 - DNA, 19 bp, Homo sapiens
  siRNA target sequence for KIAA1946 (NM_177454.2,1171-1189).
ccacacagtgtttcttaca

SEQ ID NO: 29859 - DNA, 19 bp, Homo sapiens
  siRNA target sequence for KIAA1946 (NM_177454.2,1180-1198).
gtttcttacagccatatta

SEQ ID NO: 29860 - DNA, 19 bp, Homo sapiens
  siRNA target sequence for KIAA1946 (NM_177454.2,1191-1209).
ccatattaggaggaacaat

SEQ ID NO: 29861 - DNA, 19 bp, Homo sapiens
  siRNA target sequence for KIAA1946 (NM_177454.2,1200-1218).
gaggaacaatagtcattgt

SEQ ID NO: 29862 - DNA, 19 bp, Homo sapiens
  siRNA target sequence for KIAA1946 (NM_177454.2,1202-1220).
ggaacaatagtcattgtca

SEQ ID NO: 29863 - DNA, 19 bp, Homo sapiens
  siRNA target sequence for KIAA1946 (NM_177454.2,1203-1221).
gaacaatagtcattgtcat

SEQ ID NO: 29864 - DNA, 19 bp, Homo sapiens
  siRNA target sequence for KIAA1946 (NM_177454.2,1261-1279).
gtgtggtactccacagaaa

SEQ ID NO: 29865 - DNA, 19 bp, Homo sapiens
  siRNA target sequence for KIAA1946 (NM_177454.2,1319-1337).
gaccagacaacttcaacaa

SEQ ID NO: 29866 - DNA, 19 bp, Homo sapiens
  siRNA target sequence for KIAA1946 (NM_177454.2,1356-1374).
gtacagttaaagttgcatt

SEQ ID NO: 29867 - DNA, 19 bp, Homo sapiens
  siRNA target sequence for KIAA1946 (NM_177454.2,1382-1400).
gaggacaagtcgcagttat

SEQ ID NO: 29868 - DNA, 19 bp, Homo sapiens
  siRNA target sequence for KIAA1946 (NM_177454.2,1385-1403).
gacaagtcgcagttattca

SEQ ID NO: 29869 - DNA, 19 bp, Homo sapiens
  siRNA target sequence for KIAA1946 (NM_177454.2,1387-1405).
caagtcgcagttattcaat

SEQ ID NO: 29870 - DNA, 19 bp, Homo sapiens
  siRNA target sequence for KIAA1946 (NM_177454.2,1406-1424).
gccaaaaactcctcatata

SEQ ID NO: 29871 - DNA, 19 bp, Homo sapiens
  siRNA target sequence for KIAA1946 (NM_177454.2,1485-1503).
ctcgggacgattttaaaat

SEQ ID NO: 29872 - DNA, 19 bp, Homo sapiens
  siRNA target sequence for KIAA1946 (NM_177454.2,1487-1505).
cgggacgattttaaaatct

SEQ ID NO: 29873 - DNA, 19 bp, Homo sapiens
  siRNA target sequence for KIAA1946 (NM_177454.2,1488-1506).
gggacgattttaaaatcta

SEQ ID NO: 29874 - DNA, 19 bp, Homo sapiens
  siRNA target sequence for KIAA1946 (NM_177454.2,1511-1529).
gaagatgtttcatttctat

SEQ ID NO: 29875 - DNA, 19 bp, Homo sapiens
  siRNA target sequence for KIAA1946 (NM_177454.2,1567-1585).
gtctttggagcccaatgta

SEQ ID NO: 29876 - DNA, 19 bp, Homo sapiens
  siRNA target sequence for KIAA1946 (NM_177454.2,1587-1605).
ggtccaaacaacctaaaca

SEQ ID NO: 29877 - DNA, 19 bp, Homo sapiens
  siRNA target sequence for KIAA1946 (NM_177454.2,1598-1616).
cctaaacatattaacaaca

SEQ ID NO: 29878 - DNA, 19 bp, Homo sapiens
  siRNA target sequence for KIAA1946 (NM_177454.2,1599-1617).
ctaaacatattaacaacaa

SEQ ID NO: 29879 - DNA, 19 bp, Homo sapiens
  siRNA target sequence for KIAA1946 (NM_177454.2,1681-1699).
gtatgggcgttcccatatt

SEQ ID NO: 29880 - DNA, 19 bp, Homo sapiens
  siRNA target sequence for KIAA1946 (NM_177454.2,1700-1718).
cctgaacagcttatgcata

SEQ ID NO: 29881 - DNA, 19 bp, Homo sapiens
  siRNA target sequence for KIAA1946 (NM_177454.2,1701-1719).
ctgaacagcttatgcatat

SEQ ID NO: 29882 - DNA, 19 bp, Homo sapiens
  siRNA target sequence for KIAA1946 (NM_177454.2,1732-1750).
cattgccatccttcaaaca

SEQ ID NO: 29883 - DNA, 19 bp, Homo sapiens
  siRNA target sequence for KIAA1946 (NM_177454.2,1762-1780).
ctccacaccggaacaatta

SEQ ID NO: 29884 - DNA, 19 bp, Homo sapiens
  siRNA target sequence for KIAA1946 (NM_177454.2,1920-1938).
gggaagaggatatcatact

SEQ ID NO: 29885 - DNA, 19 bp, Homo sapiens
  siRNA target sequence for KIAA1946 (NM_177454.2,1921-1939).
ggaagaggatatcatactt

SEQ ID NO: 29886 - DNA, 19 bp, Homo sapiens
  siRNA target sequence for KIAA1946 (NM_177454.2,1958-1976).
ccatcccaggcttcagatt

SEQ ID NO: 29887 - DNA, 19 bp, Homo sapiens
  siRNA target sequence for KIAA1946 (NM_177454.2,1973-1991).
gattggagccgatactcaa

SEQ ID NO: 29888 - DNA, 19 bp, Homo sapiens
  siRNA target sequence for KIAA1946 (NM_177454.2,2027-2045).
ctaaatgaggctgttgtaa

SEQ ID NO: 29889 - DNA, 19 bp, Homo sapiens
  siRNA target sequence for KIAA1946 (NM_177454.2,2042-2060).
gtaatgactccattttcat

SEQ ID NO: 29890 - DNA, 19 bp, Homo sapiens
  siRNA target sequence for KIAA1946 (NM_177454.2,2168-2186).
caagtgaggcactccttta

SEQ ID NO: 29891 - DNA, 19 bp, Homo sapiens
  siRNA target sequence for KIAA1946 (NM_177454.2,2181-2199).
cctttatagacctgaaaaa

SEQ ID NO: 29892 - DNA, 19 bp, Homo sapiens
  siRNA target sequence for KIAA1946 (NM_177454.2,2275-2293).
gctcgagagggagaaaaca

SEQ ID NO: 29893 - DNA, 19 bp, Homo sapiens
  siRNA target sequence for KIAA1946 (NM_177454.2,2283-2301).
gggagaaaacattcatcaa

SEQ ID NO: 29894 - DNA, 19 bp, Homo sapiens
  siRNA target sequence for KIAA1946 (NM_177454.2,2312-2330).
cagcccaagatcctttact

SEQ ID NO: 29895 - DNA, 19 bp, Homo sapiens
  siRNA target sequence for KIAA1946 (NM_177454.2,2314-2332).
gcccaagatcctttactta

SEQ ID NO: 29896 - DNA, 19 bp, Homo sapiens
  siRNA target sequence for KIAA1946 (NM_177454.2,2480-2498).
gattttgaagctaatacat

SEQ ID NO: 29897 - DNA, 19 bp, Homo sapiens
  siRNA target sequence for KIAA1946 (NM_177454.2,2538-2556).
gagatagcaagactaacat

SEQ ID NO: 29898 - DNA, 19 bp, Homo sapiens
  siRNA target sequence for KIAA1946 (NM_177454.2,2540-2558).
gatagcaagactaacatct

SEQ ID NO: 29899 - DNA, 19 bp, Homo sapiens
  siRNA target sequence for KIAA1946 (NM_177454.2,2577-2595).
gcccactgattcccataaa

SEQ ID NO: 29900 - DNA, 19 bp, Homo sapiens
  siRNA target sequence for KIAA1946 (NM_177454.2,2578-2596).
cccactgattcccataaat

SEQ ID NO: 29901 - DNA, 19 bp, Homo sapiens
  siRNA target sequence for KIAA1946 (NM_177454.2,2579-2597).
ccactgattcccataaatt

SEQ ID NO: 29902 - DNA, 19 bp, Homo sapiens
  siRNA target sequence for KIF22 (NM_007317.1,101-119).
gtcgctgtcggctaagcaa

SEQ ID NO: 29903 - DNA, 19 bp, Homo sapiens
  siRNA target sequence for KIF22 (NM_007317.1,105-123).
ctgtcggctaagcaagatt

SEQ ID NO: 29904 - DNA, 19 bp, Homo sapiens
  siRNA target sequence for KIF22 (NM_007317.1,239-257).
gctctctagagattgctaa

SEQ ID NO: 29905 - DNA, 19 bp, Homo sapiens
  siRNA target sequence for KIF22 (NM_007317.1,596-614).
cttcgggagacctggtaat

SEQ ID NO: 29906 - DNA, 19 bp, Homo sapiens
  siRNA target sequence for KIF22 (NM_007317.1,817-835).
cagcgagagggaaaactct

SEQ ID NO: 29907 - DNA, 19 bp, Homo sapiens
  siRNA target sequence for KIF22 (NM_007317.1,882-900).
caagggccttcggctaaaa

SEQ ID NO: 29908 - DNA, 19 bp, Homo sapiens
  siRNA target sequence for KIF22 (NM_007317.1,886-904).
ggccttcggctaaaagaga

SEQ ID NO: 29909 - DNA, 19 bp, Homo sapiens
  siRNA target sequence for KIF22 (NM_007317.1,966-984).
cctccctcgtgtaccttat

SEQ ID NO: 29910 - DNA, 19 bp, Homo sapiens
  siRNA target sequence for KIF22 (NM_007317.1,1025-1043).
gtggctcagcccacagtat

SEQ ID NO: 29911 - DNA, 19 bp, Homo sapiens
  siRNA target sequence for KIF22 (NM_007317.1,1126-1144).
gtgatcaatcggcctttta

SEQ ID NO: 29912 - DNA, 19 bp, Homo sapiens
  siRNA target sequence for KIF22 (NM_007317.1,1131-1149).
caatcggccttttaccaat

SEQ ID NO: 29913 - DNA, 19 bp, Homo sapiens
  siRNA target sequence for KIF22 (NM_007317.1,1135-1153).
cggccttttaccaatgaga

SEQ ID NO: 29914 - DNA, 19 bp, Homo sapiens
  siRNA target sequence for KIF22 (NM_007317.1,1169-1187).
ccttgggacctgttaagct

SEQ ID NO: 29915 - DNA, 19 bp, Homo sapiens
  siRNA target sequence for KIF22 (NM_007317.1,1421-1439).
gagagcggatggtgctaat

SEQ ID NO: 29916 - DNA, 19 bp, Homo sapiens
  siRNA target sequence for KIF22 (NM_007317.1,1476-1494).
gcttaagacgaagcaaaaa

SEQ ID NO: 29917 - DNA, 19 bp, Homo sapiens
  siRNA target sequence for KIF22 (NM_007317.1,1617-1635).
gatgcccctacagctaatt

SEQ ID NO: 29918 - DNA, 19 bp, Homo sapiens
  siRNA target sequence for KIF22 (NM_007317.1,1940-1958).
gcataacggggaaacagat

SEQ ID NO: 29919 - DNA, 19 bp, Homo sapiens
  siRNA target sequence for KIF4A (NM_012310.2,272-290).
cactcataaaaggtgtatt

SEQ ID NO: 29920 - DNA, 19 bp, Homo sapiens
  siRNA target sequence for KLF14 (NM_138693.1,688-706).
ctcgactgcgacaagaagt

SEQ ID NO: 29921 - DNA, 19 bp, Homo sapiens
  siRNA target sequence for KLF14 (NM_138693.1,833-851).
caacctatcatccagatat

SEQ ID NO: 29922 - DNA, 19 bp, Homo sapiens
  siRNA target sequence for KLF15 (NM_014079.2,302-320).
ctcacccgtctctgaagat

SEQ ID NO: 29923 - DNA, 19 bp, Homo sapiens
  siRNA target sequence for KLF15 (NM_014079.2,464-482).
gggcagcggcagtagcatt

SEQ ID NO: 29924 - DNA, 19 bp, Homo sapiens
  siRNA target sequence for KLF15 (NM_014079.2,1134-1152).
gccgcagaactcatcaaaa

SEQ ID NO: 29925 - DNA, 19 bp, Homo sapiens
  siRNA target sequence for KLF15 (NM_014079.2,1135-1153).
ccgcagaactcatcaaaat

SEQ ID NO: 29926 - DNA, 19 bp, Homo sapiens
  siRNA target sequence for KLF15 (NM_014079.2,1345-1363).
ctgtgtgcgagaagaagtt

SEQ ID NO: 29927 - DNA, 19 bp, Homo sapiens
  siRNA target sequence for KLF16 (NM_031918.1,43-61).
gtgctcatggccatctctt

SEQ ID NO: 29928 - DNA, 19 bp, Homo sapiens
  siRNA target sequence for KLF5 (NM_001730.2,561-579).
gacctggtccagacaagat

SEQ ID NO: 29929 - DNA, 19 bp, Homo sapiens
  siRNA target sequence for KLF5 (NM_001730.2,563-581).
cctggtccagacaagatgt

SEQ ID NO: 29930 - DNA, 19 bp, Homo sapiens
  siRNA target sequence for KLF5 (NM_001730.2,566-584).
ggtccagacaagatgtgaa

SEQ ID NO: 29931 - DNA, 19 bp, Homo sapiens
  siRNA target sequence for KLF5 (NM_001730.2,567-585).
gtccagacaagatgtgaaa

SEQ ID NO: 29932 - DNA, 19 bp, Homo sapiens
  siRNA target sequence for KLF5 (NM_001730.2,630-648).
ccagagcataaaaagtata

SEQ ID NO: 29933 - DNA, 19 bp, Homo sapiens
  siRNA target sequence for KLF5 (NM_001730.2,666-684).
gtcgtagaccagttcttca

SEQ ID NO: 29934 - DNA, 19 bp, Homo sapiens
  siRNA target sequence for KLF5 (NM_001730.2,687-705).
gacactgaagggttacctt

SEQ ID NO: 29935 - DNA, 19 bp, Homo sapiens
  siRNA target sequence for KLF5 (NM_001730.2,696-714).
gggttaccttacagtatca

SEQ ID NO: 29936 - DNA, 19 bp, Homo sapiens
  siRNA target sequence for KLF5 (NM_001730.2,702-720).
ccttacagtatcaacatga

SEQ ID NO: 29937 - DNA, 19 bp, Homo sapiens
  siRNA target sequence for KLF5 (NM_001730.2,703-721).
cttacagtatcaacatgaa

SEQ ID NO: 29938 - DNA, 19 bp, Homo sapiens
  siRNA target sequence for KLF5 (NM_001730.2,871-889).
ctgagttcaccagtatatt

SEQ ID NO: 29939 - DNA, 19 bp, Homo sapiens
  siRNA target sequence for KLF5 (NM_001730.2,873-891).
gagttcaccagtatattca

SEQ ID NO: 29940 - DNA, 19 bp, Homo sapiens
  siRNA target sequence for KLF5 (NM_001730.2,907-925).
cagctccagaggtgaacaa

SEQ ID NO: 29941 - DNA, 19 bp, Homo sapiens
  siRNA target sequence for KLF5 (NM_001730.2,909-927).
gctccagaggtgaacaata

SEQ ID NO: 29942 - DNA, 19 bp, Homo sapiens
  siRNA target sequence for KLF5 (NM_001730.2,949-967).
ctacaccagatcttcatct

SEQ ID NO: 29943 - DNA, 19 bp, Homo sapiens
  siRNA target sequence for KLF5 (NM_001730.2,995-1013).
gtaccagctactgaataca

SEQ ID NO: 29944 - DNA, 19 bp, Homo sapiens
  siRNA target sequence for KLF5 (NM_001730.2,1007-1025).
gaatacaccggatctagat

SEQ ID NO: 29945 - DNA, 19 bp, Homo sapiens
  siRNA target sequence for KLF5 (NM_001730.2,1020-1038).
ctagatatgcccagttcta

SEQ ID NO: 29946 - DNA, 19 bp, Homo sapiens
  siRNA target sequence for KLF5 (NM_001730.2,1058-1076).
ggacactcttaatgtttct

SEQ ID NO: 29947 - DNA, 19 bp, Homo sapiens
  siRNA target sequence for KLF5 (NM_001730.2,1257-1275).
gcagagatgctccagaatt

SEQ ID NO: 29948 - DNA, 19 bp, Homo sapiens
  siRNA target sequence for KLF5 (NM_001730.2,1288-1306).
catcctatgctgctacaat

SEQ ID NO: 29949 - DNA, 19 bp, Homo sapiens
  siRNA target sequence for KLF5 (NM_001730.2,1297-1315).
ctgctacaattgcttctaa

SEQ ID NO: 29950 - DNA, 19 bp, Homo sapiens
  siRNA target sequence for KLF5 (NM_001730.2,1300-1318).
ctacaattgcttctaaact

SEQ ID NO: 29951 - DNA, 19 bp, Homo sapiens
  siRNA target sequence for KLF5 (NM_001730.2,1312-1330).
ctaaactggcaattcacaa

SEQ ID NO: 29952 - DNA, 19 bp, Homo sapiens
  siRNA target sequence for KLF5 (NM_001730.2,1317-1335).
ctggcaattcacaatccaa

SEQ ID NO: 29953 - DNA, 19 bp, Homo sapiens
  siRNA target sequence for KLF5 (NM_001730.2,1320-1338).
gcaattcacaatccaaatt

SEQ ID NO: 29954 - DNA, 19 bp, Homo sapiens
  siRNA target sequence for KLF5 (NM_001730.2,1350-1368).
ctgccagttaactcacaaa

SEQ ID NO: 29955 - DNA, 19 bp, Homo sapiens
  siRNA target sequence for KLF5 (NM_001730.2,1373-1391).
ccaacctgtcagatacaat

SEQ ID NO: 29956 - DNA, 19 bp, Homo sapiens
  siRNA target sequence for KLF5 (NM_001730.2,1374-1392).
caacctgtcagatacaata

SEQ ID NO: 29957 - DNA, 19 bp, Homo sapiens
  siRNA target sequence for KLF5 (NM_001730.2,1396-1414).
ggagtaaccccgatttgga

SEQ ID NO: 29958 - DNA, 19 bp, Homo sapiens
  siRNA target sequence for KLF5 (NM_001730.2,1442-1460).
ccctggttgcacaaaagtt

SEQ ID NO: 29959 - DNA, 19 bp, Homo sapiens
  siRNA target sequence for KLHL10 (NM_152467.1,189-207).
cttcaacgagcttagacta

SEQ ID NO: 29960 - DNA, 19 bp, Homo sapiens
  siRNA target sequence for KLHL10 (NM_152467.1,250-268).
gagttcagtgcccataaga

SEQ ID NO: 29961 - DNA, 19 bp, Homo sapiens
  siRNA target sequence for KLHL10 (NM_152467.1,369-387).
catgatgaagctaatcatt

SEQ ID NO: 29962 - DNA, 19 bp, Homo sapiens
  siRNA target sequence for KLHL10 (NM_152467.1,402-420).
ccggaccgtgcctatcaca

SEQ ID NO: 29963 - DNA, 19 bp, Homo sapiens
  siRNA target sequence for KLHL10 (NM_152467.1,413-431).
ctatcacaccggacaatgt

SEQ ID NO: 29964 - DNA, 19 bp, Homo sapiens
  siRNA target sequence for KLHL10 (NM_152467.1,446-464).
ctgctgcagaccagtttaa

SEQ ID NO: 29965 - DNA, 19 bp, Homo sapiens
  siRNA target sequence for KLHL10 (NM_152467.1,527-545).
gtatcggcatctgtaagtt

SEQ ID NO: 29966 - DNA, 19 bp, Homo sapiens
  siRNA target sequence for KLHL10 (NM_152467.1,539-557).
gtaagttcacggactacta

SEQ ID NO: 29967 - DNA, 19 bp, Homo sapiens
  siRNA target sequence for KLHL10 (NM_152467.1,575-593).
ggcagaaggcctacatgtt

SEQ ID NO: 29968 - DNA, 19 bp, Homo sapiens
  siRNA target sequence for KLHL10 (NM_152467.1,579-597).
gaaggcctacatgttcata

SEQ ID NO: 29969 - DNA, 19 bp, Homo sapiens
  siRNA target sequence for KLHL10 (NM_152467.1,621-639).
gaaagtctcggcagaattt

SEQ ID NO: 29970 - DNA, 19 bp, Homo sapiens
  siRNA target sequence for KLHL10 (NM_152467.1,645-663).
gctctcggtcactgaactt

SEQ ID NO: 29971 - DNA, 19 bp, Homo sapiens
  siRNA target sequence for KLHL10 (NM_152467.1,646-664).
ctctcggtcactgaactta

SEQ ID NO: 29972 - DNA, 19 bp, Homo sapiens
  siRNA target sequence for KLHL10 (NM_152467.1,650-668).
cggtcactgaacttaagga

SEQ ID NO: 29973 - DNA, 19 bp, Homo sapiens
  siRNA target sequence for KLHL10 (NM_152467.1,656-674).
ctgaacttaaggatatcat

SEQ ID NO: 29974 - DNA, 19 bp, Homo sapiens
  siRNA target sequence for KLHL10 (NM_152467.1,812-830).
ctgagtacttcatgaacaa

SEQ ID NO: 29975 - DNA, 19 bp, Homo sapiens
  siRNA target sequence for KLHL10 (NM_152467.1,837-855).
gatgaatgactatgtcaaa

SEQ ID NO: 29976 - DNA, 19 bp, Homo sapiens
  siRNA target sequence for KLHL10 (NM_152467.1,899-917).
ccatgtatgacctcaacat

SEQ ID NO: 29977 - DNA, 19 bp, Homo sapiens
  siRNA target sequence for KLHL10 (NM_152467.1,903-921).
gtatgacctcaacatgaat

SEQ ID NO: 29978 - DNA, 19 bp, Homo sapiens
  siRNA target sequence for KLHL10 (NM_152467.1,915-933).
catgaatggaccctctaat

SEQ ID NO: 29979 - DNA, 19 bp, Homo sapiens
  siRNA target sequence for KLHL10 (NM_152467.1,918-936).
gaatggaccctctaattct

SEQ ID NO: 29980 - DNA, 19 bp, Homo sapiens
  siRNA target sequence for KLHL10 (NM_152467.1,1051-1069).
gacagatgggtgaatgtta

SEQ ID NO: 29981 - DNA, 19 bp, Homo sapiens
  siRNA target sequence for KLHL10 (NM_152467.1,1053-1071).
cagatgggtgaatgttact

SEQ ID NO: 29982 - DNA, 19 bp, Homo sapiens
  siRNA target sequence for KLHL10 (NM_152467.1,1142-1160).
ggtttgatagtgtagacta

SEQ ID NO: 29983 - DNA, 19 bp, Homo sapiens
  siRNA target sequence for KLHL10 (NM_152467.1,1143-1161).
gtttgatagtgtagactat

SEQ ID NO: 29984 - DNA, 19 bp, Homo sapiens
  siRNA target sequence for KLHL10 (NM_152467.1,1147-1165).
gatagtgtagactatttca

SEQ ID NO: 29985 - DNA, 19 bp, Homo sapiens
  siRNA target sequence for KLHL10 (NM_152467.1,1156-1174).
gactatttcaatagtgtta

SEQ ID NO: 29986 - DNA, 19 bp, Homo sapiens
  siRNA target sequence for KLHL10 (NM_152467.1,1178-1196).
gttttgacccagtcaagaa

SEQ ID NO: 29987 - DNA, 19 bp, Homo sapiens
  siRNA target sequence for KLHL10 (NM_152467.1,1183-1201).
gacccagtcaagaaaactt

SEQ ID NO: 29988 - DNA, 19 bp, Homo sapiens
  siRNA target sequence for KLHL10 (NM_152467.1,1248-1266).
gacagtcctcggcaatttt

SEQ ID NO: 29989 - DNA, 19 bp, Homo sapiens
  siRNA target sequence for KLHL10 (NM_152467.1,1250-1268).
cagtcctcggcaattttat

SEQ ID NO: 29990 - DNA, 19 bp, Homo sapiens
  siRNA target sequence for KLHL10 (NM_152467.1,1291-1309).
ggctacgtgcgtctaaaca

SEQ ID NO: 29991 - DNA, 19 bp, Homo sapiens
  siRNA target sequence for KLHL10 (NM_152467.1,1293-1311).
ctacgtgcgtctaaacact

SEQ ID NO: 29992 - DNA, 19 bp, Homo sapiens
  siRNA target sequence for KLHL10 (NM_152467.1,1324-1342).
gagccagagaccaatcaat

SEQ ID NO: 29993 - DNA, 19 bp, Homo sapiens
  siRNA target sequence for KLHL10 (NM_152467.1,1381-1399).
gcaagcgccacaacacttt

SEQ ID NO: 29994 - DNA, 19 bp, Homo sapiens
  siRNA target sequence for KLHL10 (NM_152467.1,1382-1400).
caagcgccacaacacttta

SEQ ID NO: 29995 - DNA, 19 bp, Homo sapiens
  siRNA target sequence for KLHL10 (NM_152467.1,1489-1507).
gtcatagcacccatgagaa

SEQ ID NO: 29996 - DNA, 19 bp, Homo sapiens
  siRNA target sequence for KLHL10 (NM_152467.1,1519-1537).
ggaataggcgtgattgctt

SEQ ID NO: 29997 - DNA, 19 bp, Homo sapiens
  siRNA target sequence for KLHL10 (NM_152467.1,1520-1538).
gaataggcgtgattgctta

SEQ ID NO: 29998 - DNA, 19 bp, Homo sapiens
  siRNA target sequence for KLHL10 (NM_152467.1,1530-1548).
gattgcttatggagaacat

SEQ ID NO: 29999 - DNA, 19 bp, Homo sapiens
  siRNA target sequence for KLHL10 (NM_152467.1,1566-1584).
ctttgatggagctaatcga

SEQ ID NO: 30000 - DNA, 19 bp, Homo sapiens
  siRNA target sequence for KLHL10 (NM_152467.1,1627-1645).
cgcacaatccccactatgt

SEQ ID NO: 30001 - DNA, 19 bp, Homo sapiens
  siRNA target sequence for KLHL10 (NM_152467.1,1628-1646).
gcacaatccccactatgtt

SEQ ID NO: 30002 - DNA, 19 bp, Homo sapiens
  siRNA target sequence for KLHL10 (NM_152467.1,1677-1695).
ggtggatgacctcttgttt

SEQ ID NO: 30003 - DNA, 19 bp, Homo sapiens
  siRNA target sequence for KLHL10 (NM_152467.1,1698-1716).
ggtgggtggctttaatggt

SEQ ID NO: 30004 - DNA, 19 bp, Homo sapiens
  siRNA target sequence for KLHL10 (NM_152467.1,1705-1723).
ggctttaatggttttacca

SEQ ID NO: 30005 - DNA, 19 bp, Homo sapiens
  siRNA target sequence for KLHL10 (NM_152467.1,1830-1848).
ggccaatgttgaggaatat

SEQ ID NO: 30006 - DNA, 19 bp, Homo sapiens
  siRNA target sequence for KLHL10 (NM_152467.1,1833-1851).
caatgttgaggaatatgca

SEQ ID NO: 30007 - DNA, 19 bp, Homo sapiens
  siRNA target sequence for KLHL10 (NM_152467.1,1850-1868).
cagctagacgggacaactt

SEQ ID NO: 30008 - DNA, 19 bp, Homo sapiens
  siRNA target sequence for KLHL10 (NM_152467.1,1884-1902).
gcgagatgaagtaaaatat

SEQ ID NO: 30009 - DNA, 19 bp, Homo sapiens
  siRNA target sequence for KLHL10 (NM_152467.1,1885-1903).
cgagatgaagtaaaatatt

SEQ ID NO: 30010 - DNA, 19 bp, Homo sapiens
  siRNA target sequence for KNSL7 (NM_020242.1,82-100).
cggctgcaaaactgagtta

SEQ ID NO: 30011 - DNA, 19 bp, Homo sapiens
  siRNA target sequence for KNSL7 (NM_020242.1,97-115).
gttacgcagcgtgacaaat

SEQ ID NO: 30012 - DNA, 19 bp, Homo sapiens
  siRNA target sequence for KNSL7 (NM_020242.1,123-141).
ctaaccaaccaagtaatga

SEQ ID NO: 30013 - DNA, 19 bp, Homo sapiens
  siRNA target sequence for KNSL7 (NM_020242.1,173-191).
cgtcctcctgcagaaagat

SEQ ID NO: 30014 - DNA, 19 bp, Homo sapiens
  siRNA target sequence for KNSL7 (NM_020242.1,203-221).
gatggagagcagaacttat

SEQ ID NO: 30015 - DNA, 19 bp, Homo sapiens
  siRNA target sequence for KNSL7 (NM_020242.1,209-227).
gagcagaacttatgcttat

SEQ ID NO: 30016 - DNA, 19 bp, Homo sapiens
  siRNA target sequence for KNSL7 (NM_020242.1,312-330).
ccactcaggaatctgtatt

SEQ ID NO: 30017 - DNA, 19 bp, Homo sapiens
  siRNA target sequence for KNSL7 (NM_020242.1,332-350).
gcaactgtggctaaaagca

SEQ ID NO: 30018 - DNA, 19 bp, Homo sapiens
  siRNA target sequence for KNSL7 (NM_020242.1,360-378).
cttgcatgagcggttataa

SEQ ID NO: 30019 - DNA, 19 bp, Homo sapiens
  siRNA target sequence for KNSL7 (NM_020242.1,364-382).
catgagcggttataatggt

SEQ ID NO: 30020 - DNA, 19 bp, Homo sapiens
  siRNA target sequence for KNSL7 (NM_020242.1,430-448).
gatgggaccatctgaatct

SEQ ID NO: 30021 - DNA, 19 bp, Homo sapiens
  siRNA target sequence for KNSL7 (NM_020242.1,474-492).
gagtaatcccacgaagttt

SEQ ID NO: 30022 - DNA, 19 bp, Homo sapiens
  siRNA target sequence for KNSL7 (NM_020242.1,482-500).
ccacgaagttttgaatatt

SEQ ID NO: 30023 - DNA, 19 bp, Homo sapiens
  siRNA target sequence for KNSL7 (NM_020242.1,483-501).
cacgaagttttgaatattt

SEQ ID NO: 30024 - DNA, 19 bp, Homo sapiens
  siRNA target sequence for KNSL7 (NM_020242.1,532-550).
ggctggagctggaaagagt

SEQ ID NO: 30025 - DNA, 19 bp, Homo sapiens
  siRNA target sequence for KNSL7 (NM_020242.1,564-582).
gttcctttattgaaatcta

SEQ ID NO: 30026 - DNA, 19 bp, Homo sapiens
  siRNA target sequence for KNSL7 (NM_020242.1,580-598).
ctacaacgagcagatatat

SEQ ID NO: 30027 - DNA, 19 bp, Homo sapiens
  siRNA target sequence for KNSL7 (NM_020242.1,583-601).
caacgagcagatatatgat

SEQ ID NO: 30028 - DNA, 19 bp, Homo sapiens
  siRNA target sequence for KNSL7 (NM_020242.1,615-633).
catcggctggactgtactt

SEQ ID NO: 30029 - DNA, 19 bp, Homo sapiens
  siRNA target sequence for KNSL7 (NM_020242.1,808-826).
gtcaatggagaaaagtaat

SEQ ID NO: 30030 - DNA, 19 bp, Homo sapiens
  siRNA target sequence for KNSL7 (NM_020242.1,903-921).
cagaagggatgagattgaa

SEQ ID NO: 30031 - DNA, 19 bp, Homo sapiens
  siRNA target sequence for KNSL7 (NM_020242.1,926-944).
gcaggtaacataaatcgat

SEQ ID NO: 30032 - DNA, 19 bp, Homo sapiens
  siRNA target sequence for KNSL7 (NM_020242.1,930-948).
gtaacataaatcgatcatt

SEQ ID NO: 30033 - DNA, 19 bp, Homo sapiens
  siRNA target sequence for KNSL7 (NM_020242.1,980-998).
gtcgacgtgggtaatggaa

SEQ ID NO: 30034 - DNA, 19 bp, Homo sapiens
  siRNA target sequence for KNSL7 (NM_020242.1,982-1000).
cgacgtgggtaatggaaaa

SEQ ID NO: 30035 - DNA, 19 bp, Homo sapiens
  siRNA target sequence for KNSL7 (NM_020242.1,986-1004).
gtgggtaatggaaaacaga

SEQ ID NO: 30036 - DNA, 19 bp, Homo sapiens
  siRNA target sequence for KNSL7 (NM_020242.1,1024-1042).
ctccaaacttaccttctta

SEQ ID NO: 30037 - DNA, 19 bp, Homo sapiens
  siRNA target sequence for KNSL7 (NM_020242.1,1069-1087).
caaaacagccataattgca

SEQ ID NO: 30038 - DNA, 19 bp, Homo sapiens
  siRNA target sequence for KNSL7 (NM_020242.1,1074-1092).
cagccataattgcaaatgt

SEQ ID NO: 30039 - DNA, 19 bp, Homo sapiens
  siRNA target sequence for KNSL7 (NM_020242.1,1149-1167).
gagccaagctgattaaaaa

SEQ ID NO: 30040 - DNA, 19 bp, Homo sapiens
  siRNA target sequence for KNSL7 (NM_020242.1,1400-1418).
gaagacctcaccctcaaaa

SEQ ID NO: 30041 - DNA, 19 bp, Homo sapiens
  siRNA target sequence for KNSL7 (NM_020242.1,1459-1477).
ccgagaggatcaaataata

SEQ ID NO: 30042 - DNA, 19 bp, Homo sapiens
  siRNA target sequence for KNSL7 (NM_020242.1,1469-1487).
caaataatacgcttggaaa

SEQ ID NO: 30043 - DNA, 19 bp, Homo sapiens
  siRNA target sequence for KNSL7 (NM_020242.1,1535-1553).
cgtttgctctcagaattaa

SEQ ID NO: 30044 - DNA, 19 bp, Homo sapiens
  siRNA target sequence for KNSL7 (NM_020242.1,1565-1583).
caaactctgcgagaacaaa

SEQ ID NO: 30045 - DNA, 19 bp, Homo sapiens
  siRNA target sequence for KNSL7 (NM_020242.1,1569-1587).
ctctgcgagaacaaataga

SEQ ID NO: 30046 - DNA, 19 bp, Homo sapiens
  siRNA target sequence for KNSL7 (NM_020242.1,1599-1617).
gagttgcaaagtatgctat

SEQ ID NO: 30047 - DNA, 19 bp, Homo sapiens
  siRNA target sequence for KNSL7 (NM_020242.1,1609-1627).
gtatgctatggaaaatcat

SEQ ID NO: 30048 - DNA, 19 bp, Homo sapiens
  siRNA target sequence for KNSL7 (NM_020242.1,1647-1665).
gaagactgagattattaga

SEQ ID NO: 30049 - DNA, 19 bp, Homo sapiens
  siRNA target sequence for KNSL7 (NM_020242.1,1699-1717).
gaccattgcaaaactagaa

SEQ ID NO: 30050 - DNA, 19 bp, Homo sapiens
  siRNA target sequence for KNSL7 (NM_020242.1,1765-1783).
gcaaggattttcacctaaa

SEQ ID NO: 30051 - DNA, 19 bp, Homo sapiens
  siRNA target sequence for KNSL7 (NM_020242.1,1787-1805).
cagaaagagccatgtttgt

SEQ ID NO: 30052 - DNA, 19 bp, Homo sapiens
  siRNA target sequence for KNSL7 (NM_020242.1,1851-1869).
cagagctgaataattcaaa

SEQ ID NO: 30053 - DNA, 19 bp, Homo sapiens
  siRNA target sequence for KNSL7 (NM_020242.1,1942-1960).
gcaaaaagcgaaccttaat

SEQ ID NO: 30054 - DNA, 19 bp, Homo sapiens
  siRNA target sequence for KNSL7 (NM_020242.1,1949-1967).
gcgaaccttaatcttgaaa

SEQ ID NO: 30055 - DNA, 19 bp, Homo sapiens
  siRNA target sequence for KNSL7 (NM_020242.1,1950-1968).
cgaaccttaatcttgaaaa

SEQ ID NO: 30056 - DNA, 19 bp, Homo sapiens
  siRNA target sequence for KNSL7 (NM_020242.1,1954-1972).
ccttaatcttgaaaacctt

SEQ ID NO: 30057 - DNA, 19 bp, Homo sapiens
  siRNA target sequence for KNSL7 (NM_020242.1,1990-2008).
ctgcaagcggcaagaagtt

SEQ ID NO: 30058 - DNA, 19 bp, Homo sapiens
  siRNA target sequence for KNSL7 (NM_020242.1,2003-2021).
gaagtttctcagctgaata

SEQ ID NO: 30059 - DNA, 19 bp, Homo sapiens
  siRNA target sequence for KNSL7 (NM_020242.1,2027-2045).
catgctgaaacacttaaga

SEQ ID NO: 30060 - DNA, 19 bp, Homo sapiens
  siRNA target sequence for KNSL7 (NM_020242.1,2030-2048).
gctgaaacacttaagatta

SEQ ID NO: 30061 - DNA, 19 bp, Homo sapiens
  siRNA target sequence for KNSL7 (NM_020242.1,2082-2100).
cccgaccagtaccaaaatt

SEQ ID NO: 30062 - DNA, 19 bp, Homo sapiens
  siRNA target sequence for KNSL7 (NM_020242.1,2084-2102).
cgaccagtaccaaaattaa

SEQ ID NO: 30063 - DNA, 19 bp, Homo sapiens
  siRNA target sequence for KNSL7 (NM_020242.1,2115-2133).
gaagctttggctctctata

SEQ ID NO: 30064 - DNA, 19 bp, Homo sapiens
  siRNA target sequence for KNSL7 (NM_020242.1,2119-2137).
ctttggctctctatacact

SEQ ID NO: 30065 - DNA, 19 bp, Homo sapiens
  siRNA target sequence for KNSL7 (NM_020242.1,2125-2143).
ctctctatacactcagaat

SEQ ID NO: 30066 - DNA, 19 bp, Homo sapiens
  siRNA target sequence for KNSL7 (NM_020242.1,2178-2196).
cagttcctcctgagatgaa

SEQ ID NO: 30067 - DNA, 19 bp, Homo sapiens
  siRNA target sequence for KNSL7 (NM_020242.1,2428-2446).
gcttcaagagactcaaact

SEQ ID NO: 30068 - DNA, 19 bp, Homo sapiens
  siRNA target sequence for KNSL7 (NM_020242.1,2429-2447).
cttcaagagactcaaacta

SEQ ID NO: 30069 - DNA, 19 bp, Homo sapiens
  siRNA target sequence for KNSL7 (NM_020242.1,2480-2498).
ctgcgagtagtccttcatt

SEQ ID NO: 30070 - DNA, 19 bp, Homo sapiens
  siRNA target sequence for KNSL7 (NM_020242.1,2482-2500).
gcgagtagtccttcattct

SEQ ID NO: 30071 - DNA, 19 bp, Homo sapiens
  siRNA target sequence for KNSL7 (NM_020242.1,2501-2519).
gctgacaaggagctttctt

SEQ ID NO: 30072 - DNA, 19 bp, Homo sapiens
  siRNA target sequence for KNSL7 (NM_020242.1,2509-2527).
ggagctttcttcagtgaaa

SEQ ID NO: 30073 - DNA, 19 bp, Homo sapiens
  siRNA target sequence for KNSL7 (NM_020242.1,2510-2528).
gagctttcttcagtgaaat

SEQ ID NO: 30074 - DNA, 19 bp, Homo sapiens
  siRNA target sequence for KNSL7 (NM_020242.1,2522-2540).
gtgaaattggaatatagtt

SEQ ID NO: 30075 - DNA, 19 bp, Homo sapiens
  siRNA target sequence for KNSL7 (NM_020242.1,2530-2548).
ggaatatagttcattcaaa

SEQ ID NO: 30076 - DNA, 19 bp, Homo sapiens
  siRNA target sequence for KNSL7 (NM_020242.1,2593-2611).
gcatgtacagcttcaatta

SEQ ID NO: 30077 - DNA, 19 bp, Homo sapiens
  siRNA target sequence for KNSL7 (NM_020242.1,2603-2621).
cttcaattagataatctca

SEQ ID NO: 30078 - DNA, 19 bp, Homo sapiens
  siRNA target sequence for KNSL7 (NM_020242.1,2655-2673).
cctgcctacaggattccta

SEQ ID NO: 30079 - DNA, 19 bp, Homo sapiens
  siRNA target sequence for KNSL7 (NM_020242.1,2665-2683).
ggattcctatgacaactta

SEQ ID NO: 30080 - DNA, 19 bp, Homo sapiens
  siRNA target sequence for KNSL7 (NM_020242.1,2670-2688).
cctatgacaacttacaaga

SEQ ID NO: 30081 - DNA, 19 bp, Homo sapiens
  siRNA target sequence for KNSL7 (NM_020242.1,2671-2689).
ctatgacaacttacaagaa

SEQ ID NO: 30082 - DNA, 19 bp, Homo sapiens
  siRNA target sequence for KNSL7 (NM_020242.1,2702-2720).
gagattgaccaactttcaa

SEQ ID NO: 30083 - DNA, 19 bp, Homo sapiens
  siRNA target sequence for KNSL7 (NM_020242.1,2704-2722).
gattgaccaactttcaaga

SEQ ID NO: 30084 - DNA, 19 bp, Homo sapiens
  siRNA target sequence for KNSL7 (NM_020242.1,2718-2736).
caagaaacctccaaaactt

SEQ ID NO: 30085 - DNA, 19 bp, Homo sapiens
  siRNA target sequence for KNSL7 (NM_020242.1,2756-2774).
ctgaaatctgatctgaata

SEQ ID NO: 30086 - DNA, 19 bp, Homo sapiens
  siRNA target sequence for KNSL7 (NM_020242.1,2763-2781).
ctgatctgaataatttgat

SEQ ID NO: 30087 - DNA, 19 bp, Homo sapiens
  siRNA target sequence for KNSL7 (NM_020242.1,2807-2825).
cgcaataacaaattatcat

SEQ ID NO: 30088 - DNA, 19 bp, Homo sapiens
  siRNA target sequence for KNSL7 (NM_020242.1,2885-2903).
gtacgtcaggagaaacaga

SEQ ID NO: 30089 - DNA, 19 bp, Homo sapiens
  siRNA target sequence for KNSL7 (NM_020242.1,2956-2974).
gagcttgcttgctactgaa

SEQ ID NO: 30090 - DNA, 19 bp, Homo sapiens
  siRNA target sequence for KNSL7 (NM_020242.1,2958-2976).
gcttgcttgctactgaaaa

SEQ ID NO: 30091 - DNA, 19 bp, Homo sapiens
  siRNA target sequence for KNSL7 (NM_020242.1,2989-3007).
cctggaaaagtctagagat

SEQ ID NO: 30092 - DNA, 19 bp, Homo sapiens
  siRNA target sequence for KNSL7 (NM_020242.1,2990-3008).
ctggaaaagtctagagatt

SEQ ID NO: 30093 - DNA, 19 bp, Homo sapiens
  siRNA target sequence for KNSL7 (NM_020242.1,3063-3081).
cggtctgtgagaaaacaga

SEQ ID NO: 30094 - DNA, 19 bp, Homo sapiens
  siRNA target sequence for KNSL7 (NM_020242.1,3107-3125).
ctgaaggacataaattgca

SEQ ID NO: 30095 - DNA, 19 bp, Homo sapiens
  siRNA target sequence for KNSL7 (NM_020242.1,3159-3177).
gcagagtgttgatcaagaa

SEQ ID NO: 30096 - DNA, 19 bp, Homo sapiens
  siRNA target sequence for KNSL7 (NM_020242.1,3175-3193).
gaagcaggaagtggatatt

SEQ ID NO: 30097 - DNA, 19 bp, Homo sapiens
  siRNA target sequence for KNSL7 (NM_020242.1,3210-3228).
cccttaggctgagaatact

SEQ ID NO: 30098 - DNA, 19 bp, Homo sapiens
  siRNA target sequence for KNSL7 (NM_020242.1,3216-3234).
ggctgagaatactttctga

SEQ ID NO: 30099 - DNA, 19 bp, Homo sapiens
  siRNA target sequence for KNSL7 (NM_020242.1,3295-3313).
gctcacagaggcctcaaaa

SEQ ID NO: 30100 - DNA, 19 bp, Homo sapiens
  siRNA target sequence for KNSL7 (NM_020242.1,3302-3320).
gaggcctcaaaaaaacact

SEQ ID NO: 30101 - DNA, 19 bp, Homo sapiens
  siRNA target sequence for KNSL7 (NM_020242.1,3455-3473).
ctagaacatgtgatggatt

SEQ ID NO: 30102 - DNA, 19 bp, Homo sapiens
  siRNA target sequence for KNSL7 (NM_020242.1,3566-3584).
gatggaagagcctctaaga

SEQ ID NO: 30103 - DNA, 19 bp, Homo sapiens
  siRNA target sequence for KNSL7 (NM_020242.1,3569-3587).
ggaagagcctctaagactt

SEQ ID NO: 30104 - DNA, 19 bp, Homo sapiens
  siRNA target sequence for KNSL7 (NM_020242.1,3596-3614).
caccttgtaacaaagctaa

SEQ ID NO: 30105 - DNA, 19 bp, Homo sapiens
  siRNA target sequence for KNSL7 (NM_020242.1,3639-3657).
ctgaaatcctcagaatgaa

SEQ ID NO: 30106 - DNA, 19 bp, Homo sapiens
  siRNA target sequence for KNSL7 (NM_020242.1,3890-3908).
gtccaaagtgccctttaca

SEQ ID NO: 30107 - DNA, 19 bp, Homo sapiens
  siRNA target sequence for KNSL7 (NM_020242.1,3914-3932).
gagatggaatgccttagaa

SEQ ID NO: 30108 - DNA, 19 bp, Homo sapiens
  siRNA target sequence for KNSL7 (NM_020242.1,3919-3937).
ggaatgccttagaatgact

SEQ ID NO: 30109 - DNA, 19 bp, Homo sapiens
  siRNA target sequence for KNSL7 (NM_020242.1,3944-3962).
gtcgaacgaacccaaactt

SEQ ID NO: 30110 - DNA, 19 bp, Homo sapiens
  siRNA target sequence for KNSL7 (NM_020242.1,3955-3973).
ccaaactttggagtctaaa

SEQ ID NO: 30111 - DNA, 19 bp, Homo sapiens
  siRNA target sequence for KNSL7 (NM_020242.1,4189-4207).
gttgcgtgccgaaaatgta

SEQ ID NO: 30112 - DNA, 19 bp, Homo sapiens
  siRNA target sequence for KNSL7 (NM_020242.1,4192-4210).
gcgtgccgaaaatgtattt

SEQ ID NO: 30113 - DNA, 19 bp, Homo sapiens
  siRNA target sequence for LAF4 (NM_002285.1,175-193).
caggatgatggcacgttta

SEQ ID NO: 30114 - DNA, 19 bp, Homo sapiens
  siRNA target sequence for LAF4 (NM_002285.1,184-202).
ggcacgtttaattctagtt

SEQ ID NO: 30115 - DNA, 19 bp, Homo sapiens
  siRNA target sequence for LAF4 (NM_002285.1,185-203).
gcacgtttaattctagtta

SEQ ID NO: 30116 - DNA, 19 bp, Homo sapiens
  siRNA target sequence for LAF4 (NM_002285.1,230-248).
ctaacaagggggatgaact

SEQ ID NO: 30117 - DNA, 19 bp, Homo sapiens
  siRNA target sequence for LAF4 (NM_002285.1,255-273).
ccggatccagaacacttta

SEQ ID NO: 30118 - DNA, 19 bp, Homo sapiens
  siRNA target sequence for LAF4 (NM_002285.1,264-282).
gaacactttaggcaattat

SEQ ID NO: 30119 - DNA, 19 bp, Homo sapiens
  siRNA target sequence for LAF4 (NM_002285.1,269-287).
ctttaggcaattatgatga

SEQ ID NO: 30120 - DNA, 19 bp, Homo sapiens
  siRNA target sequence for LAF4 (NM_002285.1,358-376).
cagactcctgtgaacaaga

SEQ ID NO: 30121 - DNA, 19 bp, Homo sapiens
  siRNA target sequence for LAF4 (NM_002285.1,372-390).
caagatcgatgaacatttt

SEQ ID NO: 30122 - DNA, 19 bp, Homo sapiens
  siRNA target sequence for LAF4 (NM_002285.1,375-393).
gatcgatgaacattttgtt

SEQ ID NO: 30123 - DNA, 19 bp, Homo sapiens
  siRNA target sequence for LAF4 (NM_002285.1,414-432).
ccagccctcgtctatctgt

SEQ ID NO: 30124 - DNA, 19 bp, Homo sapiens
  siRNA target sequence for LAF4 (NM_002285.1,415-433).
cagccctcgtctatctgta

SEQ ID NO: 30125 - DNA, 19 bp, Homo sapiens
  siRNA target sequence for LAF4 (NM_002285.1,680-698).
gcggacactgtgttcagaa

SEQ ID NO: 30126 - DNA, 19 bp, Homo sapiens
  siRNA target sequence for LAF4 (NM_002285.1,683-701).
gacactgtgttcagaactt

SEQ ID NO: 30127 - DNA, 19 bp, Homo sapiens
  siRNA target sequence for LAF4 (NM_002285.1,992-1010).
caccactttctgctattca

SEQ ID NO: 30128 - DNA, 19 bp, Homo sapiens
  siRNA target sequence for LAF4 (NM_002285.1,1027-1045).
gaaccaaccaaatttccat

SEQ ID NO: 30129 - DNA, 19 bp, Homo sapiens
  siRNA target sequence for LAF4 (NM_002285.1,1069-1087).
gtatcctctggacacaata

SEQ ID NO: 30130 - DNA, 19 bp, Homo sapiens
  siRNA target sequence for LAF4 (NM_002285.1,1074-1092).
ctctggacacaataatcca

SEQ ID NO: 30131 - DNA, 19 bp, Homo sapiens
  siRNA target sequence for LAF4 (NM_002285.1,1076-1094).
ctggacacaataatccaaa

SEQ ID NO: 30132 - DNA, 19 bp, Homo sapiens
  siRNA target sequence for LAF4 (NM_002285.1,1152-1170).
ggaagatgaccttaagcta

SEQ ID NO: 30133 - DNA, 19 bp, Homo sapiens
  siRNA target sequence for LAF4 (NM_002285.1,1429-1447).
gaaccggcatcctctaaca

SEQ ID NO: 30134 - DNA, 19 bp, Homo sapiens
  siRNA target sequence for LAF4 (NM_002285.1,1432-1450).
ccggcatcctctaacaagt

SEQ ID NO: 30135 - DNA, 19 bp, Homo sapiens
  siRNA target sequence for LAF4 (NM_002285.1,1486-1504).
cacaagcctcctattctga

SEQ ID NO: 30136 - DNA, 19 bp, Homo sapiens
  siRNA target sequence for LAF4 (NM_002285.1,1496-1514).
ctattctgatccaaaatga

SEQ ID NO: 30137 - DNA, 19 bp, Homo sapiens
  siRNA target sequence for LAF4 (NM_002285.1,1523-1541).
ggtcagagagcaatcagta

SEQ ID NO: 30138 - DNA, 19 bp, Homo sapiens
  siRNA target sequence for LAF4 (NM_002285.1,2033-2051).
ccaaatccaaggagttcat

SEQ ID NO: 30139 - DNA, 19 bp, Homo sapiens
  siRNA target sequence for LAF4 (NM_002285.1,2348-2366).
ctctctgggtcaaaatcga

SEQ ID NO: 30140 - DNA, 19 bp, Homo sapiens
  siRNA target sequence for LAF4 (NM_002285.1,2640-2658).
caacagtgtggcaatacca

SEQ ID NO: 30141 - DNA, 19 bp, Homo sapiens
  siRNA target sequence for LAF4 (NM_002285.1,2643-2661).
cagtgtggcaataccaata

SEQ ID NO: 30142 - DNA, 19 bp, Homo sapiens
  siRNA target sequence for LAF4 (NM_002285.1,2645-2663).
gtgtggcaataccaataaa

SEQ ID NO: 30143 - DNA, 19 bp, Homo sapiens
  siRNA target sequence for LAF4 (NM_002285.1,2699-2717).
ccctctctgatgcatctaa

SEQ ID NO: 30144 - DNA, 19 bp, Homo sapiens
  siRNA target sequence for LAF4 (NM_002285.1,2700-2718).
cctctctgatgcatctaaa

SEQ ID NO: 30145 - DNA, 19 bp, Homo sapiens
  siRNA target sequence for LAF4 (NM_002285.1,2705-2723).
ctgatgcatctaaacacaa

SEQ ID NO: 30146 - DNA, 19 bp, Homo sapiens
  siRNA target sequence for LAF4 (NM_002285.1,2730-2748).
cagcgaggacttaacttct

SEQ ID NO: 30147 - DNA, 19 bp, Homo sapiens
  siRNA target sequence for LAF4 (NM_002285.1,2755-2773).
cgacctaatggcaacagtt

SEQ ID NO: 30148 - DNA, 19 bp, Homo sapiens
  siRNA target sequence for LAF4 (NM_002285.1,2756-2774).
gacctaatggcaacagttt

SEQ ID NO: 30149 - DNA, 19 bp, Homo sapiens
  siRNA target sequence for LAF4 (NM_002285.1,2758-2776).
cctaatggcaacagtttgt

SEQ ID NO: 30150 - DNA, 19 bp, Homo sapiens
  siRNA target sequence for LAF4 (NM_002285.1,2764-2782).
ggcaacagtttgtttactt

SEQ ID NO: 30151 - DNA, 19 bp, Homo sapiens
  siRNA target sequence for LAF4 (NM_002285.1,2847-2865).
gaaagcagctcacaacaat

SEQ ID NO: 30152 - DNA, 19 bp, Homo sapiens
  siRNA target sequence for LAF4 (NM_002285.1,2942-2960).
gcaagaggcagaaacttgt

SEQ ID NO: 30153 - DNA, 19 bp, Homo sapiens
  siRNA target sequence for LAF4 (NM_002285.1,2973-2991).
gcctcgcagtgccgattat

SEQ ID NO: 30154 - DNA, 19 bp, Homo sapiens
  siRNA target sequence for LAF4 (NM_002285.1,2974-2992).
cctcgcagtgccgattatt

SEQ ID NO: 30155 - DNA, 19 bp, Homo sapiens
  siRNA target sequence for LAF4 (NM_002285.1,2975-2993).
ctcgcagtgccgattattt

SEQ ID NO: 30156 - DNA, 19 bp, Homo sapiens
  siRNA target sequence for LAF4 (NM_002285.1,2977-2995).
cgcagtgccgattatttta

SEQ ID NO: 30157 - DNA, 19 bp, Homo sapiens
  siRNA target sequence for LAF4 (NM_002285.1,2978-2996).
gcagtgccgattattttat

SEQ ID NO: 30158 - DNA, 19 bp, Homo sapiens
  siRNA target sequence for LAF4 (NM_002285.1,3004-3022).
gctaaacgaatgaagcata

SEQ ID NO: 30159 - DNA, 19 bp, Homo sapiens
  siRNA target sequence for LAF4 (NM_002285.1,3005-3023).
ctaaacgaatgaagcataa

SEQ ID NO: 30160 - DNA, 19 bp, Homo sapiens
  siRNA target sequence for LAF4 (NM_002285.1,3074-3092).
cagcattgtcgtttatcga

SEQ ID NO: 30161 - DNA, 19 bp, Homo sapiens
  siRNA target sequence for LAF4 (NM_002285.1,3115-3133).
ggccccatggaatccaaat

SEQ ID NO: 30162 - DNA, 19 bp, Homo sapiens
  siRNA target sequence for LAF4 (NM_002285.1,3117-3135).
ccccatggaatccaaatct

SEQ ID NO: 30163 - DNA, 19 bp, Homo sapiens
  siRNA target sequence for LAF4 (NM_002285.1,3147-3165).
gatgtattcagaaacagta

SEQ ID NO: 30164 - DNA, 19 bp, Homo sapiens
  siRNA target sequence for LAF4 (NM_002285.1,3176-3194).
ggtatgctatgagactaaa

SEQ ID NO: 30165 - DNA, 19 bp, Homo sapiens
  siRNA target sequence for LAF4 (NM_002285.1,3177-3195).
gtatgctatgagactaaaa

SEQ ID NO: 30166 - DNA, 19 bp, Homo sapiens
  siRNA target sequence for LAF4 (NM_002285.1,3232-3250).
caactggctgcattatgtt

SEQ ID NO: 30167 - DNA, 19 bp, Homo sapiens
  siRNA target sequence for LAF4 (NM_002285.1,3267-3285).
cctgtactggcggatgttt

SEQ ID NO: 30168 - DNA, 19 bp, Homo sapiens
  siRNA target sequence for LAF4 (NM_002285.1,3276-3294).
gcggatgtttcgactcaaa

SEQ ID NO: 30169 - DNA, 19 bp, Homo sapiens
  siRNA target sequence for LAF4 (NM_002285.1,3277-3295).
cggatgtttcgactcaaaa

SEQ ID NO: 30170 - DNA, 19 bp, Homo sapiens
  siRNA target sequence for LAF4 (NM_002285.1,3301-3319).
cacgctgtaaagtattcaa

SEQ ID NO: 30171 - DNA, 19 bp, Homo sapiens
  siRNA target sequence for LAF4 (NM_002285.1,3303-3321).
cgctgtaaagtattcaaaa

SEQ ID NO: 30172 - DNA, 19 bp, Homo sapiens
  siRNA target sequence for LAF4 (NM_002285.1,3322-3340).
gcactaatcgactatttca

SEQ ID NO: 30173 - DNA, 19 bp, Homo sapiens
  siRNA target sequence for LAF4 (NM_002285.1,3323-3341).
cactaatcgactatttcaa

SEQ ID NO: 30174 - DNA, 19 bp, Homo sapiens
  siRNA target sequence for LAF4 (NM_002285.1,3325-3343).
ctaatcgactatttcaaga

SEQ ID NO: 30175 - DNA, 19 bp, Homo sapiens
  siRNA target sequence for LAF4 (NM_002285.1,3602-3620).
ccaaggaaaaccgagaatt

SEQ ID NO: 30176 - DNA, 19 bp, Homo sapiens
  siRNA target sequence for LAF4 (NM_002285.1,3607-3625).
gaaaaccgagaattcttca

SEQ ID NO: 30177 - DNA, 19 bp, Homo sapiens
  siRNA target sequence for LBR (NM_002296.2,270-288).
gatggaacagagcttgaat

SEQ ID NO: 30178 - DNA, 19 bp, Homo sapiens
  siRNA target sequence for LBR (NM_002296.2,300-318).
gatattaagcctttaactt

SEQ ID NO: 30179 - DNA, 19 bp, Homo sapiens
  siRNA target sequence for LBR (NM_002296.2,401-419).
ccctggtcgaccacctaaa

SEQ ID NO: 30180 - DNA, 19 bp, Homo sapiens
  siRNA target sequence for LBR (NM_002296.2,402-420).
cctggtcgaccacctaaaa

SEQ ID NO: 30181 - DNA, 19 bp, Homo sapiens
  siRNA target sequence for LBR (NM_002296.2,445-463).
cccaccaggccgacattaa

SEQ ID NO: 30182 - DNA, 19 bp, Homo sapiens
  siRNA target sequence for LBR (NM_002296.2,546-564).
gagcctgagcatattgaga

SEQ ID NO: 30183 - DNA, 19 bp, Homo sapiens
  siRNA target sequence for LBR (NM_002296.2,565-583).
gaaatgacgcacctcataa

SEQ ID NO: 30184 - DNA, 19 bp, Homo sapiens
  siRNA target sequence for LBR (NM_002296.2,572-590).
cgcacctcataaaaataca

SEQ ID NO: 30185 - DNA, 19 bp, Homo sapiens
  siRNA target sequence for LBR (NM_002296.2,688-706).
ctaaggaagaaaaatacgt

SEQ ID NO: 30186 - DNA, 19 bp, Homo sapiens
  siRNA target sequence for LBR (NM_002296.2,852-870).
gatcccagtcttctgaatt

SEQ ID NO: 30187 - DNA, 19 bp, Homo sapiens
  siRNA target sequence for LBR (NM_002296.2,880-898).
ctttgccagctttgtatga

SEQ ID NO: 30188 - DNA, 19 bp, Homo sapiens
  siRNA target sequence for LBR (NM_002296.2,884-902).
gccagctttgtatgagtta

SEQ ID NO: 30189 - DNA, 19 bp, Homo sapiens
  siRNA target sequence for LBR (NM_002296.2,924-942).
gtctacctcctgtggtttt

SEQ ID NO: 30190 - DNA, 19 bp, Homo sapiens
  siRNA target sequence for LBR (NM_002296.2,929-947).
cctcctgtggtttttgatt

SEQ ID NO: 30191 - DNA, 19 bp, Homo sapiens
  siRNA target sequence for LBR (NM_002296.2,959-977).
ctacctactgccaattgga

SEQ ID NO: 30192 - DNA, 19 bp, Homo sapiens
  siRNA target sequence for LBR (NM_002296.2,1012-1030).
gaagactcaagtatagatt

SEQ ID NO: 30193 - DNA, 19 bp, Homo sapiens
  siRNA target sequence for LBR (NM_002296.2,1019-1037).
caagtatagattaaatgga

SEQ ID NO: 30194 - DNA, 19 bp, Homo sapiens
  siRNA target sequence for LBR (NM_002296.2,1085-1103).
ccagggcgtagagtttcat

SEQ ID NO: 30195 - DNA, 19 bp, Homo sapiens
  siRNA target sequence for LBR (NM_002296.2,1086-1104).
cagggcgtagagtttcatt

SEQ ID NO: 30196 - DNA, 19 bp, Homo sapiens
  siRNA target sequence for LBR (NM_002296.2,1090-1108).
gcgtagagtttcattacgt

SEQ ID NO: 30197 - DNA, 19 bp, Homo sapiens
  siRNA target sequence for LBR (NM_002296.2,1131-1149).
gcacttgcggccactgttt

SEQ ID NO: 30198 - DNA, 19 bp, Homo sapiens
  siRNA target sequence for LBR (NM_002296.2,1134-1152).
cttgcggccactgtttttt

SEQ ID NO: 30199 - DNA, 19 bp, Homo sapiens
  siRNA target sequence for LBR (NM_002296.2,1175-1193).
ctacatgcgctctttgaaa

SEQ ID NO: 30200 - DNA, 19 bp, Homo sapiens
  siRNA target sequence for LBR (NM_002296.2,1225-1243).
ctggaaatgctgtctatga

SEQ ID NO: 30201 - DNA, 19 bp, Homo sapiens
  siRNA target sequence for LBR (NM_002296.2,1270-1288).
ctcgaattggtacttttga

SEQ ID NO: 30202 - DNA, 19 bp, Homo sapiens
  siRNA target sequence for LBR (NM_002296.2,1322-1340).
gattggatgggtggttatt

SEQ ID NO: 30203 - DNA, 19 bp, Homo sapiens
  siRNA target sequence for LBR (NM_002296.2,1326-1344).
ggatgggtggttattaact

SEQ ID NO: 30204 - DNA, 19 bp, Homo sapiens
  siRNA target sequence for LBR (NM_002296.2,1327-1345).
gatgggtggttattaactt

SEQ ID NO: 30205 - DNA, 19 bp, Homo sapiens
  siRNA target sequence for LBR (NM_002296.2,1389-1407).
ccatccttggccatgattt

SEQ ID NO: 30206 - DNA, 19 bp, Homo sapiens
  siRNA target sequence for LBR (NM_002296.2,1393-1411).
ccttggccatgattttagt

SEQ ID NO: 30207 - DNA, 19 bp, Homo sapiens
  siRNA target sequence for LBR (NM_002296.2,1394-1412).
cttggccatgattttagtt

SEQ ID NO: 30208 - DNA, 19 bp, Homo sapiens
  siRNA target sequence for LBR (NM_002296.2,1398-1416).
gccatgattttagttaata

SEQ ID NO: 30209 - DNA, 19 bp, Homo sapiens
  siRNA target sequence for LBR (NM_002296.2,1400-1418).
catgattttagttaatagt

SEQ ID NO: 30210 - DNA, 19 bp, Homo sapiens
  siRNA target sequence for LBR (NM_002296.2,1484-1502).
catccacgatggatttgga

SEQ ID NO: 30211 - DNA, 19 bp, Homo sapiens
  siRNA target sequence for LBR (NM_002296.2,1595-1613).
gccaatggcttctctaatt

SEQ ID NO: 30212 - DNA, 19 bp, Homo sapiens
  siRNA target sequence for LBR (NM_002296.2,1606-1624).
ctctaattattgttctgaa

SEQ ID NO: 30213 - DNA, 19 bp, Homo sapiens
  siRNA target sequence for LBR (NM_002296.2,1729-1747).
caacgggaaaaaatcttct

SEQ ID NO: 30214 - DNA, 19 bp, Homo sapiens
  siRNA target sequence for LBR (NM_002296.2,1732-1750).
cgggaaaaaatcttctagt

SEQ ID NO: 30215 - DNA, 19 bp, Homo sapiens
  siRNA target sequence for LBR (NM_002296.2,1734-1752).
ggaaaaaatcttctagttt

SEQ ID NO: 30216 - DNA, 19 bp, Homo sapiens
  siRNA target sequence for LBR (NM_002296.2,1770-1788).
gttcgccaccccaattact

SEQ ID NO: 30217 - DNA, 19 bp, Homo sapiens
  siRNA target sequence for LBR (NM_002296.2,1817-1835).
gtccctcccatgtggtttt

SEQ ID NO: 30218 - DNA, 19 bp, Homo sapiens
  siRNA target sequence for LBR (NM_002296.2,1819-1837).
ccctcccatgtggttttaa

SEQ ID NO: 30219 - DNA, 19 bp, Homo sapiens
  siRNA target sequence for LBR (NM_002296.2,1900-1918).
gtgacgagtaccactgtaa

SEQ ID NO: 30220 - DNA, 19 bp, Homo sapiens
  siRNA target sequence for LBR (NM_002296.2,1902-1920).
gacgagtaccactgtaaga

SEQ ID NO: 30221 - DNA, 19 bp, Homo sapiens
  siRNA target sequence for LBR (NM_002296.2,1905-1923).
gagtaccactgtaagaaga

SEQ ID NO: 30222 - DNA, 19 bp, Homo sapiens
  siRNA target sequence for LBR (NM_002296.2,1929-1947).
ggcgtggcttgggaaaagt

SEQ ID NO: 30223 - DNA, 19 bp, Homo sapiens
  siRNA target sequence for LBR (NM_002296.2,1930-1948).
gcgtggcttgggaaaagta

SEQ ID NO: 30224 - DNA, 19 bp, Homo sapiens
  siRNA target sequence for LBR (NM_002296.2,1956-1974).
cgtgtgccctaccgtatat

SEQ ID NO: 30225 - DNA, 19 bp, Homo sapiens
  siRNA target sequence for LBR (NM_002296.2,1957-1975).
gtgtgccctaccgtatatt

SEQ ID NO: 30226 - DNA, 19 bp, Homo sapiens
  siRNA target sequence for LBR (NM_002296.2,1961-1979).
gccctaccgtatatttcca

SEQ ID NO: 30227 - DNA, 19 bp, Homo sapiens
  siRNA target sequence for LBR (NM_002296.2,1962-1980).
ccctaccgtatatttccat

SEQ ID NO: 30228 - DNA, 19 bp, Homo sapiens
  siRNA target sequence for LBR (NM_002296.2,1968-1986).
cgtatatttccatacatct

SEQ ID NO: 30229 - DNA, 19 bp, Homo sapiens
  siRNA target sequence for LCX (NM_030625.1,229-247).
caaggccttccagattagt

SEQ ID NO: 30230 - DNA, 19 bp, Homo sapiens
  siRNA target sequence for LCX (NM_030625.1,324-342).
gcatcagtcaagactttaa

SEQ ID NO: 30231 - DNA, 19 bp, Homo sapiens
  siRNA target sequence for LCX (NM_030625.1,441-459).
ggagcagcacgcatgaatt

SEQ ID NO: 30232 - DNA, 19 bp, Homo sapiens
  siRNA target sequence for LCX (NM_030625.1,442-460).
gagcagcacgcatgaattt

SEQ ID NO: 30233 - DNA, 19 bp, Homo sapiens
  siRNA target sequence for LCX (NM_030625.1,445-463).
cagcacgcatgaatttgga

SEQ ID NO: 30234 - DNA, 19 bp, Homo sapiens
  siRNA target sequence for LCX (NM_030625.1,462-480).
gataggactgaggttcttt

SEQ ID NO: 30235 - DNA, 19 bp, Homo sapiens
  siRNA target sequence for LCX (NM_030625.1,483-501).
cagaacccagagtccttaa

SEQ ID NO: 30236 - DNA, 19 bp, Homo sapiens
  siRNA target sequence for LCX (NM_030625.1,502-520).
cctgcaatgggtttacaat

SEQ ID NO: 30237 - DNA, 19 bp, Homo sapiens
  siRNA target sequence for LCX (NM_030625.1,525-543).
ctacgaagcacctctctta

SEQ ID NO: 30238 - DNA, 19 bp, Homo sapiens
  siRNA target sequence for LCX (NM_030625.1,567-585).
ctggtcgtagccaaatcca

SEQ ID NO: 30239 - DNA, 19 bp, Homo sapiens
  siRNA target sequence for LCX (NM_030625.1,569-587).
ggtcgtagccaaatccaaa

SEQ ID NO: 30240 - DNA, 19 bp, Homo sapiens
  siRNA target sequence for LCX (NM_030625.1,570-588).
gtcgtagccaaatccaaaa

SEQ ID NO: 30241 - DNA, 19 bp, Homo sapiens
  siRNA target sequence for LCX (NM_030625.1,595-613).
cactttctaagggtttaga

SEQ ID NO: 30242 - DNA, 19 bp, Homo sapiens
  siRNA target sequence for LCX (NM_030625.1,607-625).
gtttagaaaagcaacatga

SEQ ID NO: 30243 - DNA, 19 bp, Homo sapiens
  siRNA target sequence for LCX (NM_030625.1,698-716).
ccaagtccttcctgatata

SEQ ID NO: 30244 - DNA, 19 bp, Homo sapiens
  siRNA target sequence for LCX (NM_030625.1,702-720).
gtccttcctgatatagaga

SEQ ID NO: 30245 - DNA, 19 bp, Homo sapiens
  siRNA target sequence for LCX (NM_030625.1,708-726).
cctgatatagagactctaa

SEQ ID NO: 30246 - DNA, 19 bp, Homo sapiens
  siRNA target sequence for LCX (NM_030625.1,709-727).
ctgatatagagactctaat

SEQ ID NO: 30247 - DNA, 19 bp, Homo sapiens
  siRNA target sequence for LCX (NM_030625.1,719-737).
gactctaattggtgtacaa

SEQ ID NO: 30248 - DNA, 19 bp, Homo sapiens
  siRNA target sequence for LCX (NM_030625.1,735-753).
caaaatccctctttactta

SEQ ID NO: 30249 - DNA, 19 bp, Homo sapiens
  siRNA target sequence for LCX (NM_030625.1,768-786).
gagacaactcagttttggt

SEQ ID NO: 30250 - DNA, 19 bp, Homo sapiens
  siRNA target sequence for LCX (NM_030625.1,779-797).
gttttggtcccaaagagtt

SEQ ID NO: 30251 - DNA, 19 bp, Homo sapiens
  siRNA target sequence for LCX (NM_030625.1,798-816).
gaggattccaagatcaata

SEQ ID NO: 30252 - DNA, 19 bp, Homo sapiens
  siRNA target sequence for LCX (NM_030625.1,916-934).
ccagtggttccccaaaaat

SEQ ID NO: 30253 - DNA, 19 bp, Homo sapiens
  siRNA target sequence for LCX (NM_030625.1,999-1017).
ggaaaccccagcattcagt

SEQ ID NO: 30254 - DNA, 19 bp, Homo sapiens
  siRNA target sequence for LCX (NM_030625.1,1000-1018).
gaaaccccagcattcagtt

SEQ ID NO: 30255 - DNA, 19 bp, Homo sapiens
  siRNA target sequence for LCX (NM_030625.1,1025-1043).
gttgggttcacgagtagaa

SEQ ID NO: 30256 - DNA, 19 bp, Homo sapiens
  siRNA target sequence for LCX (NM_030625.1,1030-1048).
gttcacgagtagaatctct

SEQ ID NO: 30257 - DNA, 19 bp, Homo sapiens
  siRNA target sequence for LCX (NM_030625.1,1033-1051).
cacgagtagaatctcttaa

SEQ ID NO: 30258 - DNA, 19 bp, Homo sapiens
  siRNA target sequence for LCX (NM_030625.1,1035-1053).
cgagtagaatctcttaagt

SEQ ID NO: 30259 - DNA, 19 bp, Homo sapiens
  siRNA target sequence for LCX (NM_030625.1,1075-1093).
ccattaaaagtgaacatga

SEQ ID NO: 30260 - DNA, 19 bp, Homo sapiens
  siRNA target sequence for LCX (NM_030625.1,1076-1094).
cattaaaagtgaacatgat

SEQ ID NO: 30261 - DNA, 19 bp, Homo sapiens
  siRNA target sequence for LCX (NM_030625.1,1101-1119).
cccacctccagtcttaata

SEQ ID NO: 30262 - DNA, 19 bp, Homo sapiens
  siRNA target sequence for LCX (NM_030625.1,1102-1120).
ccacctccagtcttaataa

SEQ ID NO: 30263 - DNA, 19 bp, Homo sapiens
  siRNA target sequence for LCX (NM_030625.1,1105-1123).
cctccagtcttaataaggt

SEQ ID NO: 30264 - DNA, 19 bp, Homo sapiens
  siRNA target sequence for LCX (NM_030625.1,1106-1124).
ctccagtcttaataaggtt

SEQ ID NO: 30265 - DNA, 19 bp, Homo sapiens
  siRNA target sequence for LCX (NM_030625.1,1128-1146).
cctgacttgaaccttagaa

SEQ ID NO: 30266 - DNA, 19 bp, Homo sapiens
  siRNA target sequence for LCX (NM_030625.1,1171-1189).
cgtctcctacctctgtaat

SEQ ID NO: 30267 - DNA, 19 bp, Homo sapiens
  siRNA target sequence for LCX (NM_030625.1,1220-1238).
gacccttggtgctaaacca

SEQ ID NO: 30268 - DNA, 19 bp, Homo sapiens
  siRNA target sequence for LCX (NM_030625.1,1228-1246).
gtgctaaaccagatcatca

SEQ ID NO: 30269 - DNA, 19 bp, Homo sapiens
  siRNA target sequence for LCX (NM_030625.1,1253-1271).
cttcgaagctactgcaaat

SEQ ID NO: 30270 - DNA, 19 bp, Homo sapiens
  siRNA target sequence for LCX (NM_030625.1,1317-1335).
ggtgctatcccacatcaat

SEQ ID NO: 30271 - DNA, 19 bp, Homo sapiens
  siRNA target sequence for LCX (NM_030625.1,1376-1394).
gggtgagaccccagatcta

SEQ ID NO: 30272 - DNA, 19 bp, Homo sapiens
  siRNA target sequence for LCX (NM_030625.1,1385-1403).
cccagatctaccagagatt

SEQ ID NO: 30273 - DNA, 19 bp, Homo sapiens
  siRNA target sequence for LCX (NM_030625.1,1426-1444).
gagaggtctttggtactat

SEQ ID NO: 30274 - DNA, 19 bp, Homo sapiens
  siRNA target sequence for LCX (NM_030625.1,1441-1459).
ctattttagaccaacaaga

SEQ ID NO: 30275 - DNA, 19 bp, Homo sapiens
  siRNA target sequence for LCX (NM_030625.1,1515-1533).
cctccaaatccaattgcta

SEQ ID NO: 30276 - DNA, 19 bp, Homo sapiens
  siRNA target sequence for LCX (NM_030625.1,1591-1609).
cagtccagggtgctataca

SEQ ID NO: 30277 - DNA, 19 bp, Homo sapiens
  siRNA target sequence for LCX (NM_030625.1,1593-1611).
gtccagggtgctatacaga

SEQ ID NO: 30278 - DNA, 19 bp, Homo sapiens
  siRNA target sequence for LCX (NM_030625.1,1596-1614).
cagggtgctatacagattt

SEQ ID NO: 30279 - DNA, 19 bp, Homo sapiens
  siRNA target sequence for LCX (NM_030625.1,1629-1647).
ggacacactcctcaatcat

SEQ ID NO: 30280 - DNA, 19 bp, Homo sapiens
  siRNA target sequence for LCX (NM_030625.1,1634-1652).
cactcctcaatcatcatca

SEQ ID NO: 30281 - DNA, 19 bp, Homo sapiens
  siRNA target sequence for LCX (NM_030625.1,1638-1656).
cctcaatcatcatcaaact

SEQ ID NO: 30282 - DNA, 19 bp, Homo sapiens
  siRNA target sequence for LCX (NM_030625.1,1678-1696).
cagtaatggctataagcaa

SEQ ID NO: 30283 - DNA, 19 bp, Homo sapiens
  siRNA target sequence for LCX (NM_030625.1,1727-1745).
cttcctgccagctaacact

SEQ ID NO: 30284 - DNA, 19 bp, Homo sapiens
  siRNA target sequence for LCX (NM_030625.1,1812-1830).
caggctggtcctagcaaat

SEQ ID NO: 30285 - DNA, 19 bp, Homo sapiens
  siRNA target sequence for LCX (NM_030625.1,1814-1832).
ggctggtcctagcaaatca

SEQ ID NO: 30286 - DNA, 19 bp, Homo sapiens
  siRNA target sequence for LCX (NM_030625.1,1816-1834).
ctggtcctagcaaatcaga

SEQ ID NO: 30287 - DNA, 19 bp, Homo sapiens
  siRNA target sequence for LCX (NM_030625.1,1861-1879).
ccagcacagttcatgttgt

SEQ ID NO: 30288 - DNA, 19 bp, Homo sapiens
  siRNA target sequence for LCX (NM_030625.1,1864-1882).
gcacagttcatgttgtcaa

SEQ ID NO: 30289 - DNA, 19 bp, Homo sapiens
  siRNA target sequence for LCX (NM_030625.1,1947-1965).
ctaccgactttggaaaaga

SEQ ID NO: 30290 - DNA, 19 bp, Homo sapiens
  siRNA target sequence for LCX (NM_030625.1,2217-2235).
gaatccatggactacagta

SEQ ID NO: 30291 - DNA, 19 bp, Homo sapiens
  siRNA target sequence for LCX (NM_030625.1,2239-2257).
gtggtcatggggaagaaca

SEQ ID NO: 30292 - DNA, 19 bp, Homo sapiens
  siRNA target sequence for LCX (NM_030625.1,2241-2259).
ggtcatggggaagaacaaa

SEQ ID NO: 30293 - DNA, 19 bp, Homo sapiens
  siRNA target sequence for LCX (NM_030625.1,2248-2266).
gggaagaacaaaaattgga

SEQ ID NO: 30294 - DNA, 19 bp, Homo sapiens
  siRNA target sequence for LCX (NM_030625.1,2253-2271).
gaacaaaaattggaattga

SEQ ID NO: 30295 - DNA, 19 bp, Homo sapiens
  siRNA target sequence for LCX (NM_030625.1,2264-2282).
ggaattgaacccacatact

SEQ ID NO: 30296 - DNA, 19 bp, Homo sapiens
  siRNA target sequence for LCX (NM_030625.1,2270-2288).
gaacccacatactgttgaa

SEQ ID NO: 30297 - DNA, 19 bp, Homo sapiens
  siRNA target sequence for LCX (NM_030625.1,2273-2291).
cccacatactgttgaaaat

SEQ ID NO: 30298 - DNA, 19 bp, Homo sapiens
  siRNA target sequence for LCX (NM_030625.1,2348-2366).
caagaaatcacagttaact

SEQ ID NO: 30299 - DNA, 19 bp, Homo sapiens
  siRNA target sequence for LCX (NM_030625.1,2370-2388).
cacgtgaaaggagatttta

SEQ ID NO: 30300 - DNA, 19 bp, Homo sapiens
  siRNA target sequence for LCX (NM_030625.1,2372-2390).
cgtgaaaggagattttagt

SEQ ID NO: 30301 - DNA, 19 bp, Homo sapiens
  siRNA target sequence for LCX (NM_030625.1,2380-2398).
gagattttagtgctaatgt

SEQ ID NO: 30302 - DNA, 19 bp, Homo sapiens
  siRNA target sequence for LCX (NM_030625.1,2423-2441).
ctctgaagttgacaagaaa

SEQ ID NO: 30303 - DNA, 19 bp, Homo sapiens
  siRNA target sequence for LCX (NM_030625.1,2435-2453).
caagaaacgaaccaaatct

SEQ ID NO: 30304 - DNA, 19 bp, Homo sapiens
  siRNA target sequence for LCX (NM_030625.1,2452-2470).
ctccaaaattgtttgtaca

SEQ ID NO: 30305 - DNA, 19 bp, Homo sapiens
  siRNA target sequence for LCX (NM_030625.1,2473-2491).
ccgtaagaaatggcattaa

SEQ ID NO: 30306 - DNA, 19 bp, Homo sapiens
  siRNA target sequence for LCX (NM_030625.1,2479-2497).
gaaatggcattaaacatgt

SEQ ID NO: 30307 - DNA, 19 bp, Homo sapiens
  siRNA target sequence for LCX (NM_030625.1,2501-2519).
ctgtttaccagctgaaaca

SEQ ID NO: 30308 - DNA, 19 bp, Homo sapiens
  siRNA target sequence for LCX (NM_030625.1,2578-2596).
cttataaattcctaaaaga

SEQ ID NO: 30309 - DNA, 19 bp, Homo sapiens
  siRNA target sequence for LCX (NM_030625.1,2652-2670).
catctcaaggggagaagta

SEQ ID NO: 30310 - DNA, 19 bp, Homo sapiens
  siRNA target sequence for LCX (NM_030625.1,2657-2675).
caaggggagaagtaacgtt

SEQ ID NO: 30311 - DNA, 19 bp, Homo sapiens
  siRNA target sequence for LCX (NM_030625.1,2660-2678).
ggggagaagtaacgtttta

SEQ ID NO: 30312 - DNA, 19 bp, Homo sapiens
  siRNA target sequence for LCX (NM_030625.1,2663-2681).
gagaagtaacgttttagta

SEQ ID NO: 30313 - DNA, 19 bp, Homo sapiens
  siRNA target sequence for LCX (NM_030625.1,2665-2683).
gaagtaacgttttagtatt

SEQ ID NO: 30314 - DNA, 19 bp, Homo sapiens
  siRNA target sequence for LCX (NM_030625.1,2725-2743).
cacactccatcataaatca

SEQ ID NO: 30315 - DNA, 19 bp, Homo sapiens
  siRNA target sequence for LCX (NM_030625.1,2742-2760).
catcatgctagtatacaca

SEQ ID NO: 30316 - DNA, 19 bp, Homo sapiens
  siRNA target sequence for LCX (NM_030625.1,2785-2803).
ctgagaatataccaagtaa

SEQ ID NO: 30317 - DNA, 19 bp, Homo sapiens
  siRNA target sequence for LCX (NM_030625.1,2825-2843).
cgttcaaccaagtctctta

SEQ ID NO: 30318 - DNA, 19 bp, Homo sapiens
  siRNA target sequence for LCX (NM_030625.1,2826-2844).
gttcaaccaagtctcttat

SEQ ID NO: 30319 - DNA, 19 bp, Homo sapiens
  siRNA target sequence for LCX (NM_030625.1,2829-2847).
caaccaagtctcttatcgt

SEQ ID NO: 30320 - DNA, 19 bp, Homo sapiens
  siRNA target sequence for LCX (NM_030625.1,2832-2850).
ccaagtctcttatcgttaa

SEQ ID NO: 30321 - DNA, 19 bp, Homo sapiens
  siRNA target sequence for LCX (NM_030625.1,2836-2854).
gtctcttatcgttaatgaa

SEQ ID NO: 30322 - DNA, 19 bp, Homo sapiens
  siRNA target sequence for LCX (NM_030625.1,2840-2858).
cttatcgttaatgaaagat

SEQ ID NO: 30323 - DNA, 19 bp, Homo sapiens
  siRNA target sequence for LCX (NM_030625.1,2852-2870).
gaaagataggagattaaca

SEQ ID NO: 30324 - DNA, 19 bp, Homo sapiens
  siRNA target sequence for LCX (NM_030625.1,2979-2997).
gccagtttgcttaatagct

SEQ ID NO: 30325 - DNA, 19 bp, Homo sapiens
  siRNA target sequence for LCX (NM_030625.1,3003-3021).
gctatcctctacactgtaa

SEQ ID NO: 30326 - DNA, 19 bp, Homo sapiens
  siRNA target sequence for LCX (NM_030625.1,3103-3121).
gcaacacggtggttttcaa

SEQ ID NO: 30327 - DNA, 19 bp, Homo sapiens
  siRNA target sequence for LCX (NM_030625.1,3104-3122).
caacacggtggttttcaat

SEQ ID NO: 30328 - DNA, 19 bp, Homo sapiens
  siRNA target sequence for LCX (NM_030625.1,3114-3132).
gttttcaatgggcaaacta

SEQ ID NO: 30329 - DNA, 19 bp, Homo sapiens
  siRNA target sequence for LCX (NM_030625.1,3170-3188).
ccaagcatccacaaagtca

SEQ ID NO: 30330 - DNA, 19 bp, Homo sapiens
  siRNA target sequence for LCX (NM_030625.1,3179-3197).
cacaaagtcacatgaatat

SEQ ID NO: 30331 - DNA, 19 bp, Homo sapiens
  siRNA target sequence for LCX (NM_030625.1,3257-3275).
caccaataaaagtattgct

SEQ ID NO: 30332 - DNA, 19 bp, Homo sapiens
  siRNA target sequence for LCX (NM_030625.1,3268-3286).
gtattgctcaagggataat

SEQ ID NO: 30333 - DNA, 19 bp, Homo sapiens
  siRNA target sequence for LCX (NM_030625.1,3280-3298).
ggataattactcttgacaa

SEQ ID NO: 30334 - DNA, 19 bp, Homo sapiens
  siRNA target sequence for LCX (NM_030625.1,3304-3322).
ccaatgatttgcatcagtt

SEQ ID NO: 30335 - DNA, 19 bp, Homo sapiens
  siRNA target sequence for LCX (NM_030625.1,3318-3336).
cagttgccaccaagaaata

SEQ ID NO: 30336 - DNA, 19 bp, Homo sapiens
  siRNA target sequence for LCX (NM_030625.1,3383-3401).
ggactcagatgatctatca

SEQ ID NO: 30337 - DNA, 19 bp, Homo sapiens
  siRNA target sequence for LCX (NM_030625.1,3412-3430).
caacccatacccaaattga

SEQ ID NO: 30338 - DNA, 19 bp, Homo sapiens
  siRNA target sequence for LCX (NM_030625.1,3452-3470).
gacacaacttgcttcgata

SEQ ID NO: 30339 - DNA, 19 bp, Homo sapiens
  siRNA target sequence for LCX (NM_030625.1,3462-3480).
gcttcgataattaagatca

SEQ ID NO: 30340 - DNA, 19 bp, Homo sapiens
  siRNA target sequence for LCX (NM_030625.1,3463-3481).
cttcgataattaagatcaa

SEQ ID NO: 30341 - DNA, 19 bp, Homo sapiens
  siRNA target sequence for LCX (NM_030625.1,3466-3484).
cgataattaagatcaatta

SEQ ID NO: 30342 - DNA, 19 bp, Homo sapiens
  siRNA target sequence for LCX (NM_030625.1,3584-3602).
gaaaccaccttcaagtgta

SEQ ID NO: 30343 - DNA, 19 bp, Homo sapiens
  siRNA target sequence for LCX (NM_030625.1,3589-3607).
caccttcaagtgtacacaa

SEQ ID NO: 30344 - DNA, 19 bp, Homo sapiens
  siRNA target sequence for LCX (NM_030625.1,3595-3613).
caagtgtacacaataatca

SEQ ID NO: 30345 - DNA, 19 bp, Homo sapiens
  siRNA target sequence for LCX (NM_030625.1,3612-3630).
catggttcatcattaacaa

SEQ ID NO: 30346 - DNA, 19 bp, Homo sapiens
  siRNA target sequence for LCX (NM_030625.1,3616-3634).
gttcatcattaacaaaaca

SEQ ID NO: 30347 - DNA, 19 bp, Homo sapiens
  siRNA target sequence for LCX (NM_030625.1,3673-3691).
caagagatcggcggaaaaa

SEQ ID NO: 30348 - DNA, 19 bp, Homo sapiens
  siRNA target sequence for LCX (NM_030625.1,3676-3694).
gagatcggcggaaaaagaa

SEQ ID NO: 30349 - DNA, 19 bp, Homo sapiens
  siRNA target sequence for LCX (NM_030625.1,3692-3710).
gaagcccacagttgtaagt

SEQ ID NO: 30350 - DNA, 19 bp, Homo sapiens
  siRNA target sequence for LCX (NM_030625.1,3697-3715).
ccacagttgtaagttatca

SEQ ID NO: 30351 - DNA, 19 bp, Homo sapiens
  siRNA target sequence for LCX (NM_030625.1,3698-3716).
cacagttgtaagttatcaa

SEQ ID NO: 30352 - DNA, 19 bp, Homo sapiens
  siRNA target sequence for LCX (NM_030625.1,3700-3718).
cagttgtaagttatcaaga

SEQ ID NO: 30353 - DNA, 19 bp, Homo sapiens
  siRNA target sequence for LCX (NM_030625.1,3749-3767).
ctatatgtatggcacaata

SEQ ID NO: 30354 - DNA, 19 bp, Homo sapiens
  siRNA target sequence for LCX (NM_030625.1,3759-3777).
ggcacaatatgcgacattt

SEQ ID NO: 30355 - DNA, 19 bp, Homo sapiens
  siRNA target sequence for LCX (NM_030625.1,3763-3781).
caatatgcgacatttggat

SEQ ID NO: 30356 - DNA, 19 bp, Homo sapiens
  siRNA target sequence for LCX (NM_030625.1,3778-3796).
ggatagcatcgaaatttca

SEQ ID NO: 30357 - DNA, 19 bp, Homo sapiens
  siRNA target sequence for LCX (NM_030625.1,3779-3797).
gatagcatcgaaatttcaa

SEQ ID NO: 30358 - DNA, 19 bp, Homo sapiens
  siRNA target sequence for LCX (NM_030625.1,3783-3801).
gcatcgaaatttcaaaatt

SEQ ID NO: 30359 - DNA, 19 bp, Homo sapiens
  siRNA target sequence for LCX (NM_030625.1,3879-3897).
gctcaaacgaggtccatta

SEQ ID NO: 30360 - DNA, 19 bp, Homo sapiens
  siRNA target sequence for LCX (NM_030625.1,3880-3898).
ctcaaacgaggtccattat

SEQ ID NO: 30361 - DNA, 19 bp, Homo sapiens
  siRNA target sequence for LCX (NM_030625.1,3899-3917).
gcaacccaaaacagtattt

SEQ ID NO: 30362 - DNA, 19 bp, Homo sapiens
  siRNA target sequence for LCX (NM_030625.1,3919-3937).
caccactcactcagataaa

SEQ ID NO: 30363 - DNA, 19 bp, Homo sapiens
  siRNA target sequence for LCX (NM_030625.1,3921-3939).
ccactcactcagataaaat

SEQ ID NO: 30364 - DNA, 19 bp, Homo sapiens
  siRNA target sequence for LCX (NM_030625.1,3922-3940).
cactcactcagataaaatt

SEQ ID NO: 30365 - DNA, 19 bp, Homo sapiens
  siRNA target sequence for LCX (NM_030625.1,4075-4093).
cggtgaatgccaatcagaa

SEQ ID NO: 30366 - DNA, 19 bp, Homo sapiens
  siRNA target sequence for LCX (NM_030625.1,4167-4185).
cggtttcagcaggttgtta

SEQ ID NO: 30367 - DNA, 19 bp, Homo sapiens
  siRNA target sequence for LCX (NM_030625.1,4221-4239).
cctggtatctctcatgaaa

SEQ ID NO: 30368 - DNA, 19 bp, Homo sapiens
  siRNA target sequence for LCX (NM_030625.1,4260-4278).
ctaactctcaggaatgtaa

SEQ ID NO: 30369 - DNA, 19 bp, Homo sapiens
  siRNA target sequence for LCX (NM_030625.1,4284-4302).
gtgtgttcaggtggaatta

SEQ ID NO: 30370 - DNA, 19 bp, Homo sapiens
  siRNA target sequence for LCX (NM_030625.1,4296-4314).
ggaattacagtggtttcta

SEQ ID NO: 30371 - DNA, 19 bp, Homo sapiens
  siRNA target sequence for LCX (NM_030625.1,4442-4460).
gtctataactaaagattct

SEQ ID NO: 30372 - DNA, 19 bp, Homo sapiens
  siRNA target sequence for LCX (NM_030625.1,4477-4495).
gctgtcttgatcgagttat

SEQ ID NO: 30373 - DNA, 19 bp, Homo sapiens
  siRNA target sequence for LCX (NM_030625.1,4478-4496).
ctgtcttgatcgagttata

SEQ ID NO: 30374 - DNA, 19 bp, Homo sapiens
  siRNA target sequence for LCX (NM_030625.1,4480-4498).
gtcttgatcgagttataca

SEQ ID NO: 30375 - DNA, 19 bp, Homo sapiens
  siRNA target sequence for LCX (NM_030625.1,4482-4500).
cttgatcgagttatacaaa

SEQ ID NO: 30376 - DNA, 19 bp, Homo sapiens
  siRNA target sequence for LCX (NM_030625.1,4571-4589).
gaataggtatggtcaaaaa

SEQ ID NO: 30377 - DNA, 19 bp, Homo sapiens
  siRNA target sequence for LCX (NM_030625.1,4576-4594).
ggtatggtcaaaaaggaaa

SEQ ID NO: 30378 - DNA, 19 bp, Homo sapiens
  siRNA target sequence for LCX (NM_030625.1,4643-4661).
ctctcatgggtgtccaatt

SEQ ID NO: 30379 - DNA, 19 bp, Homo sapiens
  siRNA target sequence for LCX (NM_030625.1,4647-4665).
catgggtgtccaattgcta

SEQ ID NO: 30380 - DNA, 19 bp, Homo sapiens
  siRNA target sequence for LCX (NM_030625.1,4796-4814).
ggccgaccggctatacaca

SEQ ID NO: 30381 - DNA, 19 bp, Homo sapiens
  siRNA target sequence for LCX (NM_030625.1,4818-4836).
ctcacagagaatctaaagt

SEQ ID NO: 30382 - DNA, 19 bp, Homo sapiens
  siRNA target sequence for LCX (NM_030625.1,4822-4840).
cagagaatctaaagtcata

SEQ ID NO: 30383 - DNA, 19 bp, Homo sapiens
  siRNA target sequence for LCX (NM_030625.1,4861-4879).
gaagatgcaccctcaatga

SEQ ID NO: 30384 - DNA, 19 bp, Homo sapiens
  siRNA target sequence for LCX (NM_030625.1,4868-4886).
caccctcaatgaaaatcgt

SEQ ID NO: 30385 - DNA, 19 bp, Homo sapiens
  siRNA target sequence for LCX (NM_030625.1,4878-4896).
gaaaatcgtacctgtacat

SEQ ID NO: 30386 - DNA, 19 bp, Homo sapiens
  siRNA target sequence for LCX (NM_030625.1,4888-4906).
cctgtacatgtcaaggaat

SEQ ID NO: 30387 - DNA, 19 bp, Homo sapiens
  siRNA target sequence for LCX (NM_030625.1,4889-4907).
ctgtacatgtcaaggaatt

SEQ ID NO: 30388 - DNA, 19 bp, Homo sapiens
  siRNA target sequence for LCX (NM_030625.1,4948-4966).
catggagtatgtactttaa

SEQ ID NO: 30389 - DNA, 19 bp, Homo sapiens
  siRNA target sequence for LCX (NM_030625.1,4994-5012).
ccccagaagatttagaatt

SEQ ID NO: 30390 - DNA, 19 bp, Homo sapiens
  siRNA target sequence for LCX (NM_030625.1,5017-5035).
caagctctcccttacatga

SEQ ID NO: 30391 - DNA, 19 bp, Homo sapiens
  siRNA target sequence for LCX (NM_030625.1,5020-5038).
gctctcccttacatgaaaa

SEQ ID NO: 30392 - DNA, 19 bp, Homo sapiens
  siRNA target sequence for LCX (NM_030625.1,5060-5078).
gagtttggctacacgatta

SEQ ID NO: 30393 - DNA, 19 bp, Homo sapiens
  siRNA target sequence for LCX (NM_030625.1,5071-5089).
cacgattagctccaattta

SEQ ID NO: 30394 - DNA, 19 bp, Homo sapiens
  siRNA target sequence for LCX (NM_030625.1,5073-5091).
cgattagctccaatttata

SEQ ID NO: 30395 - DNA, 19 bp, Homo sapiens
  siRNA target sequence for LCX (NM_030625.1,5100-5118).
gctccagtagcttaccaaa

SEQ ID NO: 30396 - DNA, 19 bp, Homo sapiens
  siRNA target sequence for LCX (NM_030625.1,5101-5119).
ctccagtagcttaccaaaa

SEQ ID NO: 30397 - DNA, 19 bp, Homo sapiens
  siRNA target sequence for LCX (NM_030625.1,5269-5287).
ccttaactcgagaagataa

SEQ ID NO: 30398 - DNA, 19 bp, Homo sapiens
  siRNA target sequence for LCX (NM_030625.1,5291-5309).
ctctttgggtgttattcct

SEQ ID NO: 30399 - DNA, 19 bp, Homo sapiens
  siRNA target sequence for LCX (NM_030625.1,5330-5348).
gctacctctttataagctt

SEQ ID NO: 30400 - DNA, 19 bp, Homo sapiens
  siRNA target sequence for LCX (NM_030625.1,5499-5517).
gaggttcttgcacataaga

SEQ ID NO: 30401 - DNA, 19 bp, Homo sapiens
  siRNA target sequence for LCX (NM_030625.1,5501-5519).
ggttcttgcacataagata

SEQ ID NO: 30402 - DNA, 19 bp, Homo sapiens
  siRNA target sequence for LCX (NM_030625.1,5547-5565).
cgaatcaagcggaagaata

SEQ ID NO: 30403 - DNA, 19 bp, Homo sapiens
  siRNA target sequence for LCX (NM_030625.1,5552-5570).
caagcggaagaataactca

SEQ ID NO: 30404 - DNA, 19 bp, Homo sapiens
  siRNA target sequence for LCX (NM_030625.1,5556-5574).
cggaagaataactcaacaa

SEQ ID NO: 30405 - DNA, 19 bp, Homo sapiens
  siRNA target sequence for LCX (NM_030625.1,5561-5579).
gaataactcaacaacaaca

SEQ ID NO: 30406 - DNA, 19 bp, Homo sapiens
  siRNA target sequence for LCX (NM_030625.1,5629-5647).
ccgtgcaacctgaagtaaa

SEQ ID NO: 30407 - DNA, 19 bp, Homo sapiens
  siRNA target sequence for LCX (NM_030625.1,5630-5648).
cgtgcaacctgaagtaaaa

SEQ ID NO: 30408 - DNA, 19 bp, Homo sapiens
  siRNA target sequence for LCX (NM_030625.1,5631-5649).
gtgcaacctgaagtaaaaa

SEQ ID NO: 30409 - DNA, 19 bp, Homo sapiens
  siRNA target sequence for LCX (NM_030625.1,5633-5651).
gcaacctgaagtaaaaagt

SEQ ID NO: 30410 - DNA, 19 bp, Homo sapiens
  siRNA target sequence for LCX (NM_030625.1,5652-5670).
gaaaccgaaccccatttta

SEQ ID NO: 30411 - DNA, 19 bp, Homo sapiens
  siRNA target sequence for LCX (NM_030625.1,5657-5675).
cgaaccccattttatctta

SEQ ID NO: 30412 - DNA, 19 bp, Homo sapiens
  siRNA target sequence for LCX (NM_030625.1,5658-5676).
gaaccccattttatcttaa

SEQ ID NO: 30413 - DNA, 19 bp, Homo sapiens
  siRNA target sequence for LCX (NM_030625.1,5812-5830).
cctcatgcgggttttcaga

SEQ ID NO: 30414 - DNA, 19 bp, Homo sapiens
  siRNA target sequence for LCX (NM_030625.1,5813-5831).
ctcatgcgggttttcagaa

SEQ ID NO: 30415 - DNA, 19 bp, Homo sapiens
  siRNA target sequence for LCX (NM_030625.1,5958-5976).
gtgatggagcccctcatta

SEQ ID NO: 30416 - DNA, 19 bp, Homo sapiens
  siRNA target sequence for LCX (NM_030625.1,5963-5981).
ggagcccctcattaattct

SEQ ID NO: 30417 - DNA, 19 bp, Homo sapiens
  siRNA target sequence for LCX (NM_030625.1,6121-6139).
cagacgaacccctatctga

SEQ ID NO: 30418 - DNA, 19 bp, Homo sapiens
  siRNA target sequence for LCX (NM_030625.1,6164-6182).
gaaattgccccacattgat

SEQ ID NO: 30419 - DNA, 19 bp, Homo sapiens
  siRNA target sequence for LCX (NM_030625.1,6195-6213).
gacagtgagcacatctttt

SEQ ID NO: 30420 - DNA, 19 bp, Homo sapiens
  siRNA target sequence for LCX (NM_030625.1,6249-6267).
gctcacggctcggttttga

SEQ ID NO: 30421 - DNA, 19 bp, Homo sapiens
  siRNA target sequence for LCX (NM_030625.1,6250-6268).
ctcacggctcggttttgat

SEQ ID NO: 30422 - DNA, 19 bp, Homo sapiens
  siRNA target sequence for LCX (NM_030625.1,6255-6273).
ggctcggttttgattgagt

SEQ ID NO: 30423 - DNA, 19 bp, Homo sapiens
  siRNA target sequence for LCX (NM_030625.1,6311-6329).
gcaccccaaccgtaatcat

SEQ ID NO: 30424 - DNA, 19 bp, Homo sapiens
  siRNA target sequence for LCX (NM_030625.1,6377-6395).
gccccaacatggttttgaa

SEQ ID NO: 30425 - DNA, 19 bp, Homo sapiens
  siRNA target sequence for LCX (NM_030625.1,6388-6406).
gttttgaactaaacaagat

SEQ ID NO: 30426 - DNA, 19 bp, Homo sapiens
  siRNA target sequence for LCX (NM_030625.1,6393-6411).
gaactaaacaagattaagt

SEQ ID NO: 30427 - DNA, 19 bp, Homo sapiens
  siRNA target sequence for LCX (NM_030625.1,6522-6540).
ccttctcataaagcattaa

SEQ ID NO: 30428 - DNA, 19 bp, Homo sapiens
  siRNA target sequence for LCX (NM_030625.1,6563-6581).
caccgtgtccccttatgct

SEQ ID NO: 30429 - DNA, 19 bp, Homo sapiens
  siRNA target sequence for LDB1 (NM_003893.3,641-659).
gggcccaactcccatgtat

SEQ ID NO: 30430 - DNA, 19 bp, Homo sapiens
  siRNA target sequence for LDB1 (NM_003893.3,652-670).
ccatgtatccgcctacata

SEQ ID NO: 30431 - DNA, 19 bp, Homo sapiens
  siRNA target sequence for LDB1 (NM_003893.3,762-780).
gaggagtgtgacaatctct

SEQ ID NO: 30432 - DNA, 19 bp, Homo sapiens
  siRNA target sequence for LDB1 (NM_003893.3,853-871).
gaccaaagagatataccat

SEQ ID NO: 30433 - DNA, 19 bp, Homo sapiens
  siRNA target sequence for LDB1 (NM_003893.3,919-937).
gtgctacggagctgtacta

SEQ ID NO: 30434 - DNA, 19 bp, Homo sapiens
  siRNA target sequence for LDB1 (NM_003893.3,922-940).
ctacggagctgtactatgt

SEQ ID NO: 30435 - DNA, 19 bp, Homo sapiens
  siRNA target sequence for LDB1 (NM_003893.3,925-943).
cggagctgtactatgttct

SEQ ID NO: 30436 - DNA, 19 bp, Homo sapiens
  siRNA target sequence for LDB1 (NM_003893.3,926-944).
ggagctgtactatgttctt

SEQ ID NO: 30437 - DNA, 19 bp, Homo sapiens
  siRNA target sequence for LDB1 (NM_003893.3,927-945).
gagctgtactatgttctta

SEQ ID NO: 30438 - DNA, 19 bp, Homo sapiens
  siRNA target sequence for LDB1 (NM_003893.3,961-979).
cattccacagcaactttgt

SEQ ID NO: 30439 - DNA, 19 bp, Homo sapiens
  siRNA target sequence for LDB1 (NM_003893.3,1061-1079).
gtacctggagttcatgttt

SEQ ID NO: 30440 - DNA, 19 bp, Homo sapiens
  siRNA target sequence for LDB1 (NM_003893.3,1083-1101).
gacatgatgcggataaaga

SEQ ID NO: 30441 - DNA, 19 bp, Homo sapiens
  siRNA target sequence for LDB1 (NM_003893.3,1209-1227).
cggtgtgggctgtccaatt

SEQ ID NO: 30442 - DNA, 19 bp, Homo sapiens
  siRNA target sequence for LDB1 (NM_003893.3,1241-1259).
cctccgactctgtgtgata

SEQ ID NO: 30443 - DNA, 19 bp, Homo sapiens
  siRNA target sequence for LDB1 (NM_003893.3,1401-1419).
cggcggaaacggaagatgt

SEQ ID NO: 30444 - DNA, 19 bp, Homo sapiens
  siRNA target sequence for LDB1 (NM_003893.3,1632-1650).
gacgacgaggacagcttta

SEQ ID NO: 30445 - DNA, 19 bp, Homo sapiens
  siRNA target sequence for LDB1 (NM_003893.3,1635-1653).
gacgaggacagctttaaca

SEQ ID NO: 30446 - DNA, 19 bp, Homo sapiens
  siRNA target sequence for LDB1 (NM_003893.3,1638-1656).
gaggacagctttaacaact

SEQ ID NO: 30447 - DNA, 19 bp, Homo sapiens
  siRNA target sequence for LDB2 (NM_001290.1,122-140).
ccacatgaccccttctatt

SEQ ID NO: 30448 - DNA, 19 bp, Homo sapiens
  siRNA target sequence for LDB2 (NM_001290.1,146-164).
cctttcggcccattttata

SEQ ID NO: 30449 - DNA, 19 bp, Homo sapiens
  siRNA target sequence for LDB2 (NM_001290.1,190-208).
gccagagtaccgaatctat

SEQ ID NO: 30450 - DNA, 19 bp, Homo sapiens
  siRNA target sequence for LDB2 (NM_001290.1,194-212).
gagtaccgaatctatgaga

SEQ ID NO: 30451 - DNA, 19 bp, Homo sapiens
  siRNA target sequence for LDB2 (NM_001290.1,231-249).
ctcgcacagaggatagtga

SEQ ID NO: 30452 - DNA, 19 bp, Homo sapiens
  siRNA target sequence for LDB2 (NM_001290.1,287-305).
gaagatgacgccacattaa

SEQ ID NO: 30453 - DNA, 19 bp, Homo sapiens
  siRNA target sequence for LDB2 (NM_001290.1,329-347).
ggaccaaagcgatacacta

SEQ ID NO: 30454 - DNA, 19 bp, Homo sapiens
  siRNA target sequence for LDB2 (NM_001290.1,330-348).
gaccaaagcgatacactat

SEQ ID NO: 30455 - DNA, 19 bp, Homo sapiens
  siRNA target sequence for LDB2 (NM_001290.1,358-376).
cctcatcccccgttacttt

SEQ ID NO: 30456 - DNA, 19 bp, Homo sapiens
  siRNA target sequence for LDB2 (NM_001290.1,359-377).
ctcatcccccgttacttta

SEQ ID NO: 30457 - DNA, 19 bp, Homo sapiens
  siRNA target sequence for LDB2 (NM_001290.1,395-413).
ggggtgaccgacctgtatt

SEQ ID NO: 30458 - DNA, 19 bp, Homo sapiens
  siRNA target sequence for LDB2 (NM_001290.1,396-414).
gggtgaccgacctgtatta

SEQ ID NO: 30459 - DNA, 19 bp, Homo sapiens
  siRNA target sequence for LDB2 (NM_001290.1,398-416).
gtgaccgacctgtattaca

SEQ ID NO: 30460 - DNA, 19 bp, Homo sapiens
  siRNA target sequence for LDB2 (NM_001290.1,419-437).
ctcaaacactcgaaagagt

SEQ ID NO: 30461 - DNA, 19 bp, Homo sapiens
  siRNA target sequence for LDB2 (NM_001290.1,434-452).
gagtcataccacaactcat

SEQ ID NO: 30462 - DNA, 19 bp, Homo sapiens
  siRNA target sequence for LDB2 (NM_001290.1,493-511).
gcacgggaagcccatgttt

SEQ ID NO: 30463 - DNA, 19 bp, Homo sapiens
  siRNA target sequence for LDB2 (NM_001290.1,494-512).
cacgggaagcccatgttta

SEQ ID NO: 30464 - DNA, 19 bp, Homo sapiens
  siRNA target sequence for LDB2 (NM_001290.1,497-515).
gggaagcccatgtttacca

SEQ ID NO: 30465 - DNA, 19 bp, Homo sapiens
  siRNA target sequence for LDB2 (NM_001290.1,498-516).
ggaagcccatgtttaccaa

SEQ ID NO: 30466 - DNA, 19 bp, Homo sapiens
  siRNA target sequence for LDB2 (NM_001290.1,503-521).
cccatgtttaccaaggtat

SEQ ID NO: 30467 - DNA, 19 bp, Homo sapiens
  siRNA target sequence for LDB2 (NM_001290.1,508-526).
gtttaccaaggtatgtaca

SEQ ID NO: 30468 - DNA, 19 bp, Homo sapiens
  siRNA target sequence for LDB2 (NM_001290.1,560-578).
gatctcatgagaatcaaaa

SEQ ID NO: 30469 - DNA, 19 bp, Homo sapiens
  siRNA target sequence for LDB2 (NM_001290.1,582-600).
ggcactttaccattagaca

SEQ ID NO: 30470 - DNA, 19 bp, Homo sapiens
  siRNA target sequence for LDB2 (NM_001290.1,583-601).
gcactttaccattagacaa

SEQ ID NO: 30471 - DNA, 19 bp, Homo sapiens
  siRNA target sequence for LDB2 (NM_001290.1,597-615).
gacaataccgagagttagt

SEQ ID NO: 30472 - DNA, 19 bp, Homo sapiens
  siRNA target sequence for LDB2 (NM_001290.1,752-770).
gaactgatgtcgagacata

SEQ ID NO: 30473 - DNA, 19 bp, Homo sapiens
  siRNA target sequence for LDB2 (NM_001290.1,757-775).
gatgtcgagacataaaact

SEQ ID NO: 30474 - DNA, 19 bp, Homo sapiens
  siRNA target sequence for LDB2 (NM_001290.1,762-780).
cgagacataaaacttacaa

SEQ ID NO: 30475 - DNA, 19 bp, Homo sapiens
  siRNA target sequence for LDB2 (NM_001290.1,921-939).
gcgctgggaacaatgcaaa

SEQ ID NO: 30476 - DNA, 19 bp, Homo sapiens
  siRNA target sequence for LDB2 (NM_001290.1,1054-1072).
ggacgaaaggctaatcact

SEQ ID NO: 30477 - DNA, 19 bp, Homo sapiens
  siRNA target sequence for LDB2 (NM_001290.1,1055-1073).
gacgaaaggctaatcacta

SEQ ID NO: 30478 - DNA, 19 bp, Homo sapiens
  siRNA target sequence for LDB2 (NM_001290.1,1062-1080).
ggctaatcactagattaga

SEQ ID NO: 30479 - DNA, 19 bp, Homo sapiens
  siRNA target sequence for LDB2 (NM_001290.1,1063-1081).
gctaatcactagattagaa

SEQ ID NO: 30480 - DNA, 19 bp, Homo sapiens
  siRNA target sequence for LDB2 (NM_001290.1,1064-1082).
ctaatcactagattagaaa

SEQ ID NO: 30481 - DNA, 19 bp, Homo sapiens
  siRNA target sequence for LDB2 (NM_001290.1,1120-1138).
ggaggacttcaacaattca

SEQ ID NO: 30482 - DNA, 19 bp, Homo sapiens
  siRNA target sequence for LDB2 (NM_001290.1,1156-1174).
cagcccgtggaacagtaaa

SEQ ID NO: 30483 - DNA, 19 bp, Homo sapiens
  siRNA target sequence for LDB2 (NM_001290.1,1159-1177).
cccgtggaacagtaaacct

SEQ ID NO: 30484 - DNA, 19 bp, Homo sapiens
  siRNA target sequence for LEF1 (NM_016269.2,786-804).
cgaagaggaaggcgattta

SEQ ID NO: 30485 - DNA, 19 bp, Homo sapiens
  siRNA target sequence for LEF1 (NM_016269.2,799-817).
gatttagctgacatcaagt

SEQ ID NO: 30486 - DNA, 19 bp, Homo sapiens
  siRNA target sequence for LEF1 (NM_016269.2,924-942).
ccccgatgacggaaagcat

SEQ ID NO: 30487 - DNA, 19 bp, Homo sapiens
  siRNA target sequence for LEF1 (NM_016269.2,970-988).
ccctcctactcgagttatt

SEQ ID NO: 30488 - DNA, 19 bp, Homo sapiens
  siRNA target sequence for LEF1 (NM_016269.2,981-999).
gagttattccgggtacata

SEQ ID NO: 30489 - DNA, 19 bp, Homo sapiens
  siRNA target sequence for LEF1 (NM_016269.2,983-1001).
gttattccgggtacataat

SEQ ID NO: 30490 - DNA, 19 bp, Homo sapiens
  siRNA target sequence for LEF1 (NM_016269.2,1020-1038).
cgacccatacatgtcaaat

SEQ ID NO: 30491 - DNA, 19 bp, Homo sapiens
  siRNA target sequence for LEF1 (NM_016269.2,1023-1041).
cccatacatgtcaaatgga

SEQ ID NO: 30492 - DNA, 19 bp, Homo sapiens
  siRNA target sequence for LEF1 (NM_016269.2,1024-1042).
ccatacatgtcaaatggat

SEQ ID NO: 30493 - DNA, 19 bp, Homo sapiens
  siRNA target sequence for LEF1 (NM_016269.2,1032-1050).
gtcaaatggatctctttct

SEQ ID NO: 30494 - DNA, 19 bp, Homo sapiens
  siRNA target sequence for LEF1 (NM_016269.2,1051-1069).
ccacccatcccgagaacat

SEQ ID NO: 30495 - DNA, 19 bp, Homo sapiens
  siRNA target sequence for LEF1 (NM_016269.2,1054-1072).
cccatcccgagaacatcaa

SEQ ID NO: 30496 - DNA, 19 bp, Homo sapiens
  siRNA target sequence for LEF1 (NM_016269.2,1055-1073).
ccatcccgagaacatcaaa

SEQ ID NO: 30497 - DNA, 19 bp, Homo sapiens
  siRNA target sequence for LEF1 (NM_016269.2,1056-1074).
catcccgagaacatcaaat

SEQ ID NO: 30498 - DNA, 19 bp, Homo sapiens
  siRNA target sequence for LEF1 (NM_016269.2,1059-1077).
cccgagaacatcaaataaa

SEQ ID NO: 30499 - DNA, 19 bp, Homo sapiens
  siRNA target sequence for LEF1 (NM_016269.2,1134-1152).
cagtgacgagcacttttct

SEQ ID NO: 30500 - DNA, 19 bp, Homo sapiens
  siRNA target sequence for LEF1 (NM_016269.2,1167-1185).
gtcacacatcccatcagat

SEQ ID NO: 30501 - DNA, 19 bp, Homo sapiens
  siRNA target sequence for LEF1 (NM_016269.2,1223-1241).
ctcctgatatccctacttt

SEQ ID NO: 30502 - DNA, 19 bp, Homo sapiens
  siRNA target sequence for LEF1 (NM_016269.2,1225-1243).
cctgatatccctacttttt

SEQ ID NO: 30503 - DNA, 19 bp, Homo sapiens
  siRNA target sequence for LEF1 (NM_016269.2,1425-1443).
catccctcatccagctatt

SEQ ID NO: 30504 - DNA, 19 bp, Homo sapiens
  siRNA target sequence for LEF1 (NM_016269.2,1478-1496).
ctgacagtgacctaatgca

SEQ ID NO: 30505 - DNA, 19 bp, Homo sapiens
  siRNA target sequence for LEF1 (NM_016269.2,1505-1523).
ctcagcatgaacagagaaa

SEQ ID NO: 30506 - DNA, 19 bp, Homo sapiens
  siRNA target sequence for LEF1 (NM_016269.2,1567-1585).
gcttttatgttatacatga

SEQ ID NO: 30507 - DNA, 19 bp, Homo sapiens
  siRNA target sequence for LEF1 (NM_016269.2,1605-1623).
cgttgctgagtgtactcta

SEQ ID NO: 30508 - DNA, 19 bp, Homo sapiens
  siRNA target sequence for LEF1 (NM_016269.2,1610-1628).
ctgagtgtactctaaaaga

SEQ ID NO: 30509 - DNA, 19 bp, Homo sapiens
  siRNA target sequence for LEF1 (NM_016269.2,1634-1652).
cagctatcaaccagattct

SEQ ID NO: 30510 - DNA, 19 bp, Homo sapiens
  siRNA target sequence for LEF1 (NM_016269.2,1678-1696).
cgtgaagagcaggctaaat

SEQ ID NO: 30511 - DNA, 19 bp, Homo sapiens
  siRNA target sequence for LEF1 (NM_016269.2,1681-1699).
gaagagcaggctaaatatt

SEQ ID NO: 30512 - DNA, 19 bp, Homo sapiens
  siRNA target sequence for LEF1 (NM_016269.2,1756-1774).
gcaagagacaattatggta

SEQ ID NO: 30513 - DNA, 19 bp, Homo sapiens
  siRNA target sequence for LEF1 (NM_016269.2,1757-1775).
caagagacaattatggtaa

SEQ ID NO: 30514 - DNA, 19 bp, Homo sapiens
  siRNA target sequence for LEF1 (NM_016269.2,1817-1835).
caggtacaggtccaagaat

SEQ ID NO: 30515 - DNA, 19 bp, Homo sapiens
  siRNA target sequence for LEF1 (NM_016269.2,1819-1837).
ggtacaggtccaagaatga

SEQ ID NO: 30516 - DNA, 19 bp, Homo sapiens
  siRNA target sequence for LENEP (NM_018655.1,98-116).
cgggtgcctgtcattaaga

SEQ ID NO: 30517 - DNA, 19 bp, Homo sapiens
  siRNA target sequence for LHFP (NM_005780.1,424-442).
cctgcgtggggttctttat

SEQ ID NO: 30518 - DNA, 19 bp, Homo sapiens
  siRNA target sequence for LHFP (NM_005780.1,494-512).
cttccggaggtgctcatat

SEQ ID NO: 30519 - DNA, 19 bp, Homo sapiens
  siRNA target sequence for LHFP (NM_005780.1,714-732).
gtggctggaggaattcagt

SEQ ID NO: 30520 - DNA, 19 bp, Homo sapiens
  siRNA target sequence for LIG1 (NM_000234.1,124-142).
cagcgaagtatcatgtcat

SEQ ID NO: 30521 - DNA, 19 bp, Homo sapiens
  siRNA target sequence for LIG1 (NM_000234.1,126-144).
gcgaagtatcatgtcattt

SEQ ID NO: 30522 - DNA, 19 bp, Homo sapiens
  siRNA target sequence for LIG1 (NM_000234.1,127-145).
cgaagtatcatgtcatttt

SEQ ID NO: 30523 - DNA, 19 bp, Homo sapiens
  siRNA target sequence for LIG1 (NM_000234.1,128-146).
gaagtatcatgtcattttt

SEQ ID NO: 30524 - DNA, 19 bp, Homo sapiens
  siRNA target sequence for LIG1 (NM_000234.1,707-725).
cgacggaaagcgtttcaga

SEQ ID NO: 30525 - DNA, 19 bp, Homo sapiens
  siRNA target sequence for LIG1 (NM_000234.1,903-921).
ggatccatctggttacaat

SEQ ID NO: 30526 - DNA, 19 bp, Homo sapiens
  siRNA target sequence for LIG1 (NM_000234.1,1651-1669).
cccgacctggaccgaatta

SEQ ID NO: 30527 - DNA, 19 bp, Homo sapiens
  siRNA target sequence for LIG1 (NM_000234.1,1652-1670).
ccgacctggaccgaattat

SEQ ID NO: 30528 - DNA, 19 bp, Homo sapiens
  siRNA target sequence for LIG1 (NM_000234.1,1730-1748).
ggattcccctgaaaccaat

SEQ ID NO: 30529 - DNA, 19 bp, Homo sapiens
  siRNA target sequence for LIG1 (NM_000234.1,1804-1822).
gctttcacctgcgaataca

SEQ ID NO: 30530 - DNA, 19 bp, Homo sapiens
  siRNA target sequence for LIG1 (NM_000234.1,1809-1827).
cacctgcgaatacaaatat

SEQ ID NO: 30531 - DNA, 19 bp, Homo sapiens
  siRNA target sequence for LIG1 (NM_000234.1,1907-1925).
ggaagtacccggacatcat

SEQ ID NO: 30532 - DNA, 19 bp, Homo sapiens
  siRNA target sequence for LIG1 (NM_000234.1,1928-1946).
gccgcatccccaagattaa

SEQ ID NO: 30533 - DNA, 19 bp, Homo sapiens
  siRNA target sequence for LIG1 (NM_000234.1,1929-1947).
ccgcatccccaagattaaa

SEQ ID NO: 30534 - DNA, 19 bp, Homo sapiens
  siRNA target sequence for LIG1 (NM_000234.1,1931-1949).
gcatccccaagattaaact

SEQ ID NO: 30535 - DNA, 19 bp, Homo sapiens
  siRNA target sequence for LIG1 (NM_000234.1,2186-2204).
cagagggcgagtttgtctt

SEQ ID NO: 30536 - DNA, 19 bp, Homo sapiens
  siRNA target sequence for LIG1 (NM_000234.1,2583-2601).
cccttacgtgcggatagat

SEQ ID NO: 30537 - DNA, 19 bp, Homo sapiens
  siRNA target sequence for LIG1 (NM_000234.1,2791-2809).
gctcaggtggcctgtttgt

SEQ ID NO: 30538 - DNA, 19 bp, Homo sapiens
  siRNA target sequence for LIG1 (NM_000234.1,2792-2810).
ctcaggtggcctgtttgta

SEQ ID NO: 30539 - DNA, 19 bp, Homo sapiens
  siRNA target sequence for LIG1 (NM_000234.1,2811-2829).
ccggaagcaaagtcagatt

SEQ ID NO: 30540 - DNA, 19 bp, Homo sapiens
  siRNA target sequence for LIG1 (NM_000234.1,2854-2872).
ggctctgaccctgaagata

SEQ ID NO: 30541 - DNA, 19 bp, Homo sapiens
  siRNA target sequence for LIG3 (NM_002311.2,363-381).
ggcacagctggctgcaaaa

SEQ ID NO: 30542 - DNA, 19 bp, Homo sapiens
  siRNA target sequence for LIG3 (NM_002311.2,445-463).
cagagtctgggggtgatat

SEQ ID NO: 30543 - DNA, 19 bp, Homo sapiens
  siRNA target sequence for LIG3 (NM_002311.2,451-469).
ctgggggtgatatgaaaga

SEQ ID NO: 30544 - DNA, 19 bp, Homo sapiens
  siRNA target sequence for LIG3 (NM_002311.2,453-471).
gggggtgatatgaaagagt

SEQ ID NO: 30545 - DNA, 19 bp, Homo sapiens
  siRNA target sequence for LIG3 (NM_002311.2,725-743).
caatccccggaaattttct

SEQ ID NO: 30546 - DNA, 19 bp, Homo sapiens
  siRNA target sequence for LIG3 (NM_002311.2,846-864).
ctgctacgggagtttcgaa

SEQ ID NO: 30547 - DNA, 19 bp, Homo sapiens
  siRNA target sequence for LIG3 (NM_002311.2,852-870).
cgggagtttcgaaagttat

SEQ ID NO: 30548 - DNA, 19 bp, Homo sapiens
  siRNA target sequence for LIG3 (NM_002311.2,872-890).
cgccatggtggccgataat

SEQ ID NO: 30549 - DNA, 19 bp, Homo sapiens
  siRNA target sequence for LIG3 (NM_002311.2,885-903).
gataatcctagctacaaca

SEQ ID NO: 30550 - DNA, 19 bp, Homo sapiens
  siRNA target sequence for LIG3 (NM_002311.2,964-982).
gtgatgtgtacctaacagt

SEQ ID NO: 30551 - DNA, 19 bp, Homo sapiens
  siRNA target sequence for LIG3 (NM_002311.2,989-1007).
gctgctgccaggagtcatt

SEQ ID NO: 30552 - DNA, 19 bp, Homo sapiens
  siRNA target sequence for LIG3 (NM_002311.2,993-1011).
ctgccaggagtcattaaga

SEQ ID NO: 30553 - DNA, 19 bp, Homo sapiens
  siRNA target sequence for LIG3 (NM_002311.2,999-1017).
ggagtcattaagactgttt

SEQ ID NO: 30554 - DNA, 19 bp, Homo sapiens
  siRNA target sequence for LIG3 (NM_002311.2,1014-1032).
gtttacaacttgaacgata

SEQ ID NO: 30555 - DNA, 19 bp, Homo sapiens
  siRNA target sequence for LIG3 (NM_002311.2,1107-1125).
gacgtgtcagagacaatca

SEQ ID NO: 30556 - DNA, 19 bp, Homo sapiens
  siRNA target sequence for LIG3 (NM_002311.2,1109-1127).
cgtgtcagagacaatcaga

SEQ ID NO: 30557 - DNA, 19 bp, Homo sapiens
  siRNA target sequence for LIG3 (NM_002311.2,1165-1183).
ccaagagcctccttaccat

SEQ ID NO: 30558 - DNA, 19 bp, Homo sapiens
  siRNA target sequence for LIG3 (NM_002311.2,1273-1291).
gtacagccaatgaccttaa

SEQ ID NO: 30559 - DNA, 19 bp, Homo sapiens
  siRNA target sequence for LIG3 (NM_002311.2,1278-1296).
gccaatgaccttaaatgca

SEQ ID NO: 30560 - DNA, 19 bp, Homo sapiens
  siRNA target sequence for LIG3 (NM_002311.2,1279-1297).
ccaatgaccttaaatgcat

SEQ ID NO: 30561 - DNA, 19 bp, Homo sapiens
  siRNA target sequence for LIG3 (NM_002311.2,1294-1312).
gcatcatcaggttgatcaa

SEQ ID NO: 30562 - DNA, 19 bp, Homo sapiens
  siRNA target sequence for LIG3 (NM_002311.2,1298-1316).
catcaggttgatcaaacat

SEQ ID NO: 30563 - DNA, 19 bp, Homo sapiens
  siRNA target sequence for LIG3 (NM_002311.2,1301-1319).
caggttgatcaaacatgat

SEQ ID NO: 30564 - DNA, 19 bp, Homo sapiens
  siRNA target sequence for LIG3 (NM_002311.2,1314-1332).
catgatctgaagatgaact

SEQ ID NO: 30565 - DNA, 19 bp, Homo sapiens
  siRNA target sequence for LIG3 (NM_002311.2,1325-1343).
gatgaactcaggtgcaaaa

SEQ ID NO: 30566 - DNA, 19 bp, Homo sapiens
  siRNA target sequence for LIG3 (NM_002311.2,1328-1346).
gaactcaggtgcaaaacat

SEQ ID NO: 30567 - DNA, 19 bp, Homo sapiens
  siRNA target sequence for LIG3 (NM_002311.2,1525-1543).
cctgcaagtccgttgagta

SEQ ID NO: 30568 - DNA, 19 bp, Homo sapiens
  siRNA target sequence for LIG3 (NM_002311.2,1526-1544).
ctgcaagtccgttgagtat

SEQ ID NO: 30569 - DNA, 19 bp, Homo sapiens
  siRNA target sequence for LIG3 (NM_002311.2,1534-1552).
ccgttgagtatgcaatgaa

SEQ ID NO: 30570 - DNA, 19 bp, Homo sapiens
  siRNA target sequence for LIG3 (NM_002311.2,1599-1617).
cgagtccaggtgcataaga

SEQ ID NO: 30571 - DNA, 19 bp, Homo sapiens
  siRNA target sequence for LIG3 (NM_002311.2,1668-1686).
cacaaggtggcccacttta

SEQ ID NO: 30572 - DNA, 19 bp, Homo sapiens
  siRNA target sequence for LIG3 (NM_002311.2,1679-1697).
ccactttaaggactacatt

SEQ ID NO: 30573 - DNA, 19 bp, Homo sapiens
  siRNA target sequence for LIG3 (NM_002311.2,1738-1756).
ctgaagtgcttctgattga

SEQ ID NO: 30574 - DNA, 19 bp, Homo sapiens
  siRNA target sequence for LIG3 (NM_002311.2,1852-1870).
gtatctactttaatgatgt

SEQ ID NO: 30575 - DNA, 19 bp, Homo sapiens
  siRNA target sequence for LIG3 (NM_002311.2,1935-1953).
ccaaaccggatcatgttct

SEQ ID NO: 30576 - DNA, 19 bp, Homo sapiens
  siRNA target sequence for LIG3 (NM_002311.2,1941-1959).
cggatcatgttctcagaaa

SEQ ID NO: 30577 - DNA, 19 bp, Homo sapiens
  siRNA target sequence for LIG3 (NM_002311.2,1961-1979).
gaagcgagtcacaaaagct

SEQ ID NO: 30578 - DNA, 19 bp, Homo sapiens
  siRNA target sequence for LIG3 (NM_002311.2,1982-2000).
ggacttggctgacatgata

SEQ ID NO: 30579 - DNA, 19 bp, Homo sapiens
  siRNA target sequence for LIG3 (NM_002311.2,2141-2159).
ggtccttggagccttctat

SEQ ID NO: 30580 - DNA, 19 bp, Homo sapiens
  siRNA target sequence for LIG3 (NM_002311.2,2175-2193).
ggcggcatgatgtcaatct

SEQ ID NO: 30581 - DNA, 19 bp, Homo sapiens
  siRNA target sequence for LIG3 (NM_002311.2,2176-2194).
gcggcatgatgtcaatctt

SEQ ID NO: 30582 - DNA, 19 bp, Homo sapiens
  siRNA target sequence for LIG3 (NM_002311.2,2295-2313).
ctagacatggtgaagatca

SEQ ID NO: 30583 - DNA, 19 bp, Homo sapiens
  siRNA target sequence for LIG3 (NM_002311.2,2314-2332).
gcaaggaccccagcaaaat

SEQ ID NO: 30584 - DNA, 19 bp, Homo sapiens
  siRNA target sequence for LIG3 (NM_002311.2,2348-2366).
ggtcaacaagatctactat

SEQ ID NO: 30585 - DNA, 19 bp, Homo sapiens
  siRNA target sequence for LIG3 (NM_002311.2,2432-2450).
caaatcggaggctcataca

SEQ ID NO: 30586 - DNA, 19 bp, Homo sapiens
  siRNA target sequence for LIG3 (NM_002311.2,2485-2503).
cccgaatccgagatgataa

SEQ ID NO: 30587 - DNA, 19 bp, Homo sapiens
  siRNA target sequence for LIG3 (NM_002311.2,2614-2632).
ggggtagcagtgaagagaa

SEQ ID NO: 30588 - DNA, 19 bp, Homo sapiens
  siRNA target sequence for LIG3 (NM_002311.2,2617-2635).
gtagcagtgaagagaataa

SEQ ID NO: 30589 - DNA, 19 bp, Homo sapiens
  siRNA target sequence for LIG3 (NM_002311.2,2701-2719).
cagaagggaagctgagtaa

SEQ ID NO: 30590 - DNA, 19 bp, Homo sapiens
  siRNA target sequence for LIG3 (NM_002311.2,2795-2813).
gtcttctccagtgaaagta

SEQ ID NO: 30591 - DNA, 19 bp, Homo sapiens
  siRNA target sequence for LIG3 (NM_013975.1,2844-2862).
ctgtgccaaacaaaggtat

SEQ ID NO: 30592 - DNA, 19 bp, Homo sapiens
  siRNA target sequence for LIG3 (NM_013975.1,2848-2866).
gccaaacaaaggtattgct

SEQ ID NO: 30593 - DNA, 19 bp, Homo sapiens
  siRNA target sequence for LIG3 (NM_013975.1,2921-2939).
ccgtctcagacgctacttt

SEQ ID NO: 30594 - DNA, 19 bp, Homo sapiens
  siRNA target sequence for LIG3 (NM_013975.1,2923-2941).
gtctcagacgctactttgt

SEQ ID NO: 30595 - DNA, 19 bp, Homo sapiens
  siRNA target sequence for LIG3 (NM_013975.1,2953-2971).
gggacctggtacaggaatt

SEQ ID NO: 30596 - DNA, 19 bp, Homo sapiens
  siRNA target sequence for LIG3 (NM_013975.1,2954-2972).
ggacctggtacaggaattt

SEQ ID NO: 30597 - DNA, 19 bp, Homo sapiens
  siRNA target sequence for LIG3 (NM_013975.1,2961-2979).
gtacaggaatttgatatga

SEQ ID NO: 30598 - DNA, 19 bp, Homo sapiens
  siRNA target sequence for LIG4 (NM_002312.2,276-294).
ggctgcctcacaaacttca

SEQ ID NO: 30599 - DNA, 19 bp, Homo sapiens
  siRNA target sequence for LIG4 (NM_002312.2,284-302).
cacaaacttcacaaactgt

SEQ ID NO: 30600 - DNA, 19 bp, Homo sapiens
  siRNA target sequence for LIG4 (NM_002312.2,335-353).
caactttagaacgaataca

SEQ ID NO: 30601 - DNA, 19 bp, Homo sapiens
  siRNA target sequence for LIG4 (NM_002312.2,343-361).
gaacgaatacagaaaagta

SEQ ID NO: 30602 - DNA, 19 bp, Homo sapiens
  siRNA target sequence for LIG4 (NM_002312.2,383-401).
gacacttcagggaattttt

SEQ ID NO: 30603 - DNA, 19 bp, Homo sapiens
  siRNA target sequence for LIG4 (NM_002312.2,453-471).
cacagactctttttatcca

SEQ ID NO: 30604 - DNA, 19 bp, Homo sapiens
  siRNA target sequence for LIG4 (NM_002312.2,547-565).
ctttatattgagttgctta

SEQ ID NO: 30605 - DNA, 19 bp, Homo sapiens
  siRNA target sequence for LIG4 (NM_002312.2,561-579).
gcttaatttacctagagat

SEQ ID NO: 30606 - DNA, 19 bp, Homo sapiens
  siRNA target sequence for LIG4 (NM_002312.2,590-608).
ccctcaaacttttaaacta

SEQ ID NO: 30607 - DNA, 19 bp, Homo sapiens
  siRNA target sequence for LIG4 (NM_002312.2,592-610).
ctcaaacttttaaactaca

SEQ ID NO: 30608 - DNA, 19 bp, Homo sapiens
  siRNA target sequence for LIG4 (NM_002312.2,643-661).
gactttgcaatgattgcat

SEQ ID NO: 30609 - DNA, 19 bp, Homo sapiens
  siRNA target sequence for LIG4 (NM_002312.2,688-706).
cagaaaggaagtttaacca

SEQ ID NO: 30610 - DNA, 19 bp, Homo sapiens
  siRNA target sequence for LIG4 (NM_002312.2,715-733).
gtaaacgaccttttagact

SEQ ID NO: 30611 - DNA, 19 bp, Homo sapiens
  siRNA target sequence for LIG4 (NM_002312.2,720-738).
cgaccttttagactcaatt

SEQ ID NO: 30612 - DNA, 19 bp, Homo sapiens
  siRNA target sequence for LIG4 (NM_002312.2,730-748).
gactcaattgccagcaata

SEQ ID NO: 30613 - DNA, 19 bp, Homo sapiens
  siRNA target sequence for LIG4 (NM_002312.2,732-750).
ctcaattgccagcaataat

SEQ ID NO: 30614 - DNA, 19 bp, Homo sapiens
  siRNA target sequence for LIG4 (NM_002312.2,741-759).
cagcaataattctgctaaa

SEQ ID NO: 30615 - DNA, 19 bp, Homo sapiens
  siRNA target sequence for LIG4 (NM_002312.2,744-762).
caataattctgctaaaaga

SEQ ID NO: 30616 - DNA, 19 bp, Homo sapiens
  siRNA target sequence for LIG4 (NM_002312.2,780-798).
gagccttcttcaacttata

SEQ ID NO: 30617 - DNA, 19 bp, Homo sapiens
  siRNA target sequence for LIG4 (NM_002312.2,827-845).
ggcttatacggatgatcat

SEQ ID NO: 30618 - DNA, 19 bp, Homo sapiens
  siRNA target sequence for LIG4 (NM_002312.2,835-853).
cggatgatcataaaggatt

SEQ ID NO: 30619 - DNA, 19 bp, Homo sapiens
  siRNA target sequence for LIG4 (NM_002312.2,863-881).
gtgttagtcagcaaactat

SEQ ID NO: 30620 - DNA, 19 bp, Homo sapiens
  siRNA target sequence for LIG4 (NM_002312.2,865-883).
gttagtcagcaaactatct

SEQ ID NO: 30621 - DNA, 19 bp, Homo sapiens
  siRNA target sequence for LIG4 (NM_002312.2,901-919).
gatgctgctgagttgcata

SEQ ID NO: 30622 - DNA, 19 bp, Homo sapiens
  siRNA target sequence for LIG4 (NM_002312.2,905-923).
ctgctgagttgcataatgt

SEQ ID NO: 30623 - DNA, 19 bp, Homo sapiens
  siRNA target sequence for LIG4 (NM_002312.2,907-925).
gctgagttgcataatgtca

SEQ ID NO: 30624 - DNA, 19 bp, Homo sapiens
  siRNA target sequence for LIG4 (NM_002312.2,970-988).
gtaggactcagtgatattt

SEQ ID NO: 30625 - DNA, 19 bp, Homo sapiens
  siRNA target sequence for LIG4 (NM_002312.2,1036-1054).
gatattgagcacattgaga

SEQ ID NO: 30626 - DNA, 19 bp, Homo sapiens
  siRNA target sequence for LIG4 (NM_002312.2,1096-1114).
gatggtgaacgtatgcaaa

SEQ ID NO: 30627 - DNA, 19 bp, Homo sapiens
  siRNA target sequence for LIG4 (NM_002312.2,1100-1118).
gtgaacgtatgcaaatgca

SEQ ID NO: 30628 - DNA, 19 bp, Homo sapiens
  siRNA target sequence for LIG4 (NM_002312.2,1148-1166).
ctcgaaatggatataacta

SEQ ID NO: 30629 - DNA, 19 bp, Homo sapiens
  siRNA target sequence for LIG4 (NM_002312.2,1150-1168).
cgaaatggatataactaca

SEQ ID NO: 30630 - DNA, 19 bp, Homo sapiens
  siRNA target sequence for LIG4 (NM_002312.2,1262-1280).
gtgagatgatggcctataa

SEQ ID NO: 30631 - DNA, 19 bp, Homo sapiens
  siRNA target sequence for LIG4 (NM_002312.2,1266-1284).
gatgatggcctataatcct

SEQ ID NO: 30632 - DNA, 19 bp, Homo sapiens
  siRNA target sequence for LIG4 (NM_002312.2,1269-1287).
gatggcctataatcctaat

SEQ ID NO: 30633 - DNA, 19 bp, Homo sapiens
  siRNA target sequence for LIG4 (NM_002312.2,1272-1290).
ggcctataatcctaataca

SEQ ID NO: 30634 - DNA, 19 bp, Homo sapiens
  siRNA target sequence for LIG4 (NM_002312.2,1282-1300).
cctaatacacaaactttca

SEQ ID NO: 30635 - DNA, 19 bp, Homo sapiens
  siRNA target sequence for LIG4 (NM_002312.2,1283-1301).
ctaatacacaaactttcat

SEQ ID NO: 30636 - DNA, 19 bp, Homo sapiens
  siRNA target sequence for LIG4 (NM_002312.2,1308-1326).
gggaactaagtttgatatt

SEQ ID NO: 30637 - DNA, 19 bp, Homo sapiens
  siRNA target sequence for LIG4 (NM_002312.2,1346-1364).
ctgatctgcaaacttgtta

SEQ ID NO: 30638 - DNA, 19 bp, Homo sapiens
  siRNA target sequence for LIG4 (NM_002312.2,1353-1371).
gcaaacttgttattgtgtt

SEQ ID NO: 30639 - DNA, 19 bp, Homo sapiens
  siRNA target sequence for LIG4 (NM_002312.2,1421-1439).
gaaagaggtatgagattct

SEQ ID NO: 30640 - DNA, 19 bp, Homo sapiens
  siRNA target sequence for LIG4 (NM_002312.2,1425-1443).
gaggtatgagattcttagt

SEQ ID NO: 30641 - DNA, 19 bp, Homo sapiens
  siRNA target sequence for LIG4 (NM_002312.2,1498-1516).
catactaagaatgaagtaa

SEQ ID NO: 30642 - DNA, 19 bp, Homo sapiens
  siRNA target sequence for LIG4 (NM_002312.2,1606-1624).
gaagggtggttaaaaatta

SEQ ID NO: 30643 - DNA, 19 bp, Homo sapiens
  siRNA target sequence for LIG4 (NM_002312.2,1640-1658).
gtggactaatggatgaatt

SEQ ID NO: 30644 - DNA, 19 bp, Homo sapiens
  siRNA target sequence for LIG4 (NM_002312.2,1643-1661).
gactaatggatgaattgga

SEQ ID NO: 30645 - DNA, 19 bp, Homo sapiens
  siRNA target sequence for LIG4 (NM_002312.2,1678-1696).
ggatattggggtaaaggat

SEQ ID NO: 30646 - DNA, 19 bp, Homo sapiens
  siRNA target sequence for LIG4 (NM_002312.2,1694-1712).
gatcacggggtggaatgat

SEQ ID NO: 30647 - DNA, 19 bp, Homo sapiens
  siRNA target sequence for LIG4 (NM_002312.2,1702-1720).
ggtggaatgatgtctcatt

SEQ ID NO: 30648 - DNA, 19 bp, Homo sapiens
  siRNA target sequence for LIG4 (NM_002312.2,1703-1721).
gtggaatgatgtctcattt

SEQ ID NO: 30649 - DNA, 19 bp, Homo sapiens
  siRNA target sequence for LIG4 (NM_002312.2,1806-1824).
catgaaagaactgtatgat

SEQ ID NO: 30650 - DNA, 19 bp, Homo sapiens
  siRNA target sequence for LIG4 (NM_002312.2,1818-1836).
gtatgatctgggtttgaaa

SEQ ID NO: 30651 - DNA, 19 bp, Homo sapiens
  siRNA target sequence for LIG4 (NM_002312.2,1850-1868).
ggaagccttttcatagaaa

SEQ ID NO: 30652 - DNA, 19 bp, Homo sapiens
  siRNA target sequence for LIG4 (NM_002312.2,1854-1872).
gccttttcatagaaaagct

SEQ ID NO: 30653 - DNA, 19 bp, Homo sapiens
  siRNA target sequence for LIG4 (NM_002312.2,1925-1943).
cttgtaattctgtcattgt

SEQ ID NO: 30654 - DNA, 19 bp, Homo sapiens
  siRNA target sequence for LIG4 (NM_002312.2,1960-1978).
gagatcgtacccagtgata

SEQ ID NO: 30655 - DNA, 19 bp, Homo sapiens
  siRNA target sequence for LIG4 (NM_002312.2,1965-1983).
cgtacccagtgatatgtat

SEQ ID NO: 30656 - DNA, 19 bp, Homo sapiens
  siRNA target sequence for LIG4 (NM_002312.2,1966-1984).
gtacccagtgatatgtata

SEQ ID NO: 30657 - DNA, 19 bp, Homo sapiens
  siRNA target sequence for LIG4 (NM_002312.2,1969-1987).
cccagtgatatgtataaaa

SEQ ID NO: 30658 - DNA, 19 bp, Homo sapiens
  siRNA target sequence for LIG4 (NM_002312.2,1998-2016).
cttgcgttttccacgaatt

SEQ ID NO: 30659 - DNA, 19 bp, Homo sapiens
  siRNA target sequence for LIG4 (NM_002312.2,2001-2019).
gcgttttccacgaattgaa

SEQ ID NO: 30660 - DNA, 19 bp, Homo sapiens
  siRNA target sequence for LIG4 (NM_002312.2,2008-2026).
ccacgaattgaaaagataa

SEQ ID NO: 30661 - DNA, 19 bp, Homo sapiens
  siRNA target sequence for LIG4 (NM_002312.2,2093-2111).
ctggtaagctcgcatctaa

SEQ ID NO: 30662 - DNA, 19 bp, Homo sapiens
  siRNA target sequence for LIG4 (NM_002312.2,2104-2122).
gcatctaaacacctttata

SEQ ID NO: 30663 - DNA, 19 bp, Homo sapiens
  siRNA target sequence for LIG4 (NM_002312.2,2161-2179).
gctgccccaaagatgaaga

SEQ ID NO: 30664 - DNA, 19 bp, Homo sapiens
  siRNA target sequence for LIG4 (NM_002312.2,2172-2190).
gatgaagaaagttattgga

SEQ ID NO: 30665 - DNA, 19 bp, Homo sapiens
  siRNA target sequence for LIG4 (NM_002312.2,2212-2230).
cctaaccttactaacgtta

SEQ ID NO: 30666 - DNA, 19 bp, Homo sapiens
  siRNA target sequence for LIG4 (NM_002312.2,2213-2231).
ctaaccttactaacgttaa

SEQ ID NO: 30667 - DNA, 19 bp, Homo sapiens
  siRNA target sequence for LIG4 (NM_002312.2,2254-2272).
gatgtagagttttgtgtta

SEQ ID NO: 30668 - DNA, 19 bp, Homo sapiens
  siRNA target sequence for LIG4 (NM_002312.2,2269-2287).
gttatgagtggaacagata

SEQ ID NO: 30669 - DNA, 19 bp, Homo sapiens
  siRNA target sequence for LIG4 (NM_002312.2,2320-2338).
gcagaatttggtggttata

SEQ ID NO: 30670 - DNA, 19 bp, Homo sapiens
  siRNA target sequence for LIG4 (NM_002312.2,2329-2347).
ggtggttatatagtacaaa

SEQ ID NO: 30671 - DNA, 19 bp, Homo sapiens
  siRNA target sequence for LIG4 (NM_002312.2,2330-2348).
gtggttatatagtacaaaa

SEQ ID NO: 30672 - DNA, 19 bp, Homo sapiens
  siRNA target sequence for LIG4 (NM_002312.2,2357-2375).
cagacacgtactgtgtaat

SEQ ID NO: 30673 - DNA, 19 bp, Homo sapiens
  siRNA target sequence for LIG4 (NM_002312.2,2361-2379).
cacgtactgtgtaattgca

SEQ ID NO: 30674 - DNA, 19 bp, Homo sapiens
  siRNA target sequence for LIG4 (NM_002312.2,2391-2409).
catcagagtgaaaaacata

SEQ ID NO: 30675 - DNA, 19 bp, Homo sapiens
  siRNA target sequence for LIG4 (NM_002312.2,2483-2501).
catggcagcctcgctttat

SEQ ID NO: 30676 - DNA, 19 bp, Homo sapiens
  siRNA target sequence for LIG4 (NM_002312.2,2486-2504).
ggcagcctcgctttatgat

SEQ ID NO: 30677 - DNA, 19 bp, Homo sapiens
  siRNA target sequence for LIG4 (NM_002312.2,2487-2505).
gcagcctcgctttatgatt

SEQ ID NO: 30678 - DNA, 19 bp, Homo sapiens
  siRNA target sequence for LIG4 (NM_002312.2,2490-2508).
gcctcgctttatgattcat

SEQ ID NO: 30679 - DNA, 19 bp, Homo sapiens
  siRNA target sequence for LIG4 (NM_002312.2,2491-2509).
cctcgctttatgattcata

SEQ ID NO: 30680 - DNA, 19 bp, Homo sapiens
  siRNA target sequence for LIG4 (NM_002312.2,2492-2510).
ctcgctttatgattcatat

SEQ ID NO: 30681 - DNA, 19 bp, Homo sapiens
  siRNA target sequence for LIG4 (NM_002312.2,2494-2512).
cgctttatgattcatatgt

SEQ ID NO: 30682 - DNA, 19 bp, Homo sapiens
  siRNA target sequence for LIG4 (NM_002312.2,2537-2555).
cccgtgaatatgattgcta

SEQ ID NO: 30683 - DNA, 19 bp, Homo sapiens
  siRNA target sequence for LIG4 (NM_002312.2,2538-2556).
ccgtgaatatgattgctat

SEQ ID NO: 30684 - DNA, 19 bp, Homo sapiens
  siRNA target sequence for LIG4 (NM_002312.2,2552-2570).
gctatggtgatagttattt

SEQ ID NO: 30685 - DNA, 19 bp, Homo sapiens
  siRNA target sequence for LIG4 (NM_002312.2,2656-2674).
ctgattgctgatttagaat

SEQ ID NO: 30686 - DNA, 19 bp, Homo sapiens
  siRNA target sequence for LIG4 (NM_002312.2,2713-2731).
cgacgccacaccgtttatt

SEQ ID NO: 30687 - DNA, 19 bp, Homo sapiens
  siRNA target sequence for LIG4 (NM_002312.2,2714-2732).
gacgccacaccgtttattt

SEQ ID NO: 30688 - DNA, 19 bp, Homo sapiens
  siRNA target sequence for LIG4 (NM_002312.2,2717-2735).
gccacaccgtttatttgga

SEQ ID NO: 30689 - DNA, 19 bp, Homo sapiens
  siRNA target sequence for LIG4 (NM_002312.2,2734-2752).
gactcgtatgctgttatta

SEQ ID NO: 30690 - DNA, 19 bp, Homo sapiens
  siRNA target sequence for LIG4 (NM_002312.2,2736-2754).
ctcgtatgctgttattaat

SEQ ID NO: 30691 - DNA, 19 bp, Homo sapiens
  siRNA target sequence for LIG4 (NM_002312.2,2776-2794).
gggacaaggttagctatta

SEQ ID NO: 30692 - DNA, 19 bp, Homo sapiens
  siRNA target sequence for LIG4 (NM_002312.2,2777-2795).
ggacaaggttagctattaa

SEQ ID NO: 30693 - DNA, 19 bp, Homo sapiens
  siRNA target sequence for LIG4 (NM_002312.2,2778-2796).
gacaaggttagctattaaa

SEQ ID NO: 30694 - DNA, 19 bp, Homo sapiens
  siRNA target sequence for LIG4 (NM_002312.2,2799-2817).
cttggagcttcggtttcat

SEQ ID NO: 30695 - DNA, 19 bp, Homo sapiens
  siRNA target sequence for LIG4 (NM_002312.2,2847-2865).
gggagtgtctcatgtaata

SEQ ID NO: 30696 - DNA, 19 bp, Homo sapiens
  siRNA target sequence for LIG4 (NM_002312.2,2848-2866).
ggagtgtctcatgtaataa

SEQ ID NO: 30697 - DNA, 19 bp, Homo sapiens
  siRNA target sequence for LIG4 (NM_002312.2,2882-2900).
gtcgtgttgcagattttaa

SEQ ID NO: 30698 - DNA, 19 bp, Homo sapiens
  siRNA target sequence for LIG4 (NM_002312.2,2948-2966).
gttgggtaactgattcaat

SEQ ID NO: 30699 - DNA, 19 bp, Homo sapiens
  siRNA target sequence for LIG4 (NM_002312.2,2953-2971).
gtaactgattcaatagaca

SEQ ID NO: 30700 - DNA, 19 bp, Homo sapiens
  siRNA target sequence for LIN28 (NM_024674.3,317-335).
ccccagtggatgtctttgt

SEQ ID NO: 30701 - DNA, 19 bp, Homo sapiens
  siRNA target sequence for LIN28 (NM_024674.3,388-406).
gcagtggagttcaccttta

SEQ ID NO: 30702 - DNA, 19 bp, Homo sapiens
  siRNA target sequence for LIN28 (NM_024674.3,448-466).
cctggtggagtattctgta

SEQ ID NO: 30703 - DNA, 19 bp, Homo sapiens
  siRNA target sequence for LIN28 (NM_024674.3,504-522).
gaagcgcagatcaaaagga

SEQ ID NO: 30704 - DNA, 19 bp, Homo sapiens
  siRNA target sequence for LIN28 (NM_024674.3,609-627).
gagcatcagccatatggta

SEQ ID NO: 30705 - DNA, 19 bp, Homo sapiens
  siRNA target sequence for LIN28 (NM_024674.3,669-687).
gggaaagccaacctacttt

SEQ ID NO: 30706 - DNA, 19 bp, Homo sapiens
  siRNA target sequence for LIN28 (NM_024674.3,724-742).
ctcccggaggcacagaatt

SEQ ID NO: 30707 - DNA, 19 bp, Homo sapiens
  siRNA target sequence for LOC112885 (NM_138415.1,426-444).
ccaagcagcccccaacatt

SEQ ID NO: 30708 - DNA, 19 bp, Homo sapiens
  siRNA target sequence for LOC112885 (NM_138415.1,1010-1028).
ctggttaccacggaacatt

SEQ ID NO: 30709 - DNA, 19 bp, Homo sapiens
  siRNA target sequence for LOC112885 (NM_138415.1,1390-1408).
ggccatcgtgcactcttat

SEQ ID NO: 30710 - DNA, 19 bp, Homo sapiens
  siRNA target sequence for LOC112885 (NM_138415.1,1514-1532).
gcgtcagcagtgcagaaat

SEQ ID NO: 30711 - DNA, 19 bp, Homo sapiens
  siRNA target sequence for LOC112885 (NM_138415.1,1602-1620).
ccctcctgagactgataca

SEQ ID NO: 30712 - DNA, 19 bp, Homo sapiens
  siRNA target sequence for LOC115950 (NM_138783.1,365-383).
gggagcaggtccccaaaaa

SEQ ID NO: 30713 - DNA, 19 bp, Homo sapiens
  siRNA target sequence for LOC115950 (NM_138783.1,922-940).
cccagcgccctctttgaga

SEQ ID NO: 30714 - DNA, 19 bp, Homo sapiens
  siRNA target sequence for LOC115950 (NM_138783.1,1004-1022).
gctcacaggtgatcatcat

SEQ ID NO: 30715 - DNA, 19 bp, Homo sapiens
  siRNA target sequence for LOC115950 (NM_138783.1,1005-1023).
ctcacaggtgatcatcatt

SEQ ID NO: 30716 - DNA, 19 bp, Homo sapiens
  siRNA target sequence for LOC115950 (NM_138783.1,1234-1252).
gaggacctgtgcttgctaa

SEQ ID NO: 30717 - DNA, 19 bp, Homo sapiens
  siRNA target sequence for LOC115950 (NM_138783.1,1362-1380).
gtcagccatcatctatgaa

SEQ ID NO: 30718 - DNA, 19 bp, Homo sapiens
  siRNA target sequence for LOC115950 (NM_138783.1,1509-1527).
ccagaaccacgtcaatctt

SEQ ID NO: 30719 - DNA, 19 bp, Homo sapiens
  siRNA target sequence for LOC115950 (NM_138783.1,1606-1624).
cggcacatgatcatccatt

SEQ ID NO: 30720 - DNA, 19 bp, Homo sapiens
  siRNA target sequence for LOC116071 (NM_138456.2,805-823).
cgcctgtgccccatggatt

SEQ ID NO: 30721 - DNA, 19 bp, Homo sapiens
  siRNA target sequence for LOC117584 (NM_057178.2,253-271).
ggatgcaggcctattccaa

SEQ ID NO: 30722 - DNA, 19 bp, Homo sapiens
  siRNA target sequence for LOC117584 (NM_057178.2,364-382).
cctgcttggactgtaagaa

SEQ ID NO: 30723 - DNA, 19 bp, Homo sapiens
  siRNA target sequence for LOC117584 (NM_057178.2,365-383).
ctgcttggactgtaagaaa

SEQ ID NO: 30724 - DNA, 19 bp, Homo sapiens
  siRNA target sequence for LOC117584 (NM_057178.2,367-385).
gcttggactgtaagaaaaa

SEQ ID NO: 30725 - DNA, 19 bp, Homo sapiens
  siRNA target sequence for LOC117584 (NM_057178.2,969-987).
cgcaactttgtcaactaca

SEQ ID NO: 30726 - DNA, 19 bp, Homo sapiens
  siRNA target sequence for LOC117584 (NM_057178.2,970-988).
gcaactttgtcaactacaa

SEQ ID NO: 30727 - DNA, 19 bp, Homo sapiens
  siRNA target sequence for LOC117584 (NM_057178.2,1021-1039).
gagtgacccggctatacaa

SEQ ID NO: 30728 - DNA, 19 bp, Homo sapiens
  siRNA target sequence for LOC117584 (NM_057178.2,1031-1049).
gctatacaaggatcagaaa

SEQ ID NO: 30729 - DNA, 19 bp, Homo sapiens
  siRNA target sequence for LOC117584 (NM_057178.2,1069-1087).
gtggtgccgaagaccaaaa

SEQ ID NO: 30730 - DNA, 19 bp, Homo sapiens
  siRNA target sequence for LOC117584 (NM_057178.2,1116-1134).
gagaacctgtgtaagatct

SEQ ID NO: 30731 - DNA, 19 bp, Homo sapiens
  siRNA target sequence for LOC127540 (NM_145205.2,152-170).
ctcttcttacgttcacttt

SEQ ID NO: 30732 - DNA, 19 bp, Homo sapiens
  siRNA target sequence for LOC151871 (NM_138815.2,268-286).
gatagcagcaagaagaatt

SEQ ID NO: 30733 - DNA, 19 bp, Homo sapiens
  siRNA target sequence for LOC151871 (NM_138815.2,327-345).
gacactggtgccagttaaa

SEQ ID NO: 30734 - DNA, 19 bp, Homo sapiens
  siRNA target sequence for LOC151871 (NM_138815.2,340-358).
gttaaagatgacgcaaata

SEQ ID NO: 30735 - DNA, 19 bp, Homo sapiens
  siRNA target sequence for LOC151871 (NM_138815.2,369-387).
ggaaccaagcgtttcttca

SEQ ID NO: 30736 - DNA, 19 bp, Homo sapiens
  siRNA target sequence for LOC151871 (NM_138815.2,373-391).
ccaagcgtttcttcaactt

SEQ ID NO: 30737 - DNA, 19 bp, Homo sapiens
  siRNA target sequence for LOC151871 (NM_138815.2,408-426).
gaagcctaagaaatacaat

SEQ ID NO: 30738 - DNA, 19 bp, Homo sapiens
  siRNA target sequence for LOC151871 (NM_138815.2,427-445).
ccaggtcatctacttcaaa

SEQ ID NO: 30739 - DNA, 19 bp, Homo sapiens
  siRNA target sequence for LOC151871 (NM_138815.2,496-514).
cttcccttgccgaccattt

SEQ ID NO: 30740 - DNA, 19 bp, Homo sapiens
  siRNA target sequence for LOC151871 (NM_138815.2,551-569).
gggactggtgtcaacaact

SEQ ID NO: 30741 - DNA, 19 bp, Homo sapiens
  siRNA target sequence for LOC151871 (NM_138815.2,562-580).
caacaactcggtttgagta

SEQ ID NO: 30742 - DNA, 19 bp, Homo sapiens
  siRNA target sequence for LOC151871 (NM_138815.2,565-583).
caactcggtttgagtacta

SEQ ID NO: 30743 - DNA, 19 bp, Homo sapiens
  siRNA target sequence for LOC151871 (NM_138815.2,576-594).
gagtactaatggcaagaaa

SEQ ID NO: 30744 - DNA, 19 bp, Homo sapiens
  siRNA target sequence for LOC151871 (NM_138815.2,587-605).
gcaagaaaatcgaagttta

SEQ ID NO: 30745 - DNA, 19 bp, Homo sapiens
  siRNA target sequence for LOC151871 (NM_138815.2,588-606).
caagaaaatcgaagtttat

SEQ ID NO: 30746 - DNA, 19 bp, Homo sapiens
  siRNA target sequence for LOC151871 (NM_138815.2,611-629).
ggcttcataggcatgctta

SEQ ID NO: 30747 - DNA, 19 bp, Homo sapiens
  siRNA target sequence for LOC151871 (NM_138815.2,631-649).
cctgaacaacggcaagata

SEQ ID NO: 30748 - DNA, 19 bp, Homo sapiens
  siRNA target sequence for LOC151871 (NM_138815.2,641-659).
ggcaagatatgcctgaaat

SEQ ID NO: 30749 - DNA, 19 bp, Homo sapiens
  siRNA target sequence for LOC151871 (NM_138815.2,722-740).
ggcttcagagaagttatga

SEQ ID NO: 30750 - DNA, 19 bp, Homo sapiens
  siRNA target sequence for LOC151871 (NM_138815.2,844-862).
cctaaggctttgaattcat

SEQ ID NO: 30751 - DNA, 19 bp, Homo sapiens
  siRNA target sequence for LOC151871 (NM_138815.2,1005-1023).
cactcacaggaggatgatt

SEQ ID NO: 30752 - DNA, 19 bp, Homo sapiens
  siRNA target sequence for LOC151871 (NM_138815.2,1097-1115).
ctaagaggaataagaagat

SEQ ID NO: 30753 - DNA, 19 bp, Homo sapiens
  siRNA target sequence for LOC151871 (NM_138815.2,1124-1142).
gattaatgacagtagagaa

SEQ ID NO: 30754 - DNA, 19 bp, Homo sapiens
  siRNA target sequence for LOC153222 (NM_153607.1,390-408).
gcacagatctcttagcaaa

SEQ ID NO: 30755 - DNA, 19 bp, Homo sapiens
  siRNA target sequence for LOC153222 (NM_153607.1,414-432).
cggatccagatttcatgta

SEQ ID NO: 30756 - DNA, 19 bp, Homo sapiens
  siRNA target sequence for LOC153222 (NM_153607.1,415-433).
ggatccagatttcatgtat

SEQ ID NO: 30757 - DNA, 19 bp, Homo sapiens
  siRNA target sequence for LOC153222 (NM_153607.1,420-438).
cagatttcatgtatgaact

SEQ ID NO: 30758 - DNA, 19 bp, Homo sapiens
  siRNA target sequence for LOC153222 (NM_153607.1,448-466).
gatgaactaccaacagaat

SEQ ID NO: 30759 - DNA, 19 bp, Homo sapiens
  siRNA target sequence for LOC153222 (NM_153607.1,493-511).
ggactgcaaagacattgaa

SEQ ID NO: 30760 - DNA, 19 bp, Homo sapiens
  siRNA target sequence for LOC153222 (NM_153607.1,509-527).
gaaaatctggagtctttca

SEQ ID NO: 30761 - DNA, 19 bp, Homo sapiens
  siRNA target sequence for LOC153222 (NM_153607.1,539-557).
gataatgagggtgctttaa

SEQ ID NO: 30762 - DNA, 19 bp, Homo sapiens
  siRNA target sequence for LOC153222 (NM_153607.1,569-587).
gaacagtgggatacatact

SEQ ID NO: 30763 - DNA, 19 bp, Homo sapiens
  siRNA target sequence for LOC153222 (NM_153607.1,588-606).
gtgaagacctaacgaaata

SEQ ID NO: 30764 - DNA, 19 bp, Homo sapiens
  siRNA target sequence for LOC153222 (NM_153607.1,590-608).
gaagacctaacgaaatata

SEQ ID NO: 30765 - DNA, 19 bp, Homo sapiens
  siRNA target sequence for LOC153222 (NM_153607.1,593-611).
gacctaacgaaatatacca

SEQ ID NO: 30766 - DNA, 19 bp, Homo sapiens
  siRNA target sequence for LOC153222 (NM_153607.1,595-613).
cctaacgaaatataccaaa

SEQ ID NO: 30767 - DNA, 19 bp, Homo sapiens
  siRNA target sequence for LOC153222 (NM_153607.1,624-642).
gtgacatctggggaacaaa

SEQ ID NO: 30768 - DNA, 19 bp, Homo sapiens
  siRNA target sequence for LOC153222 (NM_153607.1,659-677).
ggtcttgatgacttttcta

SEQ ID NO: 30769 - DNA, 19 bp, Homo sapiens
  siRNA target sequence for LOC153222 (NM_153607.1,670-688).
cttttctagtccttaccaa

SEQ ID NO: 30770 - DNA, 19 bp, Homo sapiens
  siRNA target sequence for LOC153222 (NM_153607.1,675-693).
ctagtccttaccaagatga

SEQ ID NO: 30771 - DNA, 19 bp, Homo sapiens
  siRNA target sequence for LOC153222 (NM_153607.1,685-703).
ccaagatgaagaggttata

SEQ ID NO: 30772 - DNA, 19 bp, Homo sapiens
  siRNA target sequence for LOC153222 (NM_153607.1,713-731).
ccaactttagctcaactta

SEQ ID NO: 30773 - DNA, 19 bp, Homo sapiens
  siRNA target sequence for LOC153222 (NM_153607.1,714-732).
caactttagctcaacttaa

SEQ ID NO: 30774 - DNA, 19 bp, Homo sapiens
  siRNA target sequence for LOC153222 (NM_153607.1,737-755).
gaggactcacagtctgttt

SEQ ID NO: 30775 - DNA, 19 bp, Homo sapiens
  siRNA target sequence for LOC153222 (NM_153607.1,739-757).
ggactcacagtctgtttct

SEQ ID NO: 30776 - DNA, 19 bp, Homo sapiens
  siRNA target sequence for LOC153222 (NM_153607.1,772-790).
ccccgattcacttttcagt

SEQ ID NO: 30777 - DNA, 19 bp, Homo sapiens
  siRNA target sequence for LOC153222 (NM_153607.1,821-839).
cctggtaaaaagatcacaa

SEQ ID NO: 30778 - DNA, 19 bp, Homo sapiens
  siRNA target sequence for LOC153222 (NM_153607.1,979-997).
gaactttcatgttgaatgt

SEQ ID NO: 30779 - DNA, 19 bp, Homo sapiens
  siRNA target sequence for LOC153222 (NM_153607.1,1053-1071).
ccttgttgagccagattca

SEQ ID NO: 30780 - DNA, 19 bp, Homo sapiens
  siRNA target sequence for LOC153222 (NM_153607.1,1189-1207).
ccaggaactattactaagt

SEQ ID NO: 30781 - DNA, 19 bp, Homo sapiens
  siRNA target sequence for LOC153222 (NM_153607.1,1339-1357).
gggtgaacagccaactaaa

SEQ ID NO: 30782 - DNA, 19 bp, Homo sapiens
  siRNA target sequence for LOC153222 (NM_153607.1,1340-1358).
ggtgaacagccaactaaat

SEQ ID NO: 30783 - DNA, 19 bp, Homo sapiens
  siRNA target sequence for LOC153222 (NM_153607.1,1343-1361).
gaacagccaactaaatgca

SEQ ID NO: 30784 - DNA, 19 bp, Homo sapiens
  siRNA target sequence for LOC153222 (NM_153607.1,1612-1630).
gtatagtgaacaacttaca

SEQ ID NO: 30785 - DNA, 19 bp, Homo sapiens
  siRNA target sequence for LOC153222 (NM_153607.1,1664-1682).
gagtggaaccgagatactt

SEQ ID NO: 30786 - DNA, 19 bp, Homo sapiens
  siRNA target sequence for LOC153222 (NM_153607.1,1674-1692).
gagatactttgccaagtaa

SEQ ID NO: 30787 - DNA, 19 bp, Homo sapiens
  siRNA target sequence for LOC153222 (NM_153607.1,1702-1720).
gaaaaatggcttacatcat

SEQ ID NO: 30788 - DNA, 19 bp, Homo sapiens
  siRNA target sequence for LOC153222 (NM_153607.1,1711-1729).
cttacatcatggaaaatat

SEQ ID NO: 30789 - DNA, 19 bp, Homo sapiens
  siRNA target sequence for LOC153222 (NM_153607.1,1738-1756).
gaagtcacggagaactgat

SEQ ID NO: 30790 - DNA, 19 bp, Homo sapiens
  siRNA target sequence for LOC153222 (NM_153607.1,1741-1759).
gtcacggagaactgatgta

SEQ ID NO: 30791 - DNA, 19 bp, Homo sapiens
  siRNA target sequence for LOC153222 (NM_153607.1,1789-1807).
cctccagataggcaatgaa

SEQ ID NO: 30792 - DNA, 19 bp, Homo sapiens
  siRNA target sequence for LOC153222 (NM_153607.1,1849-1867).
cagtgagcttcccttaaca

SEQ ID NO: 30793 - DNA, 19 bp, Homo sapiens
  siRNA target sequence for LOC153222 (NM_153607.1,1908-1926).
ccagagcttgtcggttaaa

SEQ ID NO: 30794 - DNA, 19 bp, Homo sapiens
  siRNA target sequence for LOC153222 (NM_153607.1,1911-1929).
gagcttgtcggttaaagaa

SEQ ID NO: 30795 - DNA, 19 bp, Homo sapiens
  siRNA target sequence for LOC153222 (NM_153607.1,1913-1931).
gcttgtcggttaaagaaga

SEQ ID NO: 30796 - DNA, 19 bp, Homo sapiens
  siRNA target sequence for LOC153222 (NM_153607.1,1935-1953).
cccagtatgaagctaataa

SEQ ID NO: 30797 - DNA, 19 bp, Homo sapiens
  siRNA target sequence for LOC153222 (NM_153607.1,1965-1983).
ggggcctcaacacagaata

SEQ ID NO: 30798 - DNA, 19 bp, Homo sapiens
  siRNA target sequence for LOC153222 (NM_153607.1,1969-1987).
cctcaacacagaatatggt

SEQ ID NO: 30799 - DNA, 19 bp, Homo sapiens
  siRNA target sequence for LOC153222 (NM_153607.1,1970-1988).
ctcaacacagaatatggta

SEQ ID NO: 30800 - DNA, 19 bp, Homo sapiens
  siRNA target sequence for LOC153222 (NM_153607.1,1979-1997).
gaatatggtaatttattgt

SEQ ID NO: 30801 - DNA, 19 bp, Homo sapiens
  siRNA target sequence for LOC153222 (NM_153607.1,2011-2029).
catcaagcaagagattgta

SEQ ID NO: 30802 - DNA, 19 bp, Homo sapiens
  siRNA target sequence for LOC153222 (NM_153607.1,2080-2098).
gcttgaaatcctcattaaa

SEQ ID NO: 30803 - DNA, 19 bp, Homo sapiens
  siRNA target sequence for LOC153222 (NM_153607.1,2120-2138).
gctgggcaaacctcagaat

SEQ ID NO: 30804 - DNA, 19 bp, Homo sapiens
  siRNA target sequence for LOC153222 (NM_153607.1,2126-2144).
caaacctcagaatttgtta

SEQ ID NO: 30805 - DNA, 19 bp, Homo sapiens
  siRNA target sequence for LOC153222 (NM_153607.1,2192-2210).
gtaggattaaggataccaa

SEQ ID NO: 30806 - DNA, 19 bp, Homo sapiens
  siRNA target sequence for LOC221143 (NM_174928.1,175-193).
gagccaggcgaggatgata

SEQ ID NO: 30807 - DNA, 19 bp, Homo sapiens
  siRNA target sequence for LOC221143 (NM_174928.1,179-197).
caggcgaggatgataaata

SEQ ID NO: 30808 - DNA, 19 bp, Homo sapiens
  siRNA target sequence for LOC221143 (NM_174928.1,181-199).
ggcgaggatgataaatata

SEQ ID NO: 30809 - DNA, 19 bp, Homo sapiens
  siRNA target sequence for LOC221143 (NM_174928.1,182-200).
gcgaggatgataaatataa

SEQ ID NO: 30810 - DNA, 19 bp, Homo sapiens
  siRNA target sequence for LOC221143 (NM_174928.1,233-251).
gccagttttggtatagtca

SEQ ID NO: 30811 - DNA, 19 bp, Homo sapiens
  siRNA target sequence for LOC221143 (NM_174928.1,270-288).
ggcacaggaggcaattgca

SEQ ID NO: 30812 - DNA, 19 bp, Homo sapiens
  siRNA target sequence for LOC221143 (NM_174928.1,329-347).
ctagtgtttaccagaaact

SEQ ID NO: 30813 - DNA, 19 bp, Homo sapiens
  siRNA target sequence for LOC221143 (NM_174928.1,360-378).
cagagaaaacttttcgata

SEQ ID NO: 30814 - DNA, 19 bp, Homo sapiens
  siRNA target sequence for LOC221143 (NM_174928.1,364-382).
gaaaacttttcgatataca

SEQ ID NO: 30815 - DNA, 19 bp, Homo sapiens
  siRNA target sequence for LOC221143 (NM_174928.1,374-392).
cgatatacatctttgaata

SEQ ID NO: 30816 - DNA, 19 bp, Homo sapiens
  siRNA target sequence for LOC221143 (NM_174928.1,411-429).
gtatggagaggagtttatt

SEQ ID NO: 30817 - DNA, 19 bp, Homo sapiens
  siRNA target sequence for LOC221143 (NM_174928.1,415-433).
ggagaggagtttattttct

SEQ ID NO: 30818 - DNA, 19 bp, Homo sapiens
  siRNA target sequence for LOC221143 (NM_174928.1,453-471).
ggacttacccgaaagaatt

SEQ ID NO: 30819 - DNA, 19 bp, Homo sapiens
  siRNA target sequence for LOC221143 (NM_174928.1,456-474).
cttacccgaaagaattgct

SEQ ID NO: 30820 - DNA, 19 bp, Homo sapiens
  siRNA target sequence for LOC221143 (NM_174928.1,467-485).
gaattgctgcacatagttt

SEQ ID NO: 30821 - DNA, 19 bp, Homo sapiens
  siRNA target sequence for LOC221143 (NM_174928.1,473-491).
ctgcacatagttttgacat

SEQ ID NO: 30822 - DNA, 19 bp, Homo sapiens
  siRNA target sequence for LOC221143 (NM_174928.1,518-536).
cggaggaatgtctcagaaa

SEQ ID NO: 30823 - DNA, 19 bp, Homo sapiens
  siRNA target sequence for LOC221143 (NM_174928.1,520-538).
gaggaatgtctcagaaaaa

SEQ ID NO: 30824 - DNA, 19 bp, Homo sapiens
  siRNA target sequence for LOC221143 (NM_174928.1,659-677).
cccggaacttggcaaatga

SEQ ID NO: 30825 - DNA, 19 bp, Homo sapiens
  siRNA target sequence for LOC221143 (NM_174928.1,676-694).
gagtttcgctgttatgtga

SEQ ID NO: 30826 - DNA, 19 bp, Homo sapiens
  siRNA target sequence for LOC283248 (NM_173587.2,523-541).
gatccgcgttggaaccaat

SEQ ID NO: 30827 - DNA, 19 bp, Homo sapiens
  siRNA target sequence for LOC283248 (NM_173587.2,538-556).
caattaccaggccgtaatt

SEQ ID NO: 30828 - DNA, 19 bp, Homo sapiens
  siRNA target sequence for LOC283248 (NM_173587.2,682-700).
gaagcatggctacaacatt

SEQ ID NO: 30829 - DNA, 19 bp, Homo sapiens
  siRNA target sequence for LOC283248 (NM_173587.2,868-886).
gctgcctgacaagttgatt

SEQ ID NO: 30830 - DNA, 19 bp, Homo sapiens
  siRNA target sequence for LOC283248 (NM_173587.2,887-905).
cccagcctggtgaaatact

SEQ ID NO: 30831 - DNA, 19 bp, Homo sapiens
  siRNA target sequence for LOC283248 (NM_173587.2,888-906).
ccagcctggtgaaatacta

SEQ ID NO: 30832 - DNA, 19 bp, Homo sapiens
  siRNA target sequence for LOC283248 (NM_173587.2,891-909).
gcctggtgaaatactacta

SEQ ID NO: 30833 - DNA, 19 bp, Homo sapiens
  siRNA target sequence for LOC283248 (NM_173587.2,922-940).
gacccgcagccgaactagt

SEQ ID NO: 30834 - DNA, 19 bp, Homo sapiens
  siRNA target sequence for LOC283248 (NM_173587.2,1320-1338).
ccctggagggcggtattga

SEQ ID NO: 30835 - DNA, 19 bp, Homo sapiens
  siRNA target sequence for LOC283248 (NM_173587.2,1321-1339).
cctggagggcggtattgat

SEQ ID NO: 30836 - DNA, 19 bp, Homo sapiens
  siRNA target sequence for LOC283248 (NM_173587.2,1396-1414).
gcagcttttggctgttcaa

SEQ ID NO: 30837 - DNA, 19 bp, Homo sapiens
  siRNA target sequence for LOC283248 (NM_173587.2,1421-1439).
cgtaggtatggcaaagact

SEQ ID NO: 30838 - DNA, 19 bp, Homo sapiens
  siRNA target sequence for LOC283248 (NM_173587.2,1640-1658).
gatgaggtccagattacat

SEQ ID NO: 30839 - DNA, 19 bp, Homo sapiens
  siRNA target sequence for LOC56959 (NM_020207.1,128-146).
gttcaaatgagaaagttgt

SEQ ID NO: 30840 - DNA, 19 bp, Homo sapiens
  siRNA target sequence for LOC56959 (NM_020207.1,151-169).
caagagcagtcgtatgaat

SEQ ID NO: 30841 - DNA, 19 bp, Homo sapiens
  siRNA target sequence for LOC56959 (NM_020207.1,154-172).
gagcagtcgtatgaatcaa

SEQ ID NO: 30842 - DNA, 19 bp, Homo sapiens
  siRNA target sequence for LOC56959 (NM_020207.1,159-177).
gtcgtatgaatcaatggat

SEQ ID NO: 30843 - DNA, 19 bp, Homo sapiens
  siRNA target sequence for LOC56959 (NM_020207.1,193-211).
gttcaggaagtggcttata

SEQ ID NO: 30844 - DNA, 19 bp, Homo sapiens
  siRNA target sequence for LOC56959 (NM_020207.1,269-287).
gggcagcacatgacgtatt

SEQ ID NO: 30845 - DNA, 19 bp, Homo sapiens
  siRNA target sequence for LOC56959 (NM_020207.1,270-288).
ggcagcacatgacgtattt

SEQ ID NO: 30846 - DNA, 19 bp, Homo sapiens
  siRNA target sequence for LOC56959 (NM_020207.1,272-290).
cagcacatgacgtatttga

SEQ ID NO: 30847 - DNA, 19 bp, Homo sapiens
  siRNA target sequence for LOC56959 (NM_020207.1,274-292).
gcacatgacgtatttgagt

SEQ ID NO: 30848 - DNA, 19 bp, Homo sapiens
  siRNA target sequence for LOC56959 (NM_020207.1,275-293).
cacatgacgtatttgagtt

SEQ ID NO: 30849 - DNA, 19 bp, Homo sapiens
  siRNA target sequence for LOC56959 (NM_020207.1,325-343).
gctgtttgcagttctaaga

SEQ ID NO: 30850 - DNA, 19 bp, Homo sapiens
  siRNA target sequence for LOC56959 (NM_020207.1,328-346).
gtttgcagttctaagacat

SEQ ID NO: 30851 - DNA, 19 bp, Homo sapiens
  siRNA target sequence for LOC56959 (NM_020207.1,480-498).
ccagaccaccttcataatt

SEQ ID NO: 30852 - DNA, 19 bp, Homo sapiens
  siRNA target sequence for LOC56959 (NM_020207.1,483-501).
gaccaccttcataattgga

SEQ ID NO: 30853 - DNA, 19 bp, Homo sapiens
  siRNA target sequence for LOC56959 (NM_020207.1,514-532).
ggaatccgcagaaaacaat

SEQ ID NO: 30854 - DNA, 19 bp, Homo sapiens
  siRNA target sequence for LOC56959 (NM_020207.1,558-576).
ctcgtcttctgtaaacgaa

SEQ ID NO: 30855 - DNA, 19 bp, Homo sapiens
  siRNA target sequence for LOC56959 (NM_020207.1,560-578).
cgtcttctgtaaacgaatt

SEQ ID NO: 30856 - DNA, 19 bp, Homo sapiens
  siRNA target sequence for LOC56959 (NM_020207.1,624-642).
gctaagagacttttatgct

SEQ ID NO: 30857 - DNA, 19 bp, Homo sapiens
  siRNA target sequence for LOC56959 (NM_020207.1,631-649).
gacttttatgcttctcaat

SEQ ID NO: 30858 - DNA, 19 bp, Homo sapiens
  siRNA target sequence for LOC56959 (NM_020207.1,633-651).
cttttatgcttctcaatat

SEQ ID NO: 30859 - DNA, 19 bp, Homo sapiens
  siRNA target sequence for LOC56959 (NM_020207.1,673-691).
gtggattctgtgtcacaat

SEQ ID NO: 30860 - DNA, 19 bp, Homo sapiens
  siRNA target sequence for LOC56959 (NM_020207.1,721-739).
cagcgcacccggaagaaat

SEQ ID NO: 30861 - DNA, 19 bp, Homo sapiens
  siRNA target sequence for LOC56959 (NM_020207.1,725-743).
gcacccggaagaaatctga

SEQ ID NO: 30862 - DNA, 19 bp, Homo sapiens
  siRNA target sequence for LOC56959 (NM_020207.1,726-744).
cacccggaagaaatctgat

SEQ ID NO: 30863 - DNA, 19 bp, Homo sapiens
  siRNA target sequence for LOC56959 (NM_020207.1,728-746).
cccggaagaaatctgataa

SEQ ID NO: 30864 - DNA, 19 bp, Homo sapiens
  siRNA target sequence for LOC56959 (NM_020207.1,729-747).
ccggaagaaatctgataaa

SEQ ID NO: 30865 - DNA, 19 bp, Homo sapiens
  siRNA target sequence for LOC56959 (NM_020207.1,751-769).
gaatctcttataaaaccaa

SEQ ID NO: 30866 - DNA, 19 bp, Homo sapiens
  siRNA target sequence for LOC56959 (NM_020207.1,767-785).
caaggctgtcagattctga

SEQ ID NO: 30867 - DNA, 19 bp, Homo sapiens
  siRNA target sequence for LOC56959 (NM_020207.1,823-841).
caagtttgcagcctaaaaa

SEQ ID NO: 30868 - DNA, 19 bp, Homo sapiens
  siRNA target sequence for LOC56959 (NM_020207.1,826-844).
gtttgcagcctaaaaacat

SEQ ID NO: 30869 - DNA, 19 bp, Homo sapiens
  siRNA target sequence for LOC56959 (NM_020207.1,935-953).
gttctactcaagagattga

SEQ ID NO: 30870 - DNA, 19 bp, Homo sapiens
  siRNA target sequence for LOC56959 (NM_020207.1,969-987).
ccaggcatccgaagatact

SEQ ID NO: 30871 - DNA, 19 bp, Homo sapiens
  siRNA target sequence for LOC56959 (NM_020207.1,1031-1049).
gaaggttagaaaataccat

SEQ ID NO: 30872 - DNA, 19 bp, Homo sapiens
  siRNA target sequence for LOC56959 (NM_020207.1,1073-1091).
gaacgggcatttcaagaaa

SEQ ID NO: 30873 - DNA, 19 bp, Homo sapiens
  siRNA target sequence for LOC56959 (NM_020207.1,1076-1094).
cgggcatttcaagaaaaga

SEQ ID NO: 30874 - DNA, 19 bp, Homo sapiens
  siRNA target sequence for LOC56959 (NM_020207.1,1097-1115).
cccttctcaaattggaaaa

SEQ ID NO: 30875 - DNA, 19 bp, Homo sapiens
  siRNA target sequence for LOC56959 (NM_020207.1,1132-1150).
ccagtgctggaaaatactt

SEQ ID NO: 30876 - DNA, 19 bp, Homo sapiens
  siRNA target sequence for LOC56959 (NM_020207.1,1140-1158).
ggaaaatacttctgtgata

SEQ ID NO: 30877 - DNA, 19 bp, Homo sapiens
  siRNA target sequence for LOC56959 (NM_020207.1,1169-1187).
gtgatacctctattcttga

SEQ ID NO: 30878 - DNA, 19 bp, Homo sapiens
  siRNA target sequence for LOC56959 (NM_020207.1,1178-1196).
ctattcttgatgacctttt

SEQ ID NO: 30879 - DNA, 19 bp, Homo sapiens
  siRNA target sequence for LOC56959 (NM_020207.1,1246-1264).
gggcccatggaaaaagcaa

SEQ ID NO: 30880 - DNA, 19 bp, Homo sapiens
  siRNA target sequence for LOC56959 (NM_020207.1,1303-1321).
cagaatgatgagagtctta

SEQ ID NO: 30881 - DNA, 19 bp, Homo sapiens
  siRNA target sequence for LOC56959 (NM_020207.1,1312-1330).
gagagtcttagtaaactca

SEQ ID NO: 30882 - DNA, 19 bp, Homo sapiens
  siRNA target sequence for LOC56959 (NM_020207.1,1331-1349).
cagacttggcagtaataga

SEQ ID NO: 30883 - DNA, 19 bp, Homo sapiens
  siRNA target sequence for LOC56959 (NM_020207.1,1333-1351).
gacttggcagtaatagaga

SEQ ID NO: 30884 - DNA, 19 bp, Homo sapiens
  siRNA target sequence for LOC56959 (NM_020207.1,1468-1486).
gatgaaaacgcaaccaata

SEQ ID NO: 30885 - DNA, 19 bp, Homo sapiens
  siRNA target sequence for LOC57117 (NM_020395.2,255-273).
ctaggtttcttgcattcaa

SEQ ID NO: 30886 - DNA, 19 bp, Homo sapiens
  siRNA target sequence for LOC57117 (NM_020395.2,341-359).
cagttaccgtccatctcaa

SEQ ID NO: 30887 - DNA, 19 bp, Homo sapiens
  siRNA target sequence for LOC57117 (NM_020395.2,343-361).
gttaccgtccatctcaaaa

SEQ ID NO: 30888 - DNA, 19 bp, Homo sapiens
  siRNA target sequence for LOC57117 (NM_020395.2,347-365).
ccgtccatctcaaaaggat

SEQ ID NO: 30889 - DNA, 19 bp, Homo sapiens
  siRNA target sequence for LOC57117 (NM_020395.2,368-386).
ggagccacccaaaatttca

SEQ ID NO: 30890 - DNA, 19 bp, Homo sapiens
  siRNA target sequence for LOC57117 (NM_020395.2,369-387).
gagccacccaaaatttcaa

SEQ ID NO: 30891 - DNA, 19 bp, Homo sapiens
  siRNA target sequence for LOC57117 (NM_020395.2,410-428).
gcaagagcccaaaatatca

SEQ ID NO: 30892 - DNA, 19 bp, Homo sapiens
  siRNA target sequence for LOC57117 (NM_020395.2,411-429).
caagagcccaaaatatcat

SEQ ID NO: 30893 - DNA, 19 bp, Homo sapiens
  siRNA target sequence for LOC57117 (NM_020395.2,465-483).
ctcacaactgaaaaggtaa

SEQ ID NO: 30894 - DNA, 19 bp, Homo sapiens
  siRNA target sequence for LOC57117 (NM_020395.2,502-520).
gacctgctgataaaatgaa

SEQ ID NO: 30895 - DNA, 19 bp, Homo sapiens
  siRNA target sequence for LOC57117 (NM_020395.2,527-545).
catcactgaaggagttgat

SEQ ID NO: 30896 - DNA, 19 bp, Homo sapiens
  siRNA target sequence for LOC57117 (NM_020395.2,538-556).
gagttgatattccaaagaa

SEQ ID NO: 30897 - DNA, 19 bp, Homo sapiens
  siRNA target sequence for LOC57117 (NM_020395.2,591-609).
cccattactgtccaaagta

SEQ ID NO: 30898 - DNA, 19 bp, Homo sapiens
  siRNA target sequence for LOC57117 (NM_020395.2,602-620).
ccaaagtagcaaggattta

SEQ ID NO: 30899 - DNA, 19 bp, Homo sapiens
  siRNA target sequence for LOC57117 (NM_020395.2,626-644).
ggctgacctttccagtttt

SEQ ID NO: 30900 - DNA, 19 bp, Homo sapiens
  siRNA target sequence for LOC57117 (NM_020395.2,681-699).
ggattggcctgcgttgttt

SEQ ID NO: 30901 - DNA, 19 bp, Homo sapiens
  siRNA target sequence for LOC57117 (NM_020395.2,718-736).
catctggcaatcaattagt

SEQ ID NO: 30902 - DNA, 19 bp, Homo sapiens
  siRNA target sequence for LOC57117 (NM_020395.2,721-739).
ctggcaatcaattagtaga

SEQ ID NO: 30903 - DNA, 19 bp, Homo sapiens
  siRNA target sequence for LOC57117 (NM_020395.2,725-743).
caatcaattagtagaatgt

SEQ ID NO: 30904 - DNA, 19 bp, Homo sapiens
  siRNA target sequence for LOC57117 (NM_020395.2,761-779).
ctaccaccgagattgtcat

SEQ ID NO: 30905 - DNA, 19 bp, Homo sapiens
  siRNA target sequence for LOC57117 (NM_020395.2,813-831).
cctcgcctggtgtggtatt

SEQ ID NO: 30906 - DNA, 19 bp, Homo sapiens
  siRNA target sequence for LOC57117 (NM_020395.2,834-852).
gcccgatgtaccagacaaa

SEQ ID NO: 30907 - DNA, 19 bp, Homo sapiens
  siRNA target sequence for LOC57117 (NM_020395.2,835-853).
cccgatgtaccagacaaat

SEQ ID NO: 30908 - DNA, 19 bp, Homo sapiens
  siRNA target sequence for LOC57117 (NM_020395.2,837-855).
cgatgtaccagacaaatga

SEQ ID NO: 30909 - DNA, 19 bp, Homo sapiens
  siRNA target sequence for LOC57117 (NM_020395.2,941-959).
ggttaagaaaccagaaact

SEQ ID NO: 30910 - DNA, 19 bp, Homo sapiens
  siRNA target sequence for LOC57117 (NM_020395.2,976-994).
caacttttctagcgtttaa

SEQ ID NO: 30911 - DNA, 19 bp, Homo sapiens
  siRNA target sequence for LOC57117 (NM_020395.2,1005-1023).
gtcaagacatccacagtta

SEQ ID NO: 30912 - DNA, 19 bp, Homo sapiens
  siRNA target sequence for LOC57117 (NM_020395.2,1007-1025).
caagacatccacagttatt

SEQ ID NO: 30913 - DNA, 19 bp, Homo sapiens
  siRNA target sequence for LOC57117 (NM_020395.2,1049-1067).
cgtttcctcgtcagtaact

SEQ ID NO: 30914 - DNA, 19 bp, Homo sapiens
  siRNA target sequence for LOC57117 (NM_020395.2,1050-1068).
gtttcctcgtcagtaacta

SEQ ID NO: 30915 - DNA, 19 bp, Homo sapiens
  siRNA target sequence for LOC57117 (NM_020395.2,1190-1208).
gaaacctgtgggtttgact

SEQ ID NO: 30916 - DNA, 19 bp, Homo sapiens
  siRNA target sequence for LOC57117 (NM_020395.2,1205-1223).
gactggtctggcaacatca

SEQ ID NO: 30917 - DNA, 19 bp, Homo sapiens
  siRNA target sequence for LOC57117 (NM_020395.2,1299-1317).
cctctaaccttgggtaaaa

SEQ ID NO: 30918 - DNA, 19 bp, Homo sapiens
  siRNA target sequence for LOC57117 (NM_020395.2,1320-1338).
ggccttagtcgctcagtta

SEQ ID NO: 30919 - DNA, 19 bp, Homo sapiens
  siRNA target sequence for LOC57117 (NM_020395.2,1322-1340).
ccttagtcgctcagttagt

SEQ ID NO: 30920 - DNA, 19 bp, Homo sapiens
  siRNA target sequence for LOC57117 (NM_020395.2,1323-1341).
cttagtcgctcagttagtt

SEQ ID NO: 30921 - DNA, 19 bp, Homo sapiens
  siRNA target sequence for LOC58486 (NM_021211.1,510-528).
cacatttgcgatactcaat

SEQ ID NO: 30922 - DNA, 19 bp, Homo sapiens
  siRNA target sequence for LOC58486 (NM_021211.1,512-530).
catttgcgatactcaatgt

SEQ ID NO: 30923 - DNA, 19 bp, Homo sapiens
  siRNA target sequence for LOC58486 (NM_021211.1,517-535).
gcgatactcaatgtctatt

SEQ ID NO: 30924 - DNA, 19 bp, Homo sapiens
  siRNA target sequence for LOC58486 (NM_021211.1,529-547).
gtctattctaaattaacca

SEQ ID NO: 30925 - DNA, 19 bp, Homo sapiens
  siRNA target sequence for LOC58486 (NM_021211.1,549-567).
gttttgtaccacaaactca

SEQ ID NO: 30926 - DNA, 19 bp, Homo sapiens
  siRNA target sequence for LOC58486 (NM_021211.1,585-603).
gctgaaacaaggaagtctt

SEQ ID NO: 30927 - DNA, 19 bp, Homo sapiens
  siRNA target sequence for LOC58486 (NM_021211.1,596-614).
gaagtcttaaacaagaagt

SEQ ID NO: 30928 - DNA, 19 bp, Homo sapiens
  siRNA target sequence for LOC58486 (NM_021211.1,631-649).
cagattgtgtctgaatcaa

SEQ ID NO: 30929 - DNA, 19 bp, Homo sapiens
  siRNA target sequence for LOC58486 (NM_021211.1,652-670).
gatcagaaggttggaatat

SEQ ID NO: 30930 - DNA, 19 bp, Homo sapiens
  siRNA target sequence for LOC58486 (NM_021211.1,657-675).
gaaggttggaatattacaa

SEQ ID NO: 30931 - DNA, 19 bp, Homo sapiens
  siRNA target sequence for LOC58486 (NM_021211.1,660-678).
ggttggaatattacaaagt

SEQ ID NO: 30932 - DNA, 19 bp, Homo sapiens
  siRNA target sequence for LOC58486 (NM_021211.1,687-705).
gcagttgcaaccttcagtt

SEQ ID NO: 30933 - DNA, 19 bp, Homo sapiens
  siRNA target sequence for LOC58486 (NM_021211.1,690-708).
gttgcaaccttcagtttct

SEQ ID NO: 30934 - DNA, 19 bp, Homo sapiens
  siRNA target sequence for LOC58486 (NM_021211.1,693-711).
gcaaccttcagtttctaaa

SEQ ID NO: 30935 - DNA, 19 bp, Homo sapiens
  siRNA target sequence for LOC58486 (NM_021211.1,734-752).
gggtcaaatttatatccaa

SEQ ID NO: 30936 - DNA, 19 bp, Homo sapiens
  siRNA target sequence for LOC58486 (NM_021211.1,815-833).
cttttggatttacttactt

SEQ ID NO: 30937 - DNA, 19 bp, Homo sapiens
  siRNA target sequence for LOC58486 (NM_021211.1,859-877).
cagtgtgtattatgtaaga

SEQ ID NO: 30938 - DNA, 19 bp, Homo sapiens
  siRNA target sequence for LOC58486 (NM_021211.1,916-934).
cgaagacatttggaaacta

SEQ ID NO: 30939 - DNA, 19 bp, Homo sapiens
  siRNA target sequence for LOC58486 (NM_021211.1,982-1000).
ctcgattcacctgaaaata

SEQ ID NO: 30940 - DNA, 19 bp, Homo sapiens
  siRNA target sequence for LOC58486 (NM_021211.1,984-1002).
cgattcacctgaaaataat

SEQ ID NO: 30941 - DNA, 19 bp, Homo sapiens
  siRNA target sequence for LOC58486 (NM_021211.1,1049-1067).
cagaagcatcatacaatgt

SEQ ID NO: 30942 - DNA, 19 bp, Homo sapiens
  siRNA target sequence for LOC58486 (NM_021211.1,1051-1069).
gaagcatcatacaatgtaa

SEQ ID NO: 30943 - DNA, 19 bp, Homo sapiens
  siRNA target sequence for LOC58486 (NM_021211.1,1054-1072).
gcatcatacaatgtaagtt

SEQ ID NO: 30944 - DNA, 19 bp, Homo sapiens
  siRNA target sequence for LOC58486 (NM_021211.1,1055-1073).
catcatacaatgtaagtta

SEQ ID NO: 30945 - DNA, 19 bp, Homo sapiens
  siRNA target sequence for LOC58486 (NM_021211.1,1088-1106).
gtggagaggctcatactat

SEQ ID NO: 30946 - DNA, 19 bp, Homo sapiens
  siRNA target sequence for LOC58486 (NM_021211.1,1103-1121).
ctattggagaattgcttat

SEQ ID NO: 30947 - DNA, 19 bp, Homo sapiens
  siRNA target sequence for LOC58486 (NM_021211.1,1149-1167).
gcggatgtttgatgaacaa

SEQ ID NO: 30948 - DNA, 19 bp, Homo sapiens
  siRNA target sequence for LOC58486 (NM_021211.1,1150-1168).
cggatgtttgatgaacaat

SEQ ID NO: 30949 - DNA, 19 bp, Homo sapiens
  siRNA target sequence for LOC58486 (NM_021211.1,1183-1201).
gatgcagtacagctatcaa

SEQ ID NO: 30950 - DNA, 19 bp, Homo sapiens
  siRNA target sequence for LOC58486 (NM_021211.1,1186-1204).
gcagtacagctatcaaaca

SEQ ID NO: 30951 - DNA, 19 bp, Homo sapiens
  siRNA target sequence for LOC58486 (NM_021211.1,1189-1207).
gtacagctatcaaacagta

SEQ ID NO: 30952 - DNA, 19 bp, Homo sapiens
  siRNA target sequence for LOC58486 (NM_021211.1,1208-1226).
ctgttgcacgtcgaattaa

SEQ ID NO: 30953 - DNA, 19 bp, Homo sapiens
  siRNA target sequence for LOC58486 (NM_021211.1,1227-1245).
ggatctagctgctgacatt

SEQ ID NO: 30954 - DNA, 19 bp, Homo sapiens
  siRNA target sequence for LOC58486 (NM_021211.1,1254-1272).
gcttgtttgtagactgaaa

SEQ ID NO: 30955 - DNA, 19 bp, Homo sapiens
  siRNA target sequence for LOC58486 (NM_021211.1,1258-1276).
gtttgtagactgaaaattt

SEQ ID NO: 30956 - DNA, 19 bp, Homo sapiens
  siRNA target sequence for LOC58486 (NM_021211.1,1283-1301).
ggttttcactgcaactaga

SEQ ID NO: 30957 - DNA, 19 bp, Homo sapiens
  siRNA target sequence for LOC58486 (NM_021211.1,1284-1302).
gttttcactgcaactagat

SEQ ID NO: 30958 - DNA, 19 bp, Homo sapiens
  siRNA target sequence for LOC58486 (NM_021211.1,1335-1353).
gcttgtgtttgttcgttat

SEQ ID NO: 30959 - DNA, 19 bp, Homo sapiens
  siRNA target sequence for LOC58486 (NM_021211.1,1336-1354).
cttgtgtttgttcgttata

SEQ ID NO: 30960 - DNA, 19 bp, Homo sapiens
  siRNA target sequence for LOC58486 (NM_021211.1,1341-1359).
gtttgttcgttataggttt

SEQ ID NO: 30961 - DNA, 19 bp, Homo sapiens
  siRNA target sequence for LOC58486 (NM_021211.1,1345-1363).
gttcgttataggtttaata

SEQ ID NO: 30962 - DNA, 19 bp, Homo sapiens
  siRNA target sequence for LOC58486 (NM_021211.1,1348-1366).
cgttataggtttaataagt

SEQ ID NO: 30963 - DNA, 19 bp, Homo sapiens
  siRNA target sequence for LOC58486 (NM_021211.1,1355-1373).
ggtttaataagtctattga

SEQ ID NO: 30964 - DNA, 19 bp, Homo sapiens
  siRNA target sequence for LOC58486 (NM_021211.1,1381-1399).
ctactcctgtgtgaatctt

SEQ ID NO: 30965 - DNA, 19 bp, Homo sapiens
  siRNA target sequence for LOC58486 (NM_021211.1,1411-1429).
gctaccggtgaagaaatat

SEQ ID NO: 30966 - DNA, 19 bp, Homo sapiens
  siRNA target sequence for LOC58486 (NM_021211.1,1412-1430).
ctaccggtgaagaaatatt

SEQ ID NO: 30967 - DNA, 19 bp, Homo sapiens
  siRNA target sequence for LOC58486 (NM_021211.1,1528-1546).
gccgaagctgtcaccttaa

SEQ ID NO: 30968 - DNA, 19 bp, Homo sapiens
  siRNA target sequence for LOC58486 (NM_021211.1,1529-1547).
ccgaagctgtcaccttaat

SEQ ID NO: 30969 - DNA, 19 bp, Homo sapiens
  siRNA target sequence for LOC58486 (NM_021211.1,1595-1613).
gacatgcactggcagttaa

SEQ ID NO: 30970 - DNA, 19 bp, Homo sapiens
  siRNA target sequence for LOC58486 (NM_021211.1,1641-1659).
gctagaccaggcagtacaa

SEQ ID NO: 30971 - DNA, 19 bp, Homo sapiens
  siRNA target sequence for LOC58486 (NM_021211.1,1642-1660).
ctagaccaggcagtacaaa

SEQ ID NO: 30972 - DNA, 19 bp, Homo sapiens
  siRNA target sequence for LOC58486 (NM_021211.1,1645-1663).
gaccaggcagtacaaatca

SEQ ID NO: 30973 - DNA, 19 bp, Homo sapiens
  siRNA target sequence for LOC58486 (NM_021211.1,1648-1666).
caggcagtacaaatcatca

SEQ ID NO: 30974 - DNA, 19 bp, Homo sapiens
  siRNA target sequence for LOC58486 (NM_021211.1,1652-1670).
cagtacaaatcatcaatta

SEQ ID NO: 30975 - DNA, 19 bp, Homo sapiens
  siRNA target sequence for LOC58486 (NM_021211.1,1654-1672).
gtacaaatcatcaattata

SEQ ID NO: 30976 - DNA, 19 bp, Homo sapiens
  siRNA target sequence for LOC58486 (NM_021211.1,1685-1703).
cacatcaatccagactatt

SEQ ID NO: 30977 - DNA, 19 bp, Homo sapiens
  siRNA target sequence for LOC58486 (NM_021211.1,1734-1752).
gcacacagcacttcttcta

SEQ ID NO: 30978 - DNA, 19 bp, Homo sapiens
  siRNA target sequence for LOC58486 (NM_021211.1,1742-1760).
cacttcttctaaatacaga

SEQ ID NO: 30979 - DNA, 19 bp, Homo sapiens
  siRNA target sequence for LOC58486 (NM_021211.1,1775-1793).
ctcgaggtaaagttcttgt

SEQ ID NO: 30980 - DNA, 19 bp, Homo sapiens
  siRNA target sequence for LOC58486 (NM_021211.1,1777-1795).
cgaggtaaagttcttgtaa

SEQ ID NO: 30981 - DNA, 19 bp, Homo sapiens
  siRNA target sequence for LOC58486 (NM_021211.1,1810-1828).
cgtcgtgaacttttggttt

SEQ ID NO: 30982 - DNA, 19 bp, Homo sapiens
  siRNA target sequence for LOC58486 (NM_021211.1,1811-1829).
gtcgtgaacttttggtttt

SEQ ID NO: 30983 - DNA, 19 bp, Homo sapiens
  siRNA target sequence for LOC58486 (NM_021211.1,1878-1896).
gctgctaagacttgcatat

SEQ ID NO: 30984 - DNA, 19 bp, Homo sapiens
  siRNA target sequence for LOC58486 (NM_021211.1,1881-1899).
gctaagacttgcatatctt

SEQ ID NO: 30985 - DNA, 19 bp, Homo sapiens
  siRNA target sequence for LOC58486 (NM_021211.1,1954-1972).
gtgaccgtttttacagtat

SEQ ID NO: 30986 - DNA, 19 bp, Homo sapiens
  siRNA target sequence for LOC58486 (NM_021211.1,1956-1974).
gaccgtttttacagtattt

SEQ ID NO: 30987 - DNA, 19 bp, Homo sapiens
  siRNA target sequence for LOC58486 (NM_021211.1,1958-1976).
ccgtttttacagtatttga

SEQ ID NO: 30988 - DNA, 19 bp, Homo sapiens
  siRNA target sequence for LOC58486 (NM_021211.1,1975-1993).
gataaaatgtcgtcattgt

SEQ ID NO: 30989 - DNA, 19 bp, Homo sapiens
  siRNA target sequence for LOC58486 (NM_021211.1,1985-2003).
cgtcattgttaagaaaatt

SEQ ID NO: 30990 - DNA, 19 bp, Homo sapiens
  siRNA target sequence for LOC58486 (NM_021211.1,2089-2107).
gttgataaagatatttgca

SEQ ID NO: 30991 - DNA, 19 bp, Homo sapiens
  siRNA target sequence for LOC58486 (NM_021211.1,2137-2155).
cgcgctactctgttaaaat

SEQ ID NO: 30992 - DNA, 19 bp, Homo sapiens
  siRNA target sequence for LOC58486 (NM_021211.1,2140-2158).
gctactctgttaaaatact

SEQ ID NO: 30993 - DNA, 19 bp, Homo sapiens
  siRNA target sequence for LOC58486 (NM_021211.1,2141-2159).
ctactctgttaaaatactt

SEQ ID NO: 30994 - DNA, 19 bp, Homo sapiens
  siRNA target sequence for LOC58486 (NM_021211.1,2182-2200).
gcttgggttagaaatccat

SEQ ID NO: 30995 - DNA, 19 bp, Homo sapiens
  siRNA target sequence for LOC58486 (NM_021211.1,2187-2205).
ggttagaaatccatttaca

SEQ ID NO: 30996 - DNA, 19 bp, Homo sapiens
  siRNA target sequence for LOC58486 (NM_021211.1,2210-2228).
ctgttaaaccagcttcatt

SEQ ID NO: 30997 - DNA, 19 bp, Homo sapiens
  siRNA target sequence for LOC58486 (NM_021211.1,2269-2287).
gattctcaagtgaagcaaa

SEQ ID NO: 30998 - DNA, 19 bp, Homo sapiens
  siRNA target sequence for LOC58486 (NM_021211.1,2273-2291).
ctcaagtgaagcaaaattt

SEQ ID NO: 30999 - DNA, 19 bp, Homo sapiens
  siRNA target sequence for LOC58486 (NM_021211.1,2335-2353).
gaatacccaagcattgcaa

SEQ ID NO: 31000 - DNA, 19 bp, Homo sapiens
  siRNA target sequence for LOC58486 (NM_021211.1,2355-2373).
gcgtgcagtgcgtgtactt

SEQ ID NO: 31001 - DNA, 19 bp, Homo sapiens
  siRNA target sequence for LOC58486 (NM_021211.1,2357-2375).
gtgcagtgcgtgtacttct

SEQ ID NO: 31002 - DNA, 19 bp, Homo sapiens
  siRNA target sequence for LOC58486 (NM_021211.1,2368-2386).
gtacttcttccttttgcta

SEQ ID NO: 31003 - DNA, 19 bp, Homo sapiens
  siRNA target sequence for LOC58486 (NM_021211.1,2414-2432).
catattacgctgcaacaaa

SEQ ID NO: 31004 - DNA, 19 bp, Homo sapiens
  siRNA target sequence for LOC58486 (NM_021211.1,2472-2490).
gcgaatccgacttagcaat

SEQ ID NO: 31005 - DNA, 19 bp, Homo sapiens
  siRNA target sequence for LOC58486 (NM_021211.1,2473-2491).
cgaatccgacttagcaata

SEQ ID NO: 31006 - DNA, 19 bp, Homo sapiens
  siRNA target sequence for LOC58486 (NM_021211.1,2474-2492).
gaatccgacttagcaatat

SEQ ID NO: 31007 - DNA, 19 bp, Homo sapiens
  siRNA target sequence for LOC58486 (NM_021211.1,2478-2496).
ccgacttagcaatattaca

SEQ ID NO: 31008 - DNA, 19 bp, Homo sapiens
  siRNA target sequence for LOC58486 (NM_021211.1,2509-2527).
cggatatgtgataaaaaga

SEQ ID NO: 31009 - DNA, 19 bp, Homo sapiens
  siRNA target sequence for LOC64744 (NM_022733.1,148-166).
gtgcagattgccagtctaa

SEQ ID NO: 31010 - DNA, 19 bp, Homo sapiens
  siRNA target sequence for LOC64744 (NM_022733.1,198-216).
gtgttcatctgcattcgat

SEQ ID NO: 31011 - DNA, 19 bp, Homo sapiens
  siRNA target sequence for LOC64744 (NM_022733.1,256-274).
gggtaaagtcagttaacct

SEQ ID NO: 31012 - DNA, 19 bp, Homo sapiens
  siRNA target sequence for LOC64744 (NM_022733.1,275-293).
cgaccagtggactcaagaa

SEQ ID NO: 31013 - DNA, 19 bp, Homo sapiens
  siRNA target sequence for LOC64744 (NM_022733.1,281-299).
gtggactcaagaacagatt

SEQ ID NO: 31014 - DNA, 19 bp, Homo sapiens
  siRNA target sequence for LOC64744 (NM_022733.1,325-343).
gaaaggcaaaccgacttta

SEQ ID NO: 31015 - DNA, 19 bp, Homo sapiens
  siRNA target sequence for LOC64744 (NM_022733.1,329-347).
ggcaaaccgactttatgaa

SEQ ID NO: 31016 - DNA, 19 bp, Homo sapiens
  siRNA target sequence for LOC64744 (NM_022733.1,365-383).
ctttcggcgacctcagata

SEQ ID NO: 31017 - DNA, 19 bp, Homo sapiens
  siRNA target sequence for LOC64744 (NM_022733.1,386-404).
cccagctgttgaaggattt

SEQ ID NO: 31018 - DNA, 19 bp, Homo sapiens
  siRNA target sequence for LOC64744 (NM_022733.1,387-405).
ccagctgttgaaggattta

SEQ ID NO: 31019 - DNA, 19 bp, Homo sapiens
  siRNA target sequence for LOC64744 (NM_022733.1,388-406).
cagctgttgaaggatttat

SEQ ID NO: 31020 - DNA, 19 bp, Homo sapiens
  siRNA target sequence for LOC64744 (NM_022733.1,440-458).
ccgaagtctggacatcaat

SEQ ID NO: 31021 - DNA, 19 bp, Homo sapiens
  siRNA target sequence for LOC64744 (NM_022733.1,450-468).
gacatcaatgcctttagga

SEQ ID NO: 31022 - DNA, 19 bp, Homo sapiens
  siRNA target sequence for LOC64744 (NM_022733.1,455-473).
caatgcctttaggaaagaa

SEQ ID NO: 31023 - DNA, 19 bp, Homo sapiens
  siRNA target sequence for LOC64744 (NM_022733.1,576-594).
cagctacctcggaaaagct

SEQ ID NO: 31024 - DNA, 19 bp, Homo sapiens
  siRNA target sequence for LOC64744 (NM_022733.1,609-627).
gcgcctgtcatggatttgt

SEQ ID NO: 31025 - DNA, 19 bp, Homo sapiens
  siRNA target sequence for LOC64744 (NM_022733.1,610-628).
cgcctgtcatggatttgtt

SEQ ID NO: 31026 - DNA, 19 bp, Homo sapiens
  siRNA target sequence for LOC64744 (NM_022733.1,650-668).
ctgctccattgcaaatagt

SEQ ID NO: 31027 - DNA, 19 bp, Homo sapiens
  siRNA target sequence for LOC64744 (NM_022733.1,841-859).
gcaagaaacagctctctaa

SEQ ID NO: 31028 - DNA, 19 bp, Homo sapiens
  siRNA target sequence for LOC64744 (NM_022733.1,883-901).
gatcccagacgcctcaaat

SEQ ID NO: 31029 - DNA, 19 bp, Homo sapiens
  siRNA target sequence for LOC64744 (NM_022733.1,893-911).
gcctcaaatgcctactcaa

SEQ ID NO: 31030 - DNA, 19 bp, Homo sapiens
  siRNA target sequence for LOC64744 (NM_022733.1,904-922).
ctactcaagcaatgttcat

SEQ ID NO: 31031 - DNA, 19 bp, Homo sapiens
  siRNA target sequence for LOC64744 (NM_022733.1,1066-1084).
ccatgcctgcaggctatat

SEQ ID NO: 31032 - DNA, 19 bp, Homo sapiens
  siRNA target sequence for LOC64744 (NM_022733.1,1111-1129).
gtgtgccgaatggaatgat

SEQ ID NO: 31033 - DNA, 19 bp, Homo sapiens
  siRNA target sequence for LOC64744 (NM_022733.1,1113-1131).
gtgccgaatggaatgatga

SEQ ID NO: 31034 - DNA, 19 bp, Homo sapiens
  siRNA target sequence for LOC64744 (NM_022733.1,1244-1262).
ggctgggatgaacttctat

SEQ ID NO: 31035 - DNA, 19 bp, Homo sapiens
  siRNA target sequence for LOC90668 (NM_138360.1,1084-1102).
gaaacgctgccgcaagatt

SEQ ID NO: 31036 - DNA, 19 bp, Homo sapiens
  siRNA target sequence for LOC90668 (NM_138360.1,1246-1264).
gcccactcatggttacaaa

SEQ ID NO: 31037 - DNA, 19 bp, Homo sapiens
  siRNA target sequence for LOC90668 (NM_138360.1,1249-1267).
cactcatggttacaaacta

SEQ ID NO: 31038 - DNA, 19 bp, Homo sapiens
  siRNA target sequence for LOC90668 (NM_138360.1,1644-1662).
ccccaagcctcggcaataa

SEQ ID NO: 31039 - DNA, 19 bp, Homo sapiens
  siRNA target sequence for LOC90668 (NM_138360.1,2278-2296).
caagctggaacctgataga

SEQ ID NO: 31040 - DNA, 19 bp, Homo sapiens
  siRNA target sequence for LOC93349 (NM_138402.2,158-176).
ggaacgagaacgcagaaaa

SEQ ID NO: 31041 - DNA, 19 bp, Homo sapiens
  siRNA target sequence for LOC93349 (NM_138402.2,162-180).
cgagaacgcagaaaaacaa

SEQ ID NO: 31042 - DNA, 19 bp, Homo sapiens
  siRNA target sequence for LOC93349 (NM_138402.2,456-474).
ccttggcaaagtgtataca

SEQ ID NO: 31043 - DNA, 19 bp, Homo sapiens
  siRNA target sequence for LOC93349 (NM_138402.2,595-613).
ggaaggatctctacctaat

SEQ ID NO: 31044 - DNA, 19 bp, Homo sapiens
  siRNA target sequence for LOC93349 (NM_138402.2,609-627).
ctaatcctccaagaatata

SEQ ID NO: 31045 - DNA, 19 bp, Homo sapiens
  siRNA target sequence for LRP1B (NM_018557.1,997-1015).
ctcactctctcgggattat

SEQ ID NO: 31046 - DNA, 19 bp, Homo sapiens
  siRNA target sequence for LRP1B (NM_018557.1,1178-1196).
gtcccgaggaggtagaaat

SEQ ID NO: 31047 - DNA, 19 bp, Homo sapiens
  siRNA target sequence for LRP1B (NM_018557.1,1181-1199).
ccgaggaggtagaaatcaa

SEQ ID NO: 31048 - DNA, 19 bp, Homo sapiens
  siRNA target sequence for LRP1B (NM_018557.1,1224-1242).
ccttggtaccaacaaatgt

SEQ ID NO: 31049 - DNA, 19 bp, Homo sapiens
  siRNA target sequence for LRP1B (NM_018557.1,1290-1308).
gtatgacgaaggagtacat

SEQ ID NO: 31050 - DNA, 19 bp, Homo sapiens
  siRNA target sequence for LRP1B (NM_018557.1,1306-1324).
cattgtcaggaactgttat

SEQ ID NO: 31051 - DNA, 19 bp, Homo sapiens
  siRNA target sequence for LRP1B (NM_018557.1,1312-1330).
caggaactgttatccaatt

SEQ ID NO: 31052 - DNA, 19 bp, Homo sapiens
  siRNA target sequence for LRP1B (NM_018557.1,1331-1349).
gccaacagctgaattgtca

SEQ ID NO: 31053 - DNA, 19 bp, Homo sapiens
  siRNA target sequence for LRP1B (NM_018557.1,1341-1359).
gaattgtcagtataaatgt

SEQ ID NO: 31054 - DNA, 19 bp, Homo sapiens
  siRNA target sequence for LRP1B (NM_018557.1,1365-1383).
ggtcagaaatagtacaaga

SEQ ID NO: 31055 - DNA, 19 bp, Homo sapiens
  siRNA target sequence for LRP1B (NM_018557.1,1393-1411).
gaggatggattcgaaataa

SEQ ID NO: 31056 - DNA, 19 bp, Homo sapiens
  siRNA target sequence for LRP1B (NM_018557.1,1395-1413).
ggatggattcgaaataaca

SEQ ID NO: 31057 - DNA, 19 bp, Homo sapiens
  siRNA target sequence for LRP1B (NM_018557.1,1511-1529).
gtgtggaaggctacctaat

SEQ ID NO: 31058 - DNA, 19 bp, Homo sapiens
  siRNA target sequence for LRP1B (NM_018557.1,1531-1549).
cagccagacaacagatctt

SEQ ID NO: 31059 - DNA, 19 bp, Homo sapiens
  siRNA target sequence for LRP1B (NM_018557.1,1571-1589).
cagatagaccacctatact

SEQ ID NO: 31060 - DNA, 19 bp, Homo sapiens
  siRNA target sequence for LRP1B (NM_018557.1,1573-1591).
gatagaccacctatactat

SEQ ID NO: 31061 - DNA, 19 bp, Homo sapiens
  siRNA target sequence for LRP1B (NM_018557.1,1582-1600).
cctatactattaattgcaa

SEQ ID NO: 31062 - DNA, 19 bp, Homo sapiens
  siRNA target sequence for LRP1B (NM_018557.1,1610-1628).
caattgaggttttctatct

SEQ ID NO: 31063 - DNA, 19 bp, Homo sapiens
  siRNA target sequence for LRP1B (NM_018557.1,1617-1635).
ggttttctatcttaatgga

SEQ ID NO: 31064 - DNA, 19 bp, Homo sapiens
  siRNA target sequence for LRP1B (NM_018557.1,1710-1728).
gatttgttggattgaatca

SEQ ID NO: 31065 - DNA, 19 bp, Homo sapiens
  siRNA target sequence for LRP1B (NM_018557.1,1727-1745).
caagagaatcttcaaatca

SEQ ID NO: 31066 - DNA, 19 bp, Homo sapiens
  siRNA target sequence for LRP1B (NM_018557.1,1749-1767).
caaatgtatccagataaca

SEQ ID NO: 31067 - DNA, 19 bp, Homo sapiens
  siRNA target sequence for LRP1B (NM_018557.1,1793-1811).
ggacaatcaatattcttca

SEQ ID NO: 31068 - DNA, 19 bp, Homo sapiens
  siRNA target sequence for LRP1B (NM_018557.1,1828-1846).
caacaaatggcgattgact

SEQ ID NO: 31069 - DNA, 19 bp, Homo sapiens
  siRNA target sequence for LRP1B (NM_018557.1,1848-1866).
gctcactcgaaatctctat

SEQ ID NO: 31070 - DNA, 19 bp, Homo sapiens
  siRNA target sequence for LRP1B (NM_018557.1,1849-1867).
ctcactcgaaatctctatt

SEQ ID NO: 31071 - DNA, 19 bp, Homo sapiens
  siRNA target sequence for LRP1B (NM_018557.1,1881-1899).
cggtgaccggatctttgtt

SEQ ID NO: 31072 - DNA, 19 bp, Homo sapiens
  siRNA target sequence for LRP1B (NM_018557.1,1882-1900).
ggtgaccggatctttgttt

SEQ ID NO: 31073 - DNA, 19 bp, Homo sapiens
  siRNA target sequence for LRP1B (NM_018557.1,1885-1903).
gaccggatctttgtttgta

SEQ ID NO: 31074 - DNA, 19 bp, Homo sapiens
  siRNA target sequence for LRP1B (NM_018557.1,1887-1905).
ccggatctttgtttgtaat

SEQ ID NO: 31075 - DNA, 19 bp, Homo sapiens
  siRNA target sequence for LRP1B (NM_018557.1,1907-1925).
ccaacggttctgtatgtgt

SEQ ID NO: 31076 - DNA, 19 bp, Homo sapiens
  siRNA target sequence for LRP1B (NM_018557.1,1941-1959).
ggagcttcacaatcctaaa

SEQ ID NO: 31077 - DNA, 19 bp, Homo sapiens
  siRNA target sequence for LRP1B (NM_018557.1,1961-1979).
caatagcagtagatccaat

SEQ ID NO: 31078 - DNA, 19 bp, Homo sapiens
  siRNA target sequence for LRP1B (NM_018557.1,1975-1993).
ccaatagcaggaaaacttt

SEQ ID NO: 31079 - DNA, 19 bp, Homo sapiens
  siRNA target sequence for LRP1B (NM_018557.1,2046-2064).
gatgaaccgaacaaggata

SEQ ID NO: 31080 - DNA, 19 bp, Homo sapiens
  siRNA target sequence for LRP1B (NM_018557.1,2049-2067).
gaaccgaacaaggataatt

SEQ ID NO: 31081 - DNA, 19 bp, Homo sapiens
  siRNA target sequence for LRP1B (NM_018557.1,2052-2070).
ccgaacaaggataattgat

SEQ ID NO: 31082 - DNA, 19 bp, Homo sapiens
  siRNA target sequence for LRP1B (NM_018557.1,2101-2119).
ctagacctagtcaacaaat

SEQ ID NO: 31083 - DNA, 19 bp, Homo sapiens
  siRNA target sequence for LRP1B (NM_018557.1,2164-2182).
gactatcaaggaaaaaata

SEQ ID NO: 31084 - DNA, 19 bp, Homo sapiens
  siRNA target sequence for LRP1B (NM_018557.1,2239-2257).
gaagattatttgtatgcaa

SEQ ID NO: 31085 - DNA, 19 bp, Homo sapiens
  siRNA target sequence for LRP1B (NM_018557.1,2266-2284).
gataactacaatatcgtaa

SEQ ID NO: 31086 - DNA, 19 bp, Homo sapiens
  siRNA target sequence for LRP1B (NM_018557.1,2271-2289).
ctacaatatcgtaaggata

SEQ ID NO: 31087 - DNA, 19 bp, Homo sapiens
  siRNA target sequence for LRP1B (NM_018557.1,2281-2299).
gtaaggataaaccgattta

SEQ ID NO: 31088 - DNA, 19 bp, Homo sapiens
  siRNA target sequence for LRP1B (NM_018557.1,2303-2321).
ggactgatattcactcatt

SEQ ID NO: 31089 - DNA, 19 bp, Homo sapiens
  siRNA target sequence for LRP1B (NM_018557.1,2304-2322).
gactgatattcactcatta

SEQ ID NO: 31090 - DNA, 19 bp, Homo sapiens
  siRNA target sequence for LRP1B (NM_018557.1,2338-2356).
gcttggggaatccgaattt

SEQ ID NO: 31091 - DNA, 19 bp, Homo sapiens
  siRNA target sequence for LRP1B (NM_018557.1,2339-2357).
cttggggaatccgaattta

SEQ ID NO: 31092 - DNA, 19 bp, Homo sapiens
  siRNA target sequence for LRP1B (NM_018557.1,2342-2360).
ggggaatccgaatttatca

SEQ ID NO: 31093 - DNA, 19 bp, Homo sapiens
  siRNA target sequence for LRP1B (NM_018557.1,2349-2367).
ccgaatttatcaaaaaaga

SEQ ID NO: 31094 - DNA, 19 bp, Homo sapiens
  siRNA target sequence for LRP1B (NM_018557.1,2350-2368).
cgaatttatcaaaaaagaa

SEQ ID NO: 31095 - DNA, 19 bp, Homo sapiens
  siRNA target sequence for LRP1B (NM_018557.1,2393-2411).
catgtgaagtcgatccata

SEQ ID NO: 31096 - DNA, 19 bp, Homo sapiens
  siRNA target sequence for LRP1B (NM_018557.1,2480-2498).
gcaggactggcttcaactt

SEQ ID NO: 31097 - DNA, 19 bp, Homo sapiens
  siRNA target sequence for LRP1B (NM_018557.1,2490-2508).
cttcaacttgggaagtgat

SEQ ID NO: 31098 - DNA, 19 bp, Homo sapiens
  siRNA target sequence for LRP1B (NM_018557.1,2525-2543).
gaccaaagaatgagttgtt

SEQ ID NO: 31099 - DNA, 19 bp, Homo sapiens
  siRNA target sequence for LRP1B (NM_018557.1,2624-2642).
ccatagaaaatctggtaaa

SEQ ID NO: 31100 - DNA, 19 bp, Homo sapiens
  siRNA target sequence for LRP1B (NM_018557.1,2637-2655).
ggtaaaccctcgtgcttta

SEQ ID NO: 31101 - DNA, 19 bp, Homo sapiens
  siRNA target sequence for LRP1B (NM_018557.1,2643-2661).
ccctcgtgctttagacttt

SEQ ID NO: 31102 - DNA, 19 bp, Homo sapiens
  siRNA target sequence for LRP1B (NM_018557.1,2645-2663).
ctcgtgctttagactttca

SEQ ID NO: 31103 - DNA, 19 bp, Homo sapiens
  siRNA target sequence for LRP1B (NM_018557.1,2658-2676).
ctttcacgcagaaaccaat

SEQ ID NO: 31104 - DNA, 19 bp, Homo sapiens
  siRNA target sequence for LRP1B (NM_018557.1,2665-2683).
gcagaaaccaattacatct

SEQ ID NO: 31105 - DNA, 19 bp, Homo sapiens
  siRNA target sequence for LRP1B (NM_018557.1,2692-2710).
gacaccaccagtttcctaa

SEQ ID NO: 31106 - DNA, 19 bp, Homo sapiens
  siRNA target sequence for LRP1B (NM_018557.1,2793-2811).
ctggattggaaataatctt

SEQ ID NO: 31107 - DNA, 19 bp, Homo sapiens
  siRNA target sequence for LRP1B (NM_018557.1,2795-2813).
ggattggaaataatcttta

SEQ ID NO: 31108 - DNA, 19 bp, Homo sapiens
  siRNA target sequence for LRP1B (NM_018557.1,2819-2837).
ccaatgatggccataggaa

SEQ ID NO: 31109 - DNA, 19 bp, Homo sapiens
  siRNA target sequence for LRP1B (NM_018557.1,2829-2847).
ccataggaaaaccattaat

SEQ ID NO: 31110 - DNA, 19 bp, Homo sapiens
  siRNA target sequence for LRP1B (NM_018557.1,2874-2892).
gagtcggaagactctttta

SEQ ID NO: 31111 - DNA, 19 bp, Homo sapiens
  siRNA target sequence for LRP1B (NM_018557.1,2876-2894).
gtcggaagactcttttaga

SEQ ID NO: 31112 - DNA, 19 bp, Homo sapiens
  siRNA target sequence for LRP1B (NM_018557.1,2885-2903).
ctcttttagagggtgaaat

SEQ ID NO: 31113 - DNA, 19 bp, Homo sapiens
  siRNA target sequence for LRP1B (NM_018557.1,2887-2905).
cttttagagggtgaaatgt

SEQ ID NO: 31114 - DNA, 19 bp, Homo sapiens
  siRNA target sequence for LRP1B (NM_018557.1,2925-2943).
ggtggatccagttaatggt

SEQ ID NO: 31115 - DNA, 19 bp, Homo sapiens
  siRNA target sequence for LRP1B (NM_018557.1,2987-3005).
gcgtgggaaggattgagaa

SEQ ID NO: 31116 - DNA, 19 bp, Homo sapiens
  siRNA target sequence for LRP1B (NM_018557.1,3055-3073).
ctgtggccaaacggtttaa

SEQ ID NO: 31117 - DNA, 19 bp, Homo sapiens
  siRNA target sequence for LRP1B (NM_018557.1,3057-3075).
gtggccaaacggtttaact

SEQ ID NO: 31118 - DNA, 19 bp, Homo sapiens
  siRNA target sequence for LRP1B (NM_018557.1,3059-3077).
ggccaaacggtttaactct

SEQ ID NO: 31119 - DNA, 19 bp, Homo sapiens
  siRNA target sequence for LRP1B (NM_018557.1,3104-3122).
ggtgtgatgcctattacga

SEQ ID NO: 31120 - DNA, 19 bp, Homo sapiens
  siRNA target sequence for LRP1B (NM_018557.1,3105-3123).
gtgtgatgcctattacgat

SEQ ID NO: 31121 - DNA, 19 bp, Homo sapiens
  siRNA target sequence for LRP1B (NM_018557.1,3109-3127).
gatgcctattacgatcata

SEQ ID NO: 31122 - DNA, 19 bp, Homo sapiens
  siRNA target sequence for LRP1B (NM_018557.1,3113-3131).
cctattacgatcatattga

SEQ ID NO: 31123 - DNA, 19 bp, Homo sapiens
  siRNA target sequence for LRP1B (NM_018557.1,3114-3132).
ctattacgatcatattgaa

SEQ ID NO: 31124 - DNA, 19 bp, Homo sapiens
  siRNA target sequence for LRP1B (NM_018557.1,3120-3138).
cgatcatattgaaaaagta

SEQ ID NO: 31125 - DNA, 19 bp, Homo sapiens
  siRNA target sequence for LRP1B (NM_018557.1,3152-3170).
ctcacaggaagattgttta

SEQ ID NO: 31126 - DNA, 19 bp, Homo sapiens
  siRNA target sequence for LRP1B (NM_018557.1,3200-3218).
gactgtcgcatcatggaaa

SEQ ID NO: 31127 - DNA, 19 bp, Homo sapiens
  siRNA target sequence for LRP1B (NM_018557.1,3202-3220).
ctgtcgcatcatggaaatt

SEQ ID NO: 31128 - DNA, 19 bp, Homo sapiens
  siRNA target sequence for LRP1B (NM_018557.1,3204-3222).
gtcgcatcatggaaattat

SEQ ID NO: 31129 - DNA, 19 bp, Homo sapiens
  siRNA target sequence for LRP1B (NM_018557.1,3206-3224).
cgcatcatggaaattatgt

SEQ ID NO: 31130 - DNA, 19 bp, Homo sapiens
  siRNA target sequence for LRP1B (NM_018557.1,3208-3226).
catcatggaaattatgtgt

SEQ ID NO: 31131 - DNA, 19 bp, Homo sapiens
  siRNA target sequence for LRP1B (NM_018557.1,3223-3241).
gtgttctggactgattata

SEQ ID NO: 31132 - DNA, 19 bp, Homo sapiens
  siRNA target sequence for LRP1B (NM_018557.1,3228-3246).
ctggactgattatatgaat

SEQ ID NO: 31133 - DNA, 19 bp, Homo sapiens
  siRNA target sequence for LRP1B (NM_018557.1,3248-3266).
gttccatttttcaactaga

SEQ ID NO: 31134 - DNA, 19 bp, Homo sapiens
  siRNA target sequence for LRP1B (NM_018557.1,3425-3443).
gtgcttgtgccgataatca

SEQ ID NO: 31135 - DNA, 19 bp, Homo sapiens
  siRNA target sequence for LRP1B (NM_018557.1,3428-3446).
cttgtgccgataatcaact

SEQ ID NO: 31136 - DNA, 19 bp, Homo sapiens
  siRNA target sequence for LRP1B (NM_018557.1,3431-3449).
gtgccgataatcaactttt

SEQ ID NO: 31137 - DNA, 19 bp, Homo sapiens
  siRNA target sequence for LRP1B (NM_018557.1,3434-3452).
ccgataatcaacttttgga

SEQ ID NO: 31138 - DNA, 19 bp, Homo sapiens
  siRNA target sequence for LRP1B (NM_018557.1,3435-3453).
cgataatcaacttttggat

SEQ ID NO: 31139 - DNA, 19 bp, Homo sapiens
  siRNA target sequence for LRP1B (NM_018557.1,3487-3505).
gaagcactacctcacatat

SEQ ID NO: 31140 - DNA, 19 bp, Homo sapiens
  siRNA target sequence for LRP1B (NM_018557.1,3490-3508).
gcactacctcacatatgta

SEQ ID NO: 31141 - DNA, 19 bp, Homo sapiens
  siRNA target sequence for LRP1B (NM_018557.1,3514-3532).
ggagagtttcgctgcaaaa

SEQ ID NO: 31142 - DNA, 19 bp, Homo sapiens
  siRNA target sequence for LRP1B (NM_018557.1,3515-3533).
gagagtttcgctgcaaaaa

SEQ ID NO: 31143 - DNA, 19 bp, Homo sapiens
  siRNA target sequence for LRP1B (NM_018557.1,3546-3564).
ccaagctcggtggaaatgt

SEQ ID NO: 31144 - DNA, 19 bp, Homo sapiens
  siRNA target sequence for LRP1B (NM_018557.1,3590-3608).
gaagcgatgaggattcagt

SEQ ID NO: 31145 - DNA, 19 bp, Homo sapiens
  siRNA target sequence for LRP1B (NM_018557.1,3593-3611).
gcgatgaggattcagtaaa

SEQ ID NO: 31146 - DNA, 19 bp, Homo sapiens
  siRNA target sequence for LRP1B (NM_018557.1,3607-3625).
gtaaactgcttcaatcata

SEQ ID NO: 31147 - DNA, 19 bp, Homo sapiens
  siRNA target sequence for LRP1B (NM_018557.1,3631-3649).
cctgatgatcagtttaaat

SEQ ID NO: 31148 - DNA, 19 bp, Homo sapiens
  siRNA target sequence for LRP1B (NM_018557.1,3681-3699).
gctttgtgatggagctaat

SEQ ID NO: 31149 - DNA, 19 bp, Homo sapiens
  siRNA target sequence for LRP1B (NM_018557.1,3718-3736).
gatgaatccaatcaaactt

SEQ ID NO: 31150 - DNA, 19 bp, Homo sapiens
  siRNA target sequence for LRP1B (NM_018557.1,3774-3792).
cggaaatgggcgttgcatt

SEQ ID NO: 31151 - DNA, 19 bp, Homo sapiens
  siRNA target sequence for LRP1B (NM_018557.1,3876-3894).
gccactaacccaattcgta

SEQ ID NO: 31152 - DNA, 19 bp, Homo sapiens
  siRNA target sequence for LRP1B (NM_018557.1,3877-3895).
ccactaacccaattcgtat

SEQ ID NO: 31153 - DNA, 19 bp, Homo sapiens
  siRNA target sequence for LRP1B (NM_018557.1,3885-3903).
ccaattcgtatgcaaaagt

SEQ ID NO: 31154 - DNA, 19 bp, Homo sapiens
  siRNA target sequence for LRP1B (NM_018557.1,3979-3997).
gttcactcttgctttgata

SEQ ID NO: 31155 - DNA, 19 bp, Homo sapiens
  siRNA target sequence for LRP1B (NM_018557.1,3986-4004).
cttgctttgataatcagtt

SEQ ID NO: 31156 - DNA, 19 bp, Homo sapiens
  siRNA target sequence for LRP1B (NM_018557.1,3994-4012).
gataatcagttcagatgtt

SEQ ID NO: 31157 - DNA, 19 bp, Homo sapiens
  siRNA target sequence for LRP1B (NM_018557.1,4085-4103).
cccagatcaattgtactaa

SEQ ID NO: 31158 - DNA, 19 bp, Homo sapiens
  siRNA target sequence for LRP1B (NM_018557.1,4086-4104).
ccagatcaattgtactaaa

SEQ ID NO: 31159 - DNA, 19 bp, Homo sapiens
  siRNA target sequence for LRP1B (NM_018557.1,4089-4107).
gatcaattgtactaaagaa

SEQ ID NO: 31160 - DNA, 19 bp, Homo sapiens
  siRNA target sequence for LRP1B (NM_018557.1,4124-4142).
ctggttgtaacggaaatga

SEQ ID NO: 31161 - DNA, 19 bp, Homo sapiens
  siRNA target sequence for LRP1B (NM_018557.1,4126-4144).
ggttgtaacggaaatgaat

SEQ ID NO: 31162 - DNA, 19 bp, Homo sapiens
  siRNA target sequence for LRP1B (NM_018557.1,4127-4145).
gttgtaacggaaatgaatt

SEQ ID NO: 31163 - DNA, 19 bp, Homo sapiens
  siRNA target sequence for LRP1B (NM_018557.1,4163-4181).
gtaattgcgttcctgattt

SEQ ID NO: 31164 - DNA, 19 bp, Homo sapiens
  siRNA target sequence for LRP1B (NM_018557.1,4216-4234).
ggtagtgatgaaaaaggtt

SEQ ID NO: 31165 - DNA, 19 bp, Homo sapiens
  siRNA target sequence for LRP1B (NM_018557.1,4235-4253).
gcaatggtaccatacgatt

SEQ ID NO: 31166 - DNA, 19 bp, Homo sapiens
  siRNA target sequence for LRP1B (NM_018557.1,4249-4267).
cgattgtgtgaccacaaaa

SEQ ID NO: 31167 - DNA, 19 bp, Homo sapiens
  siRNA target sequence for LRP1B (NM_018557.1,4314-4332).
ggtgtgtgatggagatatt

SEQ ID NO: 31168 - DNA, 19 bp, Homo sapiens
  siRNA target sequence for LRP1B (NM_018557.1,4389-4407).
caagcatccttgtgctaat

SEQ ID NO: 31169 - DNA, 19 bp, Homo sapiens
  siRNA target sequence for LRP1B (NM_018557.1,4577-4595).
gacttcaactcaacaaaga

SEQ ID NO: 31170 - DNA, 19 bp, Homo sapiens
  siRNA target sequence for LRP1B (NM_018557.1,4604-4622).
catgtgaaattgtggatta

SEQ ID NO: 31171 - DNA, 19 bp, Homo sapiens
  siRNA target sequence for LRP1B (NM_018557.1,4677-4695).
caagtgctcatgttatgaa

SEQ ID NO: 31172 - DNA, 19 bp, Homo sapiens
  siRNA target sequence for LRP1B (NM_018557.1,4708-4726).
gatgtagacggtgaaagtt

SEQ ID NO: 31173 - DNA, 19 bp, Homo sapiens
  siRNA target sequence for LRP1B (NM_018557.1,4711-4729).
gtagacggtgaaagttgta

SEQ ID NO: 31174 - DNA, 19 bp, Homo sapiens
  siRNA target sequence for LRP1B (NM_018557.1,4727-4745).
gtacaagtgttgatccttt

SEQ ID NO: 31175 - DNA, 19 bp, Homo sapiens
  siRNA target sequence for LRP1B (NM_018557.1,4730-4748).
caagtgttgatccttttga

SEQ ID NO: 31176 - DNA, 19 bp, Homo sapiens
  siRNA target sequence for LRP1B (NM_018557.1,4755-4773).
catcatcttttctattcgt

SEQ ID NO: 31177 - DNA, 19 bp, Homo sapiens
  siRNA target sequence for LRP1B (NM_018557.1,4779-4797).
gatcagaaggattgatctt

SEQ ID NO: 31178 - DNA, 19 bp, Homo sapiens
  siRNA target sequence for LRP1B (NM_018557.1,4805-4823).
gagactatagtctacttgt

SEQ ID NO: 31179 - DNA, 19 bp, Homo sapiens
  siRNA target sequence for LRP1B (NM_018557.1,4819-4837).
cttgttcctggattgagaa

SEQ ID NO: 31180 - DNA, 19 bp, Homo sapiens
  siRNA target sequence for LRP1B (NM_018557.1,5033-5051).
gcaatctggaccaaatcga

SEQ ID NO: 31181 - DNA, 19 bp, Homo sapiens
  siRNA target sequence for LRP1B (NM_018557.1,5034-5052).
caatctggaccaaatcgaa

SEQ ID NO: 31182 - DNA, 19 bp, Homo sapiens
  siRNA target sequence for LRP1B (NM_018557.1,5049-5067).
cgaagtggccaaactagat

SEQ ID NO: 31183 - DNA, 19 bp, Homo sapiens
  siRNA target sequence for LRP1B (NM_018557.1,5070-5088).
ctccctaagaactacacta

SEQ ID NO: 31184 - DNA, 19 bp, Homo sapiens
  siRNA target sequence for LRP1B (NM_018557.1,5072-5090).
ccctaagaactacactaat

SEQ ID NO: 31185 - DNA, 19 bp, Homo sapiens
  siRNA target sequence for LRP1B (NM_018557.1,5073-5091).
cctaagaactacactaata

SEQ ID NO: 31186 - DNA, 19 bp, Homo sapiens
  siRNA target sequence for LRP1B (NM_018557.1,5266-5284).
gtggaccactttgagaaaa

SEQ ID NO: 31187 - DNA, 19 bp, Homo sapiens
  siRNA target sequence for LRP1B (NM_018557.1,5271-5289).
ccactttgagaaaaggata

SEQ ID NO: 31188 - DNA, 19 bp, Homo sapiens
  siRNA target sequence for LRP1B (NM_018557.1,5329-5347).
ctctatgatggaacaaaca

SEQ ID NO: 31189 - DNA, 19 bp, Homo sapiens
  siRNA target sequence for LRP1B (NM_018557.1,5361-5379).
ccgaggtcatgaatacctt

SEQ ID NO: 31190 - DNA, 19 bp, Homo sapiens
  siRNA target sequence for LRP1B (NM_018557.1,5428-5446).
gactggaggaccaacacat

SEQ ID NO: 31191 - DNA, 19 bp, Homo sapiens
  siRNA target sequence for LRP1B (NM_018557.1,5510-5528).
catttgaccttcagatata

SEQ ID NO: 31192 - DNA, 19 bp, Homo sapiens
  siRNA target sequence for LRP1B (NM_018557.1,5545-5563).
ccacaggctcccaatcctt

SEQ ID NO: 31193 - DNA, 19 bp, Homo sapiens
  siRNA target sequence for LRP1B (NM_018557.1,5591-5609).
gctctcacatgtgtctaat

SEQ ID NO: 31194 - DNA, 19 bp, Homo sapiens
  siRNA target sequence for LRP1B (NM_018557.1,5594-5612).
ctcacatgtgtctaatcaa

SEQ ID NO: 31195 - DNA, 19 bp, Homo sapiens
  siRNA target sequence for LRP1B (NM_018557.1,5633-5651).
gtgcgtgcccccacttgat

SEQ ID NO: 31196 - DNA, 19 bp, Homo sapiens
  siRNA target sequence for LRP1B (NM_018557.1,5635-5653).
gcgtgcccccacttgatga

SEQ ID NO: 31197 - DNA, 19 bp, Homo sapiens
  siRNA target sequence for LRP1B (NM_018557.1,5636-5654).
cgtgcccccacttgatgaa

SEQ ID NO: 31198 - DNA, 19 bp, Homo sapiens
  siRNA target sequence for LRP1B (NM_018557.1,5641-5659).
ccccacttgatgaagcttt

SEQ ID NO: 31199 - DNA, 19 bp, Homo sapiens
  siRNA target sequence for LRP1B (NM_018557.1,5673-5691).
gacctgctatgaaatgaaa

SEQ ID NO: 31200 - DNA, 19 bp, Homo sapiens
  siRNA target sequence for LRP1B (NM_018557.1,5707-5725).
gcaagacgttctgaaatca

SEQ ID NO: 31201 - DNA, 19 bp, Homo sapiens
  siRNA target sequence for LRP1B (NM_018557.1,5757-5775).
cttcatcacggcatttaca

SEQ ID NO: 31202 - DNA, 19 bp, Homo sapiens
  siRNA target sequence for LRP1B (NM_018557.1,5774-5792).
cagtccctgatattgatga

SEQ ID NO: 31203 - DNA, 19 bp, Homo sapiens
  siRNA target sequence for LRP1B (NM_018557.1,5791-5809).
gacgttactgtgatagact

SEQ ID NO: 31204 - DNA, 19 bp, Homo sapiens
  siRNA target sequence for LRP1B (NM_018557.1,5815-5833).
gcatctgaggaacgtttat

SEQ ID NO: 31205 - DNA, 19 bp, Homo sapiens
  siRNA target sequence for LRP1B (NM_018557.1,5816-5834).
catctgaggaacgtttata

SEQ ID NO: 31206 - DNA, 19 bp, Homo sapiens
  siRNA target sequence for LRP1B (NM_018557.1,5858-5876).
ccattaaacgagcttttat

SEQ ID NO: 31207 - DNA, 19 bp, Homo sapiens
  siRNA target sequence for LRP1B (NM_018557.1,5880-5898).
cggaactgggttagaaact

SEQ ID NO: 31208 - DNA, 19 bp, Homo sapiens
  siRNA target sequence for LRP1B (NM_018557.1,5885-5903).
ctgggttagaaactgttat

SEQ ID NO: 31209 - DNA, 19 bp, Homo sapiens
  siRNA target sequence for LRP1B (NM_018557.1,5887-5905).
gggttagaaactgttattt

SEQ ID NO: 31210 - DNA, 19 bp, Homo sapiens
  siRNA target sequence for LRP1B (NM_018557.1,5940-5958).
ggattgggtgtcacgtaat

SEQ ID NO: 31211 - DNA, 19 bp, Homo sapiens
  siRNA target sequence for LRP1B (NM_018557.1,5941-5959).
gattgggtgtcacgtaatt

SEQ ID NO: 31212 - DNA, 19 bp, Homo sapiens
  siRNA target sequence for LRP1B (NM_018557.1,5945-5963).
gggtgtcacgtaatttata

SEQ ID NO: 31213 - DNA, 19 bp, Homo sapiens
  siRNA target sequence for LRP1B (NM_018557.1,5964-5982).
ctggattagctcagaattt

SEQ ID NO: 31214 - DNA, 19 bp, Homo sapiens
  siRNA target sequence for LRP1B (NM_018557.1,5967-5985).
gattagctcagaatttgat

SEQ ID NO: 31215 - DNA, 19 bp, Homo sapiens
  siRNA target sequence for LRP1B (NM_018557.1,6024-6042).
gaaaacctcaattatccat

SEQ ID NO: 31216 - DNA, 19 bp, Homo sapiens
  siRNA target sequence for LRP1B (NM_018557.1,6029-6047).
cctcaattatccatggaat

SEQ ID NO: 31217 - DNA, 19 bp, Homo sapiens
  siRNA target sequence for LRP1B (NM_018557.1,6096-6114).
ctggaccgatggaaacaca

SEQ ID NO: 31218 - DNA, 19 bp, Homo sapiens
  siRNA target sequence for LRP1B (NM_018557.1,6098-6116).
ggaccgatggaaacacaat

SEQ ID NO: 31219 - DNA, 19 bp, Homo sapiens
  siRNA target sequence for LRP1B (NM_018557.1,6099-6117).
gaccgatggaaacacaatt

SEQ ID NO: 31220 - DNA, 19 bp, Homo sapiens
  siRNA target sequence for LRP1B (NM_018557.1,6101-6119).
ccgatggaaacacaattaa

SEQ ID NO: 31221 - DNA, 19 bp, Homo sapiens
  siRNA target sequence for LRP1B (NM_018557.1,6137-6155).
gcagtaatagcaagattct

SEQ ID NO: 31222 - DNA, 19 bp, Homo sapiens
  siRNA target sequence for LRP1B (NM_018557.1,6174-6192).
gccagttggtctatcgata

SEQ ID NO: 31223 - DNA, 19 bp, Homo sapiens
  siRNA target sequence for LRP1B (NM_018557.1,6178-6196).
gttggtctatcgatagact

SEQ ID NO: 31224 - DNA, 19 bp, Homo sapiens
  siRNA target sequence for LRP1B (NM_018557.1,6182-6200).
gtctatcgatagactatgt

SEQ ID NO: 31225 - DNA, 19 bp, Homo sapiens
  siRNA target sequence for LRP1B (NM_018557.1,6229-6247).
gggaatggaaccataaata

SEQ ID NO: 31226 - DNA, 19 bp, Homo sapiens
  siRNA target sequence for LRP1B (NM_018557.1,6258-6276).
ggatggtggtaatttagaa

SEQ ID NO: 31227 - DNA, 19 bp, Homo sapiens
  siRNA target sequence for LRP1B (NM_018557.1,6266-6284).
gtaatttagaagtaatcga

SEQ ID NO: 31228 - DNA, 19 bp, Homo sapiens
  siRNA target sequence for LRP1B (NM_018557.1,6317-6335).
ccctaaccatcatggataa

SEQ ID NO: 31229 - DNA, 19 bp, Homo sapiens
  siRNA target sequence for LRP1B (NM_018557.1,6319-6337).
ctaaccatcatggataaga

SEQ ID NO: 31230 - DNA, 19 bp, Homo sapiens
  siRNA target sequence for LRP1B (NM_018557.1,6344-6362).
ggtgggcagaccaaaactt

SEQ ID NO: 31231 - DNA, 19 bp, Homo sapiens
  siRNA target sequence for LRP1B (NM_018557.1,6345-6363).
gtgggcagaccaaaactta

SEQ ID NO: 31232 - DNA, 19 bp, Homo sapiens
  siRNA target sequence for LRP1B (NM_018557.1,6370-6388).
ctaggaacctgcagcaaaa

SEQ ID NO: 31233 - DNA, 19 bp, Homo sapiens
  siRNA target sequence for LRP1B (NM_018557.1,6423-6441).
gacttctggggtagttcat

SEQ ID NO: 31234 - DNA, 19 bp, Homo sapiens
  siRNA target sequence for LRP1B (NM_018557.1,6428-6446).
ctggggtagttcatatgaa

SEQ ID NO: 31235 - DNA, 19 bp, Homo sapiens
  siRNA target sequence for LRP1B (NM_018557.1,6431-6449).
gggtagttcatatgaaagt

SEQ ID NO: 31236 - DNA, 19 bp, Homo sapiens
  siRNA target sequence for LRP1B (NM_018557.1,6433-6451).
gtagttcatatgaaagtct

SEQ ID NO: 31237 - DNA, 19 bp, Homo sapiens
  siRNA target sequence for LRP1B (NM_018557.1,6476-6494).
gcaattcctgccaactaaa

SEQ ID NO: 31238 - DNA, 19 bp, Homo sapiens
  siRNA target sequence for LRP1B (NM_018557.1,6503-6521).
gatgctctcaactttgttt

SEQ ID NO: 31239 - DNA, 19 bp, Homo sapiens
  siRNA target sequence for LRP1B (NM_018557.1,6507-6525).
ctctcaactttgtttacca

SEQ ID NO: 31240 - DNA, 19 bp, Homo sapiens
  siRNA target sequence for LRP1B (NM_018557.1,6563-6581).
gatattatctccaaaagaa

SEQ ID NO: 31241 - DNA, 19 bp, Homo sapiens
  siRNA target sequence for LRP1B (NM_018557.1,6573-6591).
ccaaaagaaccgtatgtca

SEQ ID NO: 31242 - DNA, 19 bp, Homo sapiens
  siRNA target sequence for LRP1B (NM_018557.1,6584-6602).
gtatgtcatgtcaaggtat

SEQ ID NO: 31243 - DNA, 19 bp, Homo sapiens
  siRNA target sequence for LRP1B (NM_018557.1,6598-6616).
ggtatagaatcatttctta

SEQ ID NO: 31244 - DNA, 19 bp, Homo sapiens
  siRNA target sequence for LRP1B (NM_018557.1,6652-6670).
cttgaaccaagtgacaaaa

SEQ ID NO: 31245 - DNA, 19 bp, Homo sapiens
  siRNA target sequence for LRP1B (NM_018557.1,6684-6702).
gcctatatcaggaacttca

SEQ ID NO: 31246 - DNA, 19 bp, Homo sapiens
  siRNA target sequence for LRP1B (NM_018557.1,6707-6725).
ccgtgggaatagatttcca

SEQ ID NO: 31247 - DNA, 19 bp, Homo sapiens
  siRNA target sequence for LRP1B (NM_018557.1,6708-6726).
cgtgggaatagatttccat

SEQ ID NO: 31248 - DNA, 19 bp, Homo sapiens
  siRNA target sequence for LRP1B (NM_018557.1,6756-6774).
catgggcttcaataaaatt

SEQ ID NO: 31249 - DNA, 19 bp, Homo sapiens
  siRNA target sequence for LRP1B (NM_018557.1,6857-6875).
ggattgctggtaacatata

SEQ ID NO: 31250 - DNA, 19 bp, Homo sapiens
  siRNA target sequence for LRP1B (NM_018557.1,6883-6901).
gatcatggtttcaacttaa

SEQ ID NO: 31251 - DNA, 19 bp, Homo sapiens
  siRNA target sequence for LRP1B (NM_018557.1,6890-6908).
gtttcaacttaattgaagt

SEQ ID NO: 31252 - DNA, 19 bp, Homo sapiens
  siRNA target sequence for LRP1B (NM_018557.1,6907-6925).
gttgcaagactcaatggtt

SEQ ID NO: 31253 - DNA, 19 bp, Homo sapiens
  siRNA target sequence for LRP1B (NM_018557.1,6922-6940).
ggttctttccgttatgtaa

SEQ ID NO: 31254 - DNA, 19 bp, Homo sapiens
  siRNA target sequence for LRP1B (NM_018557.1,6955-6973).
ctggatcaaccaagatcta

SEQ ID NO: 31255 - DNA, 19 bp, Homo sapiens
  siRNA target sequence for LRP1B (NM_018557.1,6957-6975).
ggatcaaccaagatctata

SEQ ID NO: 31256 - DNA, 19 bp, Homo sapiens
  siRNA target sequence for LRP1B (NM_018557.1,7021-7039).
caaatgccctgtattggaa

SEQ ID NO: 31257 - DNA, 19 bp, Homo sapiens
  siRNA target sequence for LRP1B (NM_018557.1,7060-7078).
gagaaggttgtccttgtaa

SEQ ID NO: 31258 - DNA, 19 bp, Homo sapiens
  siRNA target sequence for LRP1B (NM_018557.1,7075-7093).
gtaagcatgggaatagcat

SEQ ID NO: 31259 - DNA, 19 bp, Homo sapiens
  siRNA target sequence for LRP1B (NM_018557.1,7110-7128).
catcgactatgaggaaaat

SEQ ID NO: 31260 - DNA, 19 bp, Homo sapiens
  siRNA target sequence for LRP1B (NM_018557.1,7148-7166).
ctcgcacagacaagataga

SEQ ID NO: 31261 - DNA, 19 bp, Homo sapiens
  siRNA target sequence for LRP1B (NM_018557.1,7296-7314).
cagaaggggccacaagaat

SEQ ID NO: 31262 - DNA, 19 bp, Homo sapiens
  siRNA target sequence for LRP1B (NM_018557.1,7319-7337).
ccacagaaacgataaccat

SEQ ID NO: 31263 - DNA, 19 bp, Homo sapiens
  siRNA target sequence for LRP1B (NM_018557.1,7324-7342).
gaaacgataaccatgagaa

SEQ ID NO: 31264 - DNA, 19 bp, Homo sapiens
  siRNA target sequence for LRP1B (NM_018557.1,7443-7461).
ctgtctttatcgaggaaat

SEQ ID NO: 31265 - DNA, 19 bp, Homo sapiens
  siRNA target sequence for LRP1B (NM_018557.1,7523-7541).
ggcatgaaggctatttact

SEQ ID NO: 31266 - DNA, 19 bp, Homo sapiens
  siRNA target sequence for LRP1B (NM_018557.1,7525-7543).
catgaaggctatttactgt

SEQ ID NO: 31267 - DNA, 19 bp, Homo sapiens
  siRNA target sequence for LRP1B (NM_018557.1,7528-7546).
gaaggctatttactgtatt

SEQ ID NO: 31268 - DNA, 19 bp, Homo sapiens
  siRNA target sequence for LRP1B (NM_018557.1,7601-7619).
ccccaataaggccatatga

SEQ ID NO: 31269 - DNA, 19 bp, Homo sapiens
  siRNA target sequence for LRP1B (NM_018557.1,7603-7621).
ccaataaggccatatgaga

SEQ ID NO: 31270 - DNA, 19 bp, Homo sapiens
  siRNA target sequence for LRP1B (NM_018557.1,7648-7666).
gccttggcttttgactata

SEQ ID NO: 31271 - DNA, 19 bp, Homo sapiens
  siRNA target sequence for LRP1B (NM_018557.1,7649-7667).
ccttggcttttgactataa

SEQ ID NO: 31272 - DNA, 19 bp, Homo sapiens
  siRNA target sequence for LRP1B (NM_018557.1,7650-7668).
cttggcttttgactataat

SEQ ID NO: 31273 - DNA, 19 bp, Homo sapiens
  siRNA target sequence for LRP1B (NM_018557.1,7654-7672).
gcttttgactataatcaaa

SEQ ID NO: 31274 - DNA, 19 bp, Homo sapiens
  siRNA target sequence for LRP1B (NM_018557.1,7681-7699).
ggtaccaaccgaatctttt

SEQ ID NO: 31275 - DNA, 19 bp, Homo sapiens
  siRNA target sequence for LRP1B (NM_018557.1,7682-7700).
gtaccaaccgaatctttta

SEQ ID NO: 31276 - DNA, 19 bp, Homo sapiens
  siRNA target sequence for LRP1B (NM_018557.1,7686-7704).
caaccgaatcttttacagt

SEQ ID NO: 31277 - DNA, 19 bp, Homo sapiens
  siRNA target sequence for LRP1B (NM_018557.1,7872-7890).
gactcggcctggagcattt

SEQ ID NO: 31278 - DNA, 19 bp, Homo sapiens
  siRNA target sequence for LRP1B (NM_018557.1,7936-7954).
gtgctagccttggatgaat

SEQ ID NO: 31279 - DNA, 19 bp, Homo sapiens
  siRNA target sequence for LRP1B (NM_018557.1,7942-7960).
gccttggatgaatgtcaaa

SEQ ID NO: 31280 - DNA, 19 bp, Homo sapiens
  siRNA target sequence for LRP1B (NM_018557.1,7943-7961).
ccttggatgaatgtcaaaa

SEQ ID NO: 31281 - DNA, 19 bp, Homo sapiens
  siRNA target sequence for LRP1B (NM_018557.1,7990-8008).
caacatccaagtatcatga

SEQ ID NO: 31282 - DNA, 19 bp, Homo sapiens
  siRNA target sequence for LRP1B (NM_018557.1,7993-8011).
catccaagtatcatgagat

SEQ ID NO: 31283 - DNA, 19 bp, Homo sapiens
  siRNA target sequence for LRP1B (NM_018557.1,7996-8014).
ccaagtatcatgagatcta

SEQ ID NO: 31284 - DNA, 19 bp, Homo sapiens
  siRNA target sequence for LRP1B (NM_018557.1,8044-8062).
gtcagtacagacatactca

SEQ ID NO: 31285 - DNA, 19 bp, Homo sapiens
  siRNA target sequence for LRP1B (NM_018557.1,8061-8079).
cactccaaatggacttact

SEQ ID NO: 31286 - DNA, 19 bp, Homo sapiens
  siRNA target sequence for LRP1B (NM_018557.1,8196-8214).
cctcagtttggctgtttat

SEQ ID NO: 31287 - DNA, 19 bp, Homo sapiens
  siRNA target sequence for LRP1B (NM_018557.1,8205-8223).
ggctgtttatgacaattat

SEQ ID NO: 31288 - DNA, 19 bp, Homo sapiens
  siRNA target sequence for LRP1B (NM_018557.1,8232-8250).
gtcggactggggaagaaga

SEQ ID NO: 31289 - DNA, 19 bp, Homo sapiens
  siRNA target sequence for LRP1B (NM_018557.1,8271-8289).
gtacacaggaggagataca

SEQ ID NO: 31290 - DNA, 19 bp, Homo sapiens
  siRNA target sequence for LRP1B (NM_018557.1,8338-8356).
gttgccaatgacaccaata

SEQ ID NO: 31291 - DNA, 19 bp, Homo sapiens
  siRNA target sequence for LRP1B (NM_018557.1,8365-8383).
ctttctccatgtgcattat

SEQ ID NO: 31292 - DNA, 19 bp, Homo sapiens
  siRNA target sequence for LRP1B (NM_018557.1,8369-8387).
ctccatgtgcattattgaa

SEQ ID NO: 31293 - DNA, 19 bp, Homo sapiens
  siRNA target sequence for LRP1B (NM_018557.1,8444-8462).
gcagaggggaccgaatatt

SEQ ID NO: 31294 - DNA, 19 bp, Homo sapiens
  siRNA target sequence for LRP1B (NM_018557.1,8447-8465).
gaggggaccgaatattgct

SEQ ID NO: 31295 - DNA, 19 bp, Homo sapiens
  siRNA target sequence for LRP1B (NM_018557.1,8669-8687).
ctcatggcaagttatgtga

SEQ ID NO: 31296 - DNA, 19 bp, Homo sapiens
  siRNA target sequence for LRP1B (NM_018557.1,8712-8730).
ctctgatgaattagattgt

SEQ ID NO: 31297 - DNA, 19 bp, Homo sapiens
  siRNA target sequence for LRP1B (NM_018557.1,8719-8737).
gaattagattgtaaagttt

SEQ ID NO: 31298 - DNA, 19 bp, Homo sapiens
  siRNA target sequence for LRP1B (NM_018557.1,8741-8759).
cctgtgccacggttgagtt

SEQ ID NO: 31299 - DNA, 19 bp, Homo sapiens
  siRNA target sequence for LRP1B (NM_018557.1,8765-8783).
gtgcagatgggacttgtat

SEQ ID NO: 31300 - DNA, 19 bp, Homo sapiens
  siRNA target sequence for LRP1B (NM_018557.1,8770-8788).
gatgggacttgtattccaa

SEQ ID NO: 31301 - DNA, 19 bp, Homo sapiens
  siRNA target sequence for LRP1B (NM_018557.1,8775-8793).
gacttgtattccaagatca

SEQ ID NO: 31302 - DNA, 19 bp, Homo sapiens
  siRNA target sequence for LRP1B (NM_018557.1,8795-8813).
cacgatgcaaccagaacat

SEQ ID NO: 31303 - DNA, 19 bp, Homo sapiens
  siRNA target sequence for LRP1B (NM_018557.1,8802-8820).
caaccagaacatagattgt

SEQ ID NO: 31304 - DNA, 19 bp, Homo sapiens
  siRNA target sequence for LRP1B (NM_018557.1,8857-8875).
gactgcacacatttctata

SEQ ID NO: 31305 - DNA, 19 bp, Homo sapiens
  siRNA target sequence for LRP1B (NM_018557.1,8886-8904).
gaaaaccacagggttcata

SEQ ID NO: 31306 - DNA, 19 bp, Homo sapiens
  siRNA target sequence for LRP1B (NM_018557.1,8892-8910).
cacagggttcataagatgt

SEQ ID NO: 31307 - DNA, 19 bp, Homo sapiens
  siRNA target sequence for LRP1B (NM_018557.1,8896-8914).
gggttcataagatgtaatt

SEQ ID NO: 31308 - DNA, 19 bp, Homo sapiens
  siRNA target sequence for LRP1B (NM_018557.1,8898-8916).
gttcataagatgtaattct

SEQ ID NO: 31309 - DNA, 19 bp, Homo sapiens
  siRNA target sequence for LRP1B (NM_018557.1,8929-8947).
gttctgccaacctggatat

SEQ ID NO: 31310 - DNA, 19 bp, Homo sapiens
  siRNA target sequence for LRP1B (NM_018557.1,8971-8989).
gactattcagatgaattaa

SEQ ID NO: 31311 - DNA, 19 bp, Homo sapiens
  siRNA target sequence for LRP1B (NM_018557.1,9040-9058).
cctagtggaagatgcattt

SEQ ID NO: 31312 - DNA, 19 bp, Homo sapiens
  siRNA target sequence for LRP1B (NM_018557.1,9069-9087).
gatatgcgatggtcagaaa

SEQ ID NO: 31313 - DNA, 19 bp, Homo sapiens
  siRNA target sequence for LRP1B (NM_018557.1,9156-9174).
cgcacaaaaatgtatttct

SEQ ID NO: 31314 - DNA, 19 bp, Homo sapiens
  siRNA target sequence for LRP1B (NM_018557.1,9206-9224).
gtggggatgggttagatga

SEQ ID NO: 31315 - DNA, 19 bp, Homo sapiens
  siRNA target sequence for LRP1B (NM_018557.1,9208-9226).
ggggatgggttagatgaaa

SEQ ID NO: 31316 - DNA, 19 bp, Homo sapiens
  siRNA target sequence for LRP1B (NM_018557.1,9210-9228).
ggatgggttagatgaaagt

SEQ ID NO: 31317 - DNA, 19 bp, Homo sapiens
  siRNA target sequence for LRP1B (NM_018557.1,9299-9317).
cccgacattggctttgtga

SEQ ID NO: 31318 - DNA, 19 bp, Homo sapiens
  siRNA target sequence for LRP1B (NM_018557.1,9300-9318).
ccgacattggctttgtgat

SEQ ID NO: 31319 - DNA, 19 bp, Homo sapiens
  siRNA target sequence for LRP1B (NM_018557.1,9364-9382).
ggctgcgctcccaataata

SEQ ID NO: 31320 - DNA, 19 bp, Homo sapiens
  siRNA target sequence for LRP1B (NM_018557.1,9366-9384).
ctgcgctcccaataataca

SEQ ID NO: 31321 - DNA, 19 bp, Homo sapiens
  siRNA target sequence for LRP1B (NM_018557.1,9369-9387).
cgctcccaataatacatgt

SEQ ID NO: 31322 - DNA, 19 bp, Homo sapiens
  siRNA target sequence for LRP1B (NM_018557.1,9418-9436).
gtatgcattcccaagcaat

SEQ ID NO: 31323 - DNA, 19 bp, Homo sapiens
  siRNA target sequence for LRP1B (NM_018557.1,9422-9440).
gcattcccaagcaatttgt

SEQ ID NO: 31324 - DNA, 19 bp, Homo sapiens
  siRNA target sequence for LRP1B (NM_018557.1,9428-9446).
ccaagcaatttgtttgtga

SEQ ID NO: 31325 - DNA, 19 bp, Homo sapiens
  siRNA target sequence for LRP1B (NM_018557.1,9504-9522).
gtgtggtacagaagaattt

SEQ ID NO: 31326 - DNA, 19 bp, Homo sapiens
  siRNA target sequence for LRP1B (NM_018557.1,9532-9550).
gatgggcggtgtcttctaa

SEQ ID NO: 31327 - DNA, 19 bp, Homo sapiens
  siRNA target sequence for LRP1B (NM_018557.1,9535-9553).
gggcggtgtcttctaaata

SEQ ID NO: 31328 - DNA, 19 bp, Homo sapiens
  siRNA target sequence for LRP1B (NM_018557.1,9537-9555).
gcggtgtcttctaaatact

SEQ ID NO: 31329 - DNA, 19 bp, Homo sapiens
  siRNA target sequence for LRP1B (NM_018557.1,9539-9557).
ggtgtcttctaaatactca

SEQ ID NO: 31330 - DNA, 19 bp, Homo sapiens
  siRNA target sequence for LRP1B (NM_018557.1,9608-9626).
ctttaaacccaaagtgtaa

SEQ ID NO: 31331 - DNA, 19 bp, Homo sapiens
  siRNA target sequence for LRP1B (NM_018557.1,9634-9652).
gaacagtcatgcaacagtt

SEQ ID NO: 31332 - DNA, 19 bp, Homo sapiens
  siRNA target sequence for LRP1B (NM_018557.1,9802-9820).
gaccttccggtcagttata

SEQ ID NO: 31333 - DNA, 19 bp, Homo sapiens
  siRNA target sequence for LRP1B (NM_018557.1,9811-9829).
gtcagttataagtgcaaat

SEQ ID NO: 31334 - DNA, 19 bp, Homo sapiens
  siRNA target sequence for LRP1B (NM_018557.1,9849-9867).
gaaggatgacggcaaaaca

SEQ ID NO: 31335 - DNA, 19 bp, Homo sapiens
  siRNA target sequence for LRP1B (NM_018557.1,9852-9870).
ggatgacggcaaaacatgt

SEQ ID NO: 31336 - DNA, 19 bp, Homo sapiens
  siRNA target sequence for LRP1B (NM_018557.1,9939-9957).
caagtgcctctgtacagat

SEQ ID NO: 31337 - DNA, 19 bp, Homo sapiens
  siRNA target sequence for LRP1B (NM_018557.1,9948-9966).
ctgtacagatgggtatgaa

SEQ ID NO: 31338 - DNA, 19 bp, Homo sapiens
  siRNA target sequence for LRP1B (NM_018557.1,9950-9968).
gtacagatgggtatgaaat

SEQ ID NO: 31339 - DNA, 19 bp, Homo sapiens
  siRNA target sequence for LRP1B (NM_018557.1,10036-10054).
catcatgagataaggaaaa

SEQ ID NO: 31340 - DNA, 19 bp, Homo sapiens
  siRNA target sequence for LRP1B (NM_018557.1,10066-10084).
ggctccaactacacacttt

SEQ ID NO: 31341 - DNA, 19 bp, Homo sapiens
  siRNA target sequence for LRP1B (NM_018557.1,10070-10088).
ccaactacacacttttaaa

SEQ ID NO: 31342 - DNA, 19 bp, Homo sapiens
  siRNA target sequence for LRP1B (NM_018557.1,10081-10099).
cttttaaaacagggattaa

SEQ ID NO: 31343 - DNA, 19 bp, Homo sapiens
  siRNA target sequence for LRP1B (NM_018557.1,10166-10184).
ccaatggcagtcgcataaa

SEQ ID NO: 31344 - DNA, 19 bp, Homo sapiens
  siRNA target sequence for LRP1B (NM_018557.1,10167-10185).
caatggcagtcgcataaat

SEQ ID NO: 31345 - DNA, 19 bp, Homo sapiens
  siRNA target sequence for LRP1B (NM_018557.1,10171-10189).
ggcagtcgcataaatagaa

SEQ ID NO: 31346 - DNA, 19 bp, Homo sapiens
  siRNA target sequence for LRP1B (NM_018557.1,10172-10190).
gcagtcgcataaatagaat

SEQ ID NO: 31347 - DNA, 19 bp, Homo sapiens
  siRNA target sequence for LRP1B (NM_018557.1,10177-10195).
cgcataaatagaatgtgtt

SEQ ID NO: 31348 - DNA, 19 bp, Homo sapiens
  siRNA target sequence for LRP1B (NM_018557.1,10205-10223).
gtgacattaaggtagttca

SEQ ID NO: 31349 - DNA, 19 bp, Homo sapiens
  siRNA target sequence for LRP1B (NM_018557.1,10207-10225).
gacattaaggtagttcata

SEQ ID NO: 31350 - DNA, 19 bp, Homo sapiens
  siRNA target sequence for LRP1B (NM_018557.1,10244-10262).
cacttgctgtcgattggat

SEQ ID NO: 31351 - DNA, 19 bp, Homo sapiens
  siRNA target sequence for LRP1B (NM_018557.1,10252-10270).
gtcgattggattggaaaaa

SEQ ID NO: 31352 - DNA, 19 bp, Homo sapiens
  siRNA target sequence for LRP1B (NM_018557.1,10325-10343).
gcttgtaccctactatact

SEQ ID NO: 31353 - DNA, 19 bp, Homo sapiens
  siRNA target sequence for LRP1B (NM_018557.1,10334-10352).
ctactatactcgttagcaa

SEQ ID NO: 31354 - DNA, 19 bp, Homo sapiens
  siRNA target sequence for LRP1B (NM_018557.1,10384-10402).
gatcctcaagctggatatt

SEQ ID NO: 31355 - DNA, 19 bp, Homo sapiens
  siRNA target sequence for LRP1B (NM_018557.1,10390-10408).
caagctggatatttgtatt

SEQ ID NO: 31356 - DNA, 19 bp, Homo sapiens
  siRNA target sequence for LRP1B (NM_018557.1,10393-10411).
gctggatatttgtattgga

SEQ ID NO: 31357 - DNA, 19 bp, Homo sapiens
  siRNA target sequence for LRP1B (NM_018557.1,10394-10412).
ctggatatttgtattggat

SEQ ID NO: 31358 - DNA, 19 bp, Homo sapiens
  siRNA target sequence for LRP1B (NM_018557.1,10418-10436).
gctgcgagtatcctcatat

SEQ ID NO: 31359 - DNA, 19 bp, Homo sapiens
  siRNA target sequence for LRP1B (NM_018557.1,10419-10437).
ctgcgagtatcctcatatt

SEQ ID NO: 31360 - DNA, 19 bp, Homo sapiens
  siRNA target sequence for LRP1B (NM_018557.1,10496-10514).
gacctatggcactaacaat

SEQ ID NO: 31361 - DNA, 19 bp, Homo sapiens
  siRNA target sequence for LRP1B (NM_018557.1,10499-10517).
ctatggcactaacaataga

SEQ ID NO: 31362 - DNA, 19 bp, Homo sapiens
  siRNA target sequence for LRP1B (NM_018557.1,10503-10521).
ggcactaacaatagattat

SEQ ID NO: 31363 - DNA, 19 bp, Homo sapiens
  siRNA target sequence for LRP1B (NM_018557.1,10505-10523).
cactaacaatagattatgt

SEQ ID NO: 31364 - DNA, 19 bp, Homo sapiens
  siRNA target sequence for LRP1B (NM_018557.1,10507-10525).
ctaacaatagattatgtta

SEQ ID NO: 31365 - DNA, 19 bp, Homo sapiens
  siRNA target sequence for LRP1B (NM_018557.1,10541-10559).
gggccgatgaaaatcacat

SEQ ID NO: 31366 - DNA, 19 bp, Homo sapiens
  siRNA target sequence for LRP1B (NM_018557.1,10544-10562).
ccgatgaaaatcacattga

SEQ ID NO: 31367 - DNA, 19 bp, Homo sapiens
  siRNA target sequence for LRP1B (NM_018557.1,10589-10607).
gacacaaagtccctaatca

SEQ ID NO: 31368 - DNA, 19 bp, Homo sapiens
  siRNA target sequence for LRP1B (NM_018557.1,10593-10611).
caaagtccctaatcaagat

SEQ ID NO: 31369 - DNA, 19 bp, Homo sapiens
  siRNA target sequence for LRP1B (NM_018557.1,10599-10617).
ccctaatcaagatattcca

SEQ ID NO: 31370 - DNA, 19 bp, Homo sapiens
  siRNA target sequence for LRP1B (NM_018557.1,10618-10636).
ggggtgattgcactaacat

SEQ ID NO: 31371 - DNA, 19 bp, Homo sapiens
  siRNA target sequence for LRP1B (NM_018557.1,10619-10637).
gggtgattgcactaacatt

SEQ ID NO: 31372 - DNA, 19 bp, Homo sapiens
  siRNA target sequence for LRP1B (NM_018557.1,10634-10652).
cattgtttgaagactacat

SEQ ID NO: 31373 - DNA, 19 bp, Homo sapiens
  siRNA target sequence for LRP1B (NM_018557.1,10683-10701).
cagccgtgcccataaaaca

SEQ ID NO: 31374 - DNA, 19 bp, Homo sapiens
  siRNA target sequence for LRP1B (NM_018557.1,10781-10799).
ctgatgtctccaaacatct

SEQ ID NO: 31375 - DNA, 19 bp, Homo sapiens
  siRNA target sequence for LRP1B (NM_018557.1,10791-10809).
caaacatctctgcatgata

SEQ ID NO: 31376 - DNA, 19 bp, Homo sapiens
  siRNA target sequence for LRP1B (NM_018557.1,10800-10818).
ctgcatgataaataatggt

SEQ ID NO: 31377 - DNA, 19 bp, Homo sapiens
  siRNA target sequence for LRP1B (NM_018557.1,10871-10889).
gtcccactaacttctatct

SEQ ID NO: 31378 - DNA, 19 bp, Homo sapiens
  siRNA target sequence for LRP1B (NM_018557.1,10884-10902).
ctatctggcagctgataat

SEQ ID NO: 31379 - DNA, 19 bp, Homo sapiens
  siRNA target sequence for LRP1B (NM_018557.1,10932-10950).
ccagtttcgttgcaaaact

SEQ ID NO: 31380 - DNA, 19 bp, Homo sapiens
  siRNA target sequence for LRP1B (NM_018557.1,11044-11062).
cagccaggccgatttcagt

SEQ ID NO: 31381 - DNA, 19 bp, Homo sapiens
  siRNA target sequence for LRP1B (NM_018557.1,11080-11098).
gctctaccagctttcatct

SEQ ID NO: 31382 - DNA, 19 bp, Homo sapiens
  siRNA target sequence for LRP1B (NM_018557.1,11159-11177).
gcctgtcaggtcaattcaa

SEQ ID NO: 31383 - DNA, 19 bp, Homo sapiens
  siRNA target sequence for LRP1B (NM_018557.1,11160-11178).
cctgtcaggtcaattcaaa

SEQ ID NO: 31384 - DNA, 19 bp, Homo sapiens
  siRNA target sequence for LRP1B (NM_018557.1,11161-11179).
ctgtcaggtcaattcaaat

SEQ ID NO: 31385 - DNA, 19 bp, Homo sapiens
  siRNA target sequence for LRP1B (NM_018557.1,11216-11234).
gatgtaatgggcaagatga

SEQ ID NO: 31386 - DNA, 19 bp, Homo sapiens
  siRNA target sequence for LRP1B (NM_018557.1,11289-11307).
ctatttccagtgtaagact

SEQ ID NO: 31387 - DNA, 19 bp, Homo sapiens
  siRNA target sequence for LRP1B (NM_018557.1,11304-11322).
gactacgaagcattgcatt

SEQ ID NO: 31388 - DNA, 19 bp, Homo sapiens
  siRNA target sequence for LRP1B (NM_018557.1,11309-11327).
cgaagcattgcatttccaa

SEQ ID NO: 31389 - DNA, 19 bp, Homo sapiens
  siRNA target sequence for LRP1B (NM_018557.1,11373-11391).
cgaggccaactgcgataaa

SEQ ID NO: 31390 - DNA, 19 bp, Homo sapiens
  siRNA target sequence for LRP1B (NM_018557.1,11374-11392).
gaggccaactgcgataaaa

SEQ ID NO: 31391 - DNA, 19 bp, Homo sapiens
  siRNA target sequence for LRP1B (NM_018557.1,11377-11395).
gccaactgcgataaaaaga

SEQ ID NO: 31392 - DNA, 19 bp, Homo sapiens
  siRNA target sequence for LRP1B (NM_018557.1,11379-11397).
caactgcgataaaaagact

SEQ ID NO: 31393 - DNA, 19 bp, Homo sapiens
  siRNA target sequence for LRP1B (NM_018557.1,11394-11412).
gacttgtggacctcatgaa

SEQ ID NO: 31394 - DNA, 19 bp, Homo sapiens
  siRNA target sequence for LRP1B (NM_018557.1,11443-11461).
gatcactggcggtgtgata

SEQ ID NO: 31395 - DNA, 19 bp, Homo sapiens
  siRNA target sequence for LRP1B (NM_018557.1,11451-11469).
gcggtgtgatagccaaaat

SEQ ID NO: 31396 - DNA, 19 bp, Homo sapiens
  siRNA target sequence for LRP1B (NM_018557.1,11601-11619).
ctctgatgagagaaattgt

SEQ ID NO: 31397 - DNA, 19 bp, Homo sapiens
  siRNA target sequence for LRP1B (NM_018557.1,11627-11645).
gttgttccaaagatcagtt

SEQ ID NO: 31398 - DNA, 19 bp, Homo sapiens
  siRNA target sequence for LRP1B (NM_018557.1,11750-11768).
cttgctcatcacgtgaata

SEQ ID NO: 31399 - DNA, 19 bp, Homo sapiens
  siRNA target sequence for LRP1B (NM_018557.1,11753-11771).
gctcatcacgtgaatatat

SEQ ID NO: 31400 - DNA, 19 bp, Homo sapiens
  siRNA target sequence for LRP1B (NM_018557.1,11754-11772).
ctcatcacgtgaatatata

SEQ ID NO: 31401 - DNA, 19 bp, Homo sapiens
  siRNA target sequence for LRP1B (NM_018557.1,11805-11823).
gaaatgtaatggagaatat

SEQ ID NO: 31402 - DNA, 19 bp, Homo sapiens
  siRNA target sequence for LRP1B (NM_018557.1,11831-11849).
ctgatggttcagatgagat

SEQ ID NO: 31403 - DNA, 19 bp, Homo sapiens
  siRNA target sequence for LRP1B (NM_018557.1,11850-11868).
ggactgtgtgactgaatgt

SEQ ID NO: 31404 - DNA, 19 bp, Homo sapiens
  siRNA target sequence for LRP1B (NM_018557.1,11861-11879).
ctgaatgtaaggaagatca

SEQ ID NO: 31405 - DNA, 19 bp, Homo sapiens
  siRNA target sequence for LRP1B (NM_018557.1,11901-11919).
ccactgtattccaattaga

SEQ ID NO: 31406 - DNA, 19 bp, Homo sapiens
  siRNA target sequence for LRP1B (NM_018557.1,12001-12019).
gatgagttcctttgcaata

SEQ ID NO: 31407 - DNA, 19 bp, Homo sapiens
  siRNA target sequence for LRP1B (NM_018557.1,12006-12024).
gttcctttgcaataattct

SEQ ID NO: 31408 - DNA, 19 bp, Homo sapiens
  siRNA target sequence for LRP1B (NM_018557.1,12090-12108).
ccctgatatgtgtgtcaaa

SEQ ID NO: 31409 - DNA, 19 bp, Homo sapiens
  siRNA target sequence for LRP1B (NM_018557.1,12091-12109).
cctgatatgtgtgtcaaat

SEQ ID NO: 31410 - DNA, 19 bp, Homo sapiens
  siRNA target sequence for LRP1B (NM_018557.1,12099-12117).
gtgtgtcaaatttctttgt

SEQ ID NO: 31411 - DNA, 19 bp, Homo sapiens
  siRNA target sequence for LRP1B (NM_018557.1,12137-12155).
gatgcagaaataacagaat

SEQ ID NO: 31412 - DNA, 19 bp, Homo sapiens
  siRNA target sequence for LRP1B (NM_018557.1,12224-12242).
gtggtggtaagctgacata

SEQ ID NO: 31413 - DNA, 19 bp, Homo sapiens
  siRNA target sequence for LRP1B (NM_018557.1,12226-12244).
ggtggtaagctgacatata

SEQ ID NO: 31414 - DNA, 19 bp, Homo sapiens
  siRNA target sequence for LRP1B (NM_018557.1,12248-12266).
caaggccttgtaaaaagga

SEQ ID NO: 31415 - DNA, 19 bp, Homo sapiens
  siRNA target sequence for LRP1B (NM_018557.1,12265-12283).
gatgagtttgcttgtagta

SEQ ID NO: 31416 - DNA, 19 bp, Homo sapiens
  siRNA target sequence for LRP1B (NM_018557.1,12309-12327).
ccagtgtgatcgacttgat

SEQ ID NO: 31417 - DNA, 19 bp, Homo sapiens
  siRNA target sequence for LRP1B (NM_018557.1,12351-12369).
gcaaggatgcagaatagct

SEQ ID NO: 31418 - DNA, 19 bp, Homo sapiens
  siRNA target sequence for LRP1B (NM_018557.1,12362-12380).
gaatagctcctactgaata

SEQ ID NO: 31419 - DNA, 19 bp, Homo sapiens
  siRNA target sequence for LRP1B (NM_018557.1,12388-12406).
gaagataatgtgaatccat

SEQ ID NO: 31420 - DNA, 19 bp, Homo sapiens
  siRNA target sequence for LRP1B (NM_018557.1,12409-12427).
ggagatgatgcatattgta

SEQ ID NO: 31421 - DNA, 19 bp, Homo sapiens
  siRNA target sequence for LRP1B (NM_018557.1,12466-12484).
ggatttcagagaaacatga

SEQ ID NO: 31422 - DNA, 19 bp, Homo sapiens
  siRNA target sequence for LRP1B (NM_018557.1,12480-12498).
catgaaaaacagacaatgt

SEQ ID NO: 31423 - DNA, 19 bp, Homo sapiens
  siRNA target sequence for LRP1B (NM_018557.1,12526-12544).
ggcacatgttcccatcaat

SEQ ID NO: 31424 - DNA, 19 bp, Homo sapiens
  siRNA target sequence for LRP1B (NM_018557.1,12659-12677).
ctgatatcctgggttttat

SEQ ID NO: 31425 - DNA, 19 bp, Homo sapiens
  siRNA target sequence for LRP1B (NM_018557.1,12661-12679).
gatatcctgggttttatat

SEQ ID NO: 31426 - DNA, 19 bp, Homo sapiens
  siRNA target sequence for LRP1B (NM_018557.1,12666-12684).
cctgggttttatatatcca

SEQ ID NO: 31427 - DNA, 19 bp, Homo sapiens
  siRNA target sequence for LRP1B (NM_018557.1,12690-12708).
ctacagtggcgatcatcaa

SEQ ID NO: 31428 - DNA, 19 bp, Homo sapiens
  siRNA target sequence for LRP1B (NM_018557.1,12697-12715).
ggcgatcatcaacaaattt

SEQ ID NO: 31429 - DNA, 19 bp, Homo sapiens
  siRNA target sequence for LRP1B (NM_018557.1,12699-12717).
cgatcatcaacaaatttct

SEQ ID NO: 31430 - DNA, 19 bp, Homo sapiens
  siRNA target sequence for LRP1B (NM_018557.1,12703-12721).
catcaacaaatttctcata

SEQ ID NO: 31431 - DNA, 19 bp, Homo sapiens
  siRNA target sequence for LRP1B (NM_018557.1,12746-12764).
ggatggatgtatattatca

SEQ ID NO: 31432 - DNA, 19 bp, Homo sapiens
  siRNA target sequence for LRP1B (NM_018557.1,12747-12765).
gatggatgtatattatcaa

SEQ ID NO: 31433 - DNA, 19 bp, Homo sapiens
  siRNA target sequence for LRP1B (NM_018557.1,12750-12768).
ggatgtatattatcaaaga

SEQ ID NO: 31434 - DNA, 19 bp, Homo sapiens
  siRNA target sequence for LRP1B (NM_018557.1,12802-12820).
ggcggaattttctacaaaa

SEQ ID NO: 31435 - DNA, 19 bp, Homo sapiens
  siRNA target sequence for LRP1B (NM_018557.1,12905-12923).
gggtggctggaaacattta

SEQ ID NO: 31436 - DNA, 19 bp, Homo sapiens
  siRNA target sequence for LRP1B (NM_018557.1,12924-12942).
ctggactgatcattctaga

SEQ ID NO: 31437 - DNA, 19 bp, Homo sapiens
  siRNA target sequence for LRP1B (NM_018557.1,12926-12944).
ggactgatcattctagaat

SEQ ID NO: 31438 - DNA, 19 bp, Homo sapiens
  siRNA target sequence for LRP1B (NM_018557.1,12941-12959).
gaatgcattggttcagtta

SEQ ID NO: 31439 - DNA, 19 bp, Homo sapiens
  siRNA target sequence for LRP1B (NM_018557.1,12980-12998).
gtctgaggtactctatcaa

SEQ ID NO: 31440 - DNA, 19 bp, Homo sapiens
  siRNA target sequence for LRP1B (NM_018557.1,13020-13038).
caactgcaccagactctta

SEQ ID NO: 31441 - DNA, 19 bp, Homo sapiens
  siRNA target sequence for LRP1B (NM_018557.1,13025-13043).
gcaccagactcttaacaaa

SEQ ID NO: 31442 - DNA, 19 bp, Homo sapiens
  siRNA target sequence for LRP1B (NM_018557.1,13059-13077).
ctatgctattgcagtaaat

SEQ ID NO: 31443 - DNA, 19 bp, Homo sapiens
  siRNA target sequence for LRP1B (NM_018557.1,13063-13081).
gctattgcagtaaatccta

SEQ ID NO: 31444 - DNA, 19 bp, Homo sapiens
  siRNA target sequence for LRP1B (NM_018557.1,13079-13097).
ctaaaagagggatgatgta

SEQ ID NO: 31445 - DNA, 19 bp, Homo sapiens
  siRNA target sequence for LRP1B (NM_018557.1,13151-13169).
cactgagaaggattttagt

SEQ ID NO: 31446 - DNA, 19 bp, Homo sapiens
  siRNA target sequence for LRP1B (NM_018557.1,13293-13311).
ctctgtcagcagcaaacaa

SEQ ID NO: 31447 - DNA, 19 bp, Homo sapiens
  siRNA target sequence for LRP1B (NM_018557.1,13299-13317).
cagcagcaaacaaggttta

SEQ ID NO: 31448 - DNA, 19 bp, Homo sapiens
  siRNA target sequence for LRP1B (NM_018557.1,13302-13320).
cagcaaacaaggtttatta

SEQ ID NO: 31449 - DNA, 19 bp, Homo sapiens
  siRNA target sequence for LRP1B (NM_018557.1,13321-13339).
catccacataggatcgata

SEQ ID NO: 31450 - DNA, 19 bp, Homo sapiens
  siRNA target sequence for LRP1B (NM_018557.1,13324-13342).
ccacataggatcgatatct

SEQ ID NO: 31451 - DNA, 19 bp, Homo sapiens
  siRNA target sequence for LRP1B (NM_018557.1,13325-13343).
cacataggatcgatatctt

SEQ ID NO: 31452 - DNA, 19 bp, Homo sapiens
  siRNA target sequence for LRP1B (NM_018557.1,13331-13349).
ggatcgatatctttgaaga

SEQ ID NO: 31453 - DNA, 19 bp, Homo sapiens
  siRNA target sequence for LRP1B (NM_018557.1,13332-13350).
gatcgatatctttgaagat

SEQ ID NO: 31454 - DNA, 19 bp, Homo sapiens
  siRNA target sequence for LRP1B (NM_018557.1,13403-13421).
gccatggttcagtagagta

SEQ ID NO: 31455 - DNA, 19 bp, Homo sapiens
  siRNA target sequence for LRP1B (NM_018557.1,13412-13430).
cagtagagtacttagcttt

SEQ ID NO: 31456 - DNA, 19 bp, Homo sapiens
  siRNA target sequence for LRP1B (NM_018557.1,13417-13435).
gagtacttagctttaaata

SEQ ID NO: 31457 - DNA, 19 bp, Homo sapiens
  siRNA target sequence for LRP1B (NM_018557.1,13463-13481).
ctcatcgttataaacaact

SEQ ID NO: 31458 - DNA, 19 bp, Homo sapiens
  siRNA target sequence for LRP1B (NM_018557.1,13468-13486).
cgttataaacaactagatt

SEQ ID NO: 31459 - DNA, 19 bp, Homo sapiens
  siRNA target sequence for LRP1B (NM_018557.1,13491-13509).
caatccatgcttggattta

SEQ ID NO: 31460 - DNA, 19 bp, Homo sapiens
  siRNA target sequence for LRP1B (NM_018557.1,13495-13513).
ccatgcttggatttagcat

SEQ ID NO: 31461 - DNA, 19 bp, Homo sapiens
  siRNA target sequence for LRP1B (NM_018557.1,13503-13521).
ggatttagcatgcgaattt

SEQ ID NO: 31462 - DNA, 19 bp, Homo sapiens
  siRNA target sequence for LRP1B (NM_018557.1,13511-13529).
catgcgaatttctttgctt

SEQ ID NO: 31463 - DNA, 19 bp, Homo sapiens
  siRNA target sequence for LRP1B (NM_018557.1,13522-13540).
ctttgcttgctaaatcctt

SEQ ID NO: 31464 - DNA, 19 bp, Homo sapiens
  siRNA target sequence for LRP1B (NM_018557.1,13602-13620).
cagcctgttagatgattca

SEQ ID NO: 31465 - DNA, 19 bp, Homo sapiens
  siRNA target sequence for LRP1B (NM_018557.1,13684-13702).
cactgttggcccagttatt

SEQ ID NO: 31466 - DNA, 19 bp, Homo sapiens
  siRNA target sequence for LRP1B (NM_018557.1,13830-13848).
gacagtctgtgaggatttt

SEQ ID NO: 31467 - DNA, 19 bp, Homo sapiens
  siRNA target sequence for LRP1B (NM_018557.1,13941-13959).
cgtgtgccaccactattgt

SEQ ID NO: 31468 - DNA, 19 bp, Homo sapiens
  siRNA target sequence for LRP1B (NM_018557.1,13947-13965).
ccaccactattgtgtgaat

SEQ ID NO: 31469 - DNA, 19 bp, Homo sapiens
  siRNA target sequence for LRP1B (NM_018557.1,13950-13968).
ccactattgtgtgaattct

SEQ ID NO: 31470 - DNA, 19 bp, Homo sapiens
  siRNA target sequence for LRP1B (NM_018557.1,13960-13978).
gtgaattctgaatcatgta

SEQ ID NO: 31471 - DNA, 19 bp, Homo sapiens
  siRNA target sequence for LRP1B (NM_018557.1,14010-14028).
ctgtccaacgcgctatgaa

SEQ ID NO: 31472 - DNA, 19 bp, Homo sapiens
  siRNA target sequence for LRP1B (NM_018557.1,14019-14037).
gcgctatgaaggaccaaaa

SEQ ID NO: 31473 - DNA, 19 bp, Homo sapiens
  siRNA target sequence for LRP1B (NM_018557.1,14020-14038).
cgctatgaaggaccaaaat

SEQ ID NO: 31474 - DNA, 19 bp, Homo sapiens
  siRNA target sequence for LRP1B (NM_018557.1,14041-14059).
gaggttgacaagtgtgtaa

SEQ ID NO: 31475 - DNA, 19 bp, Homo sapiens
  siRNA target sequence for LRP1B (NM_018557.1,14115-14133).
ctgcactaatggaaagatt

SEQ ID NO: 31476 - DNA, 19 bp, Homo sapiens
  siRNA target sequence for LRP1B (NM_018557.1,14153-14171).
gtgatggctactgttacaa

SEQ ID NO: 31477 - DNA, 19 bp, Homo sapiens
  siRNA target sequence for LRP1B (NM_018557.1,14270-14288).
gcagcaagtctgatcatat

SEQ ID NO: 31478 - DNA, 19 bp, Homo sapiens
  siRNA target sequence for LRP1B (NM_018557.1,14325-14343).
cctcttggtgactttgata

SEQ ID NO: 31479 - DNA, 19 bp, Homo sapiens
  siRNA target sequence for LRP1B (NM_018557.1,14348-14366).
ccttagtaattggtttagt

SEQ ID NO: 31480 - DNA, 19 bp, Homo sapiens
  siRNA target sequence for LRP1B (NM_018557.1,14396-14414).
caattagaagacaacctat

SEQ ID NO: 31481 - DNA, 19 bp, Homo sapiens
  siRNA target sequence for LRP1B (NM_018557.1,14402-14420).
gaagacaacctattatcaa

SEQ ID NO: 31482 - DNA, 19 bp, Homo sapiens
  siRNA target sequence for LRP1B (NM_018557.1,14434-14452).
gtagaaattggcaatccat

SEQ ID NO: 31483 - DNA, 19 bp, Homo sapiens
  siRNA target sequence for LRP1B (NM_018557.1,14460-14478).
catgtatgaggtagatcat

SEQ ID NO: 31484 - DNA, 19 bp, Homo sapiens
  siRNA target sequence for LRP1B (NM_018557.1,14484-14502).
caacgatggaggtctttta

SEQ ID NO: 31485 - DNA, 19 bp, Homo sapiens
  siRNA target sequence for LRP1B (NM_018557.1,14586-14604).
gcccatctacctaaactct

SEQ ID NO: 31486 - DNA, 19 bp, Homo sapiens
  siRNA target sequence for LRP1B (NM_018557.1,14624-14642).
ctgctgggccaacaaatta

SEQ ID NO: 31487 - DNA, 19 bp, Homo sapiens
  siRNA target sequence for LRP1B (NM_018557.1,14626-14644).
gctgggccaacaaattact

SEQ ID NO: 31488 - DNA, 19 bp, Homo sapiens
  siRNA target sequence for LRP1B (NM_018557.1,14643-14661).
ctccaatccggtatatgca

SEQ ID NO: 31489 - DNA, 19 bp, Homo sapiens
  siRNA target sequence for LRP1B (NM_018557.1,14645-14663).
ccaatccggtatatgcaaa

SEQ ID NO: 31490 - DNA, 19 bp, Homo sapiens
  siRNA target sequence for LRP1B (NM_018557.1,14646-14664).
caatccggtatatgcaaaa

SEQ ID NO: 31491 - DNA, 19 bp, Homo sapiens
  siRNA target sequence for LRP1B (NM_018557.1,14650-14668).
ccggtatatgcaaaattat

SEQ ID NO: 31492 - DNA, 19 bp, Homo sapiens
  siRNA target sequence for LYL1 (NM_005583.3,710-728).
ccagcaggaccttttagca

SEQ ID NO: 31493 - DNA, 19 bp, Homo sapiens
  siRNA target sequence for M96 (NM_007358.1,257-275).
caggggcaggtaattcact

SEQ ID NO: 31494 - DNA, 19 bp, Homo sapiens
  siRNA target sequence for M96 (NM_007358.1,279-297).
ccacaagcggtctccttta

SEQ ID NO: 31495 - DNA, 19 bp, Homo sapiens
  siRNA target sequence for M96 (NM_007358.1,282-300).
caagcggtctcctttacgt

SEQ ID NO: 31496 - DNA, 19 bp, Homo sapiens
  siRNA target sequence for M96 (NM_007358.1,292-310).
cctttacgtcgaaaccaaa

SEQ ID NO: 31497 - DNA, 19 bp, Homo sapiens
  siRNA target sequence for M96 (NM_007358.1,293-311).
ctttacgtcgaaaccaaaa

SEQ ID NO: 31498 - DNA, 19 bp, Homo sapiens
  siRNA target sequence for M96 (NM_007358.1,323-341).
ccttgaccaagctgtcttt

SEQ ID NO: 31499 - DNA, 19 bp, Homo sapiens
  siRNA target sequence for M96 (NM_007358.1,324-342).
cttgaccaagctgtcttta

SEQ ID NO: 31500 - DNA, 19 bp, Homo sapiens
  siRNA target sequence for M96 (NM_007358.1,338-356).
ctttacaggatggacataa

SEQ ID NO: 31501 - DNA, 19 bp, Homo sapiens
  siRNA target sequence for M96 (NM_007358.1,410-428).
ggtcagatggcttgtttta

SEQ ID NO: 31502 - DNA, 19 bp, Homo sapiens
  siRNA target sequence for M96 (NM_007358.1,430-448).
cttggcactatcaaaaaga

SEQ ID NO: 31503 - DNA, 19 bp, Homo sapiens
  siRNA target sequence for M96 (NM_007358.1,467-485).
gctgcttcatcatatttga

SEQ ID NO: 31504 - DNA, 19 bp, Homo sapiens
  siRNA target sequence for M96 (NM_007358.1,484-502).
gaagacagttctaaatcct

SEQ ID NO: 31505 - DNA, 19 bp, Homo sapiens
  siRNA target sequence for M96 (NM_007358.1,510-528).
ctggaaggacattcaaaca

SEQ ID NO: 31506 - DNA, 19 bp, Homo sapiens
  siRNA target sequence for M96 (NM_007358.1,552-570).
ggtctgtacaatatgtcaa

SEQ ID NO: 31507 - DNA, 19 bp, Homo sapiens
  siRNA target sequence for M96 (NM_007358.1,581-599).
cagaagctcccaatgaaat

SEQ ID NO: 31508 - DNA, 19 bp, Homo sapiens
  siRNA target sequence for M96 (NM_007358.1,587-605).
ctcccaatgaaatggttat

SEQ ID NO: 31509 - DNA, 19 bp, Homo sapiens
  siRNA target sequence for M96 (NM_007358.1,589-607).
cccaatgaaatggttatat

SEQ ID NO: 31510 - DNA, 19 bp, Homo sapiens
  siRNA target sequence for M96 (NM_007358.1,612-630).
caagtgtggccaaggatat

SEQ ID NO: 31511 - DNA, 19 bp, Homo sapiens
  siRNA target sequence for M96 (NM_007358.1,615-633).
gtgtggccaaggatatcat

SEQ ID NO: 31512 - DNA, 19 bp, Homo sapiens
  siRNA target sequence for M96 (NM_007358.1,639-657).
gtgtcacacacctcatatt

SEQ ID NO: 31513 - DNA, 19 bp, Homo sapiens
  siRNA target sequence for M96 (NM_007358.1,728-746).
ggggtggtgcacttaagaa

SEQ ID NO: 31514 - DNA, 19 bp, Homo sapiens
  siRNA target sequence for M96 (NM_007358.1,748-766).
ggaccaaatgccaaagcat

SEQ ID NO: 31515 - DNA, 19 bp, Homo sapiens
  siRNA target sequence for M96 (NM_007358.1,833-851).
ccaatgtccagcagtgtta

SEQ ID NO: 31516 - DNA, 19 bp, Homo sapiens
  siRNA target sequence for M96 (NM_007358.1,841-859).
cagcagtgttactgctatt

SEQ ID NO: 31517 - DNA, 19 bp, Homo sapiens
  siRNA target sequence for M96 (NM_007358.1,872-890).
gagactggtatttgaagat

SEQ ID NO: 31518 - DNA, 19 bp, Homo sapiens
  siRNA target sequence for M96 (NM_007358.1,932-950).
gtgtgcaatgccttcaaaa

SEQ ID NO: 31519 - DNA, 19 bp, Homo sapiens
  siRNA target sequence for M96 (NM_007358.1,957-975).
gctatttggagacagattt

SEQ ID NO: 31520 - DNA, 19 bp, Homo sapiens
  siRNA target sequence for M96 (NM_007358.1,1001-1019).
gttctggaccagaatacct

SEQ ID NO: 31521 - DNA, 19 bp, Homo sapiens
  siRNA target sequence for M96 (NM_007358.1,1017-1035).
cctcaaacgtctaccatta

SEQ ID NO: 31522 - DNA, 19 bp, Homo sapiens
  siRNA target sequence for M96 (NM_007358.1,1030-1048).
ccattacagtgggtagata

SEQ ID NO: 31523 - DNA, 19 bp, Homo sapiens
  siRNA target sequence for M96 (NM_007358.1,1031-1049).
cattacagtgggtagatat

SEQ ID NO: 31524 - DNA, 19 bp, Homo sapiens
  siRNA target sequence for M96 (NM_007358.1,1051-1069).
gcacacctatgcctttaca

SEQ ID NO: 31525 - DNA, 19 bp, Homo sapiens
  siRNA target sequence for M96 (NM_007358.1,1052-1070).
cacacctatgcctttacaa

SEQ ID NO: 31526 - DNA, 19 bp, Homo sapiens
  siRNA target sequence for M96 (NM_007358.1,1057-1075).
ctatgcctttacaacctaa

SEQ ID NO: 31527 - DNA, 19 bp, Homo sapiens
  siRNA target sequence for M96 (NM_007358.1,1062-1080).
cctttacaacctaagtgtt

SEQ ID NO: 31528 - DNA, 19 bp, Homo sapiens
  siRNA target sequence for M96 (NM_007358.1,1063-1081).
ctttacaacctaagtgtta

SEQ ID NO: 31529 - DNA, 19 bp, Homo sapiens
  siRNA target sequence for M96 (NM_007358.1,1068-1086).
caacctaagtgttattcat

SEQ ID NO: 31530 - DNA, 19 bp, Homo sapiens
  siRNA target sequence for M96 (NM_007358.1,1108-1126).
gaacttgagcttatgacat

SEQ ID NO: 31531 - DNA, 19 bp, Homo sapiens
  siRNA target sequence for M96 (NM_007358.1,1116-1134).
gcttatgacatacattaat

SEQ ID NO: 31532 - DNA, 19 bp, Homo sapiens
  siRNA target sequence for M96 (NM_007358.1,1272-1290).
gtttgggttgcgaattcgt

SEQ ID NO: 31533 - DNA, 19 bp, Homo sapiens
  siRNA target sequence for M96 (NM_007358.1,1342-1360).
ggaacatctcatgaattta

SEQ ID NO: 31534 - DNA, 19 bp, Homo sapiens
  siRNA target sequence for M96 (NM_007358.1,1373-1391).
gaaaggcatccaaacctat

SEQ ID NO: 31535 - DNA, 19 bp, Homo sapiens
  siRNA target sequence for M96 (NM_007358.1,1453-1471).
cgtccacctggcccatata

SEQ ID NO: 31536 - DNA, 19 bp, Homo sapiens
  siRNA target sequence for M96 (NM_007358.1,1463-1481).
gcccatatacaagaaaaat

SEQ ID NO: 31537 - DNA, 19 bp, Homo sapiens
  siRNA target sequence for M96 (NM_007358.1,1501-1519).
ccacttttggataaggaat

SEQ ID NO: 31538 - DNA, 19 bp, Homo sapiens
  siRNA target sequence for M96 (NM_007358.1,1528-1546).
gagaatcctactttggatt

SEQ ID NO: 31539 - DNA, 19 bp, Homo sapiens
  siRNA target sequence for M96 (NM_007358.1,1530-1548).
gaatcctactttggattta

SEQ ID NO: 31540 - DNA, 19 bp, Homo sapiens
  siRNA target sequence for M96 (NM_007358.1,1570-1588).
gagggaactgcacattcat

SEQ ID NO: 31541 - DNA, 19 bp, Homo sapiens
  siRNA target sequence for M96 (NM_007358.1,1579-1597).
gcacattcatccaatacct

SEQ ID NO: 31542 - DNA, 19 bp, Homo sapiens
  siRNA target sequence for M96 (NM_007358.1,1656-1674).
caggcattatggattatct

SEQ ID NO: 31543 - DNA, 19 bp, Homo sapiens
  siRNA target sequence for M96 (NM_007358.1,1805-1823).
gcaaagaagattatcagtt

SEQ ID NO: 31544 - DNA, 19 bp, Homo sapiens
  siRNA target sequence for M96 (NM_007358.1,1859-1877).
cagatcaggagttacaact

SEQ ID NO: 31545 - DNA, 19 bp, Homo sapiens
  siRNA target sequence for M96 (NM_007358.1,1869-1887).
gttacaactcaatcatcta

SEQ ID NO: 31546 - DNA, 19 bp, Homo sapiens
  siRNA target sequence for M96 (NM_007358.1,1876-1894).
ctcaatcatctaaagaact

SEQ ID NO: 31547 - DNA, 19 bp, Homo sapiens
  siRNA target sequence for M96 (NM_007358.1,1885-1903).
ctaaagaactccattacca

SEQ ID NO: 31548 - DNA, 19 bp, Homo sapiens
  siRNA target sequence for MAF (NM_005360.2,1996-2014).
cttaccagtgtgttcacaa

SEQ ID NO: 31549 - DNA, 19 bp, Homo sapiens
  siRNA target sequence for MAFB (NM_005461.3,625-643).
cacacctcgaggatctgta

SEQ ID NO: 31550 - DNA, 19 bp, Homo sapiens
  siRNA target sequence for MAZ (NM_002383.1,763-781).
gttcaagaacggctacaat

SEQ ID NO: 31551 - DNA, 19 bp, Homo sapiens
  siRNA target sequence for MAZ (NM_002383.1,830-848).
ccctcgggtgctatgaaga

SEQ ID NO: 31552 - DNA, 19 bp, Homo sapiens
  siRNA target sequence for MAZ (NM_002383.1,831-849).
cctcgggtgctatgaagat

SEQ ID NO: 31553 - DNA, 19 bp, Homo sapiens
  siRNA target sequence for MAZ (NM_002383.1,1366-1384).
gctgagctcggcttatatt

SEQ ID NO: 31554 - DNA, 19 bp, Homo sapiens
  siRNA target sequence for MAZ (NM_002383.1,1367-1385).
ctgagctcggcttatattt

SEQ ID NO: 31555 - DNA, 19 bp, Homo sapiens
  siRNA target sequence for MBD3 (NM_003926.5,110-128).
cacagggatgtcttttact

SEQ ID NO: 31556 - DNA, 19 bp, Homo sapiens
  siRNA target sequence for MBD3 (NM_003926.5,112-130).
cagggatgtcttttactat

SEQ ID NO: 31557 - DNA, 19 bp, Homo sapiens
  siRNA target sequence for MBD3 (NM_003926.5,329-347).
cagacggcgtccatcttca

SEQ ID NO: 31558 - DNA, 19 bp, Homo sapiens
  siRNA target sequence for MBD3 (NM_003926.5,349-367).
gcagccggtgaccaagatt

SEQ ID NO: 31559 - DNA, 19 bp, Homo sapiens
  siRNA target sequence for MBD3 (NM_003926.5,350-368).
cagccggtgaccaagatta

SEQ ID NO: 31560 - DNA, 19 bp, Homo sapiens
  siRNA target sequence for MBD3 (NM_003926.5,354-372).
cggtgaccaagattaccaa

SEQ ID NO: 31561 - DNA, 19 bp, Homo sapiens
  siRNA target sequence for MBD5 (NM_018328.3,331-349).
gaggtcttccagctataca

SEQ ID NO: 31562 - DNA, 19 bp, Homo sapiens
  siRNA target sequence for MBD5 (NM_018328.3,368-386).
gcgtcgtgtggatcaaaat

SEQ ID NO: 31563 - DNA, 19 bp, Homo sapiens
  siRNA target sequence for MBD5 (NM_018328.3,403-421).
gtcccagtgggtctttgtt

SEQ ID NO: 31564 - DNA, 19 bp, Homo sapiens
  siRNA target sequence for MBD5 (NM_018328.3,405-423).
cccagtgggtctttgttat

SEQ ID NO: 31565 - DNA, 19 bp, Homo sapiens
  siRNA target sequence for MBD5 (NM_018328.3,407-425).
cagtgggtctttgttatct

SEQ ID NO: 31566 - DNA, 19 bp, Homo sapiens
  siRNA target sequence for MBD5 (NM_018328.3,615-633).
gtggccacacttcataaaa

SEQ ID NO: 31567 - DNA, 19 bp, Homo sapiens
  siRNA target sequence for MBD5 (NM_018328.3,618-636).
gccacacttcataaaagca

SEQ ID NO: 31568 - DNA, 19 bp, Homo sapiens
  siRNA target sequence for MBD5 (NM_018328.3,766-784).
ctgtaatgcctgaatgtaa

SEQ ID NO: 31569 - DNA, 19 bp, Homo sapiens
  siRNA target sequence for MBD5 (NM_018328.3,797-815).
gttaatgattggatcatca

SEQ ID NO: 31570 - DNA, 19 bp, Homo sapiens
  siRNA target sequence for MBD5 (NM_018328.3,820-838).
ccatgggaaggctatatgt

SEQ ID NO: 31571 - DNA, 19 bp, Homo sapiens
  siRNA target sequence for MBD5 (NM_018328.3,821-839).
catgggaaggctatatgta

SEQ ID NO: 31572 - DNA, 19 bp, Homo sapiens
  siRNA target sequence for MBD5 (NM_018328.3,824-842).
gggaaggctatatgtacaa

SEQ ID NO: 31573 - DNA, 19 bp, Homo sapiens
  siRNA target sequence for MBD5 (NM_018328.3,829-847).
ggctatatgtacaagaact

SEQ ID NO: 31574 - DNA, 19 bp, Homo sapiens
  siRNA target sequence for MBD5 (NM_018328.3,1032-1050).
gatgttttcacaagaagta

SEQ ID NO: 31575 - DNA, 19 bp, Homo sapiens
  siRNA target sequence for MBD5 (NM_018328.3,1072-1090).
ccaattctagtcctattca

SEQ ID NO: 31576 - DNA, 19 bp, Homo sapiens
  siRNA target sequence for MBD5 (NM_018328.3,1083-1101).
cctattcacctgaatagga

SEQ ID NO: 31577 - DNA, 19 bp, Homo sapiens
  siRNA target sequence for MBD5 (NM_018328.3,1094-1112).
gaataggactcctctttct

SEQ ID NO: 31578 - DNA, 19 bp, Homo sapiens
  siRNA target sequence for MBD5 (NM_018328.3,1111-1129).
ctccaccttcagtaatgct

SEQ ID NO: 31579 - DNA, 19 bp, Homo sapiens
  siRNA target sequence for MBD5 (NM_018328.3,1163-1181).
ggctggaaggactaatata

SEQ ID NO: 31580 - DNA, 19 bp, Homo sapiens
  siRNA target sequence for MBD5 (NM_018328.3,1191-1209).
ccaaccttgactacaaaga

SEQ ID NO: 31581 - DNA, 19 bp, Homo sapiens
  siRNA target sequence for MBD5 (NM_018328.3,1315-1333).
cttcttgtgctcttcagaa

SEQ ID NO: 31582 - DNA, 19 bp, Homo sapiens
  siRNA target sequence for MBD5 (NM_018328.3,1376-1394).
ccctattcctagtaaacca

SEQ ID NO: 31583 - DNA, 19 bp, Homo sapiens
  siRNA target sequence for MBD5 (NM_018328.3,1384-1402).
ctagtaaaccagtgaatca

SEQ ID NO: 31584 - DNA, 19 bp, Homo sapiens
  siRNA target sequence for MBD5 (NM_018328.3,1406-1424).
ccctgttatcattaatcca

SEQ ID NO: 31585 - DNA, 19 bp, Homo sapiens
  siRNA target sequence for MBD5 (NM_018328.3,1426-1444).
ccagtttccattcaaatgt

SEQ ID NO: 31586 - DNA, 19 bp, Homo sapiens
  siRNA target sequence for MBD5 (NM_018328.3,1454-1472).
ggtacctatgatgaatgta

SEQ ID NO: 31587 - DNA, 19 bp, Homo sapiens
  siRNA target sequence for MBD5 (NM_018328.3,1455-1473).
gtacctatgatgaatgtaa

SEQ ID NO: 31588 - DNA, 19 bp, Homo sapiens
  siRNA target sequence for MBD5 (NM_018328.3,1509-1527).
ctcccattgccaactgtaa

SEQ ID NO: 31589 - DNA, 19 bp, Homo sapiens
  siRNA target sequence for MBD5 (NM_018328.3,1511-1529).
cccattgccaactgtaaaa

SEQ ID NO: 31590 - DNA, 19 bp, Homo sapiens
  siRNA target sequence for MBD5 (NM_018328.3,1541-1559).
gaatcatgggagtcatgta

SEQ ID NO: 31591 - DNA, 19 bp, Homo sapiens
  siRNA target sequence for MBD5 (NM_018328.3,1609-1627).
catcccccgtgcacatgat

SEQ ID NO: 31592 - DNA, 19 bp, Homo sapiens
  siRNA target sequence for MBD5 (NM_018328.3,1662-1680).
caaagatcacgctcatctt

SEQ ID NO: 31593 - DNA, 19 bp, Homo sapiens
  siRNA target sequence for MBD5 (NM_018328.3,1722-1740).
ggaccccaggccacttcta

SEQ ID NO: 31594 - DNA, 19 bp, Homo sapiens
  siRNA target sequence for MBD5 (NM_018328.3,1730-1748).
ggccacttctagtggtatt

SEQ ID NO: 31595 - DNA, 19 bp, Homo sapiens
  siRNA target sequence for MBD5 (NM_018328.3,1731-1749).
gccacttctagtggtatta

SEQ ID NO: 31596 - DNA, 19 bp, Homo sapiens
  siRNA target sequence for MBD5 (NM_018328.3,1732-1750).
ccacttctagtggtattaa

SEQ ID NO: 31597 - DNA, 19 bp, Homo sapiens
  siRNA target sequence for MBD5 (NM_018328.3,1763-1781).
gtcaccaaggtcaacaata

SEQ ID NO: 31598 - DNA, 19 bp, Homo sapiens
  siRNA target sequence for MBD5 (NM_018328.3,1825-1843).
ccgatggacatcatcagta

SEQ ID NO: 31599 - DNA, 19 bp, Homo sapiens
  siRNA target sequence for MBD5 (NM_018328.3,1853-1871).
ccctaacccattaattgct

SEQ ID NO: 31600 - DNA, 19 bp, Homo sapiens
  siRNA target sequence for MBD5 (NM_018328.3,1859-1877).
cccattaattgctggaata

SEQ ID NO: 31601 - DNA, 19 bp, Homo sapiens
  siRNA target sequence for MBD5 (NM_018328.3,1860-1878).
ccattaattgctggaataa

SEQ ID NO: 31602 - DNA, 19 bp, Homo sapiens
  siRNA target sequence for MBD5 (NM_018328.3,1873-1891).
gaataagtaatgtactaaa

SEQ ID NO: 31603 - DNA, 19 bp, Homo sapiens
  siRNA target sequence for MBD5 (NM_018328.3,1895-1913).
cccaagcagtgcagctttt

SEQ ID NO: 31604 - DNA, 19 bp, Homo sapiens
  siRNA target sequence for MBD5 (NM_018328.3,1926-1944).
gccggaagtagttctgtaa

SEQ ID NO: 31605 - DNA, 19 bp, Homo sapiens
  siRNA target sequence for MBD5 (NM_018328.3,1927-1945).
ccggaagtagttctgtaaa

SEQ ID NO: 31606 - DNA, 19 bp, Homo sapiens
  siRNA target sequence for MBD5 (NM_018328.3,1961-1979).
gctgggaatgcctttaaat

SEQ ID NO: 31607 - DNA, 19 bp, Homo sapiens
  siRNA target sequence for MBD5 (NM_018328.3,2009-2027).
ctttccagcaagtagttta

SEQ ID NO: 31608 - DNA, 19 bp, Homo sapiens
  siRNA target sequence for MBD5 (NM_018328.3,2046-2064).
gcacagctagcaaatcaaa

SEQ ID NO: 31609 - DNA, 19 bp, Homo sapiens
  siRNA target sequence for MBD5 (NM_018328.3,2136-2154).
ggacatagcactttaaaca

SEQ ID NO: 31610 - DNA, 19 bp, Homo sapiens
  siRNA target sequence for MBD5 (NM_018328.3,2209-2227).
gtcgagcagcactaagaga

SEQ ID NO: 31611 - DNA, 19 bp, Homo sapiens
  siRNA target sequence for MBD5 (NM_018328.3,2211-2229).
cgagcagcactaagagata

SEQ ID NO: 31612 - DNA, 19 bp, Homo sapiens
  siRNA target sequence for MBD5 (NM_018328.3,2212-2230).
gagcagcactaagagataa

SEQ ID NO: 31613 - DNA, 19 bp, Homo sapiens
  siRNA target sequence for MBD5 (NM_018328.3,2250-2268).
gacgcattgcggaaaagaa

SEQ ID NO: 31614 - DNA, 19 bp, Homo sapiens
  siRNA target sequence for MBD5 (NM_018328.3,2252-2270).
cgcattgcggaaaagaaaa

SEQ ID NO: 31615 - DNA, 19 bp, Homo sapiens
  siRNA target sequence for MBD5 (NM_018328.3,2277-2295).
cctacgacagtgttgagtt

SEQ ID NO: 31616 - DNA, 19 bp, Homo sapiens
  siRNA target sequence for MBD5 (NM_018328.3,2306-2324).
gtctcaaatggatagttct

SEQ ID NO: 31617 - DNA, 19 bp, Homo sapiens
  siRNA target sequence for MBD5 (NM_018328.3,2337-2355).
cctggacctgacttgctaa

SEQ ID NO: 31618 - DNA, 19 bp, Homo sapiens
  siRNA target sequence for MBD5 (NM_018328.3,2360-2378).
gcagggtcagggttcattt

SEQ ID NO: 31619 - DNA, 19 bp, Homo sapiens
  siRNA target sequence for MBD5 (NM_018328.3,2395-2413).
ctcagttactacagtctat

SEQ ID NO: 31620 - DNA, 19 bp, Homo sapiens
  siRNA target sequence for MBD5 (NM_018328.3,2399-2417).
gttactacagtctatgagt

SEQ ID NO: 31621 - DNA, 19 bp, Homo sapiens
  siRNA target sequence for MBD5 (NM_018328.3,2421-2439).
caaagctctcacttgagta

SEQ ID NO: 31622 - DNA, 19 bp, Homo sapiens
  siRNA target sequence for MBD5 (NM_018328.3,2453-2471).
gggttgtggggcctcaaat

SEQ ID NO: 31623 - DNA, 19 bp, Homo sapiens
  siRNA target sequence for MBD5 (NM_018328.3,2511-2529).
gatcccagtatgaactcta

SEQ ID NO: 31624 - DNA, 19 bp, Homo sapiens
  siRNA target sequence for MBD5 (NM_018328.3,2516-2534).
cagtatgaactctagtgtt

SEQ ID NO: 31625 - DNA, 19 bp, Homo sapiens
  siRNA target sequence for MBD5 (NM_018328.3,2565-2583).
gtgcactgccacaatgcaa

SEQ ID NO: 31626 - DNA, 19 bp, Homo sapiens
  siRNA target sequence for MBD5 (NM_018328.3,2572-2590).
gccacaatgcaaacactaa

SEQ ID NO: 31627 - DNA, 19 bp, Homo sapiens
  siRNA target sequence for MBD5 (NM_018328.3,2574-2592).
cacaatgcaaacactaact

SEQ ID NO: 31628 - DNA, 19 bp, Homo sapiens
  siRNA target sequence for MBD5 (NM_018328.3,2576-2594).
caatgcaaacactaacttt

SEQ ID NO: 31629 - DNA, 19 bp, Homo sapiens
  siRNA target sequence for MBD5 (NM_018328.3,2581-2599).
caaacactaactttgttca

SEQ ID NO: 31630 - DNA, 19 bp, Homo sapiens
  siRNA target sequence for MBD5 (NM_018328.3,2684-2702).
gtcgggcatggctttagga

SEQ ID NO: 31631 - DNA, 19 bp, Homo sapiens
  siRNA target sequence for MBD5 (NM_018328.3,2770-2788).
gcattgttagcagctataa

SEQ ID NO: 31632 - DNA, 19 bp, Homo sapiens
  siRNA target sequence for MBD5 (NM_018328.3,2780-2798).
cagctataatcaaacaagt

SEQ ID NO: 31633 - DNA, 19 bp, Homo sapiens
  siRNA target sequence for MBD5 (NM_018328.3,2870-2888).
gacaacatctgttcttcaa

SEQ ID NO: 31634 - DNA, 19 bp, Homo sapiens
  siRNA target sequence for MBD5 (NM_018328.3,2886-2904).
caagatggcgtcatagtca

SEQ ID NO: 31635 - DNA, 19 bp, Homo sapiens
  siRNA target sequence for MBD5 (NM_018328.3,2969-2987).
ccaggagcacgcacttcat

SEQ ID NO: 31636 - DNA, 19 bp, Homo sapiens
  siRNA target sequence for MBD5 (NM_018328.3,2970-2988).
caggagcacgcacttcatt

SEQ ID NO: 31637 - DNA, 19 bp, Homo sapiens
  siRNA target sequence for MBD5 (NM_018328.3,3047-3065).
cagttctctacctatctct

SEQ ID NO: 31638 - DNA, 19 bp, Homo sapiens
  siRNA target sequence for MBD5 (NM_018328.3,3089-3107).
cctaaaccagaatctatta

SEQ ID NO: 31639 - DNA, 19 bp, Homo sapiens
  siRNA target sequence for MBD5 (NM_018328.3,3126-3144).
gcaggagaaggtgatatgt

SEQ ID NO: 31640 - DNA, 19 bp, Homo sapiens
  siRNA target sequence for MBD5 (NM_018328.3,3129-3147).
ggagaaggtgatatgtcat

SEQ ID NO: 31641 - DNA, 19 bp, Homo sapiens
  siRNA target sequence for MBD5 (NM_018328.3,3132-3150).
gaaggtgatatgtcatcaa

SEQ ID NO: 31642 - DNA, 19 bp, Homo sapiens
  siRNA target sequence for MBD5 (NM_018328.3,3135-3153).
ggtgatatgtcatcaataa

SEQ ID NO: 31643 - DNA, 19 bp, Homo sapiens
  siRNA target sequence for MBD5 (NM_018328.3,3136-3154).
gtgatatgtcatcaataaa

SEQ ID NO: 31644 - DNA, 19 bp, Homo sapiens
  siRNA target sequence for MBD5 (NM_018328.3,3189-3207).
cagtcgctgttaaacaaca

SEQ ID NO: 31645 - DNA, 19 bp, Homo sapiens
  siRNA target sequence for MBD5 (NM_018328.3,3191-3209).
gtcgctgttaaacaacaat

SEQ ID NO: 31646 - DNA, 19 bp, Homo sapiens
  siRNA target sequence for MBD5 (NM_018328.3,3193-3211).
cgctgttaaacaacaatca

SEQ ID NO: 31647 - DNA, 19 bp, Homo sapiens
  siRNA target sequence for MBD5 (NM_018328.3,3275-3293).
ccaaggacagtccacaatt

SEQ ID NO: 31648 - DNA, 19 bp, Homo sapiens
  siRNA target sequence for MBD5 (NM_018328.3,3279-3297).
ggacagtccacaattcctt

SEQ ID NO: 31649 - DNA, 19 bp, Homo sapiens
  siRNA target sequence for MBD5 (NM_018328.3,3294-3312).
ccttgcccagctaacaata

SEQ ID NO: 31650 - DNA, 19 bp, Homo sapiens
  siRNA target sequence for MBD5 (NM_018328.3,3295-3313).
cttgcccagctaacaataa

SEQ ID NO: 31651 - DNA, 19 bp, Homo sapiens
  siRNA target sequence for MBD5 (NM_018328.3,3414-3432).
cctgagaatccaaacacta

SEQ ID NO: 31652 - DNA, 19 bp, Homo sapiens
  siRNA target sequence for MBD5 (NM_018328.3,3419-3437).
gaatccaaacactacactt

SEQ ID NO: 31653 - DNA, 19 bp, Homo sapiens
  siRNA target sequence for MBD5 (NM_018328.3,3538-3556).
cttccgtagatgccattta

SEQ ID NO: 31654 - DNA, 19 bp, Homo sapiens
  siRNA target sequence for MBD5 (NM_018328.3,3541-3559).
ccgtagatgccatttacaa

SEQ ID NO: 31655 - DNA, 19 bp, Homo sapiens
  siRNA target sequence for MBD5 (NM_018328.3,3542-3560).
cgtagatgccatttacaaa

SEQ ID NO: 31656 - DNA, 19 bp, Homo sapiens
  siRNA target sequence for MBD5 (NM_018328.3,3706-3724).
ctgtcagtgcggtcattca

SEQ ID NO: 31657 - DNA, 19 bp, Homo sapiens
  siRNA target sequence for MBD5 (NM_018328.3,3734-3752).
catgggaggtgttgatcat

SEQ ID NO: 31658 - DNA, 19 bp, Homo sapiens
  siRNA target sequence for MBD5 (NM_018328.3,3784-3802).
ggctgcccaagaatctaga

SEQ ID NO: 31659 - DNA, 19 bp, Homo sapiens
  siRNA target sequence for MBD5 (NM_018328.3,3825-3843).
ggagatgggtttgaatatt

SEQ ID NO: 31660 - DNA, 19 bp, Homo sapiens
  siRNA target sequence for MBD5 (NM_018328.3,3859-3877).
gccacacatccaaaaaaca

SEQ ID NO: 31661 - DNA, 19 bp, Homo sapiens
  siRNA target sequence for MBD5 (NM_018328.3,3861-3879).
cacacatccaaaaaacagt

SEQ ID NO: 31662 - DNA, 19 bp, Homo sapiens
  siRNA target sequence for MBD5 (NM_018328.3,3916-3934).
ggtggaagtacgaggaatt

SEQ ID NO: 31663 - DNA, 19 bp, Homo sapiens
  siRNA target sequence for MBD5 (NM_018328.3,3917-3935).
gtggaagtacgaggaattt

SEQ ID NO: 31664 - DNA, 19 bp, Homo sapiens
  siRNA target sequence for MBD5 (NM_018328.3,3919-3937).
ggaagtacgaggaattttt

SEQ ID NO: 31665 - DNA, 19 bp, Homo sapiens
  siRNA target sequence for MBD5 (NM_018328.3,3956-3974).
ccacagtagtccttgtcat

SEQ ID NO: 31666 - DNA, 19 bp, Homo sapiens
  siRNA target sequence for MBD5 (NM_018328.3,4032-4050).
ctgttaccaccaagaaact

SEQ ID NO: 31667 - DNA, 19 bp, Homo sapiens
  siRNA target sequence for MBD5 (NM_018328.3,4034-4052).
gttaccaccaagaaactgt

SEQ ID NO: 31668 - DNA, 19 bp, Homo sapiens
  siRNA target sequence for MBD5 (NM_018328.3,4049-4067).
ctgtccaggggataaaatt

SEQ ID NO: 31669 - DNA, 19 bp, Homo sapiens
  siRNA target sequence for MBD5 (NM_018328.3,4051-4069).
gtccaggggataaaattct

SEQ ID NO: 31670 - DNA, 19 bp, Homo sapiens
  siRNA target sequence for MBD5 (NM_018328.3,4071-4089).
gaggaaaatttcaggtata

SEQ ID NO: 31671 - DNA, 19 bp, Homo sapiens
  siRNA target sequence for MBD5 (NM_018328.3,4073-4091).
ggaaaatttcaggtataat

SEQ ID NO: 31672 - DNA, 19 bp, Homo sapiens
  siRNA target sequence for MBD5 (NM_018328.3,4082-4100).
caggtataataactacaaa

SEQ ID NO: 31673 - DNA, 19 bp, Homo sapiens
  siRNA target sequence for MBD5 (NM_018328.3,4105-4123).
ctatgatgagttttaagga

SEQ ID NO: 31674 - DNA, 19 bp, Homo sapiens
  siRNA target sequence for MBD5 (NM_018328.3,4142-4160).
ggaaagatgtgcacacata

SEQ ID NO: 31675 - DNA, 19 bp, Homo sapiens
  siRNA target sequence for MBD5 (NM_018328.3,4245-4263).
ccaagttcctcaaatagtt

SEQ ID NO: 31676 - DNA, 19 bp, Homo sapiens
  siRNA target sequence for MBD5 (NM_018328.3,4278-4296).
gtcaaagactacatccatt

SEQ ID NO: 31677 - DNA, 19 bp, Homo sapiens
  siRNA target sequence for MBD5 (NM_018328.3,4293-4311).
cattacaatggagacttta

SEQ ID NO: 31678 - DNA, 19 bp, Homo sapiens
  siRNA target sequence for MBD5 (NM_018328.3,4405-4423).
caaatgaattgatacatta

SEQ ID NO: 31679 - DNA, 19 bp, Homo sapiens
  siRNA target sequence for MBD5 (NM_018328.3,4426-4444).
gaccaaggacgttcaatgt

SEQ ID NO: 31680 - DNA, 19 bp, Homo sapiens
  siRNA target sequence for MBD5 (NM_018328.3,4454-4472).
ggtctggggccaaatcaaa

SEQ ID NO: 31681 - DNA, 19 bp, Homo sapiens
  siRNA target sequence for MBD5 (NM_018328.3,4487-4505).
gcctggaaaattagtaaga

SEQ ID NO: 31682 - DNA, 19 bp, Homo sapiens
  siRNA target sequence for MBD5 (NM_018328.3,4504-4522).
gagaagacgacgttcacaa

SEQ ID NO: 31683 - DNA, 19 bp, Homo sapiens
  siRNA target sequence for MBD5 (NM_018328.3,4506-4524).
gaagacgacgttcacaatt

SEQ ID NO: 31684 - DNA, 19 bp, Homo sapiens
  siRNA target sequence for MBD5 (NM_018328.3,4509-4527).
gacgacgttcacaattcat

SEQ ID NO: 31685 - DNA, 19 bp, Homo sapiens
  siRNA target sequence for MBD5 (NM_018328.3,4511-4529).
cgacgttcacaattcatgt

SEQ ID NO: 31686 - DNA, 19 bp, Homo sapiens
  siRNA target sequence for MBD5 (NM_018328.3,4608-4626).
gtccggaaaaggaacagaa

SEQ ID NO: 31687 - DNA, 19 bp, Homo sapiens
  siRNA target sequence for MBD5 (NM_018328.3,4696-4714).
ctgggactgtacaccaaat

SEQ ID NO: 31688 - DNA, 19 bp, Homo sapiens
  siRNA target sequence for MBD5 (NM_018328.3,4717-4735).
cacagggtgacagacaaat

SEQ ID NO: 31689 - DNA, 19 bp, Homo sapiens
  siRNA target sequence for MBD5 (NM_018328.3,4719-4737).
cagggtgacagacaaatga

SEQ ID NO: 31690 - DNA, 19 bp, Homo sapiens
  siRNA target sequence for MCM2 (NM_004526.2,62-80).
cggaatcatcggaatcctt

SEQ ID NO: 31691 - DNA, 19 bp, Homo sapiens
  siRNA target sequence for MCM2 (NM_004526.2,105-123).
gcgtcggcgaggcaatgat

SEQ ID NO: 31692 - DNA, 19 bp, Homo sapiens
  siRNA target sequence for MCM2 (NM_004526.2,186-204).
ccgtgaccttccaccattt

SEQ ID NO: 31693 - DNA, 19 bp, Homo sapiens
  siRNA target sequence for MCM2 (NM_004526.2,188-206).
gtgaccttccaccatttga

SEQ ID NO: 31694 - DNA, 19 bp, Homo sapiens
  siRNA target sequence for MCM2 (NM_004526.2,452-470).
gccgtgggctcctgtatga

SEQ ID NO: 31695 - DNA, 19 bp, Homo sapiens
  siRNA target sequence for MCM2 (NM_004526.2,743-761).
gcctggtggtgaactatga

SEQ ID NO: 31696 - DNA, 19 bp, Homo sapiens
  siRNA target sequence for MCM2 (NM_004526.2,1303-1321).
ggcatctatcacaacaact

SEQ ID NO: 31697 - DNA, 19 bp, Homo sapiens
  siRNA target sequence for MCM2 (NM_004526.2,1304-1322).
gcatctatcacaacaacta

SEQ ID NO: 31698 - DNA, 19 bp, Homo sapiens
  siRNA target sequence for MCM2 (NM_004526.2,1305-1323).
catctatcacaacaactat

SEQ ID NO: 31699 - DNA, 19 bp, Homo sapiens
  siRNA target sequence for MCM2 (NM_004526.2,1473-1491).
gatcggagagaagatcttt

SEQ ID NO: 31700 - DNA, 19 bp, Homo sapiens
  siRNA target sequence for MCM2 (NM_004526.2,1497-1515).
cattgctccttccatctat

SEQ ID NO: 31701 - DNA, 19 bp, Homo sapiens
  siRNA target sequence for MCM2 (NM_004526.2,1639-1657).
gcgaagtcgcagtttctca

SEQ ID NO: 31702 - DNA, 19 bp, Homo sapiens
  siRNA target sequence for MCM2 (NM_004526.2,1640-1658).
cgaagtcgcagtttctcaa

SEQ ID NO: 31703 - DNA, 19 bp, Homo sapiens
  siRNA target sequence for MCM2 (NM_004526.2,1646-1664).
cgcagtttctcaagtatat

SEQ ID NO: 31704 - DNA, 19 bp, Homo sapiens
  siRNA target sequence for MCM2 (NM_004526.2,1969-1987).
gacccctcgctgactttct

SEQ ID NO: 31705 - DNA, 19 bp, Homo sapiens
  siRNA target sequence for MCM2 (NM_004526.2,1971-1989).
cccctcgctgactttctct

SEQ ID NO: 31706 - DNA, 19 bp, Homo sapiens
  siRNA target sequence for MCM2 (NM_004526.2,2398-2416).
catctgcgggactatgtga

SEQ ID NO: 31707 - DNA, 19 bp, Homo sapiens
  siRNA target sequence for MCM2 (NM_004526.2,2491-2509).
cgcagcatgcgcaagactt

SEQ ID NO: 31708 - DNA, 19 bp, Homo sapiens
  siRNA target sequence for MCM2 (NM_004526.2,2492-2510).
gcagcatgcgcaagacttt

SEQ ID NO: 31709 - DNA, 19 bp, Homo sapiens
  siRNA target sequence for MCM2 (NM_004526.2,2525-2543).
cattccggcgtgacaacaa

SEQ ID NO: 31710 - DNA, 19 bp, Homo sapiens
  siRNA target sequence for MCM2 (NM_004526.2,2548-2566).
ctgttgctcttcatactga

SEQ ID NO: 31711 - DNA, 19 bp, Homo sapiens
  siRNA target sequence for MCM2 (NM_004526.2,2686-2704).
ctctctgcattttatgaca

SEQ ID NO: 31712 - DNA, 19 bp, Homo sapiens
  siRNA target sequence for MCM2 (NM_004526.2,2734-2752).
cacgacctgaaaaggaaaa

SEQ ID NO: 31713 - DNA, 19 bp, Homo sapiens
  siRNA target sequence for MCM3 (NM_002388.3,192-210).
gaccagggaatttatcaga

SEQ ID NO: 31714 - DNA, 19 bp, Homo sapiens
  siRNA target sequence for MCM3 (NM_002388.3,225-243).
ctgatcagtgacaaccaat

SEQ ID NO: 31715 - DNA, 19 bp, Homo sapiens
  siRNA target sequence for MCM3 (NM_002388.3,240-258).
caataccggctgattgtca

SEQ ID NO: 31716 - DNA, 19 bp, Homo sapiens
  siRNA target sequence for MCM3 (NM_002388.3,246-264).
cggctgattgtcaatgtga

SEQ ID NO: 31717 - DNA, 19 bp, Homo sapiens
  siRNA target sequence for MCM3 (NM_002388.3,365-383).
ctccattgatgctacctat

SEQ ID NO: 31718 - DNA, 19 bp, Homo sapiens
  siRNA target sequence for MCM3 (NM_002388.3,491-509).
ggagggcattgtcactaaa

SEQ ID NO: 31719 - DNA, 19 bp, Homo sapiens
  siRNA target sequence for MCM3 (NM_002388.3,492-510).
gagggcattgtcactaaat

SEQ ID NO: 31720 - DNA, 19 bp, Homo sapiens
  siRNA target sequence for MCM3 (NM_002388.3,494-512).
gggcattgtcactaaatgt

SEQ ID NO: 31721 - DNA, 19 bp, Homo sapiens
  siRNA target sequence for MCM3 (NM_002388.3,495-513).
ggcattgtcactaaatgtt

SEQ ID NO: 31722 - DNA, 19 bp, Homo sapiens
  siRNA target sequence for MCM3 (NM_002388.3,503-521).
cactaaatgttctctagtt

SEQ ID NO: 31723 - DNA, 19 bp, Homo sapiens
  siRNA target sequence for MCM3 (NM_002388.3,569-587).
gaccatagagcgacgttat

SEQ ID NO: 31724 - DNA, 19 bp, Homo sapiens
  siRNA target sequence for MCM3 (NM_002388.3,572-590).
catagagcgacgttattct

SEQ ID NO: 31725 - DNA, 19 bp, Homo sapiens
  siRNA target sequence for MCM3 (NM_002388.3,754-772).
gctctgtggacgtcattct

SEQ ID NO: 31726 - DNA, 19 bp, Homo sapiens
  siRNA target sequence for MCM3 (NM_002388.3,887-905).
cctgattgcctgtaatgtt

SEQ ID NO: 31727 - DNA, 19 bp, Homo sapiens
  siRNA target sequence for MCM3 (NM_002388.3,888-906).
ctgattgcctgtaatgtta

SEQ ID NO: 31728 - DNA, 19 bp, Homo sapiens
  siRNA target sequence for MCM3 (NM_002388.3,921-939).
gatgctcagccctctttct

SEQ ID NO: 31729 - DNA, 19 bp, Homo sapiens
  siRNA target sequence for MCM3 (NM_002388.3,959-977).
gatcaagaagttcagtaaa

SEQ ID NO: 31730 - DNA, 19 bp, Homo sapiens
  siRNA target sequence for MCM3 (NM_002388.3,979-997).
cccgatccaaggatatctt

SEQ ID NO: 31731 - DNA, 19 bp, Homo sapiens
  siRNA target sequence for MCM3 (NM_002388.3,999-1017).
gaccagctggccaagtcat

SEQ ID NO: 31732 - DNA, 19 bp, Homo sapiens
  siRNA target sequence for MCM3 (NM_002388.3,1027-1045).
gtatccatgggcatgacta

SEQ ID NO: 31733 - DNA, 19 bp, Homo sapiens
  siRNA target sequence for MCM3 (NM_002388.3,1115-1133).
ccgtggggacatcaatatt

SEQ ID NO: 31734 - DNA, 19 bp, Homo sapiens
  siRNA target sequence for MCM3 (NM_002388.3,1117-1135).
gtggggacatcaatattct

SEQ ID NO: 31735 - DNA, 19 bp, Homo sapiens
  siRNA target sequence for MCM3 (NM_002388.3,1120-1138).
gggacatcaatattcttct

SEQ ID NO: 31736 - DNA, 19 bp, Homo sapiens
  siRNA target sequence for MCM3 (NM_002388.3,1316-1334).
ccgaggcgtggtttgcatt

SEQ ID NO: 31737 - DNA, 19 bp, Homo sapiens
  siRNA target sequence for MCM3 (NM_002388.3,1322-1340).
cgtggtttgcattgatgaa

SEQ ID NO: 31738 - DNA, 19 bp, Homo sapiens
  siRNA target sequence for MCM3 (NM_002388.3,1323-1341).
gtggtttgcattgatgaat

SEQ ID NO: 31739 - DNA, 19 bp, Homo sapiens
  siRNA target sequence for MCM3 (NM_002388.3,1369-1387).
cagccatccatgaagtgat

SEQ ID NO: 31740 - DNA, 19 bp, Homo sapiens
  siRNA target sequence for MCM3 (NM_002388.3,1480-1498).
gcaggtatgaccagtataa

SEQ ID NO: 31741 - DNA, 19 bp, Homo sapiens
  siRNA target sequence for MCM3 (NM_002388.3,1529-1547).
ctcactgctgtcacgattt

SEQ ID NO: 31742 - DNA, 19 bp, Homo sapiens
  siRNA target sequence for MCM3 (NM_002388.3,1531-1549).
cactgctgtcacgatttga

SEQ ID NO: 31743 - DNA, 19 bp, Homo sapiens
  siRNA target sequence for MCM3 (NM_002388.3,1533-1551).
ctgctgtcacgatttgact

SEQ ID NO: 31744 - DNA, 19 bp, Homo sapiens
  siRNA target sequence for MCM3 (NM_002388.3,1694-1712).
cacagatgatcccaacttt

SEQ ID NO: 31745 - DNA, 19 bp, Homo sapiens
  siRNA target sequence for MCM3 (NM_002388.3,1727-1745).
gcaggacacccagatttat

SEQ ID NO: 31746 - DNA, 19 bp, Homo sapiens
  siRNA target sequence for MCM3 (NM_002388.3,1731-1749).
gacacccagatttatgaga

SEQ ID NO: 31747 - DNA, 19 bp, Homo sapiens
  siRNA target sequence for MCM3 (NM_002388.3,1751-1769).
gcatgacaaccttctacat

SEQ ID NO: 31748 - DNA, 19 bp, Homo sapiens
  siRNA target sequence for MCM3 (NM_002388.3,1764-1782).
ctacatgggaccaagaaga

SEQ ID NO: 31749 - DNA, 19 bp, Homo sapiens
  siRNA target sequence for MCM3 (NM_002388.3,1804-1822).
cagcattcatgaagaagta

SEQ ID NO: 31750 - DNA, 19 bp, Homo sapiens
  siRNA target sequence for MCM3 (NM_002388.3,1862-1880).
ggagtcggccacctacatt

SEQ ID NO: 31751 - DNA, 19 bp, Homo sapiens
  siRNA target sequence for MCM3 (NM_002388.3,1874-1892).
ctacattgcagaagagtat

SEQ ID NO: 31752 - DNA, 19 bp, Homo sapiens
  siRNA target sequence for MCM3 (NM_002388.3,2049-2067).
gagttggtccagtatgctt

SEQ ID NO: 31753 - DNA, 19 bp, Homo sapiens
  siRNA target sequence for MCM3 (NM_002388.3,2054-2072).
ggtccagtatgcttacttt

SEQ ID NO: 31754 - DNA, 19 bp, Homo sapiens
  siRNA target sequence for MCM3 (NM_002388.3,2055-2073).
gtccagtatgcttacttta

SEQ ID NO: 31755 - DNA, 19 bp, Homo sapiens
  siRNA target sequence for MCM3 (NM_002388.3,2108-2126).
gcgaagtgaggatgaatca

SEQ ID NO: 31756 - DNA, 19 bp, Homo sapiens
  siRNA target sequence for MCM3 (NM_002388.3,2205-2223).
gccaaagatggggattcat

SEQ ID NO: 31757 - DNA, 19 bp, Homo sapiens
  siRNA target sequence for MCM3 (NM_002388.3,2206-2224).
ccaaagatggggattcata

SEQ ID NO: 31758 - DNA, 19 bp, Homo sapiens
  siRNA target sequence for MCM3 (NM_002388.3,2221-2239).
catacgacccctatgactt

SEQ ID NO: 31759 - DNA, 19 bp, Homo sapiens
  siRNA target sequence for MCM3 (NM_002388.3,2390-2408).
gcagtcaatcggcatgaat

SEQ ID NO: 31760 - DNA, 19 bp, Homo sapiens
  siRNA target sequence for MCM3 (NM_002388.3,2479-2497).
gcaagatgcaggatgacaa

SEQ ID NO: 31761 - DNA, 19 bp, Homo sapiens
  siRNA target sequence for MCM3 (NM_002388.3,2480-2498).
caagatgcaggatgacaat

SEQ ID NO: 31762 - DNA, 19 bp, Homo sapiens
  siRNA target sequence for MCM3AP (NM_003906.3,83-101).
cggcgtcttctagtaatgt

SEQ ID NO: 31763 - DNA, 19 bp, Homo sapiens
  siRNA target sequence for MCM3AP (NM_003906.3,84-102).
ggcgtcttctagtaatgta

SEQ ID NO: 31764 - DNA, 19 bp, Homo sapiens
  siRNA target sequence for MCM3AP (NM_003906.3,116-134).
ctaagccgccatttcgatt

SEQ ID NO: 31765 - DNA, 19 bp, Homo sapiens
  siRNA target sequence for MCM3AP (NM_003906.3,120-138).
gccgccatttcgatttggt

SEQ ID NO: 31766 - DNA, 19 bp, Homo sapiens
  siRNA target sequence for MCM3AP (NM_003906.3,175-193).
gggaagagctcgggatttt

SEQ ID NO: 31767 - DNA, 19 bp, Homo sapiens
  siRNA target sequence for MCM3AP (NM_003906.3,177-195).
gaagagctcgggattttca

SEQ ID NO: 31768 - DNA, 19 bp, Homo sapiens
  siRNA target sequence for MCM3AP (NM_003906.3,215-233).
cgtcttctggagtaagtca

SEQ ID NO: 31769 - DNA, 19 bp, Homo sapiens
  siRNA target sequence for MCM3AP (NM_003906.3,261-279).
cacccaaacctcaagtgtt

SEQ ID NO: 31770 - DNA, 19 bp, Homo sapiens
  siRNA target sequence for MCM3AP (NM_003906.3,353-371).
gaaacacaggatttagttt

SEQ ID NO: 31771 - DNA, 19 bp, Homo sapiens
  siRNA target sequence for MCM3AP (NM_003906.3,449-467).
gttttgggaaaacagaatt

SEQ ID NO: 31772 - DNA, 19 bp, Homo sapiens
  siRNA target sequence for MCM3AP (NM_003906.3,470-488).
gctttaaacctctggaaaa

SEQ ID NO: 31773 - DNA, 19 bp, Homo sapiens
  siRNA target sequence for MCM3AP (NM_003906.3,471-489).
ctttaaacctctggaaaat

SEQ ID NO: 31774 - DNA, 19 bp, Homo sapiens
  siRNA target sequence for MCM3AP (NM_003906.3,612-630).
ctcttttcctcaagtaaca

SEQ ID NO: 31775 - DNA, 19 bp, Homo sapiens
  siRNA target sequence for MCM3AP (NM_003906.3,638-656).
cagctaccacttcaaattt

SEQ ID NO: 31776 - DNA, 19 bp, Homo sapiens
  siRNA target sequence for MCM3AP (NM_003906.3,673-691).
gttagtagtaataattcat

SEQ ID NO: 31777 - DNA, 19 bp, Homo sapiens
  siRNA target sequence for MCM3AP (NM_003906.3,705-723).
ccctgctttgtcaaaccaa

SEQ ID NO: 31778 - DNA, 19 bp, Homo sapiens
  siRNA target sequence for MCM3AP (NM_003906.3,741-759).
gagaggacctaagtcaata

SEQ ID NO: 31779 - DNA, 19 bp, Homo sapiens
  siRNA target sequence for MCM3AP (NM_003906.3,763-781).
ggaagttctaataatagct

SEQ ID NO: 31780 - DNA, 19 bp, Homo sapiens
  siRNA target sequence for MCM3AP (NM_003906.3,764-782).
gaagttctaataatagctt

SEQ ID NO: 31781 - DNA, 19 bp, Homo sapiens
  siRNA target sequence for MCM3AP (NM_003906.3,806-824).
cggttttgggcgaaccttt

SEQ ID NO: 31782 - DNA, 19 bp, Homo sapiens
  siRNA target sequence for MCM3AP (NM_003906.3,990-1008).
cgatcatcctccagacaaa

SEQ ID NO: 31783 - DNA, 19 bp, Homo sapiens
  siRNA target sequence for MCM3AP (NM_003906.3,1035-1053).
gggaggtactttatttggt

SEQ ID NO: 31784 - DNA, 19 bp, Homo sapiens
  siRNA target sequence for MCM3AP (NM_003906.3,1054-1072).
cggacgatacaggatgttt

SEQ ID NO: 31785 - DNA, 19 bp, Homo sapiens
  siRNA target sequence for MCM3AP (NM_003906.3,1055-1073).
ggacgatacaggatgtttt

SEQ ID NO: 31786 - DNA, 19 bp, Homo sapiens
  siRNA target sequence for MCM3AP (NM_003906.3,1200-1218).
ccggattccaggtgtgaat

SEQ ID NO: 31787 - DNA, 19 bp, Homo sapiens
  siRNA target sequence for MCM3AP (NM_003906.3,1201-1219).
cggattccaggtgtgaata

SEQ ID NO: 31788 - DNA, 19 bp, Homo sapiens
  siRNA target sequence for MCM3AP (NM_003906.3,1398-1416).
ccattttggcaaaattgct

SEQ ID NO: 31789 - DNA, 19 bp, Homo sapiens
  siRNA target sequence for MCM3AP (NM_003906.3,1420-1438).
gtgcagcgcatctttacca

SEQ ID NO: 31790 - DNA, 19 bp, Homo sapiens
  siRNA target sequence for MCM3AP (NM_003906.3,1437-1455).
caggcgcagcaaaaagctt

SEQ ID NO: 31791 - DNA, 19 bp, Homo sapiens
  siRNA target sequence for MCM3AP (NM_003906.3,1503-1521).
gaaggggaaaagtttgcat

SEQ ID NO: 31792 - DNA, 19 bp, Homo sapiens
  siRNA target sequence for MCM3AP (NM_003906.3,1506-1524).
ggggaaaagtttgcataaa

SEQ ID NO: 31793 - DNA, 19 bp, Homo sapiens
  siRNA target sequence for MCM3AP (NM_003906.3,1681-1699).
gctagcagcctcctgaata

SEQ ID NO: 31794 - DNA, 19 bp, Homo sapiens
  siRNA target sequence for MCM3AP (NM_003906.3,1682-1700).
ctagcagcctcctgaataa

SEQ ID NO: 31795 - DNA, 19 bp, Homo sapiens
  siRNA target sequence for MCM3AP (NM_003906.3,1891-1909).
caagctcgggtgaagagaa

SEQ ID NO: 31796 - DNA, 19 bp, Homo sapiens
  siRNA target sequence for MCM3AP (NM_003906.3,1917-1935).
ggacaaagcgaggactttt

SEQ ID NO: 31797 - DNA, 19 bp, Homo sapiens
  siRNA target sequence for MCM3AP (NM_003906.3,1920-1938).
caaagcgaggacttttgtt

SEQ ID NO: 31798 - DNA, 19 bp, Homo sapiens
  siRNA target sequence for MCM3AP (NM_003906.3,2177-2195).
gcagcctgcgggattggta

SEQ ID NO: 31799 - DNA, 19 bp, Homo sapiens
  siRNA target sequence for MCM3AP (NM_003906.3,2178-2196).
cagcctgcgggattggtat

SEQ ID NO: 31800 - DNA, 19 bp, Homo sapiens
  siRNA target sequence for MCM3AP (NM_003906.3,2182-2200).
ctgcgggattggtatgact

SEQ ID NO: 31801 - DNA, 19 bp, Homo sapiens
  siRNA target sequence for MCM3AP (NM_003906.3,2218-2236).
cgtggcatacggaaggata

SEQ ID NO: 31802 - DNA, 19 bp, Homo sapiens
  siRNA target sequence for MCM3AP (NM_003906.3,2219-2237).
gtggcatacggaaggatat

SEQ ID NO: 31803 - DNA, 19 bp, Homo sapiens
  siRNA target sequence for MCM3AP (NM_003906.3,2221-2239).
ggcatacggaaggatatca

SEQ ID NO: 31804 - DNA, 19 bp, Homo sapiens
  siRNA target sequence for MCM3AP (NM_003906.3,2267-2285).
cggtgtccctgattgagaa

SEQ ID NO: 31805 - DNA, 19 bp, Homo sapiens
  siRNA target sequence for MCM3AP (NM_003906.3,2343-2361).
ctttgatgccaagatcaat

SEQ ID NO: 31806 - DNA, 19 bp, Homo sapiens
  siRNA target sequence for MCM3AP (NM_003906.3,2350-2368).
gccaagatcaataatgaga

SEQ ID NO: 31807 - DNA, 19 bp, Homo sapiens
  siRNA target sequence for MCM3AP (NM_003906.3,2351-2369).
ccaagatcaataatgagaa

SEQ ID NO: 31808 - DNA, 19 bp, Homo sapiens
  siRNA target sequence for MCM3AP (NM_003906.3,2518-2536).
catcctgctgttagaaact

SEQ ID NO: 31809 - DNA, 19 bp, Homo sapiens
  siRNA target sequence for MCM3AP (NM_003906.3,2563-2581).
gcttttgctgcattgaaca

SEQ ID NO: 31810 - DNA, 19 bp, Homo sapiens
  siRNA target sequence for MCM3AP (NM_003906.3,2570-2588).
ctgcattgaacagtaataa

SEQ ID NO: 31811 - DNA, 19 bp, Homo sapiens
  siRNA target sequence for MCM3AP (NM_003906.3,2572-2590).
gcattgaacagtaataatt

SEQ ID NO: 31812 - DNA, 19 bp, Homo sapiens
  siRNA target sequence for MCM3AP (NM_003906.3,2879-2897).
ccaggaagtcggtgtttat

SEQ ID NO: 31813 - DNA, 19 bp, Homo sapiens
  siRNA target sequence for MCM3AP (NM_003906.3,2880-2898).
caggaagtcggtgtttatt

SEQ ID NO: 31814 - DNA, 19 bp, Homo sapiens
  siRNA target sequence for MCM3AP (NM_003906.3,2913-2931).
ggtgtcagtcggggaaatt

SEQ ID NO: 31815 - DNA, 19 bp, Homo sapiens
  siRNA target sequence for MCM3AP (NM_003906.3,3244-3262).
gagcccgtgcccatgtact

SEQ ID NO: 31816 - DNA, 19 bp, Homo sapiens
  siRNA target sequence for MCM3AP (NM_003906.3,3382-3400).
gctgctatggaggatttgt

SEQ ID NO: 31817 - DNA, 19 bp, Homo sapiens
  siRNA target sequence for MCM3AP (NM_003906.3,3409-3427).
gcaaccacgggcattttga

SEQ ID NO: 31818 - DNA, 19 bp, Homo sapiens
  siRNA target sequence for MCM3AP (NM_003906.3,3572-3590).
gcgtgatgatggagtttgt

SEQ ID NO: 31819 - DNA, 19 bp, Homo sapiens
  siRNA target sequence for MCM3AP (NM_003906.3,3747-3765).
gtgcttctgcaagtatcta

SEQ ID NO: 31820 - DNA, 19 bp, Homo sapiens
  siRNA target sequence for MCM3AP (NM_003906.3,3749-3767).
gcttctgcaagtatctaca

SEQ ID NO: 31821 - DNA, 19 bp, Homo sapiens
  siRNA target sequence for MCM3AP (NM_003906.3,4161-4179).
gagttgtggcagaattcta

SEQ ID NO: 31822 - DNA, 19 bp, Homo sapiens
  siRNA target sequence for MCM3AP (NM_003906.3,4240-4258).
gatgctggtgggattcaga

SEQ ID NO: 31823 - DNA, 19 bp, Homo sapiens
  siRNA target sequence for MCM3AP (NM_003906.3,4255-4273).
cagacgctttcgcttttca

SEQ ID NO: 31824 - DNA, 19 bp, Homo sapiens
  siRNA target sequence for MCM3AP (NM_003906.3,4286-4304).
gcaaaggggatcagatgat

SEQ ID NO: 31825 - DNA, 19 bp, Homo sapiens
  siRNA target sequence for MCM3AP (NM_003906.3,4287-4305).
caaaggggatcagatgatt

SEQ ID NO: 31826 - DNA, 19 bp, Homo sapiens
  siRNA target sequence for MCM3AP (NM_003906.3,4307-4325).
ctgttaacgtgtgtataaa

SEQ ID NO: 31827 - DNA, 19 bp, Homo sapiens
  siRNA target sequence for MCM3AP (NM_003906.3,4344-4362).
cagtgatggtgccattgat

SEQ ID NO: 31828 - DNA, 19 bp, Homo sapiens
  siRNA target sequence for MCM3AP (NM_003906.3,4553-4571).
gaggggacgccgttgagaa

SEQ ID NO: 31829 - DNA, 19 bp, Homo sapiens
  siRNA target sequence for MCM3AP (NM_003906.3,4562-4580).
ccgttgagaaggaagtaga

SEQ ID NO: 31830 - DNA, 19 bp, Homo sapiens
  siRNA target sequence for MCM3AP (NM_003906.3,4606-4624).
gtttcagctaagctgattt

SEQ ID NO: 31831 - DNA, 19 bp, Homo sapiens
  siRNA target sequence for MCM3AP (NM_003906.3,4610-4628).
cagctaagctgatttcaga

SEQ ID NO: 31832 - DNA, 19 bp, Homo sapiens
  siRNA target sequence for MCM3AP (NM_003906.3,4613-4631).
ctaagctgatttcagatta

SEQ ID NO: 31833 - DNA, 19 bp, Homo sapiens
  siRNA target sequence for MCM3AP (NM_003906.3,4642-4660).
gagatccctgataccatta

SEQ ID NO: 31834 - DNA, 19 bp, Homo sapiens
  siRNA target sequence for MCM3AP (NM_003906.3,4647-4665).
ccctgataccattaatgat

SEQ ID NO: 31835 - DNA, 19 bp, Homo sapiens
  siRNA target sequence for MCM3AP (NM_003906.3,4649-4667).
ctgataccattaatgatct

SEQ ID NO: 31836 - DNA, 19 bp, Homo sapiens
  siRNA target sequence for MCM3AP (NM_003906.3,4669-4687).
caaggttcaactaaggttt

SEQ ID NO: 31837 - DNA, 19 bp, Homo sapiens
  siRNA target sequence for MCM3AP (NM_003906.3,4673-4691).
gttcaactaaggttttgca

SEQ ID NO: 31838 - DNA, 19 bp, Homo sapiens
  siRNA target sequence for MCM3AP (NM_003906.3,4771-4789).
gggattggccatgagttta

SEQ ID NO: 31839 - DNA, 19 bp, Homo sapiens
  siRNA target sequence for MCM3AP (NM_003906.3,4773-4791).
gattggccatgagtttagt

SEQ ID NO: 31840 - DNA, 19 bp, Homo sapiens
  siRNA target sequence for MCM3AP (NM_003906.3,5250-5268).
gatcccatgggatgatctt

SEQ ID NO: 31841 - DNA, 19 bp, Homo sapiens
  siRNA target sequence for MCM3AP (NM_003906.3,5263-5281).
gatcttatcgccttgtgta

SEQ ID NO: 31842 - DNA, 19 bp, Homo sapiens
  siRNA target sequence for MCM3AP (NM_003906.3,5266-5284).
cttatcgccttgtgtatca

SEQ ID NO: 31843 - DNA, 19 bp, Homo sapiens
  siRNA target sequence for MCM3AP (NM_003906.3,5350-5368).
ggtcagatatgtgtgtatt

SEQ ID NO: 31844 - DNA, 19 bp, Homo sapiens
  siRNA target sequence for MCM3AP (NM_003906.3,5455-5473).
gagggacgtttggcaataa

SEQ ID NO: 31845 - DNA, 19 bp, Homo sapiens
  siRNA target sequence for MCM3AP (NM_003906.3,5482-5500).
catccttctgcaaacaatt

SEQ ID NO: 31846 - DNA, 19 bp, Homo sapiens
  siRNA target sequence for MCM3AP (NM_003906.3,5614-5632).
ctcttggcgcagtgtttgt

SEQ ID NO: 31847 - DNA, 19 bp, Homo sapiens
  siRNA target sequence for MCM3AP (NM_003906.3,5713-5731).
gcatttacggatttaactt

SEQ ID NO: 31848 - DNA, 19 bp, Homo sapiens
  siRNA target sequence for MCM3AP (NM_003906.3,5752-5770).
cagactctagtgtctcttt

SEQ ID NO: 31849 - DNA, 19 bp, Homo sapiens
  siRNA target sequence for MCM3AP (NM_003906.3,5813-5831).
gcccacagagtgacatgat

SEQ ID NO: 31850 - DNA, 19 bp, Homo sapiens
  siRNA target sequence for MCM3AP (NM_003906.3,5870-5888).
gtctaggcgaacgactaaa

SEQ ID NO: 31851 - DNA, 19 bp, Homo sapiens
  siRNA target sequence for MCM4 (NM_005914.2,421-439).
cagccctccccaaatgcat

SEQ ID NO: 31852 - DNA, 19 bp, Homo sapiens
  siRNA target sequence for MCM4 (NM_005914.2,643-661).
gtctctaggccaaaaactt

SEQ ID NO: 31853 - DNA, 19 bp, Homo sapiens
  siRNA target sequence for MCM4 (NM_005914.2,794-812).
caacgacttggggagatta

SEQ ID NO: 31854 - DNA, 19 bp, Homo sapiens
  siRNA target sequence for MCM4 (NM_005914.2,798-816).
gacttggggagattaatgt

SEQ ID NO: 31855 - DNA, 19 bp, Homo sapiens
  siRNA target sequence for MCM4 (NM_005914.2,815-833).
gttattggtgagccatttt

SEQ ID NO: 31856 - DNA, 19 bp, Homo sapiens
  siRNA target sequence for MCM4 (NM_005914.2,908-926).
gttattccaacttttgaca

SEQ ID NO: 31857 - DNA, 19 bp, Homo sapiens
  siRNA target sequence for MCM4 (NM_005914.2,953-971).
cgttaccctgactcaatct

SEQ ID NO: 31858 - DNA, 19 bp, Homo sapiens
  siRNA target sequence for MCM4 (NM_005914.2,954-972).
gttaccctgactcaatctt

SEQ ID NO: 31859 - DNA, 19 bp, Homo sapiens
  siRNA target sequence for MCM4 (NM_005914.2,958-976).
ccctgactcaatcttagaa

SEQ ID NO: 31860 - DNA, 19 bp, Homo sapiens
  siRNA target sequence for MCM4 (NM_005914.2,960-978).
ctgactcaatcttagaaca

SEQ ID NO: 31861 - DNA, 19 bp, Homo sapiens
  siRNA target sequence for MCM4 (NM_005914.2,1004-1022).
gcattgaagactaagaata

SEQ ID NO: 31862 - DNA, 19 bp, Homo sapiens
  siRNA target sequence for MCM4 (NM_005914.2,1005-1023).
cattgaagactaagaatat

SEQ ID NO: 31863 - DNA, 19 bp, Homo sapiens
  siRNA target sequence for MCM4 (NM_005914.2,1308-1326).
caccacacacagttatcct

SEQ ID NO: 31864 - DNA, 19 bp, Homo sapiens
  siRNA target sequence for MCM4 (NM_005914.2,1375-1393).
gaatgttacaggcatctat

SEQ ID NO: 31865 - DNA, 19 bp, Homo sapiens
  siRNA target sequence for MCM4 (NM_005914.2,1403-1421).
cctattcgagtcaatccaa

SEQ ID NO: 31866 - DNA, 19 bp, Homo sapiens
  siRNA target sequence for MCM4 (NM_005914.2,1477-1495).
gaaaacggatgcaaaacgt

SEQ ID NO: 31867 - DNA, 19 bp, Homo sapiens
  siRNA target sequence for MCM4 (NM_005914.2,1494-1512).
gtctgcatggccttgatga

SEQ ID NO: 31868 - DNA, 19 bp, Homo sapiens
  siRNA target sequence for MCM4 (NM_005914.2,1604-1622).
gccttggctccaagcattt

SEQ ID NO: 31869 - DNA, 19 bp, Homo sapiens
  siRNA target sequence for MCM4 (NM_005914.2,1668-1686).
gcgggacaaggaaggattt

SEQ ID NO: 31870 - DNA, 19 bp, Homo sapiens
  siRNA target sequence for MCM4 (NM_005914.2,1669-1687).
cgggacaaggaaggatttt

SEQ ID NO: 31871 - DNA, 19 bp, Homo sapiens
  siRNA target sequence for MCM4 (NM_005914.2,1712-1730).
cgggctgagatcaacatct

SEQ ID NO: 31872 - DNA, 19 bp, Homo sapiens
  siRNA target sequence for MCM4 (NM_005914.2,1835-1853).
ggcctcactgcgtacgtaa

SEQ ID NO: 31873 - DNA, 19 bp, Homo sapiens
  siRNA target sequence for MCM4 (NM_005914.2,1836-1854).
gcctcactgcgtacgtaat

SEQ ID NO: 31874 - DNA, 19 bp, Homo sapiens
  siRNA target sequence for MCM4 (NM_005914.2,1838-1856).
ctcactgcgtacgtaatga

SEQ ID NO: 31875 - DNA, 19 bp, Homo sapiens
  siRNA target sequence for MCM4 (NM_005914.2,1840-1858).
cactgcgtacgtaatgaaa

SEQ ID NO: 31876 - DNA, 19 bp, Homo sapiens
  siRNA target sequence for MCM4 (NM_005914.2,1842-1860).
ctgcgtacgtaatgaaaga

SEQ ID NO: 31877 - DNA, 19 bp, Homo sapiens
  siRNA target sequence for MCM4 (NM_005914.2,1915-1933).
cggcatctgctgtatcgat

SEQ ID NO: 31878 - DNA, 19 bp, Homo sapiens
  siRNA target sequence for MCM4 (NM_005914.2,1942-1960).
caagatgaatgaaagtaca

SEQ ID NO: 31879 - DNA, 19 bp, Homo sapiens
  siRNA target sequence for MCM4 (NM_005914.2,1956-1974).
gtacaagatcggtattgca

SEQ ID NO: 31880 - DNA, 19 bp, Homo sapiens
  siRNA target sequence for MCM4 (NM_005914.2,1962-1980).
gatcggtattgcatgaagt

SEQ ID NO: 31881 - DNA, 19 bp, Homo sapiens
  siRNA target sequence for MCM4 (NM_005914.2,1965-1983).
cggtattgcatgaagtcat

SEQ ID NO: 31882 - DNA, 19 bp, Homo sapiens
  siRNA target sequence for MCM4 (NM_005914.2,2113-2131).
ccagctgcctcatacttta

SEQ ID NO: 31883 - DNA, 19 bp, Homo sapiens
  siRNA target sequence for MCM4 (NM_005914.2,2120-2138).
cctcatactttattatcaa

SEQ ID NO: 31884 - DNA, 19 bp, Homo sapiens
  siRNA target sequence for MCM4 (NM_005914.2,2136-2154).
caaggtttgatttgatctt

SEQ ID NO: 31885 - DNA, 19 bp, Homo sapiens
  siRNA target sequence for MCM4 (NM_005914.2,2265-2283).
cggtgctaaaggactacat

SEQ ID NO: 31886 - DNA, 19 bp, Homo sapiens
  siRNA target sequence for MCM4 (NM_005914.2,2266-2284).
ggtgctaaaggactacatt

SEQ ID NO: 31887 - DNA, 19 bp, Homo sapiens
  siRNA target sequence for MCM4 (NM_005914.2,2337-2355).
ctctcatcgaggcttatgt

SEQ ID NO: 31888 - DNA, 19 bp, Homo sapiens
  siRNA target sequence for MCM4 (NM_005914.2,2405-2423).
cgacagctagagtcattaa

SEQ ID NO: 31889 - DNA, 19 bp, Homo sapiens
  siRNA target sequence for MCM4 (NM_005914.2,2433-2451).
cagaagcccatgctaaagt

SEQ ID NO: 31890 - DNA, 19 bp, Homo sapiens
  siRNA target sequence for MCM4 (NM_005914.2,2438-2456).
gcccatgctaaagtaagat

SEQ ID NO: 31891 - DNA, 19 bp, Homo sapiens
  siRNA target sequence for MCM4 (NM_005914.2,2439-2457).
cccatgctaaagtaagatt

SEQ ID NO: 31892 - DNA, 19 bp, Homo sapiens
  siRNA target sequence for MCM4 (NM_005914.2,2441-2459).
catgctaaagtaagattgt

SEQ ID NO: 31893 - DNA, 19 bp, Homo sapiens
  siRNA target sequence for MCM4 (NM_005914.2,2444-2462).
gctaaagtaagattgtcta

SEQ ID NO: 31894 - DNA, 19 bp, Homo sapiens
  siRNA target sequence for MCM4 (NM_005914.2,2445-2463).
ctaaagtaagattgtctaa

SEQ ID NO: 31895 - DNA, 19 bp, Homo sapiens
  siRNA target sequence for MCM4 (NM_005914.2,2518-2536).
gaagcagtctgcaactgat

SEQ ID NO: 31896 - DNA, 19 bp, Homo sapiens
  siRNA target sequence for MCM4 (NM_005914.2,2581-2599).
gagtgccacctctcgtaaa

SEQ ID NO: 31897 - DNA, 19 bp, Homo sapiens
  siRNA target sequence for MCM4 (NM_005914.2,2590-2608).
ctctcgtaaacggaaagaa

SEQ ID NO: 31898 - DNA, 19 bp, Homo sapiens
  siRNA target sequence for MCM4 (NM_005914.2,2594-2612).
cgtaaacggaaagaagaat

SEQ ID NO: 31899 - DNA, 19 bp, Homo sapiens
  siRNA target sequence for MCM4 (NM_005914.2,2696-2714).
ggacaatctgacatagcaa

SEQ ID NO: 31900 - DNA, 19 bp, Homo sapiens
  siRNA target sequence for MCM4 (NM_005914.2,2697-2715).
gacaatctgacatagcaat

SEQ ID NO: 31901 - DNA, 19 bp, Homo sapiens
  siRNA target sequence for MCM4 (NM_005914.2,2699-2717).
caatctgacatagcaatta

SEQ ID NO: 31902 - DNA, 19 bp, Homo sapiens
  siRNA target sequence for MCM4 (NM_005914.2,2703-2721).
ctgacatagcaattactaa

SEQ ID NO: 31903 - DNA, 19 bp, Homo sapiens
  siRNA target sequence for MCM4 (NM_005914.2,2707-2725).
catagcaattactaaagat

SEQ ID NO: 31904 - DNA, 19 bp, Homo sapiens
  siRNA target sequence for MCM4 (NM_005914.2,2711-2729).
gcaattactaaagatatgt

SEQ ID NO: 31905 - DNA, 19 bp, Homo sapiens
  siRNA target sequence for MCM4 (NM_005914.2,2712-2730).
caattactaaagatatgtt

SEQ ID NO: 31906 - DNA, 19 bp, Homo sapiens
  siRNA target sequence for MCM5 (NM_006739.2,95-113).
gacgatcctggcattttct

SEQ ID NO: 31907 - DNA, 19 bp, Homo sapiens
  siRNA target sequence for MCM5 (NM_006739.2,228-246).
cgggcttcaccttcaaata

SEQ ID NO: 31908 - DNA, 19 bp, Homo sapiens
  siRNA target sequence for MCM5 (NM_006739.2,254-272).
gaactcaagcggcattaca

SEQ ID NO: 31909 - DNA, 19 bp, Homo sapiens
  siRNA target sequence for MCM5 (NM_006739.2,498-516).
gcctgaagtcggacatgat

SEQ ID NO: 31910 - DNA, 19 bp, Homo sapiens
  siRNA target sequence for MCM5 (NM_006739.2,500-518).
ctgaagtcggacatgatgt

SEQ ID NO: 31911 - DNA, 19 bp, Homo sapiens
  siRNA target sequence for MCM5 (NM_006739.2,724-742).
catgcccgacaaatgcaaa

SEQ ID NO: 31912 - DNA, 19 bp, Homo sapiens
  siRNA target sequence for MCM5 (NM_006739.2,1115-1133).
gggggcacagacatgaaga

SEQ ID NO: 31913 - DNA, 19 bp, Homo sapiens
  siRNA target sequence for MCM5 (NM_006739.2,1191-1209).
ctcgccgaggagacatcaa

SEQ ID NO: 31914 - DNA, 19 bp, Homo sapiens
  siRNA target sequence for MCM5 (NM_006739.2,1346-1364).
ccttcgtcccggaatttca

SEQ ID NO: 31915 - DNA, 19 bp, Homo sapiens
  siRNA target sequence for MCM5 (NM_006739.2,1347-1365).
cttcgtcccggaatttcat

SEQ ID NO: 31916 - DNA, 19 bp, Homo sapiens
  siRNA target sequence for MCM5 (NM_006739.2,1350-1368).
cgtcccggaatttcatcat

SEQ ID NO: 31917 - DNA, 19 bp, Homo sapiens
  siRNA target sequence for MCM5 (NM_006739.2,1398-1416).
gtggggtcgtctgtattga

SEQ ID NO: 31918 - DNA, 19 bp, Homo sapiens
  siRNA target sequence for MCM5 (NM_006739.2,1410-1428).
gtattgacgagtttgacaa

SEQ ID NO: 31919 - DNA, 19 bp, Homo sapiens
  siRNA target sequence for MCM5 (NM_006739.2,1576-1594).
gaagggggaggacaacatt

SEQ ID NO: 31920 - DNA, 19 bp, Homo sapiens
  siRNA target sequence for MCM5 (NM_006739.2,1617-1635).
cgcgcttcgacatgatctt

SEQ ID NO: 31921 - DNA, 19 bp, Homo sapiens
  siRNA target sequence for MCM5 (NM_006739.2,1619-1637).
cgcttcgacatgatcttca

SEQ ID NO: 31922 - DNA, 19 bp, Homo sapiens
  siRNA target sequence for MCM5 (NM_006739.2,1943-1961).
gaagccctcagcaagatga

SEQ ID NO: 31923 - DNA, 19 bp, Homo sapiens
  siRNA target sequence for MCM6 (NM_005915.4,144-162).
ccgagaagtgccagaaact

SEQ ID NO: 31924 - DNA, 19 bp, Homo sapiens
  siRNA target sequence for MCM6 (NM_005915.4,203-221).
gaaattaaatacttgcaat

SEQ ID NO: 31925 - DNA, 19 bp, Homo sapiens
  siRNA target sequence for MCM6 (NM_005915.4,239-257).
cgtcctgagagaaacacat

SEQ ID NO: 31926 - DNA, 19 bp, Homo sapiens
  siRNA target sequence for MCM6 (NM_005915.4,310-328).
cattcaagaggagttctat

SEQ ID NO: 31927 - DNA, 19 bp, Homo sapiens
  siRNA target sequence for MCM6 (NM_005915.4,346-364).
gtgtcgggccttgaaaaca

SEQ ID NO: 31928 - DNA, 19 bp, Homo sapiens
  siRNA target sequence for MCM6 (NM_005915.4,368-386).
gtcaaagaccgtaaagaga

SEQ ID NO: 31929 - DNA, 19 bp, Homo sapiens
  siRNA target sequence for MCM6 (NM_005915.4,427-445).
gcctaccagacacaagatt

SEQ ID NO: 31930 - DNA, 19 bp, Homo sapiens
  siRNA target sequence for MCM6 (NM_005915.4,451-469).
gctcacctcatccagaatt

SEQ ID NO: 31931 - DNA, 19 bp, Homo sapiens
  siRNA target sequence for MCM6 (NM_005915.4,526-544).
gcttgtgagcggaactttt

SEQ ID NO: 31932 - DNA, 19 bp, Homo sapiens
  siRNA target sequence for MCM6 (NM_005915.4,581-599).
gaacagcagttcaaataca

SEQ ID NO: 31933 - DNA, 19 bp, Homo sapiens
  siRNA target sequence for MCM6 (NM_005915.4,613-631).
ctgccgaaatccagtttgt

SEQ ID NO: 31934 - DNA, 19 bp, Homo sapiens
  siRNA target sequence for MCM6 (NM_005915.4,653-671).
ctggatacaaataaatcaa

SEQ ID NO: 31935 - DNA, 19 bp, Homo sapiens
  siRNA target sequence for MCM6 (NM_005915.4,660-678).
caaataaatcaagatttgt

SEQ ID NO: 31936 - DNA, 19 bp, Homo sapiens
  siRNA target sequence for MCM6 (NM_005915.4,739-757).
ccgcagtttagaagtaatt

SEQ ID NO: 31937 - DNA, 19 bp, Homo sapiens
  siRNA target sequence for MCM6 (NM_005915.4,740-758).
cgcagtttagaagtaattt

SEQ ID NO: 31938 - DNA, 19 bp, Homo sapiens
  siRNA target sequence for MCM6 (NM_005915.4,810-828).
cagggacactgattgttgt

SEQ ID NO: 31939 - DNA, 19 bp, Homo sapiens
  siRNA target sequence for MCM6 (NM_005915.4,830-848).
cctgacgtctccaagctta

SEQ ID NO: 31940 - DNA, 19 bp, Homo sapiens
  siRNA target sequence for MCM6 (NM_005915.4,888-906).
gtggtgttgatggatatga

SEQ ID NO: 31941 - DNA, 19 bp, Homo sapiens
  siRNA target sequence for MCM6 (NM_005915.4,938-956).
ggtgttagggacctttctt

SEQ ID NO: 31942 - DNA, 19 bp, Homo sapiens
  siRNA target sequence for MCM6 (NM_005915.4,939-957).
gtgttagggacctttctta

SEQ ID NO: 31943 - DNA, 19 bp, Homo sapiens
  siRNA target sequence for MCM6 (NM_005915.4,954-972).
cttataggctggtctttct

SEQ ID NO: 31944 - DNA, 19 bp, Homo sapiens
  siRNA target sequence for MCM6 (NM_005915.4,1054-1072).
gaaccaaatgactgtgaaa

SEQ ID NO: 31945 - DNA, 19 bp, Homo sapiens
  siRNA target sequence for MCM6 (NM_005915.4,1096-1114).
gagtcaagataaaaatcta

SEQ ID NO: 31946 - DNA, 19 bp, Homo sapiens
  siRNA target sequence for MCM6 (NM_005915.4,1196-1214).
ggtggcgttccaaagacaa

SEQ ID NO: 31947 - DNA, 19 bp, Homo sapiens
  siRNA target sequence for MCM6 (NM_005915.4,1235-1253).
cgaggggacataaatgttt

SEQ ID NO: 31948 - DNA, 19 bp, Homo sapiens
  siRNA target sequence for MCM6 (NM_005915.4,1239-1257).
gggacataaatgtttgcat

SEQ ID NO: 31949 - DNA, 19 bp, Homo sapiens
  siRNA target sequence for MCM6 (NM_005915.4,1277-1295).
gctaagagccaatttctca

SEQ ID NO: 31950 - DNA, 19 bp, Homo sapiens
  siRNA target sequence for MCM6 (NM_005915.4,1388-1406).
gaatctcatgagtttgtca

SEQ ID NO: 31951 - DNA, 19 bp, Homo sapiens
  siRNA target sequence for MCM6 (NM_005915.4,1419-1437).
ctttgatgttggctgataa

SEQ ID NO: 31952 - DNA, 19 bp, Homo sapiens
  siRNA target sequence for MCM6 (NM_005915.4,1471-1489).
ggacgtgcgggatcaagtt

SEQ ID NO: 31953 - DNA, 19 bp, Homo sapiens
  siRNA target sequence for MCM6 (NM_005915.4,1477-1495).
gcgggatcaagttgctatt

SEQ ID NO: 31954 - DNA, 19 bp, Homo sapiens
  siRNA target sequence for MCM6 (NM_005915.4,1514-1532).
cagaccatatccatcacta

SEQ ID NO: 31955 - DNA, 19 bp, Homo sapiens
  siRNA target sequence for MCM6 (NM_005915.4,1516-1534).
gaccatatccatcactaaa

SEQ ID NO: 31956 - DNA, 19 bp, Homo sapiens
  siRNA target sequence for MCM6 (NM_005915.4,1588-1606).
cccaatcagtggacactat

SEQ ID NO: 31957 - DNA, 19 bp, Homo sapiens
  siRNA target sequence for MCM6 (NM_005915.4,1590-1608).
caatcagtggacactatga

SEQ ID NO: 31958 - DNA, 19 bp, Homo sapiens
  siRNA target sequence for MCM6 (NM_005915.4,1599-1617).
gacactatgacagatcaaa

SEQ ID NO: 31959 - DNA, 19 bp, Homo sapiens
  siRNA target sequence for MCM6 (NM_005915.4,1601-1619).
cactatgacagatcaaaat

SEQ ID NO: 31960 - DNA, 19 bp, Homo sapiens
  siRNA target sequence for MCM6 (NM_005915.4,1609-1627).
cagatcaaaatcattgaaa

SEQ ID NO: 31961 - DNA, 19 bp, Homo sapiens
  siRNA target sequence for MCM6 (NM_005915.4,1651-1669).
catcatgtcccgattcgat

SEQ ID NO: 31962 - DNA, 19 bp, Homo sapiens
  siRNA target sequence for MCM6 (NM_005915.4,1659-1677).
cccgattcgatctcttctt

SEQ ID NO: 31963 - DNA, 19 bp, Homo sapiens
  siRNA target sequence for MCM6 (NM_005915.4,1660-1678).
ccgattcgatctcttcttt

SEQ ID NO: 31964 - DNA, 19 bp, Homo sapiens
  siRNA target sequence for MCM6 (NM_005915.4,1681-1699).
ccttgtggatgaatgtaat

SEQ ID NO: 31965 - DNA, 19 bp, Homo sapiens
  siRNA target sequence for MCM6 (NM_005915.4,1722-1740).
ccaggcgcatagtagattt

SEQ ID NO: 31966 - DNA, 19 bp, Homo sapiens
  siRNA target sequence for MCM6 (NM_005915.4,1725-1743).
ggcgcatagtagatttgca

SEQ ID NO: 31967 - DNA, 19 bp, Homo sapiens
  siRNA target sequence for MCM6 (NM_005915.4,1726-1744).
gcgcatagtagatttgcat

SEQ ID NO: 31968 - DNA, 19 bp, Homo sapiens
  siRNA target sequence for MCM6 (NM_005915.4,1727-1745).
cgcatagtagatttgcatt

SEQ ID NO: 31969 - DNA, 19 bp, Homo sapiens
  siRNA target sequence for MCM6 (NM_005915.4,1807-1825).
ctttgcaagacagtttaaa

SEQ ID NO: 31970 - DNA, 19 bp, Homo sapiens
  siRNA target sequence for MCM6 (NM_005915.4,1852-1870).
cttcattgtggagcaatat

SEQ ID NO: 31971 - DNA, 19 bp, Homo sapiens
  siRNA target sequence for MCM6 (NM_005915.4,2015-2033).
gaagctttccggttactga

SEQ ID NO: 31972 - DNA, 19 bp, Homo sapiens
  siRNA target sequence for MCM6 (NM_005915.4,2018-2036).
gctttccggttactgaata

SEQ ID NO: 31973 - DNA, 19 bp, Homo sapiens
  siRNA target sequence for MCM6 (NM_005915.4,2023-2041).
ccggttactgaataaatca

SEQ ID NO: 31974 - DNA, 19 bp, Homo sapiens
  siRNA target sequence for MCM6 (NM_005915.4,2110-2128).
gggtgctggtggcatcaat

SEQ ID NO: 31975 - DNA, 19 bp, Homo sapiens
  siRNA target sequence for MCM6 (NM_005915.4,2158-2176).
cgggatcaatggctacaat

SEQ ID NO: 31976 - DNA, 19 bp, Homo sapiens
  siRNA target sequence for MCM6 (NM_005915.4,2161-2179).
gatcaatggctacaatgaa

SEQ ID NO: 31977 - DNA, 19 bp, Homo sapiens
  siRNA target sequence for MCM6 (NM_005915.4,2231-2249).
gagtactgccgaatctcta

SEQ ID NO: 31978 - DNA, 19 bp, Homo sapiens
  siRNA target sequence for MCM6 (NM_005915.4,2236-2254).
ctgccgaatctctaacctt

SEQ ID NO: 31979 - DNA, 19 bp, Homo sapiens
  siRNA target sequence for MCM6 (NM_005915.4,2238-2256).
gccgaatctctaaccttat

SEQ ID NO: 31980 - DNA, 19 bp, Homo sapiens
  siRNA target sequence for MCM6 (NM_005915.4,2239-2257).
ccgaatctctaaccttatt

SEQ ID NO: 31981 - DNA, 19 bp, Homo sapiens
  siRNA target sequence for MCM6 (NM_005915.4,2288-2306).
gaggacgagtcagcattaa

SEQ ID NO: 31982 - DNA, 19 bp, Homo sapiens
  siRNA target sequence for MCM6 (NM_005915.4,2291-2309).
gacgagtcagcattaaaga

SEQ ID NO: 31983 - DNA, 19 bp, Homo sapiens
  siRNA target sequence for MCM6 (NM_005915.4,2328-2346).
ggtacttgaaggaaatcga

SEQ ID NO: 31984 - DNA, 19 bp, Homo sapiens
  siRNA target sequence for MCM6 (NM_005915.4,2329-2347).
gtacttgaaggaaatcgaa

SEQ ID NO: 31985 - DNA, 19 bp, Homo sapiens
  siRNA target sequence for MCM6 (NM_005915.4,2412-2430).
gactcacacactatgatca

SEQ ID NO: 31986 - DNA, 19 bp, Homo sapiens
  siRNA target sequence for MCM6 (NM_005915.4,2418-2436).
cacactatgatcatgttct

SEQ ID NO: 31987 - DNA, 19 bp, Homo sapiens
  siRNA target sequence for MCM6 (NM_005915.4,2422-2440).
ctatgatcatgttctaatt

SEQ ID NO: 31988 - DNA, 19 bp, Homo sapiens
  siRNA target sequence for MCM6 (NM_005915.4,2498-2516).
gatccctacttggtagtta

SEQ ID NO: 31989 - DNA, 19 bp, Homo sapiens
  siRNA target sequence for MCM6 (NM_005915.4,2510-2528).
gtagttaaccctaactact

SEQ ID NO: 31990 - DNA, 19 bp, Homo sapiens
  siRNA target sequence for MCM7 (NM_005916.3,639-657).
ggaacaggtggctctgtat

SEQ ID NO: 31991 - DNA, 19 bp, Homo sapiens
  siRNA target sequence for MCM7 (NM_005916.3,689-707).
ccgagttggtggactcaat

SEQ ID NO: 31992 - DNA, 19 bp, Homo sapiens
  siRNA target sequence for MCM7 (NM_005916.3,690-708).
cgagttggtggactcaatt

SEQ ID NO: 31993 - DNA, 19 bp, Homo sapiens
  siRNA target sequence for MCM7 (NM_005916.3,693-711).
gttggtggactcaatttgt

SEQ ID NO: 31994 - DNA, 19 bp, Homo sapiens
  siRNA target sequence for MCM7 (NM_005916.3,699-717).
ggactcaatttgtgagaat

SEQ ID NO: 31995 - DNA, 19 bp, Homo sapiens
  siRNA target sequence for MCM7 (NM_005916.3,799-817).
gatgtcctggacgtttaca

SEQ ID NO: 31996 - DNA, 19 bp, Homo sapiens
  siRNA target sequence for MCM7 (NM_005916.3,904-922).
cgcagatttgagctgtatt

SEQ ID NO: 31997 - DNA, 19 bp, Homo sapiens
  siRNA target sequence for MCM7 (NM_005916.3,1041-1059).
ggtggtggccacttacact

SEQ ID NO: 31998 - DNA, 19 bp, Homo sapiens
  siRNA target sequence for MCM7 (NM_005916.3,1042-1060).
gtggtggccacttacactt

SEQ ID NO: 31999 - DNA, 19 bp, Homo sapiens
  siRNA target sequence for MCM7 (NM_005916.3,1183-1201).
cggggctccagattcatca

SEQ ID NO: 32000 - DNA, 19 bp, Homo sapiens
  siRNA target sequence for MCM7 (NM_005916.3,1184-1202).
ggggctccagattcatcaa

SEQ ID NO: 32001 - DNA, 19 bp, Homo sapiens
  siRNA target sequence for MCM7 (NM_005916.3,1185-1203).
gggctccagattcatcaaa

SEQ ID NO: 32002 - DNA, 19 bp, Homo sapiens
  siRNA target sequence for MCM7 (NM_005916.3,1218-1236).
gatgcaagaacatagtgat

SEQ ID NO: 32003 - DNA, 19 bp, Homo sapiens
  siRNA target sequence for MCM7 (NM_005916.3,1250-1268).
gaaatatccctcgtagtat

SEQ ID NO: 32004 - DNA, 19 bp, Homo sapiens
  siRNA target sequence for MCM7 (NM_005916.3,1320-1338).
cgtcagcgtcactggtatt

SEQ ID NO: 32005 - DNA, 19 bp, Homo sapiens
  siRNA target sequence for MCM7 (NM_005916.3,1321-1339).
gtcagcgtcactggtattt

SEQ ID NO: 32006 - DNA, 19 bp, Homo sapiens
  siRNA target sequence for MCM7 (NM_005916.3,1372-1390).
gtggtacagggtttactct

SEQ ID NO: 32007 - DNA, 19 bp, Homo sapiens
  siRNA target sequence for MCM7 (NM_005916.3,1378-1396).
cagggtttactctcagaaa

SEQ ID NO: 32008 - DNA, 19 bp, Homo sapiens
  siRNA target sequence for MCM7 (NM_005916.3,1382-1400).
gtttactctcagaaaccta

SEQ ID NO: 32009 - DNA, 19 bp, Homo sapiens
  siRNA target sequence for MCM7 (NM_005916.3,1523-1541).
cttcaatcgccccagaaat

SEQ ID NO: 32010 - DNA, 19 bp, Homo sapiens
  siRNA target sequence for MCM7 (NM_005916.3,1526-1544).
caatcgccccagaaatata

SEQ ID NO: 32011 - DNA, 19 bp, Homo sapiens
  siRNA target sequence for MCM7 (NM_005916.3,1602-1620).
gtctcctcgaggcatgaaa

SEQ ID NO: 32012 - DNA, 19 bp, Homo sapiens
  siRNA target sequence for MCM7 (NM_005916.3,1604-1622).
ctcctcgaggcatgaaaat

SEQ ID NO: 32013 - DNA, 19 bp, Homo sapiens
  siRNA target sequence for MCM7 (NM_005916.3,1673-1691).
ctcagctcctgtcatacat

SEQ ID NO: 32014 - DNA, 19 bp, Homo sapiens
  siRNA target sequence for MCM7 (NM_005916.3,1705-1723).
cctcgcagccagtacacaa

SEQ ID NO: 32015 - DNA, 19 bp, Homo sapiens
  siRNA target sequence for MCM7 (NM_005916.3,1929-1947).
cattctcaccacactcaat

SEQ ID NO: 32016 - DNA, 19 bp, Homo sapiens
  siRNA target sequence for MCM7 (NM_005916.3,2009-2027).
gcctggagcagaacataca

SEQ ID NO: 32017 - DNA, 19 bp, Homo sapiens
  siRNA target sequence for MCM7 (NM_005916.3,2279-2297).
gagaggcttgggctagtaa

SEQ ID NO: 32018 - DNA, 19 bp, Homo sapiens
  siRNA target sequence for MCM7 (NM_005916.3,2283-2301).
ggcttgggctagtaaggat

SEQ ID NO: 32019 - DNA, 19 bp, Homo sapiens
  siRNA target sequence for MCM7 (NM_005916.3,2427-2445).
gtcaaaggactctcttcta

SEQ ID NO: 32020 - DNA, 19 bp, Homo sapiens
  siRNA target sequence for MCM7 (NM_005916.3,2477-2495).
gaccagcagatgtgatatt

SEQ ID NO: 32021 - DNA, 19 bp, Homo sapiens
  siRNA target sequence for MCM7 (NM_005916.3,2593-2611).
caggcggctctggatgaat

SEQ ID NO: 32022 - DNA, 19 bp, Homo sapiens
  siRNA target sequence for MCM7 (NM_005916.3,2595-2613).
ggcggctctggatgaatat

SEQ ID NO: 32023 - DNA, 19 bp, Homo sapiens
  siRNA target sequence for MCM7 (NM_005916.3,2597-2615).
cggctctggatgaatatga

SEQ ID NO: 32024 - DNA, 19 bp, Homo sapiens
  siRNA target sequence for MCM7 (NM_005916.3,2645-2663).
cccggacacggatcacttt

SEQ ID NO: 32025 - DNA, 19 bp, Homo sapiens
  siRNA target sequence for MCM7 (NM_005916.3,2646-2664).
ccggacacggatcactttt

SEQ ID NO: 32026 - DNA, 19 bp, Homo sapiens
  siRNA target sequence for MCM8 (NM_032485.4,389-407).
gtatagaggcagaggattt

SEQ ID NO: 32027 - DNA, 19 bp, Homo sapiens
  siRNA target sequence for MCM8 (NM_032485.4,577-595).
caacattggatcgattcat

SEQ ID NO: 32028 - DNA, 19 bp, Homo sapiens
  siRNA target sequence for MCM8 (NM_032485.4,584-602).
ggatcgattcataccatat

SEQ ID NO: 32029 - DNA, 19 bp, Homo sapiens
  siRNA target sequence for MCM8 (NM_032485.4,585-603).
gatcgattcataccatata

SEQ ID NO: 32030 - DNA, 19 bp, Homo sapiens
  siRNA target sequence for MCM8 (NM_032485.4,606-624).
ggctggaagctttatttct

SEQ ID NO: 32031 - DNA, 19 bp, Homo sapiens
  siRNA target sequence for MCM8 (NM_032485.4,637-655).
gcgatagctctcctttgat

SEQ ID NO: 32032 - DNA, 19 bp, Homo sapiens
  siRNA target sequence for MCM8 (NM_032485.4,638-656).
cgatagctctcctttgatt

SEQ ID NO: 32033 - DNA, 19 bp, Homo sapiens
  siRNA target sequence for MCM8 (NM_032485.4,646-664).
ctcctttgattgagaagat

SEQ ID NO: 32034 - DNA, 19 bp, Homo sapiens
  siRNA target sequence for MCM8 (NM_032485.4,691-709).
ggcatattgatttgtatga

SEQ ID NO: 32035 - DNA, 19 bp, Homo sapiens
  siRNA target sequence for MCM8 (NM_032485.4,765-783).
gaaggtggtgaagtaacta

SEQ ID NO: 32036 - DNA, 19 bp, Homo sapiens
  siRNA target sequence for MCM8 (NM_032485.4,768-786).
ggtggtgaagtaactaact

SEQ ID NO: 32037 - DNA, 19 bp, Homo sapiens
  siRNA target sequence for MCM8 (NM_032485.4,769-787).
gtggtgaagtaactaactt

SEQ ID NO: 32038 - DNA, 19 bp, Homo sapiens
  siRNA target sequence for MCM8 (NM_032485.4,781-799).
ctaacttgataccagatat

SEQ ID NO: 32039 - DNA, 19 bp, Homo sapiens
  siRNA target sequence for MCM8 (NM_032485.4,795-813).
gatatagcaactgaactaa

SEQ ID NO: 32040 - DNA, 19 bp, Homo sapiens
  siRNA target sequence for MCM8 (NM_032485.4,841-859).
gcatgggtttggcaataca

SEQ ID NO: 32041 - DNA, 19 bp, Homo sapiens
  siRNA target sequence for MCM8 (NM_032485.4,842-860).
catgggtttggcaatacat

SEQ ID NO: 32042 - DNA, 19 bp, Homo sapiens
  siRNA target sequence for MCM8 (NM_032485.4,852-870).
gcaatacatcaggtgttaa

SEQ ID NO: 32043 - DNA, 19 bp, Homo sapiens
  siRNA target sequence for MCM8 (NM_032485.4,886-904).
ggcatgcagctgagttaca

SEQ ID NO: 32044 - DNA, 19 bp, Homo sapiens
  siRNA target sequence for MCM8 (NM_032485.4,906-924).
gcccaggaaggattgtcta

SEQ ID NO: 32045 - DNA, 19 bp, Homo sapiens
  siRNA target sequence for MCM8 (NM_032485.4,960-978).
catgcaagggtgtacaact

SEQ ID NO: 32046 - DNA, 19 bp, Homo sapiens
  siRNA target sequence for MCM8 (NM_032485.4,1009-1027).
gagcaaattactatggaaa

SEQ ID NO: 32047 - DNA, 19 bp, Homo sapiens
  siRNA target sequence for MCM8 (NM_032485.4,1052-1070).
ggttcgtgtcagtaatata

SEQ ID NO: 32048 - DNA, 19 bp, Homo sapiens
  siRNA target sequence for MCM8 (NM_032485.4,1053-1071).
gttcgtgtcagtaatataa

SEQ ID NO: 32049 - DNA, 19 bp, Homo sapiens
  siRNA target sequence for MCM8 (NM_032485.4,1082-1100).
caccaagatggcttttctt

SEQ ID NO: 32050 - DNA, 19 bp, Homo sapiens
  siRNA target sequence for MCM8 (NM_032485.4,1132-1150).
ctcttccagatggaaaata

SEQ ID NO: 32051 - DNA, 19 bp, Homo sapiens
  siRNA target sequence for MCM8 (NM_032485.4,1181-1199).
gtgtcgaggcaggtcattt

SEQ ID NO: 32052 - DNA, 19 bp, Homo sapiens
  siRNA target sequence for MCM8 (NM_032485.4,1216-1234).
ctcctctcacagttacgat

SEQ ID NO: 32053 - DNA, 19 bp, Homo sapiens
  siRNA target sequence for MCM8 (NM_032485.4,1231-1249).
cgatggactggcagtcaat

SEQ ID NO: 32054 - DNA, 19 bp, Homo sapiens
  siRNA target sequence for MCM8 (NM_032485.4,1291-1309).
gtcggattccacgaacaat

SEQ ID NO: 32055 - DNA, 19 bp, Homo sapiens
  siRNA target sequence for MCM8 (NM_032485.4,1294-1312).
ggattccacgaacaataga

SEQ ID NO: 32056 - DNA, 19 bp, Homo sapiens
  siRNA target sequence for MCM8 (NM_032485.4,1300-1318).
cacgaacaatagaatgtga

SEQ ID NO: 32057 - DNA, 19 bp, Homo sapiens
  siRNA target sequence for MCM8 (NM_032485.4,1351-1369).
cgggagacacagtgactat

SEQ ID NO: 32058 - DNA, 19 bp, Homo sapiens
  siRNA target sequence for MCM8 (NM_032485.4,1353-1371).
ggagacacagtgactatta

SEQ ID NO: 32059 - DNA, 19 bp, Homo sapiens
  siRNA target sequence for MCM8 (NM_032485.4,1366-1384).
ctattactggaattgtcaa

SEQ ID NO: 32060 - DNA, 19 bp, Homo sapiens
  siRNA target sequence for MCM8 (NM_032485.4,1375-1393).
gaattgtcaaagtctcaaa

SEQ ID NO: 32061 - DNA, 19 bp, Homo sapiens
  siRNA target sequence for MCM8 (NM_032485.4,1504-1522).
ggtgtaagcatggaatgtt

SEQ ID NO: 32062 - DNA, 19 bp, Homo sapiens
  siRNA target sequence for MCM8 (NM_032485.4,1507-1525).
gtaagcatggaatgttgat

SEQ ID NO: 32063 - DNA, 19 bp, Homo sapiens
  siRNA target sequence for MCM8 (NM_032485.4,1569-1587).
gctgaagaaaacctgttta

SEQ ID NO: 32064 - DNA, 19 bp, Homo sapiens
  siRNA target sequence for MCM8 (NM_032485.4,1601-1619).
ctcgctttgccctgtcatt

SEQ ID NO: 32065 - DNA, 19 bp, Homo sapiens
  siRNA target sequence for MCM8 (NM_032485.4,1603-1621).
cgctttgccctgtcatttt

SEQ ID NO: 32066 - DNA, 19 bp, Homo sapiens
  siRNA target sequence for MCM8 (NM_032485.4,1789-1807).
ccccacgtggcgtgtatgt

SEQ ID NO: 32067 - DNA, 19 bp, Homo sapiens
  siRNA target sequence for MCM8 (NM_032485.4,1791-1809).
ccacgtggcgtgtatgttt

SEQ ID NO: 32068 - DNA, 19 bp, Homo sapiens
  siRNA target sequence for MCM8 (NM_032485.4,1831-1849).
ctggtctgacggtaactct

SEQ ID NO: 32069 - DNA, 19 bp, Homo sapiens
  siRNA target sequence for MCM8 (NM_032485.4,1833-1851).
ggtctgacggtaactcttt

SEQ ID NO: 32070 - DNA, 19 bp, Homo sapiens
  siRNA target sequence for MCM8 (NM_032485.4,1836-1854).
ctgacggtaactctttcaa

SEQ ID NO: 32071 - DNA, 19 bp, Homo sapiens
  siRNA target sequence for MCM8 (NM_032485.4,1838-1856).
gacggtaactctttcaaaa

SEQ ID NO: 32072 - DNA, 19 bp, Homo sapiens
  siRNA target sequence for MCM8 (NM_032485.4,1921-1939).
gtggaatcgatgaatttga

SEQ ID NO: 32073 - DNA, 19 bp, Homo sapiens
  siRNA target sequence for MCM8 (NM_032485.4,1923-1941).
ggaatcgatgaatttgata

SEQ ID NO: 32074 - DNA, 19 bp, Homo sapiens
  siRNA target sequence for MCM8 (NM_032485.4,1943-1961).
gatggggaatcaacatcaa

SEQ ID NO: 32075 - DNA, 19 bp, Homo sapiens
  siRNA target sequence for MCM8 (NM_032485.4,1979-1997).
ggagcagcaaagtattagt

SEQ ID NO: 32076 - DNA, 19 bp, Homo sapiens
  siRNA target sequence for MCM8 (NM_032485.4,1982-2000).
gcagcaaagtattagtctt

SEQ ID NO: 32077 - DNA, 19 bp, Homo sapiens
  siRNA target sequence for MCM8 (NM_032485.4,2028-2046).
cctgcaagaacttccatta

SEQ ID NO: 32078 - DNA, 19 bp, Homo sapiens
  siRNA target sequence for MCM8 (NM_032485.4,2144-2162).
ggtctttatcctgttagat

SEQ ID NO: 32079 - DNA, 19 bp, Homo sapiens
  siRNA target sequence for MCM8 (NM_032485.4,2167-2185).
caaatgagcatcatgatca

SEQ ID NO: 32080 - DNA, 19 bp, Homo sapiens
  siRNA target sequence for MCM8 (NM_032485.4,2196-2214).
gaacatgtgattgcaataa

SEQ ID NO: 32081 - DNA, 19 bp, Homo sapiens
  siRNA target sequence for MCM8 (NM_032485.4,2245-2263).
ccacagtagctcgtatgaa

SEQ ID NO: 32082 - DNA, 19 bp, Homo sapiens
  siRNA target sequence for MCM8 (NM_032485.4,2246-2264).
cacagtagctcgtatgaat

SEQ ID NO: 32083 - DNA, 19 bp, Homo sapiens
  siRNA target sequence for MCM8 (NM_032485.4,2256-2274).
cgtatgaatagtcaagatt

SEQ ID NO: 32084 - DNA, 19 bp, Homo sapiens
  siRNA target sequence for MCM8 (NM_032485.4,2275-2293).
caaatacttccgtacttga

SEQ ID NO: 32085 - DNA, 19 bp, Homo sapiens
  siRNA target sequence for MCM8 (NM_032485.4,2281-2299).
cttccgtacttgaagtagt

SEQ ID NO: 32086 - DNA, 19 bp, Homo sapiens
  siRNA target sequence for MCM8 (NM_032485.4,2285-2303).
cgtacttgaagtagtttct

SEQ ID NO: 32087 - DNA, 19 bp, Homo sapiens
  siRNA target sequence for MCM8 (NM_032485.4,2356-2374).
ccattccccaccagctatt

SEQ ID NO: 32088 - DNA, 19 bp, Homo sapiens
  siRNA target sequence for MCM8 (NM_032485.4,2389-2407).
gctatgctcggcagtatgt

SEQ ID NO: 32089 - DNA, 19 bp, Homo sapiens
  siRNA target sequence for MCM8 (NM_032485.4,2541-2559).
gcacgagcaaggttggaat

SEQ ID NO: 32090 - DNA, 19 bp, Homo sapiens
  siRNA target sequence for MCM8 (NM_032485.4,2542-2560).
cacgagcaaggttggaatt

SEQ ID NO: 32091 - DNA, 19 bp, Homo sapiens
  siRNA target sequence for MCM8 (NM_032485.4,2544-2562).
cgagcaaggttggaattga

SEQ ID NO: 32092 - DNA, 19 bp, Homo sapiens
  siRNA target sequence for MCM8 (NM_032485.4,2693-2711).
caggtcaacagcgaaaaga

SEQ ID NO: 32093 - DNA, 19 bp, Homo sapiens
  siRNA target sequence for MCM8 (NM_032485.4,2695-2713).
ggtcaacagcgaaaagatt

SEQ ID NO: 32094 - DNA, 19 bp, Homo sapiens
  siRNA target sequence for MCM8 (NM_032485.4,2726-2744).
caacaacgttgctgaaaga

SEQ ID NO: 32095 - DNA, 19 bp, Homo sapiens
  siRNA target sequence for MCM8 (NM_032485.4,2729-2747).
caacgttgctgaaagaact

SEQ ID NO: 32096 - DNA, 19 bp, Homo sapiens
  siRNA target sequence for MCM8 (NM_032485.4,2732-2750).
cgttgctgaaagaacttat

SEQ ID NO: 32097 - DNA, 19 bp, Homo sapiens
  siRNA target sequence for MCM8 (NM_032485.4,2801-2819).
cattcaggttgctgatttt

SEQ ID NO: 32098 - DNA, 19 bp, Homo sapiens
  siRNA target sequence for MCM8 (NM_032485.4,2877-2895).
gtttaccagcttcaaacta

SEQ ID NO: 32099 - DNA, 19 bp, Homo sapiens
  siRNA target sequence for MCM8 (NM_182802.1,1450-1468).
cggaagaagcaaattctat

SEQ ID NO: 32100 - DNA, 19 bp, Homo sapiens
  siRNA target sequence for MCMDC1 (NM_153255.2,242-260).
gaatagcgatcaagttaca

SEQ ID NO: 32101 - DNA, 19 bp, Homo sapiens
  siRNA target sequence for MCMDC1 (NM_153255.2,268-286).
gtcaagtgtttgagtcata

SEQ ID NO: 32102 - DNA, 19 bp, Homo sapiens
  siRNA target sequence for MCMDC1 (NM_153255.2,288-306).
gtttcggaataccataaga

SEQ ID NO: 32103 - DNA, 19 bp, Homo sapiens
  siRNA target sequence for MCMDC1 (NM_153255.2,292-310).
cggaataccataagaatga

SEQ ID NO: 32104 - DNA, 19 bp, Homo sapiens
  siRNA target sequence for MCMDC1 (NM_153255.2,309-327).
gatattcttctaatcttga

SEQ ID NO: 32105 - DNA, 19 bp, Homo sapiens
  siRNA target sequence for MCMDC1 (NM_153255.2,396-414).
gaaatcggggaatatttca

SEQ ID NO: 32106 - DNA, 19 bp, Homo sapiens
  siRNA target sequence for MCMDC1 (NM_153255.2,423-441).
cccagtgaagtgcttacaa

SEQ ID NO: 32107 - DNA, 19 bp, Homo sapiens
  siRNA target sequence for MCMDC1 (NM_153255.2,424-442).
ccagtgaagtgcttacaat

SEQ ID NO: 32108 - DNA, 19 bp, Homo sapiens
  siRNA target sequence for MCMDC1 (NM_153255.2,511-529).
ccatgaaacagaatcttca

SEQ ID NO: 32109 - DNA, 19 bp, Homo sapiens
  siRNA target sequence for MCMDC1 (NM_153255.2,512-530).
catgaaacagaatcttcat

SEQ ID NO: 32110 - DNA, 19 bp, Homo sapiens
  siRNA target sequence for MCMDC1 (NM_153255.2,563-581).
gctggtgagggaacacata

SEQ ID NO: 32111 - DNA, 19 bp, Homo sapiens
  siRNA target sequence for MCMDC1 (NM_153255.2,567-585).
gtgagggaacacataccta

SEQ ID NO: 32112 - DNA, 19 bp, Homo sapiens
  siRNA target sequence for MCMDC1 (NM_153255.2,569-587).
gagggaacacatacctaaa

SEQ ID NO: 32113 - DNA, 19 bp, Homo sapiens
  siRNA target sequence for MCMDC1 (NM_153255.2,590-608).
caaggatgtgggacacttt

SEQ ID NO: 32114 - DNA, 19 bp, Homo sapiens
  siRNA target sequence for MCMDC1 (NM_153255.2,623-641).
gacagtgattcgaacaagt

SEQ ID NO: 32115 - DNA, 19 bp, Homo sapiens
  siRNA target sequence for MCMDC1 (NM_153255.2,663-681).
gagcgggattacatgtgta

SEQ ID NO: 32116 - DNA, 19 bp, Homo sapiens
  siRNA target sequence for MCMDC1 (NM_153255.2,666-684).
cgggattacatgtgtaaca

SEQ ID NO: 32117 - DNA, 19 bp, Homo sapiens
  siRNA target sequence for MCMDC1 (NM_153255.2,667-685).
gggattacatgtgtaacaa

SEQ ID NO: 32118 - DNA, 19 bp, Homo sapiens
  siRNA target sequence for MCMDC1 (NM_153255.2,769-787).
gctgtgattcctctaaatt

SEQ ID NO: 32119 - DNA, 19 bp, Homo sapiens
  siRNA target sequence for MCMDC1 (NM_153255.2,774-792).
gattcctctaaattcactt

SEQ ID NO: 32120 - DNA, 19 bp, Homo sapiens
  siRNA target sequence for MCMDC1 (NM_153255.2,816-834).
ccaaccaggtgtagagatt

SEQ ID NO: 32121 - DNA, 19 bp, Homo sapiens
  siRNA target sequence for MCMDC1 (NM_153255.2,817-835).
caaccaggtgtagagatta

SEQ ID NO: 32122 - DNA, 19 bp, Homo sapiens
  siRNA target sequence for MCMDC1 (NM_153255.2,820-838).
ccaggtgtagagattacca

SEQ ID NO: 32123 - DNA, 19 bp, Homo sapiens
  siRNA target sequence for MCMDC1 (NM_153255.2,826-844).
gtagagattaccaggaaat

SEQ ID NO: 32124 - DNA, 19 bp, Homo sapiens
  siRNA target sequence for MCMDC1 (NM_153255.2,829-847).
gagattaccaggaaatcaa

SEQ ID NO: 32125 - DNA, 19 bp, Homo sapiens
  siRNA target sequence for MCMDC1 (NM_153255.2,831-849).
gattaccaggaaatcaaaa

SEQ ID NO: 32126 - DNA, 19 bp, Homo sapiens
  siRNA target sequence for MCMDC1 (NM_153255.2,860-878).
ggttcaaaggctatctgtt

SEQ ID NO: 32127 - DNA, 19 bp, Homo sapiens
  siRNA target sequence for MCMDC1 (NM_153255.2,883-901).
gtattccacgatctatgaa

SEQ ID NO: 32128 - DNA, 19 bp, Homo sapiens
  siRNA target sequence for MCMDC1 (NM_153255.2,889-907).
cacgatctatgaaggttat

SEQ ID NO: 32129 - DNA, 19 bp, Homo sapiens
  siRNA target sequence for MCMDC1 (NM_153255.2,915-933).
gatgacttagtggatagtt

SEQ ID NO: 32130 - DNA, 19 bp, Homo sapiens
  siRNA target sequence for MCMDC1 (NM_153255.2,942-960).
ggtgatgacctcactattt

SEQ ID NO: 32131 - DNA, 19 bp, Homo sapiens
  siRNA target sequence for MCMDC1 (NM_153255.2,953-971).
cactatttacgggattgta

SEQ ID NO: 32132 - DNA, 19 bp, Homo sapiens
  siRNA target sequence for MCMDC1 (NM_153255.2,1032-1050).
gcaaattacatccaagtaa

SEQ ID NO: 32133 - DNA, 19 bp, Homo sapiens
  siRNA target sequence for MCMDC1 (NM_153255.2,1088-1106).
ggtccaaaaggaattcgaa

SEQ ID NO: 32134 - DNA, 19 bp, Homo sapiens
  siRNA target sequence for MCMDC1 (NM_153255.2,1165-1183).
gcttgtgccctcaagtgtt

SEQ ID NO: 32135 - DNA, 19 bp, Homo sapiens
  siRNA target sequence for MCMDC1 (NM_153255.2,1181-1199).
gtttggaatgtatctagta

SEQ ID NO: 32136 - DNA, 19 bp, Homo sapiens
  siRNA target sequence for MCMDC1 (NM_153255.2,1221-1239).
ctggctggtgggattcaaa

SEQ ID NO: 32137 - DNA, 19 bp, Homo sapiens
  siRNA target sequence for MCMDC1 (NM_153255.2,1261-1279).
gggtcagaggagaatctca

SEQ ID NO: 32138 - DNA, 19 bp, Homo sapiens
  siRNA target sequence for MCMDC1 (NM_153255.2,1262-1280).
ggtcagaggagaatctcat

SEQ ID NO: 32139 - DNA, 19 bp, Homo sapiens
  siRNA target sequence for MCMDC1 (NM_153255.2,1364-1382).
cacaggaattggatctact

SEQ ID NO: 32140 - DNA, 19 bp, Homo sapiens
  siRNA target sequence for MCMDC1 (NM_153255.2,1378-1396).
ctactagtgcaggtattgt

SEQ ID NO: 32141 - DNA, 19 bp, Homo sapiens
  siRNA target sequence for MCMDC1 (NM_153255.2,1384-1402).
gtgcaggtattgtatgtga

SEQ ID NO: 32142 - DNA, 19 bp, Homo sapiens
  siRNA target sequence for MECP2 (NM_004992.2,233-251).
ggacaaacccctcaagttt

SEQ ID NO: 32143 - DNA, 19 bp, Homo sapiens
  siRNA target sequence for MECP2 (NM_004992.2,234-252).
gacaaacccctcaagttta

SEQ ID NO: 32144 - DNA, 19 bp, Homo sapiens
  siRNA target sequence for MECP2 (NM_004992.2,474-492).
ggctggacacggaagctta

SEQ ID NO: 32145 - DNA, 19 bp, Homo sapiens
  siRNA target sequence for MECP2 (NM_004992.2,475-493).
gctggacacggaagcttaa

SEQ ID NO: 32146 - DNA, 19 bp, Homo sapiens
  siRNA target sequence for MECP2 (NM_004992.2,479-497).
gacacggaagcttaagcaa

SEQ ID NO: 32147 - DNA, 19 bp, Homo sapiens
  siRNA target sequence for MECP2 (NM_004992.2,488-506).
gcttaagcaaaggaaatct

SEQ ID NO: 32148 - DNA, 19 bp, Homo sapiens
  siRNA target sequence for MECP2 (NM_004992.2,511-529).
gctctgctgggaagtatga

SEQ ID NO: 32149 - DNA, 19 bp, Homo sapiens
  siRNA target sequence for MECP2 (NM_004992.2,517-535).
ctgggaagtatgatgtgta

SEQ ID NO: 32150 - DNA, 19 bp, Homo sapiens
  siRNA target sequence for MECP2 (NM_004992.2,519-537).
gggaagtatgatgtgtatt

SEQ ID NO: 32151 - DNA, 19 bp, Homo sapiens
  siRNA target sequence for MECP2 (NM_004992.2,565-583).
gctctaaagtggagttgat

SEQ ID NO: 32152 - DNA, 19 bp, Homo sapiens
  siRNA target sequence for MECP2 (NM_004992.2,610-628).
catccctggaccctaatga

SEQ ID NO: 32153 - DNA, 19 bp, Homo sapiens
  siRNA target sequence for MECP2 (NM_004992.2,613-631).
ccctggaccctaatgattt

SEQ ID NO: 32154 - DNA, 19 bp, Homo sapiens
  siRNA target sequence for MECP2 (NM_004992.2,820-838).
ggaagctccttgtcaagat

SEQ ID NO: 32155 - DNA, 19 bp, Homo sapiens
  siRNA target sequence for MECP2 (NM_004992.2,896-914).
ccaggtcatggtgatcaaa

SEQ ID NO: 32156 - DNA, 19 bp, Homo sapiens
  siRNA target sequence for MECP2 (NM_004992.2,1189-1207).
gccctgggcggaaaagcaa

SEQ ID NO: 32157 - DNA, 19 bp, Homo sapiens
  siRNA target sequence for MECP2 (NM_004992.2,1504-1522).
ccgcagaaaagtacaaaca

SEQ ID NO: 32158 - DNA, 19 bp, Homo sapiens
  siRNA target sequence for MECP2 (NM_004992.2,1530-1548).
gagggagagcgcaaagaca

SEQ ID NO: 32159 - DNA, 19 bp, Homo sapiens
  siRNA target sequence for MECP2 (NM_004992.2,1534-1552).
gagagcgcaaagacattgt

SEQ ID NO: 32160 - DNA, 19 bp, Homo sapiens
  siRNA target sequence for MECP2 (NM_004992.2,1605-1623).
cccgtgaccgagagagtta

SEQ ID NO: 32161 - DNA, 19 bp, Homo sapiens
  siRNA target sequence for MGC23143 (NM_153219.1,104-122).
gaaacctctggccttatct

SEQ ID NO: 32162 - DNA, 19 bp, Homo sapiens
  siRNA target sequence for MGC23143 (NM_153219.1,656-674).
ctgccggctgcgctttaca

SEQ ID NO: 32163 - DNA, 19 bp, Homo sapiens
  siRNA target sequence for MGC23143 (NM_153219.1,658-676).
gccggctgcgctttacaga

SEQ ID NO: 32164 - DNA, 19 bp, Homo sapiens
  siRNA target sequence for MGC23920 (NM_173825.1,78-96).
ccatctcctatgccaaaat

SEQ ID NO: 32165 - DNA, 19 bp, Homo sapiens
  siRNA target sequence for MGC23920 (NM_173825.1,248-266).
caagagcagtattctacaa

SEQ ID NO: 32166 - DNA, 19 bp, Homo sapiens
  siRNA target sequence for MGC23920 (NM_173825.1,261-279).
ctacaactccgtaaatggt

SEQ ID NO: 32167 - DNA, 19 bp, Homo sapiens
  siRNA target sequence for MGC23920 (NM_173825.1,264-282).
caactccgtaaatggtatt

SEQ ID NO: 32168 - DNA, 19 bp, Homo sapiens
  siRNA target sequence for MGC23920 (NM_173825.1,288-306).
cgtacacgacttaacaaat

SEQ ID NO: 32169 - DNA, 19 bp, Homo sapiens
  siRNA target sequence for MGC23920 (NM_173825.1,289-307).
gtacacgacttaacaaata

SEQ ID NO: 32170 - DNA, 19 bp, Homo sapiens
  siRNA target sequence for MGC23920 (NM_173825.1,292-310).
cacgacttaacaaataaga

SEQ ID NO: 32171 - DNA, 19 bp, Homo sapiens
  siRNA target sequence for MGC23920 (NM_173825.1,327-345).
gcgtcgttggtcattggaa

SEQ ID NO: 32172 - DNA, 19 bp, Homo sapiens
  siRNA target sequence for MGC23920 (NM_173825.1,347-365).
ctctcaacagggatttggt

SEQ ID NO: 32173 - DNA, 19 bp, Homo sapiens
  siRNA target sequence for MGC23920 (NM_173825.1,392-410).
gggattatgatcaagaaca

SEQ ID NO: 32174 - DNA, 19 bp, Homo sapiens
  siRNA target sequence for MGC23920 (NM_173825.1,435-453).
gttggtaatagggactaaa

SEQ ID NO: 32175 - DNA, 19 bp, Homo sapiens
  siRNA target sequence for MGC23920 (NM_173825.1,457-475).
gaccagattcatgaaacaa

SEQ ID NO: 32176 - DNA, 19 bp, Homo sapiens
  siRNA target sequence for MGC23920 (NM_173825.1,477-495).
gcgccatgaagttttaact

SEQ ID NO: 32177 - DNA, 19 bp, Homo sapiens
  siRNA target sequence for MGC23920 (NM_173825.1,478-496).
cgccatgaagttttaacta

SEQ ID NO: 32178 - DNA, 19 bp, Homo sapiens
  siRNA target sequence for MGC23920 (NM_173825.1,549-567).
cacaaatccacggtactta

SEQ ID NO: 32179 - DNA, 19 bp, Homo sapiens
  siRNA target sequence for MGC23920 (NM_173825.1,594-612).
gctcagtaggttttttgat

SEQ ID NO: 32180 - DNA, 19 bp, Homo sapiens
  siRNA target sequence for MGC23920 (NM_173825.1,595-613).
ctcagtaggttttttgata

SEQ ID NO: 32181 - DNA, 19 bp, Homo sapiens
  siRNA target sequence for MGC23920 (NM_173825.1,599-617).
gtaggttttttgataaggt

SEQ ID NO: 32182 - DNA, 19 bp, Homo sapiens
  siRNA target sequence for MGC2941 (NM_024297.1,244-262).
gagaaacggcggagaacaa

SEQ ID NO: 32183 - DNA, 19 bp, Homo sapiens
  siRNA target sequence for MGC2941 (NM_024297.1,428-446).
ccatccagacttttgttaa

SEQ ID NO: 32184 - DNA, 19 bp, Homo sapiens
  siRNA target sequence for MGC2941 (NM_024297.1,622-640).
cccacatccctgacacata

SEQ ID NO: 32185 - DNA, 19 bp, Homo sapiens
  siRNA target sequence for MGC2941 (NM_024297.1,824-842).
gcaagaagcggaagttaaa

SEQ ID NO: 32186 - DNA, 19 bp, Homo sapiens
  siRNA target sequence for MGC2941 (NM_024297.1,825-843).
caagaagcggaagttaaaa

SEQ ID NO: 32187 - DNA, 19 bp, Homo sapiens
  siRNA target sequence for MGC29463 (NM_152686.1,43-61).
gctggacggaagcttacat

SEQ ID NO: 32188 - DNA, 19 bp, Homo sapiens
  siRNA target sequence for MGC29463 (NM_152686.1,231-249).
ggggtacaaaggatcaaga

SEQ ID NO: 32189 - DNA, 19 bp, Homo sapiens
  siRNA target sequence for MGC29463 (NM_152686.1,232-250).
gggtacaaaggatcaagaa

SEQ ID NO: 32190 - DNA, 19 bp, Homo sapiens
  siRNA target sequence for MGC29463 (NM_152686.1,292-310).
ctagtgacgaagagcttaa

SEQ ID NO: 32191 - DNA, 19 bp, Homo sapiens
  siRNA target sequence for MGC29463 (NM_152686.1,477-495).
cctcgagccagaccttata

SEQ ID NO: 32192 - DNA, 19 bp, Homo sapiens
  siRNA target sequence for MGC29463 (NM_152686.1,478-496).
ctcgagccagaccttataa

SEQ ID NO: 32193 - DNA, 19 bp, Homo sapiens
  siRNA target sequence for MGC29463 (NM_152686.1,480-498).
cgagccagaccttataatt

SEQ ID NO: 32194 - DNA, 19 bp, Homo sapiens
  siRNA target sequence for MGC29463 (NM_152686.1,483-501).
gccagaccttataattatt

SEQ ID NO: 32195 - DNA, 19 bp, Homo sapiens
  siRNA target sequence for MGC29463 (NM_152686.1,484-502).
ccagaccttataattatta

SEQ ID NO: 32196 - DNA, 19 bp, Homo sapiens
  siRNA target sequence for MGC29463 (NM_152686.1,536-554).
gctgttcaacgtcttcttt

SEQ ID NO: 32197 - DNA, 19 bp, Homo sapiens
  siRNA target sequence for MGC29463 (NM_152686.1,674-692).
gaaacctcagactacatat

SEQ ID NO: 32198 - DNA, 19 bp, Homo sapiens
  siRNA target sequence for MGC29463 (NM_152686.1,748-766).
ctcagctgctggctactaa

SEQ ID NO: 32199 - DNA, 19 bp, Homo sapiens
  siRNA target sequence for MGC29463 (NM_152686.1,759-777).
gctactaatcccccatata

SEQ ID NO: 32200 - DNA, 19 bp, Homo sapiens
  siRNA target sequence for MGC29463 (NM_152686.1,769-787).
ccccatatagtctgttcta

SEQ ID NO: 32201 - DNA, 19 bp, Homo sapiens
  siRNA target sequence for MGC29463 (NM_152686.1,770-788).
cccatatagtctgttctat

SEQ ID NO: 32202 - DNA, 19 bp, Homo sapiens
  siRNA target sequence for MGC29463 (NM_152686.1,927-945).
gattatatccagactagtt

SEQ ID NO: 32203 - DNA, 19 bp, Homo sapiens
  siRNA target sequence for MGC29463 (NM_152686.1,979-997).
caaatttggcaggattata

SEQ ID NO: 32204 - DNA, 19 bp, Homo sapiens
  siRNA target sequence for MGC29463 (NM_152686.1,998-1016).
cagagatgaacgattgaaa

SEQ ID NO: 32205 - DNA, 19 bp, Homo sapiens
  siRNA target sequence for MGC29463 (NM_152686.1,1000-1018).
gagatgaacgattgaaaca

SEQ ID NO: 32206 - DNA, 19 bp, Homo sapiens
  siRNA target sequence for MGC29463 (NM_152686.1,1024-1042).
cagagtcgctgaaacttga

SEQ ID NO: 32207 - DNA, 19 bp, Homo sapiens
  siRNA target sequence for MGC33407 (NM_178525.2,195-213).
gtcccaacgtggtgaacaa

SEQ ID NO: 32208 - DNA, 19 bp, Homo sapiens
  siRNA target sequence for MGC33407 (NM_178525.2,358-376).
gggctgccagcccaagaaa

SEQ ID NO: 32209 - DNA, 19 bp, Homo sapiens
  siRNA target sequence for MGC33407 (NM_178525.2,865-883).
ggacctagtggagaacatt

SEQ ID NO: 32210 - DNA, 19 bp, Homo sapiens
  siRNA target sequence for MGC33407 (NM_178525.2,866-884).
gacctagtggagaacatta

SEQ ID NO: 32211 - DNA, 19 bp, Homo sapiens
  siRNA target sequence for MGC33407 (NM_178525.2,1082-1100).
cagagtctccgcaagttgt

SEQ ID NO: 32212 - DNA, 19 bp, Homo sapiens
  siRNA target sequence for MGC33407 (NM_178525.2,1116-1134).
cggacttggcccaaaacgt

SEQ ID NO: 32213 - DNA, 19 bp, Homo sapiens
  siRNA target sequence for MGMT (NM_002412.1,120-138).
gtctgcacgaaataaagct

SEQ ID NO: 32214 - DNA, 19 bp, Homo sapiens
  siRNA target sequence for MGMT (NM_002412.1,373-391).
gatttcttaccagcaatta

SEQ ID NO: 32215 - DNA, 19 bp, Homo sapiens
  siRNA target sequence for MHC2TA (NM_000246.1,273-291).
gtgcctctaccacttctat

SEQ ID NO: 32216 - DNA, 19 bp, Homo sapiens
  siRNA target sequence for MHC2TA (NM_000246.1,275-293).
gcctctaccacttctatga

SEQ ID NO: 32217 - DNA, 19 bp, Homo sapiens
  siRNA target sequence for MHC2TA (NM_000246.1,434-452).
cggaactggaccagtatgt

SEQ ID NO: 32218 - DNA, 19 bp, Homo sapiens
  siRNA target sequence for MHC2TA (NM_000246.1,476-494).
gcctgagcaaggacatttt

SEQ ID NO: 32219 - DNA, 19 bp, Homo sapiens
  siRNA target sequence for MHC2TA (NM_000246.1,478-496).
ctgagcaaggacattttca

SEQ ID NO: 32220 - DNA, 19 bp, Homo sapiens
  siRNA target sequence for MHC2TA (NM_000246.1,695-713).
cactgcctgcgctgttcaa

SEQ ID NO: 32221 - DNA, 19 bp, Homo sapiens
  siRNA target sequence for MHC2TA (NM_000246.1,785-803).
cgttgagctgcctgaatct

SEQ ID NO: 32222 - DNA, 19 bp, Homo sapiens
  siRNA target sequence for MHC2TA (NM_000246.1,850-868).
catgggctctggcaaatct

SEQ ID NO: 32223 - DNA, 19 bp, Homo sapiens
  siRNA target sequence for MHC2TA (NM_000246.1,1368-1386).
gcgtgagacacgagtgatt

SEQ ID NO: 32224 - DNA, 19 bp, Homo sapiens
  siRNA target sequence for MHC2TA (NM_000246.1,1465-1483).
ccccagtacgactttgtct

SEQ ID NO: 32225 - DNA, 19 bp, Homo sapiens
  siRNA target sequence for MHC2TA (NM_000246.1,1487-1505).
ctgtcccctgccattgctt

SEQ ID NO: 32226 - DNA, 19 bp, Homo sapiens
  siRNA target sequence for MHC2TA (NM_000246.1,1812-1830).
caaggccgacgccctattt

SEQ ID NO: 32227 - DNA, 19 bp, Homo sapiens
  siRNA target sequence for MHC2TA (NM_000246.1,2045-2063).
cgctcacgggactctatgt

SEQ ID NO: 32228 - DNA, 19 bp, Homo sapiens
  siRNA target sequence for MHC2TA (NM_000246.1,2305-2323).
gctctgagtggcgaaatca

SEQ ID NO: 32229 - DNA, 19 bp, Homo sapiens
  siRNA target sequence for MHC2TA (NM_000246.1,2306-2324).
ctctgagtggcgaaatcaa

SEQ ID NO: 32230 - DNA, 19 bp, Homo sapiens
  siRNA target sequence for MHC2TA (NM_000246.1,2663-2681).
ctcctgatgcacatgtact

SEQ ID NO: 32231 - DNA, 19 bp, Homo sapiens
  siRNA target sequence for MHC2TA (NM_000246.1,2846-2864).
gggagaccaagctacttca

SEQ ID NO: 32232 - DNA, 19 bp, Homo sapiens
  siRNA target sequence for MHC2TA (NM_000246.1,2993-3011).
ctgctgttcgggacctaaa

SEQ ID NO: 32233 - DNA, 19 bp, Homo sapiens
  siRNA target sequence for MHC2TA (NM_000246.1,3115-3133).
gcgctgagtgagaacaaga

SEQ ID NO: 32234 - DNA, 19 bp, Homo sapiens
  siRNA target sequence for MHC2TA (NM_000246.1,3116-3134).
cgctgagtgagaacaagat

SEQ ID NO: 32235 - DNA, 19 bp, Homo sapiens
  siRNA target sequence for MHC2TA (NM_000246.1,3281-3299).
ggctaagcttgtacaataa

SEQ ID NO: 32236 - DNA, 19 bp, Homo sapiens
  siRNA target sequence for MHC2TA (NM_000246.1,3370-3388).
gacgtccagtacaacaagt

SEQ ID NO: 32237 - DNA, 19 bp, Homo sapiens
  siRNA target sequence for MI-ER1 (NM_020948.1,289-307).
gactcttttcctgtcaaat

SEQ ID NO: 32238 - DNA, 19 bp, Homo sapiens
  siRNA target sequence for MI-ER1 (NM_020948.1,389-407).
gctggttcatgattttgat

SEQ ID NO: 32239 - DNA, 19 bp, Homo sapiens
  siRNA target sequence for MI-ER1 (NM_020948.1,490-508).
gcgacatgccaattcatga

SEQ ID NO: 32240 - DNA, 19 bp, Homo sapiens
  siRNA target sequence for MI-ER1 (NM_020948.1,491-509).
cgacatgccaattcatgaa

SEQ ID NO: 32241 - DNA, 19 bp, Homo sapiens
  siRNA target sequence for MI-ER1 (NM_020948.1,494-512).
catgccaattcatgaactt

SEQ ID NO: 32242 - DNA, 19 bp, Homo sapiens
  siRNA target sequence for MI-ER1 (NM_020948.1,631-649).
gtagtggggaaaataaaga

SEQ ID NO: 32243 - DNA, 19 bp, Homo sapiens
  siRNA target sequence for MI-ER1 (NM_020948.1,698-716).
caatgatgatccatcacaa

SEQ ID NO: 32244 - DNA, 19 bp, Homo sapiens
  siRNA target sequence for MI-ER1 (NM_020948.1,749-767).
ccgcccacgtcgatgtaaa

SEQ ID NO: 32245 - DNA, 19 bp, Homo sapiens
  siRNA target sequence for MI-ER1 (NM_020948.1,750-768).
cgcccacgtcgatgtaaat

SEQ ID NO: 32246 - DNA, 19 bp, Homo sapiens
  siRNA target sequence for MI-ER1 (NM_020948.1,751-769).
gcccacgtcgatgtaaata

SEQ ID NO: 32247 - DNA, 19 bp, Homo sapiens
  siRNA target sequence for MI-ER1 (NM_020948.1,753-771).
ccacgtcgatgtaaatatt

SEQ ID NO: 32248 - DNA, 19 bp, Homo sapiens
  siRNA target sequence for MI-ER1 (NM_020948.1,754-772).
cacgtcgatgtaaatattt

SEQ ID NO: 32249 - DNA, 19 bp, Homo sapiens
  siRNA target sequence for MI-ER1 (NM_020948.1,757-775).
gtcgatgtaaatattttga

SEQ ID NO: 32250 - DNA, 19 bp, Homo sapiens
  siRNA target sequence for MI-ER1 (NM_020948.1,854-872).
ggtgggctccatgtttcaa

SEQ ID NO: 32251 - DNA, 19 bp, Homo sapiens
  siRNA target sequence for MI-ER1 (NM_020948.1,885-903).
gttggcatttgtagataca

SEQ ID NO: 32252 - DNA, 19 bp, Homo sapiens
  siRNA target sequence for MI-ER1 (NM_020948.1,944-962).
gtgggaccctgagtactta

SEQ ID NO: 32253 - DNA, 19 bp, Homo sapiens
  siRNA target sequence for MI-ER1 (NM_020948.1,954-972).
gagtacttaccagaagata

SEQ ID NO: 32254 - DNA, 19 bp, Homo sapiens
  siRNA target sequence for MI-ER1 (NM_020948.1,1019-1037).
gaagggtgtagaagcaatt

SEQ ID NO: 32255 - DNA, 19 bp, Homo sapiens
  siRNA target sequence for MI-ER1 (NM_020948.1,1147-1165).
ctagagaggaattatctgt

SEQ ID NO: 32256 - DNA, 19 bp, Homo sapiens
  siRNA target sequence for MI-ER1 (NM_020948.1,1201-1219).
ggctgaaggcctatggaaa

SEQ ID NO: 32257 - DNA, 19 bp, Homo sapiens
  siRNA target sequence for MI-ER1 (NM_020948.1,1258-1276).
ggtcagttggtgaatgtgt

SEQ ID NO: 32258 - DNA, 19 bp, Homo sapiens
  siRNA target sequence for MI-ER1 (NM_020948.1,1259-1277).
gtcagttggtgaatgtgta

SEQ ID NO: 32259 - DNA, 19 bp, Homo sapiens
  siRNA target sequence for MI-ER1 (NM_020948.1,1326-1344).
cagcaaacacgatttggaa

SEQ ID NO: 32260 - DNA, 19 bp, Homo sapiens
  siRNA target sequence for MI-ER1 (NM_020948.1,1365-1383).
cctggtgtaacggattaca

SEQ ID NO: 32261 - DNA, 19 bp, Homo sapiens
  siRNA target sequence for MI-ER1 (NM_020948.1,1366-1384).
ctggtgtaacggattacat

SEQ ID NO: 32262 - DNA, 19 bp, Homo sapiens
  siRNA target sequence for MI-ER1 (NM_020948.1,1390-1408).
gtcttctagacgaaagtga

SEQ ID NO: 32263 - DNA, 19 bp, Homo sapiens
  siRNA target sequence for MI-ER1 (NM_020948.1,1392-1410).
cttctagacgaaagtgaaa

SEQ ID NO: 32264 - DNA, 19 bp, Homo sapiens
  siRNA target sequence for MI-ER1 (NM_020948.1,1438-1456).
ctcccccaactgcatcaaa

SEQ ID NO: 32265 - DNA, 19 bp, Homo sapiens
  siRNA target sequence for MI-ER1 (NM_020948.1,1443-1461).
ccaactgcatcaaacagta

SEQ ID NO: 32266 - DNA, 19 bp, Homo sapiens
  siRNA target sequence for MI-ER1 (NM_020948.1,1469-1487).
ccagtctgagaaagaagat

SEQ ID NO: 32267 - DNA, 19 bp, Homo sapiens
  siRNA target sequence for MI-ER1 (NM_020948.1,1490-1508).
cactgtaagcactgctaat

SEQ ID NO: 32268 - DNA, 19 bp, Homo sapiens
  siRNA target sequence for MI-ER1 (NM_020948.1,1492-1510).
ctgtaagcactgctaatca

SEQ ID NO: 32269 - DNA, 19 bp, Homo sapiens
  siRNA target sequence for MI-ER1 (NM_020948.1,1530-1548).
ggaccaggtgaaatattaa

SEQ ID NO: 32270 - DNA, 19 bp, Homo sapiens
  siRNA target sequence for MI-ER1 (NM_020948.1,1587-1605).
ggaccaacaggtggaaata

SEQ ID NO: 32271 - DNA, 19 bp, Homo sapiens
  siRNA target sequence for MI-ER1 (NM_020948.1,1588-1606).
gaccaacaggtggaaataa

SEQ ID NO: 32272 - DNA, 19 bp, Homo sapiens
  siRNA target sequence for MI-ER1 (NM_020948.1,1629-1647).
gatactaatggttatgaaa

SEQ ID NO: 32273 - DNA, 19 bp, Homo sapiens
  siRNA target sequence for MI-ER1 (NM_020948.1,1639-1657).
gttatgaaacagataacct

SEQ ID NO: 32274 - DNA, 19 bp, Homo sapiens
  siRNA target sequence for MI-ER1 (NM_020948.1,1768-1786).
gtccaggttcttctgaatt

SEQ ID NO: 32275 - DNA, 19 bp, Homo sapiens
  siRNA target sequence for MITF (NM_000248.2,124-142).
gctggaaatgctagaatat

SEQ ID NO: 32276 - DNA, 19 bp, Homo sapiens
  siRNA target sequence for MITF (NM_000248.2,125-143).
ctggaaatgctagaatata

SEQ ID NO: 32277 - DNA, 19 bp, Homo sapiens
  siRNA target sequence for MITF (NM_000248.2,127-145).
ggaaatgctagaatataat

SEQ ID NO: 32278 - DNA, 19 bp, Homo sapiens
  siRNA target sequence for MITF (NM_000248.2,223-241).
gtacctttctaccacttta

SEQ ID NO: 32279 - DNA, 19 bp, Homo sapiens
  siRNA target sequence for MITF (NM_000248.2,347-365).
gctatgcttacgcttaact

SEQ ID NO: 32280 - DNA, 19 bp, Homo sapiens
  siRNA target sequence for MITF (NM_000248.2,359-377).
cttaactccaactgtgaaa

SEQ ID NO: 32281 - DNA, 19 bp, Homo sapiens
  siRNA target sequence for MITF (NM_000248.2,374-392).
gaaaaagagggattttata

SEQ ID NO: 32282 - DNA, 19 bp, Homo sapiens
  siRNA target sequence for MITF (NM_000248.2,466-484).
gatggatgatgtaatcgat

SEQ ID NO: 32283 - DNA, 19 bp, Homo sapiens
  siRNA target sequence for MITF (NM_000248.2,476-494).
gtaatcgatgacatcatta

SEQ ID NO: 32284 - DNA, 19 bp, Homo sapiens
  siRNA target sequence for MITF (NM_000248.2,487-505).
catcattagcctagaatca

SEQ ID NO: 32285 - DNA, 19 bp, Homo sapiens
  siRNA target sequence for MITF (NM_000248.2,490-508).
cattagcctagaatcaagt

SEQ ID NO: 32286 - DNA, 19 bp, Homo sapiens
  siRNA target sequence for MITF (NM_000248.2,507-525).
gttataatgaggaaatctt

SEQ ID NO: 32287 - DNA, 19 bp, Homo sapiens
  siRNA target sequence for MITF (NM_000248.2,566-584).
cctgtctcgggaaacttga

SEQ ID NO: 32288 - DNA, 19 bp, Homo sapiens
  siRNA target sequence for MITF (NM_000248.2,567-585).
ctgtctcgggaaacttgat

SEQ ID NO: 32289 - DNA, 19 bp, Homo sapiens
  siRNA target sequence for MITF (NM_000248.2,571-589).
ctcgggaaacttgattgat

SEQ ID NO: 32290 - DNA, 19 bp, Homo sapiens
  siRNA target sequence for MITF (NM_000248.2,670-688).
ggagctcacagcgtgtatt

SEQ ID NO: 32291 - DNA, 19 bp, Homo sapiens
  siRNA target sequence for MITF (NM_000248.2,673-691).
gctcacagcgtgtattttt

SEQ ID NO: 32292 - DNA, 19 bp, Homo sapiens
  siRNA target sequence for MITF (NM_000248.2,811-829).
gattcccaagtcaaatgat

SEQ ID NO: 32293 - DNA, 19 bp, Homo sapiens
  siRNA target sequence for MITF (NM_000248.2,908-926).
cgcgcaaaagaacttgaaa

SEQ ID NO: 32294 - DNA, 19 bp, Homo sapiens
  siRNA target sequence for MITF (NM_000248.2,947-965).
cacgccaaccggcatttgt

SEQ ID NO: 32295 - DNA, 19 bp, Homo sapiens
  siRNA target sequence for MITF (NM_000248.2,1121-1139).
gacctaacctgtacaacaa

SEQ ID NO: 32296 - DNA, 19 bp, Homo sapiens
  siRNA target sequence for MITF (NM_000248.2,1200-1218).
ccaaccaagcctatagtgt

SEQ ID NO: 32297 - DNA, 19 bp, Homo sapiens
  siRNA target sequence for MITF (NM_000248.2,1210-1228).
ctatagtgtccccacaaaa

SEQ ID NO: 32298 - DNA, 19 bp, Homo sapiens
  siRNA target sequence for MITF (NM_000248.2,1233-1251).
gatccaaactggaagacat

SEQ ID NO: 32299 - DNA, 19 bp, Homo sapiens
  siRNA target sequence for MITF (NM_000248.2,1361-1379).
gagacggagcacacttgtt

SEQ ID NO: 32300 - DNA, 19 bp, Homo sapiens
  siRNA target sequence for MITF (NM_006722.1,34-52).
gggacaccttgaaaatact

SEQ ID NO: 32301 - DNA, 19 bp, Homo sapiens
  siRNA target sequence for MITF (NM_006722.1,35-53).
ggacaccttgaaaatactt

SEQ ID NO: 32302 - DNA, 19 bp, Homo sapiens
  siRNA target sequence for MITF (NM_006722.1,58-76).
ggttttcccacgagctatt

SEQ ID NO: 32303 - DNA, 19 bp, Homo sapiens
  siRNA target sequence for MITF (NM_006722.1,59-77).
gttttcccacgagctattt

SEQ ID NO: 32304 - DNA, 19 bp, Homo sapiens
  siRNA target sequence for MITF (NM_198159.1,133-151).
ggatcgtgccggatttcga

SEQ ID NO: 32305 - DNA, 19 bp, Homo sapiens
  siRNA target sequence for MITF (NM_198159.1,134-152).
gatcgtgccggatttcgaa

SEQ ID NO: 32306 - DNA, 19 bp, Homo sapiens
  siRNA target sequence for MITF (NM_198159.1,176-194).
gcccaaaacctattacgaa

SEQ ID NO: 32307 - DNA, 19 bp, Homo sapiens
  siRNA target sequence for MITF (NM_198159.1,185-203).
ctattacgaactcaaaagt

SEQ ID NO: 32308 - DNA, 19 bp, Homo sapiens
  siRNA target sequence for MITF (NM_198177.1,8-26).
cgcttagagttcagatgtt

SEQ ID NO: 32309 - DNA, 19 bp, Homo sapiens
  siRNA target sequence for MITF (NM_198177.1,10-28).
cttagagttcagatgttca

SEQ ID NO: 32310 - DNA, 19 bp, Homo sapiens
  siRNA target sequence for MITF (NM_198177.1,27-45).
catgccatgctcctttgaa

SEQ ID NO: 32311 - DNA, 19 bp, Homo sapiens
  siRNA target sequence for MITF (NM_198177.1,36-54).
ctcctttgaaagcttgtat

SEQ ID NO: 32312 - DNA, 19 bp, Homo sapiens
  siRNA target sequence for MIZ1 (NM_004671.1,50-68).
ctgaactacaagtattact

SEQ ID NO: 32313 - DNA, 19 bp, Homo sapiens
  siRNA target sequence for MIZ1 (NM_004671.1,72-90).
ctttgctggacggaataaa

SEQ ID NO: 32314 - DNA, 19 bp, Homo sapiens
  siRNA target sequence for MIZ1 (NM_004671.1,114-132).
gatgagggcgctgcattta

SEQ ID NO: 32315 - DNA, 19 bp, Homo sapiens
  siRNA target sequence for MIZ1 (NM_004671.1,119-137).
gggcgctgcatttattgaa

SEQ ID NO: 32316 - DNA, 19 bp, Homo sapiens
  siRNA target sequence for MIZ1 (NM_004671.1,121-139).
gcgctgcatttattgaaga

SEQ ID NO: 32317 - DNA, 19 bp, Homo sapiens
  siRNA target sequence for MIZ1 (NM_004671.1,146-164).
gcagccctgcggttcagat

SEQ ID NO: 32318 - DNA, 19 bp, Homo sapiens
  siRNA target sequence for MIZ1 (NM_004671.1,147-165).
cagccctgcggttcagatt

SEQ ID NO: 32319 - DNA, 19 bp, Homo sapiens
  siRNA target sequence for MIZ1 (NM_004671.1,149-167).
gccctgcggttcagattaa

SEQ ID NO: 32320 - DNA, 19 bp, Homo sapiens
  siRNA target sequence for MIZ1 (NM_004671.1,150-168).
ccctgcggttcagattaaa

SEQ ID NO: 32321 - DNA, 19 bp, Homo sapiens
  siRNA target sequence for MIZ1 (NM_004671.1,151-169).
cctgcggttcagattaaaa

SEQ ID NO: 32322 - DNA, 19 bp, Homo sapiens
  siRNA target sequence for MIZ1 (NM_004671.1,152-170).
ctgcggttcagattaaaat

SEQ ID NO: 32323 - DNA, 19 bp, Homo sapiens
  siRNA target sequence for MIZ1 (NM_004671.1,180-198).
gtatagacgccgatatcca

SEQ ID NO: 32324 - DNA, 19 bp, Homo sapiens
  siRNA target sequence for MIZ1 (NM_004671.1,211-229).
ggactttctgatttatcca

SEQ ID NO: 32325 - DNA, 19 bp, Homo sapiens
  siRNA target sequence for MIZ1 (NM_004671.1,218-236).
ctgatttatccacaatcaa

SEQ ID NO: 32326 - DNA, 19 bp, Homo sapiens
  siRNA target sequence for MIZ1 (NM_004671.1,234-252).
caaatcatcggttttcagt

SEQ ID NO: 32327 - DNA, 19 bp, Homo sapiens
  siRNA target sequence for MIZ1 (NM_004671.1,361-379).
gtgctgcttcaagatacta

SEQ ID NO: 32328 - DNA, 19 bp, Homo sapiens
  siRNA target sequence for MIZ1 (NM_004671.1,377-395).
ctaagcccacatttgagat

SEQ ID NO: 32329 - DNA, 19 bp, Homo sapiens
  siRNA target sequence for MIZ1 (NM_004671.1,430-448).
cctgatgtgcagttaaaaa

SEQ ID NO: 32330 - DNA, 19 bp, Homo sapiens
  siRNA target sequence for MIZ1 (NM_004671.1,480-498).
catcaagcccacgagttta

SEQ ID NO: 32331 - DNA, 19 bp, Homo sapiens
  siRNA target sequence for MIZ1 (NM_004671.1,486-504).
gcccacgagtttagttcaa

SEQ ID NO: 32332 - DNA, 19 bp, Homo sapiens
  siRNA target sequence for MIZ1 (NM_004671.1,487-505).
cccacgagtttagttcaaa

SEQ ID NO: 32333 - DNA, 19 bp, Homo sapiens
  siRNA target sequence for MIZ1 (NM_004671.1,506-524).
gcagtattcagcgatttca

SEQ ID NO: 32334 - DNA, 19 bp, Homo sapiens
  siRNA target sequence for MIZ1 (NM_004671.1,507-525).
cagtattcagcgatttcaa

SEQ ID NO: 32335 - DNA, 19 bp, Homo sapiens
  siRNA target sequence for MIZ1 (NM_004671.1,509-527).
gtattcagcgatttcaaga

SEQ ID NO: 32336 - DNA, 19 bp, Homo sapiens
  siRNA target sequence for MIZ1 (NM_004671.1,516-534).
gcgatttcaagagaagttt

SEQ ID NO: 32337 - DNA, 19 bp, Homo sapiens
  siRNA target sequence for MIZ1 (NM_004671.1,517-535).
cgatttcaagagaagtttt

SEQ ID NO: 32338 - DNA, 19 bp, Homo sapiens
  siRNA target sequence for MIZ1 (NM_004671.1,551-569).
cacctcaacaagttagaga

SEQ ID NO: 32339 - DNA, 19 bp, Homo sapiens
  siRNA target sequence for MIZ1 (NM_004671.1,562-580).
gttagagagatatgcatat

SEQ ID NO: 32340 - DNA, 19 bp, Homo sapiens
  siRNA target sequence for MIZ1 (NM_004671.1,598-616).
ggtggtaggagagattata

SEQ ID NO: 32341 - DNA, 19 bp, Homo sapiens
  siRNA target sequence for MIZ1 (NM_004671.1,622-640).
caagttcagttgagacttt

SEQ ID NO: 32342 - DNA, 19 bp, Homo sapiens
  siRNA target sequence for MIZ1 (NM_004671.1,656-674).
gttgccctcaagaagataa

SEQ ID NO: 32343 - DNA, 19 bp, Homo sapiens
  siRNA target sequence for MIZ1 (NM_004671.1,659-677).
gccctcaagaagataacta

SEQ ID NO: 32344 - DNA, 19 bp, Homo sapiens
  siRNA target sequence for MIZ1 (NM_004671.1,675-693).
ctatccaaatagtctatgt

SEQ ID NO: 32345 - DNA, 19 bp, Homo sapiens
  siRNA target sequence for MIZ1 (NM_004671.1,679-697).
ccaaatagtctatgtataa

SEQ ID NO: 32346 - DNA, 19 bp, Homo sapiens
  siRNA target sequence for MIZ1 (NM_004671.1,686-704).
gtctatgtataaaagtaaa

SEQ ID NO: 32347 - DNA, 19 bp, Homo sapiens
  siRNA target sequence for MIZ1 (NM_004671.1,772-790).
ggacgccccttgaatatta

SEQ ID NO: 32348 - DNA, 19 bp, Homo sapiens
  siRNA target sequence for MIZ1 (NM_004671.1,783-801).
gaatattacatctttagtt

SEQ ID NO: 32349 - DNA, 19 bp, Homo sapiens
  siRNA target sequence for MIZ1 (NM_004671.1,814-832).
gctgtgccaaaccaaattt

SEQ ID NO: 32350 - DNA, 19 bp, Homo sapiens
  siRNA target sequence for MIZ1 (NM_004671.1,817-835).
gtgccaaaccaaatttcca

SEQ ID NO: 32351 - DNA, 19 bp, Homo sapiens
  siRNA target sequence for MIZ1 (NM_004671.1,869-887).
ctatgtctgtatatcttgt

SEQ ID NO: 32352 - DNA, 19 bp, Homo sapiens
  siRNA target sequence for MIZ1 (NM_004671.1,883-901).
cttgtacggcagcttacat

SEQ ID NO: 32353 - DNA, 19 bp, Homo sapiens
  siRNA target sequence for MIZ1 (NM_004671.1,894-912).
gcttacatcagccatgtta

SEQ ID NO: 32354 - DNA, 19 bp, Homo sapiens
  siRNA target sequence for MIZ1 (NM_004671.1,895-913).
cttacatcagccatgttat

SEQ ID NO: 32355 - DNA, 19 bp, Homo sapiens
  siRNA target sequence for MIZ1 (NM_004671.1,1013-1031).
ctagccttcgggtatcctt

SEQ ID NO: 32356 - DNA, 19 bp, Homo sapiens
  siRNA target sequence for MIZ1 (NM_004671.1,1029-1047).
cttgatgtgccctttagga

SEQ ID NO: 32357 - DNA, 19 bp, Homo sapiens
  siRNA target sequence for MIZ1 (NM_004671.1,1071-1089).
ccgtgcagtgacttgtaca

SEQ ID NO: 32358 - DNA, 19 bp, Homo sapiens
  siRNA target sequence for MIZ1 (NM_004671.1,1177-1195).
gcctatgaaagtctaatat

SEQ ID NO: 32359 - DNA, 19 bp, Homo sapiens
  siRNA target sequence for MIZ1 (NM_004671.1,1221-1239).
caatgactgttctgatgta

SEQ ID NO: 32360 - DNA, 19 bp, Homo sapiens
  siRNA target sequence for MIZ1 (NM_004671.1,1229-1247).
gttctgatgtagatgagat

SEQ ID NO: 32361 - DNA, 19 bp, Homo sapiens
  siRNA target sequence for MIZ1 (NM_004671.1,1234-1252).
gatgtagatgagatcaaat

SEQ ID NO: 32362 - DNA, 19 bp, Homo sapiens
  siRNA target sequence for MIZ1 (NM_004671.1,1283-1301).
gaccgaagaaagaagctat

SEQ ID NO: 32363 - DNA, 19 bp, Homo sapiens
  siRNA target sequence for MIZ1 (NM_004671.1,1311-1329).
cagccaaccgtgtacaaaa

SEQ ID NO: 32364 - DNA, 19 bp, Homo sapiens
  siRNA target sequence for MIZ1 (NM_004671.1,1313-1331).
gccaaccgtgtacaaaaat

SEQ ID NO: 32365 - DNA, 19 bp, Homo sapiens
  siRNA target sequence for MIZ1 (NM_004671.1,1499-1517).
caaccaaaggggttctcat

SEQ ID NO: 32366 - DNA, 19 bp, Homo sapiens
  siRNA target sequence for MIZ1 (NM_004671.1,1502-1520).
ccaaaggggttctcatgta

SEQ ID NO: 32367 - DNA, 19 bp, Homo sapiens
  siRNA target sequence for MIZ1 (NM_004671.1,1518-1536).
gtatcagccatcttctgta

SEQ ID NO: 32368 - DNA, 19 bp, Homo sapiens
  siRNA target sequence for MIZ1 (NM_004671.1,1570-1588).
gctattccgccttcattaa

SEQ ID NO: 32369 - DNA, 19 bp, Homo sapiens
  siRNA target sequence for MIZ1 (NM_004671.1,1589-1607).
cagactactcagtaccatt

SEQ ID NO: 32370 - DNA, 19 bp, Homo sapiens
  siRNA target sequence for MIZ1 (NM_004671.1,1609-1627).
caccatacgccaatatcaa

SEQ ID NO: 32371 - DNA, 19 bp, Homo sapiens
  siRNA target sequence for MIZ1 (NM_004671.1,1691-1709).
gtcctcctatgtttttgga

SEQ ID NO: 32372 - DNA, 19 bp, Homo sapiens
  siRNA target sequence for MIZ1 (NM_004671.1,1693-1711).
cctcctatgtttttggata

SEQ ID NO: 32373 - DNA, 19 bp, Homo sapiens
  siRNA target sequence for MIZ1 (NM_004671.1,1697-1715).
ctatgtttttggatagtct

SEQ ID NO: 32374 - DNA, 19 bp, Homo sapiens
  siRNA target sequence for MIZ1 (NM_004671.1,1773-1791).
cagtactcatgttagttca

SEQ ID NO: 32375 - DNA, 19 bp, Homo sapiens
  siRNA target sequence for MKL1 (NM_020831.2,626-644).
ctcaaacggaagattcgtt

SEQ ID NO: 32376 - DNA, 19 bp, Homo sapiens
  siRNA target sequence for MKL1 (NM_020831.2,859-877).
ggtgaactatcccaaagta

SEQ ID NO: 32377 - DNA, 19 bp, Homo sapiens
  siRNA target sequence for MKL1 (NM_020831.2,1024-1042).
ccaggttgtgtctcaactt

SEQ ID NO: 32378 - DNA, 19 bp, Homo sapiens
  siRNA target sequence for MKL1 (NM_020831.2,1158-1176).
ccacccccacactcattaa

SEQ ID NO: 32379 - DNA, 19 bp, Homo sapiens
  siRNA target sequence for MKL1 (NM_020831.2,1477-1495).
cagcctctccactaccaat

SEQ ID NO: 32380 - DNA, 19 bp, Homo sapiens
  siRNA target sequence for MKL1 (NM_020831.2,1675-1693).
gcgccttcgagcctatcaa

SEQ ID NO: 32381 - DNA, 19 bp, Homo sapiens
  siRNA target sequence for MKL1 (NM_020831.2,1677-1695).
gccttcgagcctatcaaga

SEQ ID NO: 32382 - DNA, 19 bp, Homo sapiens
  siRNA target sequence for MKL1 (NM_020831.2,1683-1701).
gagcctatcaagaccaaat

SEQ ID NO: 32383 - DNA, 19 bp, Homo sapiens
  siRNA target sequence for MKL1 (NM_020831.2,1937-1955).
ctcagcacgggcgatgaaa

SEQ ID NO: 32384 - DNA, 19 bp, Homo sapiens
  siRNA target sequence for MKL1 (NM_020831.2,2361-2379).
cagccaccaaccacataga

SEQ ID NO: 32385 - DNA, 19 bp, Homo sapiens
  siRNA target sequence for MKL1 (NM_020831.2,2555-2573).
ctcaccgtgaccaataaga

SEQ ID NO: 32386 - DNA, 19 bp, Homo sapiens
  siRNA target sequence for MKL1 (NM_020831.2,2758-2776).
caaacagcaggaaaatggt

SEQ ID NO: 32387 - DNA, 19 bp, Homo sapiens
  siRNA target sequence for MLL3 (NM_021230.1,479-497).
ctcagtgtggtcagtgtta

SEQ ID NO: 32388 - DNA, 19 bp, Homo sapiens
  siRNA target sequence for MLL3 (NM_021230.1,483-501).
gtgtggtcagtgttaccat

SEQ ID NO: 32389 - DNA, 19 bp, Homo sapiens
  siRNA target sequence for MLL3 (NM_021230.1,488-506).
gtcagtgttaccatccata

SEQ ID NO: 32390 - DNA, 19 bp, Homo sapiens
  siRNA target sequence for MLL3 (NM_021230.1,502-520).
ccatactgtgtcagtatta

SEQ ID NO: 32391 - DNA, 19 bp, Homo sapiens
  siRNA target sequence for MLL3 (NM_021230.1,511-529).
gtcagtattaagatcacta

SEQ ID NO: 32392 - DNA, 19 bp, Homo sapiens
  siRNA target sequence for MLL3 (NM_021230.1,513-531).
cagtattaagatcactaaa

SEQ ID NO: 32393 - DNA, 19 bp, Homo sapiens
  siRNA target sequence for MLL3 (NM_021230.1,527-545).
ctaaagtggttcttagcaa

SEQ ID NO: 32394 - DNA, 19 bp, Homo sapiens
  siRNA target sequence for MLL3 (NM_021230.1,532-550).
gtggttcttagcaaaggtt

SEQ ID NO: 32395 - DNA, 19 bp, Homo sapiens
  siRNA target sequence for MLL3 (NM_021230.1,960-978).
ctatatgcctgcgtctaat

SEQ ID NO: 32396 - DNA, 19 bp, Homo sapiens
  siRNA target sequence for MLL3 (NM_021230.1,1007-1025).
cacttgtagcacaaattgt

SEQ ID NO: 32397 - DNA, 19 bp, Homo sapiens
  siRNA target sequence for MLL3 (NM_021230.1,1072-1090).
ggtgtgtgtttgactgaat

SEQ ID NO: 32398 - DNA, 19 bp, Homo sapiens
  siRNA target sequence for MLL3 (NM_021230.1,1141-1159).
cggtcaaaaccaaaattga

SEQ ID NO: 32399 - DNA, 19 bp, Homo sapiens
  siRNA target sequence for MLL3 (NM_021230.1,1205-1223).
ctccagacatccaatcaga

SEQ ID NO: 32400 - DNA, 19 bp, Homo sapiens
  siRNA target sequence for MLL3 (NM_021230.1,1384-1402).
ccaggtattggtggattta

SEQ ID NO: 32401 - DNA, 19 bp, Homo sapiens
  siRNA target sequence for MLL3 (NM_021230.1,1385-1403).
caggtattggtggatttat

SEQ ID NO: 32402 - DNA, 19 bp, Homo sapiens
  siRNA target sequence for MLL3 (NM_021230.1,1388-1406).
gtattggtggatttatggt

SEQ ID NO: 32403 - DNA, 19 bp, Homo sapiens
  siRNA target sequence for MLL3 (NM_021230.1,1518-1536).
gcagttaccagatacttta

SEQ ID NO: 32404 - DNA, 19 bp, Homo sapiens
  siRNA target sequence for MLL3 (NM_021230.1,1663-1681).
ctagatacaagtagacaaa

SEQ ID NO: 32405 - DNA, 19 bp, Homo sapiens
  siRNA target sequence for MLL3 (NM_021230.1,1717-1735).
gctcagcttttatataaaa

SEQ ID NO: 32406 - DNA, 19 bp, Homo sapiens
  siRNA target sequence for MLL3 (NM_021230.1,1755-1773).
cttggatccttccttagat

SEQ ID NO: 32407 - DNA, 19 bp, Homo sapiens
  siRNA target sequence for MLL3 (NM_021230.1,1767-1785).
cttagatccactacttagt

SEQ ID NO: 32408 - DNA, 19 bp, Homo sapiens
  siRNA target sequence for MLL3 (NM_021230.1,1771-1789).
gatccactacttagttcat

SEQ ID NO: 32409 - DNA, 19 bp, Homo sapiens
  siRNA target sequence for MLL3 (NM_021230.1,1791-1809).
ctcggctccaacaaaatct

SEQ ID NO: 32410 - DNA, 19 bp, Homo sapiens
  siRNA target sequence for MLL3 (NM_021230.1,1831-1849).
gacccattagctgatattt

SEQ ID NO: 32411 - DNA, 19 bp, Homo sapiens
  siRNA target sequence for MLL3 (NM_021230.1,1840-1858).
gctgatatttctgaagttt

SEQ ID NO: 32412 - DNA, 19 bp, Homo sapiens
  siRNA target sequence for MLL3 (NM_021230.1,1910-1928).
cagttgatcattcagatat

SEQ ID NO: 32413 - DNA, 19 bp, Homo sapiens
  siRNA target sequence for MLL3 (NM_021230.1,1978-1996).
cagagttcacgaccattaa

SEQ ID NO: 32414 - DNA, 19 bp, Homo sapiens
  siRNA target sequence for MLL3 (NM_021230.1,1980-1998).
gagttcacgaccattaagt

SEQ ID NO: 32415 - DNA, 19 bp, Homo sapiens
  siRNA target sequence for MLL3 (NM_021230.1,1982-2000).
gttcacgaccattaagtga

SEQ ID NO: 32416 - DNA, 19 bp, Homo sapiens
  siRNA target sequence for MLL3 (NM_021230.1,1988-2006).
gaccattaagtgaagaaca

SEQ ID NO: 32417 - DNA, 19 bp, Homo sapiens
  siRNA target sequence for MLL3 (NM_021230.1,2024-2042).
gtcctgaactagacaaaat

SEQ ID NO: 32418 - DNA, 19 bp, Homo sapiens
  siRNA target sequence for MLL3 (NM_021230.1,2093-2111).
gcggaaaagatgttgaaga

SEQ ID NO: 32419 - DNA, 19 bp, Homo sapiens
  siRNA target sequence for MLL3 (NM_021230.1,2199-2217).
caatcaggatgctttttca

SEQ ID NO: 32420 - DNA, 19 bp, Homo sapiens
  siRNA target sequence for MLL3 (NM_021230.1,2257-2275).
catctcccacataattctt

SEQ ID NO: 32421 - DNA, 19 bp, Homo sapiens
  siRNA target sequence for MLL3 (NM_021230.1,2285-2303).
gaagcggactgggaacttt

SEQ ID NO: 32422 - DNA, 19 bp, Homo sapiens
  siRNA target sequence for MLL3 (NM_021230.1,2289-2307).
cggactgggaactttctct

SEQ ID NO: 32423 - DNA, 19 bp, Homo sapiens
  siRNA target sequence for MLL3 (NM_021230.1,2368-2386).
gcaagtgatcctaacaact

SEQ ID NO: 32424 - DNA, 19 bp, Homo sapiens
  siRNA target sequence for MLL3 (NM_021230.1,2382-2400).
caactcttggacatcatca

SEQ ID NO: 32425 - DNA, 19 bp, Homo sapiens
  siRNA target sequence for MLL3 (NM_021230.1,2443-2461).
cagagaagcacgcttaagt

SEQ ID NO: 32426 - DNA, 19 bp, Homo sapiens
  siRNA target sequence for MLL3 (NM_021230.1,2453-2471).
cgcttaagtgggagaaaga

SEQ ID NO: 32427 - DNA, 19 bp, Homo sapiens
  siRNA target sequence for MLL3 (NM_021230.1,2503-2521).
ccagttctctacaccaata

SEQ ID NO: 32428 - DNA, 19 bp, Homo sapiens
  siRNA target sequence for MLL3 (NM_021230.1,2504-2522).
cagttctctacaccaatat

SEQ ID NO: 32429 - DNA, 19 bp, Homo sapiens
  siRNA target sequence for MLL3 (NM_021230.1,2506-2524).
gttctctacaccaatatta

SEQ ID NO: 32430 - DNA, 19 bp, Homo sapiens
  siRNA target sequence for MLL3 (NM_021230.1,2509-2527).
ctctacaccaatattaatt

SEQ ID NO: 32431 - DNA, 19 bp, Homo sapiens
  siRNA target sequence for MLL3 (NM_021230.1,2530-2548).
cccaacttaaaggaagaat

SEQ ID NO: 32432 - DNA, 19 bp, Homo sapiens
  siRNA target sequence for MLL3 (NM_021230.1,2561-2579).
ctactagagtgaagcaaat

SEQ ID NO: 32433 - DNA, 19 bp, Homo sapiens
  siRNA target sequence for MLL3 (NM_021230.1,2583-2601).
caaattgtggagaaaagca

SEQ ID NO: 32434 - DNA, 19 bp, Homo sapiens
  siRNA target sequence for MLL3 (NM_021230.1,2626-2644).
gtgcaaaaagccagagata

SEQ ID NO: 32435 - DNA, 19 bp, Homo sapiens
  siRNA target sequence for MLL3 (NM_021230.1,2648-2666).
gagctgctttacgcattaa

SEQ ID NO: 32436 - DNA, 19 bp, Homo sapiens
  siRNA target sequence for MLL3 (NM_021230.1,2650-2668).
gctgctttacgcattaata

SEQ ID NO: 32437 - DNA, 19 bp, Homo sapiens
  siRNA target sequence for MLL3 (NM_021230.1,2654-2672).
ctttacgcattaataaagt

SEQ ID NO: 32438 - DNA, 19 bp, Homo sapiens
  siRNA target sequence for MLL3 (NM_021230.1,2660-2678).
gcattaataaagtacagat

SEQ ID NO: 32439 - DNA, 19 bp, Homo sapiens
  siRNA target sequence for MLL3 (NM_021230.1,2671-2689).
gtacagatgtcaaatgatt

SEQ ID NO: 32440 - DNA, 19 bp, Homo sapiens
  siRNA target sequence for MLL3 (NM_021230.1,2703-2721).
gcaacagcaagatagcatt

SEQ ID NO: 32441 - DNA, 19 bp, Homo sapiens
  siRNA target sequence for MLL3 (NM_021230.1,2725-2743).
cccagctctcgtattgatt

SEQ ID NO: 32442 - DNA, 19 bp, Homo sapiens
  siRNA target sequence for MLL3 (NM_021230.1,2828-2846).
gtaagcagcaagctaaaat

SEQ ID NO: 32443 - DNA, 19 bp, Homo sapiens
  siRNA target sequence for MLL3 (NM_021230.1,2896-2914).
caacaacagcaatttggtt

SEQ ID NO: 32444 - DNA, 19 bp, Homo sapiens
  siRNA target sequence for MLL3 (NM_021230.1,2928-2946).
ggtgcagtctggttcagat

SEQ ID NO: 32445 - DNA, 19 bp, Homo sapiens
  siRNA target sequence for MLL3 (NM_021230.1,2929-2947).
gtgcagtctggttcagata

SEQ ID NO: 32446 - DNA, 19 bp, Homo sapiens
  siRNA target sequence for MLL3 (NM_021230.1,2950-2968).
ccaagtagtgggatacaga

SEQ ID NO: 32447 - DNA, 19 bp, Homo sapiens
  siRNA target sequence for MLL3 (NM_021230.1,3007-3025).
cctgcacagtcattccata

SEQ ID NO: 32448 - DNA, 19 bp, Homo sapiens
  siRNA target sequence for MLL3 (NM_021230.1,3057-3075).
ccctacgtctacatcttca

SEQ ID NO: 32449 - DNA, 19 bp, Homo sapiens
  siRNA target sequence for MLL3 (NM_021230.1,3133-3151).
cccatccaggatagtcttt

SEQ ID NO: 32450 - DNA, 19 bp, Homo sapiens
  siRNA target sequence for MLL3 (NM_021230.1,3173-3191).
caccctcaccgcaagtgtt

SEQ ID NO: 32451 - DNA, 19 bp, Homo sapiens
  siRNA target sequence for MLL3 (NM_021230.1,3307-3325).
gcaccagtggaaaactgta

SEQ ID NO: 32452 - DNA, 19 bp, Homo sapiens
  siRNA target sequence for MLL3 (NM_021230.1,3328-3346).
cctttatcatcggtatcta

SEQ ID NO: 32453 - DNA, 19 bp, Homo sapiens
  siRNA target sequence for MLL3 (NM_021230.1,3344-3362).
ctaggccccttcaaatgaa

SEQ ID NO: 32454 - DNA, 19 bp, Homo sapiens
  siRNA target sequence for MLL3 (NM_021230.1,3347-3365).
ggccccttcaaatgaatga

SEQ ID NO: 32455 - DNA, 19 bp, Homo sapiens
  siRNA target sequence for MLL3 (NM_021230.1,3459-3477).
gcctgtgatgacagatcaa

SEQ ID NO: 32456 - DNA, 19 bp, Homo sapiens
  siRNA target sequence for MLL3 (NM_021230.1,3472-3490).
gatcaatttcccaaatcct

SEQ ID NO: 32457 - DNA, 19 bp, Homo sapiens
  siRNA target sequence for MLL3 (NM_021230.1,3501-3519).
ccggtctcctgtagtttca

SEQ ID NO: 32458 - DNA, 19 bp, Homo sapiens
  siRNA target sequence for MLL3 (NM_021230.1,3554-3572).
ccagtgatcactttactaa

SEQ ID NO: 32459 - DNA, 19 bp, Homo sapiens
  siRNA target sequence for MLL3 (NM_021230.1,3578-3596).
ctcctagggcagatgtgtt

SEQ ID NO: 32460 - DNA, 19 bp, Homo sapiens
  siRNA target sequence for MLL3 (NM_021230.1,3581-3599).
ctagggcagatgtgtttca

SEQ ID NO: 32461 - DNA, 19 bp, Homo sapiens
  siRNA target sequence for MLL3 (NM_021230.1,3609-3627).
gatacctgactcatatgca

SEQ ID NO: 32462 - DNA, 19 bp, Homo sapiens
  siRNA target sequence for MLL3 (NM_021230.1,3639-3657).
gacacctgcacctcttgat

SEQ ID NO: 32463 - DNA, 19 bp, Homo sapiens
  siRNA target sequence for MLL3 (NM_021230.1,3659-3677).
gtggtcctggaccttttaa

SEQ ID NO: 32464 - DNA, 19 bp, Homo sapiens
  siRNA target sequence for MLL3 (NM_021230.1,3732-3750).
ggcatcaaggcgattgtct

SEQ ID NO: 32465 - DNA, 19 bp, Homo sapiens
  siRNA target sequence for MLL3 (NM_021230.1,3777-3795).
gacaccaagacctatagat

SEQ ID NO: 32466 - DNA, 19 bp, Homo sapiens
  siRNA target sequence for MLL3 (NM_021230.1,3779-3797).
caccaagacctatagataa

SEQ ID NO: 32467 - DNA, 19 bp, Homo sapiens
  siRNA target sequence for MLL3 (NM_021230.1,3781-3799).
ccaagacctatagataatt

SEQ ID NO: 32468 - DNA, 19 bp, Homo sapiens
  siRNA target sequence for MLL3 (NM_021230.1,3813-3831).
gtcaaatgatccatatagt

SEQ ID NO: 32469 - DNA, 19 bp, Homo sapiens
  siRNA target sequence for MLL3 (NM_021230.1,3853-3871).
ccagcagtgaatgaatctt

SEQ ID NO: 32470 - DNA, 19 bp, Homo sapiens
  siRNA target sequence for MLL3 (NM_021230.1,3854-3872).
cagcagtgaatgaatcttt

SEQ ID NO: 32471 - DNA, 19 bp, Homo sapiens
  siRNA target sequence for MLL3 (NM_021230.1,3956-3974).
ctccacgacctgttgtaga

SEQ ID NO: 32472 - DNA, 19 bp, Homo sapiens
  siRNA target sequence for MLL3 (NM_021230.1,3958-3976).
ccacgacctgttgtagatt

SEQ ID NO: 32473 - DNA, 19 bp, Homo sapiens
  siRNA target sequence for MLL3 (NM_021230.1,3961-3979).
cgacctgttgtagattctt

SEQ ID NO: 32474 - DNA, 19 bp, Homo sapiens
  siRNA target sequence for MLL3 (NM_021230.1,3962-3980).
gacctgttgtagattctta

SEQ ID NO: 32475 - DNA, 19 bp, Homo sapiens
  siRNA target sequence for MLL3 (NM_021230.1,3994-4012).
ggaacagctaggtccaata

SEQ ID NO: 32476 - DNA, 19 bp, Homo sapiens
  siRNA target sequence for MLL3 (NM_021230.1,4008-4026).
caatacagacccttactct

SEQ ID NO: 32477 - DNA, 19 bp, Homo sapiens
  siRNA target sequence for MLL3 (NM_021230.1,4055-4073).
ctgttgacccatatagtca

SEQ ID NO: 32478 - DNA, 19 bp, Homo sapiens
  siRNA target sequence for MLL3 (NM_021230.1,4091-4109).
gaccatctacacaaactga

SEQ ID NO: 32479 - DNA, 19 bp, Homo sapiens
  siRNA target sequence for MLL3 (NM_021230.1,4100-4118).
cacaaactgacttgtttgt

SEQ ID NO: 32480 - DNA, 19 bp, Homo sapiens
  siRNA target sequence for MLL3 (NM_021230.1,4137-4155).
gaggcattctgatccatat

SEQ ID NO: 32481 - DNA, 19 bp, Homo sapiens
  siRNA target sequence for MLL3 (NM_021230.1,4140-4158).
gcattctgatccatatgct

SEQ ID NO: 32482 - DNA, 19 bp, Homo sapiens
  siRNA target sequence for MLL3 (NM_021230.1,4341-4359).
ggtaaggccacctgataca

SEQ ID NO: 32483 - DNA, 19 bp, Homo sapiens
  siRNA target sequence for MLL3 (NM_021230.1,4388-4406).
ctggtctttcagacacatt

SEQ ID NO: 32484 - DNA, 19 bp, Homo sapiens
  siRNA target sequence for MLL3 (NM_021230.1,4430-4448).
cccgtgatccctatgatca

SEQ ID NO: 32485 - DNA, 19 bp, Homo sapiens
  siRNA target sequence for MLL3 (NM_021230.1,4466-4484).
gatctcagtctgactcttt

SEQ ID NO: 32486 - DNA, 19 bp, Homo sapiens
  siRNA target sequence for MLL3 (NM_021230.1,4623-4641).
gccaacttcaggagtaact

SEQ ID NO: 32487 - DNA, 19 bp, Homo sapiens
  siRNA target sequence for MLL3 (NM_021230.1,4631-4649).
caggagtaactgatacaca

SEQ ID NO: 32488 - DNA, 19 bp, Homo sapiens
  siRNA target sequence for MLL3 (NM_021230.1,4642-4660).
gatacacagaatactgtaa

SEQ ID NO: 32489 - DNA, 19 bp, Homo sapiens
  siRNA target sequence for MLL3 (NM_021230.1,4701-4719).
gaagttacgtgaaatcatt

SEQ ID NO: 32490 - DNA, 19 bp, Homo sapiens
  siRNA target sequence for MLL3 (NM_021230.1,4812-4830).
ctggcaaccagagaatgtt

SEQ ID NO: 32491 - DNA, 19 bp, Homo sapiens
  siRNA target sequence for MLL3 (NM_021230.1,4858-4876).
ccctatcctgggaacatta

SEQ ID NO: 32492 - DNA, 19 bp, Homo sapiens
  siRNA target sequence for MLL3 (NM_021230.1,4946-4964).
ctcctgatgttgctagtat

SEQ ID NO: 32493 - DNA, 19 bp, Homo sapiens
  siRNA target sequence for MLL3 (NM_021230.1,5083-5101).
cagctaagaagatcagtat

SEQ ID NO: 32494 - DNA, 19 bp, Homo sapiens
  siRNA target sequence for MLL3 (NM_021230.1,5093-5111).
gatcagtatctgtagatat

SEQ ID NO: 32495 - DNA, 19 bp, Homo sapiens
  siRNA target sequence for MLL3 (NM_021230.1,5107-5125).
gatatgcctaggcctttaa

SEQ ID NO: 32496 - DNA, 19 bp, Homo sapiens
  siRNA target sequence for MLL3 (NM_021230.1,5130-5148).
ctcacaaatgaataatcca

SEQ ID NO: 32497 - DNA, 19 bp, Homo sapiens
  siRNA target sequence for MLL3 (NM_021230.1,5202-5220).
catactgggccaagcatat

SEQ ID NO: 32498 - DNA, 19 bp, Homo sapiens
  siRNA target sequence for MLL3 (NM_021230.1,5286-5304).
cgttgtagaggcatcttct

SEQ ID NO: 32499 - DNA, 19 bp, Homo sapiens
  siRNA target sequence for MLL3 (NM_021230.1,5293-5311).
gaggcatcttctaatctga

SEQ ID NO: 32500 - DNA, 19 bp, Homo sapiens
  siRNA target sequence for MLL3 (NM_021230.1,5310-5328).
gagacatggaaacttcatt

SEQ ID NO: 32501 - DNA, 19 bp, Homo sapiens
  siRNA target sequence for MLL3 (NM_021230.1,5378-5396).
ctccccagggtctacctaa

SEQ ID NO: 32502 - DNA, 19 bp, Homo sapiens
  siRNA target sequence for MLL3 (NM_021230.1,5381-5399).
cccagggtctacctaatca

SEQ ID NO: 32503 - DNA, 19 bp, Homo sapiens
  siRNA target sequence for MLL3 (NM_021230.1,5405-5423).
ctgtgcacccagatttgga

SEQ ID NO: 32504 - DNA, 19 bp, Homo sapiens
  siRNA target sequence for MLL3 (NM_021230.1,5549-5567).
ctgaaacaacgtctgataa

SEQ ID NO: 32505 - DNA, 19 bp, Homo sapiens
  siRNA target sequence for MLL3 (NM_021230.1,5555-5573).
caacgtctgataatttaca

SEQ ID NO: 32506 - DNA, 19 bp, Homo sapiens
  siRNA target sequence for MLL3 (NM_021230.1,5632-5650).
gtgaaggaactggatgtta

SEQ ID NO: 32507 - DNA, 19 bp, Homo sapiens
  siRNA target sequence for MLL3 (NM_021230.1,5664-5682).
ggttgaagtcaaagactta

SEQ ID NO: 32508 - DNA, 19 bp, Homo sapiens
  siRNA target sequence for MLL3 (NM_021230.1,5779-5797).
ctggatgacctcttaaggt

SEQ ID NO: 32509 - DNA, 19 bp, Homo sapiens
  siRNA target sequence for MLL3 (NM_021230.1,5795-5813).
ggtcaggagagtttgatat

SEQ ID NO: 32510 - DNA, 19 bp, Homo sapiens
  siRNA target sequence for MLL3 (NM_021230.1,5803-5821).
gagtttgatatcattgcat

SEQ ID NO: 32511 - DNA, 19 bp, Homo sapiens
  siRNA target sequence for MLL3 (NM_021230.1,5805-5823).
gtttgatatcattgcatat

SEQ ID NO: 32512 - DNA, 19 bp, Homo sapiens
  siRNA target sequence for MLL3 (NM_021230.1,5881-5899).
cttccaattgatgataagt

SEQ ID NO: 32513 - DNA, 19 bp, Homo sapiens
  siRNA target sequence for MLL3 (NM_021230.1,5885-5903).
caattgatgataagttaga

SEQ ID NO: 32514 - DNA, 19 bp, Homo sapiens
  siRNA target sequence for MLL3 (NM_021230.1,6116-6134).
ctgctcactcagacctaaa

SEQ ID NO: 32515 - DNA, 19 bp, Homo sapiens
  siRNA target sequence for MLL3 (NM_021230.1,6160-6178).
ccttgtgatccagatctat

SEQ ID NO: 32516 - DNA, 19 bp, Homo sapiens
  siRNA target sequence for MLL3 (NM_021230.1,6161-6179).
cttgtgatccagatctatt

SEQ ID NO: 32517 - DNA, 19 bp, Homo sapiens
  siRNA target sequence for MLL3 (NM_021230.1,6166-6184).
gatccagatctatttgaga

SEQ ID NO: 32518 - DNA, 19 bp, Homo sapiens
  siRNA target sequence for MLL3 (NM_021230.1,6248-6266).
ctgctcaagatgtaataaa

SEQ ID NO: 32519 - DNA, 19 bp, Homo sapiens
  siRNA target sequence for MLL3 (NM_021230.1,6250-6268).
gctcaagatgtaataaact

SEQ ID NO: 32520 - DNA, 19 bp, Homo sapiens
  siRNA target sequence for MLL3 (NM_021230.1,6313-6331).
gctaatgagaaatctgata

SEQ ID NO: 32521 - DNA, 19 bp, Homo sapiens
  siRNA target sequence for MLL3 (NM_021230.1,6422-6440).
caccgcctggccgtgtttt

SEQ ID NO: 32522 - DNA, 19 bp, Homo sapiens
  siRNA target sequence for MLL3 (NM_021230.1,6428-6446).
ctggccgtgttttggataa

SEQ ID NO: 32523 - DNA, 19 bp, Homo sapiens
  siRNA target sequence for MLL3 (NM_021230.1,6497-6515).
ctcagggtgtgcaggtaaa

SEQ ID NO: 32524 - DNA, 19 bp, Homo sapiens
  siRNA target sequence for MLL3 (NM_021230.1,6523-6541).
ctcattccaggtcaatcaa

SEQ ID NO: 32525 - DNA, 19 bp, Homo sapiens
  siRNA target sequence for MLL3 (NM_021230.1,6525-6543).
cattccaggtcaatcaaca

SEQ ID NO: 32526 - DNA, 19 bp, Homo sapiens
  siRNA target sequence for MLL3 (NM_021230.1,6533-6551).
gtcaatcaacagttaacca

SEQ ID NO: 32527 - DNA, 19 bp, Homo sapiens
  siRNA target sequence for MLL3 (NM_021230.1,6552-6570).
cagtctggggacaggaaaa

SEQ ID NO: 32528 - DNA, 19 bp, Homo sapiens
  siRNA target sequence for MLL3 (NM_021230.1,6623-6641).
ctggaccccaacagctaat

SEQ ID NO: 32529 - DNA, 19 bp, Homo sapiens
  siRNA target sequence for MLL3 (NM_021230.1,6625-6643).
ggaccccaacagctaatga

SEQ ID NO: 32530 - DNA, 19 bp, Homo sapiens
  siRNA target sequence for MLL3 (NM_021230.1,6675-6693).
gaggccccttcttctagaa

SEQ ID NO: 32531 - DNA, 19 bp, Homo sapiens
  siRNA target sequence for MLL3 (NM_021230.1,6677-6695).
ggccccttcttctagaaga

SEQ ID NO: 32532 - DNA, 19 bp, Homo sapiens
  siRNA target sequence for MLL3 (NM_021230.1,6703-6721).
ctacttctacaggatcttt

SEQ ID NO: 32533 - DNA, 19 bp, Homo sapiens
  siRNA target sequence for MLL3 (NM_021230.1,6771-6789).
gattcgtcagcgatcagaa

SEQ ID NO: 32534 - DNA, 19 bp, Homo sapiens
  siRNA target sequence for MLL3 (NM_021230.1,6791-6809).
cgttcttccctaatattga

SEQ ID NO: 32535 - DNA, 19 bp, Homo sapiens
  siRNA target sequence for MLL3 (NM_021230.1,6792-6810).
gttcttccctaatattgat

SEQ ID NO: 32536 - DNA, 19 bp, Homo sapiens
  siRNA target sequence for MLL3 (NM_021230.1,6849-6867).
ggtggcccttaaaggtata

SEQ ID NO: 32537 - DNA, 19 bp, Homo sapiens
  siRNA target sequence for MLL3 (NM_021230.1,6999-7017).
ggatggcagtataacacat

SEQ ID NO: 32538 - DNA, 19 bp, Homo sapiens
  siRNA target sequence for MLL3 (NM_021230.1,7028-7046).
ggcctaatcctccaaattt

SEQ ID NO: 32539 - DNA, 19 bp, Homo sapiens
  siRNA target sequence for MLL3 (NM_021230.1,7049-7067).
gtccaggctttgtcaatga

SEQ ID NO: 32540 - DNA, 19 bp, Homo sapiens
  siRNA target sequence for MLL3 (NM_021230.1,7055-7073).
gctttgtcaatgattcaca

SEQ ID NO: 32541 - DNA, 19 bp, Homo sapiens
  siRNA target sequence for MLL3 (NM_021230.1,7134-7152).
gtatcttgaagaacaaatt

SEQ ID NO: 32542 - DNA, 19 bp, Homo sapiens
  siRNA target sequence for MLL3 (NM_021230.1,7156-7174).
gctcacagaaaatctaaga

SEQ ID NO: 32543 - DNA, 19 bp, Homo sapiens
  siRNA target sequence for MLL3 (NM_021230.1,7206-7224).
gaaagctgggcgtgaattt

SEQ ID NO: 32544 - DNA, 19 bp, Homo sapiens
  siRNA target sequence for MLL3 (NM_021230.1,7285-7303).
cagctagaacagattcgta

SEQ ID NO: 32545 - DNA, 19 bp, Homo sapiens
  siRNA target sequence for MLL3 (NM_021230.1,7287-7305).
gctagaacagattcgtaaa

SEQ ID NO: 32546 - DNA, 19 bp, Homo sapiens
  siRNA target sequence for MLL3 (NM_021230.1,7321-7339).
gctgaattgattgaagatt

SEQ ID NO: 32547 - DNA, 19 bp, Homo sapiens
  siRNA target sequence for MLL3 (NM_021230.1,7486-7504).
cagcagcacacaacagtta

SEQ ID NO: 32548 - DNA, 19 bp, Homo sapiens
  siRNA target sequence for MLL3 (NM_021230.1,7501-7519).
gttatttctggccatacta

SEQ ID NO: 32549 - DNA, 19 bp, Homo sapiens
  siRNA target sequence for MLL3 (NM_021230.1,7512-7530).
ccatactagccctgttaga

SEQ ID NO: 32550 - DNA, 19 bp, Homo sapiens
  siRNA target sequence for MLL3 (NM_021230.1,7513-7531).
catactagccctgttagaa

SEQ ID NO: 32551 - DNA, 19 bp, Homo sapiens
  siRNA target sequence for MLL3 (NM_021230.1,7606-7624).
ccaattgcccagttaccaa

SEQ ID NO: 32552 - DNA, 19 bp, Homo sapiens
  siRNA target sequence for MLL3 (NM_021230.1,7612-7630).
gcccagttaccaataaaaa

SEQ ID NO: 32553 - DNA, 19 bp, Homo sapiens
  siRNA target sequence for MLL3 (NM_021230.1,7648-7666).
gggacagtctcaaatgcaa

SEQ ID NO: 32554 - DNA, 19 bp, Homo sapiens
  siRNA target sequence for MLL3 (NM_021230.1,7649-7667).
ggacagtctcaaatgcaaa

SEQ ID NO: 32555 - DNA, 19 bp, Homo sapiens
  siRNA target sequence for MLL3 (NM_021230.1,7650-7668).
gacagtctcaaatgcaaat

SEQ ID NO: 32556 - DNA, 19 bp, Homo sapiens
  siRNA target sequence for MLL3 (NM_021230.1,7681-7699).
ccaccacctcgggtagaat

SEQ ID NO: 32557 - DNA, 19 bp, Homo sapiens
  siRNA target sequence for MLL3 (NM_021230.1,7685-7703).
cacctcgggtagaatttga

SEQ ID NO: 32558 - DNA, 19 bp, Homo sapiens
  siRNA target sequence for MLL3 (NM_021230.1,7739-7757).
gggaacgtaaggaacgttt

SEQ ID NO: 32559 - DNA, 19 bp, Homo sapiens
  siRNA target sequence for MLL3 (NM_021230.1,7740-7758).
ggaacgtaaggaacgttta

SEQ ID NO: 32560 - DNA, 19 bp, Homo sapiens
  siRNA target sequence for MLL3 (NM_021230.1,7775-7793).
gacaacggatccaactcat

SEQ ID NO: 32561 - DNA, 19 bp, Homo sapiens
  siRNA target sequence for MLL3 (NM_021230.1,7854-7872).
ggtgggctctgagataagt

SEQ ID NO: 32562 - DNA, 19 bp, Homo sapiens
  siRNA target sequence for MLL3 (NM_021230.1,7855-7873).
gtgggctctgagataagta

SEQ ID NO: 32563 - DNA, 19 bp, Homo sapiens
  siRNA target sequence for MLL3 (NM_021230.1,7858-7876).
ggctctgagataagtagta

SEQ ID NO: 32564 - DNA, 19 bp, Homo sapiens
  siRNA target sequence for MLL3 (NM_021230.1,7914-7932).
cgacttaccttgtgatttt

SEQ ID NO: 32565 - DNA, 19 bp, Homo sapiens
  siRNA target sequence for MLL3 (NM_021230.1,7915-7933).
gacttaccttgtgatttta

SEQ ID NO: 32566 - DNA, 19 bp, Homo sapiens
  siRNA target sequence for MLL3 (NM_021230.1,8011-8029).
caacaaggatcaattaatt

SEQ ID NO: 32567 - DNA, 19 bp, Homo sapiens
  siRNA target sequence for MLL3 (NM_021230.1,8045-8063).
ctttcatgcagactaatga

SEQ ID NO: 32568 - DNA, 19 bp, Homo sapiens
  siRNA target sequence for MLL3 (NM_021230.1,8116-8134).
gttggaagcccaaattttt

SEQ ID NO: 32569 - DNA, 19 bp, Homo sapiens
  siRNA target sequence for MLL3 (NM_021230.1,8224-8242).
gcacctccagtagctaata

SEQ ID NO: 32570 - DNA, 19 bp, Homo sapiens
  siRNA target sequence for MLL3 (NM_021230.1,8250-8268).
cccatgtggccaagattct

SEQ ID NO: 32571 - DNA, 19 bp, Homo sapiens
  siRNA target sequence for MLL3 (NM_021230.1,8257-8275).
ggccaagattctactataa

SEQ ID NO: 32572 - DNA, 19 bp, Homo sapiens
  siRNA target sequence for MLL3 (NM_021230.1,8300-8318).
caacccaatcgctcattca

SEQ ID NO: 32573 - DNA, 19 bp, Homo sapiens
  siRNA target sequence for MLL3 (NM_021230.1,8303-8321).
cccaatcgctcattcagtt

SEQ ID NO: 32574 - DNA, 19 bp, Homo sapiens
  siRNA target sequence for MLL3 (NM_021230.1,8310-8328).
gctcattcagttgtattct

SEQ ID NO: 32575 - DNA, 19 bp, Homo sapiens
  siRNA target sequence for MLL3 (NM_021230.1,8414-8432).
caactccccattcagatat

SEQ ID NO: 32576 - DNA, 19 bp, Homo sapiens
  siRNA target sequence for MLL3 (NM_021230.1,8493-8511).
cagtgagcttcctcaacaa

SEQ ID NO: 32577 - DNA, 19 bp, Homo sapiens
  siRNA target sequence for MLL3 (NM_021230.1,8566-8584).
ggccagctatgtacagaat

SEQ ID NO: 32578 - DNA, 19 bp, Homo sapiens
  siRNA target sequence for MLL3 (NM_021230.1,8567-8585).
gccagctatgtacagaatt

SEQ ID NO: 32579 - DNA, 19 bp, Homo sapiens
  siRNA target sequence for MLL3 (NM_021230.1,8568-8586).
ccagctatgtacagaatta

SEQ ID NO: 32580 - DNA, 19 bp, Homo sapiens
  siRNA target sequence for MLL3 (NM_021230.1,8589-8607).
gaacaaactgcccaatagt

SEQ ID NO: 32581 - DNA, 19 bp, Homo sapiens
  siRNA target sequence for MLL3 (NM_021230.1,8592-8610).
caaactgcccaatagtgat

SEQ ID NO: 32582 - DNA, 19 bp, Homo sapiens
  siRNA target sequence for MLL3 (NM_021230.1,8632-8650).
caacagacgtatgcaaatt

SEQ ID NO: 32583 - DNA, 19 bp, Homo sapiens
  siRNA target sequence for MLL3 (NM_021230.1,8637-8655).
gacgtatgcaaattcagaa

SEQ ID NO: 32584 - DNA, 19 bp, Homo sapiens
  siRNA target sequence for MLL3 (NM_021230.1,8640-8658).
gtatgcaaattcagaagta

SEQ ID NO: 32585 - DNA, 19 bp, Homo sapiens
  siRNA target sequence for MLL3 (NM_021230.1,8645-8663).
caaattcagaagtagacaa

SEQ ID NO: 32586 - DNA, 19 bp, Homo sapiens
  siRNA target sequence for MLL3 (NM_021230.1,8931-8949).
gggcagtatttgttcagaa

SEQ ID NO: 32587 - DNA, 19 bp, Homo sapiens
  siRNA target sequence for MLL3 (NM_021230.1,8934-8952).
cagtatttgttcagaagat

SEQ ID NO: 32588 - DNA, 19 bp, Homo sapiens
  siRNA target sequence for MLL3 (NM_021230.1,8950-8968).
gatgactgtacaaaggata

SEQ ID NO: 32589 - DNA, 19 bp, Homo sapiens
  siRNA target sequence for MLL3 (NM_021230.1,8953-8971).
gactgtacaaaggataata

SEQ ID NO: 32590 - DNA, 19 bp, Homo sapiens
  siRNA target sequence for MLL3 (NM_021230.1,8957-8975).
gtacaaaggataataaact

SEQ ID NO: 32591 - DNA, 19 bp, Homo sapiens
  siRNA target sequence for MLL3 (NM_021230.1,9011-9029).
ctttgggggctcaaatgca

SEQ ID NO: 32592 - DNA, 19 bp, Homo sapiens
  siRNA target sequence for MLL3 (NM_021230.1,9166-9184).
gagaaacaagctatgtact

SEQ ID NO: 32593 - DNA, 19 bp, Homo sapiens
  siRNA target sequence for MLL3 (NM_021230.1,9197-9215).
cgtttacccacttgaaaca

SEQ ID NO: 32594 - DNA, 19 bp, Homo sapiens
  siRNA target sequence for MLL3 (NM_021230.1,9230-9248).
ctctgctccctctaatgga

SEQ ID NO: 32595 - DNA, 19 bp, Homo sapiens
  siRNA target sequence for MLL3 (NM_021230.1,9239-9257).
ctctaatggaaccaatcat

SEQ ID NO: 32596 - DNA, 19 bp, Homo sapiens
  siRNA target sequence for MLL3 (NM_021230.1,9264-9282).
gaactttgcgcactttctt

SEQ ID NO: 32597 - DNA, 19 bp, Homo sapiens
  siRNA target sequence for MLL3 (NM_021230.1,9352-9370).
ggggtttcggactactatt

SEQ ID NO: 32598 - DNA, 19 bp, Homo sapiens
  siRNA target sequence for MLL3 (NM_021230.1,9354-9372).
ggtttcggactactattct

SEQ ID NO: 32599 - DNA, 19 bp, Homo sapiens
  siRNA target sequence for MLL3 (NM_021230.1,9446-9464).
ctatggcttgtcagaagat

SEQ ID NO: 32600 - DNA, 19 bp, Homo sapiens
  siRNA target sequence for MLL3 (NM_021230.1,9462-9480).
gatggccaatggttttgca

SEQ ID NO: 32601 - DNA, 19 bp, Homo sapiens
  siRNA target sequence for MLL3 (NM_021230.1,9468-9486).
caatggttttgcaacaact

SEQ ID NO: 32602 - DNA, 19 bp, Homo sapiens
  siRNA target sequence for MLL3 (NM_021230.1,9500-9518).
gaaaagccggagtgttagt

SEQ ID NO: 32603 - DNA, 19 bp, Homo sapiens
  siRNA target sequence for MLL3 (NM_021230.1,9513-9531).
gttagtgagccatgaagtt

SEQ ID NO: 32604 - DNA, 19 bp, Homo sapiens
  siRNA target sequence for MLL3 (NM_021230.1,9519-9537).
gagccatgaagttaccaaa

SEQ ID NO: 32605 - DNA, 19 bp, Homo sapiens
  siRNA target sequence for MLL3 (NM_021230.1,9534-9552).
caaaactctaggacctaaa

SEQ ID NO: 32606 - DNA, 19 bp, Homo sapiens
  siRNA target sequence for MLL3 (NM_021230.1,9572-9590).
gaccccaggacgacttgtt

SEQ ID NO: 32607 - DNA, 19 bp, Homo sapiens
  siRNA target sequence for MLL3 (NM_021230.1,9643-9661).
ccaacaccacctcataaca

SEQ ID NO: 32608 - DNA, 19 bp, Homo sapiens
  siRNA target sequence for MLL3 (NM_021230.1,9644-9662).
caacaccacctcataacaa

SEQ ID NO: 32609 - DNA, 19 bp, Homo sapiens
  siRNA target sequence for MLL3 (NM_021230.1,9810-9828).
ggtgccgtcccccatcatt

SEQ ID NO: 32610 - DNA, 19 bp, Homo sapiens
  siRNA target sequence for MLL3 (NM_021230.1,9815-9833).
cgtcccccatcattccaat

SEQ ID NO: 32611 - DNA, 19 bp, Homo sapiens
  siRNA target sequence for MLL3 (NM_021230.1,9816-9834).
gtcccccatcattccaatt

SEQ ID NO: 32612 - DNA, 19 bp, Homo sapiens
  siRNA target sequence for MLL3 (NM_021230.1,9940-9958).
cccagatcaggtcttatat

SEQ ID NO: 32613 - DNA, 19 bp, Homo sapiens
  siRNA target sequence for MLL3 (NM_021230.1,9942-9960).
cagatcaggtcttatatct

SEQ ID NO: 32614 - DNA, 19 bp, Homo sapiens
  siRNA target sequence for MLL3 (NM_021230.1,9944-9962).
gatcaggtcttatatctgt

SEQ ID NO: 32615 - DNA, 19 bp, Homo sapiens
  siRNA target sequence for MLL3 (NM_021230.1,10016-10034).
cattttccgaccttcttca

SEQ ID NO: 32616 - DNA, 19 bp, Homo sapiens
  siRNA target sequence for MLL3 (NM_021230.1,10125-10143).
ggagtatcgacagcattta

SEQ ID NO: 32617 - DNA, 19 bp, Homo sapiens
  siRNA target sequence for MLL3 (NM_021230.1,10209-10227).
gcagcctaatgtaccattt

SEQ ID NO: 32618 - DNA, 19 bp, Homo sapiens
  siRNA target sequence for MLL3 (NM_021230.1,10246-10264).
ctttctggatataaggatt

SEQ ID NO: 32619 - DNA, 19 bp, Homo sapiens
  siRNA target sequence for MLL3 (NM_021230.1,10340-10358).
gtggtgtgcggaaatcttt

SEQ ID NO: 32620 - DNA, 19 bp, Homo sapiens
  siRNA target sequence for MLL3 (NM_021230.1,10342-10360).
ggtgtgcggaaatctttca

SEQ ID NO: 32621 - DNA, 19 bp, Homo sapiens
  siRNA target sequence for MLL3 (NM_021230.1,10343-10361).
gtgtgcggaaatctttcaa

SEQ ID NO: 32622 - DNA, 19 bp, Homo sapiens
  siRNA target sequence for MLL3 (NM_021230.1,10363-10381).
gatctgacccttttgaaca

SEQ ID NO: 32623 - DNA, 19 bp, Homo sapiens
  siRNA target sequence for MLL3 (NM_021230.1,10406-10424).
gggtagagaaggacattgt

SEQ ID NO: 32624 - DNA, 19 bp, Homo sapiens
  siRNA target sequence for MLL3 (NM_021230.1,10528-10546).
gaaacgccttccaaagcat

SEQ ID NO: 32625 - DNA, 19 bp, Homo sapiens
  siRNA target sequence for MLL3 (NM_021230.1,10538-10556).
ccaaagcatttcatcagta

SEQ ID NO: 32626 - DNA, 19 bp, Homo sapiens
  siRNA target sequence for MLL3 (NM_021230.1,10731-10749).
ccatggtgggtttgaagat

SEQ ID NO: 32627 - DNA, 19 bp, Homo sapiens
  siRNA target sequence for MLL3 (NM_021230.1,10732-10750).
catggtgggtttgaagatt

SEQ ID NO: 32628 - DNA, 19 bp, Homo sapiens
  siRNA target sequence for MLL3 (NM_021230.1,10747-10765).
gattgcaggccgctcaata

SEQ ID NO: 32629 - DNA, 19 bp, Homo sapiens
  siRNA target sequence for MLL3 (NM_021230.1,10751-10769).
gcaggccgctcaataaaaa

SEQ ID NO: 32630 - DNA, 19 bp, Homo sapiens
  siRNA target sequence for MLL3 (NM_021230.1,10756-10774).
ccgctcaataaaaaatgga

SEQ ID NO: 32631 - DNA, 19 bp, Homo sapiens
  siRNA target sequence for MLL3 (NM_021230.1,10791-10809).
gaagtggagcattcatatt

SEQ ID NO: 32632 - DNA, 19 bp, Homo sapiens
  siRNA target sequence for MLL3 (NM_021230.1,10815-10833).
ccctaaggggacatttaaa

SEQ ID NO: 32633 - DNA, 19 bp, Homo sapiens
  siRNA target sequence for MLL3 (NM_021230.1,10905-10923).
caaagactatcggaaatgt

SEQ ID NO: 32634 - DNA, 19 bp, Homo sapiens
  siRNA target sequence for MLL3 (NM_021230.1,10961-10979).
gaccagcaaggctactcaa

SEQ ID NO: 32635 - DNA, 19 bp, Homo sapiens
  siRNA target sequence for MLL3 (NM_021230.1,10970-10988).
ggctactcaaccttgactt

SEQ ID NO: 32636 - DNA, 19 bp, Homo sapiens
  siRNA target sequence for MLL3 (NM_021230.1,11044-11062).
caggctggtgccttaataa

SEQ ID NO: 32637 - DNA, 19 bp, Homo sapiens
  siRNA target sequence for MLL3 (NM_021230.1,11077-11095).
ctgaggagaggcctacaaa

SEQ ID NO: 32638 - DNA, 19 bp, Homo sapiens
  siRNA target sequence for MLL3 (NM_021230.1,11153-11171).
gcaccaacatttatcactt

SEQ ID NO: 32639 - DNA, 19 bp, Homo sapiens
  siRNA target sequence for MLL3 (NM_021230.1,11188-11206).
gcacaatgcatgtttttta

SEQ ID NO: 32640 - DNA, 19 bp, Homo sapiens
  siRNA target sequence for MLL3 (NM_021230.1,11251-11269).
catgagcaagaattaagtt

SEQ ID NO: 32641 - DNA, 19 bp, Homo sapiens
  siRNA target sequence for MLL3 (NM_021230.1,11254-11272).
gagcaagaattaagttact

SEQ ID NO: 32642 - DNA, 19 bp, Homo sapiens
  siRNA target sequence for MLL3 (NM_021230.1,11280-11298).
cttcaggagggtctatgtt

SEQ ID NO: 32643 - DNA, 19 bp, Homo sapiens
  siRNA target sequence for MLL3 (NM_021230.1,11308-11326).
gaggtgcgacagattgcta

SEQ ID NO: 32644 - DNA, 19 bp, Homo sapiens
  siRNA target sequence for MLL3 (NM_021230.1,11342-11360).
gagaacgggaccatacctt

SEQ ID NO: 32645 - DNA, 19 bp, Homo sapiens
  siRNA target sequence for MLL3 (NM_021230.1,11363-11381).
gcgtgggtagcctcatctt

SEQ ID NO: 32646 - DNA, 19 bp, Homo sapiens
  siRNA target sequence for MLL3 (NM_021230.1,11372-11390).
gcctcatcttccacacaat

SEQ ID NO: 32647 - DNA, 19 bp, Homo sapiens
  siRNA target sequence for MLL3 (NM_021230.1,11611-11629).
ggtgtctgggataagattt

SEQ ID NO: 32648 - DNA, 19 bp, Homo sapiens
  siRNA target sequence for MLL3 (NM_021230.1,11673-11691).
gcttttcccagcgtattta

SEQ ID NO: 32649 - DNA, 19 bp, Homo sapiens
  siRNA target sequence for MLL3 (NM_021230.1,11674-11692).
cttttcccagcgtatttaa

SEQ ID NO: 32650 - DNA, 19 bp, Homo sapiens
  siRNA target sequence for MLL3 (NM_021230.1,11732-11750).
cacgcatagcggaatcact

SEQ ID NO: 32651 - DNA, 19 bp, Homo sapiens
  siRNA target sequence for MLL3 (NM_021230.1,11755-11773).
ggggttgaggcatgtgaaa

SEQ ID NO: 32652 - DNA, 19 bp, Homo sapiens
  siRNA target sequence for MLL3 (NM_021230.1,11764-11782).
gcatgtgaaaattatacct

SEQ ID NO: 32653 - DNA, 19 bp, Homo sapiens
  siRNA target sequence for MLL3 (NM_021230.1,11784-11802).
ccgatacggccgaaatcct

SEQ ID NO: 32654 - DNA, 19 bp, Homo sapiens
  siRNA target sequence for MLL3 (NM_021230.1,11840-11858).
gtgcccgttctgaacctaa

SEQ ID NO: 32655 - DNA, 19 bp, Homo sapiens
  siRNA target sequence for MLL3 (NM_021230.1,11842-11860).
gcccgttctgaacctaaaa

SEQ ID NO: 32656 - DNA, 19 bp, Homo sapiens
  siRNA target sequence for MLL3 (NM_021230.1,11843-11861).
cccgttctgaacctaaaat

SEQ ID NO: 32657 - DNA, 19 bp, Homo sapiens
  siRNA target sequence for MLL3 (NM_021230.1,11845-11863).
cgttctgaacctaaaatga

SEQ ID NO: 32658 - DNA, 19 bp, Homo sapiens
  siRNA target sequence for MLL3 (NM_021230.1,11941-11959).
ctgaacgcaccttatagta

SEQ ID NO: 32659 - DNA, 19 bp, Homo sapiens
  siRNA target sequence for MLL3 (NM_021230.1,11943-11961).
gaacgcaccttatagtaaa

SEQ ID NO: 32660 - DNA, 19 bp, Homo sapiens
  siRNA target sequence for MLL3 (NM_021230.1,11948-11966).
caccttatagtaaacagtt

SEQ ID NO: 32661 - DNA, 19 bp, Homo sapiens
  siRNA target sequence for MLL3 (NM_021230.1,11988-12006).
gtaccggaagatgaaaact

SEQ ID NO: 32662 - DNA, 19 bp, Homo sapiens
  siRNA target sequence for MLL3 (NM_021230.1,12060-12078).
gtatgctgctcgagacatt

SEQ ID NO: 32663 - DNA, 19 bp, Homo sapiens
  siRNA target sequence for MLL3 (NM_021230.1,12064-12082).
gctgctcgagacattgaga

SEQ ID NO: 32664 - DNA, 19 bp, Homo sapiens
  siRNA target sequence for MLL3 (NM_021230.1,12065-12083).
ctgctcgagacattgagaa

SEQ ID NO: 32665 - DNA, 19 bp, Homo sapiens
  siRNA target sequence for MLL3 (NM_021230.1,12085-12103).
cacaccatggtcattgagt

SEQ ID NO: 32666 - DNA, 19 bp, Homo sapiens
  siRNA target sequence for MLL3 (NM_021230.1,12100-12118).
gagtacatcgggactatca

SEQ ID NO: 32667 - DNA, 19 bp, Homo sapiens
  siRNA target sequence for MLL3 (NM_021230.1,12102-12120).
gtacatcgggactatcatt

SEQ ID NO: 32668 - DNA, 19 bp, Homo sapiens
  siRNA target sequence for MLL3 (NM_021230.1,12111-12129).
gactatcattcgaaacgaa

SEQ ID NO: 32669 - DNA, 19 bp, Homo sapiens
  siRNA target sequence for MLL3 (NM_021230.1,12192-12210).
ggataacgaccatgtgatt

SEQ ID NO: 32670 - DNA, 19 bp, Homo sapiens
  siRNA target sequence for MLL3 (NM_021230.1,12249-12267).
ccattcgtgtgcacctaat

SEQ ID NO: 32671 - DNA, 19 bp, Homo sapiens
  siRNA target sequence for MLL3 (NM_021230.1,12250-12268).
cattcgtgtgcacctaatt

SEQ ID NO: 32672 - DNA, 19 bp, Homo sapiens
  siRNA target sequence for MLL3 (NM_021230.1,12349-12367).
ctctgctatgactataagt

SEQ ID NO: 32673 - DNA, 19 bp, Homo sapiens
  siRNA target sequence for MLL3 (NM_170606.1,416-434).
cgattgtggaaacagaaat

SEQ ID NO: 32674 - DNA, 19 bp, Homo sapiens
  siRNA target sequence for MLL3 (NM_170606.1,550-568).
ggtgtagaagccaaaatca

SEQ ID NO: 32675 - DNA, 19 bp, Homo sapiens
  siRNA target sequence for MLL3 (NM_170606.1,577-595).
ctctgcgctttttgttact

SEQ ID NO: 32676 - DNA, 19 bp, Homo sapiens
  siRNA target sequence for MLL3 (NM_170606.1,579-597).
ctgcgctttttgttactgt

SEQ ID NO: 32677 - DNA, 19 bp, Homo sapiens
  siRNA target sequence for MLL3 (NM_170606.1,641-659).
gaataacgcctggatttat

SEQ ID NO: 32678 - DNA, 19 bp, Homo sapiens
  siRNA target sequence for MLL3 (NM_170606.1,671-689).
gaaaccaaccttctaacaa

SEQ ID NO: 32679 - DNA, 19 bp, Homo sapiens
  siRNA target sequence for MLL3 (NM_170606.1,716-734).
gaacctatgagaaaatgca

SEQ ID NO: 32680 - DNA, 19 bp, Homo sapiens
  siRNA target sequence for MLL3 (NM_170606.1,775-793).
cgatctcctcagcagaata

SEQ ID NO: 32681 - DNA, 19 bp, Homo sapiens
  siRNA target sequence for MLL3 (NM_170606.1,776-794).
gatctcctcagcagaatat

SEQ ID NO: 32682 - DNA, 19 bp, Homo sapiens
  siRNA target sequence for MLL3 (NM_170606.1,781-799).
cctcagcagaatatagtat

SEQ ID NO: 32683 - DNA, 19 bp, Homo sapiens
  siRNA target sequence for MLL3 (NM_170606.1,786-804).
gcagaatatagtatcttgt

SEQ ID NO: 32684 - DNA, 19 bp, Homo sapiens
  siRNA target sequence for MLL3 (NM_170606.1,796-814).
gtatcttgtgtaagtgtaa

SEQ ID NO: 32685 - DNA, 19 bp, Homo sapiens
  siRNA target sequence for MLL3 (NM_170606.1,819-837).
ccagacagcttcagatgat

SEQ ID NO: 32686 - DNA, 19 bp, Homo sapiens
  siRNA target sequence for MLL3 (NM_170606.1,845-863).
gtaaactgtgggatgaact

SEQ ID NO: 32687 - DNA, 19 bp, Homo sapiens
  siRNA target sequence for MLL3 (NM_170606.1,910-928).
gattctacaggcacttgtt

SEQ ID NO: 32688 - DNA, 19 bp, Homo sapiens
  siRNA target sequence for MLL3 (NM_170606.1,972-990).
gatggaagaaccattgtta

SEQ ID NO: 32689 - DNA, 19 bp, Homo sapiens
  siRNA target sequence for MLL3 (NM_170606.1,976-994).
gaagaaccattgttagtga

SEQ ID NO: 32690 - DNA, 19 bp, Homo sapiens
  siRNA target sequence for MLL3 (NM_170606.1,1556-1574).
gttaccaacagcaggataa

SEQ ID NO: 32691 - DNA, 19 bp, Homo sapiens
  siRNA target sequence for MLL3 (NM_170606.1,1587-1605).
ctgtgggaagtgttatcat

SEQ ID NO: 32692 - DNA, 19 bp, Homo sapiens
  siRNA target sequence for MLL3 (NM_170606.1,1598-1616).
gttatcatccagaattgca

SEQ ID NO: 32693 - DNA, 19 bp, Homo sapiens
  siRNA target sequence for MLL3 (NM_170606.1,1665-1683).
gtgtgacaaaccaacagat

SEQ ID NO: 32694 - DNA, 19 bp, Homo sapiens
  siRNA target sequence for MLL3 (NM_170606.1,1786-1804).
gctgagctcactacagatt

SEQ ID NO: 32695 - DNA, 19 bp, Homo sapiens
  siRNA target sequence for MLL3 (NM_170606.1,1787-1805).
ctgagctcactacagatta

SEQ ID NO: 32696 - DNA, 19 bp, Homo sapiens
  siRNA target sequence for MLL3 (NM_170606.1,1794-1812).
cactacagattataacaat

SEQ ID NO: 32697 - DNA, 19 bp, Homo sapiens
  siRNA target sequence for MLL3 (NM_170606.1,1857-1875).
gcaggcagctaataaagat

SEQ ID NO: 32698 - DNA, 19 bp, Homo sapiens
  siRNA target sequence for MLL3 (NM_170606.1,1947-1965).
gagtcatccctcagaaagt

SEQ ID NO: 32699 - DNA, 19 bp, Homo sapiens
  siRNA target sequence for MLL3 (NM_170606.1,1964-1982).
gtcttgacacagatagtct

SEQ ID NO: 32700 - DNA, 19 bp, Homo sapiens
  siRNA target sequence for MLL3 (NM_170606.1,1969-1987).
gacacagatagtcttctta

SEQ ID NO: 32701 - DNA, 19 bp, Homo sapiens
  siRNA target sequence for MLL3 (NM_170606.1,2009-2027).
cagtgaatactgaattgga

SEQ ID NO: 32702 - DNA, 19 bp, Homo sapiens
  siRNA target sequence for MLL3 (NM_170606.1,11839-11857).
cacttgaaacagcagaata

SEQ ID NO: 32703 - DNA, 19 bp, Homo sapiens
  siRNA target sequence for MLL3 (NM_170606.1,14335-14353).
gtcaagaggtttgtgttaa

SEQ ID NO: 32704 - DNA, 19 bp, Homo sapiens
  siRNA target sequence for MLL5 (NM_018682.2,216-234).
cccattgggggttgataca

SEQ ID NO: 32705 - DNA, 19 bp, Homo sapiens
  siRNA target sequence for MLL5 (NM_018682.2,233-251).
cagcagagacgtcatactt

SEQ ID NO: 32706 - DNA, 19 bp, Homo sapiens
  siRNA target sequence for MLL5 (NM_018682.2,294-312).
ccctgtggtagttgagaaa

SEQ ID NO: 32707 - DNA, 19 bp, Homo sapiens
  siRNA target sequence for MLL5 (NM_018682.2,320-338).
gttatccccaccagttata

SEQ ID NO: 32708 - DNA, 19 bp, Homo sapiens
  siRNA target sequence for MLL5 (NM_018682.2,325-343).
ccccaccagttatatacca

SEQ ID NO: 32709 - DNA, 19 bp, Homo sapiens
  siRNA target sequence for MLL5 (NM_018682.2,380-398).
cctatgcggaccataatta

SEQ ID NO: 32710 - DNA, 19 bp, Homo sapiens
  siRNA target sequence for MLL5 (NM_018682.2,381-399).
ctatgcggaccataattat

SEQ ID NO: 32711 - DNA, 19 bp, Homo sapiens
  siRNA target sequence for MLL5 (NM_018682.2,550-568).
gatgtaaccaggtgcatat

SEQ ID NO: 32712 - DNA, 19 bp, Homo sapiens
  siRNA target sequence for MLL5 (NM_018682.2,578-596).
cacatgatgatggatacat

SEQ ID NO: 32713 - DNA, 19 bp, Homo sapiens
  siRNA target sequence for MLL5 (NM_018682.2,580-598).
catgatgatggatacatga

SEQ ID NO: 32714 - DNA, 19 bp, Homo sapiens
  siRNA target sequence for MLL5 (NM_018682.2,583-601).
gatgatggatacatgatct

SEQ ID NO: 32715 - DNA, 19 bp, Homo sapiens
  siRNA target sequence for MLL5 (NM_018682.2,614-632).
gcagcgtttggcaacatat

SEQ ID NO: 32716 - DNA, 19 bp, Homo sapiens
  siRNA target sequence for MLL5 (NM_018682.2,615-633).
cagcgtttggcaacatatt

SEQ ID NO: 32717 - DNA, 19 bp, Homo sapiens
  siRNA target sequence for MLL5 (NM_018682.2,617-635).
gcgtttggcaacatattga

SEQ ID NO: 32718 - DNA, 19 bp, Homo sapiens
  siRNA target sequence for MLL5 (NM_018682.2,634-652).
gactgcatggggattgata

SEQ ID NO: 32719 - DNA, 19 bp, Homo sapiens
  siRNA target sequence for MLL5 (NM_018682.2,654-672).
gcagcatattcctgataca

SEQ ID NO: 32720 - DNA, 19 bp, Homo sapiens
  siRNA target sequence for MLL5 (NM_018682.2,655-673).
cagcatattcctgatacat

SEQ ID NO: 32721 - DNA, 19 bp, Homo sapiens
  siRNA target sequence for MLL5 (NM_018682.2,657-675).
gcatattcctgatacatat

SEQ ID NO: 32722 - DNA, 19 bp, Homo sapiens
  siRNA target sequence for MLL5 (NM_018682.2,685-703).
cgttgtcagcctaggaatt

SEQ ID NO: 32723 - DNA, 19 bp, Homo sapiens
  siRNA target sequence for MLL5 (NM_018682.2,689-707).
gtcagcctaggaatttgga

SEQ ID NO: 32724 - DNA, 19 bp, Homo sapiens
  siRNA target sequence for MLL5 (NM_018682.2,714-732).
gagggcagtgctactacaa

SEQ ID NO: 32725 - DNA, 19 bp, Homo sapiens
  siRNA target sequence for MLL5 (NM_018682.2,734-752).
gccggaaaagggaaaatat

SEQ ID NO: 32726 - DNA, 19 bp, Homo sapiens
  siRNA target sequence for MLL5 (NM_018682.2,790-808).
gaggttcctgtggaattat

SEQ ID NO: 32727 - DNA, 19 bp, Homo sapiens
  siRNA target sequence for MLL5 (NM_018682.2,822-840).
gcatactccaacatcaatt

SEQ ID NO: 32728 - DNA, 19 bp, Homo sapiens
  siRNA target sequence for MLL5 (NM_018682.2,823-841).
catactccaacatcaatta

SEQ ID NO: 32729 - DNA, 19 bp, Homo sapiens
  siRNA target sequence for MLL5 (NM_018682.2,829-847).
ccaacatcaattactttaa

SEQ ID NO: 32730 - DNA, 19 bp, Homo sapiens
  siRNA target sequence for MLL5 (NM_018682.2,854-872).
caagagtttccaaagttaa

SEQ ID NO: 32731 - DNA, 19 bp, Homo sapiens
  siRNA target sequence for MLL5 (NM_018682.2,857-875).
gagtttccaaagttaatga

SEQ ID NO: 32732 - DNA, 19 bp, Homo sapiens
  siRNA target sequence for MLL5 (NM_018682.2,859-877).
gtttccaaagttaatgata

SEQ ID NO: 32733 - DNA, 19 bp, Homo sapiens
  siRNA target sequence for MLL5 (NM_018682.2,893-911).
gcggggagaaagaacaaca

SEQ ID NO: 32734 - DNA, 19 bp, Homo sapiens
  siRNA target sequence for MLL5 (NM_018682.2,940-958).
gaaggatctaggaagtcat

SEQ ID NO: 32735 - DNA, 19 bp, Homo sapiens
  siRNA target sequence for MLL5 (NM_018682.2,943-961).
ggatctaggaagtcatcaa

SEQ ID NO: 32736 - DNA, 19 bp, Homo sapiens
  siRNA target sequence for MLL5 (NM_018682.2,969-987).
gggttcagctccagagatt

SEQ ID NO: 32737 - DNA, 19 bp, Homo sapiens
  siRNA target sequence for MLL5 (NM_018682.2,1000-1018).
gatggttcaaattttggat

SEQ ID NO: 32738 - DNA, 19 bp, Homo sapiens
  siRNA target sequence for MLL5 (NM_018682.2,1021-1039).
gagacaaagatcaaagcat

SEQ ID NO: 32739 - DNA, 19 bp, Homo sapiens
  siRNA target sequence for MLL5 (NM_018682.2,1037-1055).
catggatggatcgatatga

SEQ ID NO: 32740 - DNA, 19 bp, Homo sapiens
  siRNA target sequence for MLL5 (NM_018682.2,1116-1134).
gagattaggcaatggaaat

SEQ ID NO: 32741 - DNA, 19 bp, Homo sapiens
  siRNA target sequence for MLL5 (NM_018682.2,1118-1136).
gattaggcaatggaaatga

SEQ ID NO: 32742 - DNA, 19 bp, Homo sapiens
  siRNA target sequence for MLL5 (NM_018682.2,1149-1167).
gaataaatccgatttgaat

SEQ ID NO: 32743 - DNA, 19 bp, Homo sapiens
  siRNA target sequence for MLL5 (NM_018682.2,1169-1187).
ccaacaatttgctcttcaa

SEQ ID NO: 32744 - DNA, 19 bp, Homo sapiens
  siRNA target sequence for MLL5 (NM_018682.2,1170-1188).
caacaatttgctcttcaaa

SEQ ID NO: 32745 - DNA, 19 bp, Homo sapiens
  siRNA target sequence for MLL5 (NM_018682.2,1193-1211).
ctgtagagagccatataca

SEQ ID NO: 32746 - DNA, 19 bp, Homo sapiens
  siRNA target sequence for MLL5 (NM_018682.2,1195-1213).
gtagagagccatatacaaa

SEQ ID NO: 32747 - DNA, 19 bp, Homo sapiens
  siRNA target sequence for MLL5 (NM_018682.2,1249-1267).
cctcctgatgcacttatca

SEQ ID NO: 32748 - DNA, 19 bp, Homo sapiens
  siRNA target sequence for MLL5 (NM_018682.2,1250-1268).
ctcctgatgcacttatcat

SEQ ID NO: 32749 - DNA, 19 bp, Homo sapiens
  siRNA target sequence for MLL5 (NM_018682.2,1253-1271).
ctgatgcacttatcattga

SEQ ID NO: 32750 - DNA, 19 bp, Homo sapiens
  siRNA target sequence for MLL5 (NM_018682.2,1255-1273).
gatgcacttatcattgaat

SEQ ID NO: 32751 - DNA, 19 bp, Homo sapiens
  siRNA target sequence for MLL5 (NM_018682.2,1258-1276).
gcacttatcattgaataca

SEQ ID NO: 32752 - DNA, 19 bp, Homo sapiens
  siRNA target sequence for MLL5 (NM_018682.2,1290-1308).
gctgagagaacagtttgaa

SEQ ID NO: 32753 - DNA, 19 bp, Homo sapiens
  siRNA target sequence for MLL5 (NM_018682.2,1331-1349).
gaccatacccttttgtgtt

SEQ ID NO: 32754 - DNA, 19 bp, Homo sapiens
  siRNA target sequence for MLL5 (NM_018682.2,1419-1437).
catcaggcggtcttgtaca

SEQ ID NO: 32755 - DNA, 19 bp, Homo sapiens
  siRNA target sequence for MLL5 (NM_018682.2,1468-1486).
gatggaaccatacatcttt

SEQ ID NO: 32756 - DNA, 19 bp, Homo sapiens
  siRNA target sequence for MLL5 (NM_018682.2,1471-1489).
ggaaccatacatctttata

SEQ ID NO: 32757 - DNA, 19 bp, Homo sapiens
  siRNA target sequence for MLL5 (NM_018682.2,1472-1490).
gaaccatacatctttatat

SEQ ID NO: 32758 - DNA, 19 bp, Homo sapiens
  siRNA target sequence for MLL5 (NM_018682.2,1546-1564).
gactatggaaattgtaagt

SEQ ID NO: 32759 - DNA, 19 bp, Homo sapiens
  siRNA target sequence for MLL5 (NM_018682.2,1612-1630).
ctaaaacgtagttctgaat

SEQ ID NO: 32760 - DNA, 19 bp, Homo sapiens
  siRNA target sequence for MLL5 (NM_018682.2,1793-1811).
ctccactgagactatcagt

SEQ ID NO: 32761 - DNA, 19 bp, Homo sapiens
  siRNA target sequence for MLL5 (NM_018682.2,1800-1818).
gagactatcagtatcaaat

SEQ ID NO: 32762 - DNA, 19 bp, Homo sapiens
  siRNA target sequence for MLL5 (NM_018682.2,2118-2136).
gccaacccctgccaaagta

SEQ ID NO: 32763 - DNA, 19 bp, Homo sapiens
  siRNA target sequence for MLL5 (NM_018682.2,2125-2143).
cctgccaaagtaaatagaa

SEQ ID NO: 32764 - DNA, 19 bp, Homo sapiens
  siRNA target sequence for MLL5 (NM_018682.2,2128-2146).
gccaaagtaaatagaacta

SEQ ID NO: 32765 - DNA, 19 bp, Homo sapiens
  siRNA target sequence for MLL5 (NM_018682.2,2216-2234).
gcatgtgttcagatatcca

SEQ ID NO: 32766 - DNA, 19 bp, Homo sapiens
  siRNA target sequence for MLL5 (NM_018682.2,2235-2253).
gccatcttctcctgatata

SEQ ID NO: 32767 - DNA, 19 bp, Homo sapiens
  siRNA target sequence for MLL5 (NM_018682.2,2347-2365).
gaagttccagcacttaata

SEQ ID NO: 32768 - DNA, 19 bp, Homo sapiens
  siRNA target sequence for MLL5 (NM_018682.2,2350-2368).
gttccagcacttaataaat

SEQ ID NO: 32769 - DNA, 19 bp, Homo sapiens
  siRNA target sequence for MLL5 (NM_018682.2,2400-2418).
cttggttaatgaatggtta

SEQ ID NO: 32770 - DNA, 19 bp, Homo sapiens
  siRNA target sequence for MLL5 (NM_018682.2,2469-2487).
gcctctacgcataactaca

SEQ ID NO: 32771 - DNA, 19 bp, Homo sapiens
  siRNA target sequence for MLL5 (NM_018682.2,2483-2501).
ctacagatcctgaagtgtt

SEQ ID NO: 32772 - DNA, 19 bp, Homo sapiens
  siRNA target sequence for MLL5 (NM_018682.2,2488-2506).
gatcctgaagtgttagcta

SEQ ID NO: 32773 - DNA, 19 bp, Homo sapiens
  siRNA target sequence for MLL5 (NM_018682.2,2499-2517).
gttagctacacaactcaat

SEQ ID NO: 32774 - DNA, 19 bp, Homo sapiens
  siRNA target sequence for MLL5 (NM_018682.2,2504-2522).
ctacacaactcaattcttt

SEQ ID NO: 32775 - DNA, 19 bp, Homo sapiens
  siRNA target sequence for MLL5 (NM_018682.2,2519-2537).
ctttaccaggtctcactta

SEQ ID NO: 32776 - DNA, 19 bp, Homo sapiens
  siRNA target sequence for MLL5 (NM_018682.2,2649-2667).
gaagcgatggttgaaacaa

SEQ ID NO: 32777 - DNA, 19 bp, Homo sapiens
  siRNA target sequence for MLL5 (NM_018682.2,2762-2780).
gtccactactattaaatga

SEQ ID NO: 32778 - DNA, 19 bp, Homo sapiens
  siRNA target sequence for MLL5 (NM_018682.2,2764-2782).
ccactactattaaatgaca

SEQ ID NO: 32779 - DNA, 19 bp, Homo sapiens
  siRNA target sequence for MLL5 (NM_018682.2,2783-2801).
gctgttcccttccagattt

SEQ ID NO: 32780 - DNA, 19 bp, Homo sapiens
  siRNA target sequence for MLL5 (NM_018682.2,2784-2802).
ctgttcccttccagattta

SEQ ID NO: 32781 - DNA, 19 bp, Homo sapiens
  siRNA target sequence for MLL5 (NM_018682.2,2838-2856).
gctagattcggtttactca

SEQ ID NO: 32782 - DNA, 19 bp, Homo sapiens
  siRNA target sequence for MLL5 (NM_018682.2,2842-2860).
gattcggtttactcagaaa

SEQ ID NO: 32783 - DNA, 19 bp, Homo sapiens
  siRNA target sequence for MLL5 (NM_018682.2,2893-2911).
ccaactcacaccgatatta

SEQ ID NO: 32784 - DNA, 19 bp, Homo sapiens
  siRNA target sequence for MLL5 (NM_018682.2,2912-2930).
ctcctatggacccatcttt

SEQ ID NO: 32785 - DNA, 19 bp, Homo sapiens
  siRNA target sequence for MLL5 (NM_018682.2,2934-2952).
cacgcctccacggataaaa

SEQ ID NO: 32786 - DNA, 19 bp, Homo sapiens
  siRNA target sequence for MLL5 (NM_018682.2,2977-2995).
ggttataaacccatatatt

SEQ ID NO: 32787 - DNA, 19 bp, Homo sapiens
  siRNA target sequence for MLL5 (NM_018682.2,3016-3034).
cctggtacaccaggaaata

SEQ ID NO: 32788 - DNA, 19 bp, Homo sapiens
  siRNA target sequence for MLL5 (NM_018682.2,3029-3047).
gaaataccatgcactttga

SEQ ID NO: 32789 - DNA, 19 bp, Homo sapiens
  siRNA target sequence for MLL5 (NM_018682.2,3103-3121).
gagggatatgacagatctt

SEQ ID NO: 32790 - DNA, 19 bp, Homo sapiens
  siRNA target sequence for MLL5 (NM_018682.2,3105-3123).
gggatatgacagatcttca

SEQ ID NO: 32791 - DNA, 19 bp, Homo sapiens
  siRNA target sequence for MLL5 (NM_018682.2,3114-3132).
cagatcttcaaccatgtta

SEQ ID NO: 32792 - DNA, 19 bp, Homo sapiens
  siRNA target sequence for MLL5 (NM_018682.2,3134-3152).
cattggggccttttagaaa

SEQ ID NO: 32793 - DNA, 19 bp, Homo sapiens
  siRNA target sequence for MLL5 (NM_018682.2,3181-3199).
gaaataaagactattggtt

SEQ ID NO: 32794 - DNA, 19 bp, Homo sapiens
  siRNA target sequence for MLL5 (NM_018682.2,3212-3230).
ggagtaggactgaagtcaa

SEQ ID NO: 32795 - DNA, 19 bp, Homo sapiens
  siRNA target sequence for MLL5 (NM_018682.2,3292-3310).
gagccaactgccctacata

SEQ ID NO: 32796 - DNA, 19 bp, Homo sapiens
  siRNA target sequence for MLL5 (NM_018682.2,3295-3313).
ccaactgccctacataaaa

SEQ ID NO: 32797 - DNA, 19 bp, Homo sapiens
  siRNA target sequence for MLL5 (NM_018682.2,3374-3392).
ctggacggggcacaatgta

SEQ ID NO: 32798 - DNA, 19 bp, Homo sapiens
  siRNA target sequence for MLL5 (NM_018682.2,3376-3394).
ggacggggcacaatgtatt

SEQ ID NO: 32799 - DNA, 19 bp, Homo sapiens
  siRNA target sequence for MLL5 (NM_018682.2,3379-3397).
cggggcacaatgtattctt

SEQ ID NO: 32800 - DNA, 19 bp, Homo sapiens
  siRNA target sequence for MLL5 (NM_018682.2,3499-3517).
cgaataagtgagtcaaagt

SEQ ID NO: 32801 - DNA, 19 bp, Homo sapiens
  siRNA target sequence for MLL5 (NM_018682.2,3541-3559).
ggcatgtttatggaaacaa

SEQ ID NO: 32802 - DNA, 19 bp, Homo sapiens
  siRNA target sequence for MLL5 (NM_018682.2,3576-3594).
cgaagatgggcttgtatct

SEQ ID NO: 32803 - DNA, 19 bp, Homo sapiens
  siRNA target sequence for MLL5 (NM_018682.2,3595-3613).
ggtttcggacggactgtta

SEQ ID NO: 32804 - DNA, 19 bp, Homo sapiens
  siRNA target sequence for MLL5 (NM_018682.2,3596-3614).
gtttcggacggactgttaa

SEQ ID NO: 32805 - DNA, 19 bp, Homo sapiens
  siRNA target sequence for MLL5 (NM_018682.2,3601-3619).
ggacggactgttaatgaca

SEQ ID NO: 32806 - DNA, 19 bp, Homo sapiens
  siRNA target sequence for MLL5 (NM_018682.2,3602-3620).
gacggactgttaatgacaa

SEQ ID NO: 32807 - DNA, 19 bp, Homo sapiens
  siRNA target sequence for MLL5 (NM_018682.2,3604-3622).
cggactgttaatgacaatt

SEQ ID NO: 32808 - DNA, 19 bp, Homo sapiens
  siRNA target sequence for MLL5 (NM_018682.2,3732-3750).
gaactttccactcattagt

SEQ ID NO: 32809 - DNA, 19 bp, Homo sapiens
  siRNA target sequence for MLL5 (NM_018682.2,3735-3753).
ctttccactcattagtgta

SEQ ID NO: 32810 - DNA, 19 bp, Homo sapiens
  siRNA target sequence for MLL5 (NM_018682.2,3834-3852).
cactgctagcctaccttta

SEQ ID NO: 32811 - DNA, 19 bp, Homo sapiens
  siRNA target sequence for MLL5 (NM_018682.2,3884-3902).
ctgaagaaactagcaataa

SEQ ID NO: 32812 - DNA, 19 bp, Homo sapiens
  siRNA target sequence for MLL5 (NM_018682.2,3995-4013).
gttatcagagagctttact

SEQ ID NO: 32813 - DNA, 19 bp, Homo sapiens
  siRNA target sequence for MLL5 (NM_018682.2,4019-4037).
gtgatcaccgaaaagataa

SEQ ID NO: 32814 - DNA, 19 bp, Homo sapiens
  siRNA target sequence for MLL5 (NM_018682.2,4026-4044).
ccgaaaagataaagatagt

SEQ ID NO: 32815 - DNA, 19 bp, Homo sapiens
  siRNA target sequence for MLL5 (NM_018682.2,4195-4213).
cccacaactacgaatgaat

SEQ ID NO: 32816 - DNA, 19 bp, Homo sapiens
  siRNA target sequence for MLL5 (NM_018682.2,4197-4215).
cacaactacgaatgaatgt

SEQ ID NO: 32817 - DNA, 19 bp, Homo sapiens
  siRNA target sequence for MLL5 (NM_018682.2,4225-4243).
gatacttctcaaaatactt

SEQ ID NO: 32818 - DNA, 19 bp, Homo sapiens
  siRNA target sequence for MLL5 (NM_018682.2,4300-4318).
caagcacacgggaaaatat

SEQ ID NO: 32819 - DNA, 19 bp, Homo sapiens
  siRNA target sequence for MLL5 (NM_018682.2,4355-4373).
gtgcatccgaagctgaaaa

SEQ ID NO: 32820 - DNA, 19 bp, Homo sapiens
  siRNA target sequence for MLL5 (NM_018682.2,4451-4469).
ctcagacacacgttcgtaa

SEQ ID NO: 32821 - DNA, 19 bp, Homo sapiens
  siRNA target sequence for MLL5 (NM_018682.2,4453-4471).
cagacacacgttcgtaatt

SEQ ID NO: 32822 - DNA, 19 bp, Homo sapiens
  siRNA target sequence for MLL5 (NM_018682.2,4455-4473).
gacacacgttcgtaattca

SEQ ID NO: 32823 - DNA, 19 bp, Homo sapiens
  siRNA target sequence for MLL5 (NM_018682.2,4498-4516).
ccttctgtgccaacaaagt

SEQ ID NO: 32824 - DNA, 19 bp, Homo sapiens
  siRNA target sequence for MLL5 (NM_018682.2,4499-4517).
cttctgtgccaacaaagtt

SEQ ID NO: 32825 - DNA, 19 bp, Homo sapiens
  siRNA target sequence for MLL5 (NM_018682.2,4529-4547).
catcacctcacctagaaaa

SEQ ID NO: 32826 - DNA, 19 bp, Homo sapiens
  siRNA target sequence for MLL5 (NM_018682.2,4577-4595).
ctgtacagcatggttatct

SEQ ID NO: 32827 - DNA, 19 bp, Homo sapiens
  siRNA target sequence for MLL5 (NM_018682.2,4632-4650).
ctacaggcctcatcattca

SEQ ID NO: 32828 - DNA, 19 bp, Homo sapiens
  siRNA target sequence for MLL5 (NM_018682.2,4678-4696).
cgagagcctcaaagaaact

SEQ ID NO: 32829 - DNA, 19 bp, Homo sapiens
  siRNA target sequence for MLL5 (NM_018682.2,4713-4731).
gaaccttccagccaatact

SEQ ID NO: 32830 - DNA, 19 bp, Homo sapiens
  siRNA target sequence for MLL5 (NM_018682.2,4737-4755).
ggcaacttctggaacatta

SEQ ID NO: 32831 - DNA, 19 bp, Homo sapiens
  siRNA target sequence for MLL5 (NM_018682.2,4764-4782).
gacaccctcaggacaatct

SEQ ID NO: 32832 - DNA, 19 bp, Homo sapiens
  siRNA target sequence for MLL5 (NM_018682.2,4853-4871).
ctccttcttcgtcttacta

SEQ ID NO: 32833 - DNA, 19 bp, Homo sapiens
  siRNA target sequence for MLL5 (NM_018682.2,4856-4874).
cttcttcgtcttactatca

SEQ ID NO: 32834 - DNA, 19 bp, Homo sapiens
  siRNA target sequence for MLL5 (NM_018682.2,4862-4880).
cgtcttactatcaaaacca

SEQ ID NO: 32835 - DNA, 19 bp, Homo sapiens
  siRNA target sequence for MLL5 (NM_018682.2,4881-4899).
gcagccctctgcaaacttt

SEQ ID NO: 32836 - DNA, 19 bp, Homo sapiens
  siRNA target sequence for MLL5 (NM_018682.2,4887-4905).
ctctgcaaactttcagaat

SEQ ID NO: 32837 - DNA, 19 bp, Homo sapiens
  siRNA target sequence for MLL5 (NM_018682.2,4889-4907).
ctgcaaactttcagaatta

SEQ ID NO: 32838 - DNA, 19 bp, Homo sapiens
  siRNA target sequence for MLL5 (NM_018682.2,4891-4909).
gcaaactttcagaattata

SEQ ID NO: 32839 - DNA, 19 bp, Homo sapiens
  siRNA target sequence for MLL5 (NM_018682.2,4912-4930).
cagctcaaaggtagtcttt

SEQ ID NO: 32840 - DNA, 19 bp, Homo sapiens
  siRNA target sequence for MLL5 (NM_018682.2,4921-4939).
ggtagtctttctcaacaaa

SEQ ID NO: 32841 - DNA, 19 bp, Homo sapiens
  siRNA target sequence for MLL5 (NM_018682.2,5108-5126).
caggaccgcaccttgtaca

SEQ ID NO: 32842 - DNA, 19 bp, Homo sapiens
  siRNA target sequence for MLL5 (NM_018682.2,5151-5169).
ctctgtagcacatgtagta

SEQ ID NO: 32843 - DNA, 19 bp, Homo sapiens
  siRNA target sequence for MLL5 (NM_018682.2,5187-5205).
cacccctgggtcgcatatt

SEQ ID NO: 32844 - DNA, 19 bp, Homo sapiens
  siRNA target sequence for MLL5 (NM_018682.2,5189-5207).
cccctgggtcgcatattca

SEQ ID NO: 32845 - DNA, 19 bp, Homo sapiens
  siRNA target sequence for MLL5 (NM_018682.2,5191-5209).
cctgggtcgcatattcatt

SEQ ID NO: 32846 - DNA, 19 bp, Homo sapiens
  siRNA target sequence for MLL5 (NM_018682.2,5195-5213).
ggtcgcatattcattctca

SEQ ID NO: 32847 - DNA, 19 bp, Homo sapiens
  siRNA target sequence for MLL5 (NM_018682.2,5196-5214).
gtcgcatattcattctcaa

SEQ ID NO: 32848 - DNA, 19 bp, Homo sapiens
  siRNA target sequence for MLL5 (NM_018682.2,5320-5338).
caccagcatgttgtaaatt

SEQ ID NO: 32849 - DNA, 19 bp, Homo sapiens
  siRNA target sequence for MLL5 (NM_018682.2,5363-5381).
cgccaccttccagtgtttt

SEQ ID NO: 32850 - DNA, 19 bp, Homo sapiens
  siRNA target sequence for MLL5 (NM_018682.2,5487-5505).
ctcacaagctacacatcat

SEQ ID NO: 32851 - DNA, 19 bp, Homo sapiens
  siRNA target sequence for MLL5 (NM_018682.2,5550-5568).
gccacattgtccattacct

SEQ ID NO: 32852 - DNA, 19 bp, Homo sapiens
  siRNA target sequence for MLL5 (NM_018682.2,5590-5608).
ccccaaggaccaaacagta

SEQ ID NO: 32853 - DNA, 19 bp, Homo sapiens
  siRNA target sequence for MLL5 (NM_018682.2,5592-5610).
ccaaggaccaaacagtatt

SEQ ID NO: 32854 - DNA, 19 bp, Homo sapiens
  siRNA target sequence for MLL5 (NM_018682.2,5596-5614).
ggaccaaacagtattccaa

SEQ ID NO: 32855 - DNA, 19 bp, Homo sapiens
  siRNA target sequence for MLL5 (NM_018682.2,5704-5722).
ggacagattccaattcaca

SEQ ID NO: 32856 - DNA, 19 bp, Homo sapiens
  siRNA target sequence for MLL5 (NM_182931.1,2074-2092).
gaaggaacgaccaacaaaa

SEQ ID NO: 32857 - DNA, 19 bp, Homo sapiens
  siRNA target sequence for MLL5 (NM_182931.1,3272-3290).
ctccacggataaaatcaga

SEQ ID NO: 32858 - DNA, 19 bp, Homo sapiens
  siRNA target sequence for MLL5 (NM_182931.1,3820-3838).
ggaggaggcttccgaataa

SEQ ID NO: 32859 - DNA, 19 bp, Homo sapiens
  siRNA target sequence for MLL5 (NM_182931.1,3824-3842).
gaggcttccgaataagtga

SEQ ID NO: 32860 - DNA, 19 bp, Homo sapiens
  siRNA target sequence for MLL5 (NM_182931.1,3852-3870).
cctgatgcaggatgatact

SEQ ID NO: 32861 - DNA, 19 bp, Homo sapiens
  siRNA target sequence for MLL5 (NM_182931.1,3853-3871).
ctgatgcaggatgatacta

SEQ ID NO: 32862 - DNA, 19 bp, Homo sapiens
  siRNA target sequence for MLL5 (NM_182931.1,3865-3883).
gatactagaggcatgttta

SEQ ID NO: 32863 - DNA, 19 bp, Homo sapiens
  siRNA target sequence for MLLT1 (NM_005934.2,393-411).
gggtacgctggcttcatca

SEQ ID NO: 32864 - DNA, 19 bp, Homo sapiens
  siRNA target sequence for MLLT1 (NM_005934.2,394-412).
ggtacgctggcttcatcat

SEQ ID NO: 32865 - DNA, 19 bp, Homo sapiens
  siRNA target sequence for MLLT1 (NM_005934.2,416-434).
catcgaggtgcacttcaaa

SEQ ID NO: 32866 - DNA, 19 bp, Homo sapiens
  siRNA target sequence for MLLT1 (NM_005934.2,420-438).
gaggtgcacttcaaaaaca

SEQ ID NO: 32867 - DNA, 19 bp, Homo sapiens
  siRNA target sequence for MLLT1 (NM_005934.2,638-656).
ccccatgttacccacaatt

SEQ ID NO: 32868 - DNA, 19 bp, Homo sapiens
  siRNA target sequence for MLLT1 (NM_005934.2,1129-1147).
cctccttctcggacaagaa

SEQ ID NO: 32869 - DNA, 19 bp, Homo sapiens
  siRNA target sequence for MLLT1 (NM_005934.2,1704-1722).
gtgctgcagcagattgtga

SEQ ID NO: 32870 - DNA, 19 bp, Homo sapiens
  siRNA target sequence for MLLT6 (NM_005937.1,221-239).
cattgaagaggactgataa

SEQ ID NO: 32871 - DNA, 19 bp, Homo sapiens
  siRNA target sequence for MLLT6 (NM_005937.1,334-352).
cctcatgatcgcttcaaca

SEQ ID NO: 32872 - DNA, 19 bp, Homo sapiens
  siRNA target sequence for MLLT6 (NM_005937.1,335-353).
ctcatgatcgcttcaacaa

SEQ ID NO: 32873 - DNA, 19 bp, Homo sapiens
  siRNA target sequence for MLLT6 (NM_005937.1,337-355).
catgatcgcttcaacaaga

SEQ ID NO: 32874 - DNA, 19 bp, Homo sapiens
  siRNA target sequence for MLLT6 (NM_005937.1,958-976).
ggtgtgagcagttttacct

SEQ ID NO: 32875 - DNA, 19 bp, Homo sapiens
  siRNA target sequence for MLLT6 (NM_005937.1,1265-1283).
cctcccctggggactataa

SEQ ID NO: 32876 - DNA, 19 bp, Homo sapiens
  siRNA target sequence for MLLT6 (NM_005937.1,1626-1644).
cctggagtcccccttacta

SEQ ID NO: 32877 - DNA, 19 bp, Homo sapiens
  siRNA target sequence for MLLT6 (NM_005937.1,1642-1660).
ctaggggcaggcatctaca

SEQ ID NO: 32878 - DNA, 19 bp, Homo sapiens
  siRNA target sequence for MLLT6 (NM_005937.1,1652-1670).
gcatctacaccagtaataa

SEQ ID NO: 32879 - DNA, 19 bp, Homo sapiens
  siRNA target sequence for MLLT6 (NM_005937.1,1843-1861).
ctggctggctctaccttta

SEQ ID NO: 32880 - DNA, 19 bp, Homo sapiens
  siRNA target sequence for MLLT6 (NM_005937.1,1890-1908).
ccccatgggtgccgttaat

SEQ ID NO: 32881 - DNA, 19 bp, Homo sapiens
  siRNA target sequence for MLLT6 (NM_005937.1,2090-2108).
ccccagggacgactaacat

SEQ ID NO: 32882 - DNA, 19 bp, Homo sapiens
  siRNA target sequence for MLLT6 (NM_005937.1,2225-2243).
gcctgacggccaaaaagga

SEQ ID NO: 32883 - DNA, 19 bp, Homo sapiens
  siRNA target sequence for MLLT6 (NM_005937.1,2421-2439).
ctcgctgtccacttcttct

SEQ ID NO: 32884 - DNA, 19 bp, Homo sapiens
  siRNA target sequence for MLLT6 (NM_005937.1,3088-3106).
ccctcgcttggcaacaaca

SEQ ID NO: 32885 - DNA, 19 bp, Homo sapiens
  siRNA target sequence for MNDA (NM_002432.1,245-263).
gctcatggatgattatcat

SEQ ID NO: 32886 - DNA, 19 bp, Homo sapiens
  siRNA target sequence for MNDA (NM_002432.1,261-279).
cattttacatcaattaagt

SEQ ID NO: 32887 - DNA, 19 bp, Homo sapiens
  siRNA target sequence for MNDA (NM_002432.1,290-308).
ctatgatttaggactaact

SEQ ID NO: 32888 - DNA, 19 bp, Homo sapiens
  siRNA target sequence for MNDA (NM_002432.1,301-319).
gactaactacaaaaatgca

SEQ ID NO: 32889 - DNA, 19 bp, Homo sapiens
  siRNA target sequence for MNDA (NM_002432.1,373-391).
gcgttgcctgtctagacaa

SEQ ID NO: 32890 - DNA, 19 bp, Homo sapiens
  siRNA target sequence for MNDA (NM_002432.1,374-392).
cgttgcctgtctagacaaa

SEQ ID NO: 32891 - DNA, 19 bp, Homo sapiens
  siRNA target sequence for MNDA (NM_002432.1,379-397).
cctgtctagacaaactaat

SEQ ID NO: 32892 - DNA, 19 bp, Homo sapiens
  siRNA target sequence for MNDA (NM_002432.1,380-398).
ctgtctagacaaactaata

SEQ ID NO: 32893 - DNA, 19 bp, Homo sapiens
  siRNA target sequence for MNDA (NM_002432.1,382-400).
gtctagacaaactaataga

SEQ ID NO: 32894 - DNA, 19 bp, Homo sapiens
  siRNA target sequence for MNDA (NM_002432.1,416-434).
gccatcacttaaaaacctt

SEQ ID NO: 32895 - DNA, 19 bp, Homo sapiens
  siRNA target sequence for MNDA (NM_002432.1,794-812).
gcaggtggatgcaagaaga

SEQ ID NO: 32896 - DNA, 19 bp, Homo sapiens
  siRNA target sequence for MNDA (NM_002432.1,856-874).
caacagcgccatttaaata

SEQ ID NO: 32897 - DNA, 19 bp, Homo sapiens
  siRNA target sequence for MNDA (NM_002432.1,859-877).
cagcgccatttaaatacga

SEQ ID NO: 32898 - DNA, 19 bp, Homo sapiens
  siRNA target sequence for MNDA (NM_002432.1,921-939).
gccagtaagactcaatatt

SEQ ID NO: 32899 - DNA, 19 bp, Homo sapiens
  siRNA target sequence for MNDA (NM_002432.1,951-969).
gtcttcgacatcaacttga

SEQ ID NO: 32900 - DNA, 19 bp, Homo sapiens
  siRNA target sequence for MNDA (NM_002432.1,989-1007).
gaaggtcattaccatatct

SEQ ID NO: 32901 - DNA, 19 bp, Homo sapiens
  siRNA target sequence for MNDA (NM_002432.1,992-1010).
ggtcattaccatatctgat

SEQ ID NO: 32902 - DNA, 19 bp, Homo sapiens
  siRNA target sequence for MNDA (NM_002432.1,993-1011).
gtcattaccatatctgatt

SEQ ID NO: 32903 - DNA, 19 bp, Homo sapiens
  siRNA target sequence for MNDA (NM_002432.1,1054-1072).
ctgtgtctgactttaatca

SEQ ID NO: 32904 - DNA, 19 bp, Homo sapiens
  siRNA target sequence for MNDA (NM_002432.1,1056-1074).
gtgtctgactttaatcaaa

SEQ ID NO: 32905 - DNA, 19 bp, Homo sapiens
  siRNA target sequence for MNDA (NM_002432.1,1080-1098).
gaggtcccaaacagaatta

SEQ ID NO: 32906 - DNA, 19 bp, Homo sapiens
  siRNA target sequence for MNDA (NM_002432.1,1087-1105).
caaacagaattatcgaaat

SEQ ID NO: 32907 - DNA, 19 bp, Homo sapiens
  siRNA target sequence for MNDA (NM_002432.1,1091-1109).
cagaattatcgaaatagca

SEQ ID NO: 32908 - DNA, 19 bp, Homo sapiens
  siRNA target sequence for MNDA (NM_002432.1,1093-1111).
gaattatcgaaatagcaaa

SEQ ID NO: 32909 - DNA, 19 bp, Homo sapiens
  siRNA target sequence for MNDA (NM_002432.1,1120-1138).
ccaagatcagtcaacttta

SEQ ID NO: 32910 - DNA, 19 bp, Homo sapiens
  siRNA target sequence for MNDA (NM_002432.1,1161-1179).
gtgtatgggttgtttatgt

SEQ ID NO: 32911 - DNA, 19 bp, Homo sapiens
  siRNA target sequence for MNDA (NM_002432.1,1163-1181).
gtatgggttgtttatgtta

SEQ ID NO: 32912 - DNA, 19 bp, Homo sapiens
  siRNA target sequence for MNDA (NM_002432.1,1194-1212).
gtacacaagaagaacacaa

SEQ ID NO: 32913 - DNA, 19 bp, Homo sapiens
  siRNA target sequence for MNDA (NM_002432.1,1313-1331).
ccttcaactgagaacagtt

SEQ ID NO: 32914 - DNA, 19 bp, Homo sapiens
  siRNA target sequence for MNDA (NM_002432.1,1400-1418).
ggaaggaccaatgaatgtt

SEQ ID NO: 32915 - DNA, 19 bp, Homo sapiens
  siRNA target sequence for MNDA (NM_002432.1,1401-1419).
gaaggaccaatgaatgtta

SEQ ID NO: 32916 - DNA, 19 bp, Homo sapiens
  siRNA target sequence for MRTF-B (NM_014048.3,162-180).
cacacaggggcgatagaca

SEQ ID NO: 32917 - DNA, 19 bp, Homo sapiens
  siRNA target sequence for MRTF-B (NM_014048.3,266-284).
gcagtccagtcaaaactta

SEQ ID NO: 32918 - DNA, 19 bp, Homo sapiens
  siRNA target sequence for MRTF-B (NM_014048.3,286-304).
cccctctgaacgaaaggaa

SEQ ID NO: 32919 - DNA, 19 bp, Homo sapiens
  siRNA target sequence for MRTF-B (NM_014048.3,334-352).
ggaggacgagagaacaact

SEQ ID NO: 32920 - DNA, 19 bp, Homo sapiens
  siRNA target sequence for MRTF-B (NM_014048.3,335-353).
gaggacgagagaacaacta

SEQ ID NO: 32921 - DNA, 19 bp, Homo sapiens
  siRNA target sequence for MRTF-B (NM_014048.3,337-355).
ggacgagagaacaactagt

SEQ ID NO: 32922 - DNA, 19 bp, Homo sapiens
  siRNA target sequence for MRTF-B (NM_014048.3,383-401).
gagcccagcggcattccat

SEQ ID NO: 32923 - DNA, 19 bp, Homo sapiens
  siRNA target sequence for MRTF-B (NM_014048.3,388-406).
cagcggcattccatgaaca

SEQ ID NO: 32924 - DNA, 19 bp, Homo sapiens
  siRNA target sequence for MRTF-B (NM_014048.3,393-411).
gcattccatgaacagataa

SEQ ID NO: 32925 - DNA, 19 bp, Homo sapiens
  siRNA target sequence for MRTF-B (NM_014048.3,399-417).
catgaacagataaaaagct

SEQ ID NO: 32926 - DNA, 19 bp, Homo sapiens
  siRNA target sequence for MRTF-B (NM_014048.3,419-437).
ggaacgagccagaactgaa

SEQ ID NO: 32927 - DNA, 19 bp, Homo sapiens
  siRNA target sequence for MRTF-B (NM_014048.3,469-487).
cagatcgttctgaacttgt

SEQ ID NO: 32928 - DNA, 19 bp, Homo sapiens
  siRNA target sequence for MRTF-B (NM_014048.3,647-665).
cagtgttaaagaagcaatt

SEQ ID NO: 32929 - DNA, 19 bp, Homo sapiens
  siRNA target sequence for MRTF-B (NM_014048.3,697-715).
ctcagggcgatttctcatt

SEQ ID NO: 32930 - DNA, 19 bp, Homo sapiens
  siRNA target sequence for MRTF-B (NM_014048.3,701-719).
gggcgatttctcatttgat

SEQ ID NO: 32931 - DNA, 19 bp, Homo sapiens
  siRNA target sequence for MRTF-B (NM_014048.3,704-722).
cgatttctcatttgatgaa

SEQ ID NO: 32932 - DNA, 19 bp, Homo sapiens
  siRNA target sequence for MRTF-B (NM_014048.3,787-805).
ccccaagtgagccaaaagt

SEQ ID NO: 32933 - DNA, 19 bp, Homo sapiens
  siRNA target sequence for MRTF-B (NM_014048.3,788-806).
cccaagtgagccaaaagtt

SEQ ID NO: 32934 - DNA, 19 bp, Homo sapiens
  siRNA target sequence for MRTF-B (NM_014048.3,793-811).
gtgagccaaaagttagtga

SEQ ID NO: 32935 - DNA, 19 bp, Homo sapiens
  siRNA target sequence for MRTF-B (NM_014048.3,862-880).
ccccaacagttcctgaatt

SEQ ID NO: 32936 - DNA, 19 bp, Homo sapiens
  siRNA target sequence for MRTF-B (NM_014048.3,868-886).
cagttcctgaattcttgaa

SEQ ID NO: 32937 - DNA, 19 bp, Homo sapiens
  siRNA target sequence for MRTF-B (NM_014048.3,1042-1060).
ccaaaccacgggtaaagaa

SEQ ID NO: 32938 - DNA, 19 bp, Homo sapiens
  siRNA target sequence for MRTF-B (NM_014048.3,1113-1131).
ccgcagatggactctaact

SEQ ID NO: 32939 - DNA, 19 bp, Homo sapiens
  siRNA target sequence for MRTF-B (NM_014048.3,1114-1132).
cgcagatggactctaacta

SEQ ID NO: 32940 - DNA, 19 bp, Homo sapiens
  siRNA target sequence for MRTF-B (NM_014048.3,1228-1246).
cattcaagccactcaatga

SEQ ID NO: 32941 - DNA, 19 bp, Homo sapiens
  siRNA target sequence for MRTF-B (NM_014048.3,1235-1253).
gccactcaatgacaaaaat

SEQ ID NO: 32942 - DNA, 19 bp, Homo sapiens
  siRNA target sequence for MRTF-B (NM_014048.3,1261-1279).
gtgggaattcagctttgaa

SEQ ID NO: 32943 - DNA, 19 bp, Homo sapiens
  siRNA target sequence for MRTF-B (NM_014048.3,1542-1560).
gtggccttgccggttacaa

SEQ ID NO: 32944 - DNA, 19 bp, Homo sapiens
  siRNA target sequence for MRTF-B (NM_014048.3,1544-1562).
ggccttgccggttacaaca

SEQ ID NO: 32945 - DNA, 19 bp, Homo sapiens
  siRNA target sequence for MRTF-B (NM_014048.3,1547-1565).
cttgccggttacaacacta

SEQ ID NO: 32946 - DNA, 19 bp, Homo sapiens
  siRNA target sequence for MRTF-B (NM_014048.3,1631-1649).
cgcaacccgtgtggaaaat

SEQ ID NO: 32947 - DNA, 19 bp, Homo sapiens
  siRNA target sequence for MRTF-B (NM_014048.3,1636-1654).
cccgtgtggaaaatgttca

SEQ ID NO: 32948 - DNA, 19 bp, Homo sapiens
  siRNA target sequence for MRTF-B (NM_014048.3,1691-1709).
gtccagtctcagtactgat

SEQ ID NO: 32949 - DNA, 19 bp, Homo sapiens
  siRNA target sequence for MRTF-B (NM_014048.3,1702-1720).
gtactgatgacacaaacat

SEQ ID NO: 32950 - DNA, 19 bp, Homo sapiens
  siRNA target sequence for MRTF-B (NM_014048.3,1725-1743).
gacactttcaccgagatta

SEQ ID NO: 32951 - DNA, 19 bp, Homo sapiens
  siRNA target sequence for MRTF-B (NM_014048.3,1737-1755).
gagattatgaccatgatgt

SEQ ID NO: 32952 - DNA, 19 bp, Homo sapiens
  siRNA target sequence for MRTF-B (NM_014048.3,2059-2077).
gctcctccatcaaagatga

SEQ ID NO: 32953 - DNA, 19 bp, Homo sapiens
  siRNA target sequence for MRTF-B (NM_014048.3,2175-2193).
gccaaaaaggctgtagtta

SEQ ID NO: 32954 - DNA, 19 bp, Homo sapiens
  siRNA target sequence for MRTF-B (NM_014048.3,2233-2251).
gtgtcgtctcgcagtttta

SEQ ID NO: 32955 - DNA, 19 bp, Homo sapiens
  siRNA target sequence for MRTF-B (NM_014048.3,2235-2253).
gtcgtctcgcagttttata

SEQ ID NO: 32956 - DNA, 19 bp, Homo sapiens
  siRNA target sequence for MRTF-B (NM_014048.3,2237-2255).
cgtctcgcagttttatact

SEQ ID NO: 32957 - DNA, 19 bp, Homo sapiens
  siRNA target sequence for MRTF-B (NM_014048.3,2238-2256).
gtctcgcagttttatactt

SEQ ID NO: 32958 - DNA, 19 bp, Homo sapiens
  siRNA target sequence for MRTF-B (NM_014048.3,2400-2418).
gtcagaaaggttttcacaa

SEQ ID NO: 32959 - DNA, 19 bp, Homo sapiens
  siRNA target sequence for MRTF-B (NM_014048.3,2470-2488).
ctgtccagcagccctttat

SEQ ID NO: 32960 - DNA, 19 bp, Homo sapiens
  siRNA target sequence for MRTF-B (NM_014048.3,2475-2493).
cagcagccctttatcaata

SEQ ID NO: 32961 - DNA, 19 bp, Homo sapiens
  siRNA target sequence for MRTF-B (NM_014048.3,2495-2513).
ggcctccaacagtgttctt

SEQ ID NO: 32962 - DNA, 19 bp, Homo sapiens
  siRNA target sequence for MRTF-B (NM_014048.3,2543-2561).
gcaaaatggacctaacaca

SEQ ID NO: 32963 - DNA, 19 bp, Homo sapiens
  siRNA target sequence for MRTF-B (NM_014048.3,2601-2619).
gtcgtccagcactctctat

SEQ ID NO: 32964 - DNA, 19 bp, Homo sapiens
  siRNA target sequence for MRTF-B (NM_014048.3,2603-2621).
cgtccagcactctctattt

SEQ ID NO: 32965 - DNA, 19 bp, Homo sapiens
  siRNA target sequence for MRTF-B (NM_014048.3,2626-2644).
gtccagtcgccaagacaaa

SEQ ID NO: 32966 - DNA, 19 bp, Homo sapiens
  siRNA target sequence for MRTF-B (NM_014048.3,2629-2647).
cagtcgccaagacaaaaga

SEQ ID NO: 32967 - DNA, 19 bp, Homo sapiens
  siRNA target sequence for MRTF-B (NM_014048.3,2935-2953).
gcttagagaaccaactaga

SEQ ID NO: 32968 - DNA, 19 bp, Homo sapiens
  siRNA target sequence for MRTF-B (NM_014048.3,2978-2996).
ctcagccaatgaaattcct

SEQ ID NO: 32969 - DNA, 19 bp, Homo sapiens
  siRNA target sequence for MRTF-B (NM_014048.3,2988-3006).
gaaattcctccactacaaa

SEQ ID NO: 32970 - DNA, 19 bp, Homo sapiens
  siRNA target sequence for MRTF-B (NM_014048.3,3041-3059).
cgaggacctccagaatgat

SEQ ID NO: 32971 - DNA, 19 bp, Homo sapiens
  siRNA target sequence for MRTF-B (NM_014048.3,3076-3094).
gtatgctggaccattcaca

SEQ ID NO: 32972 - DNA, 19 bp, Homo sapiens
  siRNA target sequence for MRTF-B (NM_014048.3,3183-3201).
gagtggttggacattacca

SEQ ID NO: 32973 - DNA, 19 bp, Homo sapiens
  siRNA target sequence for MUS81 (NM_025128.3,387-405).
ccgcacgcgcttcgtattt

SEQ ID NO: 32974 - DNA, 19 bp, Homo sapiens
  siRNA target sequence for MUS81 (NM_025128.3,389-407).
gcacgcgcttcgtatttca

SEQ ID NO: 32975 - DNA, 19 bp, Homo sapiens
  siRNA target sequence for MUS81 (NM_025128.3,392-410).
cgcgcttcgtatttcagaa

SEQ ID NO: 32976 - DNA, 19 bp, Homo sapiens
  siRNA target sequence for MUS81 (NM_025128.3,681-699).
ctcaggagcccgagtgata

SEQ ID NO: 32977 - DNA, 19 bp, Homo sapiens
  siRNA target sequence for MUS81 (NM_025128.3,715-733).
cgggagcacctgaatccta

SEQ ID NO: 32978 - DNA, 19 bp, Homo sapiens
  siRNA target sequence for MUS81 (NM_025128.3,720-738).
gcacctgaatcctaatggt

SEQ ID NO: 32979 - DNA, 19 bp, Homo sapiens
  siRNA target sequence for MUS81 (NM_025128.3,736-754).
ggtcaccacttcttaacca

SEQ ID NO: 32980 - DNA, 19 bp, Homo sapiens
  siRNA target sequence for MUS81 (NM_025128.3,874-892).
ccagccaggtactcattga

SEQ ID NO: 32981 - DNA, 19 bp, Homo sapiens
  siRNA target sequence for MUS81 (NM_025128.3,938-956).
gcctgagcttgctgaatgt

SEQ ID NO: 32982 - DNA, 19 bp, Homo sapiens
  siRNA target sequence for MUS81 (NM_025128.3,1182-1200).
gctgcacgttggagatttt

SEQ ID NO: 32983 - DNA, 19 bp, Homo sapiens
  siRNA target sequence for MUS81 (NM_025128.3,1251-1269).
gttggtactggatcacatt

SEQ ID NO: 32984 - DNA, 19 bp, Homo sapiens
  siRNA target sequence for MUS81 (NM_025128.3,1478-1496).
gcacagcagacattaagga

SEQ ID NO: 32985 - DNA, 19 bp, Homo sapiens
  siRNA target sequence for MUS81 (NM_025128.3,1656-1674).
cgcaggagccatcaagaat

SEQ ID NO: 32986 - DNA, 19 bp, Homo sapiens
  siRNA target sequence for MUS81 (NM_025128.3,1683-1701).
gtcggtgcgagaagtgttt

SEQ ID NO: 32987 - DNA, 19 bp, Homo sapiens
  siRNA target sequence for MUS81 (NM_025128.3,1833-1851).
gctgagcaccattaagtgt

SEQ ID NO: 32988 - DNA, 19 bp, Homo sapiens
  siRNA target sequence for MUTYH (NM_012222.1,162-180).
cgtctgtgggccatcatga

SEQ ID NO: 32989 - DNA, 19 bp, Homo sapiens
  siRNA target sequence for MUTYH (NM_012222.1,340-358).
cggaagaggtggtattgca

SEQ ID NO: 32990 - DNA, 19 bp, Homo sapiens
  siRNA target sequence for MUTYH (NM_012222.1,366-384).
gtctcctcataccatctat

SEQ ID NO: 32991 - DNA, 19 bp, Homo sapiens
  siRNA target sequence for MUTYH (NM_012222.1,430-448).
gctggtacgaccaagagaa

SEQ ID NO: 32992 - DNA, 19 bp, Homo sapiens
  siRNA target sequence for MUTYH (NM_012222.1,431-449).
ctggtacgaccaagagaaa

SEQ ID NO: 32993 - DNA, 19 bp, Homo sapiens
  siRNA target sequence for MUTYH (NM_012222.1,647-665).
ggctggcctgggctactat

SEQ ID NO: 32994 - DNA, 19 bp, Homo sapiens
  siRNA target sequence for MUTYH (NM_012222.1,648-666).
gctggcctgggctactatt

SEQ ID NO: 32995 - DNA, 19 bp, Homo sapiens
  siRNA target sequence for MUTYH (NM_012222.1,1465-1483).
ctcacatcaagctgacata

SEQ ID NO: 32996 - DNA, 19 bp, Homo sapiens
  siRNA target sequence for MUTYH (NM_012222.1,1469-1487).
catcaagctgacatatcaa

SEQ ID NO: 32997 - DNA, 19 bp, Homo sapiens
  siRNA target sequence for MUTYH (NM_012222.1,1472-1490).
caagctgacatatcaagta

SEQ ID NO: 32998 - DNA, 19 bp, Homo sapiens
  siRNA target sequence for MUTYH (NM_012222.1,1475-1493).
gctgacatatcaagtatat

SEQ ID NO: 32999 - DNA, 19 bp, Homo sapiens
  siRNA target sequence for MUTYH (NM_012222.1,1581-1599).
gtttccaccgccatgaaaa

SEQ ID NO: 33000 - DNA, 19 bp, Homo sapiens
  siRNA target sequence for MUTYH (NM_012222.1,1586-1604).
caccgccatgaaaaaggtt

SEQ ID NO: 33001 - DNA, 19 bp, Homo sapiens
  siRNA target sequence for MUTYH (NM_012222.1,1588-1606).
ccgccatgaaaaaggtttt

SEQ ID NO: 33002 - DNA, 19 bp, Homo sapiens
  siRNA target sequence for MUTYH (NM_012222.1,1700-1718).
ccagcaagtcctggataat

SEQ ID NO: 33003 - DNA, 19 bp, Homo sapiens
  siRNA target sequence for MXD4 (NM_006454.2,138-156).
gacttcgccagggagaaaa

SEQ ID NO: 33004 - DNA, 19 bp, Homo sapiens
  siRNA target sequence for MXD4 (NM_006454.2,140-158).
cttcgccagggagaaaaca

SEQ ID NO: 33005 - DNA, 19 bp, Homo sapiens
  siRNA target sequence for MXI1 (NM_005962.2,389-407).
catggctacgcctcttcat

SEQ ID NO: 33006 - DNA, 19 bp, Homo sapiens
  siRNA target sequence for MXI1 (NM_005962.2,426-444).
cccgactgcagcattcaaa

SEQ ID NO: 33007 - DNA, 19 bp, Homo sapiens
  siRNA target sequence for MXI1 (NM_005962.2,564-582).
gtttagaacgcttaaaagt

SEQ ID NO: 33008 - DNA, 19 bp, Homo sapiens
  siRNA target sequence for MXI1 (NM_005962.2,607-625).
cacccggcacacaacactt

SEQ ID NO: 33009 - DNA, 19 bp, Homo sapiens
  siRNA target sequence for MXI1 (NM_005962.2,612-630).
ggcacacaacacttggttt

SEQ ID NO: 33010 - DNA, 19 bp, Homo sapiens
  siRNA target sequence for MXI1 (NM_005962.2,760-778).
ggagatggaacgaatacga

SEQ ID NO: 33011 - DNA, 19 bp, Homo sapiens
  siRNA target sequence for MXI1 (NM_005962.2,761-779).
gagatggaacgaatacgaa

SEQ ID NO: 33012 - DNA, 19 bp, Homo sapiens
  siRNA target sequence for MXI1 (NM_005962.2,776-794).
cgaatggacagcattggat

SEQ ID NO: 33013 - DNA, 19 bp, Homo sapiens
  siRNA target sequence for MXI1 (NM_005962.2,922-940).
cagcagcctgccgagtatt

SEQ ID NO: 33014 - DNA, 19 bp, Homo sapiens
  siRNA target sequence for MXI1 (NM_005962.2,961-979).
cagtgccagtgtcaaactt

SEQ ID NO: 33015 - DNA, 19 bp, Homo sapiens
  siRNA target sequence for MXI1 (NM_005962.2,965-983).
gccagtgtcaaactttcat

SEQ ID NO: 33016 - DNA, 19 bp, Homo sapiens
  siRNA target sequence for MXI1 (NM_005962.2,966-984).
ccagtgtcaaactttcatt

SEQ ID NO: 33017 - DNA, 19 bp, Homo sapiens
  siRNA target sequence for MYB (NM_005375.1,353-371).
ccgatggcagaaagtacta

SEQ ID NO: 33018 - DNA, 19 bp, Homo sapiens
  siRNA target sequence for MYB (NM_005375.1,418-436).
gagtgatagagcttgtaca

SEQ ID NO: 33019 - DNA, 19 bp, Homo sapiens
  siRNA target sequence for MYB (NM_005375.1,448-466).
cgaaacgttggtctgttat

SEQ ID NO: 33020 - DNA, 19 bp, Homo sapiens
  siRNA target sequence for MYB (NM_005375.1,473-491).
gcacttaaaggggagaatt

SEQ ID NO: 33021 - DNA, 19 bp, Homo sapiens
  siRNA target sequence for MYB (NM_005375.1,483-501).
gggagaattggaaaacaat

SEQ ID NO: 33022 - DNA, 19 bp, Homo sapiens
  siRNA target sequence for MYB (NM_005375.1,512-530).
gtggcataaccacttgaat

SEQ ID NO: 33023 - DNA, 19 bp, Homo sapiens
  siRNA target sequence for MYB (NM_005375.1,630-648).
ctgcctggacgaactgata

SEQ ID NO: 33024 - DNA, 19 bp, Homo sapiens
  siRNA target sequence for MYB (NM_005375.1,636-654).
ggacgaactgataatgcta

SEQ ID NO: 33025 - DNA, 19 bp, Homo sapiens
  siRNA target sequence for MYB (NM_005375.1,637-655).
gacgaactgataatgctat

SEQ ID NO: 33026 - DNA, 19 bp, Homo sapiens
  siRNA target sequence for MYB (NM_005375.1,656-674).
caagaaccactggaattct

SEQ ID NO: 33027 - DNA, 19 bp, Homo sapiens
  siRNA target sequence for MYB (NM_005375.1,689-707).
ggtcgaacaggaaggttat

SEQ ID NO: 33028 - DNA, 19 bp, Homo sapiens
  siRNA target sequence for MYB (NM_005375.1,819-837).
ggccagcccactgttaaca

SEQ ID NO: 33029 - DNA, 19 bp, Homo sapiens
  siRNA target sequence for MYB (NM_005375.1,820-838).
gccagcccactgttaacaa

SEQ ID NO: 33030 - DNA, 19 bp, Homo sapiens
  siRNA target sequence for MYB (NM_005375.1,831-849).
gttaacaacgactattcct

SEQ ID NO: 33031 - DNA, 19 bp, Homo sapiens
  siRNA target sequence for MYB (NM_005375.1,896-914).
ccctgtagcgttacatgta

SEQ ID NO: 33032 - DNA, 19 bp, Homo sapiens
  siRNA target sequence for MYB (NM_005375.1,897-915).
cctgtagcgttacatgtaa

SEQ ID NO: 33033 - DNA, 19 bp, Homo sapiens
  siRNA target sequence for MYB (NM_005375.1,898-916).
ctgtagcgttacatgtaaa

SEQ ID NO: 33034 - DNA, 19 bp, Homo sapiens
  siRNA target sequence for MYB (NM_005375.1,900-918).
gtagcgttacatgtaaata

SEQ ID NO: 33035 - DNA, 19 bp, Homo sapiens
  siRNA target sequence for MYB (NM_005375.1,904-922).
cgttacatgtaaatatagt

SEQ ID NO: 33036 - DNA, 19 bp, Homo sapiens
  siRNA target sequence for MYB (NM_005375.1,956-974).
gagacactataatgatgaa

SEQ ID NO: 33037 - DNA, 19 bp, Homo sapiens
  siRNA target sequence for MYB (NM_005375.1,1024-1042).
caaccgagaatgagctaaa

SEQ ID NO: 33038 - DNA, 19 bp, Homo sapiens
  siRNA target sequence for MYB (NM_005375.1,1028-1046).
cgagaatgagctaaaagga

SEQ ID NO: 33039 - DNA, 19 bp, Homo sapiens
  siRNA target sequence for MYB (NM_005375.1,1252-1270).
gcaccattctggataatgt

SEQ ID NO: 33040 - DNA, 19 bp, Homo sapiens
  siRNA target sequence for MYB (NM_005375.1,1269-1287).
gttaagaacctcttagaat

SEQ ID NO: 33041 - DNA, 19 bp, Homo sapiens
  siRNA target sequence for MYB (NM_005375.1,1291-1309).
cagaaacactccaatttat

SEQ ID NO: 33042 - DNA, 19 bp, Homo sapiens
  siRNA target sequence for MYB (NM_005375.1,1380-1398).
cccctcattggtcacaaat

SEQ ID NO: 33043 - DNA, 19 bp, Homo sapiens
  siRNA target sequence for MYB (NM_005375.1,1381-1399).
ccctcattggtcacaaatt

SEQ ID NO: 33044 - DNA, 19 bp, Homo sapiens
  siRNA target sequence for MYB (NM_005375.1,1389-1407).
ggtcacaaattgactgtta

SEQ ID NO: 33045 - DNA, 19 bp, Homo sapiens
  siRNA target sequence for MYB (NM_005375.1,1404-1422).
gttacaacaccatttcata

SEQ ID NO: 33046 - DNA, 19 bp, Homo sapiens
  siRNA target sequence for MYB (NM_005375.1,1408-1426).
caacaccatttcatagaga

SEQ ID NO: 33047 - DNA, 19 bp, Homo sapiens
  siRNA target sequence for MYB (NM_005375.1,1474-1492).
ctatcaaaaggtcaatctt

SEQ ID NO: 33048 - DNA, 19 bp, Homo sapiens
  siRNA target sequence for MYB (NM_005375.1,1510-1528).
ctcctacaccattcaaaca

SEQ ID NO: 33049 - DNA, 19 bp, Homo sapiens
  siRNA target sequence for MYB (NM_005375.1,1533-1551).
cttgcagctcaagaaatta

SEQ ID NO: 33050 - DNA, 19 bp, Homo sapiens
  siRNA target sequence for MYB (NM_005375.1,1580-1598).
gacaccctctcatctagta

SEQ ID NO: 33051 - DNA, 19 bp, Homo sapiens
  siRNA target sequence for MYB (NM_005375.1,1582-1600).
caccctctcatctagtaga

SEQ ID NO: 33052 - DNA, 19 bp, Homo sapiens
  siRNA target sequence for MYB (NM_005375.1,1585-1603).
cctctcatctagtagaaga

SEQ ID NO: 33053 - DNA, 19 bp, Homo sapiens
  siRNA target sequence for MYB (NM_005375.1,1586-1604).
ctctcatctagtagaagat

SEQ ID NO: 33054 - DNA, 19 bp, Homo sapiens
  siRNA target sequence for MYB (NM_005375.1,1588-1606).
ctcatctagtagaagatct

SEQ ID NO: 33055 - DNA, 19 bp, Homo sapiens
  siRNA target sequence for MYB (NM_005375.1,1616-1634).
gatcaaacaggaatctgat

SEQ ID NO: 33056 - DNA, 19 bp, Homo sapiens
  siRNA target sequence for MYB (NM_005375.1,1671-1689).
ccacccttactgaagaaaa

SEQ ID NO: 33057 - DNA, 19 bp, Homo sapiens
  siRNA target sequence for MYB (NM_005375.1,1703-1721).
ggaatctccaactgataaa

SEQ ID NO: 33058 - DNA, 19 bp, Homo sapiens
  siRNA target sequence for MYB (NM_005375.1,1704-1722).
gaatctccaactgataaat

SEQ ID NO: 33059 - DNA, 19 bp, Homo sapiens
  siRNA target sequence for MYB (NM_005375.1,1803-1821).
gatgcaccgaatattctta

SEQ ID NO: 33060 - DNA, 19 bp, Homo sapiens
  siRNA target sequence for MYB (NM_005375.1,1806-1824).
gcaccgaatattcttacaa

SEQ ID NO: 33061 - DNA, 19 bp, Homo sapiens
  siRNA target sequence for MYB (NM_005375.1,1818-1836).
cttacaagctccgttttaa

SEQ ID NO: 33062 - DNA, 19 bp, Homo sapiens
  siRNA target sequence for MYB (NM_005375.1,1981-1999).
ccagtcaagctcgtaaata

SEQ ID NO: 33063 - DNA, 19 bp, Homo sapiens
  siRNA target sequence for MYB (NM_005375.1,1992-2010).
cgtaaatacgtgaatgcat

SEQ ID NO: 33064 - DNA, 19 bp, Homo sapiens
  siRNA target sequence for MYB (NM_005375.1,1993-2011).
gtaaatacgtgaatgcatt

SEQ ID NO: 33065 - DNA, 19 bp, Homo sapiens
  siRNA target sequence for MYCD (NM_153604.1,19-37).
gagcattccttgctgatta

SEQ ID NO: 33066 - DNA, 19 bp, Homo sapiens
  siRNA target sequence for MYCD (NM_153604.1,31-49).
ctgattaggagcaagttca

SEQ ID NO: 33067 - DNA, 19 bp, Homo sapiens
  siRNA target sequence for MYCD (NM_153604.1,99-117).
ggctaaccaaggcataata

SEQ ID NO: 33068 - DNA, 19 bp, Homo sapiens
  siRNA target sequence for MYCD (NM_153604.1,139-157).
gaattccatgagcaaagaa

SEQ ID NO: 33069 - DNA, 19 bp, Homo sapiens
  siRNA target sequence for MYCD (NM_153604.1,144-162).
ccatgagcaaagaaaacat

SEQ ID NO: 33070 - DNA, 19 bp, Homo sapiens
  siRNA target sequence for MYCD (NM_153604.1,150-168).
gcaaagaaaacatttggat

SEQ ID NO: 33071 - DNA, 19 bp, Homo sapiens
  siRNA target sequence for MYCD (NM_153604.1,166-184).
gatagtgacaaggctaaaa

SEQ ID NO: 33072 - DNA, 19 bp, Homo sapiens
  siRNA target sequence for MYCD (NM_153604.1,219-237).
cagtgccgacttggttaat

SEQ ID NO: 33073 - DNA, 19 bp, Homo sapiens
  siRNA target sequence for MYCD (NM_153604.1,221-239).
gtgccgacttggttaatat

SEQ ID NO: 33074 - DNA, 19 bp, Homo sapiens
  siRNA target sequence for MYCD (NM_153604.1,224-242).
ccgacttggttaatatgca

SEQ ID NO: 33075 - DNA, 19 bp, Homo sapiens
  siRNA target sequence for MYCD (NM_153604.1,305-323).
cccgactcgccgatgatct

SEQ ID NO: 33076 - DNA, 19 bp, Homo sapiens
  siRNA target sequence for MYCD (NM_153604.1,492-510).
ggatcagactcgaagtgaa

SEQ ID NO: 33077 - DNA, 19 bp, Homo sapiens
  siRNA target sequence for MYCD (NM_153604.1,541-559).
gacgctaaagcctcagata

SEQ ID NO: 33078 - DNA, 19 bp, Homo sapiens
  siRNA target sequence for MYCD (NM_153604.1,698-716).
ccgtgcatgctgctgtaaa

SEQ ID NO: 33079 - DNA, 19 bp, Homo sapiens
  siRNA target sequence for MYCD (NM_153604.1,706-724).
gctgctgtaaagtccaaat

SEQ ID NO: 33080 - DNA, 19 bp, Homo sapiens
  siRNA target sequence for MYCD (NM_153604.1,709-727).
gctgtaaagtccaaatcct

SEQ ID NO: 33081 - DNA, 19 bp, Homo sapiens
  siRNA target sequence for MYCD (NM_153604.1,710-728).
ctgtaaagtccaaatcctt

SEQ ID NO: 33082 - DNA, 19 bp, Homo sapiens
  siRNA target sequence for MYCD (NM_153604.1,1032-1050).
ccccttgtctcctgtcaaa

SEQ ID NO: 33083 - DNA, 19 bp, Homo sapiens
  siRNA target sequence for MYCD (NM_153604.1,1106-1124).
ctaacctggatgatctgaa

SEQ ID NO: 33084 - DNA, 19 bp, Homo sapiens
  siRNA target sequence for MYCD (NM_153604.1,1236-1254).
gccgaactttggggatata

SEQ ID NO: 33085 - DNA, 19 bp, Homo sapiens
  siRNA target sequence for MYCD (NM_153604.1,1237-1255).
ccgaactttggggatataa

SEQ ID NO: 33086 - DNA, 19 bp, Homo sapiens
  siRNA target sequence for MYCD (NM_153604.1,1853-1871).
cagatcaaaccaatgtact

SEQ ID NO: 33087 - DNA, 19 bp, Homo sapiens
  siRNA target sequence for MYCD (NM_153604.1,1915-1933).
ccgctgggggctgtgaaaa

SEQ ID NO: 33088 - DNA, 19 bp, Homo sapiens
  siRNA target sequence for MYCD (NM_153604.1,2054-2072).
cacagatggctggtttaca

SEQ ID NO: 33089 - DNA, 19 bp, Homo sapiens
  siRNA target sequence for MYCD (NM_153604.1,2056-2074).
cagatggctggtttacact

SEQ ID NO: 33090 - DNA, 19 bp, Homo sapiens
  siRNA target sequence for MYCD (NM_153604.1,2065-2083).
ggtttacactcttctgata

SEQ ID NO: 33091 - DNA, 19 bp, Homo sapiens
  siRNA target sequence for MYCD (NM_153604.1,2107-2125).
ccatccccaactttttcta

SEQ ID NO: 33092 - DNA, 19 bp, Homo sapiens
  siRNA target sequence for MYCD (NM_153604.1,2176-2194).
gccgtaaagcagcaaatga

SEQ ID NO: 33093 - DNA, 19 bp, Homo sapiens
  siRNA target sequence for MYCD (NM_153604.1,2220-2238).
cctggacgtgcttattgaa

SEQ ID NO: 33094 - DNA, 19 bp, Homo sapiens
  siRNA target sequence for MYCD (NM_153604.1,2269-2287).
gatcactcatgtcttcaaa

SEQ ID NO: 33095 - DNA, 19 bp, Homo sapiens
  siRNA target sequence for MYCD (NM_153604.1,2340-2358).
gccctcggcttcctttgaa

SEQ ID NO: 33096 - DNA, 19 bp, Homo sapiens
  siRNA target sequence for MYCD (NM_153604.1,2342-2360).
cctcggcttcctttgaaca

SEQ ID NO: 33097 - DNA, 19 bp, Homo sapiens
  siRNA target sequence for MYCD (NM_153604.1,2408-2426).
gtgatgagcatcttgaagt

SEQ ID NO: 33098 - DNA, 19 bp, Homo sapiens
  siRNA target sequence for MYCD (NM_153604.1,2464-2482).
gatgtcacccttctaaaaa

SEQ ID NO: 33099 - DNA, 19 bp, Homo sapiens
  siRNA target sequence for MYCD (NM_153604.1,2487-2505).
gagcgaagagcctcacttt

SEQ ID NO: 33100 - DNA, 19 bp, Homo sapiens
  siRNA target sequence for MYCD (NM_153604.1,2489-2507).
gcgaagagcctcactttga

SEQ ID NO: 33101 - DNA, 19 bp, Homo sapiens
  siRNA target sequence for MYCD (NM_153604.1,2490-2508).
cgaagagcctcactttgat

SEQ ID NO: 33102 - DNA, 19 bp, Homo sapiens
  siRNA target sequence for MYCD (NM_153604.1,2637-2655).
gttaagcttcactgaatct

SEQ ID NO: 33103 - DNA, 19 bp, Homo sapiens
  siRNA target sequence for MYCD (NM_153604.1,2680-2698).
gacctcactccgccaaatt

SEQ ID NO: 33104 - DNA, 19 bp, Homo sapiens
  siRNA target sequence for MYCD (NM_153604.1,2764-2782).
gtcactgatctcaatttga

SEQ ID NO: 33105 - DNA, 19 bp, Homo sapiens
  siRNA target sequence for MYCD (NM_153604.1,2770-2788).
gatctcaatttgaattctt

SEQ ID NO: 33106 - DNA, 19 bp, Homo sapiens
  siRNA target sequence for MYST3 (NM_006766.1,405-423).
cgcaaacccgctttatact

SEQ ID NO: 33107 - DNA, 19 bp, Homo sapiens
  siRNA target sequence for MYST3 (NM_006766.1,509-527).
cccatggcttggatcgtaa

SEQ ID NO: 33108 - DNA, 19 bp, Homo sapiens
  siRNA target sequence for MYST3 (NM_006766.1,510-528).
ccatggcttggatcgtaaa

SEQ ID NO: 33109 - DNA, 19 bp, Homo sapiens
  siRNA target sequence for MYST3 (NM_006766.1,511-529).
catggcttggatcgtaaaa

SEQ ID NO: 33110 - DNA, 19 bp, Homo sapiens
  siRNA target sequence for MYST3 (NM_006766.1,515-533).
gcttggatcgtaaaactgt

SEQ ID NO: 33111 - DNA, 19 bp, Homo sapiens
  siRNA target sequence for MYST3 (NM_006766.1,530-548).
ctgttttagaacaattgga

SEQ ID NO: 33112 - DNA, 19 bp, Homo sapiens
  siRNA target sequence for MYST3 (NM_006766.1,546-564).
ggagttgagtgttaaagat

SEQ ID NO: 33113 - DNA, 19 bp, Homo sapiens
  siRNA target sequence for MYST3 (NM_006766.1,626-644).
ggcgaatagcacttcctaa

SEQ ID NO: 33114 - DNA, 19 bp, Homo sapiens
  siRNA target sequence for MYST3 (NM_006766.1,646-664).
cctcggaaccatggaaaat

SEQ ID NO: 33115 - DNA, 19 bp, Homo sapiens
  siRNA target sequence for MYST3 (NM_006766.1,647-665).
ctcggaaccatggaaaatt

SEQ ID NO: 33116 - DNA, 19 bp, Homo sapiens
  siRNA target sequence for MYST3 (NM_006766.1,727-745).
gagtctggtggctcaactt

SEQ ID NO: 33117 - DNA, 19 bp, Homo sapiens
  siRNA target sequence for MYST3 (NM_006766.1,731-749).
ctggtggctcaactttgaa

SEQ ID NO: 33118 - DNA, 19 bp, Homo sapiens
  siRNA target sequence for MYST3 (NM_006766.1,733-751).
ggtggctcaactttgaaaa

SEQ ID NO: 33119 - DNA, 19 bp, Homo sapiens
  siRNA target sequence for MYST3 (NM_006766.1,831-849).
gttacgattggctatcaaa

SEQ ID NO: 33120 - DNA, 19 bp, Homo sapiens
  siRNA target sequence for MYST3 (NM_006766.1,860-878).
gccacggcagactccttaa

SEQ ID NO: 33121 - DNA, 19 bp, Homo sapiens
  siRNA target sequence for MYST3 (NM_006766.1,861-879).
ccacggcagactccttaaa

SEQ ID NO: 33122 - DNA, 19 bp, Homo sapiens
  siRNA target sequence for MYST3 (NM_006766.1,864-882).
cggcagactccttaaagat

SEQ ID NO: 33123 - DNA, 19 bp, Homo sapiens
  siRNA target sequence for MYST3 (NM_006766.1,931-949).
gagagttgtgagtctcttt

SEQ ID NO: 33124 - DNA, 19 bp, Homo sapiens
  siRNA target sequence for MYST3 (NM_006766.1,942-960).
gtctctttcctgtttacct

SEQ ID NO: 33125 - DNA, 19 bp, Homo sapiens
  siRNA target sequence for MYST3 (NM_006766.1,1003-1021).
gaaccaatccccatctgta

SEQ ID NO: 33126 - DNA, 19 bp, Homo sapiens
  siRNA target sequence for MYST3 (NM_006766.1,1006-1024).
ccaatccccatctgtagtt

SEQ ID NO: 33127 - DNA, 19 bp, Homo sapiens
  siRNA target sequence for MYST3 (NM_006766.1,1102-1120).
ggccatccatcctgtttaa

SEQ ID NO: 33128 - DNA, 19 bp, Homo sapiens
  siRNA target sequence for MYST3 (NM_006766.1,1167-1185).
gtgcatcgagtgtaaaaca

SEQ ID NO: 33129 - DNA, 19 bp, Homo sapiens
  siRNA target sequence for MYST3 (NM_006766.1,1196-1214).
gtcgagatcaaggcaaaaa

SEQ ID NO: 33130 - DNA, 19 bp, Homo sapiens
  siRNA target sequence for MYST3 (NM_006766.1,1216-1234).
gcggataacatgctctttt

SEQ ID NO: 33131 - DNA, 19 bp, Homo sapiens
  siRNA target sequence for MYST3 (NM_006766.1,1241-1259).
catgtgaccgaggttttca

SEQ ID NO: 33132 - DNA, 19 bp, Homo sapiens
  siRNA target sequence for MYST3 (NM_006766.1,1244-1262).
gtgaccgaggttttcacat

SEQ ID NO: 33133 - DNA, 19 bp, Homo sapiens
  siRNA target sequence for MYST3 (NM_006766.1,1300-1318).
ggcatgtggatatgtcaaa

SEQ ID NO: 33134 - DNA, 19 bp, Homo sapiens
  siRNA target sequence for MYST3 (NM_006766.1,1301-1319).
gcatgtggatatgtcaaat

SEQ ID NO: 33135 - DNA, 19 bp, Homo sapiens
  siRNA target sequence for MYST3 (NM_006766.1,1340-1358).
gacgaaaacttctacaaaa

SEQ ID NO: 33136 - DNA, 19 bp, Homo sapiens
  siRNA target sequence for MYST3 (NM_006766.1,1342-1360).
cgaaaacttctacaaaaga

SEQ ID NO: 33137 - DNA, 19 bp, Homo sapiens
  siRNA target sequence for MYST3 (NM_006766.1,1371-1389).
gataaaacggcgctatact

SEQ ID NO: 33138 - DNA, 19 bp, Homo sapiens
  siRNA target sequence for MYST3 (NM_006766.1,1378-1396).
cggcgctatactaatccaa

SEQ ID NO: 33139 - DNA, 19 bp, Homo sapiens
  siRNA target sequence for MYST3 (NM_006766.1,1379-1397).
ggcgctatactaatccaat

SEQ ID NO: 33140 - DNA, 19 bp, Homo sapiens
  siRNA target sequence for MYST3 (NM_006766.1,1380-1398).
gcgctatactaatccaata

SEQ ID NO: 33141 - DNA, 19 bp, Homo sapiens
  siRNA target sequence for MYST3 (NM_006766.1,1383-1401).
ctatactaatccaatagga

SEQ ID NO: 33142 - DNA, 19 bp, Homo sapiens
  siRNA target sequence for MYST3 (NM_006766.1,1394-1412).
caataggacgtccaaaaaa

SEQ ID NO: 33143 - DNA, 19 bp, Homo sapiens
  siRNA target sequence for MYST3 (NM_006766.1,1402-1420).
cgtccaaaaaacaggttaa

SEQ ID NO: 33144 - DNA, 19 bp, Homo sapiens
  siRNA target sequence for MYST3 (NM_006766.1,1403-1421).
gtccaaaaaacaggttaaa

SEQ ID NO: 33145 - DNA, 19 bp, Homo sapiens
  siRNA target sequence for MYST3 (NM_006766.1,1474-1492).
ggaaggggtaggaaacgaa

SEQ ID NO: 33146 - DNA, 19 bp, Homo sapiens
  siRNA target sequence for MYST3 (NM_006766.1,1475-1493).
gaaggggtaggaaacgaaa

SEQ ID NO: 33147 - DNA, 19 bp, Homo sapiens
  siRNA target sequence for MYST3 (NM_006766.1,1478-1496).
ggggtaggaaacgaaaaat

SEQ ID NO: 33148 - DNA, 19 bp, Homo sapiens
  siRNA target sequence for MYST3 (NM_006766.1,1566-1584).
cttctgcagagatagcaat

SEQ ID NO: 33149 - DNA, 19 bp, Homo sapiens
  siRNA target sequence for MYST3 (NM_006766.1,1686-1704).
ggactactctgagcaatat

SEQ ID NO: 33150 - DNA, 19 bp, Homo sapiens
  siRNA target sequence for MYST3 (NM_006766.1,1689-1707).
ctactctgagcaatatcga

SEQ ID NO: 33151 - DNA, 19 bp, Homo sapiens
  siRNA target sequence for MYST3 (NM_006766.1,1696-1714).
gagcaatatcgaatcagaa

SEQ ID NO: 33152 - DNA, 19 bp, Homo sapiens
  siRNA target sequence for MYST3 (NM_006766.1,1716-1734).
gaggggcaacaggaaatca

SEQ ID NO: 33153 - DNA, 19 bp, Homo sapiens
  siRNA target sequence for MYST3 (NM_006766.1,1772-1790).
gggatggcaaacaagaaaa

SEQ ID NO: 33154 - DNA, 19 bp, Homo sapiens
  siRNA target sequence for MYST3 (NM_006766.1,1916-1934).
gtccctctgtcattgagtt

SEQ ID NO: 33155 - DNA, 19 bp, Homo sapiens
  siRNA target sequence for MYST3 (NM_006766.1,1932-1950).
gtttgggaagtatgaaatt

SEQ ID NO: 33156 - DNA, 19 bp, Homo sapiens
  siRNA target sequence for MYST3 (NM_006766.1,1988-2006).
caaggctgcccaaattgta

SEQ ID NO: 33157 - DNA, 19 bp, Homo sapiens
  siRNA target sequence for MYST3 (NM_006766.1,1991-2009).
ggctgcccaaattgtatct

SEQ ID NO: 33158 - DNA, 19 bp, Homo sapiens
  siRNA target sequence for MYST3 (NM_006766.1,2053-2071).
cagcagcacatgaagaaat

SEQ ID NO: 33159 - DNA, 19 bp, Homo sapiens
  siRNA target sequence for MYST3 (NM_006766.1,2148-2166).
gagtaccatttattgtcaa

SEQ ID NO: 33160 - DNA, 19 bp, Homo sapiens
  siRNA target sequence for MYST3 (NM_006766.1,2174-2192).
gtcttttggcaaagttgtt

SEQ ID NO: 33161 - DNA, 19 bp, Homo sapiens
  siRNA target sequence for MYST3 (NM_006766.1,2202-2220).
caaaaccctctattacgat

SEQ ID NO: 33162 - DNA, 19 bp, Homo sapiens
  siRNA target sequence for MYST3 (NM_006766.1,2304-2322).
ctgccaacagaagtacaat

SEQ ID NO: 33163 - DNA, 19 bp, Homo sapiens
  siRNA target sequence for MYST3 (NM_006766.1,2363-2381).
gctatggcaggtttctcat

SEQ ID NO: 33164 - DNA, 19 bp, Homo sapiens
  siRNA target sequence for MYST3 (NM_006766.1,2368-2386).
ggcaggtttctcatcgatt

SEQ ID NO: 33165 - DNA, 19 bp, Homo sapiens
  siRNA target sequence for MYST3 (NM_006766.1,2369-2387).
gcaggtttctcatcgattt

SEQ ID NO: 33166 - DNA, 19 bp, Homo sapiens
  siRNA target sequence for MYST3 (NM_006766.1,2582-2600).
cactccaccacctacgaat

SEQ ID NO: 33167 - DNA, 19 bp, Homo sapiens
  siRNA target sequence for MYST3 (NM_006766.1,2607-2625).
cttccgtagtgaccaattt

SEQ ID NO: 33168 - DNA, 19 bp, Homo sapiens
  siRNA target sequence for MYST3 (NM_006766.1,2611-2629).
cgtagtgaccaatttgtga

SEQ ID NO: 33169 - DNA, 19 bp, Homo sapiens
  siRNA target sequence for MYST3 (NM_006766.1,2679-2697).
gaatttgcgacctgtagat

SEQ ID NO: 33170 - DNA, 19 bp, Homo sapiens
  siRNA target sequence for MYST3 (NM_006766.1,2802-2820).
gtgccaggaaagagaatta

SEQ ID NO: 33171 - DNA, 19 bp, Homo sapiens
  siRNA target sequence for MYST3 (NM_006766.1,2866-2884).
gattcttattcagtagaaa

SEQ ID NO: 33172 - DNA, 19 bp, Homo sapiens
  siRNA target sequence for MYST3 (NM_006766.1,2870-2888).
cttattcagtagaaagtga

SEQ ID NO: 33173 - DNA, 19 bp, Homo sapiens
  siRNA target sequence for MYST3 (NM_006766.1,2924-2942).
cacgtttgagcaaacaagt

SEQ ID NO: 33174 - DNA, 19 bp, Homo sapiens
  siRNA target sequence for MYST3 (NM_006766.1,2938-2956).
caagtccttcctcatgata

SEQ ID NO: 33175 - DNA, 19 bp, Homo sapiens
  siRNA target sequence for MYST3 (NM_006766.1,2943-2961).
ccttcctcatgatagtctt

SEQ ID NO: 33176 - DNA, 19 bp, Homo sapiens
  siRNA target sequence for MYST3 (NM_006766.1,3021-3039).
ggaacgttttggtgataaa

SEQ ID NO: 33177 - DNA, 19 bp, Homo sapiens
  siRNA target sequence for MYST3 (NM_006766.1,3025-3043).
cgttttggtgataaagatt

SEQ ID NO: 33178 - DNA, 19 bp, Homo sapiens
  siRNA target sequence for MYST3 (NM_006766.1,3081-3099).
ggaacaatatggagaatgt

SEQ ID NO: 33179 - DNA, 19 bp, Homo sapiens
  siRNA target sequence for MYST3 (NM_006766.1,3123-3141).
ggaacaatacactgaaagt

SEQ ID NO: 33180 - DNA, 19 bp, Homo sapiens
  siRNA target sequence for MYST3 (NM_006766.1,3262-3280).
gctctgaagtgcagattaa

SEQ ID NO: 33181 - DNA, 19 bp, Homo sapiens
  siRNA target sequence for MYST3 (NM_006766.1,3387-3405).
gtcaagctcgccaccaatt

SEQ ID NO: 33182 - DNA, 19 bp, Homo sapiens
  siRNA target sequence for MYST3 (NM_006766.1,3389-3407).
caagctcgccaccaattct

SEQ ID NO: 33183 - DNA, 19 bp, Homo sapiens
  siRNA target sequence for MYST3 (NM_006766.1,3395-3413).
cgccaccaattctcacaaa

SEQ ID NO: 33184 - DNA, 19 bp, Homo sapiens
  siRNA target sequence for MYST3 (NM_006766.1,3421-3439).
ctgaagcgaaagaaaccat

SEQ ID NO: 33185 - DNA, 19 bp, Homo sapiens
  siRNA target sequence for MYST3 (NM_006766.1,3488-3506).
gtgtagtcacagaaactat

SEQ ID NO: 33186 - DNA, 19 bp, Homo sapiens
  siRNA target sequence for MYST3 (NM_006766.1,3490-3508).
gtagtcacagaaactattt

SEQ ID NO: 33187 - DNA, 19 bp, Homo sapiens
  siRNA target sequence for MYST3 (NM_006766.1,3513-3531).
gaccactgaagtgttagat

SEQ ID NO: 33188 - DNA, 19 bp, Homo sapiens
  siRNA target sequence for MYST3 (NM_006766.1,3525-3543).
gttagatgaaccttttgaa

SEQ ID NO: 33189 - DNA, 19 bp, Homo sapiens
  siRNA target sequence for MYST3 (NM_006766.1,3560-3578).
ggccaatgccaagattaga

SEQ ID NO: 33190 - DNA, 19 bp, Homo sapiens
  siRNA target sequence for MYST3 (NM_006766.1,3628-3646).
cttttccctagagaatact

SEQ ID NO: 33191 - DNA, 19 bp, Homo sapiens
  siRNA target sequence for MYST3 (NM_006766.1,3692-3710).
ctaagaggaagtctaaaga

SEQ ID NO: 33192 - DNA, 19 bp, Homo sapiens
  siRNA target sequence for MYST3 (NM_006766.1,3802-3820).
cctcttgagccagatacat

SEQ ID NO: 33193 - DNA, 19 bp, Homo sapiens
  siRNA target sequence for MYST3 (NM_006766.1,3856-3874).
ggcaagagccgcaaaccaa

SEQ ID NO: 33194 - DNA, 19 bp, Homo sapiens
  siRNA target sequence for MYST3 (NM_006766.1,3857-3875).
gcaagagccgcaaaccaat

SEQ ID NO: 33195 - DNA, 19 bp, Homo sapiens
  siRNA target sequence for MYST3 (NM_006766.1,3885-3903).
gaaaagacctggtcgaaaa

SEQ ID NO: 33196 - DNA, 19 bp, Homo sapiens
  siRNA target sequence for MYST3 (NM_006766.1,3895-3913).
ggtcgaaaaccaggattta

SEQ ID NO: 33197 - DNA, 19 bp, Homo sapiens
  siRNA target sequence for MYST3 (NM_006766.1,3930-3948).
catgccagtttctactcaa

SEQ ID NO: 33198 - DNA, 19 bp, Homo sapiens
  siRNA target sequence for MYST3 (NM_006766.1,3944-3962).
ctcaagcatgcgtcattga

SEQ ID NO: 33199 - DNA, 19 bp, Homo sapiens
  siRNA target sequence for MYST3 (NM_006766.1,3955-3973).
gtcattgagcccatcgttt

SEQ ID NO: 33200 - DNA, 19 bp, Homo sapiens
  siRNA target sequence for MYST3 (NM_006766.1,3964-3982).
cccatcgtttccattccta

SEQ ID NO: 33201 - DNA, 19 bp, Homo sapiens
  siRNA target sequence for MYST3 (NM_006766.1,3965-3983).
ccatcgtttccattcctaa

SEQ ID NO: 33202 - DNA, 19 bp, Homo sapiens
  siRNA target sequence for MYST3 (NM_006766.1,4427-4445).
ctggtgttcaagagtcttt

SEQ ID NO: 33203 - DNA, 19 bp, Homo sapiens
  siRNA target sequence for MYST3 (NM_006766.1,4594-4612).
cacactaaggaagagttaa

SEQ ID NO: 33204 - DNA, 19 bp, Homo sapiens
  siRNA target sequence for MYST3 (NM_006766.1,4812-4830).
ctgtcatgcgtcagaacat

SEQ ID NO: 33205 - DNA, 19 bp, Homo sapiens
  siRNA target sequence for MYST3 (NM_006766.1,4814-4832).
gtcatgcgtcagaacataa

SEQ ID NO: 33206 - DNA, 19 bp, Homo sapiens
  siRNA target sequence for MYST3 (NM_006766.1,4816-4834).
catgcgtcagaacataata

SEQ ID NO: 33207 - DNA, 19 bp, Homo sapiens
  siRNA target sequence for MYST3 (NM_006766.1,5494-5512).
ccgctgtcacagtgtagta

SEQ ID NO: 33208 - DNA, 19 bp, Homo sapiens
  siRNA target sequence for MYST3 (NM_006766.1,5495-5513).
cgctgtcacagtgtagtat

SEQ ID NO: 33209 - DNA, 19 bp, Homo sapiens
  siRNA target sequence for MYST3 (NM_006766.1,5497-5515).
ctgtcacagtgtagtatga

SEQ ID NO: 33210 - DNA, 19 bp, Homo sapiens
  siRNA target sequence for MYST3 (NM_006766.1,5503-5521).
cagtgtagtatgaataaca

SEQ ID NO: 33211 - DNA, 19 bp, Homo sapiens
  siRNA target sequence for MYST3 (NM_006766.1,5505-5523).
gtgtagtatgaataacagt

SEQ ID NO: 33212 - DNA, 19 bp, Homo sapiens
  siRNA target sequence for MYST3 (NM_006766.1,5544-5562).
catggagataccagaatct

SEQ ID NO: 33213 - DNA, 19 bp, Homo sapiens
  siRNA target sequence for MYST3 (NM_006766.1,5563-5581).
ggaagcactgggaacataa

SEQ ID NO: 33214 - DNA, 19 bp, Homo sapiens
  siRNA target sequence for MYST3 (NM_006766.1,5570-5588).
ctgggaacataagtatcta

SEQ ID NO: 33215 - DNA, 19 bp, Homo sapiens
  siRNA target sequence for MYST3 (NM_006766.1,5573-5591).
ggaacataagtatctatga

SEQ ID NO: 33216 - DNA, 19 bp, Homo sapiens
  siRNA target sequence for MYST3 (NM_006766.1,5592-5610).
gaggattccaggggatttt

SEQ ID NO: 33217 - DNA, 19 bp, Homo sapiens
  siRNA target sequence for MYST3 (NM_006766.1,5595-5613).
gattccaggggattttggt

SEQ ID NO: 33218 - DNA, 19 bp, Homo sapiens
  siRNA target sequence for MYST3 (NM_006766.1,5689-5707).
cctcatgccatgccttata

SEQ ID NO: 33219 - DNA, 19 bp, Homo sapiens
  siRNA target sequence for MYST3 (NM_006766.1,5886-5904).
catgtctgccaccaacatt

SEQ ID NO: 33220 - DNA, 19 bp, Homo sapiens
  siRNA target sequence for MYST3 (NM_006766.1,6070-6088).
gttcagcgtggcatgaaca

SEQ ID NO: 33221 - DNA, 19 bp, Homo sapiens
  siRNA target sequence for MYST3 (NM_006766.1,6105-6123).
gcctactcccgcctataat

SEQ ID NO: 33222 - DNA, 19 bp, Homo sapiens
  siRNA target sequence for MYST3 (NM_006766.1,6107-6125).
ctactcccgcctataatgt

SEQ ID NO: 33223 - DNA, 19 bp, Homo sapiens
  siRNA target sequence for MYST3 (NM_006766.1,6112-6130).
cccgcctataatgtcaatt

SEQ ID NO: 33224 - DNA, 19 bp, Homo sapiens
  siRNA target sequence for MYST3 (NM_006766.1,6154-6172).
gccatgaacagctatcgaa

SEQ ID NO: 33225 - DNA, 19 bp, Homo sapiens
  siRNA target sequence for MYST3 (NM_006766.1,6155-6173).
ccatgaacagctatcgaat

SEQ ID NO: 33226 - DNA, 19 bp, Homo sapiens
  siRNA target sequence for MYST3 (NM_006766.1,6159-6177).
gaacagctatcgaatgaca

SEQ ID NO: 33227 - DNA, 19 bp, Homo sapiens
  siRNA target sequence for MYST3 (NM_006766.1,6206-6224).
gtaaccctgcctacatgaa

SEQ ID NO: 33228 - DNA, 19 bp, Homo sapiens
  siRNA target sequence for MYST3 (NM_006766.1,6222-6240).
gaaccagacagcacagtat

SEQ ID NO: 33229 - DNA, 19 bp, Homo sapiens
  siRNA target sequence for MYST3 (NM_006766.1,6307-6325).
cctcatgggaacatgatgt

SEQ ID NO: 33230 - DNA, 19 bp, Homo sapiens
  siRNA target sequence for MYST3 (NM_006766.1,6338-6356).
cccatcacagctacatgaa

SEQ ID NO: 33231 - DNA, 19 bp, Homo sapiens
  siRNA target sequence for MYST3 (NM_006766.1,6382-6400).
ctcaacggaccttacatga

SEQ ID NO: 33232 - DNA, 19 bp, Homo sapiens
  siRNA target sequence for MYST4 (NM_012330.1,348-366).
gtggattcttgaagctata

SEQ ID NO: 33233 - DNA, 19 bp, Homo sapiens
  siRNA target sequence for MYST4 (NM_012330.1,428-446).
cttcccatgggttggataa

SEQ ID NO: 33234 - DNA, 19 bp, Homo sapiens
  siRNA target sequence for MYST4 (NM_012330.1,515-533).
gccttgcctcctataagga

SEQ ID NO: 33235 - DNA, 19 bp, Homo sapiens
  siRNA target sequence for MYST4 (NM_012330.1,540-558).
caaccctgggcgcttttca

SEQ ID NO: 33236 - DNA, 19 bp, Homo sapiens
  siRNA target sequence for MYST4 (NM_012330.1,543-561).
ccctgggcgcttttcatca

SEQ ID NO: 33237 - DNA, 19 bp, Homo sapiens
  siRNA target sequence for MYST4 (NM_012330.1,547-565).
gggcgcttttcatcagtta

SEQ ID NO: 33238 - DNA, 19 bp, Homo sapiens
  siRNA target sequence for MYST4 (NM_012330.1,594-612).
ggggtctagaggatcatgt

SEQ ID NO: 33239 - DNA, 19 bp, Homo sapiens
  siRNA target sequence for MYST4 (NM_012330.1,595-613).
gggtctagaggatcatgta

SEQ ID NO: 33240 - DNA, 19 bp, Homo sapiens
  siRNA target sequence for MYST4 (NM_012330.1,596-614).
ggtctagaggatcatgtaa

SEQ ID NO: 33241 - DNA, 19 bp, Homo sapiens
  siRNA target sequence for MYST4 (NM_012330.1,597-615).
gtctagaggatcatgtaat

SEQ ID NO: 33242 - DNA, 19 bp, Homo sapiens
  siRNA target sequence for MYST4 (NM_012330.1,599-617).
ctagaggatcatgtaatga

SEQ ID NO: 33243 - DNA, 19 bp, Homo sapiens
  siRNA target sequence for MYST4 (NM_012330.1,602-620).
gaggatcatgtaatgatct

SEQ ID NO: 33244 - DNA, 19 bp, Homo sapiens
  siRNA target sequence for MYST4 (NM_012330.1,780-798).
ggccaaacgcgctgtgaat

SEQ ID NO: 33245 - DNA, 19 bp, Homo sapiens
  siRNA target sequence for MYST4 (NM_012330.1,781-799).
gccaaacgcgctgtgaata

SEQ ID NO: 33246 - DNA, 19 bp, Homo sapiens
  siRNA target sequence for MYST4 (NM_012330.1,782-800).
ccaaacgcgctgtgaataa

SEQ ID NO: 33247 - DNA, 19 bp, Homo sapiens
  siRNA target sequence for MYST4 (NM_012330.1,783-801).
caaacgcgctgtgaataat

SEQ ID NO: 33248 - DNA, 19 bp, Homo sapiens
  siRNA target sequence for MYST4 (NM_012330.1,824-842).
cgcagtacagggtcaatta

SEQ ID NO: 33249 - DNA, 19 bp, Homo sapiens
  siRNA target sequence for MYST4 (NM_012330.1,825-843).
gcagtacagggtcaattat

SEQ ID NO: 33250 - DNA, 19 bp, Homo sapiens
  siRNA target sequence for MYST4 (NM_012330.1,837-855).
caattatgggagcttagat

SEQ ID NO: 33251 - DNA, 19 bp, Homo sapiens
  siRNA target sequence for MYST4 (NM_012330.1,858-876).
caaaggggcacctcagtat

SEQ ID NO: 33252 - DNA, 19 bp, Homo sapiens
  siRNA target sequence for MYST4 (NM_012330.1,911-929).
gccttctaccccatgagaa

SEQ ID NO: 33253 - DNA, 19 bp, Homo sapiens
  siRNA target sequence for MYST4 (NM_012330.1,912-930).
ccttctaccccatgagaaa

SEQ ID NO: 33254 - DNA, 19 bp, Homo sapiens
  siRNA target sequence for MYST4 (NM_012330.1,941-959).
gtgctgatcccattccaat

SEQ ID NO: 33255 - DNA, 19 bp, Homo sapiens
  siRNA target sequence for MYST4 (NM_012330.1,943-961).
gctgatcccattccaatat

SEQ ID NO: 33256 - DNA, 19 bp, Homo sapiens
  siRNA target sequence for MYST4 (NM_012330.1,946-964).
gatcccattccaatatgta

SEQ ID NO: 33257 - DNA, 19 bp, Homo sapiens
  siRNA target sequence for MYST4 (NM_012330.1,955-973).
ccaatatgtagcttctgtt

SEQ ID NO: 33258 - DNA, 19 bp, Homo sapiens
  siRNA target sequence for MYST4 (NM_012330.1,978-996).
gactaaagaatcaaatcgt

SEQ ID NO: 33259 - DNA, 19 bp, Homo sapiens
  siRNA target sequence for MYST4 (NM_012330.1,1045-1063).
ggacacccatcctgtttga

SEQ ID NO: 33260 - DNA, 19 bp, Homo sapiens
  siRNA target sequence for MYST4 (NM_012330.1,1046-1064).
gacacccatcctgtttgaa

SEQ ID NO: 33261 - DNA, 19 bp, Homo sapiens
  siRNA target sequence for MYST4 (NM_012330.1,1048-1066).
cacccatcctgtttgaaat

SEQ ID NO: 33262 - DNA, 19 bp, Homo sapiens
  siRNA target sequence for MYST4 (NM_012330.1,1184-1202).
cctgtgatagaggatttca

SEQ ID NO: 33263 - DNA, 19 bp, Homo sapiens
  siRNA target sequence for MYST4 (NM_012330.1,1187-1205).
gtgatagaggatttcatat

SEQ ID NO: 33264 - DNA, 19 bp, Homo sapiens
  siRNA target sequence for MYST4 (NM_012330.1,1337-1355).
ccattggacgaccgaaaaa

SEQ ID NO: 33265 - DNA, 19 bp, Homo sapiens
  siRNA target sequence for MYST4 (NM_012330.1,1338-1356).
cattggacgaccgaaaaat

SEQ ID NO: 33266 - DNA, 19 bp, Homo sapiens
  siRNA target sequence for MYST4 (NM_012330.1,1345-1363).
cgaccgaaaaataaattaa

SEQ ID NO: 33267 - DNA, 19 bp, Homo sapiens
  siRNA target sequence for MYST4 (NM_012330.1,1377-1395).
gtctgtaaccagtgatgaa

SEQ ID NO: 33268 - DNA, 19 bp, Homo sapiens
  siRNA target sequence for MYST4 (NM_012330.1,1393-1411).
gaaggatccatgaatgcat

SEQ ID NO: 33269 - DNA, 19 bp, Homo sapiens
  siRNA target sequence for MYST4 (NM_012330.1,1432-1450).
ggtaggggtcaaaagacta

SEQ ID NO: 33270 - DNA, 19 bp, Homo sapiens
  siRNA target sequence for MYST4 (NM_012330.1,1433-1451).
gtaggggtcaaaagactaa

SEQ ID NO: 33271 - DNA, 19 bp, Homo sapiens
  siRNA target sequence for MYST4 (NM_012330.1,1436-1454).
ggggtcaaaagactaaagt

SEQ ID NO: 33272 - DNA, 19 bp, Homo sapiens
  siRNA target sequence for MYST4 (NM_012330.1,1455-1473).
ctgtaccacaccttcatct

SEQ ID NO: 33273 - DNA, 19 bp, Homo sapiens
  siRNA target sequence for MYST4 (NM_012330.1,1505-1523).
gcagattggctgttacaga

SEQ ID NO: 33274 - DNA, 19 bp, Homo sapiens
  siRNA target sequence for MYST4 (NM_012330.1,1580-1598).
cctctacacttaaagttaa

SEQ ID NO: 33275 - DNA, 19 bp, Homo sapiens
  siRNA target sequence for MYST4 (NM_012330.1,1583-1601).
ctacacttaaagttaacaa

SEQ ID NO: 33276 - DNA, 19 bp, Homo sapiens
  siRNA target sequence for MYST4 (NM_012330.1,1662-1680).
cagatcacgaggtgaaatt

SEQ ID NO: 33277 - DNA, 19 bp, Homo sapiens
  siRNA target sequence for MYST4 (NM_012330.1,1664-1682).
gatcacgaggtgaaattat

SEQ ID NO: 33278 - DNA, 19 bp, Homo sapiens
  siRNA target sequence for MYST4 (NM_012330.1,1669-1687).
cgaggtgaaattatagact

SEQ ID NO: 33279 - DNA, 19 bp, Homo sapiens
  siRNA target sequence for MYST4 (NM_012330.1,1670-1688).
gaggtgaaattatagactt

SEQ ID NO: 33280 - DNA, 19 bp, Homo sapiens
  siRNA target sequence for MYST4 (NM_012330.1,1672-1690).
ggtgaaattatagactttt

SEQ ID NO: 33281 - DNA, 19 bp, Homo sapiens
  siRNA target sequence for MYST4 (NM_012330.1,1695-1713).
gcactatcgtccaaggaaa

SEQ ID NO: 33282 - DNA, 19 bp, Homo sapiens
  siRNA target sequence for MYST4 (NM_012330.1,1696-1714).
cactatcgtccaaggaaaa

SEQ ID NO: 33283 - DNA, 19 bp, Homo sapiens
  siRNA target sequence for MYST4 (NM_012330.1,1759-1777).
ggtaccacacaaaagctaa

SEQ ID NO: 33284 - DNA, 19 bp, Homo sapiens
  siRNA target sequence for MYST4 (NM_012330.1,1760-1778).
gtaccacacaaaagctaaa

SEQ ID NO: 33285 - DNA, 19 bp, Homo sapiens
  siRNA target sequence for MYST4 (NM_012330.1,2019-2037).
caaacgtatgcgtcgtaaa

SEQ ID NO: 33286 - DNA, 19 bp, Homo sapiens
  siRNA target sequence for MYST4 (NM_012330.1,2024-2042).
gtatgcgtcgtaaaactga

SEQ ID NO: 33287 - DNA, 19 bp, Homo sapiens
  siRNA target sequence for MYST4 (NM_012330.1,2028-2046).
gcgtcgtaaaactgaatta

SEQ ID NO: 33288 - DNA, 19 bp, Homo sapiens
  siRNA target sequence for MYST4 (NM_012330.1,2029-2047).
cgtcgtaaaactgaattat

SEQ ID NO: 33289 - DNA, 19 bp, Homo sapiens
  siRNA target sequence for MYST4 (NM_012330.1,2208-2226).
gctaggcagattaaaatat

SEQ ID NO: 33290 - DNA, 19 bp, Homo sapiens
  siRNA target sequence for MYST4 (NM_012330.1,2271-2289).
cttgacagacggaaggatt

SEQ ID NO: 33291 - DNA, 19 bp, Homo sapiens
  siRNA target sequence for MYST4 (NM_012330.1,2274-2292).
gacagacggaaggattaaa

SEQ ID NO: 33292 - DNA, 19 bp, Homo sapiens
  siRNA target sequence for MYST4 (NM_012330.1,2293-2311).
cctgatcaggatgatgata

SEQ ID NO: 33293 - DNA, 19 bp, Homo sapiens
  siRNA target sequence for MYST4 (NM_012330.1,2342-2360).
gtgcagatgtaaatgtgat

SEQ ID NO: 33294 - DNA, 19 bp, Homo sapiens
  siRNA target sequence for MYST4 (NM_012330.1,2367-2385).
caaggatgtcgttactgaa

SEQ ID NO: 33295 - DNA, 19 bp, Homo sapiens
  siRNA target sequence for MYST4 (NM_012330.1,2466-2484).
ccggtacccttctgtgatt

SEQ ID NO: 33296 - DNA, 19 bp, Homo sapiens
  siRNA target sequence for MYST4 (NM_012330.1,2469-2487).
gtacccttctgtgattgaa

SEQ ID NO: 33297 - DNA, 19 bp, Homo sapiens
  siRNA target sequence for MYST4 (NM_012330.1,2479-2497).
gtgattgaatttggtaaat

SEQ ID NO: 33298 - DNA, 19 bp, Homo sapiens
  siRNA target sequence for MYST4 (NM_012330.1,2491-2509).
ggtaaatatgaaatccaaa

SEQ ID NO: 33299 - DNA, 19 bp, Homo sapiens
  siRNA target sequence for MYST4 (NM_012330.1,2535-2553).
ggaatatgcaagattacca

SEQ ID NO: 33300 - DNA, 19 bp, Homo sapiens
  siRNA target sequence for MYST4 (NM_012330.1,2536-2554).
gaatatgcaagattaccaa

SEQ ID NO: 33301 - DNA, 19 bp, Homo sapiens
  siRNA target sequence for MYST4 (NM_012330.1,2542-2560).
gcaagattaccaaagcttt

SEQ ID NO: 33302 - DNA, 19 bp, Homo sapiens
  siRNA target sequence for MYST4 (NM_012330.1,2543-2561).
caagattaccaaagcttta

SEQ ID NO: 33303 - DNA, 19 bp, Homo sapiens
  siRNA target sequence for MYST4 (NM_012330.1,2608-2626).
ctaagacactccaagaagt

SEQ ID NO: 33304 - DNA, 19 bp, Homo sapiens
  siRNA target sequence for MYST4 (NM_012330.1,2751-2769).
ggaccacaaaacgttgtat

SEQ ID NO: 33305 - DNA, 19 bp, Homo sapiens
  siRNA target sequence for MYST4 (NM_012330.1,2754-2772).
ccacaaaacgttgtattat

SEQ ID NO: 33306 - DNA, 19 bp, Homo sapiens
  siRNA target sequence for MYST4 (NM_012330.1,2856-2874).
gctttgccagcagaagtat

SEQ ID NO: 33307 - DNA, 19 bp, Homo sapiens
  siRNA target sequence for MYST4 (NM_012330.1,2878-2896).
gtctcctgcataatgatca

SEQ ID NO: 33308 - DNA, 19 bp, Homo sapiens
  siRNA target sequence for MYST4 (NM_012330.1,2943-2961).
cagctatttgctttctaga

SEQ ID NO: 33309 - DNA, 19 bp, Homo sapiens
  siRNA target sequence for MYST4 (NM_012330.1,3236-3254).
gttccagagccaatgaact

SEQ ID NO: 33310 - DNA, 19 bp, Homo sapiens
  siRNA target sequence for MYST4 (NM_012330.1,3240-3258).
cagagccaatgaacttgat

SEQ ID NO: 33311 - DNA, 19 bp, Homo sapiens
  siRNA target sequence for MYST4 (NM_012330.1,3272-3290).
ggtggaccccaattttaat

SEQ ID NO: 33312 - DNA, 19 bp, Homo sapiens
  siRNA target sequence for MYST4 (NM_012330.1,3393-3411).
gtcaactagagctaacagt

SEQ ID NO: 33313 - DNA, 19 bp, Homo sapiens
  siRNA target sequence for MYST4 (NM_012330.1,3413-3431).
ggcaatcacctgcaaaagt

SEQ ID NO: 33314 - DNA, 19 bp, Homo sapiens
  siRNA target sequence for MYST4 (NM_012330.1,3422-3440).
ctgcaaaagtacaatcgaa

SEQ ID NO: 33315 - DNA, 19 bp, Homo sapiens
  siRNA target sequence for MYST4 (NM_012330.1,3662-3680).
cacagtcagttgccataaa

SEQ ID NO: 33316 - DNA, 19 bp, Homo sapiens
  siRNA target sequence for MYST4 (NM_012330.1,3664-3682).
cagtcagttgccataaaga

SEQ ID NO: 33317 - DNA, 19 bp, Homo sapiens
  siRNA target sequence for MYST4 (NM_012330.1,3732-3750).
gatcaacagcagtgtaaca

SEQ ID NO: 33318 - DNA, 19 bp, Homo sapiens
  siRNA target sequence for MYST4 (NM_012330.1,3768-3786).
gacgacagaagtactgaat

SEQ ID NO: 33319 - DNA, 19 bp, Homo sapiens
  siRNA target sequence for MYST4 (NM_012330.1,3897-3915).
gcatcagcctgggaagaaa

SEQ ID NO: 33320 - DNA, 19 bp, Homo sapiens
  siRNA target sequence for MYST4 (NM_012330.1,3960-3978).
gaatgctgacccttgtaga

SEQ ID NO: 33321 - DNA, 19 bp, Homo sapiens
  siRNA target sequence for MYST4 (NM_012330.1,3965-3983).
ctgacccttgtagaaacaa

SEQ ID NO: 33322 - DNA, 19 bp, Homo sapiens
  siRNA target sequence for MYST4 (NM_012330.1,3967-3985).
gacccttgtagaaacaata

SEQ ID NO: 33323 - DNA, 19 bp, Homo sapiens
  siRNA target sequence for MYST4 (NM_012330.1,3970-3988).
ccttgtagaaacaatatga

SEQ ID NO: 33324 - DNA, 19 bp, Homo sapiens
  siRNA target sequence for MYST4 (NM_012330.1,3981-3999).
caatatgaatgatgattca

SEQ ID NO: 33325 - DNA, 19 bp, Homo sapiens
  siRNA target sequence for MYST4 (NM_012330.1,4070-4088).
caaagcgcggtctatctaa

SEQ ID NO: 33326 - DNA, 19 bp, Homo sapiens
  siRNA target sequence for MYST4 (NM_012330.1,4107-4125).
gaggaagaccggatttaaa

SEQ ID NO: 33327 - DNA, 19 bp, Homo sapiens
  siRNA target sequence for MYST4 (NM_012330.1,4163-4181).
ctgacgagcaggtaacagt

SEQ ID NO: 33328 - DNA, 19 bp, Homo sapiens
  siRNA target sequence for MYST4 (NM_012330.1,4343-4361).
cagaagatgatctcatcaa

SEQ ID NO: 33329 - DNA, 19 bp, Homo sapiens
  siRNA target sequence for MYST4 (NM_012330.1,4456-4474).
gatccagatggtgctaaaa

SEQ ID NO: 33330 - DNA, 19 bp, Homo sapiens
  siRNA target sequence for MYST4 (NM_012330.1,4520-4538).
ctgcacgtttggatgatca

SEQ ID NO: 33331 - DNA, 19 bp, Homo sapiens
  siRNA target sequence for MYST4 (NM_012330.1,4688-4706).
cttttttagaccttaatgt

SEQ ID NO: 33332 - DNA, 19 bp, Homo sapiens
  siRNA target sequence for MYST4 (NM_012330.1,4721-4739).
cgaacccagaggtcttaat

SEQ ID NO: 33333 - DNA, 19 bp, Homo sapiens
  siRNA target sequence for MYST4 (NM_012330.1,4752-4770).
cgacctgacagcttcttgt

SEQ ID NO: 33334 - DNA, 19 bp, Homo sapiens
  siRNA target sequence for MYST4 (NM_012330.1,4758-4776).
gacagcttcttgtaacagt

SEQ ID NO: 33335 - DNA, 19 bp, Homo sapiens
  siRNA target sequence for MYST4 (NM_012330.1,4874-4892).
gcaaggaagtcgatacaga

SEQ ID NO: 33336 - DNA, 19 bp, Homo sapiens
  siRNA target sequence for MYST4 (NM_012330.1,4910-4928).
cagcaaccatggaaatcga

SEQ ID NO: 33337 - DNA, 19 bp, Homo sapiens
  siRNA target sequence for MYST4 (NM_012330.1,5021-5039).
gtagaagcctacagaacta

SEQ ID NO: 33338 - DNA, 19 bp, Homo sapiens
  siRNA target sequence for MYST4 (NM_012330.1,5101-5119).
cacagtagcccagtttcat

SEQ ID NO: 33339 - DNA, 19 bp, Homo sapiens
  siRNA target sequence for MYST4 (NM_012330.1,5262-5280).
gatggatgtcccatcagtt

SEQ ID NO: 33340 - DNA, 19 bp, Homo sapiens
  siRNA target sequence for MYST4 (NM_012330.1,5265-5283).
ggatgtcccatcagtttca

SEQ ID NO: 33341 - DNA, 19 bp, Homo sapiens
  siRNA target sequence for MYST4 (NM_012330.1,5272-5290).
ccatcagtttcagatcatt

SEQ ID NO: 33342 - DNA, 19 bp, Homo sapiens
  siRNA target sequence for MYST4 (NM_012330.1,5301-5319).
cgtagacagtggatttagt

SEQ ID NO: 33343 - DNA, 19 bp, Homo sapiens
  siRNA target sequence for MYST4 (NM_012330.1,5362-5380).
ccaagcagctacgattcta

SEQ ID NO: 33344 - DNA, 19 bp, Homo sapiens
  siRNA target sequence for MYST4 (NM_012330.1,5366-5384).
gcagctacgattctactat

SEQ ID NO: 33345 - DNA, 19 bp, Homo sapiens
  siRNA target sequence for MYST4 (NM_012330.1,5416-5434).
cagaacagctgctcctata

SEQ ID NO: 33346 - DNA, 19 bp, Homo sapiens
  siRNA target sequence for MYST4 (NM_012330.1,5621-5639).
gcagcatggctgctaactt

SEQ ID NO: 33347 - DNA, 19 bp, Homo sapiens
  siRNA target sequence for MYST4 (NM_012330.1,5684-5702).
ccaacattggcttatacga

SEQ ID NO: 33348 - DNA, 19 bp, Homo sapiens
  siRNA target sequence for MYST4 (NM_012330.1,5704-5722).
cgaatgggtcagagtgatt

SEQ ID NO: 33349 - DNA, 19 bp, Homo sapiens
  siRNA target sequence for MYST4 (NM_012330.1,5773-5791).
ctgcagcagttaactaata

SEQ ID NO: 33350 - DNA, 19 bp, Homo sapiens
  siRNA target sequence for MYST4 (NM_012330.1,5778-5796).
gcagttaactaatacactt

SEQ ID NO: 33351 - DNA, 19 bp, Homo sapiens
  siRNA target sequence for MYST4 (NM_012330.1,5779-5797).
cagttaactaatacactta

SEQ ID NO: 33352 - DNA, 19 bp, Homo sapiens
  siRNA target sequence for MYST4 (NM_012330.1,5786-5804).
ctaatacacttattgatca

SEQ ID NO: 33353 - DNA, 19 bp, Homo sapiens
  siRNA target sequence for MYST4 (NM_012330.1,5845-5863).
gcaaacagtgcctctttgt

SEQ ID NO: 33354 - DNA, 19 bp, Homo sapiens
  siRNA target sequence for MYST4 (NM_012330.1,5876-5894).
gtaacacagggcttgttca

SEQ ID NO: 33355 - DNA, 19 bp, Homo sapiens
  siRNA target sequence for MYST4 (NM_012330.1,6009-6027).
gaacatggctgcatcaaat

SEQ ID NO: 33356 - DNA, 19 bp, Homo sapiens
  siRNA target sequence for MYST4 (NM_012330.1,6124-6142).
gccacccatcagtcacaaa

SEQ ID NO: 33357 - DNA, 19 bp, Homo sapiens
  siRNA target sequence for MYST4 (NM_012330.1,6129-6147).
ccatcagtcacaaatctat

SEQ ID NO: 33358 - DNA, 19 bp, Homo sapiens
  siRNA target sequence for MYST4 (NM_012330.1,6174-6192).
gggtcctgcacggacttta

SEQ ID NO: 33359 - DNA, 19 bp, Homo sapiens
  siRNA target sequence for MYST4 (NM_012330.1,6175-6193).
ggtcctgcacggactttaa

SEQ ID NO: 33360 - DNA, 19 bp, Homo sapiens
  siRNA target sequence for MYST4 (NM_012330.1,6178-6196).
cctgcacggactttaacga

SEQ ID NO: 33361 - DNA, 19 bp, Homo sapiens
  siRNA target sequence for MYST4 (NM_012330.1,6179-6197).
ctgcacggactttaacgat

SEQ ID NO: 33362 - DNA, 19 bp, Homo sapiens
  siRNA target sequence for MYST4 (NM_012330.1,6184-6202).
cggactttaacgatgcaaa

SEQ ID NO: 33363 - DNA, 19 bp, Homo sapiens
  siRNA target sequence for MYST4 (NM_012330.1,6199-6217).
caaagaggcatgaacatga

SEQ ID NO: 33364 - DNA, 19 bp, Homo sapiens
  siRNA target sequence for MYST4 (NM_012330.1,6231-6249).
gccagcgccagcctacaat

SEQ ID NO: 33365 - DNA, 19 bp, Homo sapiens
  siRNA target sequence for MYST4 (NM_012330.1,6235-6253).
gcgccagcctacaatgtca

SEQ ID NO: 33366 - DNA, 19 bp, Homo sapiens
  siRNA target sequence for MYST4 (NM_012330.1,6236-6254).
cgccagcctacaatgtcaa

SEQ ID NO: 33367 - DNA, 19 bp, Homo sapiens
  siRNA target sequence for MYST4 (NM_012330.1,6302-6320).
gcatgtcccagccaatgat

SEQ ID NO: 33368 - DNA, 19 bp, Homo sapiens
  siRNA target sequence for MYST4 (NM_012330.1,6343-6361).
catggctatatgaatcaaa

SEQ ID NO: 33369 - DNA, 19 bp, Homo sapiens
  siRNA target sequence for MYST4 (NM_012330.1,6436-6454).
ccaccccacggtaacatga

SEQ ID NO: 33370 - DNA, 19 bp, Homo sapiens
  siRNA target sequence for MYST4 (NM_012330.1,6437-6455).
caccccacggtaacatgat

SEQ ID NO: 33371 - DNA, 19 bp, Homo sapiens
  siRNA target sequence for MYST4 (NM_012330.1,6439-6457).
ccccacggtaacatgatgt

SEQ ID NO: 33372 - DNA, 19 bp, Homo sapiens
  siRNA target sequence for MYST4 (NM_012330.1,6440-6458).
cccacggtaacatgatgta

SEQ ID NO: 33373 - DNA, 19 bp, Homo sapiens
  siRNA target sequence for MYST4 (NM_012330.1,6469-6487).
ggacatcacggctacatga

SEQ ID NO: 33374 - DNA, 19 bp, Homo sapiens
  siRNA target sequence for MYST4 (NM_012330.1,6470-6488).
gacatcacggctacatgaa

SEQ ID NO: 33375 - DNA, 19 bp, Homo sapiens
  siRNA target sequence for MYST4 (NM_012330.1,6498-6516).
gtccaaacagtctctcaat

SEQ ID NO: 33376 - DNA, 19 bp, Homo sapiens
  siRNA target sequence for MYST4 (NM_012330.1,6511-6529).
ctcaatggctcctacatga

SEQ ID NO: 33377 - DNA, 19 bp, Homo sapiens
  siRNA target sequence for N-PAC (NM_032569.2,60-78).
gaaactcggccgatatcct

SEQ ID NO: 33378 - DNA, 19 bp, Homo sapiens
  siRNA target sequence for N-PAC (NM_032569.2,80-98).
cttggccaggaaagattgt

SEQ ID NO: 33379 - DNA, 19 bp, Homo sapiens
  siRNA target sequence for N-PAC (NM_032569.2,83-101).
ggccaggaaagattgttaa

SEQ ID NO: 33380 - DNA, 19 bp, Homo sapiens
  siRNA target sequence for N-PAC (NM_032569.2,120-138).
gaaacctcgcggaaagaaa

SEQ ID NO: 33381 - DNA, 19 bp, Homo sapiens
  siRNA target sequence for N-PAC (NM_032569.2,124-142).
cctcgcggaaagaaatgct

SEQ ID NO: 33382 - DNA, 19 bp, Homo sapiens
  siRNA target sequence for N-PAC (NM_032569.2,125-143).
ctcgcggaaagaaatgctt

SEQ ID NO: 33383 - DNA, 19 bp, Homo sapiens
  siRNA target sequence for N-PAC (NM_032569.2,201-219).
gccatatcatgctcataaa

SEQ ID NO: 33384 - DNA, 19 bp, Homo sapiens
  siRNA target sequence for N-PAC (NM_032569.2,310-328).
cagacgtcatcccacaatt

SEQ ID NO: 33385 - DNA, 19 bp, Homo sapiens
  siRNA target sequence for N-PAC (NM_032569.2,312-330).
gacgtcatcccacaattct

SEQ ID NO: 33386 - DNA, 19 bp, Homo sapiens
  siRNA target sequence for N-PAC (NM_032569.2,315-333).
gtcatcccacaattcttct

SEQ ID NO: 33387 - DNA, 19 bp, Homo sapiens
  siRNA target sequence for N-PAC (NM_032569.2,337-355).
gacaagaatcgacgtaatt

SEQ ID NO: 33388 - DNA, 19 bp, Homo sapiens
  siRNA target sequence for N-PAC (NM_032569.2,377-395).
caaactcaggtgatgagaa

SEQ ID NO: 33389 - DNA, 19 bp, Homo sapiens
  siRNA target sequence for N-PAC (NM_032569.2,388-406).
gatgagaagcgcaaactta

SEQ ID NO: 33390 - DNA, 19 bp, Homo sapiens
  siRNA target sequence for N-PAC (NM_032569.2,632-650).
ccgcaagcgagcctgttaa

SEQ ID NO: 33391 - DNA, 19 bp, Homo sapiens
  siRNA target sequence for N-PAC (NM_032569.2,633-651).
cgcaagcgagcctgttaaa

SEQ ID NO: 33392 - DNA, 19 bp, Homo sapiens
  siRNA target sequence for N-PAC (NM_032569.2,635-653).
caagcgagcctgttaaaga

SEQ ID NO: 33393 - DNA, 19 bp, Homo sapiens
  siRNA target sequence for N-PAC (NM_032569.2,718-736).
gcaatcacgaagaagttga

SEQ ID NO: 33394 - DNA, 19 bp, Homo sapiens
  siRNA target sequence for N-PAC (NM_032569.2,864-882).
cgtctccaacttgctaaaa

SEQ ID NO: 33395 - DNA, 19 bp, Homo sapiens
  siRNA target sequence for N-PAC (NM_032569.2,906-924).
gaaccgcactgcagagaaa

SEQ ID NO: 33396 - DNA, 19 bp, Homo sapiens
  siRNA target sequence for N-PAC (NM_032569.2,983-1001).
caacctgcgacatcacttt

SEQ ID NO: 33397 - DNA, 19 bp, Homo sapiens
  siRNA target sequence for N-PAC (NM_032569.2,1185-1203).
gaatcagcagctgtctaat

SEQ ID NO: 33398 - DNA, 19 bp, Homo sapiens
  siRNA target sequence for N-PAC (NM_032569.2,1232-1250).
gagacaggggcttatatga

SEQ ID NO: 33399 - DNA, 19 bp, Homo sapiens
  siRNA target sequence for N-PAC (NM_032569.2,1353-1371).
gagcttcatggccactatt

SEQ ID NO: 33400 - DNA, 19 bp, Homo sapiens
  siRNA target sequence for N-PAC (NM_032569.2,1656-1674).
cgtgtaccgagcctacata

SEQ ID NO: 33401 - DNA, 19 bp, Homo sapiens
  siRNA target sequence for NAP1L1 (NM_004537.3,153-171).
ctgaacttgatcaagattt

SEQ ID NO: 33402 - DNA, 19 bp, Homo sapiens
  siRNA target sequence for NAP1L1 (NM_004537.3,231-249).
gtcagctaactgttcagat

SEQ ID NO: 33403 - DNA, 19 bp, Homo sapiens
  siRNA target sequence for NAP1L1 (NM_004537.3,330-348).
gcctgcctagggtagttaa

SEQ ID NO: 33404 - DNA, 19 bp, Homo sapiens
  siRNA target sequence for NAP1L1 (NM_004537.3,331-349).
cctgcctagggtagttaaa

SEQ ID NO: 33405 - DNA, 19 bp, Homo sapiens
  siRNA target sequence for NAP1L1 (NM_004537.3,353-371).
cgagtgaatgctctcaaaa

SEQ ID NO: 33406 - DNA, 19 bp, Homo sapiens
  siRNA target sequence for NAP1L1 (NM_004537.3,415-433).
ggaagttcacgatcttgaa

SEQ ID NO: 33407 - DNA, 19 bp, Homo sapiens
  siRNA target sequence for NAP1L1 (NM_004537.3,424-442).
cgatcttgaaaggaagtat

SEQ ID NO: 33408 - DNA, 19 bp, Homo sapiens
  siRNA target sequence for NAP1L1 (NM_004537.3,451-469).
ctatcagcctctatttgat

SEQ ID NO: 33409 - DNA, 19 bp, Homo sapiens
  siRNA target sequence for NAP1L1 (NM_004537.3,472-490).
gcgatttgaaattattaat

SEQ ID NO: 33410 - DNA, 19 bp, Homo sapiens
  siRNA target sequence for NAP1L1 (NM_004537.3,656-674).
gttgacttgctcagtgata

SEQ ID NO: 33411 - DNA, 19 bp, Homo sapiens
  siRNA target sequence for NAP1L1 (NM_004537.3,682-700).
ggaacacgatgaacctatt

SEQ ID NO: 33412 - DNA, 19 bp, Homo sapiens
  siRNA target sequence for NAP1L1 (NM_004537.3,686-704).
cacgatgaacctattctga

SEQ ID NO: 33413 - DNA, 19 bp, Homo sapiens
  siRNA target sequence for NAP1L1 (NM_004537.3,744-762).
gccagcctatgagttttgt

SEQ ID NO: 33414 - DNA, 19 bp, Homo sapiens
  siRNA target sequence for NAP1L1 (NM_004537.3,746-764).
cagcctatgagttttgtct

SEQ ID NO: 33415 - DNA, 19 bp, Homo sapiens
  siRNA target sequence for NAP1L1 (NM_004537.3,895-913).
gtgccagatagattggaaa

SEQ ID NO: 33416 - DNA, 19 bp, Homo sapiens
  siRNA target sequence for NAP1L1 (NM_004537.3,975-993).
cagttcgtactgtgactaa

SEQ ID NO: 33417 - DNA, 19 bp, Homo sapiens
  siRNA target sequence for NAP1L1 (NM_004537.3,977-995).
gttcgtactgtgactaaaa

SEQ ID NO: 33418 - DNA, 19 bp, Homo sapiens
  siRNA target sequence for NAP1L1 (NM_004537.3,1096-1114).
cgaaattggtcacttttta

SEQ ID NO: 33419 - DNA, 19 bp, Homo sapiens
  siRNA target sequence for NAP1L1 (NM_004537.3,1129-1147).
cccaagatcagtgttatat

SEQ ID NO: 33420 - DNA, 19 bp, Homo sapiens
  siRNA target sequence for NAP1L2 (NM_021963.2,388-406).
cagaatccagtcaagaaga

SEQ ID NO: 33421 - DNA, 19 bp, Homo sapiens
  siRNA target sequence for NAP1L2 (NM_021963.2,409-427).
ctggtaatcagataatggt

SEQ ID NO: 33422 - DNA, 19 bp, Homo sapiens
  siRNA target sequence for NAP1L2 (NM_021963.2,686-704).
ccgtgtgttagcccttaaa

SEQ ID NO: 33423 - DNA, 19 bp, Homo sapiens
  siRNA target sequence for NAP1L2 (NM_021963.2,687-705).
cgtgtgttagcccttaaaa

SEQ ID NO: 33424 - DNA, 19 bp, Homo sapiens
  siRNA target sequence for NAP1L2 (NM_021963.2,715-733).
ctagagcggccaatttaga

SEQ ID NO: 33425 - DNA, 19 bp, Homo sapiens
  siRNA target sequence for NAP1L2 (NM_021963.2,721-739).
cggccaatttagaatccaa

SEQ ID NO: 33426 - DNA, 19 bp, Homo sapiens
  siRNA target sequence for NAP1L2 (NM_021963.2,722-740).
ggccaatttagaatccaaa

SEQ ID NO: 33427 - DNA, 19 bp, Homo sapiens
  siRNA target sequence for NAP1L2 (NM_021963.2,811-829).
gtcagatcatcaatgcaat

SEQ ID NO: 33428 - DNA, 19 bp, Homo sapiens
  siRNA target sequence for NAP1L2 (NM_021963.2,900-918).
catgaagagatgtatggta

SEQ ID NO: 33429 - DNA, 19 bp, Homo sapiens
  siRNA target sequence for NAP1L2 (NM_021963.2,923-941).
ggagggtatggtacatgaa

SEQ ID NO: 33430 - DNA, 19 bp, Homo sapiens
  siRNA target sequence for NAP1L2 (NM_021963.2,924-942).
gagggtatggtacatgaat

SEQ ID NO: 33431 - DNA, 19 bp, Homo sapiens
  siRNA target sequence for NAP1L2 (NM_021963.2,926-944).
gggtatggtacatgaatat

SEQ ID NO: 33432 - DNA, 19 bp, Homo sapiens
  siRNA target sequence for NAP1L2 (NM_021963.2,961-979).
gttatgaggactattatta

SEQ ID NO: 33433 - DNA, 19 bp, Homo sapiens
  siRNA target sequence for NAP1L2 (NM_021963.2,1066-1084).
ctaagggaattcctgattt

SEQ ID NO: 33434 - DNA, 19 bp, Homo sapiens
  siRNA target sequence for NAP1L2 (NM_021963.2,1120-1138).
ctcctttgattaagaaata

SEQ ID NO: 33435 - DNA, 19 bp, Homo sapiens
  siRNA target sequence for NAP1L2 (NM_021963.2,1160-1178).
cctgacagatattaaagtt

SEQ ID NO: 33436 - DNA, 19 bp, Homo sapiens
  siRNA target sequence for NAP1L2 (NM_021963.2,1161-1179).
ctgacagatattaaagtta

SEQ ID NO: 33437 - DNA, 19 bp, Homo sapiens
  siRNA target sequence for NAP1L2 (NM_021963.2,1192-1210).
ctggcgagcccctcagttt

SEQ ID NO: 33438 - DNA, 19 bp, Homo sapiens
  siRNA target sequence for NAP1L2 (NM_021963.2,1194-1212).
ggcgagcccctcagtttca

SEQ ID NO: 33439 - DNA, 19 bp, Homo sapiens
  siRNA target sequence for NAP1L2 (NM_021963.2,1202-1220).
cctcagtttcacactagaa

SEQ ID NO: 33440 - DNA, 19 bp, Homo sapiens
  siRNA target sequence for NAP1L2 (NM_021963.2,1203-1221).
ctcagtttcacactagaat

SEQ ID NO: 33441 - DNA, 19 bp, Homo sapiens
  siRNA target sequence for NAP1L2 (NM_021963.2,1318-1336).
ggggaactgcgattgagta

SEQ ID NO: 33442 - DNA, 19 bp, Homo sapiens
  siRNA target sequence for NAP1L2 (NM_021963.2,1319-1337).
gggaactgcgattgagtat

SEQ ID NO: 33443 - DNA, 19 bp, Homo sapiens
  siRNA target sequence for NAP1L2 (NM_021963.2,1346-1364).
ctgtgagatagattggaat

SEQ ID NO: 33444 - DNA, 19 bp, Homo sapiens
  siRNA target sequence for NAP1L2 (NM_021963.2,1421-1439).
gggaacaatccgaactgta

SEQ ID NO: 33445 - DNA, 19 bp, Homo sapiens
  siRNA target sequence for NAP1L2 (NM_021963.2,1422-1440).
ggaacaatccgaactgtaa

SEQ ID NO: 33446 - DNA, 19 bp, Homo sapiens
  siRNA target sequence for NAP1L2 (NM_021963.2,1426-1444).
caatccgaactgtaactga

SEQ ID NO: 33447 - DNA, 19 bp, Homo sapiens
  siRNA target sequence for NAP1L2 (NM_021963.2,1430-1448).
ccgaactgtaactgaagat

SEQ ID NO: 33448 - DNA, 19 bp, Homo sapiens
  siRNA target sequence for NAP1L2 (NM_021963.2,1431-1449).
cgaactgtaactgaagatt

SEQ ID NO: 33449 - DNA, 19 bp, Homo sapiens
  siRNA target sequence for NAP1L2 (NM_021963.2,1488-1506).
ggaatcacctcaaatggaa

SEQ ID NO: 33450 - DNA, 19 bp, Homo sapiens
  siRNA target sequence for NAP1L2 (NM_021963.2,1530-1548).
cttggtcacaatttacgta

SEQ ID NO: 33451 - DNA, 19 bp, Homo sapiens
  siRNA target sequence for NAP1L2 (NM_021963.2,1538-1556).
caatttacgtacttacata

SEQ ID NO: 33452 - DNA, 19 bp, Homo sapiens
  siRNA target sequence for NAP1L2 (NM_021963.2,1545-1563).
cgtacttacataattccaa

SEQ ID NO: 33453 - DNA, 19 bp, Homo sapiens
  siRNA target sequence for NAP1L2 (NM_021963.2,1604-1622).
gcaggagggggtagttaga

SEQ ID NO: 33454 - DNA, 19 bp, Homo sapiens
  siRNA target sequence for NAP1L2 (NM_021963.2,1607-1625).
ggagggggtagttagagaa

SEQ ID NO: 33455 - DNA, 19 bp, Homo sapiens
  siRNA target sequence for NAP1L3 (NM_004538.2,471-489).
cagccgcagccgcttgtat

SEQ ID NO: 33456 - DNA, 19 bp, Homo sapiens
  siRNA target sequence for NAP1L3 (NM_004538.2,475-493).
cgcagccgcttgtatagaa

SEQ ID NO: 33457 - DNA, 19 bp, Homo sapiens
  siRNA target sequence for NAP1L3 (NM_004538.2,476-494).
gcagccgcttgtatagaaa

SEQ ID NO: 33458 - DNA, 19 bp, Homo sapiens
  siRNA target sequence for NAP1L3 (NM_004538.2,479-497).
gccgcttgtatagaaagaa

SEQ ID NO: 33459 - DNA, 19 bp, Homo sapiens
  siRNA target sequence for NAP1L3 (NM_004538.2,536-554).
cgttgggaacaaatttcgt

SEQ ID NO: 33460 - DNA, 19 bp, Homo sapiens
  siRNA target sequence for NAP1L3 (NM_004538.2,561-579).
gctgcctcaggcagttaga

SEQ ID NO: 33461 - DNA, 19 bp, Homo sapiens
  siRNA target sequence for NAP1L3 (NM_004538.2,583-601).
cgtgtgcaagcgcttagaa

SEQ ID NO: 33462 - DNA, 19 bp, Homo sapiens
  siRNA target sequence for NAP1L3 (NM_004538.2,584-602).
gtgtgcaagcgcttagaaa

SEQ ID NO: 33463 - DNA, 19 bp, Homo sapiens
  siRNA target sequence for NAP1L3 (NM_004538.2,588-606).
gcaagcgcttagaaacatt

SEQ ID NO: 33464 - DNA, 19 bp, Homo sapiens
  siRNA target sequence for NAP1L3 (NM_004538.2,593-611).
cgcttagaaacattcaaga

SEQ ID NO: 33465 - DNA, 19 bp, Homo sapiens
  siRNA target sequence for NAP1L3 (NM_004538.2,594-612).
gcttagaaacattcaagat

SEQ ID NO: 33466 - DNA, 19 bp, Homo sapiens
  siRNA target sequence for NAP1L3 (NM_004538.2,613-631).
gaatgtgacaaggtagata

SEQ ID NO: 33467 - DNA, 19 bp, Homo sapiens
  siRNA target sequence for NAP1L3 (NM_004538.2,624-642).
ggtagataccctgttctta

SEQ ID NO: 33468 - DNA, 19 bp, Homo sapiens
  siRNA target sequence for NAP1L3 (NM_004538.2,625-643).
gtagataccctgttcttaa

SEQ ID NO: 33469 - DNA, 19 bp, Homo sapiens
  siRNA target sequence for NAP1L3 (NM_004538.2,701-719).
ggcggtttcaaatcatcaa

SEQ ID NO: 33470 - DNA, 19 bp, Homo sapiens
  siRNA target sequence for NAP1L3 (NM_004538.2,702-720).
gcggtttcaaatcatcaat

SEQ ID NO: 33471 - DNA, 19 bp, Homo sapiens
  siRNA target sequence for NAP1L3 (NM_004538.2,729-747).
cgagcctacagaagaagaa

SEQ ID NO: 33472 - DNA, 19 bp, Homo sapiens
  siRNA target sequence for NAP1L3 (NM_004538.2,798-816).
ggataacacccctagtgaa

SEQ ID NO: 33473 - DNA, 19 bp, Homo sapiens
  siRNA target sequence for NAP1L3 (NM_004538.2,799-817).
gataacacccctagtgaaa

SEQ ID NO: 33474 - DNA, 19 bp, Homo sapiens
  siRNA target sequence for NAP1L3 (NM_004538.2,1032-1050).
ccaggtaaaggcagatgat

SEQ ID NO: 33475 - DNA, 19 bp, Homo sapiens
  siRNA target sequence for NAP1L3 (NM_004538.2,1199-1217).
ctgactattggctgattgt

SEQ ID NO: 33476 - DNA, 19 bp, Homo sapiens
  siRNA target sequence for NAP1L3 (NM_004538.2,1203-1221).
ctattggctgattgtttta

SEQ ID NO: 33477 - DNA, 19 bp, Homo sapiens
  siRNA target sequence for NAP1L3 (NM_004538.2,1237-1255).
ctcgggcctatgattcaga

SEQ ID NO: 33478 - DNA, 19 bp, Homo sapiens
  siRNA target sequence for NAP1L3 (NM_004538.2,1242-1260).
gcctatgattcagaagtat

SEQ ID NO: 33479 - DNA, 19 bp, Homo sapiens
  siRNA target sequence for NAP1L3 (NM_004538.2,1286-1304).
cggatgttagcctgaagtt

SEQ ID NO: 33480 - DNA, 19 bp, Homo sapiens
  siRNA target sequence for NAP1L3 (NM_004538.2,1291-1309).
gttagcctgaagttctcaa

SEQ ID NO: 33481 - DNA, 19 bp, Homo sapiens
  siRNA target sequence for NAP1L3 (NM_004538.2,1315-1333).
ggccagcctgtaagttaca

SEQ ID NO: 33482 - DNA, 19 bp, Homo sapiens
  siRNA target sequence for NAP1L3 (NM_004538.2,1328-1346).
gttacacctttgaatttca

SEQ ID NO: 33483 - DNA, 19 bp, Homo sapiens
  siRNA target sequence for NAP1L3 (NM_004538.2,1351-1369).
ctacccaacccatacttca

SEQ ID NO: 33484 - DNA, 19 bp, Homo sapiens
  siRNA target sequence for NAP1L3 (NM_004538.2,1377-1395).
ggtgctggtgaagacatat

SEQ ID NO: 33485 - DNA, 19 bp, Homo sapiens
  siRNA target sequence for NAP1L3 (NM_004538.2,1380-1398).
gctggtgaagacatatata

SEQ ID NO: 33486 - DNA, 19 bp, Homo sapiens
  siRNA target sequence for NAP1L3 (NM_004538.2,1381-1399).
ctggtgaagacatatataa

SEQ ID NO: 33487 - DNA, 19 bp, Homo sapiens
  siRNA target sequence for NAP1L3 (NM_004538.2,1436-1454).
cttggggatgggaaattga

SEQ ID NO: 33488 - DNA, 19 bp, Homo sapiens
  siRNA target sequence for NAP1L3 (NM_004538.2,1445-1463).
gggaaattgaagattgcaa

SEQ ID NO: 33489 - DNA, 19 bp, Homo sapiens
  siRNA target sequence for NAP1L3 (NM_004538.2,1554-1572).
gccaagagtggttcctaat

SEQ ID NO: 33490 - DNA, 19 bp, Homo sapiens
  siRNA target sequence for NAP1L3 (NM_004538.2,1669-1687).
gggcagattttacatgata

SEQ ID NO: 33491 - DNA, 19 bp, Homo sapiens
  siRNA target sequence for NAP1L3 (NM_004538.2,1690-1708).
gtcatcctgaaatcaatct

SEQ ID NO: 33492 - DNA, 19 bp, Homo sapiens
  siRNA target sequence for NAP1L3 (NM_004538.2,1698-1716).
gaaatcaatctattactat

SEQ ID NO: 33493 - DNA, 19 bp, Homo sapiens
  siRNA target sequence for NAP1L4 (NM_005969.2,144-162).
ggcagatcacagtttttca

SEQ ID NO: 33494 - DNA, 19 bp, Homo sapiens
  siRNA target sequence for NAP1L4 (NM_005969.2,183-201).
cgtggaagctgctaaaaat

SEQ ID NO: 33495 - DNA, 19 bp, Homo sapiens
  siRNA target sequence for NAP1L4 (NM_005969.2,248-266).
gagttctggcagctttaca

SEQ ID NO: 33496 - DNA, 19 bp, Homo sapiens
  siRNA target sequence for NAP1L4 (NM_005969.2,299-317).
ccagctacatcgaaacttt

SEQ ID NO: 33497 - DNA, 19 bp, Homo sapiens
  siRNA target sequence for NAP1L4 (NM_005969.2,303-321).
ctacatcgaaactttacct

SEQ ID NO: 33498 - DNA, 19 bp, Homo sapiens
  siRNA target sequence for NAP1L4 (NM_005969.2,306-324).
catcgaaactttacctaaa

SEQ ID NO: 33499 - DNA, 19 bp, Homo sapiens
  siRNA target sequence for NAP1L4 (NM_005969.2,309-327).
cgaaactttacctaaagca

SEQ ID NO: 33500 - DNA, 19 bp, Homo sapiens
  siRNA target sequence for NAP1L4 (NM_005969.2,363-381).
ggtgagatgtgctcacata

SEQ ID NO: 33501 - DNA, 19 bp, Homo sapiens
  siRNA target sequence for NAP1L4 (NM_005969.2,366-384).
gagatgtgctcacatagaa

SEQ ID NO: 33502 - DNA, 19 bp, Homo sapiens
  siRNA target sequence for NAP1L4 (NM_005969.2,403-421).
gtacatgacttggaaagaa

SEQ ID NO: 33503 - DNA, 19 bp, Homo sapiens
  siRNA target sequence for NAP1L4 (NM_005969.2,503-521).
cggaatggcacagtgaaaa

SEQ ID NO: 33504 - DNA, 19 bp, Homo sapiens
  siRNA target sequence for NAP1L4 (NM_005969.2,540-558).
ggctggagacatgaaaagt

SEQ ID NO: 33505 - DNA, 19 bp, Homo sapiens
  siRNA target sequence for NAP1L4 (NM_005969.2,541-559).
gctggagacatgaaaagta

SEQ ID NO: 33506 - DNA, 19 bp, Homo sapiens
  siRNA target sequence for NAP1L4 (NM_005969.2,620-638).
cagagttctggtttaccat

SEQ ID NO: 33507 - DNA, 19 bp, Homo sapiens
  siRNA target sequence for NAP1L4 (NM_005969.2,651-669).
ggacatgctgagtgaatta

SEQ ID NO: 33508 - DNA, 19 bp, Homo sapiens
  siRNA target sequence for NAP1L4 (NM_005969.2,662-680).
gtgaattagtccaggaata

SEQ ID NO: 33509 - DNA, 19 bp, Homo sapiens
  siRNA target sequence for NAP1L4 (NM_005969.2,703-721).
ctgcaggatattaaagtga

SEQ ID NO: 33510 - DNA, 19 bp, Homo sapiens
  siRNA target sequence for NAP1L4 (NM_005969.2,732-750).
ccctggacagcctatgtct

SEQ ID NO: 33511 - DNA, 19 bp, Homo sapiens
  siRNA target sequence for NAP1L4 (NM_005969.2,737-755).
gacagcctatgtcttttgt

SEQ ID NO: 33512 - DNA, 19 bp, Homo sapiens
  siRNA target sequence for NAP1L4 (NM_005969.2,739-757).
cagcctatgtcttttgtgt

SEQ ID NO: 33513 - DNA, 19 bp, Homo sapiens
  siRNA target sequence for NAP1L4 (NM_005969.2,797-815).
cagtcctgacaaaaaccta

SEQ ID NO: 33514 - DNA, 19 bp, Homo sapiens
  siRNA target sequence for NAP1L4 (NM_005969.2,1152-1170).
ggaggccatagaagatgat

SEQ ID NO: 33515 - DNA, 19 bp, Homo sapiens
  siRNA target sequence for NAP1L4 (NM_005969.2,1236-1254).
cgaggatgatgcggaaatt

SEQ ID NO: 33516 - DNA, 19 bp, Homo sapiens
  siRNA target sequence for NCL (NM_005381.1,121-139).
ctcgcgaaggcaggtaaaa

SEQ ID NO: 33517 - DNA, 19 bp, Homo sapiens
  siRNA target sequence for NCL (NM_005381.1,123-141).
cgcgaaggcaggtaaaaat

SEQ ID NO: 33518 - DNA, 19 bp, Homo sapiens
  siRNA target sequence for NCL (NM_005381.1,125-143).
cgaaggcaggtaaaaatca

SEQ ID NO: 33519 - DNA, 19 bp, Homo sapiens
  siRNA target sequence for NCL (NM_005381.1,126-144).
gaaggcaggtaaaaatcaa

SEQ ID NO: 33520 - DNA, 19 bp, Homo sapiens
  siRNA target sequence for NCL (NM_005381.1,303-321).
ggtcgtttccccaacaaaa

SEQ ID NO: 33521 - DNA, 19 bp, Homo sapiens
  siRNA target sequence for NCL (NM_005381.1,1019-1037).
cgactacggctttcaatct

SEQ ID NO: 33522 - DNA, 19 bp, Homo sapiens
  siRNA target sequence for NCL (NM_005381.1,1022-1040).
ctacggctttcaatctctt

SEQ ID NO: 33523 - DNA, 19 bp, Homo sapiens
  siRNA target sequence for NCL (NM_005381.1,1025-1043).
cggctttcaatctctttgt

SEQ ID NO: 33524 - DNA, 19 bp, Homo sapiens
  siRNA target sequence for NCL (NM_005381.1,1036-1054).
ctctttgttggaaacctaa

SEQ ID NO: 33525 - DNA, 19 bp, Homo sapiens
  siRNA target sequence for NCL (NM_005381.1,1045-1063).
ggaaacctaaactttaaca

SEQ ID NO: 33526 - DNA, 19 bp, Homo sapiens
  siRNA target sequence for NCL (NM_005381.1,1050-1068).
cctaaactttaacaaatct

SEQ ID NO: 33527 - DNA, 19 bp, Homo sapiens
  siRNA target sequence for NCL (NM_005381.1,1085-1103).
ctggtatcagcgatgtttt

SEQ ID NO: 33528 - DNA, 19 bp, Homo sapiens
  siRNA target sequence for NCL (NM_005381.1,1092-1110).
cagcgatgtttttgctaaa

SEQ ID NO: 33529 - DNA, 19 bp, Homo sapiens
  siRNA target sequence for NCL (NM_005381.1,1278-1296).
gcgagatgcgagaacactt

SEQ ID NO: 33530 - DNA, 19 bp, Homo sapiens
  siRNA target sequence for NCL (NM_005381.1,1279-1297).
cgagatgcgagaacacttt

SEQ ID NO: 33531 - DNA, 19 bp, Homo sapiens
  siRNA target sequence for NCL (NM_005381.1,1280-1298).
gagatgcgagaacactttt

SEQ ID NO: 33532 - DNA, 19 bp, Homo sapiens
  siRNA target sequence for NCL (NM_005381.1,1292-1310).
cacttttggctaaaaatct

SEQ ID NO: 33533 - DNA, 19 bp, Homo sapiens
  siRNA target sequence for NCL (NM_005381.1,1358-1376).
ctgcggagatcagattagt

SEQ ID NO: 33534 - DNA, 19 bp, Homo sapiens
  siRNA target sequence for NCL (NM_005381.1,1360-1378).
gcggagatcagattagtca

SEQ ID NO: 33535 - DNA, 19 bp, Homo sapiens
  siRNA target sequence for NCL (NM_005381.1,1394-1412).
gtaaagggattgcttatat

SEQ ID NO: 33536 - DNA, 19 bp, Homo sapiens
  siRNA target sequence for NCL (NM_005381.1,1400-1418).
ggattgcttatattgaatt

SEQ ID NO: 33537 - DNA, 19 bp, Homo sapiens
  siRNA target sequence for NCL (NM_005381.1,1429-1447).
gctgatgcagagaaaacct

SEQ ID NO: 33538 - DNA, 19 bp, Homo sapiens
  siRNA target sequence for NCL (NM_005381.1,1470-1488).
gatcgatgggcgatctatt

SEQ ID NO: 33539 - DNA, 19 bp, Homo sapiens
  siRNA target sequence for NCL (NM_005381.1,1513-1531).
ggtcaaaatcaagactata

SEQ ID NO: 33540 - DNA, 19 bp, Homo sapiens
  siRNA target sequence for NCL (NM_005381.1,1609-1627).
gaaactcttcaggaagtat

SEQ ID NO: 33541 - DNA, 19 bp, Homo sapiens
  siRNA target sequence for NCL (NM_005381.1,1681-1699).
gggtatgcatttatagagt

SEQ ID NO: 33542 - DNA, 19 bp, Homo sapiens
  siRNA target sequence for NCL (NM_005381.1,1682-1700).
ggtatgcatttatagagtt

SEQ ID NO: 33543 - DNA, 19 bp, Homo sapiens
  siRNA target sequence for NCL (NM_005381.1,1726-1744).
gctttaaattcctgtaata

SEQ ID NO: 33544 - DNA, 19 bp, Homo sapiens
  siRNA target sequence for NCL (NM_005381.1,1824-1842).
caaaactctgtttgtcaaa

SEQ ID NO: 33545 - DNA, 19 bp, Homo sapiens
  siRNA target sequence for NCL (NM_005381.1,1869-1887).
gacattaaaggagtcattt

SEQ ID NO: 33546 - DNA, 19 bp, Homo sapiens
  siRNA target sequence for NCL (NM_005381.1,1896-1914).
cgttcgggcaaggatagtt

SEQ ID NO: 33547 - DNA, 19 bp, Homo sapiens
  siRNA target sequence for NCL (NM_005381.1,1943-1961).
ggtttggttttgtagactt

SEQ ID NO: 33548 - DNA, 19 bp, Homo sapiens
  siRNA target sequence for NCL (NM_005381.1,1948-1966).
ggttttgtagacttcaaca

SEQ ID NO: 33549 - DNA, 19 bp, Homo sapiens
  siRNA target sequence for NCL (NM_005381.1,1989-2007).
catggaagacggtgaaatt

SEQ ID NO: 33550 - DNA, 19 bp, Homo sapiens
  siRNA target sequence for NCL (NM_005381.1,1998-2016).
cggtgaaattgatggaaat

SEQ ID NO: 33551 - DNA, 19 bp, Homo sapiens
  siRNA target sequence for NCOR1 (NM_006311.2,307-325).
cactctgtccagtatacat

SEQ ID NO: 33552 - DNA, 19 bp, Homo sapiens
  siRNA target sequence for NCOR1 (NM_006311.2,309-327).
ctctgtccagtatacattt

SEQ ID NO: 33553 - DNA, 19 bp, Homo sapiens
  siRNA target sequence for NCOR1 (NM_006311.2,351-369).
gttcgcagtccctgattat

SEQ ID NO: 33554 - DNA, 19 bp, Homo sapiens
  siRNA target sequence for NCOR1 (NM_006311.2,354-372).
cgcagtccctgattatcgt

SEQ ID NO: 33555 - DNA, 19 bp, Homo sapiens
  siRNA target sequence for NCOR1 (NM_006311.2,355-373).
gcagtccctgattatcgtt

SEQ ID NO: 33556 - DNA, 19 bp, Homo sapiens
  siRNA target sequence for NCOR1 (NM_006311.2,527-545).
catccccagtggatcatga

SEQ ID NO: 33557 - DNA, 19 bp, Homo sapiens
  siRNA target sequence for NCOR1 (NM_006311.2,531-549).
cccagtggatcatgattca

SEQ ID NO: 33558 - DNA, 19 bp, Homo sapiens
  siRNA target sequence for NCOR1 (NM_006311.2,611-629).
ctgcggttttgcctttagt

SEQ ID NO: 33559 - DNA, 19 bp, Homo sapiens
  siRNA target sequence for NCOR1 (NM_006311.2,927-945).
gcagaaacaccgcagtatt

SEQ ID NO: 33560 - DNA, 19 bp, Homo sapiens
  siRNA target sequence for NCOR1 (NM_006311.2,936-954).
ccgcagtattgtccaaatt

SEQ ID NO: 33561 - DNA, 19 bp, Homo sapiens
  siRNA target sequence for NCOR1 (NM_006311.2,937-955).
cgcagtattgtccaaatta

SEQ ID NO: 33562 - DNA, 19 bp, Homo sapiens
  siRNA target sequence for NCOR1 (NM_006311.2,1007-1025).
gtcttggcccaaaagttga

SEQ ID NO: 33563 - DNA, 19 bp, Homo sapiens
  siRNA target sequence for NCOR1 (NM_006311.2,1021-1039).
gttgaactgccactgtata

SEQ ID NO: 33564 - DNA, 19 bp, Homo sapiens
  siRNA target sequence for NCOR1 (NM_006311.2,1035-1053).
gtataaccagccatcagat

SEQ ID NO: 33565 - DNA, 19 bp, Homo sapiens
  siRNA target sequence for NCOR1 (NM_006311.2,1248-1266).
caaaacaagggaatactat

SEQ ID NO: 33566 - DNA, 19 bp, Homo sapiens
  siRNA target sequence for NCOR1 (NM_006311.2,1275-1293).
gtttccagaaattcgaaaa

SEQ ID NO: 33567 - DNA, 19 bp, Homo sapiens
  siRNA target sequence for NCOR1 (NM_006311.2,1442-1460).
ctgtgattccacctatgat

SEQ ID NO: 33568 - DNA, 19 bp, Homo sapiens
  siRNA target sequence for NCOR1 (NM_006311.2,1446-1464).
gattccacctatgatgttt

SEQ ID NO: 33569 - DNA, 19 bp, Homo sapiens
  siRNA target sequence for NCOR1 (NM_006311.2,1474-1492).
caaagacgagtcaagttca

SEQ ID NO: 33570 - DNA, 19 bp, Homo sapiens
  siRNA target sequence for NCOR1 (NM_006311.2,1478-1496).
gacgagtcaagttcattaa

SEQ ID NO: 33571 - DNA, 19 bp, Homo sapiens
  siRNA target sequence for NCOR1 (NM_006311.2,1480-1498).
cgagtcaagttcattaaca

SEQ ID NO: 33572 - DNA, 19 bp, Homo sapiens
  siRNA target sequence for NCOR1 (NM_006311.2,1518-1536).
ccctatgaaagtgtataaa

SEQ ID NO: 33573 - DNA, 19 bp, Homo sapiens
  siRNA target sequence for NCOR1 (NM_006311.2,1618-1636).
ggactaattgcatcatact

SEQ ID NO: 33574 - DNA, 19 bp, Homo sapiens
  siRNA target sequence for NCOR1 (NM_006311.2,1619-1637).
gactaattgcatcatactt

SEQ ID NO: 33575 - DNA, 19 bp, Homo sapiens
  siRNA target sequence for NCOR1 (NM_006311.2,1705-1723).
gccctcgtcagaaggaatt

SEQ ID NO: 33576 - DNA, 19 bp, Homo sapiens
  siRNA target sequence for NCOR1 (NM_006311.2,1706-1724).
ccctcgtcagaaggaatta

SEQ ID NO: 33577 - DNA, 19 bp, Homo sapiens
  siRNA target sequence for NCOR1 (NM_006311.2,1707-1725).
cctcgtcagaaggaattat

SEQ ID NO: 33578 - DNA, 19 bp, Homo sapiens
  siRNA target sequence for NCOR1 (NM_006311.2,1757-1775).
ctcgaccctcgcaagaaga

SEQ ID NO: 33579 - DNA, 19 bp, Homo sapiens
  siRNA target sequence for NCOR1 (NM_006311.2,1759-1777).
cgaccctcgcaagaagaaa

SEQ ID NO: 33580 - DNA, 19 bp, Homo sapiens
  siRNA target sequence for NCOR1 (NM_006311.2,1763-1781).
cctcgcaagaagaaaaagt

SEQ ID NO: 33581 - DNA, 19 bp, Homo sapiens
  siRNA target sequence for NCOR1 (NM_006311.2,1764-1782).
ctcgcaagaagaaaaagta

SEQ ID NO: 33582 - DNA, 19 bp, Homo sapiens
  siRNA target sequence for NCOR1 (NM_006311.2,2183-2201).
cagcaattgctaaaatggt

SEQ ID NO: 33583 - DNA, 19 bp, Homo sapiens
  siRNA target sequence for NCOR1 (NM_006311.2,2218-2236).
gctcaatgtaaaaacttct

SEQ ID NO: 33584 - DNA, 19 bp, Homo sapiens
  siRNA target sequence for NCOR1 (NM_006311.2,2221-2239).
caatgtaaaaacttctatt

SEQ ID NO: 33585 - DNA, 19 bp, Homo sapiens
  siRNA target sequence for NCOR1 (NM_006311.2,2244-2262).
ctataaaaggcgacacaat

SEQ ID NO: 33586 - DNA, 19 bp, Homo sapiens
  siRNA target sequence for NCOR1 (NM_006311.2,2317-2335).
gagcgagatgtgtctcaat

SEQ ID NO: 33587 - DNA, 19 bp, Homo sapiens
  siRNA target sequence for NCOR1 (NM_006311.2,2319-2337).
gcgagatgtgtctcaatgt

SEQ ID NO: 33588 - DNA, 19 bp, Homo sapiens
  siRNA target sequence for NCOR1 (NM_006311.2,2323-2341).
gatgtgtctcaatgtgaaa

SEQ ID NO: 33589 - DNA, 19 bp, Homo sapiens
  siRNA target sequence for NCOR1 (NM_006311.2,2363-2381).
ctcaggaggatgaagatat

SEQ ID NO: 33590 - DNA, 19 bp, Homo sapiens
  siRNA target sequence for NCOR1 (NM_006311.2,2445-2463).
ggacagtcctgaaaatgct

SEQ ID NO: 33591 - DNA, 19 bp, Homo sapiens
  siRNA target sequence for NCOR1 (NM_006311.2,2446-2464).
gacagtcctgaaaatgcta

SEQ ID NO: 33592 - DNA, 19 bp, Homo sapiens
  siRNA target sequence for NCOR1 (NM_006311.2,2538-2556).
cttagcagttccaagtaca

SEQ ID NO: 33593 - DNA, 19 bp, Homo sapiens
  siRNA target sequence for NCOR1 (NM_006311.2,2726-2744).
cagaaaaccatgcatctaa

SEQ ID NO: 33594 - DNA, 19 bp, Homo sapiens
  siRNA target sequence for NCOR1 (NM_006311.2,2733-2751).
ccatgcatctaaagttgaa

SEQ ID NO: 33595 - DNA, 19 bp, Homo sapiens
  siRNA target sequence for NCOR1 (NM_006311.2,2746-2764).
gttgaaggtgataatacca

SEQ ID NO: 33596 - DNA, 19 bp, Homo sapiens
  siRNA target sequence for NCOR1 (NM_006311.2,2823-2841).
ggtagctcagcaaataaat

SEQ ID NO: 33597 - DNA, 19 bp, Homo sapiens
  siRNA target sequence for NCOR1 (NM_006311.2,2853-2871).
cgagccccagtcagacaat

SEQ ID NO: 33598 - DNA, 19 bp, Homo sapiens
  siRNA target sequence for NCOR1 (NM_006311.2,2985-3003).
cgtctcatctccgttaaaa

SEQ ID NO: 33599 - DNA, 19 bp, Homo sapiens
  siRNA target sequence for NCOR1 (NM_006311.2,2988-3006).
ctcatctccgttaaaacca

SEQ ID NO: 33600 - DNA, 19 bp, Homo sapiens
  siRNA target sequence for NCOR1 (NM_006311.2,3046-3064).
gttatcccaccaatggtat

SEQ ID NO: 33601 - DNA, 19 bp, Homo sapiens
  siRNA target sequence for NCOR1 (NM_006311.2,3066-3084).
ctgcaccccatgtaacata

SEQ ID NO: 33602 - DNA, 19 bp, Homo sapiens
  siRNA target sequence for NCOR1 (NM_006311.2,3071-3089).
ccccatgtaacataccaat

SEQ ID NO: 33603 - DNA, 19 bp, Homo sapiens
  siRNA target sequence for NCOR1 (NM_006311.2,3120-3138).
ccagcgacacattaaagca

SEQ ID NO: 33604 - DNA, 19 bp, Homo sapiens
  siRNA target sequence for NCOR1 (NM_006311.2,3176-3194).
gacaagaacagatagattt

SEQ ID NO: 33605 - DNA, 19 bp, Homo sapiens
  siRNA target sequence for NCOR1 (NM_006311.2,3184-3202).
cagatagatttggaatgta

SEQ ID NO: 33606 - DNA, 19 bp, Homo sapiens
  siRNA target sequence for NCOR1 (NM_006311.2,3266-3284).
ctgctccacatcaagtgat

SEQ ID NO: 33607 - DNA, 19 bp, Homo sapiens
  siRNA target sequence for NCOR1 (NM_006311.2,3268-3286).
gctccacatcaagtgataa

SEQ ID NO: 33608 - DNA, 19 bp, Homo sapiens
  siRNA target sequence for NCOR1 (NM_006311.2,3271-3289).
ccacatcaagtgataacta

SEQ ID NO: 33609 - DNA, 19 bp, Homo sapiens
  siRNA target sequence for NCOR1 (NM_006311.2,3346-3364).
ctcatcccgtcatccaaaa

SEQ ID NO: 33610 - DNA, 19 bp, Homo sapiens
  siRNA target sequence for NCOR1 (NM_006311.2,3417-3435).
gggaacaccaggcacttat

SEQ ID NO: 33611 - DNA, 19 bp, Homo sapiens
  siRNA target sequence for NCOR1 (NM_006311.2,3418-3436).
ggaacaccaggcacttatt

SEQ ID NO: 33612 - DNA, 19 bp, Homo sapiens
  siRNA target sequence for NCOR1 (NM_006311.2,3481-3499).
ccgtcagtgggatctatct

SEQ ID NO: 33613 - DNA, 19 bp, Homo sapiens
  siRNA target sequence for NCOR1 (NM_006311.2,3538-3556).
gctactttgccctacatca

SEQ ID NO: 33614 - DNA, 19 bp, Homo sapiens
  siRNA target sequence for NCOR1 (NM_006311.2,3609-3627).
ggtcagggcccaacatgaa

SEQ ID NO: 33615 - DNA, 19 bp, Homo sapiens
  siRNA target sequence for NCOR1 (NM_006311.2,3644-3662).
ccgcaggagccatacaaga

SEQ ID NO: 33616 - DNA, 19 bp, Homo sapiens
  siRNA target sequence for NCOR1 (NM_006311.2,3720-3738).
cctacggggctctatcact

SEQ ID NO: 33617 - DNA, 19 bp, Homo sapiens
  siRNA target sequence for NCOR1 (NM_006311.2,3757-3775).
ccccagactggcataccaa

SEQ ID NO: 33618 - DNA, 19 bp, Homo sapiens
  siRNA target sequence for NCOR1 (NM_006311.2,3787-3805).
gtgaaggggtccatttcga

SEQ ID NO: 33619 - DNA, 19 bp, Homo sapiens
  siRNA target sequence for NCOR1 (NM_006311.2,3803-3821).
cgagaatgcccattgaaga

SEQ ID NO: 33620 - DNA, 19 bp, Homo sapiens
  siRNA target sequence for NCOR1 (NM_006311.2,3853-3871).
gcatccaaaggccatgtta

SEQ ID NO: 33621 - DNA, 19 bp, Homo sapiens
  siRNA target sequence for NCOR1 (NM_006311.2,3854-3872).
catccaaaggccatgttat

SEQ ID NO: 33622 - DNA, 19 bp, Homo sapiens
  siRNA target sequence for NCOR1 (NM_006311.2,3887-3905).
gtggacatatcttgtcata

SEQ ID NO: 33623 - DNA, 19 bp, Homo sapiens
  siRNA target sequence for NCOR1 (NM_006311.2,3890-3908).
gacatatcttgtcatatga

SEQ ID NO: 33624 - DNA, 19 bp, Homo sapiens
  siRNA target sequence for NCOR1 (NM_006311.2,4042-4060).
ccgttagaggggctgatat

SEQ ID NO: 33625 - DNA, 19 bp, Homo sapiens
  siRNA target sequence for NCOR1 (NM_006311.2,4053-4071).
gctgatatgccgagcatta

SEQ ID NO: 33626 - DNA, 19 bp, Homo sapiens
  siRNA target sequence for NCOR1 (NM_006311.2,4074-4092).
cagggggagtcctcattct

SEQ ID NO: 33627 - DNA, 19 bp, Homo sapiens
  siRNA target sequence for NCOR1 (NM_006311.2,4076-4094).
gggggagtcctcattctga

SEQ ID NO: 33628 - DNA, 19 bp, Homo sapiens
  siRNA target sequence for NCOR1 (NM_006311.2,4161-4179).
ctttgaagatggccttaaa

SEQ ID NO: 33629 - DNA, 19 bp, Homo sapiens
  siRNA target sequence for NCOR1 (NM_006311.2,4173-4191).
ccttaaatatcccaaacaa

SEQ ID NO: 33630 - DNA, 19 bp, Homo sapiens
  siRNA target sequence for NCOR1 (NM_006311.2,4208-4226).
ctcccatacgagcatttga

SEQ ID NO: 33631 - DNA, 19 bp, Homo sapiens
  siRNA target sequence for NCOR1 (NM_006311.2,4356-4374).
gagcacacggccgataatt

SEQ ID NO: 33632 - DNA, 19 bp, Homo sapiens
  siRNA target sequence for NCOR1 (NM_006311.2,4358-4376).
gcacacggccgataattga

SEQ ID NO: 33633 - DNA, 19 bp, Homo sapiens
  siRNA target sequence for NCOR1 (NM_006311.2,4394-4412).
gcacaccaataaagtttga

SEQ ID NO: 33634 - DNA, 19 bp, Homo sapiens
  siRNA target sequence for NCOR1 (NM_006311.2,4424-4442).
gtcaatctgccatcaaaca

SEQ ID NO: 33635 - DNA, 19 bp, Homo sapiens
  siRNA target sequence for NCOR1 (NM_006311.2,4426-4444).
caatctgccatcaaacaca

SEQ ID NO: 33636 - DNA, 19 bp, Homo sapiens
  siRNA target sequence for NCOR1 (NM_006311.2,4430-4448).
ctgccatcaaacacaatgt

SEQ ID NO: 33637 - DNA, 19 bp, Homo sapiens
  siRNA target sequence for NCOR1 (NM_006311.2,4441-4459).
cacaatgtcaaatccttaa

SEQ ID NO: 33638 - DNA, 19 bp, Homo sapiens
  siRNA target sequence for NCOR1 (NM_006311.2,4487-4505).
gaatgcctccgctggaaat

SEQ ID NO: 33639 - DNA, 19 bp, Homo sapiens
  siRNA target sequence for NCOR1 (NM_006311.2,4527-4545).
ggtagaacggggaaaatat

SEQ ID NO: 33640 - DNA, 19 bp, Homo sapiens
  siRNA target sequence for NCOR1 (NM_006311.2,4653-4671).
gagccctgggatttatgat

SEQ ID NO: 33641 - DNA, 19 bp, Homo sapiens
  siRNA target sequence for NCOR1 (NM_006311.2,4691-4709).
cccctgtgagttatcaaaa

SEQ ID NO: 33642 - DNA, 19 bp, Homo sapiens
  siRNA target sequence for NCOR1 (NM_006311.2,4740-4758).
cagaacttctgatgttaca

SEQ ID NO: 33643 - DNA, 19 bp, Homo sapiens
  siRNA target sequence for NCOR1 (NM_006311.2,4742-4760).
gaacttctgatgttacaat

SEQ ID NO: 33644 - DNA, 19 bp, Homo sapiens
  siRNA target sequence for NCOR1 (NM_006311.2,4775-4793).
ctaccaatcatgaaaggaa

SEQ ID NO: 33645 - DNA, 19 bp, Homo sapiens
  siRNA target sequence for NCOR1 (NM_006311.2,4866-4884).
gagccacagtccgtttgat

SEQ ID NO: 33646 - DNA, 19 bp, Homo sapiens
  siRNA target sequence for NCOR1 (NM_006311.2,4985-5003).
cggctgcttacctgtttca

SEQ ID NO: 33647 - DNA, 19 bp, Homo sapiens
  siRNA target sequence for NCOR1 (NM_006311.2,4987-5005).
gctgcttacctgtttcaga

SEQ ID NO: 33648 - DNA, 19 bp, Homo sapiens
  siRNA target sequence for NCOR1 (NM_006311.2,5033-5051).
caagtcagtatcagcttta

SEQ ID NO: 33649 - DNA, 19 bp, Homo sapiens
  siRNA target sequence for NCOR1 (NM_006311.2,5064-5082).
cacaagacagacaatctta

SEQ ID NO: 33650 - DNA, 19 bp, Homo sapiens
  siRNA target sequence for NCOR1 (NM_006311.2,5069-5087).
gacagacaatcttaaatga

SEQ ID NO: 33651 - DNA, 19 bp, Homo sapiens
  siRNA target sequence for NCOR1 (NM_006311.2,5180-5198).
cagcaacgagaggaatcat

SEQ ID NO: 33652 - DNA, 19 bp, Homo sapiens
  siRNA target sequence for NCOR1 (NM_006311.2,5207-5225).
ccaatatgcctccaacaat

SEQ ID NO: 33653 - DNA, 19 bp, Homo sapiens
  siRNA target sequence for NCOR1 (NM_006311.2,5255-5273).
ctcctcccatggacagaat

SEQ ID NO: 33654 - DNA, 19 bp, Homo sapiens
  siRNA target sequence for NCOR1 (NM_006311.2,5257-5275).
cctcccatggacagaatca

SEQ ID NO: 33655 - DNA, 19 bp, Homo sapiens
  siRNA target sequence for NCOR1 (NM_006311.2,5284-5302).
cctggtacacagattactt

SEQ ID NO: 33656 - DNA, 19 bp, Homo sapiens
  siRNA target sequence for NCOR1 (NM_006311.2,5285-5303).
ctggtacacagattacttt

SEQ ID NO: 33657 - DNA, 19 bp, Homo sapiens
  siRNA target sequence for NCOR1 (NM_006311.2,5305-5323).
cctcccaggccgtacaact

SEQ ID NO: 33658 - DNA, 19 bp, Homo sapiens
  siRNA target sequence for NCOR1 (NM_006311.2,5483-5501).
ctggcagtcatggatatgt

SEQ ID NO: 33659 - DNA, 19 bp, Homo sapiens
  siRNA target sequence for NCOR1 (NM_006311.2,5545-5563).
caacagagacccagtgttt

SEQ ID NO: 33660 - DNA, 19 bp, Homo sapiens
  siRNA target sequence for NCOR1 (NM_006311.2,5606-5624).
caactgctcagctacgaat

SEQ ID NO: 33661 - DNA, 19 bp, Homo sapiens
  siRNA target sequence for NCOR1 (NM_006311.2,5609-5627).
ctgctcagctacgaatcat

SEQ ID NO: 33662 - DNA, 19 bp, Homo sapiens
  siRNA target sequence for NCOR1 (NM_006311.2,5668-5686).
ccagcctcccgttacaaca

SEQ ID NO: 33663 - DNA, 19 bp, Homo sapiens
  siRNA target sequence for NCOR1 (NM_006311.2,5808-5826).
gtcagcagcagttagtgaa

SEQ ID NO: 33664 - DNA, 19 bp, Homo sapiens
  siRNA target sequence for NCOR1 (NM_006311.2,5867-5885).
gatctgttcagtgtttata

SEQ ID NO: 33665 - DNA, 19 bp, Homo sapiens
  siRNA target sequence for NCOR1 (NM_006311.2,5872-5890).
gttcagtgtttatacactt

SEQ ID NO: 33666 - DNA, 19 bp, Homo sapiens
  siRNA target sequence for NCOR1 (NM_006311.2,5927-5945).
cttcagtagtttattctga

SEQ ID NO: 33667 - DNA, 19 bp, Homo sapiens
  siRNA target sequence for NCOR1 (NM_006311.2,6045-6063).
gatcatcacccggcaaatt

SEQ ID NO: 33668 - DNA, 19 bp, Homo sapiens
  siRNA target sequence for NCOR1 (NM_006311.2,6084-6102).
ggaacgtggctctcaaagt

SEQ ID NO: 33669 - DNA, 19 bp, Homo sapiens
  siRNA target sequence for NCOR1 (NM_006311.2,6085-6103).
gaacgtggctctcaaagtt

SEQ ID NO: 33670 - DNA, 19 bp, Homo sapiens
  siRNA target sequence for NCOR1 (NM_006311.2,6143-6161).
cacctagcgatgctattga

SEQ ID NO: 33671 - DNA, 19 bp, Homo sapiens
  siRNA target sequence for NCOR1 (NM_006311.2,6463-6481).
cagcctcctacttctacat

SEQ ID NO: 33672 - DNA, 19 bp, Homo sapiens
  siRNA target sequence for NCOR1 (NM_006311.2,6514-6532).
cctgtgaggactaaaacat

SEQ ID NO: 33673 - DNA, 19 bp, Homo sapiens
  siRNA target sequence for NCOR1 (NM_006311.2,6564-6582).
gtctgtccatcatcaaaga

SEQ ID NO: 33674 - DNA, 19 bp, Homo sapiens
  siRNA target sequence for NCOR1 (NM_006311.2,6594-6612).
ggtctctccagaaaatctt

SEQ ID NO: 33675 - DNA, 19 bp, Homo sapiens
  siRNA target sequence for NCOR1 (NM_006311.2,6627-6645).
gggaagtaggcctggaaaa

SEQ ID NO: 33676 - DNA, 19 bp, Homo sapiens
  siRNA target sequence for NCOR1 (NM_006311.2,6707-6725).
cggttgtgcatgagaaaca

SEQ ID NO: 33677 - DNA, 19 bp, Homo sapiens
  siRNA target sequence for NCOR1 (NM_006311.2,6786-6804).
ccgctcaccagggagtata

SEQ ID NO: 33678 - DNA, 19 bp, Homo sapiens
  siRNA target sequence for NCOR1 (NM_006311.2,6787-6805).
cgctcaccagggagtataa

SEQ ID NO: 33679 - DNA, 19 bp, Homo sapiens
  siRNA target sequence for NCOR1 (NM_006311.2,6806-6824).
gctacttgccttcattctt

SEQ ID NO: 33680 - DNA, 19 bp, Homo sapiens
  siRNA target sequence for NCOR1 (NM_006311.2,6822-6840).
cttcaccaagcttgaaaat

SEQ ID NO: 33681 - DNA, 19 bp, Homo sapiens
  siRNA target sequence for NCOR1 (NM_006311.2,6845-6863).
cacccatggttaaatcaaa

SEQ ID NO: 33682 - DNA, 19 bp, Homo sapiens
  siRNA target sequence for NCOR1 (NM_006311.2,6847-6865).
cccatggttaaatcaaaga

SEQ ID NO: 33683 - DNA, 19 bp, Homo sapiens
  siRNA target sequence for NCOR1 (NM_006311.2,6871-6889).
gagatttttcgtaagttga

SEQ ID NO: 33684 - DNA, 19 bp, Homo sapiens
  siRNA target sequence for NCOR1 (NM_006311.2,6935-6953).
gaactgagatctttaatct

SEQ ID NO: 33685 - DNA, 19 bp, Homo sapiens
  siRNA target sequence for NCOR1 (NM_006311.2,7004-7022).
ctgatcctgccagtaatct

SEQ ID NO: 33686 - DNA, 19 bp, Homo sapiens
  siRNA target sequence for NCOR1 (NM_006311.2,7047-7065).
ggctctcatgggaagcttt

SEQ ID NO: 33687 - DNA, 19 bp, Homo sapiens
  siRNA target sequence for NCOR1 (NM_006311.2,7176-7194).
ggacccatcacctcattca

SEQ ID NO: 33688 - DNA, 19 bp, Homo sapiens
  siRNA target sequence for NCOR1 (NM_006311.2,7239-7257).
gaaatctaagtctcctata

SEQ ID NO: 33689 - DNA, 19 bp, Homo sapiens
  siRNA target sequence for NCOR1 (NM_006311.2,7391-7409).
cttataaccctctgactat

SEQ ID NO: 33690 - DNA, 19 bp, Homo sapiens
  siRNA target sequence for NCOR1 (NM_006311.2,7429-7447).
ccaccaacaccgattgcat

SEQ ID NO: 33691 - DNA, 19 bp, Homo sapiens
  siRNA target sequence for NCOR2 (NM_006312.1,255-273).
ggccagagtcccactcata

SEQ ID NO: 33692 - DNA, 19 bp, Homo sapiens
  siRNA target sequence for NCOR2 (NM_006312.1,557-575).
gtagagcagcagatctcta

SEQ ID NO: 33693 - DNA, 19 bp, Homo sapiens
  siRNA target sequence for NCOR2 (NM_006312.1,783-801).
ccgacacccggcagtatca

SEQ ID NO: 33694 - DNA, 19 bp, Homo sapiens
  siRNA target sequence for NCOR2 (NM_006312.1,784-802).
cgacacccggcagtatcat

SEQ ID NO: 33695 - DNA, 19 bp, Homo sapiens
  siRNA target sequence for NCOR2 (NM_006312.1,789-807).
cccggcagtatcatgagaa

SEQ ID NO: 33696 - DNA, 19 bp, Homo sapiens
  siRNA target sequence for NCOR2 (NM_006312.1,792-810).
ggcagtatcatgagaacat

SEQ ID NO: 33697 - DNA, 19 bp, Homo sapiens
  siRNA target sequence for NCOR2 (NM_006312.1,824-842).
gcgatgcggaagaagctaa

SEQ ID NO: 33698 - DNA, 19 bp, Homo sapiens
  siRNA target sequence for NCOR2 (NM_006312.1,825-843).
cgatgcggaagaagctaat

SEQ ID NO: 33699 - DNA, 19 bp, Homo sapiens
  siRNA target sequence for NCOR2 (NM_006312.1,830-848).
cggaagaagctaatcttgt

SEQ ID NO: 33700 - DNA, 19 bp, Homo sapiens
  siRNA target sequence for NCOR2 (NM_006312.1,862-880).
gaatcacgctcggaaacaa

SEQ ID NO: 33701 - DNA, 19 bp, Homo sapiens
  siRNA target sequence for NCOR2 (NM_006312.1,981-999).
gcaaggtgcgcgagtacta

SEQ ID NO: 33702 - DNA, 19 bp, Homo sapiens
  siRNA target sequence for NCOR2 (NM_006312.1,1211-1229).
cagcagcgcatcaagttca

SEQ ID NO: 33703 - DNA, 19 bp, Homo sapiens
  siRNA target sequence for NCOR2 (NM_006312.1,1274-1292).
gaccgccaggtcatgaaca

SEQ ID NO: 33704 - DNA, 19 bp, Homo sapiens
  siRNA target sequence for NCOR2 (NM_006312.1,1336-1354).
gcagcatcccaagaacttt

SEQ ID NO: 33705 - DNA, 19 bp, Homo sapiens
  siRNA target sequence for NCOR2 (NM_006312.1,1391-1409).
gctgagtgcgtcctctatt

SEQ ID NO: 33706 - DNA, 19 bp, Homo sapiens
  siRNA target sequence for NCOR2 (NM_006312.1,1392-1410).
ctgagtgcgtcctctatta

SEQ ID NO: 33707 - DNA, 19 bp, Homo sapiens
  siRNA target sequence for NCOR2 (NM_006312.1,1937-1955).
gtgtcgcagtgtaagaact

SEQ ID NO: 33708 - DNA, 19 bp, Homo sapiens
  siRNA target sequence for NCOR2 (NM_006312.1,1941-1959).
cgcagtgtaagaacttcta

SEQ ID NO: 33709 - DNA, 19 bp, Homo sapiens
  siRNA target sequence for NCOR2 (NM_006312.1,2124-2142).
cgggcgtgagcggaaatga

SEQ ID NO: 33710 - DNA, 19 bp, Homo sapiens
  siRNA target sequence for NCOR2 (NM_006312.1,2997-3015).
caccgccaccgcaaaacct

SEQ ID NO: 33711 - DNA, 19 bp, Homo sapiens
  siRNA target sequence for NCOR2 (NM_006312.1,3349-3367).
cgtcctcgagaggcaaata

SEQ ID NO: 33712 - DNA, 19 bp, Homo sapiens
  siRNA target sequence for NCOR2 (NM_006312.1,3352-3370).
cctcgagaggcaaataggt

SEQ ID NO: 33713 - DNA, 19 bp, Homo sapiens
  siRNA target sequence for NCOR2 (NM_006312.1,3657-3675).
cggacagcgccatcacata

SEQ ID NO: 33714 - DNA, 19 bp, Homo sapiens
  siRNA target sequence for NCOR2 (NM_006312.1,3920-3938).
cccaagcgcacctatgaca

SEQ ID NO: 33715 - DNA, 19 bp, Homo sapiens
  siRNA target sequence for NCOR2 (NM_006312.1,3921-3939).
ccaagcgcacctatgacat

SEQ ID NO: 33716 - DNA, 19 bp, Homo sapiens
  siRNA target sequence for NCOR2 (NM_006312.1,5112-5130).
cccagcgagctgatatgct

SEQ ID NO: 33717 - DNA, 19 bp, Homo sapiens
  siRNA target sequence for NCOR2 (NM_006312.1,5154-5172).
cctcgctggcactcaacta

SEQ ID NO: 33718 - DNA, 19 bp, Homo sapiens
  siRNA target sequence for NCOR2 (NM_006312.1,5342-5360).
ggtccaacacacttgacaa

SEQ ID NO: 33719 - DNA, 19 bp, Homo sapiens
  siRNA target sequence for NCOR2 (NM_006312.1,5420-5438).
gatcgggagcgggaaaagt

SEQ ID NO: 33720 - DNA, 19 bp, Homo sapiens
  siRNA target sequence for NCOR2 (NM_006312.1,5645-5663).
ggcatgaagggtatcatca

SEQ ID NO: 33721 - DNA, 19 bp, Homo sapiens
  siRNA target sequence for NCOR2 (NM_006312.1,6059-6077).
gacccgcaccgggaaaaga

SEQ ID NO: 33722 - DNA, 19 bp, Homo sapiens
  siRNA target sequence for NCOR2 (NM_006312.1,6061-6079).
cccgcaccgggaaaagact

SEQ ID NO: 33723 - DNA, 19 bp, Homo sapiens
  siRNA target sequence for NCOR2 (NM_006312.1,6067-6085).
ccgggaaaagactcaaagt

SEQ ID NO: 33724 - DNA, 19 bp, Homo sapiens
  siRNA target sequence for NCOR2 (NM_006312.1,6068-6086).
cgggaaaagactcaaagta

SEQ ID NO: 33725 - DNA, 19 bp, Homo sapiens
  siRNA target sequence for NCOR2 (NM_006312.1,6651-6669).
gtggtgaggacggtattga

SEQ ID NO: 33726 - DNA, 19 bp, Homo sapiens
  siRNA target sequence for NCOR2 (NM_006312.1,6929-6947).
gggacggagatcttcaata

SEQ ID NO: 33727 - DNA, 19 bp, Homo sapiens
  siRNA target sequence for NCOR2 (NM_006312.1,6930-6948).
ggacggagatcttcaatat

SEQ ID NO: 33728 - DNA, 19 bp, Homo sapiens
  siRNA target sequence for NCOR2 (NM_006312.1,7024-7042).
gctggaggccataattaga

SEQ ID NO: 33729 - DNA, 19 bp, Homo sapiens
  siRNA target sequence for NCOR2 (NM_006312.1,7047-7065).
cactcatgggtaaatatga

SEQ ID NO: 33730 - DNA, 19 bp, Homo sapiens
  siRNA target sequence for NCOR2 (NM_006312.1,7085-7103).
ccgctcagcgccaatgctt

SEQ ID NO: 33731 - DNA, 19 bp, Homo sapiens
  siRNA target sequence for NCOR2 (NM_006312.1,7086-7104).
cgctcagcgccaatgcttt

SEQ ID NO: 33732 - DNA, 19 bp, Homo sapiens
  siRNA target sequence for NCOR2 (NM_006312.1,7087-7105).
gctcagcgccaatgctttt

SEQ ID NO: 33733 - DNA, 19 bp, Homo sapiens
  siRNA target sequence for NDN (NM_002487.2,468-486).
gtcatcggcagctacaaga

SEQ ID NO: 33734 - DNA, 19 bp, Homo sapiens
  siRNA target sequence for NDN (NM_002487.2,798-816).
gagttcgtccaaatgaatt

SEQ ID NO: 33735 - DNA, 19 bp, Homo sapiens
  siRNA target sequence for NDN (NM_002487.2,852-870).
cccgaatacgagttctttt

SEQ ID NO: 33736 - DNA, 19 bp, Homo sapiens
  siRNA target sequence for NDN (NM_002487.2,923-941).
ggccagggtctttaagaaa

SEQ ID NO: 33737 - DNA, 19 bp, Homo sapiens
  siRNA target sequence for NEUROD1 (NM_002500.1,389-407).
gctcgcctggagcgtttta

SEQ ID NO: 33738 - DNA, 19 bp, Homo sapiens
  siRNA target sequence for NEUROD1 (NM_002500.1,390-408).
ctcgcctggagcgttttaa

SEQ ID NO: 33739 - DNA, 19 bp, Homo sapiens
  siRNA target sequence for NEUROD1 (NM_002500.1,392-410).
cgcctggagcgttttaaat

SEQ ID NO: 33740 - DNA, 19 bp, Homo sapiens
  siRNA target sequence for NEUROD1 (NM_002500.1,539-557).
cgcttggccaagaactaca

SEQ ID NO: 33741 - DNA, 19 bp, Homo sapiens
  siRNA target sequence for NEUROD1 (NM_002500.1,1041-1059).
cccaaagccacggatcaat

SEQ ID NO: 33742 - DNA, 19 bp, Homo sapiens
  siRNA target sequence for NEUROD1 (NM_002500.1,1043-1061).
caaagccacggatcaatct

SEQ ID NO: 33743 - DNA, 19 bp, Homo sapiens
  siRNA target sequence for NEUROD1 (NM_002500.1,1087-1105).
cgagatccccatagacaat

SEQ ID NO: 33744 - DNA, 19 bp, Homo sapiens
  siRNA target sequence for NEUROD1 (NM_002500.1,1090-1108).
gatccccatagacaatatt

SEQ ID NO: 33745 - DNA, 19 bp, Homo sapiens
  siRNA target sequence for NEUROD1 (NM_002500.1,1113-1131).
ccttcgatagccattcaca

SEQ ID NO: 33746 - DNA, 19 bp, Homo sapiens
  siRNA target sequence for NEUROD1 (NM_002500.1,1114-1132).
cttcgatagccattcacat

SEQ ID NO: 33747 - DNA, 19 bp, Homo sapiens
  siRNA target sequence for NEUROD4 (NM_021191.1,590-608).
gagcagaccaggtacttat

SEQ ID NO: 33748 - DNA, 19 bp, Homo sapiens
  siRNA target sequence for NEUROD4 (NM_021191.1,611-629).
gatgctcagcagcttaact

SEQ ID NO: 33749 - DNA, 19 bp, Homo sapiens
  siRNA target sequence for NEUROD4 (NM_021191.1,614-632).
gctcagcagcttaactgaa

SEQ ID NO: 33750 - DNA, 19 bp, Homo sapiens
  siRNA target sequence for NEUROD4 (NM_021191.1,628-646).
ctgaagagcatgacagtat

SEQ ID NO: 33751 - DNA, 19 bp, Homo sapiens
  siRNA target sequence for NEUROD4 (NM_021191.1,675-693).
ggggagaaacctaagagaa

SEQ ID NO: 33752 - DNA, 19 bp, Homo sapiens
  siRNA target sequence for NEUROD4 (NM_021191.1,723-741).
gctcgccttgagagattca

SEQ ID NO: 33753 - DNA, 19 bp, Homo sapiens
  siRNA target sequence for NEUROD4 (NM_021191.1,781-799).
ggatgcatggcctgaatga

SEQ ID NO: 33754 - DNA, 19 bp, Homo sapiens
  siRNA target sequence for NEUROD4 (NM_021191.1,822-840).
gtcatgccatgctactcta

SEQ ID NO: 33755 - DNA, 19 bp, Homo sapiens
  siRNA target sequence for NEUROD4 (NM_021191.1,824-842).
catgccatgctactctaaa

SEQ ID NO: 33756 - DNA, 19 bp, Homo sapiens
  siRNA target sequence for NEUROD4 (NM_021191.1,857-875).
caagatagagactcttaga

SEQ ID NO: 33757 - DNA, 19 bp, Homo sapiens
  siRNA target sequence for NEUROD4 (NM_021191.1,874-892).
gactggccaggaactatat

SEQ ID NO: 33758 - DNA, 19 bp, Homo sapiens
  siRNA target sequence for NEUROD4 (NM_021191.1,1037-1055).
gaagcacgaggataaatct

SEQ ID NO: 33759 - DNA, 19 bp, Homo sapiens
  siRNA target sequence for NEUROD4 (NM_021191.1,1043-1061).
cgaggataaatctcctatt

SEQ ID NO: 33760 - DNA, 19 bp, Homo sapiens
  siRNA target sequence for NEUROD4 (NM_021191.1,1083-1101).
cacaacttcaactatcagt

SEQ ID NO: 33761 - DNA, 19 bp, Homo sapiens
  siRNA target sequence for NEUROD4 (NM_021191.1,1117-1135).
gccctccttatggtcatat

SEQ ID NO: 33762 - DNA, 19 bp, Homo sapiens
  siRNA target sequence for NEUROD4 (NM_021191.1,1155-1173).
ctcaagccccaagtattca

SEQ ID NO: 33763 - DNA, 19 bp, Homo sapiens
  siRNA target sequence for NEUROD4 (NM_021191.1,1216-1234).
gcagtacacccccttatga

SEQ ID NO: 33764 - DNA, 19 bp, Homo sapiens
  siRNA target sequence for NEUROD4 (NM_021191.1,1290-1308).
gggtctcctgacctagaaa

SEQ ID NO: 33765 - DNA, 19 bp, Homo sapiens
  siRNA target sequence for NEUROD4 (NM_021191.1,1393-1411).
cccgttatgatgttcctat

SEQ ID NO: 33766 - DNA, 19 bp, Homo sapiens
  siRNA target sequence for NEUROD4 (NM_021191.1,1396-1414).
gttatgatgttcctataga

SEQ ID NO: 33767 - DNA, 19 bp, Homo sapiens
  siRNA target sequence for NEUROD4 (NM_021191.1,1450-1468).
ggacccaactcaatacagt

SEQ ID NO: 33768 - DNA, 19 bp, Homo sapiens
  siRNA target sequence for NEUROD6 (NM_022728.2,356-374).
gttaacactaccgtttgat

SEQ ID NO: 33769 - DNA, 19 bp, Homo sapiens
  siRNA target sequence for NEUROD6 (NM_022728.2,398-416).
ccagatgtgcagaaagttt

SEQ ID NO: 33770 - DNA, 19 bp, Homo sapiens
  siRNA target sequence for NEUROD6 (NM_022728.2,581-599).
gaggggtcttaggaaaaaa

SEQ ID NO: 33771 - DNA, 19 bp, Homo sapiens
  siRNA target sequence for NEUROD6 (NM_022728.2,686-704).
cgacgctctggacaactta

SEQ ID NO: 33772 - DNA, 19 bp, Homo sapiens
  siRNA target sequence for NEUROD6 (NM_022728.2,687-705).
gacgctctggacaacttaa

SEQ ID NO: 33773 - DNA, 19 bp, Homo sapiens
  siRNA target sequence for NEUROD6 (NM_022728.2,690-708).
gctctggacaacttaagaa

SEQ ID NO: 33774 - DNA, 19 bp, Homo sapiens
  siRNA target sequence for NEUROD6 (NM_022728.2,713-731).
ggtcccctgttattctaaa

SEQ ID NO: 33775 - DNA, 19 bp, Homo sapiens
  siRNA target sequence for NEUROD6 (NM_022728.2,743-761).
gtccaaaatagagacttta

SEQ ID NO: 33776 - DNA, 19 bp, Homo sapiens
  siRNA target sequence for NEUROD6 (NM_022728.2,746-764).
caaaatagagactttacga

SEQ ID NO: 33777 - DNA, 19 bp, Homo sapiens
  siRNA target sequence for NEUROD6 (NM_022728.2,757-775).
ctttacgactggccaaaaa

SEQ ID NO: 33778 - DNA, 19 bp, Homo sapiens
  siRNA target sequence for NEUROD6 (NM_022728.2,762-780).
cgactggccaaaaactaca

SEQ ID NO: 33779 - DNA, 19 bp, Homo sapiens
  siRNA target sequence for NEUROD6 (NM_022728.2,763-781).
gactggccaaaaactacat

SEQ ID NO: 33780 - DNA, 19 bp, Homo sapiens
  siRNA target sequence for NEUROD6 (NM_022728.2,776-794).
ctacatctgggcactttct

SEQ ID NO: 33781 - DNA, 19 bp, Homo sapiens
  siRNA target sequence for NEUROD6 (NM_022728.2,817-835).
gaccagatctgctcacatt

SEQ ID NO: 33782 - DNA, 19 bp, Homo sapiens
  siRNA target sequence for NEUROD6 (NM_022728.2,830-848).
cacattcgtccaaaactta

SEQ ID NO: 33783 - DNA, 19 bp, Homo sapiens
  siRNA target sequence for NEUROD6 (NM_022728.2,1014-1032).
gggcatgggactcttgata

SEQ ID NO: 33784 - DNA, 19 bp, Homo sapiens
  siRNA target sequence for NEUROD6 (NM_022728.2,1015-1033).
ggcatgggactcttgataa

SEQ ID NO: 33785 - DNA, 19 bp, Homo sapiens
  siRNA target sequence for NEUROD6 (NM_022728.2,1016-1034).
gcatgggactcttgataat

SEQ ID NO: 33786 - DNA, 19 bp, Homo sapiens
  siRNA target sequence for NEUROD6 (NM_022728.2,1017-1035).
catgggactcttgataatt

SEQ ID NO: 33787 - DNA, 19 bp, Homo sapiens
  siRNA target sequence for NEUROD6 (NM_022728.2,1020-1038).
gggactcttgataattcca

SEQ ID NO: 33788 - DNA, 19 bp, Homo sapiens
  siRNA target sequence for NEUROD6 (NM_022728.2,1021-1039).
ggactcttgataattccaa

SEQ ID NO: 33789 - DNA, 19 bp, Homo sapiens
  siRNA target sequence for NEUROD6 (NM_022728.2,1063-1081).
gcagtgcgtatgaatcctt

SEQ ID NO: 33790 - DNA, 19 bp, Homo sapiens
  siRNA target sequence for NEUROD6 (NM_022728.2,1069-1087).
cgtatgaatccttctatga

SEQ ID NO: 33791 - DNA, 19 bp, Homo sapiens
  siRNA target sequence for NEUROD6 (NM_022728.2,1118-1136).
gtttgaaggtcccttaagt

SEQ ID NO: 33792 - DNA, 19 bp, Homo sapiens
  siRNA target sequence for NEUROD6 (NM_022728.2,1135-1153).
gtcctcccccaattaacta

SEQ ID NO: 33793 - DNA, 19 bp, Homo sapiens
  siRNA target sequence for NEUROD6 (NM_022728.2,1138-1156).
ctcccccaattaactataa

SEQ ID NO: 33794 - DNA, 19 bp, Homo sapiens
  siRNA target sequence for NEUROD6 (NM_022728.2,1182-1200).
gaaaccttggactatggta

SEQ ID NO: 33795 - DNA, 19 bp, Homo sapiens
  siRNA target sequence for NEUROD6 (NM_022728.2,1191-1209).
gactatggtaaaaattaca

SEQ ID NO: 33796 - DNA, 19 bp, Homo sapiens
  siRNA target sequence for NEUROD6 (NM_022728.2,1319-1337).
ccaatctctcacaatgcaa

SEQ ID NO: 33797 - DNA, 19 bp, Homo sapiens
  siRNA target sequence for NEUROD6 (NM_022728.2,1326-1344).
ctcacaatgcaagatgaat

SEQ ID NO: 33798 - DNA, 19 bp, Homo sapiens
  siRNA target sequence for NEUROG3 (NM_020999.1,400-418).
gacggagtcggcgaaagaa

SEQ ID NO: 33799 - DNA, 19 bp, Homo sapiens
  siRNA target sequence for NEUROG3 (NM_020999.1,426-444).
gaccgcgagcgcaatcgaa

SEQ ID NO: 33800 - DNA, 19 bp, Homo sapiens
  siRNA target sequence for NIRF (NM_152306.2,490-508).
gcagttggaaaatggatat

SEQ ID NO: 33801 - DNA, 19 bp, Homo sapiens
  siRNA target sequence for NIRF (NM_152306.2,496-514).
ggaaaatggatatacctta

SEQ ID NO: 33802 - DNA, 19 bp, Homo sapiens
  siRNA target sequence for NIRF (NM_152306.2,531-549).
gactgaatgatataattca

SEQ ID NO: 33803 - DNA, 19 bp, Homo sapiens
  siRNA target sequence for NIRF (NM_152306.2,585-603).
gcacatctacacagattga

SEQ ID NO: 33804 - DNA, 19 bp, Homo sapiens
  siRNA target sequence for NIRF (NM_152306.2,602-620).
gaggctaaaccctgttcta

SEQ ID NO: 33805 - DNA, 19 bp, Homo sapiens
  siRNA target sequence for NIRF (NM_152306.2,604-622).
ggctaaaccctgttctaat

SEQ ID NO: 33806 - DNA, 19 bp, Homo sapiens
  siRNA target sequence for NIRF (NM_152306.2,605-623).
gctaaaccctgttctaata

SEQ ID NO: 33807 - DNA, 19 bp, Homo sapiens
  siRNA target sequence for NIRF (NM_152306.2,618-636).
ctaatagtccacctaaagt

SEQ ID NO: 33808 - DNA, 19 bp, Homo sapiens
  siRNA target sequence for NIRF (NM_152306.2,681-699).
cagctcgtgcccgtcttat

SEQ ID NO: 33809 - DNA, 19 bp, Homo sapiens
  siRNA target sequence for NIRF (NM_152306.2,684-702).
ctcgtgcccgtcttattga

SEQ ID NO: 33810 - DNA, 19 bp, Homo sapiens
  siRNA target sequence for NIRF (NM_152306.2,705-723).
ctggctttggaatatataa

SEQ ID NO: 33811 - DNA, 19 bp, Homo sapiens
  siRNA target sequence for NIRF (NM_152306.2,754-772).
cggccttggtgcttggttt

SEQ ID NO: 33812 - DNA, 19 bp, Homo sapiens
  siRNA target sequence for NIRF (NM_152306.2,768-786).
ggtttgaagcacacataca

SEQ ID NO: 33813 - DNA, 19 bp, Homo sapiens
  siRNA target sequence for NIRF (NM_152306.2,781-799).
catacatagtgttactaga

SEQ ID NO: 33814 - DNA, 19 bp, Homo sapiens
  siRNA target sequence for NIRF (NM_152306.2,823-841).
caaaactccactgaagaat

SEQ ID NO: 33815 - DNA, 19 bp, Homo sapiens
  siRNA target sequence for NIRF (NM_152306.2,835-853).
gaagaatggcagttcttgt

SEQ ID NO: 33816 - DNA, 19 bp, Homo sapiens
  siRNA target sequence for NIRF (NM_152306.2,842-860).
ggcagttcttgtaaaagga

SEQ ID NO: 33817 - DNA, 19 bp, Homo sapiens
  siRNA target sequence for NIRF (NM_152306.2,885-903).
ccaaagagaacacaaataa

SEQ ID NO: 33818 - DNA, 19 bp, Homo sapiens
  siRNA target sequence for NIRF (NM_152306.2,945-963).
ctgctgatgaagacgttat

SEQ ID NO: 33819 - DNA, 19 bp, Homo sapiens
  siRNA target sequence for NIRF (NM_152306.2,953-971).
gaagacgttatttaccata

SEQ ID NO: 33820 - DNA, 19 bp, Homo sapiens
  siRNA target sequence for NIRF (NM_152306.2,967-985).
ccatatccagtatgatgaa

SEQ ID NO: 33821 - DNA, 19 bp, Homo sapiens
  siRNA target sequence for NIRF (NM_152306.2,968-986).
catatccagtatgatgaat

SEQ ID NO: 33822 - DNA, 19 bp, Homo sapiens
  siRNA target sequence for NIRF (NM_152306.2,996-1014).
gcggtactctagaaatgaa

SEQ ID NO: 33823 - DNA, 19 bp, Homo sapiens
  siRNA target sequence for NIRF (NM_152306.2,997-1015).
cggtactctagaaatgaat

SEQ ID NO: 33824 - DNA, 19 bp, Homo sapiens
  siRNA target sequence for NIRF (NM_152306.2,1031-1049).
ccacgagctagaaccattt

SEQ ID NO: 33825 - DNA, 19 bp, Homo sapiens
  siRNA target sequence for NIRF (NM_152306.2,1032-1050).
cacgagctagaaccatttt

SEQ ID NO: 33826 - DNA, 19 bp, Homo sapiens
  siRNA target sequence for NIRF (NM_152306.2,1034-1052).
cgagctagaaccattttga

SEQ ID NO: 33827 - DNA, 19 bp, Homo sapiens
  siRNA target sequence for NIRF (NM_152306.2,1035-1053).
gagctagaaccattttgaa

SEQ ID NO: 33828 - DNA, 19 bp, Homo sapiens
  siRNA target sequence for NIRF (NM_152306.2,1073-1091).
ggtgatgtggtaatggtta

SEQ ID NO: 33829 - DNA, 19 bp, Homo sapiens
  siRNA target sequence for NIRF (NM_152306.2,1074-1092).
gtgatgtggtaatggttaa

SEQ ID NO: 33830 - DNA, 19 bp, Homo sapiens
  siRNA target sequence for NIRF (NM_152306.2,1136-1154).
gcagaaattaccacattga

SEQ ID NO: 33831 - DNA, 19 bp, Homo sapiens
  siRNA target sequence for NIRF (NM_152306.2,1178-1196).
gaacttcgtgtgaaaattt

SEQ ID NO: 33832 - DNA, 19 bp, Homo sapiens
  siRNA target sequence for NIRF (NM_152306.2,1228-1246).
ctgcaagataatatctgta

SEQ ID NO: 33833 - DNA, 19 bp, Homo sapiens
  siRNA target sequence for NIRF (NM_152306.2,1274-1292).
ggagcccatcccctttcat

SEQ ID NO: 33834 - DNA, 19 bp, Homo sapiens
  siRNA target sequence for NIRF (NM_152306.2,1315-1333).
gcgaaatgaccctgaatgt

SEQ ID NO: 33835 - DNA, 19 bp, Homo sapiens
  siRNA target sequence for NIRF (NM_152306.2,1317-1335).
gaaatgaccctgaatgtga

SEQ ID NO: 33836 - DNA, 19 bp, Homo sapiens
  siRNA target sequence for NIRF (NM_152306.2,1434-1452).
gtaatgtggcttatcatat

SEQ ID NO: 33837 - DNA, 19 bp, Homo sapiens
  siRNA target sequence for NIRF (NM_152306.2,1439-1457).
gtggcttatcatatttact

SEQ ID NO: 33838 - DNA, 19 bp, Homo sapiens
  siRNA target sequence for NIRF (NM_152306.2,1460-1478).
ctgaatccacctttggata

SEQ ID NO: 33839 - DNA, 19 bp, Homo sapiens
  siRNA target sequence for NIRF (NM_152306.2,1500-1518).
ggtattgtccttcttgtaa

SEQ ID NO: 33840 - DNA, 19 bp, Homo sapiens
  siRNA target sequence for NIRF (NM_152306.2,1501-1519).
gtattgtccttcttgtaaa

SEQ ID NO: 33841 - DNA, 19 bp, Homo sapiens
  siRNA target sequence for NIRF (NM_152306.2,1545-1563).
ctggtgaaagactcaagat

SEQ ID NO: 33842 - DNA, 19 bp, Homo sapiens
  siRNA target sequence for NIRF (NM_152306.2,1547-1565).
ggtgaaagactcaagatga

SEQ ID NO: 33843 - DNA, 19 bp, Homo sapiens
  siRNA target sequence for NIRF (NM_152306.2,1582-1600).
gatgccgtcagctagtact

SEQ ID NO: 33844 - DNA, 19 bp, Homo sapiens
  siRNA target sequence for NIRF (NM_152306.2,1585-1603).
gccgtcagctagtactgaa

SEQ ID NO: 33845 - DNA, 19 bp, Homo sapiens
  siRNA target sequence for NIRF (NM_152306.2,1586-1604).
ccgtcagctagtactgaaa

SEQ ID NO: 33846 - DNA, 19 bp, Homo sapiens
  siRNA target sequence for NIRF (NM_152306.2,1637-1655).
gttggtcgtacgagagaat

SEQ ID NO: 33847 - DNA, 19 bp, Homo sapiens
  siRNA target sequence for NIRF (NM_152306.2,1640-1658).
ggtcgtacgagagaatgta

SEQ ID NO: 33848 - DNA, 19 bp, Homo sapiens
  siRNA target sequence for NIRF (NM_152306.2,1643-1661).
cgtacgagagaatgtacta

SEQ ID NO: 33849 - DNA, 19 bp, Homo sapiens
  siRNA target sequence for NIRF (NM_152306.2,1644-1662).
gtacgagagaatgtactat

SEQ ID NO: 33850 - DNA, 19 bp, Homo sapiens
  siRNA target sequence for NIRF (NM_152306.2,1647-1665).
cgagagaatgtactattgt

SEQ ID NO: 33851 - DNA, 19 bp, Homo sapiens
  siRNA target sequence for NIRF (NM_152306.2,1656-1674).
gtactattgtcccttctaa

SEQ ID NO: 33852 - DNA, 19 bp, Homo sapiens
  siRNA target sequence for NIRF (NM_152306.2,1659-1677).
ctattgtcccttctaatca

SEQ ID NO: 33853 - DNA, 19 bp, Homo sapiens
  siRNA target sequence for NIRF (NM_152306.2,1710-1728).
caacttggagatttagagt

SEQ ID NO: 33854 - DNA, 19 bp, Homo sapiens
  siRNA target sequence for NIRF (NM_152306.2,1818-1836).
gtggatttgcggatgaagt

SEQ ID NO: 33855 - DNA, 19 bp, Homo sapiens
  siRNA target sequence for NIRF (NM_152306.2,1832-1850).
gaagtcttgacagagttat

SEQ ID NO: 33856 - DNA, 19 bp, Homo sapiens
  siRNA target sequence for NIRF (NM_152896.1,1844-1862).
ggtgatgagttcacataca

SEQ ID NO: 33857 - DNA, 19 bp, Homo sapiens
  siRNA target sequence for NIRF (NM_152896.1,1861-1879).
cactggaagcggtggtaaa

SEQ ID NO: 33858 - DNA, 19 bp, Homo sapiens
  siRNA target sequence for NIRF (NM_152896.1,1911-1929).
cttcagctgatcaaacatt

SEQ ID NO: 33859 - DNA, 19 bp, Homo sapiens
  siRNA target sequence for NIRF (NM_152896.1,1916-1934).
gctgatcaaacattaacaa

SEQ ID NO: 33860 - DNA, 19 bp, Homo sapiens
  siRNA target sequence for NIRF (NM_152896.1,1917-1935).
ctgatcaaacattaacaaa

SEQ ID NO: 33861 - DNA, 19 bp, Homo sapiens
  siRNA target sequence for NIRF (NM_152896.1,1967-1985).
gctccattggatgataaaa

SEQ ID NO: 33862 - DNA, 19 bp, Homo sapiens
  siRNA target sequence for NIRF (NM_152896.1,2053-2071).
gaagatcagcaaatatgct

SEQ ID NO: 33863 - DNA, 19 bp, Homo sapiens
  siRNA target sequence for NIRF (NM_152896.1,2113-2131).
gaaatactggccagagatt

SEQ ID NO: 33864 - DNA, 19 bp, Homo sapiens
  siRNA target sequence for NIRF (NM_152896.1,2119-2137).
ctggccagagatttcatca

SEQ ID NO: 33865 - DNA, 19 bp, Homo sapiens
  siRNA target sequence for NIRF (NM_152896.1,2149-2167).
cttggtttggcgctatctt

SEQ ID NO: 33866 - DNA, 19 bp, Homo sapiens
  siRNA target sequence for NIRF (NM_152896.1,2152-2170).
ggtttggcgctatctttta

SEQ ID NO: 33867 - DNA, 19 bp, Homo sapiens
  siRNA target sequence for NIRF (NM_152896.1,2153-2171).
gtttggcgctatcttttaa

SEQ ID NO: 33868 - DNA, 19 bp, Homo sapiens
  siRNA target sequence for NIRF (NM_152896.1,2158-2176).
gcgctatcttttaagaaga

SEQ ID NO: 33869 - DNA, 19 bp, Homo sapiens
  siRNA target sequence for NIRF (NM_152896.1,2216-2234).
gaacggtcaaggagattat

SEQ ID NO: 33870 - DNA, 19 bp, Homo sapiens
  siRNA target sequence for NIRF (NM_152896.1,2221-2239).
gtcaaggagattatgtcta

SEQ ID NO: 33871 - DNA, 19 bp, Homo sapiens
  siRNA target sequence for NIRF (NM_152896.1,2226-2244).
ggagattatgtctacgttt

SEQ ID NO: 33872 - DNA, 19 bp, Homo sapiens
  siRNA target sequence for NIRF (NM_152896.1,2229-2247).
gattatgtctacgtttaca

SEQ ID NO: 33873 - DNA, 19 bp, Homo sapiens
  siRNA target sequence for NIRF (NM_152896.1,2259-2277).
gttacccttcagataaaga

SEQ ID NO: 33874 - DNA, 19 bp, Homo sapiens
  siRNA target sequence for NIRF (NM_152896.1,2354-2372).
ccaagtgcctccaaagtgt

SEQ ID NO: 33875 - DNA, 19 bp, Homo sapiens
  siRNA target sequence for NIRF (NM_152896.1,2355-2373).
caagtgcctccaaagtgta

SEQ ID NO: 33876 - DNA, 19 bp, Homo sapiens
  siRNA target sequence for NIRF (NM_152896.1,2421-2439).
ctcaacagcaacatctcat

SEQ ID NO: 33877 - DNA, 19 bp, Homo sapiens
  siRNA target sequence for NIRF (NM_152896.1,2489-2507).
cttgtggaaggaccaaatt

SEQ ID NO: 33878 - DNA, 19 bp, Homo sapiens
  siRNA target sequence for NIRF (NM_152896.1,2544-2562).
gctgtcaggagctagttta

SEQ ID NO: 33879 - DNA, 19 bp, Homo sapiens
  siRNA target sequence for NIRF (NM_152896.1,2547-2565).
gtcaggagctagtttacca

SEQ ID NO: 33880 - DNA, 19 bp, Homo sapiens
  siRNA target sequence for NIRF (NM_152896.1,2577-2595).
ctgagtgcttccacaatgt

SEQ ID NO: 33881 - DNA, 19 bp, Homo sapiens
  siRNA target sequence for NIRF (NM_152896.1,2579-2597).
gagtgcttccacaatgtct

SEQ ID NO: 33882 - DNA, 19 bp, Homo sapiens
  siRNA target sequence for NIRF (NM_152896.1,2607-2625).
gcctacagcgctcctttaa

SEQ ID NO: 33883 - DNA, 19 bp, Homo sapiens
  siRNA target sequence for NIRF (NM_152896.1,2646-2664).
ctgcttgccggcatgatct

SEQ ID NO: 33884 - DNA, 19 bp, Homo sapiens
  siRNA target sequence for NIRF (NM_152896.1,2657-2675).
catgatcttggccagaatt

SEQ ID NO: 33885 - DNA, 19 bp, Homo sapiens
  siRNA target sequence for NIRF (NM_152896.1,2666-2684).
ggccagaattacatcatga

SEQ ID NO: 33886 - DNA, 19 bp, Homo sapiens
  siRNA target sequence for NIRF (NM_152896.1,2680-2698).
catgattcccaatgagatt

SEQ ID NO: 33887 - DNA, 19 bp, Homo sapiens
  siRNA target sequence for NONO (NM_007363.3,1021-1039).
caagtggaccgcaacatca

SEQ ID NO: 33888 - DNA, 19 bp, Homo sapiens
  siRNA target sequence for NONO (NM_007363.3,1262-1280).
ggcgacagcaggaaggatt

SEQ ID NO: 33889 - DNA, 19 bp, Homo sapiens
  siRNA target sequence for NONO (NM_007363.3,1345-1363).
gctatgggcataaacaaca

SEQ ID NO: 33890 - DNA, 19 bp, Homo sapiens
  siRNA target sequence for NRBF-2 (NM_030759.1,226-244).
gacgagcagaccgtttatt

SEQ ID NO: 33891 - DNA, 19 bp, Homo sapiens
  siRNA target sequence for NRBF-2 (NM_030759.1,260-278).
cgaagaggctatttcttgt

SEQ ID NO: 33892 - DNA, 19 bp, Homo sapiens
  siRNA target sequence for NRBF-2 (NM_030759.1,266-284).
ggctatttcttgtcacaaa

SEQ ID NO: 33893 - DNA, 19 bp, Homo sapiens
  siRNA target sequence for NRBF-2 (NM_030759.1,289-307).
ctgcagcatatctttctga

SEQ ID NO: 33894 - DNA, 19 bp, Homo sapiens
  siRNA target sequence for NRBF-2 (NM_030759.1,361-379).
gggatagccatatgaaaca

SEQ ID NO: 33895 - DNA, 19 bp, Homo sapiens
  siRNA target sequence for NRBF-2 (NM_030759.1,911-929).
gaagttcgcagcaaatact

SEQ ID NO: 33896 - DNA, 19 bp, Homo sapiens
  siRNA target sequence for NRF (NM_017544.1,668-686).
ccaaatggctgaaggtatt

SEQ ID NO: 33897 - DNA, 19 bp, Homo sapiens
  siRNA target sequence for NRF (NM_017544.1,674-692).
ggctgaaggtattgatatt

SEQ ID NO: 33898 - DNA, 19 bp, Homo sapiens
  siRNA target sequence for NRF (NM_017544.1,694-712).
gggagatgccttcatatga

SEQ ID NO: 33899 - DNA, 19 bp, Homo sapiens
  siRNA target sequence for NRF (NM_017544.1,695-713).
ggagatgccttcatatgat

SEQ ID NO: 33900 - DNA, 19 bp, Homo sapiens
  siRNA target sequence for NRF (NM_017544.1,806-824).
ccatgcgagacctcgtttt

SEQ ID NO: 33901 - DNA, 19 bp, Homo sapiens
  siRNA target sequence for NRF (NM_017544.1,819-837).
cgttttgagcctgtacatt

SEQ ID NO: 33902 - DNA, 19 bp, Homo sapiens
  siRNA target sequence for NRF (NM_017544.1,876-894).
ccttatggccctcaaacaa

SEQ ID NO: 33903 - DNA, 19 bp, Homo sapiens
  siRNA target sequence for NRF (NM_017544.1,925-943).
gcatgccaagagacatcta

SEQ ID NO: 33904 - DNA, 19 bp, Homo sapiens
  siRNA target sequence for NRF (NM_017544.1,934-952).
gagacatctaccaagatta

SEQ ID NO: 33905 - DNA, 19 bp, Homo sapiens
  siRNA target sequence for NRF (NM_017544.1,936-954).
gacatctaccaagattata

SEQ ID NO: 33906 - DNA, 19 bp, Homo sapiens
  siRNA target sequence for NRF (NM_017544.1,938-956).
catctaccaagattatact

SEQ ID NO: 33907 - DNA, 19 bp, Homo sapiens
  siRNA target sequence for NRF (NM_017544.1,941-959).
ctaccaagattatactcaa

SEQ ID NO: 33908 - DNA, 19 bp, Homo sapiens
  siRNA target sequence for NRF (NM_017544.1,955-973).
ctcaagactctttcagtat

SEQ ID NO: 33909 - DNA, 19 bp, Homo sapiens
  siRNA target sequence for NRF (NM_017544.1,978-996).
gatgggaattctcagtatt

SEQ ID NO: 33910 - DNA, 19 bp, Homo sapiens
  siRNA target sequence for NRF (NM_017544.1,1032-1050).
cctgtaacagccaacatgt

SEQ ID NO: 33911 - DNA, 19 bp, Homo sapiens
  siRNA target sequence for NRF (NM_017544.1,1033-1051).
ctgtaacagccaacatgta

SEQ ID NO: 33912 - DNA, 19 bp, Homo sapiens
  siRNA target sequence for NRF (NM_017544.1,1035-1053).
gtaacagccaacatgtatt

SEQ ID NO: 33913 - DNA, 19 bp, Homo sapiens
  siRNA target sequence for NRF (NM_017544.1,1039-1057).
cagccaacatgtattttga

SEQ ID NO: 33914 - DNA, 19 bp, Homo sapiens
  siRNA target sequence for NRF (NM_017544.1,1041-1059).
gccaacatgtattttgaca

SEQ ID NO: 33915 - DNA, 19 bp, Homo sapiens
  siRNA target sequence for NRF (NM_017544.1,1152-1170).
gtagccgagaagcagtatt

SEQ ID NO: 33916 - DNA, 19 bp, Homo sapiens
  siRNA target sequence for NRF (NM_017544.1,1196-1214).
ctggaagaacctttctaat

SEQ ID NO: 33917 - DNA, 19 bp, Homo sapiens
  siRNA target sequence for NRF (NM_017544.1,1228-1246).
ctggatctgataaaattaa

SEQ ID NO: 33918 - DNA, 19 bp, Homo sapiens
  siRNA target sequence for NRF (NM_017544.1,1231-1249).
gatctgataaaattaatta

SEQ ID NO: 33919 - DNA, 19 bp, Homo sapiens
  siRNA target sequence for NRF (NM_017544.1,1277-1295).
ggcgtgtaagacaaatcct

SEQ ID NO: 33920 - DNA, 19 bp, Homo sapiens
  siRNA target sequence for NRF (NM_017544.1,1288-1306).
caaatcctgagtatatata

SEQ ID NO: 33921 - DNA, 19 bp, Homo sapiens
  siRNA target sequence for NRF (NM_017544.1,1333-1351).
ccgacatccccaaaaataa

SEQ ID NO: 33922 - DNA, 19 bp, Homo sapiens
  siRNA target sequence for NRF (NM_017544.1,1359-1377).
ctaactgatggctatgctt

SEQ ID NO: 33923 - DNA, 19 bp, Homo sapiens
  siRNA target sequence for NRF (NM_017544.1,1387-1405).
gatgccaaaatatctactt

SEQ ID NO: 33924 - DNA, 19 bp, Homo sapiens
  siRNA target sequence for NRF (NM_017544.1,1391-1409).
ccaaaatatctacttaact

SEQ ID NO: 33925 - DNA, 19 bp, Homo sapiens
  siRNA target sequence for NRF (NM_017544.1,1403-1421).
cttaactacaggttatgct

SEQ ID NO: 33926 - DNA, 19 bp, Homo sapiens
  siRNA target sequence for NRF (NM_017544.1,1450-1468).
ctacagagctagctgtaaa

SEQ ID NO: 33927 - DNA, 19 bp, Homo sapiens
  siRNA target sequence for NRF (NM_017544.1,1475-1493).
gcagaaacgtattgaagtt

SEQ ID NO: 33928 - DNA, 19 bp, Homo sapiens
  siRNA target sequence for NRF (NM_017544.1,1478-1496).
gaaacgtattgaagttaga

SEQ ID NO: 33929 - DNA, 19 bp, Homo sapiens
  siRNA target sequence for NRF (NM_017544.1,1506-1524).
cggaaattcaagcatacat

SEQ ID NO: 33930 - DNA, 19 bp, Homo sapiens
  siRNA target sequence for NRF (NM_017544.1,1554-1572).
ggcatgtcctcctatgaat

SEQ ID NO: 33931 - DNA, 19 bp, Homo sapiens
  siRNA target sequence for NRF (NM_017544.1,1555-1573).
gcatgtcctcctatgaatt

SEQ ID NO: 33932 - DNA, 19 bp, Homo sapiens
  siRNA target sequence for NRF (NM_017544.1,1556-1574).
catgtcctcctatgaattt

SEQ ID NO: 33933 - DNA, 19 bp, Homo sapiens
  siRNA target sequence for NRF (NM_017544.1,1559-1577).
gtcctcctatgaatttcct

SEQ ID NO: 33934 - DNA, 19 bp, Homo sapiens
  siRNA target sequence for NRF (NM_017544.1,1623-1641).
gcttccgggcagccaattt

SEQ ID NO: 33935 - DNA, 19 bp, Homo sapiens
  siRNA target sequence for NRF (NM_017544.1,1627-1645).
ccgggcagccaatttttaa

SEQ ID NO: 33936 - DNA, 19 bp, Homo sapiens
  siRNA target sequence for NRF (NM_017544.1,1628-1646).
cgggcagccaatttttaat

SEQ ID NO: 33937 - DNA, 19 bp, Homo sapiens
  siRNA target sequence for NRF (NM_017544.1,1631-1649).
gcagccaatttttaatgct

SEQ ID NO: 33938 - DNA, 19 bp, Homo sapiens
  siRNA target sequence for NRF (NM_017544.1,1722-1740).
gcctcattcaacaagatgt

SEQ ID NO: 33939 - DNA, 19 bp, Homo sapiens
  siRNA target sequence for NRF (NM_017544.1,1787-1805).
gtcgagtgtttttacaaga

SEQ ID NO: 33940 - DNA, 19 bp, Homo sapiens
  siRNA target sequence for NRF1 (NM_005011.2,94-112).
gtgacccaaaccgaacata

SEQ ID NO: 33941 - DNA, 19 bp, Homo sapiens
  siRNA target sequence for NRF1 (NM_005011.2,105-123).
cgaacatatggctaccata

SEQ ID NO: 33942 - DNA, 19 bp, Homo sapiens
  siRNA target sequence for NRF1 (NM_005011.2,157-175).
gtccatgtggctacttaca

SEQ ID NO: 33943 - DNA, 19 bp, Homo sapiens
  siRNA target sequence for NRF1 (NM_005011.2,170-188).
cttacaccgagcatagtat

SEQ ID NO: 33944 - DNA, 19 bp, Homo sapiens
  siRNA target sequence for NRF1 (NM_005011.2,222-240).
cgaggacacctcttacgat

SEQ ID NO: 33945 - DNA, 19 bp, Homo sapiens
  siRNA target sequence for NRF1 (NM_005011.2,233-251).
cttacgatgactcagatat

SEQ ID NO: 33946 - DNA, 19 bp, Homo sapiens
  siRNA target sequence for NRF1 (NM_005011.2,349-367).
cggaaacggcctcatgtat

SEQ ID NO: 33947 - DNA, 19 bp, Homo sapiens
  siRNA target sequence for NRF1 (NM_005011.2,350-368).
ggaaacggcctcatgtatt

SEQ ID NO: 33948 - DNA, 19 bp, Homo sapiens
  siRNA target sequence for NRF1 (NM_005011.2,351-369).
gaaacggcctcatgtattt

SEQ ID NO: 33949 - DNA, 19 bp, Homo sapiens
  siRNA target sequence for NRF1 (NM_005011.2,387-405).
ccggaagaggcaacaaaca

SEQ ID NO: 33950 - DNA, 19 bp, Homo sapiens
  siRNA target sequence for NRF1 (NM_005011.2,424-442).
cgagccacgttagatgaat

SEQ ID NO: 33951 - DNA, 19 bp, Homo sapiens
  siRNA target sequence for NRF1 (NM_005011.2,466-484).
gctattgtcctctgtatct

SEQ ID NO: 33952 - DNA, 19 bp, Homo sapiens
  siRNA target sequence for NRF1 (NM_005011.2,524-542).
cagcacctttggagaatgt

SEQ ID NO: 33953 - DNA, 19 bp, Homo sapiens
  siRNA target sequence for NRF1 (NM_005011.2,605-623).
ctgcgccacaggaggttaa

SEQ ID NO: 33954 - DNA, 19 bp, Homo sapiens
  siRNA target sequence for NRF1 (NM_005011.2,607-625).
gcgccacaggaggttaact

SEQ ID NO: 33955 - DNA, 19 bp, Homo sapiens
  siRNA target sequence for NRF1 (NM_005011.2,609-627).
gccacaggaggttaactca

SEQ ID NO: 33956 - DNA, 19 bp, Homo sapiens
  siRNA target sequence for NRF1 (NM_005011.2,642-660).
caccatcgacggaattcca

SEQ ID NO: 33957 - DNA, 19 bp, Homo sapiens
  siRNA target sequence for NRF1 (NM_005011.2,685-703).
gcccagcttcgggcattta

SEQ ID NO: 33958 - DNA, 19 bp, Homo sapiens
  siRNA target sequence for NRF1 (NM_005011.2,686-704).
cccagcttcgggcatttat

SEQ ID NO: 33959 - DNA, 19 bp, Homo sapiens
  siRNA target sequence for NRF1 (NM_005011.2,858-876).
ggcactacggaccatagtt

SEQ ID NO: 33960 - DNA, 19 bp, Homo sapiens
  siRNA target sequence for NRF1 (NM_005011.2,859-877).
gcactacggaccatagtta

SEQ ID NO: 33961 - DNA, 19 bp, Homo sapiens
  siRNA target sequence for NRF1 (NM_005011.2,860-878).
cactacggaccatagttaa

SEQ ID NO: 33962 - DNA, 19 bp, Homo sapiens
  siRNA target sequence for NRF1 (NM_005011.2,862-880).
ctacggaccatagttaaaa

SEQ ID NO: 33963 - DNA, 19 bp, Homo sapiens
  siRNA target sequence for NRF1 (NM_005011.2,865-883).
cggaccatagttaaaaact

SEQ ID NO: 33964 - DNA, 19 bp, Homo sapiens
  siRNA target sequence for NRF1 (NM_005011.2,869-887).
ccatagttaaaaactgtta

SEQ ID NO: 33965 - DNA, 19 bp, Homo sapiens
  siRNA target sequence for NRF1 (NM_005011.2,950-968).
ccacagccacacatagtat

SEQ ID NO: 33966 - DNA, 19 bp, Homo sapiens
  siRNA target sequence for NRF1 (NM_005011.2,1103-1121).
ccgttgcccaagtgaatta

SEQ ID NO: 33967 - DNA, 19 bp, Homo sapiens
  siRNA target sequence for NRF1 (NM_005011.2,1104-1122).
cgttgcccaagtgaattat

SEQ ID NO: 33968 - DNA, 19 bp, Homo sapiens
  siRNA target sequence for NRF1 (NM_005011.2,1417-1435).
gatgctaatggcctcttta

SEQ ID NO: 33969 - DNA, 19 bp, Homo sapiens
  siRNA target sequence for NRF1 (NM_005011.2,1458-1476).
gtggatcctgactgacaaa

SEQ ID NO: 33970 - DNA, 19 bp, Homo sapiens
  siRNA target sequence for NRL (NM_006177.1,746-764).
gggagcgcgatctctacaa

SEQ ID NO: 33971 - DNA, 19 bp, Homo sapiens
  siRNA target sequence for NSD1 (NM_022455.3,59-77).
gtgaactacccagaagaaa

SEQ ID NO: 33972 - DNA, 19 bp, Homo sapiens
  siRNA target sequence for NSD1 (NM_022455.3,132-150).
cagccctttcggtaatggt

SEQ ID NO: 33973 - DNA, 19 bp, Homo sapiens
  siRNA target sequence for NSD1 (NM_022455.3,141-159).
cggtaatggtcaatccaat

SEQ ID NO: 33974 - DNA, 19 bp, Homo sapiens
  siRNA target sequence for NSD1 (NM_022455.3,142-160).
ggtaatggtcaatccaatt

SEQ ID NO: 33975 - DNA, 19 bp, Homo sapiens
  siRNA target sequence for NSD1 (NM_022455.3,143-161).
gtaatggtcaatccaattt

SEQ ID NO: 33976 - DNA, 19 bp, Homo sapiens
  siRNA target sequence for NSD1 (NM_022455.3,149-167).
gtcaatccaatttttctga

SEQ ID NO: 33977 - DNA, 19 bp, Homo sapiens
  siRNA target sequence for NSD1 (NM_022455.3,169-187).
ccacttaatgggtgtacta

SEQ ID NO: 33978 - DNA, 19 bp, Homo sapiens
  siRNA target sequence for NSD1 (NM_022455.3,281-299).
cctccatgatcaatgtaga

SEQ ID NO: 33979 - DNA, 19 bp, Homo sapiens
  siRNA target sequence for NSD1 (NM_022455.3,284-302).
ccatgatcaatgtagagta

SEQ ID NO: 33980 - DNA, 19 bp, Homo sapiens
  siRNA target sequence for NSD1 (NM_022455.3,285-303).
catgatcaatgtagagtat

SEQ ID NO: 33981 - DNA, 19 bp, Homo sapiens
  siRNA target sequence for NSD1 (NM_022455.3,362-380).
gagctcagacgccaattgt

SEQ ID NO: 33982 - DNA, 19 bp, Homo sapiens
  siRNA target sequence for NSD1 (NM_022455.3,364-382).
gctcagacgccaattgttt

SEQ ID NO: 33983 - DNA, 19 bp, Homo sapiens
  siRNA target sequence for NSD1 (NM_022455.3,404-422).
gtcctacagcacttgctat

SEQ ID NO: 33984 - DNA, 19 bp, Homo sapiens
  siRNA target sequence for NSD1 (NM_022455.3,407-425).
ctacagcacttgctatgaa

SEQ ID NO: 33985 - DNA, 19 bp, Homo sapiens
  siRNA target sequence for NSD1 (NM_022455.3,427-445).
caggaaccctcttgtaata

SEQ ID NO: 33986 - DNA, 19 bp, Homo sapiens
  siRNA target sequence for NSD1 (NM_022455.3,430-448).
gaaccctcttgtaataact

SEQ ID NO: 33987 - DNA, 19 bp, Homo sapiens
  siRNA target sequence for NSD1 (NM_022455.3,449-467).
cccctgaactccaggtaaa

SEQ ID NO: 33988 - DNA, 19 bp, Homo sapiens
  siRNA target sequence for NSD1 (NM_022455.3,452-470).
ctgaactccaggtaaaagt

SEQ ID NO: 33989 - DNA, 19 bp, Homo sapiens
  siRNA target sequence for NSD1 (NM_022455.3,469-487).
gtaacaaagactatcaaga

SEQ ID NO: 33990 - DNA, 19 bp, Homo sapiens
  siRNA target sequence for NSD1 (NM_022455.3,611-629).
ccaatgccacctgcaatta

SEQ ID NO: 33991 - DNA, 19 bp, Homo sapiens
  siRNA target sequence for NSD1 (NM_022455.3,621-639).
ctgcaattatgagactaaa

SEQ ID NO: 33992 - DNA, 19 bp, Homo sapiens
  siRNA target sequence for NSD1 (NM_022455.3,624-642).
caattatgagactaaatca

SEQ ID NO: 33993 - DNA, 19 bp, Homo sapiens
  siRNA target sequence for NSD1 (NM_022455.3,775-793).
gtggacggcagcaatgaaa

SEQ ID NO: 33994 - DNA, 19 bp, Homo sapiens
  siRNA target sequence for NSD1 (NM_022455.3,850-868).
gagcaattaaactcaataa

SEQ ID NO: 33995 - DNA, 19 bp, Homo sapiens
  siRNA target sequence for NSD1 (NM_022455.3,852-870).
gcaattaaactcaataaat

SEQ ID NO: 33996 - DNA, 19 bp, Homo sapiens
  siRNA target sequence for NSD1 (NM_022455.3,892-910).
gattccagtaccagtacat

SEQ ID NO: 33997 - DNA, 19 bp, Homo sapiens
  siRNA target sequence for NSD1 (NM_022455.3,897-915).
cagtaccagtacattagga

SEQ ID NO: 33998 - DNA, 19 bp, Homo sapiens
  siRNA target sequence for NSD1 (NM_022455.3,899-917).
gtaccagtacattaggaaa

SEQ ID NO: 33999 - DNA, 19 bp, Homo sapiens
  siRNA target sequence for NSD1 (NM_022455.3,902-920).
ccagtacattaggaaacat

SEQ ID NO: 34000 - DNA, 19 bp, Homo sapiens
  siRNA target sequence for NSD1 (NM_022455.3,990-1008).
gtctacgccactgaagtat

SEQ ID NO: 34001 - DNA, 19 bp, Homo sapiens
  siRNA target sequence for NSD1 (NM_022455.3,992-1010).
ctacgccactgaagtatga

SEQ ID NO: 34002 - DNA, 19 bp, Homo sapiens
  siRNA target sequence for NSD1 (NM_022455.3,1070-1088).
gttctgatccgttgattaa

SEQ ID NO: 34003 - DNA, 19 bp, Homo sapiens
  siRNA target sequence for NSD1 (NM_022455.3,1184-1202).
gaaaagcaatcgtcatgtt

SEQ ID NO: 34004 - DNA, 19 bp, Homo sapiens
  siRNA target sequence for NSD1 (NM_022455.3,1351-1369).
gggtcaaagaaccgaaaat

SEQ ID NO: 34005 - DNA, 19 bp, Homo sapiens
  siRNA target sequence for NSD1 (NM_022455.3,1516-1534).
gaaaagccttgcgctaaat

SEQ ID NO: 34006 - DNA, 19 bp, Homo sapiens
  siRNA target sequence for NSD1 (NM_022455.3,1578-1596).
gaaaaagggccacatacaa

SEQ ID NO: 34007 - DNA, 19 bp, Homo sapiens
  siRNA target sequence for NSD1 (NM_022455.3,1584-1602).
gggccacatacaatttgaa

SEQ ID NO: 34008 - DNA, 19 bp, Homo sapiens
  siRNA target sequence for NSD1 (NM_022455.3,1653-1671).
ctttatctctggggatata

SEQ ID NO: 34009 - DNA, 19 bp, Homo sapiens
  siRNA target sequence for NSD1 (NM_022455.3,1679-1697).
cgcaggcctctaatgaact

SEQ ID NO: 34010 - DNA, 19 bp, Homo sapiens
  siRNA target sequence for NSD1 (NM_022455.3,1680-1698).
gcaggcctctaatgaactt

SEQ ID NO: 34011 - DNA, 19 bp, Homo sapiens
  siRNA target sequence for NSD1 (NM_022455.3,1735-1753).
gccccaggaagttttctgt

SEQ ID NO: 34012 - DNA, 19 bp, Homo sapiens
  siRNA target sequence for NSD1 (NM_022455.3,1799-1817).
caaatggtgactctttatt

SEQ ID NO: 34013 - DNA, 19 bp, Homo sapiens
  siRNA target sequence for NSD1 (NM_022455.3,1848-1866).
gtgttctcgagagaagaat

SEQ ID NO: 34014 - DNA, 19 bp, Homo sapiens
  siRNA target sequence for NSD1 (NM_022455.3,1881-1899).
cctggtgtgtggttcaaaa

SEQ ID NO: 34015 - DNA, 19 bp, Homo sapiens
  siRNA target sequence for NSD1 (NM_022455.3,1902-1920).
gaagctctgctatattgga

SEQ ID NO: 34016 - DNA, 19 bp, Homo sapiens
  siRNA target sequence for NSD1 (NM_022455.3,1938-1956).
gcgaagtgattccattagt

SEQ ID NO: 34017 - DNA, 19 bp, Homo sapiens
  siRNA target sequence for NSD1 (NM_022455.3,1940-1958).
gaagtgattccattagtat

SEQ ID NO: 34018 - DNA, 19 bp, Homo sapiens
  siRNA target sequence for NSD1 (NM_022455.3,2005-2023).
cacagctcagagtctgata

SEQ ID NO: 34019 - DNA, 19 bp, Homo sapiens
  siRNA target sequence for NSD1 (NM_022455.3,2020-2038).
gataacagtgtccttgaaa

SEQ ID NO: 34020 - DNA, 19 bp, Homo sapiens
  siRNA target sequence for NSD1 (NM_022455.3,2025-2043).
cagtgtccttgaaattcca

SEQ ID NO: 34021 - DNA, 19 bp, Homo sapiens
  siRNA target sequence for NSD1 (NM_022455.3,2041-2059).
ccagatgctttcgatagaa

SEQ ID NO: 34022 - DNA, 19 bp, Homo sapiens
  siRNA target sequence for NSD1 (NM_022455.3,2060-2078).
cagagaacatgttatctat

SEQ ID NO: 34023 - DNA, 19 bp, Homo sapiens
  siRNA target sequence for NSD1 (NM_022455.3,2148-2166).
gcctctcattagtaactca

SEQ ID NO: 34024 - DNA, 19 bp, Homo sapiens
  siRNA target sequence for NSD1 (NM_022455.3,2175-2193).
ccacttaatgggttgtact

SEQ ID NO: 34025 - DNA, 19 bp, Homo sapiens
  siRNA target sequence for NSD1 (NM_022455.3,2176-2194).
cacttaatgggttgtacta

SEQ ID NO: 34026 - DNA, 19 bp, Homo sapiens
  siRNA target sequence for NSD1 (NM_022455.3,2213-2231).
ccgagacgtctcaggttaa

SEQ ID NO: 34027 - DNA, 19 bp, Homo sapiens
  siRNA target sequence for NSD1 (NM_022455.3,2214-2232).
cgagacgtctcaggttaat

SEQ ID NO: 34028 - DNA, 19 bp, Homo sapiens
  siRNA target sequence for NSD1 (NM_022455.3,2244-2262).
gaaggcatctactcttgtt

SEQ ID NO: 34029 - DNA, 19 bp, Homo sapiens
  siRNA target sequence for NSD1 (NM_022455.3,2263-2281).
cacaaaccccagtcagatt

SEQ ID NO: 34030 - DNA, 19 bp, Homo sapiens
  siRNA target sequence for NSD1 (NM_022455.3,2293-2311).
gctctctctccaaaattca

SEQ ID NO: 34031 - DNA, 19 bp, Homo sapiens
  siRNA target sequence for NSD1 (NM_022455.3,2330-2348).
ccagtgagaactcgttaat

SEQ ID NO: 34032 - DNA, 19 bp, Homo sapiens
  siRNA target sequence for NSD1 (NM_022455.3,2331-2349).
cagtgagaactcgttaata

SEQ ID NO: 34033 - DNA, 19 bp, Homo sapiens
  siRNA target sequence for NSD1 (NM_022455.3,2333-2351).
gtgagaactcgttaataaa

SEQ ID NO: 34034 - DNA, 19 bp, Homo sapiens
  siRNA target sequence for NSD1 (NM_022455.3,2360-2378).
cagcaaatcaagctctatt

SEQ ID NO: 34035 - DNA, 19 bp, Homo sapiens
  siRNA target sequence for NSD1 (NM_022455.3,2371-2389).
gctctattacattcgaaaa

SEQ ID NO: 34036 - DNA, 19 bp, Homo sapiens
  siRNA target sequence for NSD1 (NM_022455.3,2398-2416).
cccaagttccgaagtataa

SEQ ID NO: 34037 - DNA, 19 bp, Homo sapiens
  siRNA target sequence for NSD1 (NM_022455.3,2399-2417).
ccaagttccgaagtataaa

SEQ ID NO: 34038 - DNA, 19 bp, Homo sapiens
  siRNA target sequence for NSD1 (NM_022455.3,2513-2531).
ctttggccagcatttctaa

SEQ ID NO: 34039 - DNA, 19 bp, Homo sapiens
  siRNA target sequence for NSD1 (NM_022455.3,2517-2535).
ggccagcatttctaaaagt

SEQ ID NO: 34040 - DNA, 19 bp, Homo sapiens
  siRNA target sequence for NSD1 (NM_022455.3,2538-2556).
gaaagtggatggtctaaaa

SEQ ID NO: 34041 - DNA, 19 bp, Homo sapiens
  siRNA target sequence for NSD1 (NM_022455.3,2575-2593).
gagaaaaccagggattcaa

SEQ ID NO: 34042 - DNA, 19 bp, Homo sapiens
  siRNA target sequence for NSD1 (NM_022455.3,2577-2595).
gaaaaccagggattcaagt

SEQ ID NO: 34043 - DNA, 19 bp, Homo sapiens
  siRNA target sequence for NSD1 (NM_022455.3,2583-2601).
cagggattcaagtgacata

SEQ ID NO: 34044 - DNA, 19 bp, Homo sapiens
  siRNA target sequence for NSD1 (NM_022455.3,2585-2603).
gggattcaagtgacataga

SEQ ID NO: 34045 - DNA, 19 bp, Homo sapiens
  siRNA target sequence for NSD1 (NM_022455.3,2586-2604).
ggattcaagtgacatagaa

SEQ ID NO: 34046 - DNA, 19 bp, Homo sapiens
  siRNA target sequence for NSD1 (NM_022455.3,2611-2629).
gtggtgaaacatgttttat

SEQ ID NO: 34047 - DNA, 19 bp, Homo sapiens
  siRNA target sequence for NSD1 (NM_022455.3,2637-2655).
gaaggaactctcttacaga

SEQ ID NO: 34048 - DNA, 19 bp, Homo sapiens
  siRNA target sequence for NSD1 (NM_022455.3,2695-2713).
ccatcaaaaccattacttt

SEQ ID NO: 34049 - DNA, 19 bp, Homo sapiens
  siRNA target sequence for NSD1 (NM_022455.3,2696-2714).
catcaaaaccattactttt

SEQ ID NO: 34050 - DNA, 19 bp, Homo sapiens
  siRNA target sequence for NSD1 (NM_022455.3,2720-2738).
ctgcttctagtcagaatca

SEQ ID NO: 34051 - DNA, 19 bp, Homo sapiens
  siRNA target sequence for NSD1 (NM_022455.3,2729-2747).
gtcagaatcacatacctat

SEQ ID NO: 34052 - DNA, 19 bp, Homo sapiens
  siRNA target sequence for NSD1 (NM_022455.3,2733-2751).
gaatcacatacctattgaa

SEQ ID NO: 34053 - DNA, 19 bp, Homo sapiens
  siRNA target sequence for NSD1 (NM_022455.3,2755-2773).
gactacaaattcagtacat

SEQ ID NO: 34054 - DNA, 19 bp, Homo sapiens
  siRNA target sequence for NSD1 (NM_022455.3,2768-2786).
gtacattgctaatgatgtt

SEQ ID NO: 34055 - DNA, 19 bp, Homo sapiens
  siRNA target sequence for NSD1 (NM_022455.3,2775-2793).
gctaatgatgttgaaagat

SEQ ID NO: 34056 - DNA, 19 bp, Homo sapiens
  siRNA target sequence for NSD1 (NM_022455.3,2791-2809).
gatatgcatgatagtaaga

SEQ ID NO: 34057 - DNA, 19 bp, Homo sapiens
  siRNA target sequence for NSD1 (NM_022455.3,2866-2884).
cgtggggactgttctacta

SEQ ID NO: 34058 - DNA, 19 bp, Homo sapiens
  siRNA target sequence for NSD1 (NM_022455.3,2869-2887).
ggggactgttctactaata

SEQ ID NO: 34059 - DNA, 19 bp, Homo sapiens
  siRNA target sequence for NSD1 (NM_022455.3,2888-2906).
gtcctgtaggagtctctaa

SEQ ID NO: 34060 - DNA, 19 bp, Homo sapiens
  siRNA target sequence for NSD1 (NM_022455.3,2897-2915).
gagtctctaaggttttggt

SEQ ID NO: 34061 - DNA, 19 bp, Homo sapiens
  siRNA target sequence for NSD1 (NM_022455.3,2962-2980).
cagaactccgccaatccta

SEQ ID NO: 34062 - DNA, 19 bp, Homo sapiens
  siRNA target sequence for NSD1 (NM_022455.3,2989-3007).
gggggtgactctgcattat

SEQ ID NO: 34063 - DNA, 19 bp, Homo sapiens
  siRNA target sequence for NSD1 (NM_022455.3,2991-3009).
gggtgactctgcattatct

SEQ ID NO: 34064 - DNA, 19 bp, Homo sapiens
  siRNA target sequence for NSD1 (NM_022455.3,3060-3078).
ccctgcttctggtaaaagt

SEQ ID NO: 34065 - DNA, 19 bp, Homo sapiens
  siRNA target sequence for NSD1 (NM_022455.3,3079-3097).
cgttcagactgtgttacta

SEQ ID NO: 34066 - DNA, 19 bp, Homo sapiens
  siRNA target sequence for NSD1 (NM_022455.3,3143-3161).
ctttttcagcccaaatggt

SEQ ID NO: 34067 - DNA, 19 bp, Homo sapiens
  siRNA target sequence for NSD1 (NM_022455.3,3192-3210).
gaccgagcgcaaaagaaaa

SEQ ID NO: 34068 - DNA, 19 bp, Homo sapiens
  siRNA target sequence for NSD1 (NM_022455.3,3194-3212).
ccgagcgcaaaagaaaact

SEQ ID NO: 34069 - DNA, 19 bp, Homo sapiens
  siRNA target sequence for NSD1 (NM_022455.3,3260-3278).
gagaacgtggaggttcatt

SEQ ID NO: 34070 - DNA, 19 bp, Homo sapiens
  siRNA target sequence for NSD1 (NM_022455.3,3262-3280).
gaacgtggaggttcattga

SEQ ID NO: 34071 - DNA, 19 bp, Homo sapiens
  siRNA target sequence for NSD1 (NM_022455.3,3288-3306).
ggcagaagatcctagtaaa

SEQ ID NO: 34072 - DNA, 19 bp, Homo sapiens
  siRNA target sequence for NSD1 (NM_022455.3,3290-3308).
cagaagatcctagtaaaga

SEQ ID NO: 34073 - DNA, 19 bp, Homo sapiens
  siRNA target sequence for NSD1 (NM_022455.3,3319-3337).
cagataatgggccacttaa

SEQ ID NO: 34074 - DNA, 19 bp, Homo sapiens
  siRNA target sequence for NSD1 (NM_022455.3,3321-3339).
gataatgggccacttaaca

SEQ ID NO: 34075 - DNA, 19 bp, Homo sapiens
  siRNA target sequence for NSD1 (NM_022455.3,3370-3388).
catttcgatagcaaggtta

SEQ ID NO: 34076 - DNA, 19 bp, Homo sapiens
  siRNA target sequence for NSD1 (NM_022455.3,3375-3393).
cgatagcaaggttaagcaa

SEQ ID NO: 34077 - DNA, 19 bp, Homo sapiens
  siRNA target sequence for NSD1 (NM_022455.3,3376-3394).
gatagcaaggttaagcaat

SEQ ID NO: 34078 - DNA, 19 bp, Homo sapiens
  siRNA target sequence for NSD1 (NM_022455.3,3380-3398).
gcaaggttaagcaatctga

SEQ ID NO: 34079 - DNA, 19 bp, Homo sapiens
  siRNA target sequence for NSD1 (NM_022455.3,3381-3399).
caaggttaagcaatctgat

SEQ ID NO: 34080 - DNA, 19 bp, Homo sapiens
  siRNA target sequence for NSD1 (NM_022455.3,3449-3467).
cagagctggactctgtaat

SEQ ID NO: 34081 - DNA, 19 bp, Homo sapiens
  siRNA target sequence for NSD1 (NM_022455.3,3521-3539).
ggtggcagcgtttaaacca

SEQ ID NO: 34082 - DNA, 19 bp, Homo sapiens
  siRNA target sequence for NSD1 (NM_022455.3,3537-3555).
ccaaaggcgcactaaacct

SEQ ID NO: 34083 - DNA, 19 bp, Homo sapiens
  siRNA target sequence for NSD1 (NM_022455.3,3553-3571).
cctcgtaagcgcatgaaca

SEQ ID NO: 34084 - DNA, 19 bp, Homo sapiens
  siRNA target sequence for NSD1 (NM_022455.3,3556-3574).
cgtaagcgcatgaacagat

SEQ ID NO: 34085 - DNA, 19 bp, Homo sapiens
  siRNA target sequence for NSD1 (NM_022455.3,3557-3575).
gtaagcgcatgaacagatt

SEQ ID NO: 34086 - DNA, 19 bp, Homo sapiens
  siRNA target sequence for NSD1 (NM_022455.3,3731-3749).
cagctgggccacggttaaa

SEQ ID NO: 34087 - DNA, 19 bp, Homo sapiens
  siRNA target sequence for NSD1 (NM_022455.3,3734-3752).
ctgggccacggttaaatgt

SEQ ID NO: 34088 - DNA, 19 bp, Homo sapiens
  siRNA target sequence for NSD1 (NM_022455.3,3736-3754).
gggccacggttaaatgttt

SEQ ID NO: 34089 - DNA, 19 bp, Homo sapiens
  siRNA target sequence for NSD1 (NM_022455.3,3738-3756).
gccacggttaaatgtttgt

SEQ ID NO: 34090 - DNA, 19 bp, Homo sapiens
  siRNA target sequence for NSD1 (NM_022455.3,3740-3758).
cacggttaaatgtttgtga

SEQ ID NO: 34091 - DNA, 19 bp, Homo sapiens
  siRNA target sequence for NSD1 (NM_022455.3,3955-3973).
caggtgcacaaggtaagtt

SEQ ID NO: 34092 - DNA, 19 bp, Homo sapiens
  siRNA target sequence for NSD1 (NM_022455.3,4033-4051).
gtggacgagaattctttga

SEQ ID NO: 34093 - DNA, 19 bp, Homo sapiens
  siRNA target sequence for NSD1 (NM_022455.3,4035-4053).
ggacgagaattctttgatt

SEQ ID NO: 34094 - DNA, 19 bp, Homo sapiens
  siRNA target sequence for NSD1 (NM_022455.3,4036-4054).
gacgagaattctttgattt

SEQ ID NO: 34095 - DNA, 19 bp, Homo sapiens
  siRNA target sequence for NSD1 (NM_022455.3,4085-4103).
gggaggctccgtttttgga

SEQ ID NO: 34096 - DNA, 19 bp, Homo sapiens
  siRNA target sequence for NSD1 (NM_022455.3,4211-4229).
ctgaggaattgctagttaa

SEQ ID NO: 34097 - DNA, 19 bp, Homo sapiens
  siRNA target sequence for NSD1 (NM_022455.3,4225-4243).
gttaaaacgccaggaaatt

SEQ ID NO: 34098 - DNA, 19 bp, Homo sapiens
  siRNA target sequence for NSD1 (NM_022455.3,4246-4264).
gaaagtaaacgtcaaagaa

SEQ ID NO: 34099 - DNA, 19 bp, Homo sapiens
  siRNA target sequence for NSD1 (NM_022455.3,4275-4293).
gaaacttcttgaatccaat

SEQ ID NO: 34100 - DNA, 19 bp, Homo sapiens
  siRNA target sequence for NSD1 (NM_022455.3,4365-4383).
cctggagaatggcataact

SEQ ID NO: 34101 - DNA, 19 bp, Homo sapiens
  siRNA target sequence for NSD1 (NM_022455.3,4391-4409).
gtgccacatcttattcaaa

SEQ ID NO: 34102 - DNA, 19 bp, Homo sapiens
  siRNA target sequence for NSD1 (NM_022455.3,4420-4438).
ggaggcactaccaagatat

SEQ ID NO: 34103 - DNA, 19 bp, Homo sapiens
  siRNA target sequence for NSD1 (NM_022455.3,4421-4439).
gaggcactaccaagatatt

SEQ ID NO: 34104 - DNA, 19 bp, Homo sapiens
  siRNA target sequence for NSD1 (NM_022455.3,4488-4506).
gcagtgtaaaaaagtgaaa

SEQ ID NO: 34105 - DNA, 19 bp, Homo sapiens
  siRNA target sequence for NSD1 (NM_022455.3,4510-4528).
gatgactcgtcaaaagaga

SEQ ID NO: 34106 - DNA, 19 bp, Homo sapiens
  siRNA target sequence for NSD1 (NM_022455.3,4614-4632).
cgggatgcctgcctctaaa

SEQ ID NO: 34107 - DNA, 19 bp, Homo sapiens
  siRNA target sequence for NSD1 (NM_022455.3,4749-4767).
ggagtgccttggattgact

SEQ ID NO: 34108 - DNA, 19 bp, Homo sapiens
  siRNA target sequence for NSD1 (NM_022455.3,4811-4829).
gaatccatacctgttttgt

SEQ ID NO: 34109 - DNA, 19 bp, Homo sapiens
  siRNA target sequence for NSD1 (NM_022455.3,4843-4861).
ggggaagatgttaaaaggt

SEQ ID NO: 34110 - DNA, 19 bp, Homo sapiens
  siRNA target sequence for NSD1 (NM_022455.3,4919-4937).
ccactgttatgcagaacaa

SEQ ID NO: 34111 - DNA, 19 bp, Homo sapiens
  siRNA target sequence for NSD1 (NM_022455.3,4954-4972).
ctccacatctgtataacct

SEQ ID NO: 34112 - DNA, 19 bp, Homo sapiens
  siRNA target sequence for NSD1 (NM_022455.3,4981-4999).
gctaatccagccaatgttt

SEQ ID NO: 34113 - DNA, 19 bp, Homo sapiens
  siRNA target sequence for NSD1 (NM_022455.3,5045-5063).
cataccacgccaatgactt

SEQ ID NO: 34114 - DNA, 19 bp, Homo sapiens
  siRNA target sequence for NSD1 (NM_022455.3,5089-5107).
cttgcatctaatagtatca

SEQ ID NO: 34115 - DNA, 19 bp, Homo sapiens
  siRNA target sequence for NSD1 (NM_022455.3,5102-5120).
gtatcatctgccctaatca

SEQ ID NO: 34116 - DNA, 19 bp, Homo sapiens
  siRNA target sequence for NSD1 (NM_022455.3,5143-5161).
cgaaatcatgagcatgtta

SEQ ID NO: 34117 - DNA, 19 bp, Homo sapiens
  siRNA target sequence for NSD1 (NM_022455.3,5237-5255).
gtgaatgcctgaacattga

SEQ ID NO: 34118 - DNA, 19 bp, Homo sapiens
  siRNA target sequence for NSD1 (NM_022455.3,5263-5281).
gaaggaaactggtattgca

SEQ ID NO: 34119 - DNA, 19 bp, Homo sapiens
  siRNA target sequence for NSD1 (NM_022455.3,5306-5324).
cacactacagggagattgt

SEQ ID NO: 34120 - DNA, 19 bp, Homo sapiens
  siRNA target sequence for NSD1 (NM_022455.3,5308-5326).
cactacagggagattgtct

SEQ ID NO: 34121 - DNA, 19 bp, Homo sapiens
  siRNA target sequence for NSD1 (NM_022455.3,5316-5334).
ggagattgtctgggtaaaa

SEQ ID NO: 34122 - DNA, 19 bp, Homo sapiens
  siRNA target sequence for NSD1 (NM_022455.3,5381-5399).
ctgttccttccaacattga

SEQ ID NO: 34123 - DNA, 19 bp, Homo sapiens
  siRNA target sequence for NSD1 (NM_022455.3,5433-5451).
cctcttttttggatctaat

SEQ ID NO: 34124 - DNA, 19 bp, Homo sapiens
  siRNA target sequence for NSD1 (NM_022455.3,5443-5461).
ggatctaatgactatttgt

SEQ ID NO: 34125 - DNA, 19 bp, Homo sapiens
  siRNA target sequence for NSD1 (NM_022455.3,5474-5492).
cccgagtcttcccttacat

SEQ ID NO: 34126 - DNA, 19 bp, Homo sapiens
  siRNA target sequence for NSD1 (NM_022455.3,5637-5655).
caagaagccaccaccttat

SEQ ID NO: 34127 - DNA, 19 bp, Homo sapiens
  siRNA target sequence for NSD1 (NM_022455.3,5640-5658).
gaagccaccaccttataaa

SEQ ID NO: 34128 - DNA, 19 bp, Homo sapiens
  siRNA target sequence for NSD1 (NM_022455.3,5643-5661).
gccaccaccttataaacat

SEQ ID NO: 34129 - DNA, 19 bp, Homo sapiens
  siRNA target sequence for NSD1 (NM_022455.3,5644-5662).
ccaccaccttataaacata

SEQ ID NO: 34130 - DNA, 19 bp, Homo sapiens
  siRNA target sequence for NSD1 (NM_022455.3,5647-5665).
ccaccttataaacatataa

SEQ ID NO: 34131 - DNA, 19 bp, Homo sapiens
  siRNA target sequence for NSD1 (NM_022455.3,5678-5696).
ctattggcagggtacagat

SEQ ID NO: 34132 - DNA, 19 bp, Homo sapiens
  siRNA target sequence for NSD1 (NM_022455.3,5683-5701).
ggcagggtacagatcttca

SEQ ID NO: 34133 - DNA, 19 bp, Homo sapiens
  siRNA target sequence for NSD1 (NM_022455.3,5697-5715).
cttcactgcagacttatct

SEQ ID NO: 34134 - DNA, 19 bp, Homo sapiens
  siRNA target sequence for NSD1 (NM_022455.3,5700-5718).
cactgcagacttatctgaa

SEQ ID NO: 34135 - DNA, 19 bp, Homo sapiens
  siRNA target sequence for NSD1 (NM_022455.3,5702-5720).
ctgcagacttatctgaaat

SEQ ID NO: 34136 - DNA, 19 bp, Homo sapiens
  siRNA target sequence for NSD1 (NM_022455.3,5785-5803).
cgcatgctgctctatgagt

SEQ ID NO: 34137 - DNA, 19 bp, Homo sapiens
  siRNA target sequence for NSD1 (NM_022455.3,5824-5842).
gccggagggcgctgtcaaa

SEQ ID NO: 34138 - DNA, 19 bp, Homo sapiens
  siRNA target sequence for NSD1 (NM_022455.3,5825-5843).
ccggagggcgctgtcaaaa

SEQ ID NO: 34139 - DNA, 19 bp, Homo sapiens
  siRNA target sequence for NSD1 (NM_022455.3,5828-5846).
gagggcgctgtcaaaacca

SEQ ID NO: 34140 - DNA, 19 bp, Homo sapiens
  siRNA target sequence for NSD1 (NM_022455.3,5850-5868).
cttttccaagcgccaatat

SEQ ID NO: 34141 - DNA, 19 bp, Homo sapiens
  siRNA target sequence for NSD1 (NM_022455.3,5907-5925).
gggtctacggacaaaaaca

SEQ ID NO: 34142 - DNA, 19 bp, Homo sapiens
  siRNA target sequence for NSD1 (NM_022455.3,5909-5927).
gtctacggacaaaaacaga

SEQ ID NO: 34143 - DNA, 19 bp, Homo sapiens
  siRNA target sequence for NSD1 (NM_022455.3,5911-5929).
ctacggacaaaaacagata

SEQ ID NO: 34144 - DNA, 19 bp, Homo sapiens
  siRNA target sequence for NSD1 (NM_022455.3,6007-6025).
gctcaagaacatgatatca

SEQ ID NO: 34145 - DNA, 19 bp, Homo sapiens
  siRNA target sequence for NSD1 (NM_022455.3,6013-6031).
gaacatgatatcactaatt

SEQ ID NO: 34146 - DNA, 19 bp, Homo sapiens
  siRNA target sequence for NSD1 (NM_022455.3,6051-6069).
caaagaccgaatcattgat

SEQ ID NO: 34147 - DNA, 19 bp, Homo sapiens
  siRNA target sequence for NSD1 (NM_022455.3,6091-6109).
gctcggttcatgaatcatt

SEQ ID NO: 34148 - DNA, 19 bp, Homo sapiens
  siRNA target sequence for NSD1 (NM_022455.3,6194-6212).
caggcactgaacttacctt

SEQ ID NO: 34149 - DNA, 19 bp, Homo sapiens
  siRNA target sequence for NSD1 (NM_022455.3,6200-6218).
ctgaacttaccttcaacta

SEQ ID NO: 34150 - DNA, 19 bp, Homo sapiens
  siRNA target sequence for NSD1 (NM_022455.3,6213-6231).
caactacaacctagaatgt

SEQ ID NO: 34151 - DNA, 19 bp, Homo sapiens
  siRNA target sequence for NSD1 (NM_022455.3,6216-6234).
ctacaacctagaatgtctt

SEQ ID NO: 34152 - DNA, 19 bp, Homo sapiens
  siRNA target sequence for NSD1 (NM_022455.3,6288-6306).
gggtgtaaggccaaagaat

SEQ ID NO: 34153 - DNA, 19 bp, Homo sapiens
  siRNA target sequence for NSD1 (NM_022455.3,6394-6412).
cgagaagatgagtgtttta

SEQ ID NO: 34154 - DNA, 19 bp, Homo sapiens
  siRNA target sequence for NSD1 (NM_022455.3,6397-6415).
gaagatgagtgttttagtt

SEQ ID NO: 34155 - DNA, 19 bp, Homo sapiens
  siRNA target sequence for NSD1 (NM_022455.3,6455-6473).
gctgcccaaaagtttacca

SEQ ID NO: 34156 - DNA, 19 bp, Homo sapiens
  siRNA target sequence for NSD1 (NM_022455.3,6475-6493).
gcagactgtctcaatctga

SEQ ID NO: 34157 - DNA, 19 bp, Homo sapiens
  siRNA target sequence for NSD1 (NM_022455.3,6604-6622).
cgagaagggatgcttttca

SEQ ID NO: 34158 - DNA, 19 bp, Homo sapiens
  siRNA target sequence for NSD1 (NM_022455.3,6692-6710).
gggagatccgtgagtatgt

SEQ ID NO: 34159 - DNA, 19 bp, Homo sapiens
  siRNA target sequence for NSD1 (NM_022455.3,6750-6768).
cctggcagagcaatcaaca

SEQ ID NO: 34160 - DNA, 19 bp, Homo sapiens
  siRNA target sequence for NSD1 (NM_022455.3,6776-6794).
ctgctcaggcacccaaaat

SEQ ID NO: 34161 - DNA, 19 bp, Homo sapiens
  siRNA target sequence for NSD1 (NM_022455.3,6908-6926).
ccaggccccagcctttaga

SEQ ID NO: 34162 - DNA, 19 bp, Homo sapiens
  siRNA target sequence for NSD1 (NM_022455.3,6909-6927).
caggccccagcctttagat

SEQ ID NO: 34163 - DNA, 19 bp, Homo sapiens
  siRNA target sequence for NSD1 (NM_022455.3,6911-6929).
ggccccagcctttagataa

SEQ ID NO: 34164 - DNA, 19 bp, Homo sapiens
  siRNA target sequence for NSD1 (NM_022455.3,6914-6932).
cccagcctttagataaggt

SEQ ID NO: 34165 - DNA, 19 bp, Homo sapiens
  siRNA target sequence for NSD1 (NM_022455.3,7117-7135).
gacccaaggctggataaat

SEQ ID NO: 34166 - DNA, 19 bp, Homo sapiens
  siRNA target sequence for NSD1 (NM_022455.3,7210-7228).
ccagacagactgctcatta

SEQ ID NO: 34167 - DNA, 19 bp, Homo sapiens
  siRNA target sequence for NSD1 (NM_022455.3,7335-7353).
gacccttgtagctaaagaa

SEQ ID NO: 34168 - DNA, 19 bp, Homo sapiens
  siRNA target sequence for NSD1 (NM_022455.3,7367-7385).
ctgtggaccagaatactca

SEQ ID NO: 34169 - DNA, 19 bp, Homo sapiens
  siRNA target sequence for NSD1 (NM_022455.3,7498-7516).
gtgttggagtcaagttcat

SEQ ID NO: 34170 - DNA, 19 bp, Homo sapiens
  siRNA target sequence for NSD1 (NM_022455.3,7621-7639).
ccctggcaagctgttaaat

SEQ ID NO: 34171 - DNA, 19 bp, Homo sapiens
  siRNA target sequence for NSD1 (NM_022455.3,7644-7662).
cacccaggccagacttctt

SEQ ID NO: 34172 - DNA, 19 bp, Homo sapiens
  siRNA target sequence for NSD1 (NM_022455.3,7673-7691).
ctgccaaggcctttttata

SEQ ID NO: 34173 - DNA, 19 bp, Homo sapiens
  siRNA target sequence for NSD1 (NM_022455.3,7825-7843).
gccaagagtgggcaatctt

SEQ ID NO: 34174 - DNA, 19 bp, Homo sapiens
  siRNA target sequence for NSD1 (NM_022455.3,7826-7844).
ccaagagtgggcaatcttt

SEQ ID NO: 34175 - DNA, 19 bp, Homo sapiens
  siRNA target sequence for NTHL1 (NM_002528.4,531-549).
cgctgggcaagctcatcta

SEQ ID NO: 34176 - DNA, 19 bp, Homo sapiens
  siRNA target sequence for NTHL1 (NM_002528.4,567-585).
ggagcaaggtgaaatacat

SEQ ID NO: 34177 - DNA, 19 bp, Homo sapiens
  siRNA target sequence for NTHL1 (NM_002528.4,570-588).
gcaaggtgaaatacatcaa

SEQ ID NO: 34178 - DNA, 19 bp, Homo sapiens
  siRNA target sequence for NTHL1 (NM_002528.4,838-856).
gctgtggcacgagatcaat

SEQ ID NO: 34179 - DNA, 19 bp, Homo sapiens
  siRNA target sequence for NUCB1 (NM_006184.3,380-398).
cgagcaggatcccaatgta

SEQ ID NO: 34180 - DNA, 19 bp, Homo sapiens
  siRNA target sequence for NUCB1 (NM_006184.3,444-462).
cctcagaaccagcatacat

SEQ ID NO: 34181 - DNA, 19 bp, Homo sapiens
  siRNA target sequence for NUCB1 (NM_006184.3,445-463).
ctcagaaccagcatacatt

SEQ ID NO: 34182 - DNA, 19 bp, Homo sapiens
  siRNA target sequence for NUCB1 (NM_006184.3,521-539).
cgacgcagcccatcatgaa

SEQ ID NO: 34183 - DNA, 19 bp, Homo sapiens
  siRNA target sequence for NUCB1 (NM_006184.3,526-544).
cagcccatcatgaagagtt

SEQ ID NO: 34184 - DNA, 19 bp, Homo sapiens
  siRNA target sequence for NUCB1 (NM_006184.3,657-675).
cgcgagcaccctaaagtca

SEQ ID NO: 34185 - DNA, 19 bp, Homo sapiens
  siRNA target sequence for NUCB1 (NM_006184.3,658-676).
gcgagcaccctaaagtcaa

SEQ ID NO: 34186 - DNA, 19 bp, Homo sapiens
  siRNA target sequence for NUCB1 (NM_006184.3,901-919).
gcatgcgggagcatgtgat

SEQ ID NO: 34187 - DNA, 19 bp, Homo sapiens
  siRNA target sequence for NUCB2 (NM_005013.1,231-249).
gaccatcctgctacagtat

SEQ ID NO: 34188 - DNA, 19 bp, Homo sapiens
  siRNA target sequence for NUCB2 (NM_005013.1,286-304).
gaagctgtgcctattgaca

SEQ ID NO: 34189 - DNA, 19 bp, Homo sapiens
  siRNA target sequence for NUCB2 (NM_005013.1,290-308).
ctgtgcctattgacataga

SEQ ID NO: 34190 - DNA, 19 bp, Homo sapiens
  siRNA target sequence for NUCB2 (NM_005013.1,292-310).
gtgcctattgacatagaca

SEQ ID NO: 34191 - DNA, 19 bp, Homo sapiens
  siRNA target sequence for NUCB2 (NM_005013.1,339-357).
ggaaagtgcgaagatagaa

SEQ ID NO: 34192 - DNA, 19 bp, Homo sapiens
  siRNA target sequence for NUCB2 (NM_005013.1,361-379).
ccagatactggactttatt

SEQ ID NO: 34193 - DNA, 19 bp, Homo sapiens
  siRNA target sequence for NUCB2 (NM_005013.1,485-503).
gcaaagaactggatttagt

SEQ ID NO: 34194 - DNA, 19 bp, Homo sapiens
  siRNA target sequence for NUCB2 (NM_005013.1,518-536).
ggacaaaacttgatgaact

SEQ ID NO: 34195 - DNA, 19 bp, Homo sapiens
  siRNA target sequence for NUCB2 (NM_005013.1,544-562).
caagaagtaggaaggttaa

SEQ ID NO: 34196 - DNA, 19 bp, Homo sapiens
  siRNA target sequence for NUCB2 (NM_005013.1,582-600).
gttggattcccttcaagat

SEQ ID NO: 34197 - DNA, 19 bp, Homo sapiens
  siRNA target sequence for NUCB2 (NM_005013.1,585-603).
ggattcccttcaagatata

SEQ ID NO: 34198 - DNA, 19 bp, Homo sapiens
  siRNA target sequence for NUCB2 (NM_005013.1,651-669).
cctgaatcctgacaagttt

SEQ ID NO: 34199 - DNA, 19 bp, Homo sapiens
  siRNA target sequence for NUCB2 (NM_005013.1,675-693).
cacagatttagatatgcta

SEQ ID NO: 34200 - DNA, 19 bp, Homo sapiens
  siRNA target sequence for NUCB2 (NM_005013.1,679-697).
gatttagatatgctaatca

SEQ ID NO: 34201 - DNA, 19 bp, Homo sapiens
  siRNA target sequence for NUCB2 (NM_005013.1,696-714).
caaagcggcaacaagtgat

SEQ ID NO: 34202 - DNA, 19 bp, Homo sapiens
  siRNA target sequence for NUCB2 (NM_005013.1,707-725).
caagtgatctggaacacta

SEQ ID NO: 34203 - DNA, 19 bp, Homo sapiens
  siRNA target sequence for NUCB2 (NM_005013.1,710-728).
gtgatctggaacactatga

SEQ ID NO: 34204 - DNA, 19 bp, Homo sapiens
  siRNA target sequence for NUCB2 (NM_005013.1,729-747).
caagactcgtcatgaagaa

SEQ ID NO: 34205 - DNA, 19 bp, Homo sapiens
  siRNA target sequence for NUCB2 (NM_005013.1,732-750).
gactcgtcatgaagaattt

SEQ ID NO: 34206 - DNA, 19 bp, Homo sapiens
  siRNA target sequence for NUCB2 (NM_005013.1,734-752).
ctcgtcatgaagaatttaa

SEQ ID NO: 34207 - DNA, 19 bp, Homo sapiens
  siRNA target sequence for NUCB2 (NM_005013.1,889-907).
ggaagcaaagatcaactaa

SEQ ID NO: 34208 - DNA, 19 bp, Homo sapiens
  siRNA target sequence for NUCB2 (NM_005013.1,932-950).
gattggatcctaatgactt

SEQ ID NO: 34209 - DNA, 19 bp, Homo sapiens
  siRNA target sequence for NUCB2 (NM_005013.1,1021-1039).
gccctatttactaaagagt

SEQ ID NO: 34210 - DNA, 19 bp, Homo sapiens
  siRNA target sequence for NUCB2 (NM_005013.1,1022-1040).
ccctatttactaaagagtt

SEQ ID NO: 34211 - DNA, 19 bp, Homo sapiens
  siRNA target sequence for NUCB2 (NM_005013.1,1208-1226).
cagatagctgggagacatt

SEQ ID NO: 34212 - DNA, 19 bp, Homo sapiens
  siRNA target sequence for NUCB2 (NM_005013.1,1447-1465).
ccagctggagaattgaagt

SEQ ID NO: 34213 - DNA, 19 bp, Homo sapiens
  siRNA target sequence for NUP153 (NM_005124.2,262-280).
gccaccaggggccaattaa

SEQ ID NO: 34214 - DNA, 19 bp, Homo sapiens
  siRNA target sequence for NUP153 (NM_005124.2,303-321).
cagcatcagggcattctta

SEQ ID NO: 34215 - DNA, 19 bp, Homo sapiens
  siRNA target sequence for NUP153 (NM_005124.2,325-343).
gggttacagaatctgttaa

SEQ ID NO: 34216 - DNA, 19 bp, Homo sapiens
  siRNA target sequence for NUP153 (NM_005124.2,355-373).
cagggtggctacaaagata

SEQ ID NO: 34217 - DNA, 19 bp, Homo sapiens
  siRNA target sequence for NUP153 (NM_005124.2,357-375).
gggtggctacaaagatact

SEQ ID NO: 34218 - DNA, 19 bp, Homo sapiens
  siRNA target sequence for NUP153 (NM_005124.2,358-376).
ggtggctacaaagatactt

SEQ ID NO: 34219 - DNA, 19 bp, Homo sapiens
  siRNA target sequence for NUP153 (NM_005124.2,426-444).
ccacgctggccagaaaata

SEQ ID NO: 34220 - DNA, 19 bp, Homo sapiens
  siRNA target sequence for NUP153 (NM_005124.2,467-485).
cgatgaggagagctctaat

SEQ ID NO: 34221 - DNA, 19 bp, Homo sapiens
  siRNA target sequence for NUP153 (NM_005124.2,468-486).
gatgaggagagctctaata

SEQ ID NO: 34222 - DNA, 19 bp, Homo sapiens
  siRNA target sequence for NUP153 (NM_005124.2,476-494).
gagctctaatattactgat

SEQ ID NO: 34223 - DNA, 19 bp, Homo sapiens
  siRNA target sequence for NUP153 (NM_005124.2,510-528).
gagccagcagtcagtaata

SEQ ID NO: 34224 - DNA, 19 bp, Homo sapiens
  siRNA target sequence for NUP153 (NM_005124.2,534-552).
gaaccttcaacaactagta

SEQ ID NO: 34225 - DNA, 19 bp, Homo sapiens
  siRNA target sequence for NUP153 (NM_005124.2,575-593).
gttaacaaggccttctctt

SEQ ID NO: 34226 - DNA, 19 bp, Homo sapiens
  siRNA target sequence for NUP153 (NM_005124.2,594-612).
catcggagccatctgaatt

SEQ ID NO: 34227 - DNA, 19 bp, Homo sapiens
  siRNA target sequence for NUP153 (NM_005124.2,597-615).
cggagccatctgaattttt

SEQ ID NO: 34228 - DNA, 19 bp, Homo sapiens
  siRNA target sequence for NUP153 (NM_005124.2,620-638).
gttggaatcccctgcatta

SEQ ID NO: 34229 - DNA, 19 bp, Homo sapiens
  siRNA target sequence for NUP153 (NM_005124.2,639-657).
cactgtcagccatctacat

SEQ ID NO: 34230 - DNA, 19 bp, Homo sapiens
  siRNA target sequence for NUP153 (NM_005124.2,685-703).
gattttcccttgtaaagga

SEQ ID NO: 34231 - DNA, 19 bp, Homo sapiens
  siRNA target sequence for NUP153 (NM_005124.2,691-709).
cccttgtaaaggaaattaa

SEQ ID NO: 34232 - DNA, 19 bp, Homo sapiens
  siRNA target sequence for NUP153 (NM_005124.2,726-744).
catgatgatgataacatct

SEQ ID NO: 34233 - DNA, 19 bp, Homo sapiens
  siRNA target sequence for NUP153 (NM_005124.2,752-770).
cagtggtttttcttcaaga

SEQ ID NO: 34234 - DNA, 19 bp, Homo sapiens
  siRNA target sequence for NUP153 (NM_005124.2,783-801).
gatataactgtttcaaaga

SEQ ID NO: 34235 - DNA, 19 bp, Homo sapiens
  siRNA target sequence for NUP153 (NM_005124.2,930-948).
gggaattcttcaatcctta

SEQ ID NO: 34236 - DNA, 19 bp, Homo sapiens
  siRNA target sequence for NUP153 (NM_005124.2,959-977).
gcttggagattctcctttt

SEQ ID NO: 34237 - DNA, 19 bp, Homo sapiens
  siRNA target sequence for NUP153 (NM_005124.2,1012-1030).
ctgctgtaagacagtctaa

SEQ ID NO: 34238 - DNA, 19 bp, Homo sapiens
  siRNA target sequence for NUP153 (NM_005124.2,1021-1039).
gacagtctaaactacgaaa

SEQ ID NO: 34239 - DNA, 19 bp, Homo sapiens
  siRNA target sequence for NUP153 (NM_005124.2,1025-1043).
gtctaaactacgaaataca

SEQ ID NO: 34240 - DNA, 19 bp, Homo sapiens
  siRNA target sequence for NUP153 (NM_005124.2,1053-1071).
gcaccagttagaagacaaa

SEQ ID NO: 34241 - DNA, 19 bp, Homo sapiens
  siRNA target sequence for NUP153 (NM_005124.2,1056-1074).
ccagttagaagacaaatga

SEQ ID NO: 34242 - DNA, 19 bp, Homo sapiens
  siRNA target sequence for NUP153 (NM_005124.2,1117-1135).
caacagctcggcgaatatt

SEQ ID NO: 34243 - DNA, 19 bp, Homo sapiens
  siRNA target sequence for NUP153 (NM_005124.2,1120-1138).
cagctcggcgaatattgca

SEQ ID NO: 34244 - DNA, 19 bp, Homo sapiens
  siRNA target sequence for NUP153 (NM_005124.2,1126-1144).
ggcgaatattgcagtcttt

SEQ ID NO: 34245 - DNA, 19 bp, Homo sapiens
  siRNA target sequence for NUP153 (NM_005124.2,1127-1145).
gcgaatattgcagtcttta

SEQ ID NO: 34246 - DNA, 19 bp, Homo sapiens
  siRNA target sequence for NUP153 (NM_005124.2,1129-1147).
gaatattgcagtctttaga

SEQ ID NO: 34247 - DNA, 19 bp, Homo sapiens
  siRNA target sequence for NUP153 (NM_005124.2,1159-1177).
gccctttagcggatgcaaa

SEQ ID NO: 34248 - DNA, 19 bp, Homo sapiens
  siRNA target sequence for NUP153 (NM_005124.2,1160-1178).
ccctttagcggatgcaaaa

SEQ ID NO: 34249 - DNA, 19 bp, Homo sapiens
  siRNA target sequence for NUP153 (NM_005124.2,1161-1179).
cctttagcggatgcaaaaa

SEQ ID NO: 34250 - DNA, 19 bp, Homo sapiens
  siRNA target sequence for NUP153 (NM_005124.2,1221-1239).
gataggagtgggatagata

SEQ ID NO: 34251 - DNA, 19 bp, Homo sapiens
  siRNA target sequence for NUP153 (NM_005124.2,1226-1244).
gagtgggatagatatcaca

SEQ ID NO: 34252 - DNA, 19 bp, Homo sapiens
  siRNA target sequence for NUP153 (NM_005124.2,1232-1250).
gatagatatcacagatttt

SEQ ID NO: 34253 - DNA, 19 bp, Homo sapiens
  siRNA target sequence for NUP153 (NM_005124.2,1268-1286).
ggtggattctcaatatcct

SEQ ID NO: 34254 - DNA, 19 bp, Homo sapiens
  siRNA target sequence for NUP153 (NM_005124.2,1326-1344).
gcaacaaatcgaagtgttt

SEQ ID NO: 34255 - DNA, 19 bp, Homo sapiens
  siRNA target sequence for NUP153 (NM_005124.2,1327-1345).
caacaaatcgaagtgttta

SEQ ID NO: 34256 - DNA, 19 bp, Homo sapiens
  siRNA target sequence for NUP153 (NM_005124.2,1371-1389).
ggtgaattcaggaagacta

SEQ ID NO: 34257 - DNA, 19 bp, Homo sapiens
  siRNA target sequence for NUP153 (NM_005124.2,1381-1399).
ggaagactaatcaaagaat

SEQ ID NO: 34258 - DNA, 19 bp, Homo sapiens
  siRNA target sequence for NUP153 (NM_005124.2,1385-1403).
gactaatcaaagaatagat

SEQ ID NO: 34259 - DNA, 19 bp, Homo sapiens
  siRNA target sequence for NUP153 (NM_005124.2,1387-1405).
ctaatcaaagaatagataa

SEQ ID NO: 34260 - DNA, 19 bp, Homo sapiens
  siRNA target sequence for NUP153 (NM_005124.2,1392-1410).
caaagaatagataacaagt

SEQ ID NO: 34261 - DNA, 19 bp, Homo sapiens
  siRNA target sequence for NUP153 (NM_005124.2,1406-1424).
caagtgcagtactggatat

SEQ ID NO: 34262 - DNA, 19 bp, Homo sapiens
  siRNA target sequence for NUP153 (NM_005124.2,1436-1454).
gacacccggacaaaataga

SEQ ID NO: 34263 - DNA, 19 bp, Homo sapiens
  siRNA target sequence for NUP153 (NM_005124.2,1438-1456).
cacccggacaaaatagaga

SEQ ID NO: 34264 - DNA, 19 bp, Homo sapiens
  siRNA target sequence for NUP153 (NM_005124.2,1442-1460).
cggacaaaatagagaacaa

SEQ ID NO: 34265 - DNA, 19 bp, Homo sapiens
  siRNA target sequence for NUP153 (NM_005124.2,1470-1488).
ggcttttcatatccaaatt

SEQ ID NO: 34266 - DNA, 19 bp, Homo sapiens
  siRNA target sequence for NUP153 (NM_005124.2,1496-1514).
gcctgcagccaatggttta

SEQ ID NO: 34267 - DNA, 19 bp, Homo sapiens
  siRNA target sequence for NUP153 (NM_005124.2,1500-1518).
gcagccaatggtttatctt

SEQ ID NO: 34268 - DNA, 19 bp, Homo sapiens
  siRNA target sequence for NUP153 (NM_005124.2,1530-1548).
ggtggaggtggcaagatga

SEQ ID NO: 34269 - DNA, 19 bp, Homo sapiens
  siRNA target sequence for NUP153 (NM_005124.2,1608-1626).
ccagtattaccgaaaatct

SEQ ID NO: 34270 - DNA, 19 bp, Homo sapiens
  siRNA target sequence for NUP153 (NM_005124.2,1650-1668).
ctgcctacctttaatttta

SEQ ID NO: 34271 - DNA, 19 bp, Homo sapiens
  siRNA target sequence for NUP153 (NM_005124.2,1652-1670).
gcctacctttaattttagt

SEQ ID NO: 34272 - DNA, 19 bp, Homo sapiens
  siRNA target sequence for NUP153 (NM_005124.2,1695-1713).
ccatcacccatcaattcgt

SEQ ID NO: 34273 - DNA, 19 bp, Homo sapiens
  siRNA target sequence for NUP153 (NM_005124.2,1706-1724).
caattcgtctcaagcatta

SEQ ID NO: 34274 - DNA, 19 bp, Homo sapiens
  siRNA target sequence for NUP153 (NM_005124.2,1711-1729).
cgtctcaagcattaacaaa

SEQ ID NO: 34275 - DNA, 19 bp, Homo sapiens
  siRNA target sequence for NUP153 (NM_005124.2,1757-1775).
cactggcagtcccatgttt

SEQ ID NO: 34276 - DNA, 19 bp, Homo sapiens
  siRNA target sequence for NUP153 (NM_005124.2,1815-1833).
gtactacctccatcatcta

SEQ ID NO: 34277 - DNA, 19 bp, Homo sapiens
  siRNA target sequence for NUP153 (NM_005124.2,1821-1839).
cctccatcatctattggat

SEQ ID NO: 34278 - DNA, 19 bp, Homo sapiens
  siRNA target sequence for NUP153 (NM_005124.2,1888-1906).
gtagtactttagaaccaat

SEQ ID NO: 34279 - DNA, 19 bp, Homo sapiens
  siRNA target sequence for NUP153 (NM_005124.2,1912-1930).
gtagttcagctcatcatgt

SEQ ID NO: 34280 - DNA, 19 bp, Homo sapiens
  siRNA target sequence for NUP153 (NM_005124.2,1929-1947).
gtcactacagtgaacagta

SEQ ID NO: 34281 - DNA, 19 bp, Homo sapiens
  siRNA target sequence for NUP153 (NM_005124.2,2051-2069).
cgcatcgccgaagatagat

SEQ ID NO: 34282 - DNA, 19 bp, Homo sapiens
  siRNA target sequence for NUP153 (NM_005124.2,2052-2070).
gcatcgccgaagatagatt

SEQ ID NO: 34283 - DNA, 19 bp, Homo sapiens
  siRNA target sequence for NUP153 (NM_005124.2,2056-2074).
cgccgaagatagattctgt

SEQ ID NO: 34284 - DNA, 19 bp, Homo sapiens
  siRNA target sequence for NUP153 (NM_005124.2,2057-2075).
gccgaagatagattctgtt

SEQ ID NO: 34285 - DNA, 19 bp, Homo sapiens
  siRNA target sequence for NUP153 (NM_005124.2,2090-2108).
cgcaacaagcccagtagtt

SEQ ID NO: 34286 - DNA, 19 bp, Homo sapiens
  siRNA target sequence for NUP153 (NM_005124.2,2091-2109).
gcaacaagcccagtagttt

SEQ ID NO: 34287 - DNA, 19 bp, Homo sapiens
  siRNA target sequence for NUP153 (NM_005124.2,2092-2110).
caacaagcccagtagttta

SEQ ID NO: 34288 - DNA, 19 bp, Homo sapiens
  siRNA target sequence for NUP153 (NM_005124.2,2099-2117).
cccagtagtttatacaaga

SEQ ID NO: 34289 - DNA, 19 bp, Homo sapiens
  siRNA target sequence for NUP153 (NM_005124.2,2153-2171).
gtttggggagagtttaaaa

SEQ ID NO: 34290 - DNA, 19 bp, Homo sapiens
  siRNA target sequence for NUP153 (NM_005124.2,2200-2218).
gtctactccagaacaaagt

SEQ ID NO: 34291 - DNA, 19 bp, Homo sapiens
  siRNA target sequence for NUP153 (NM_005124.2,2202-2220).
ctactccagaacaaagtta

SEQ ID NO: 34292 - DNA, 19 bp, Homo sapiens
  siRNA target sequence for NUP153 (NM_005124.2,2217-2235).
gttacagacaacaaatgca

SEQ ID NO: 34293 - DNA, 19 bp, Homo sapiens
  siRNA target sequence for NUP153 (NM_005124.2,2238-2256).
gcctgtcaagcagcaaaat

SEQ ID NO: 34294 - DNA, 19 bp, Homo sapiens
  siRNA target sequence for NUP153 (NM_005124.2,2239-2257).
cctgtcaagcagcaaaatt

SEQ ID NO: 34295 - DNA, 19 bp, Homo sapiens
  siRNA target sequence for NUP153 (NM_005124.2,2370-2388).
ggcacttgggattgtgata

SEQ ID NO: 34296 - DNA, 19 bp, Homo sapiens
  siRNA target sequence for NUP153 (NM_005124.2,2460-2478).
gtgaagcgagcccttacat

SEQ ID NO: 34297 - DNA, 19 bp, Homo sapiens
  siRNA target sequence for NUP153 (NM_005124.2,2465-2483).
gcgagcccttacattgaca

SEQ ID NO: 34298 - DNA, 19 bp, Homo sapiens
  siRNA target sequence for NUP153 (NM_005124.2,2493-2511).
gaaagtgctgagactatga

SEQ ID NO: 34299 - DNA, 19 bp, Homo sapiens
  siRNA target sequence for NUP153 (NM_005124.2,2540-2558).
cactggtaccttaggattt

SEQ ID NO: 34300 - DNA, 19 bp, Homo sapiens
  siRNA target sequence for NUP153 (NM_005124.2,2721-2739).
ggctctctaggattggaaa

SEQ ID NO: 34301 - DNA, 19 bp, Homo sapiens
  siRNA target sequence for NUP153 (NM_005124.2,2727-2745).
ctaggattggaaaagttca

SEQ ID NO: 34302 - DNA, 19 bp, Homo sapiens
  siRNA target sequence for NUP153 (NM_005124.2,2796-2814).
gcagactctaccaaatgtt

SEQ ID NO: 34303 - DNA, 19 bp, Homo sapiens
  siRNA target sequence for NUP153 (NM_005124.2,2797-2815).
cagactctaccaaatgttt

SEQ ID NO: 34304 - DNA, 19 bp, Homo sapiens
  siRNA target sequence for NUP153 (NM_005124.2,2839-2857).
gcacaaaatctgggtttaa

SEQ ID NO: 34305 - DNA, 19 bp, Homo sapiens
  siRNA target sequence for NUP153 (NM_005124.2,2850-2868).
gggtttaaaggctttgaca

SEQ ID NO: 34306 - DNA, 19 bp, Homo sapiens
  siRNA target sequence for NUP153 (NM_005124.2,2865-2883).
gacacatcttcctcatctt

SEQ ID NO: 34307 - DNA, 19 bp, Homo sapiens
  siRNA target sequence for NUP153 (NM_005124.2,2897-2915).
ctcctcatccttcaaattt

SEQ ID NO: 34308 - DNA, 19 bp, Homo sapiens
  siRNA target sequence for NUP153 (NM_005124.2,2939-2957).
gccttctcagactttaaca

SEQ ID NO: 34309 - DNA, 19 bp, Homo sapiens
  siRNA target sequence for NUP153 (NM_005124.2,2980-2998).
gagatcagggaggattcaa

SEQ ID NO: 34310 - DNA, 19 bp, Homo sapiens
  siRNA target sequence for NUP153 (NM_005124.2,2982-3000).
gatcagggaggattcaaaa

SEQ ID NO: 34311 - DNA, 19 bp, Homo sapiens
  siRNA target sequence for NUP153 (NM_005124.2,2987-3005).
gggaggattcaaaataggt

SEQ ID NO: 34312 - DNA, 19 bp, Homo sapiens
  siRNA target sequence for NUP153 (NM_005124.2,3034-3052).
ccatgagtgaaggctttaa

SEQ ID NO: 34313 - DNA, 19 bp, Homo sapiens
  siRNA target sequence for NUP153 (NM_005124.2,3084-3102).
ggagtttcatctgaatcta

SEQ ID NO: 34314 - DNA, 19 bp, Homo sapiens
  siRNA target sequence for NUP153 (NM_005124.2,3100-3118).
ctaagcccgaagaagttaa

SEQ ID NO: 34315 - DNA, 19 bp, Homo sapiens
  siRNA target sequence for NUP153 (NM_005124.2,3153-3171).
ctttcttctggtttaagca

SEQ ID NO: 34316 - DNA, 19 bp, Homo sapiens
  siRNA target sequence for NUP153 (NM_005124.2,3253-3271).
cctctgcaggttttagctt

SEQ ID NO: 34317 - DNA, 19 bp, Homo sapiens
  siRNA target sequence for NUP153 (NM_005124.2,3269-3287).
ctttggtacaggtgttatt

SEQ ID NO: 34318 - DNA, 19 bp, Homo sapiens
  siRNA target sequence for NUP153 (NM_005124.2,3344-3362).
caaccttggaaccatagaa

SEQ ID NO: 34319 - DNA, 19 bp, Homo sapiens
  siRNA target sequence for NUP153 (NM_005124.2,3384-3402).
cctttcacatgtaagacat

SEQ ID NO: 34320 - DNA, 19 bp, Homo sapiens
  siRNA target sequence for NUP153 (NM_005124.2,3394-3412).
gtaagacatcagaagctaa

SEQ ID NO: 34321 - DNA, 19 bp, Homo sapiens
  siRNA target sequence for NUP153 (NM_005124.2,3525-3543).
gagcctgtcacttctactt

SEQ ID NO: 34322 - DNA, 19 bp, Homo sapiens
  siRNA target sequence for NUP153 (NM_005124.2,3569-3587).
caatgaagagccaaagtgt

SEQ ID NO: 34323 - DNA, 19 bp, Homo sapiens
  siRNA target sequence for NUP153 (NM_005124.2,3640-3658).
caaagtccacatttagttt

SEQ ID NO: 34324 - DNA, 19 bp, Homo sapiens
  siRNA target sequence for NUP153 (NM_005124.2,3714-3732).
gcctttggagctcaaacta

SEQ ID NO: 34325 - DNA, 19 bp, Homo sapiens
  siRNA target sequence for NUP153 (NM_005124.2,3753-3771).
gcagcaaagccagttttta

SEQ ID NO: 34326 - DNA, 19 bp, Homo sapiens
  siRNA target sequence for NUP153 (NM_005124.2,3756-3774).
gcaaagccagtttttagtt

SEQ ID NO: 34327 - DNA, 19 bp, Homo sapiens
  siRNA target sequence for NUP153 (NM_005124.2,3782-3800).
caacagttcctctagttca

SEQ ID NO: 34328 - DNA, 19 bp, Homo sapiens
  siRNA target sequence for NUP153 (NM_005124.2,4032-4050).
ggagccagcagtaataata

SEQ ID NO: 34329 - DNA, 19 bp, Homo sapiens
  siRNA target sequence for NUP153 (NM_005124.2,4074-4092).
ggagccacaaccacatcta

SEQ ID NO: 34330 - DNA, 19 bp, Homo sapiens
  siRNA target sequence for NUP153 (NM_005124.2,4214-4232).
cccaggctttggatctata

SEQ ID NO: 34331 - DNA, 19 bp, Homo sapiens
  siRNA target sequence for NUP153 (NM_005124.2,4220-4238).
ctttggatctatatcatct

SEQ ID NO: 34332 - DNA, 19 bp, Homo sapiens
  siRNA target sequence for NUP153 (NM_005124.2,4268-4286).
gcctgcaccacctactttt

SEQ ID NO: 34333 - DNA, 19 bp, Homo sapiens
  siRNA target sequence for OASL (NM_003733.2,11-29).
cactgatgcaggaactgta

SEQ ID NO: 34334 - DNA, 19 bp, Homo sapiens
  siRNA target sequence for OASL (NM_003733.2,13-31).
ctgatgcaggaactgtata

SEQ ID NO: 34335 - DNA, 19 bp, Homo sapiens
  siRNA target sequence for OASL (NM_003733.2,119-137).
ggaccgtggaggagtttct

SEQ ID NO: 34336 - DNA, 19 bp, Homo sapiens
  siRNA target sequence for OASL (NM_003733.2,185-203).
gggtgctgaaggtagtcaa

SEQ ID NO: 34337 - DNA, 19 bp, Homo sapiens
  siRNA target sequence for OASL (NM_003733.2,323-341).
ggctgatatggaaaaccat

SEQ ID NO: 34338 - DNA, 19 bp, Homo sapiens
  siRNA target sequence for OASL (NM_003733.2,514-532).
ccccctgaggtctatgtga

SEQ ID NO: 34339 - DNA, 19 bp, Homo sapiens
  siRNA target sequence for OASL (NM_003733.2,548-566).
gcggtggtcctggaaattt

SEQ ID NO: 34340 - DNA, 19 bp, Homo sapiens
  siRNA target sequence for OASL (NM_003733.2,690-708).
caatctgccccctctctat

SEQ ID NO: 34341 - DNA, 19 bp, Homo sapiens
  siRNA target sequence for OASL (NM_003733.2,699-717).
ccctctctatgctcttgaa

SEQ ID NO: 34342 - DNA, 19 bp, Homo sapiens
  siRNA target sequence for OASL (NM_003733.2,851-869).
cactccacaatgcaatcat

SEQ ID NO: 34343 - DNA, 19 bp, Homo sapiens
  siRNA target sequence for OASL (NM_003733.2,996-1014).
gaaacaggactgttgctat

SEQ ID NO: 34344 - DNA, 19 bp, Homo sapiens
  siRNA target sequence for OASL (NM_003733.2,1088-1106).
ggggttacccagatttcaa

SEQ ID NO: 34345 - DNA, 19 bp, Homo sapiens
  siRNA target sequence for OASL (NM_003733.2,1121-1139).
cttatgagcccataaggaa

SEQ ID NO: 34346 - DNA, 19 bp, Homo sapiens
  siRNA target sequence for OASL (NM_003733.2,1126-1144).
gagcccataaggaaggtta

SEQ ID NO: 34347 - DNA, 19 bp, Homo sapiens
  siRNA target sequence for OASL (NM_003733.2,1128-1146).
gcccataaggaaggttaaa

SEQ ID NO: 34348 - DNA, 19 bp, Homo sapiens
  siRNA target sequence for OASL (NM_003733.2,1235-1253).
ggtgctccttagccaaata

SEQ ID NO: 34349 - DNA, 19 bp, Homo sapiens
  siRNA target sequence for OASL (NM_003733.2,1236-1254).
gtgctccttagccaaatat

SEQ ID NO: 34350 - DNA, 19 bp, Homo sapiens
  siRNA target sequence for OASL (NM_003733.2,1464-1482).
gttgggtctggggatctat

SEQ ID NO: 34351 - DNA, 19 bp, Homo sapiens
  siRNA target sequence for OLIG2 (NM_005806.1,148-166).
cagagcccgatgacctttt

SEQ ID NO: 34352 - DNA, 19 bp, Homo sapiens
  siRNA target sequence for OLIG2 (NM_005806.1,616-634).
gactggtgagcgagatcta

SEQ ID NO: 34353 - DNA, 19 bp, Homo sapiens
  siRNA target sequence for OLIG2 (NM_005806.1,871-889).
caccgcacggcctactcaa

SEQ ID NO: 34354 - DNA, 19 bp, Homo sapiens
  siRNA target sequence for ORC1L (NM_004153.2,243-261).
gaagaccagaaaaacttat

SEQ ID NO: 34355 - DNA, 19 bp, Homo sapiens
  siRNA target sequence for ORC1L (NM_004153.2,246-264).
gaccagaaaaacttattca

SEQ ID NO: 34356 - DNA, 19 bp, Homo sapiens
  siRNA target sequence for ORC1L (NM_004153.2,297-315).
gcactaccaaacctataga

SEQ ID NO: 34357 - DNA, 19 bp, Homo sapiens
  siRNA target sequence for ORC1L (NM_004153.2,338-356).
gttgttccaccgagattca

SEQ ID NO: 34358 - DNA, 19 bp, Homo sapiens
  siRNA target sequence for ORC1L (NM_004153.2,407-425).
cgtatgttgctaaattgct

SEQ ID NO: 34359 - DNA, 19 bp, Homo sapiens
  siRNA target sequence for ORC1L (NM_004153.2,408-426).
gtatgttgctaaattgctt

SEQ ID NO: 34360 - DNA, 19 bp, Homo sapiens
  siRNA target sequence for ORC1L (NM_004153.2,416-434).
ctaaattgcttgagttgtt

SEQ ID NO: 34361 - DNA, 19 bp, Homo sapiens
  siRNA target sequence for ORC1L (NM_004153.2,480-498).
gtggtttgtccgattctgt

SEQ ID NO: 34362 - DNA, 19 bp, Homo sapiens
  siRNA target sequence for ORC1L (NM_004153.2,508-526).
gcctgtaaacggcatttgt

SEQ ID NO: 34363 - DNA, 19 bp, Homo sapiens
  siRNA target sequence for ORC1L (NM_004153.2,509-527).
cctgtaaacggcatttgtt

SEQ ID NO: 34364 - DNA, 19 bp, Homo sapiens
  siRNA target sequence for ORC1L (NM_004153.2,541-559).
ggtgcacaggaaatattct

SEQ ID NO: 34365 - DNA, 19 bp, Homo sapiens
  siRNA target sequence for ORC1L (NM_004153.2,550-568).
gaaatattctggtatgatt

SEQ ID NO: 34366 - DNA, 19 bp, Homo sapiens
  siRNA target sequence for ORC1L (NM_004153.2,573-591).
ggcctgtgacagcaacatt

SEQ ID NO: 34367 - DNA, 19 bp, Homo sapiens
  siRNA target sequence for ORC1L (NM_004153.2,613-631).
cttgttcgggtgatacctt

SEQ ID NO: 34368 - DNA, 19 bp, Homo sapiens
  siRNA target sequence for ORC1L (NM_004153.2,646-664).
gtggtaccgacgaatctga

SEQ ID NO: 34369 - DNA, 19 bp, Homo sapiens
  siRNA target sequence for ORC1L (NM_004153.2,653-671).
cgacgaatctgaaaaatga

SEQ ID NO: 34370 - DNA, 19 bp, Homo sapiens
  siRNA target sequence for ORC1L (NM_004153.2,675-693).
gacactctttgtgaaacta

SEQ ID NO: 34371 - DNA, 19 bp, Homo sapiens
  siRNA target sequence for ORC1L (NM_004153.2,931-949).
gagcttggcaacttaggta

SEQ ID NO: 34372 - DNA, 19 bp, Homo sapiens
  siRNA target sequence for ORC1L (NM_004153.2,960-978).
gtcccagcagacttcatgt

SEQ ID NO: 34373 - DNA, 19 bp, Homo sapiens
  siRNA target sequence for ORC1L (NM_004153.2,1049-1067).
gatctcagcctgataaact

SEQ ID NO: 34374 - DNA, 19 bp, Homo sapiens
  siRNA target sequence for ORC1L (NM_004153.2,1058-1076).
ctgataaacttcaaacctt

SEQ ID NO: 34375 - DNA, 19 bp, Homo sapiens
  siRNA target sequence for ORC1L (NM_004153.2,1109-1127).
gagagactggactctctta

SEQ ID NO: 34376 - DNA, 19 bp, Homo sapiens
  siRNA target sequence for ORC1L (NM_004153.2,1111-1129).
gagactggactctcttata

SEQ ID NO: 34377 - DNA, 19 bp, Homo sapiens
  siRNA target sequence for ORC1L (NM_004153.2,1113-1131).
gactggactctcttatact

SEQ ID NO: 34378 - DNA, 19 bp, Homo sapiens
  siRNA target sequence for ORC1L (NM_004153.2,1115-1133).
ctggactctcttatactga

SEQ ID NO: 34379 - DNA, 19 bp, Homo sapiens
  siRNA target sequence for ORC1L (NM_004153.2,1154-1172).
ctgaacatcgcataatcct

SEQ ID NO: 34380 - DNA, 19 bp, Homo sapiens
  siRNA target sequence for ORC1L (NM_004153.2,1170-1188).
cctgagaacccgaattgca

SEQ ID NO: 34381 - DNA, 19 bp, Homo sapiens
  siRNA target sequence for ORC1L (NM_004153.2,1179-1197).
ccgaattgcagcttcgaaa

SEQ ID NO: 34382 - DNA, 19 bp, Homo sapiens
  siRNA target sequence for ORC1L (NM_004153.2,1180-1198).
cgaattgcagcttcgaaaa

SEQ ID NO: 34383 - DNA, 19 bp, Homo sapiens
  siRNA target sequence for ORC1L (NM_004153.2,1189-1207).
gcttcgaaaaccatagaca

SEQ ID NO: 34384 - DNA, 19 bp, Homo sapiens
  siRNA target sequence for ORC1L (NM_004153.2,1190-1208).
cttcgaaaaccatagacat

SEQ ID NO: 34385 - DNA, 19 bp, Homo sapiens
  siRNA target sequence for ORC1L (NM_004153.2,1261-1279).
gtgccatccgtgattctga

SEQ ID NO: 34386 - DNA, 19 bp, Homo sapiens
  siRNA target sequence for ORC1L (NM_004153.2,1337-1355).
cctctactccccatcgtat

SEQ ID NO: 34387 - DNA, 19 bp, Homo sapiens
  siRNA target sequence for ORC1L (NM_004153.2,1367-1385).
gttctgtcttgactatgaa

SEQ ID NO: 34388 - DNA, 19 bp, Homo sapiens
  siRNA target sequence for ORC1L (NM_004153.2,1401-1419).
gcttcggtttctaggtaat

SEQ ID NO: 34389 - DNA, 19 bp, Homo sapiens
  siRNA target sequence for ORC1L (NM_004153.2,1402-1420).
cttcggtttctaggtaata

SEQ ID NO: 34390 - DNA, 19 bp, Homo sapiens
  siRNA target sequence for ORC1L (NM_004153.2,1405-1423).
cggtttctaggtaatagta

SEQ ID NO: 34391 - DNA, 19 bp, Homo sapiens
  siRNA target sequence for ORC1L (NM_004153.2,1546-1564).
ctgcgatcttccttgaagt

SEQ ID NO: 34392 - DNA, 19 bp, Homo sapiens
  siRNA target sequence for ORC1L (NM_004153.2,1733-1751).
cctgtcgggaacaggaatt

SEQ ID NO: 34393 - DNA, 19 bp, Homo sapiens
  siRNA target sequence for ORC1L (NM_004153.2,1736-1754).
gtcgggaacaggaattcca

SEQ ID NO: 34394 - DNA, 19 bp, Homo sapiens
  siRNA target sequence for ORC1L (NM_004153.2,1747-1765).
gaattccaagacatctaca

SEQ ID NO: 34395 - DNA, 19 bp, Homo sapiens
  siRNA target sequence for ORC1L (NM_004153.2,1798-1816).
ggagggtgcatgtacatct

SEQ ID NO: 34396 - DNA, 19 bp, Homo sapiens
  siRNA target sequence for ORC1L (NM_004153.2,1836-1854).
gaagactgccactgttcat

SEQ ID NO: 34397 - DNA, 19 bp, Homo sapiens
  siRNA target sequence for ORC1L (NM_004153.2,1841-1859).
ctgccactgttcatgaagt

SEQ ID NO: 34398 - DNA, 19 bp, Homo sapiens
  siRNA target sequence for ORC1L (NM_004153.2,1940-1958).
cggagccccaccaagtcta

SEQ ID NO: 34399 - DNA, 19 bp, Homo sapiens
  siRNA target sequence for ORC1L (NM_004153.2,1941-1959).
ggagccccaccaagtctat

SEQ ID NO: 34400 - DNA, 19 bp, Homo sapiens
  siRNA target sequence for ORC1L (NM_004153.2,2014-2032).
gaactgctggcaaagcaat

SEQ ID NO: 34401 - DNA, 19 bp, Homo sapiens
  siRNA target sequence for ORC1L (NM_004153.2,2097-2115).
gactcacaaacaagacata

SEQ ID NO: 34402 - DNA, 19 bp, Homo sapiens
  siRNA target sequence for ORC1L (NM_004153.2,2191-2209).
ctgccagagcgaatcatga

SEQ ID NO: 34403 - DNA, 19 bp, Homo sapiens
  siRNA target sequence for ORC1L (NM_004153.2,2194-2212).
ccagagcgaatcatgatga

SEQ ID NO: 34404 - DNA, 19 bp, Homo sapiens
  siRNA target sequence for ORC1L (NM_004153.2,2195-2213).
cagagcgaatcatgatgaa

SEQ ID NO: 34405 - DNA, 19 bp, Homo sapiens
  siRNA target sequence for ORC1L (NM_004153.2,2247-2265).
gtgcttccagccctataca

SEQ ID NO: 34406 - DNA, 19 bp, Homo sapiens
  siRNA target sequence for ORC1L (NM_004153.2,2249-2267).
gcttccagccctatacata

SEQ ID NO: 34407 - DNA, 19 bp, Homo sapiens
  siRNA target sequence for ORC1L (NM_004153.2,2294-2312).
cccggctcaagcatctaaa

SEQ ID NO: 34408 - DNA, 19 bp, Homo sapiens
  siRNA target sequence for ORC1L (NM_004153.2,2460-2478).
catagcccactcaatggaa

SEQ ID NO: 34409 - DNA, 19 bp, Homo sapiens
  siRNA target sequence for ORC1L (NM_004153.2,2508-2526).
catcacggccatcaaaaat

SEQ ID NO: 34410 - DNA, 19 bp, Homo sapiens
  siRNA target sequence for ORC1L (NM_004153.2,2596-2614).
gccacgtttcaacagatat

SEQ ID NO: 34411 - DNA, 19 bp, Homo sapiens
  siRNA target sequence for ORC1L (NM_004153.2,2598-2616).
cacgtttcaacagatatat

SEQ ID NO: 34412 - DNA, 19 bp, Homo sapiens
  siRNA target sequence for ORC1L (NM_004153.2,2601-2619).
gtttcaacagatatatagt

SEQ ID NO: 34413 - DNA, 19 bp, Homo sapiens
  siRNA target sequence for ORC6L (NM_014321.2,244-262).
cccttggacagggcttatt

SEQ ID NO: 34414 - DNA, 19 bp, Homo sapiens
  siRNA target sequence for ORC6L (NM_014321.2,245-263).
ccttggacagggcttattt

SEQ ID NO: 34415 - DNA, 19 bp, Homo sapiens
  siRNA target sequence for ORC6L (NM_014321.2,252-270).
cagggcttatttaattaaa

SEQ ID NO: 34416 - DNA, 19 bp, Homo sapiens
  siRNA target sequence for ORC6L (NM_014321.2,356-374).
gagacctagctgtacagtt

SEQ ID NO: 34417 - DNA, 19 bp, Homo sapiens
  siRNA target sequence for ORC6L (NM_014321.2,380-398).
gtatagaagcagtgaacat

SEQ ID NO: 34418 - DNA, 19 bp, Homo sapiens
  siRNA target sequence for ORC6L (NM_014321.2,448-466).
caagtggatcttgacttat

SEQ ID NO: 34419 - DNA, 19 bp, Homo sapiens
  siRNA target sequence for ORC6L (NM_014321.2,451-469).
gtggatcttgacttatcca

SEQ ID NO: 34420 - DNA, 19 bp, Homo sapiens
  siRNA target sequence for ORC6L (NM_014321.2,554-572).
ccggtgtaaaaaaagctat

SEQ ID NO: 34421 - DNA, 19 bp, Homo sapiens
  siRNA target sequence for ORC6L (NM_014321.2,555-573).
cggtgtaaaaaaagctata

SEQ ID NO: 34422 - DNA, 19 bp, Homo sapiens
  siRNA target sequence for ORC6L (NM_014321.2,581-599).
gactgtgtaaacaactaga

SEQ ID NO: 34423 - DNA, 19 bp, Homo sapiens
  siRNA target sequence for ORC6L (NM_014321.2,587-605).
gtaaacaactagagaagat

SEQ ID NO: 34424 - DNA, 19 bp, Homo sapiens
  siRNA target sequence for OSMR (NM_003999.1,380-398).
gcagtctttcagacaacat

SEQ ID NO: 34425 - DNA, 19 bp, Homo sapiens
  siRNA target sequence for OSMR (NM_003999.1,381-399).
cagtctttcagacaacatt

SEQ ID NO: 34426 - DNA, 19 bp, Homo sapiens
  siRNA target sequence for OSMR (NM_003999.1,383-401).
gtctttcagacaacattct

SEQ ID NO: 34427 - DNA, 19 bp, Homo sapiens
  siRNA target sequence for OSMR (NM_003999.1,426-444).
cttaccagagtgaagtctt

SEQ ID NO: 34428 - DNA, 19 bp, Homo sapiens
  siRNA target sequence for OSMR (NM_003999.1,467-485).
cctgtatcacttaaagttt

SEQ ID NO: 34429 - DNA, 19 bp, Homo sapiens
  siRNA target sequence for OSMR (NM_003999.1,501-519).
gtcagagtttgcacttaca

SEQ ID NO: 34430 - DNA, 19 bp, Homo sapiens
  siRNA target sequence for OSMR (NM_003999.1,503-521).
cagagtttgcacttacaat

SEQ ID NO: 34431 - DNA, 19 bp, Homo sapiens
  siRNA target sequence for OSMR (NM_003999.1,525-543).
ctgtccacaaccttcctta

SEQ ID NO: 34432 - DNA, 19 bp, Homo sapiens
  siRNA target sequence for OSMR (NM_003999.1,539-557).
ccttatcatcaggaattga

SEQ ID NO: 34433 - DNA, 19 bp, Homo sapiens
  siRNA target sequence for OSMR (NM_003999.1,571-589).
gatccagatcagtaggatt

SEQ ID NO: 34434 - DNA, 19 bp, Homo sapiens
  siRNA target sequence for OSMR (NM_003999.1,776-794).
gaagtcagtgtacaagatt

SEQ ID NO: 34435 - DNA, 19 bp, Homo sapiens
  siRNA target sequence for OSMR (NM_003999.1,803-821).
caggatatattgttcgttt

SEQ ID NO: 34436 - DNA, 19 bp, Homo sapiens
  siRNA target sequence for OSMR (NM_003999.1,814-832).
gttcgttttccctaaagat

SEQ ID NO: 34437 - DNA, 19 bp, Homo sapiens
  siRNA target sequence for OSMR (NM_003999.1,850-868).
caccaatgttaccatttgt

SEQ ID NO: 34438 - DNA, 19 bp, Homo sapiens
  siRNA target sequence for OSMR (NM_003999.1,857-875).
gttaccatttgttacgttt

SEQ ID NO: 34439 - DNA, 19 bp, Homo sapiens
  siRNA target sequence for OSMR (NM_003999.1,945-963).
cacatgtaactgcattcaa

SEQ ID NO: 34440 - DNA, 19 bp, Homo sapiens
  siRNA target sequence for OSMR (NM_003999.1,947-965).
catgtaactgcattcaact

SEQ ID NO: 34441 - DNA, 19 bp, Homo sapiens
  siRNA target sequence for OSMR (NM_003999.1,950-968).
gtaactgcattcaacttga

SEQ ID NO: 34442 - DNA, 19 bp, Homo sapiens
  siRNA target sequence for OSMR (NM_003999.1,957-975).
cattcaacttgaatagtgt

SEQ ID NO: 34443 - DNA, 19 bp, Homo sapiens
  siRNA target sequence for OSMR (NM_003999.1,996-1014).
ggacaaatatctattgtga

SEQ ID NO: 34444 - DNA, 19 bp, Homo sapiens
  siRNA target sequence for OSMR (NM_003999.1,1006-1024).
ctattgtgaggcaagtcaa

SEQ ID NO: 34445 - DNA, 19 bp, Homo sapiens
  siRNA target sequence for OSMR (NM_003999.1,1016-1034).
gcaagtcaaggaaatgtca

SEQ ID NO: 34446 - DNA, 19 bp, Homo sapiens
  siRNA target sequence for OSMR (NM_003999.1,1158-1176).
ccttggggtggtctaaaca

SEQ ID NO: 34447 - DNA, 19 bp, Homo sapiens
  siRNA target sequence for OSMR (NM_003999.1,1159-1177).
cttggggtggtctaaacaa

SEQ ID NO: 34448 - DNA, 19 bp, Homo sapiens
  siRNA target sequence for OSMR (NM_003999.1,1178-1196).
ccttcccaaagctacactt

SEQ ID NO: 34449 - DNA, 19 bp, Homo sapiens
  siRNA target sequence for OSMR (NM_003999.1,1182-1200).
cccaaagctacactttatt

SEQ ID NO: 34450 - DNA, 19 bp, Homo sapiens
  siRNA target sequence for OSMR (NM_003999.1,1235-1253).
cacaaaaactggtgtaatt

SEQ ID NO: 34451 - DNA, 19 bp, Homo sapiens
  siRNA target sequence for OSMR (NM_003999.1,1246-1264).
gtgtaattggcaaataact

SEQ ID NO: 34452 - DNA, 19 bp, Homo sapiens
  siRNA target sequence for OSMR (NM_003999.1,1248-1266).
gtaattggcaaataactca

SEQ ID NO: 34453 - DNA, 19 bp, Homo sapiens
  siRNA target sequence for OSMR (NM_003999.1,1291-1309).
cacactcatagctgaaaat

SEQ ID NO: 34454 - DNA, 19 bp, Homo sapiens
  siRNA target sequence for OSMR (NM_003999.1,1293-1311).
cactcatagctgaaaatta

SEQ ID NO: 34455 - DNA, 19 bp, Homo sapiens
  siRNA target sequence for OSMR (NM_003999.1,1345-1363).
cctgactcatcgagtttat

SEQ ID NO: 34456 - DNA, 19 bp, Homo sapiens
  siRNA target sequence for OSMR (NM_003999.1,1346-1364).
ctgactcatcgagtttatt

SEQ ID NO: 34457 - DNA, 19 bp, Homo sapiens
  siRNA target sequence for OSMR (NM_003999.1,1348-1366).
gactcatcgagtttattta

SEQ ID NO: 34458 - DNA, 19 bp, Homo sapiens
  siRNA target sequence for OSMR (NM_003999.1,1350-1368).
ctcatcgagtttatttaat

SEQ ID NO: 34459 - DNA, 19 bp, Homo sapiens
  siRNA target sequence for OSMR (NM_003999.1,1352-1370).
catcgagtttatttaatga

SEQ ID NO: 34460 - DNA, 19 bp, Homo sapiens
  siRNA target sequence for OSMR (NM_003999.1,1429-1447).
ggtgcactccataaggaat

SEQ ID NO: 34461 - DNA, 19 bp, Homo sapiens
  siRNA target sequence for OSMR (NM_003999.1,1430-1448).
gtgcactccataaggaata

SEQ ID NO: 34462 - DNA, 19 bp, Homo sapiens
  siRNA target sequence for OSMR (NM_003999.1,1432-1450).
gcactccataaggaataat

SEQ ID NO: 34463 - DNA, 19 bp, Homo sapiens
  siRNA target sequence for OSMR (NM_003999.1,1433-1451).
cactccataaggaataatt

SEQ ID NO: 34464 - DNA, 19 bp, Homo sapiens
  siRNA target sequence for OSMR (NM_003999.1,1527-1545).
gtgagtacttcttaagtga

SEQ ID NO: 34465 - DNA, 19 bp, Homo sapiens
  siRNA target sequence for OSMR (NM_003999.1,1630-1648).
gaacttcaccacacttgaa

SEQ ID NO: 34466 - DNA, 19 bp, Homo sapiens
  siRNA target sequence for OSMR (NM_003999.1,1668-1686).
ctgatgtctggagaattgt

SEQ ID NO: 34467 - DNA, 19 bp, Homo sapiens
  siRNA target sequence for OSMR (NM_003999.1,1687-1705).
gagcttggagccaggaaat

SEQ ID NO: 34468 - DNA, 19 bp, Homo sapiens
  siRNA target sequence for OSMR (NM_003999.1,1706-1724).
catactgtgaccttattct

SEQ ID NO: 34469 - DNA, 19 bp, Homo sapiens
  siRNA target sequence for OSMR (NM_003999.1,1840-1858).
cagcacaaaactaatcctt

SEQ ID NO: 34470 - DNA, 19 bp, Homo sapiens
  siRNA target sequence for OSMR (NM_003999.1,1859-1877).
gacaggtgttcctaccaaa

SEQ ID NO: 34471 - DNA, 19 bp, Homo sapiens
  siRNA target sequence for OSMR (NM_003999.1,2012-2030).
ccccaacctggagatgtta

SEQ ID NO: 34472 - DNA, 19 bp, Homo sapiens
  siRNA target sequence for OSMR (NM_003999.1,2013-2031).
cccaacctggagatgttat

SEQ ID NO: 34473 - DNA, 19 bp, Homo sapiens
  siRNA target sequence for OSMR (NM_003999.1,2014-2032).
ccaacctggagatgttata

SEQ ID NO: 34474 - DNA, 19 bp, Homo sapiens
  siRNA target sequence for OSMR (NM_003999.1,2144-2162).
ccaggagttcgatatgact

SEQ ID NO: 34475 - DNA, 19 bp, Homo sapiens
  siRNA target sequence for OSMR (NM_003999.1,2175-2193).
ggttatctacaaaaaggat

SEQ ID NO: 34476 - DNA, 19 bp, Homo sapiens
  siRNA target sequence for OSMR (NM_003999.1,2190-2208).
ggattgcttgtttattaga

SEQ ID NO: 34477 - DNA, 19 bp, Homo sapiens
  siRNA target sequence for OSMR (NM_003999.1,2258-2276).
gtgctggtggatacattga

SEQ ID NO: 34478 - DNA, 19 bp, Homo sapiens
  siRNA target sequence for OSMR (NM_003999.1,2260-2278).
gctggtggatacattgaca

SEQ ID NO: 34479 - DNA, 19 bp, Homo sapiens
  siRNA target sequence for OSMR (NM_003999.1,2302-2320).
gaaagattactctactgaa

SEQ ID NO: 34480 - DNA, 19 bp, Homo sapiens
  siRNA target sequence for OSMR (NM_003999.1,2342-2360).
gggtaccatgtctatctga

SEQ ID NO: 34481 - DNA, 19 bp, Homo sapiens
  siRNA target sequence for OSMR (NM_003999.1,2348-2366).
catgtctatctgaaatcca

SEQ ID NO: 34482 - DNA, 19 bp, Homo sapiens
  siRNA target sequence for OSMR (NM_003999.1,2379-2397).
gccacccacgatttgaaaa

SEQ ID NO: 34483 - DNA, 19 bp, Homo sapiens
  siRNA target sequence for OSMR (NM_003999.1,2580-2598).
cctcgatgctgattcatat

SEQ ID NO: 34484 - DNA, 19 bp, Homo sapiens
  siRNA target sequence for OSMR (NM_003999.1,2583-2601).
cgatgctgattcatatcct

SEQ ID NO: 34485 - DNA, 19 bp, Homo sapiens
  siRNA target sequence for OSMR (NM_003999.1,2584-2602).
gatgctgattcatatccta

SEQ ID NO: 34486 - DNA, 19 bp, Homo sapiens
  siRNA target sequence for OSMR (NM_003999.1,2635-2653).
ggtcatgtgctacttgaaa

SEQ ID NO: 34487 - DNA, 19 bp, Homo sapiens
  siRNA target sequence for OSMR (NM_003999.1,2636-2654).
gtcatgtgctacttgaaaa

SEQ ID NO: 34488 - DNA, 19 bp, Homo sapiens
  siRNA target sequence for OSMR (NM_003999.1,2638-2656).
catgtgctacttgaaaagt

SEQ ID NO: 34489 - DNA, 19 bp, Homo sapiens
  siRNA target sequence for OSMR (NM_003999.1,2662-2680).
gatcaaggagacctgttat

SEQ ID NO: 34490 - DNA, 19 bp, Homo sapiens
  siRNA target sequence for OSMR (NM_003999.1,2704-2722).
gagcagcatcctgtcatta

SEQ ID NO: 34491 - DNA, 19 bp, Homo sapiens
  siRNA target sequence for OSMR (NM_003999.1,2706-2724).
gcagcatcctgtcattaat

SEQ ID NO: 34492 - DNA, 19 bp, Homo sapiens
  siRNA target sequence for OSMR (NM_003999.1,2707-2725).
cagcatcctgtcattaata

SEQ ID NO: 34493 - DNA, 19 bp, Homo sapiens
  siRNA target sequence for OSMR (NM_003999.1,2734-2752).
ggagaaccctcacctaata

SEQ ID NO: 34494 - DNA, 19 bp, Homo sapiens
  siRNA target sequence for OSMR (NM_003999.1,2772-2790).
gtatcccagatgctattga

SEQ ID NO: 34495 - DNA, 19 bp, Homo sapiens
  siRNA target sequence for OSMR (NM_003999.1,2803-2821).
gccagaagggacaaagata

SEQ ID NO: 34496 - DNA, 19 bp, Homo sapiens
  siRNA target sequence for OSMR (NM_003999.1,2850-2868).
cagaaaccgagttgactaa

SEQ ID NO: 34497 - DNA, 19 bp, Homo sapiens
  siRNA target sequence for OSMR (NM_003999.1,2865-2883).
ctaagcctaactaccttta

SEQ ID NO: 34498 - DNA, 19 bp, Homo sapiens
  siRNA target sequence for OSMR (NM_003999.1,3009-3027).
caagtatgctgggactaat

SEQ ID NO: 34499 - DNA, 19 bp, Homo sapiens
  siRNA target sequence for OSMR (NM_003999.1,3192-3210).
gttcagagtataaaatgca

SEQ ID NO: 34500 - DNA, 19 bp, Homo sapiens
  siRNA target sequence for OSMR (NM_003999.1,3239-3257).
cctcccccgaccgagaata

SEQ ID NO: 34501 - DNA, 19 bp, Homo sapiens
  siRNA target sequence for OSMR (NM_003999.1,3242-3260).
cccccgaccgagaatagca

SEQ ID NO: 34502 - DNA, 19 bp, Homo sapiens
  siRNA target sequence for OSMR (NM_003999.1,3265-3283).
ctcctcaattaccctttta

SEQ ID NO: 34503 - DNA, 19 bp, Homo sapiens
  siRNA target sequence for OSMR (NM_003999.1,3268-3286).
ctcaattacccttttagat

SEQ ID NO: 34504 - DNA, 19 bp, Homo sapiens
  siRNA target sequence for PAX1 (NM_006192.1,413-431).
gaccgtacgaggcaagtaa

SEQ ID NO: 34505 - DNA, 19 bp, Homo sapiens
  siRNA target sequence for PAX1 (NM_006192.1,604-622).
ctgggcatccggacgttta

SEQ ID NO: 34506 - DNA, 19 bp, Homo sapiens
  siRNA target sequence for PAX1 (NM_006192.1,608-626).
gcatccggacgtttatgga

SEQ ID NO: 34507 - DNA, 19 bp, Homo sapiens
  siRNA target sequence for PAX1 (NM_006192.1,651-669).
cgaaggcaccgcttactct

SEQ ID NO: 34508 - DNA, 19 bp, Homo sapiens
  siRNA target sequence for PAX1 (NM_006192.1,748-766).
gccttagaggcagacatta

SEQ ID NO: 34509 - DNA, 19 bp, Homo sapiens
  siRNA target sequence for PAX1 (NM_006192.1,749-767).
ccttagaggcagacattaa

SEQ ID NO: 34510 - DNA, 19 bp, Homo sapiens
  siRNA target sequence for PAX1 (NM_006192.1,1031-1049).
ggacgccctcagtagctta

SEQ ID NO: 34511 - DNA, 19 bp, Homo sapiens
  siRNA target sequence for PAX5 (NM_016734.1,540-558).
ggccactcccggatgtagt

SEQ ID NO: 34512 - DNA, 19 bp, Homo sapiens
  siRNA target sequence for PAX5 (NM_016734.1,679-697).
catcaagcctggggtaatt

SEQ ID NO: 34513 - DNA, 19 bp, Homo sapiens
  siRNA target sequence for PAX5 (NM_016734.1,682-700).
caagcctggggtaattgga

SEQ ID NO: 34514 - DNA, 19 bp, Homo sapiens
  siRNA target sequence for PAX5 (NM_016734.1,691-709).
ggtaattggaggatccaaa

SEQ ID NO: 34515 - DNA, 19 bp, Homo sapiens
  siRNA target sequence for PAX5 (NM_016734.1,812-830).
cgggtgtgtgacaatgaca

SEQ ID NO: 34516 - DNA, 19 bp, Homo sapiens
  siRNA target sequence for PAX5 (NM_016734.1,859-877).
gatcatccggacaaaagta

SEQ ID NO: 34517 - DNA, 19 bp, Homo sapiens
  siRNA target sequence for PAX5 (NM_016734.1,1038-1056).
gcaagagagacgaaggtat

SEQ ID NO: 34518 - DNA, 19 bp, Homo sapiens
  siRNA target sequence for PAX5 (NM_016734.1,1157-1175).
ctggaccgcgtgtttgaga

SEQ ID NO: 34519 - DNA, 19 bp, Homo sapiens
  siRNA target sequence for PAX5 (NM_016734.1,1543-1561).
gcttggctccccctactat

SEQ ID NO: 34520 - DNA, 19 bp, Homo sapiens
  siRNA target sequence for PAX5 (NM_016734.1,1544-1562).
cttggctccccctactatt

SEQ ID NO: 34521 - DNA, 19 bp, Homo sapiens
  siRNA target sequence for PAX5 (NM_016734.1,1547-1565).
ggctccccctactattata

SEQ ID NO: 34522 - DNA, 19 bp, Homo sapiens
  siRNA target sequence for PAX9 (NM_006194.1,632-650).
cccaccgtggtgaaacaca

SEQ ID NO: 34523 - DNA, 19 bp, Homo sapiens
  siRNA target sequence for PAX9 (NM_006194.1,803-821).
ggtcattacgactcataca

SEQ ID NO: 34524 - DNA, 19 bp, Homo sapiens
  siRNA target sequence for PAX9 (NM_006194.1,804-822).
gtcattacgactcatacaa

SEQ ID NO: 34525 - DNA, 19 bp, Homo sapiens
  siRNA target sequence for PAX9 (NM_006194.1,1153-1171).
gtacggtcaggcaccaaat

SEQ ID NO: 34526 - DNA, 19 bp, Homo sapiens
  siRNA target sequence for PAX9 (NM_006194.1,1156-1174).
cggtcaggcaccaaatggt

SEQ ID NO: 34527 - DNA, 19 bp, Homo sapiens
  siRNA target sequence for PAX9 (NM_006194.1,1179-1197).
cagctgtgggcagttttgt

SEQ ID NO: 34528 - DNA, 19 bp, Homo sapiens
  siRNA target sequence for PAX9 (NM_006194.1,1181-1199).
gctgtgggcagttttgtgt

SEQ ID NO: 34529 - DNA, 19 bp, Homo sapiens
  siRNA target sequence for PAX9 (NM_006194.1,1233-1251).
cccaagtgtcgccttacat

SEQ ID NO: 34530 - DNA, 19 bp, Homo sapiens
  siRNA target sequence for PAX9 (NM_006194.1,1235-1253).
caagtgtcgccttacatga

SEQ ID NO: 34531 - DNA, 19 bp, Homo sapiens
  siRNA target sequence for PAX9 (NM_006194.1,1263-1281).
ctgctccttctggttatgt

SEQ ID NO: 34532 - DNA, 19 bp, Homo sapiens
  siRNA target sequence for PAX9 (NM_006194.1,1304-1322).
gctgggggcacctcattgt

SEQ ID NO: 34533 - DNA, 19 bp, Homo sapiens
  siRNA target sequence for PAX9 (NM_006194.1,1378-1396).
cagagaaggtagtcattct

SEQ ID NO: 34534 - DNA, 19 bp, Homo sapiens
  siRNA target sequence for PC326 (NM_018442.1,723-741).
gtgaggttgcacaaagcaa

SEQ ID NO: 34535 - DNA, 19 bp, Homo sapiens
  siRNA target sequence for PC326 (NM_018442.1,766-784).
cagaggtggaacaagtcaa

SEQ ID NO: 34536 - DNA, 19 bp, Homo sapiens
  siRNA target sequence for PC326 (NM_018442.1,774-792).
gaacaagtcaatcagatat

SEQ ID NO: 34537 - DNA, 19 bp, Homo sapiens
  siRNA target sequence for PC326 (NM_018442.1,813-831).
catcaagtcctgatttgga

SEQ ID NO: 34538 - DNA, 19 bp, Homo sapiens
  siRNA target sequence for PC326 (NM_018442.1,857-875).
gatactccagctgaacaat

SEQ ID NO: 34539 - DNA, 19 bp, Homo sapiens
  siRNA target sequence for PC326 (NM_018442.1,913-931).
ggctcattcgacatcatct

SEQ ID NO: 34540 - DNA, 19 bp, Homo sapiens
  siRNA target sequence for PC326 (NM_018442.1,1041-1059).
cttctgtggttaacaaaca

SEQ ID NO: 34541 - DNA, 19 bp, Homo sapiens
  siRNA target sequence for PC326 (NM_018442.1,1081-1099).
cgagcaacaggataacaat

SEQ ID NO: 34542 - DNA, 19 bp, Homo sapiens
  siRNA target sequence for PC326 (NM_018442.1,1126-1144).
gacaggtgaaccagtttta

SEQ ID NO: 34543 - DNA, 19 bp, Homo sapiens
  siRNA target sequence for PC326 (NM_018442.1,1130-1148).
ggtgaaccagttttaagtt

SEQ ID NO: 34544 - DNA, 19 bp, Homo sapiens
  siRNA target sequence for PC326 (NM_018442.1,1205-1223).
gaatggagcagtatagcat

SEQ ID NO: 34545 - DNA, 19 bp, Homo sapiens
  siRNA target sequence for PC326 (NM_018442.1,1210-1228).
gagcagtatagcatcaagt

SEQ ID NO: 34546 - DNA, 19 bp, Homo sapiens
  siRNA target sequence for PC326 (NM_018442.1,1213-1231).
cagtatagcatcaagttct

SEQ ID NO: 34547 - DNA, 19 bp, Homo sapiens
  siRNA target sequence for PC326 (NM_018442.1,1236-1254).
gaattgggagccattgcaa

SEQ ID NO: 34548 - DNA, 19 bp, Homo sapiens
  siRNA target sequence for PC326 (NM_018442.1,1242-1260).
ggagccattgcaaatctga

SEQ ID NO: 34549 - DNA, 19 bp, Homo sapiens
  siRNA target sequence for PC326 (NM_018442.1,1394-1412).
gagaaccatatcaatataa

SEQ ID NO: 34550 - DNA, 19 bp, Homo sapiens
  siRNA target sequence for PC326 (NM_018442.1,1396-1414).
gaaccatatcaatataaca

SEQ ID NO: 34551 - DNA, 19 bp, Homo sapiens
  siRNA target sequence for PC326 (NM_018442.1,1399-1417).
ccatatcaatataacacaa

SEQ ID NO: 34552 - DNA, 19 bp, Homo sapiens
  siRNA target sequence for PC326 (NM_018442.1,1562-1580).
gagagtgctaccaatgaaa

SEQ ID NO: 34553 - DNA, 19 bp, Homo sapiens
  siRNA target sequence for PC326 (NM_018442.1,1623-1641).
ggccttcagctcatgaaga

SEQ ID NO: 34554 - DNA, 19 bp, Homo sapiens
  siRNA target sequence for PC326 (NM_018442.1,1624-1642).
gccttcagctcatgaagaa

SEQ ID NO: 34555 - DNA, 19 bp, Homo sapiens
  siRNA target sequence for PC326 (NM_018442.1,1702-1720).
gatcccaggtgcaaggtat

SEQ ID NO: 34556 - DNA, 19 bp, Homo sapiens
  siRNA target sequence for PC326 (NM_018442.1,1746-1764).
ctgctgttgcccgtattca

SEQ ID NO: 34557 - DNA, 19 bp, Homo sapiens
  siRNA target sequence for PC326 (NM_018442.1,1757-1775).
cgtattcaggagttcttca

SEQ ID NO: 34558 - DNA, 19 bp, Homo sapiens
  siRNA target sequence for PC326 (NM_018442.1,1810-1828).
ggatactttgaacattaga

SEQ ID NO: 34559 - DNA, 19 bp, Homo sapiens
  siRNA target sequence for PC326 (NM_018442.1,1811-1829).
gatactttgaacattagaa

SEQ ID NO: 34560 - DNA, 19 bp, Homo sapiens
  siRNA target sequence for PC326 (NM_018442.1,1827-1845).
gaaggccgctagtaaaaat

SEQ ID NO: 34561 - DNA, 19 bp, Homo sapiens
  siRNA target sequence for PC326 (NM_018442.1,1830-1848).
ggccgctagtaaaaatggt

SEQ ID NO: 34562 - DNA, 19 bp, Homo sapiens
  siRNA target sequence for PC326 (NM_018442.1,1831-1849).
gccgctagtaaaaatggtt

SEQ ID NO: 34563 - DNA, 19 bp, Homo sapiens
  siRNA target sequence for PC326 (NM_018442.1,1863-1881).
gcaactccaggacaatgat

SEQ ID NO: 34564 - DNA, 19 bp, Homo sapiens
  siRNA target sequence for PC326 (NM_018442.1,1897-1915).
ctggggtgctaactttgta

SEQ ID NO: 34565 - DNA, 19 bp, Homo sapiens
  siRNA target sequence for PC326 (NM_018442.1,1899-1917).
ggggtgctaactttgtaat

SEQ ID NO: 34566 - DNA, 19 bp, Homo sapiens
  siRNA target sequence for PC326 (NM_018442.1,1901-1919).
ggtgctaactttgtaatga

SEQ ID NO: 34567 - DNA, 19 bp, Homo sapiens
  siRNA target sequence for PC326 (NM_018442.1,1958-1976).
cacactgctgagcatttga

SEQ ID NO: 34568 - DNA, 19 bp, Homo sapiens
  siRNA target sequence for PC326 (NM_018442.1,1978-1996).
gcttctggaagctgataat

SEQ ID NO: 34569 - DNA, 19 bp, Homo sapiens
  siRNA target sequence for PC326 (NM_018442.1,1991-2009).
gataatcatgtggtaaact

SEQ ID NO: 34570 - DNA, 19 bp, Homo sapiens
  siRNA target sequence for PC326 (NM_018442.1,2043-2061).
cctcatctggcatagatta

SEQ ID NO: 34571 - DNA, 19 bp, Homo sapiens
  siRNA target sequence for PC326 (NM_018442.1,2049-2067).
ctggcatagattatgacat

SEQ ID NO: 34572 - DNA, 19 bp, Homo sapiens
  siRNA target sequence for PC326 (NM_018442.1,2057-2075).
gattatgacataaagatct

SEQ ID NO: 34573 - DNA, 19 bp, Homo sapiens
  siRNA target sequence for PC326 (NM_018442.1,2097-2115).
ggatttttaaccgaaaact

SEQ ID NO: 34574 - DNA, 19 bp, Homo sapiens
  siRNA target sequence for PC326 (NM_018442.1,2098-2116).
gatttttaaccgaaaactt

SEQ ID NO: 34575 - DNA, 19 bp, Homo sapiens
  siRNA target sequence for PCBP3 (NM_020528.1,412-430).
ccacagacgccatcttcaa

SEQ ID NO: 34576 - DNA, 19 bp, Homo sapiens
  siRNA target sequence for PCBP3 (NM_020528.1,438-456).
gccatgatcgcatacaagt

SEQ ID NO: 34577 - DNA, 19 bp, Homo sapiens
  siRNA target sequence for PCBP3 (NM_020528.1,439-457).
ccatgatcgcatacaagtt

SEQ ID NO: 34578 - DNA, 19 bp, Homo sapiens
  siRNA target sequence for PCBP3 (NM_020528.1,792-810).
ggtggtcaggcctacacaa

SEQ ID NO: 34579 - DNA, 19 bp, Homo sapiens
  siRNA target sequence for PCBP3 (NM_020528.1,793-811).
gtggtcaggcctacacaat

SEQ ID NO: 34580 - DNA, 19 bp, Homo sapiens
  siRNA target sequence for PCBP3 (NM_020528.1,910-928).
ccgctttccccggagaaaa

SEQ ID NO: 34581 - DNA, 19 bp, Homo sapiens
  siRNA target sequence for PCBP3 (NM_020528.1,913-931).
ctttccccggagaaaagct

SEQ ID NO: 34582 - DNA, 19 bp, Homo sapiens
  siRNA target sequence for PCBP3 (NM_020528.1,1019-1037).
caccattcccaatgatcta

SEQ ID NO: 34583 - DNA, 19 bp, Homo sapiens
  siRNA target sequence for PCBP3 (NM_020528.1,1021-1039).
ccattcccaatgatctaat

SEQ ID NO: 34584 - DNA, 19 bp, Homo sapiens
  siRNA target sequence for PCBP3 (NM_020528.1,1022-1040).
cattcccaatgatctaata

SEQ ID NO: 34585 - DNA, 19 bp, Homo sapiens
  siRNA target sequence for PCBP3 (NM_020528.1,1032-1050).
gatctaataggctgcataa

SEQ ID NO: 34586 - DNA, 19 bp, Homo sapiens
  siRNA target sequence for PCBP3 (NM_020528.1,1054-1072).
gacgccaagggaccaaaat

SEQ ID NO: 34587 - DNA, 19 bp, Homo sapiens
  siRNA target sequence for PCBP3 (NM_020528.1,1067-1085).
caaaatcaatgaaattcga

SEQ ID NO: 34588 - DNA, 19 bp, Homo sapiens
  siRNA target sequence for PCDH1 (NM_002587.3,287-305).
ccactcgggtagtgtacaa

SEQ ID NO: 34589 - DNA, 19 bp, Homo sapiens
  siRNA target sequence for PCDH1 (NM_002587.3,346-364).
ctcgcagccgactatggtt

SEQ ID NO: 34590 - DNA, 19 bp, Homo sapiens
  siRNA target sequence for PCDH1 (NM_002587.3,348-366).
cgcagccgactatggtttt

SEQ ID NO: 34591 - DNA, 19 bp, Homo sapiens
  siRNA target sequence for PCDH1 (NM_002587.3,425-443).
gcaagacaggtgacatttt

SEQ ID NO: 34592 - DNA, 19 bp, Homo sapiens
  siRNA target sequence for PCDH1 (NM_002587.3,578-596).
gccagatagaagtacaaga

SEQ ID NO: 34593 - DNA, 19 bp, Homo sapiens
  siRNA target sequence for PCDH1 (NM_002587.3,802-820).
caaccacagctcattgtga

SEQ ID NO: 34594 - DNA, 19 bp, Homo sapiens
  siRNA target sequence for PCDH1 (NM_002587.3,969-987).
ctatgaggccgaactatct

SEQ ID NO: 34595 - DNA, 19 bp, Homo sapiens
  siRNA target sequence for PCDH1 (NM_002587.3,975-993).
ggccgaactatctgagaat

SEQ ID NO: 34596 - DNA, 19 bp, Homo sapiens
  siRNA target sequence for PCDH1 (NM_002587.3,976-994).
gccgaactatctgagaata

SEQ ID NO: 34597 - DNA, 19 bp, Homo sapiens
  siRNA target sequence for PCDH1 (NM_002587.3,1046-1064).
gtgccaatgcagaaatcga

SEQ ID NO: 34598 - DNA, 19 bp, Homo sapiens
  siRNA target sequence for PCDH1 (NM_002587.3,1048-1066).
gccaatgcagaaatcgaat

SEQ ID NO: 34599 - DNA, 19 bp, Homo sapiens
  siRNA target sequence for PCDH1 (NM_002587.3,1054-1072).
gcagaaatcgaatacacat

SEQ ID NO: 34600 - DNA, 19 bp, Homo sapiens
  siRNA target sequence for PCDH1 (NM_002587.3,1119-1137).
gaacactggacttatcact

SEQ ID NO: 34601 - DNA, 19 bp, Homo sapiens
  siRNA target sequence for PCDH1 (NM_002587.3,1242-1260).
gaccgtgaaggacatgaat

SEQ ID NO: 34602 - DNA, 19 bp, Homo sapiens
  siRNA target sequence for PCDH1 (NM_002587.3,1295-1313).
ggctagtgactcatcaaga

SEQ ID NO: 34603 - DNA, 19 bp, Homo sapiens
  siRNA target sequence for PCDH1 (NM_002587.3,1312-1330).
gatgggatggctaacatct

SEQ ID NO: 34604 - DNA, 19 bp, Homo sapiens
  siRNA target sequence for PCDH1 (NM_002587.3,1496-1514).
ctaccaccccgctagacta

SEQ ID NO: 34605 - DNA, 19 bp, Homo sapiens
  siRNA target sequence for PCDH1 (NM_002587.3,1837-1855).
cagcgggagagctatgagt

SEQ ID NO: 34606 - DNA, 19 bp, Homo sapiens
  siRNA target sequence for PCDH1 (NM_002587.3,2010-2028).
gggcatggtgactgtcatt

SEQ ID NO: 34607 - DNA, 19 bp, Homo sapiens
  siRNA target sequence for PCDH1 (NM_002587.3,2073-2091).
gcaggacaacggtgacttt

SEQ ID NO: 34608 - DNA, 19 bp, Homo sapiens
  siRNA target sequence for PCDH1 (NM_002587.3,2077-2095).
gacaacggtgactttgtta

SEQ ID NO: 34609 - DNA, 19 bp, Homo sapiens
  siRNA target sequence for PCDH1 (NM_002587.3,2245-2263).
gacaacgcaccctatatca

SEQ ID NO: 34610 - DNA, 19 bp, Homo sapiens
  siRNA target sequence for PCDH1 (NM_002587.3,2247-2265).
caacgcaccctatatcact

SEQ ID NO: 34611 - DNA, 19 bp, Homo sapiens
  siRNA target sequence for PCDH1 (NM_002587.3,2534-2552).
ccttggtccatctttatgt

SEQ ID NO: 34612 - DNA, 19 bp, Homo sapiens
  siRNA target sequence for PCDH1 (NM_002587.3,2538-2556).
ggtccatctttatgtcaat

SEQ ID NO: 34613 - DNA, 19 bp, Homo sapiens
  siRNA target sequence for PCDH1 (NM_002587.3,2607-2625).
ggacacgccgctggatatt

SEQ ID NO: 34614 - DNA, 19 bp, Homo sapiens
  siRNA target sequence for PCDH1 (NM_002587.3,2613-2631).
gccgctggatattgacatt

SEQ ID NO: 34615 - DNA, 19 bp, Homo sapiens
  siRNA target sequence for PCDH1 (NM_002587.3,2662-2680).
cagcgtggcaacattctct

SEQ ID NO: 34616 - DNA, 19 bp, Homo sapiens
  siRNA target sequence for PCDH1 (NM_002587.3,3016-3034).
cgccactatcgctctaact

SEQ ID NO: 34617 - DNA, 19 bp, Homo sapiens
  siRNA target sequence for PCDH1 (NM_032420.2,3365-3383).
ccctgcctgaggatcacta

SEQ ID NO: 34618 - DNA, 19 bp, Homo sapiens
  siRNA target sequence for PCDH1 (NM_032420.2,3366-3384).
cctgcctgaggatcactat

SEQ ID NO: 34619 - DNA, 19 bp, Homo sapiens
  siRNA target sequence for PCDH1 (NM_032420.2,3643-3661).
gaagaccggaacaccaaaa

SEQ ID NO: 34620 - DNA, 19 bp, Homo sapiens
  siRNA target sequence for PCDH1 (NM_032420.2,3806-3824).
cggccaagcgcgagatcta

SEQ ID NO: 34621 - DNA, 19 bp, Homo sapiens
  siRNA target sequence for PCNA (NM_002592.2,312-330).
gaggcctgctgggatatta

SEQ ID NO: 34622 - DNA, 19 bp, Homo sapiens
  siRNA target sequence for PCNA (NM_002592.2,331-349).
gctccagcggtgtaaacct

SEQ ID NO: 34623 - DNA, 19 bp, Homo sapiens
  siRNA target sequence for PCNA (NM_002592.2,485-503).
cggcaatgaagatatcatt

SEQ ID NO: 34624 - DNA, 19 bp, Homo sapiens
  siRNA target sequence for PCNA (NM_002592.2,505-523).
cactaagggccgaagataa

SEQ ID NO: 34625 - DNA, 19 bp, Homo sapiens
  siRNA target sequence for PCNA (NM_002592.2,528-546).
gataccttggcgctagtat

SEQ ID NO: 34626 - DNA, 19 bp, Homo sapiens
  siRNA target sequence for PCNA (NM_002592.2,532-550).
ccttggcgctagtatttga

SEQ ID NO: 34627 - DNA, 19 bp, Homo sapiens
  siRNA target sequence for PCNA (NM_002592.2,593-611).
gatggatttagatgttgaa

SEQ ID NO: 34628 - DNA, 19 bp, Homo sapiens
  siRNA target sequence for PCNA (NM_002592.2,632-650).
ggagtacagctgtgtagta

SEQ ID NO: 34629 - DNA, 19 bp, Homo sapiens
  siRNA target sequence for PCNA (NM_002592.2,633-651).
gagtacagctgtgtagtaa

SEQ ID NO: 34630 - DNA, 19 bp, Homo sapiens
  siRNA target sequence for PCNA (NM_002592.2,663-681).
ggtgaatttgcacgtatat

SEQ ID NO: 34631 - DNA, 19 bp, Homo sapiens
  siRNA target sequence for PCNA (NM_002592.2,683-701).
ccgagatctcagccatatt

SEQ ID NO: 34632 - DNA, 19 bp, Homo sapiens
  siRNA target sequence for PCNA (NM_002592.2,726-744).
gcaaaagacggagtgaaat

SEQ ID NO: 34633 - DNA, 19 bp, Homo sapiens
  siRNA target sequence for PCNA (NM_002592.2,727-745).
caaaagacggagtgaaatt

SEQ ID NO: 34634 - DNA, 19 bp, Homo sapiens
  siRNA target sequence for PCNA (NM_002592.2,907-925).
caacggtgacactcagtat

SEQ ID NO: 34635 - DNA, 19 bp, Homo sapiens
  siRNA target sequence for PCNA (NM_002592.2,920-938).
cagtatgtctgcagatgta

SEQ ID NO: 34636 - DNA, 19 bp, Homo sapiens
  siRNA target sequence for PCNA (NM_002592.2,931-949).
cagatgtaccccttgttgt

SEQ ID NO: 34637 - DNA, 19 bp, Homo sapiens
  siRNA target sequence for PCNA (NM_002592.2,939-957).
ccccttgttgtagagtata

SEQ ID NO: 34638 - DNA, 19 bp, Homo sapiens
  siRNA target sequence for PCNA (NM_002592.2,940-958).
cccttgttgtagagtataa

SEQ ID NO: 34639 - DNA, 19 bp, Homo sapiens
  siRNA target sequence for PCNA (NM_002592.2,963-981).
gcggatatgggacacttaa

SEQ ID NO: 34640 - DNA, 19 bp, Homo sapiens
  siRNA target sequence for PCNA (NM_002592.2,964-982).
cggatatgggacacttaaa

SEQ ID NO: 34641 - DNA, 19 bp, Homo sapiens
  siRNA target sequence for PCNA (NM_002592.2,965-983).
ggatatgggacacttaaaa

SEQ ID NO: 34642 - DNA, 19 bp, Homo sapiens
  siRNA target sequence for PDCD2 (NM_002598.2,603-621).
cagatcatctggaccatat

SEQ ID NO: 34643 - DNA, 19 bp, Homo sapiens
  siRNA target sequence for PDCD2 (NM_002598.2,605-623).
gatcatctggaccatataa

SEQ ID NO: 34644 - DNA, 19 bp, Homo sapiens
  siRNA target sequence for PDCD2 (NM_002598.2,760-778).
ggattccatggcaaaacat

SEQ ID NO: 34645 - DNA, 19 bp, Homo sapiens
  siRNA target sequence for PDCD2 (NM_002598.2,830-848).
gaaccagaacagattctta

SEQ ID NO: 34646 - DNA, 19 bp, Homo sapiens
  siRNA target sequence for PDCD2 (NM_002598.2,930-948).
gtgccaagagaatattgga

SEQ ID NO: 34647 - DNA, 19 bp, Homo sapiens
  siRNA target sequence for PDCD2 (NM_002598.2,1057-1075).
gggtactggctatacagaa

SEQ ID NO: 34648 - DNA, 19 bp, Homo sapiens
  siRNA target sequence for PDCD2 (NM_002598.2,1065-1083).
gctatacagaagaatttgt

SEQ ID NO: 34649 - DNA, 19 bp, Homo sapiens
  siRNA target sequence for PDCD2 (NM_002598.2,1090-1108).
gcaggatgtaacagataca

SEQ ID NO: 34650 - DNA, 19 bp, Homo sapiens
  siRNA target sequence for PHF10 (NM_018288.2,251-269).
gggtgtgacctcctttaaa

SEQ ID NO: 34651 - DNA, 19 bp, Homo sapiens
  siRNA target sequence for PHF10 (NM_018288.2,304-322).
ctcacaaggagaaactcta

SEQ ID NO: 34652 - DNA, 19 bp, Homo sapiens
  siRNA target sequence for PHF10 (NM_018288.2,356-374).
gtgcactctaggcttaaca

SEQ ID NO: 34653 - DNA, 19 bp, Homo sapiens
  siRNA target sequence for PHF10 (NM_018288.2,376-394).
cattgcgcagtgatgaagt

SEQ ID NO: 34654 - DNA, 19 bp, Homo sapiens
  siRNA target sequence for PHF10 (NM_018288.2,380-398).
gcgcagtgatgaagtgatt

SEQ ID NO: 34655 - DNA, 19 bp, Homo sapiens
  siRNA target sequence for PHF10 (NM_018288.2,383-401).
cagtgatgaagtgattgat

SEQ ID NO: 34656 - DNA, 19 bp, Homo sapiens
  siRNA target sequence for PHF10 (NM_018288.2,390-408).
gaagtgattgatttaatga

SEQ ID NO: 34657 - DNA, 19 bp, Homo sapiens
  siRNA target sequence for PHF10 (NM_018288.2,393-411).
gtgattgatttaatgataa

SEQ ID NO: 34658 - DNA, 19 bp, Homo sapiens
  siRNA target sequence for PHF10 (NM_018288.2,480-498).
gaccattataaagagtatt

SEQ ID NO: 34659 - DNA, 19 bp, Homo sapiens
  siRNA target sequence for PHF10 (NM_018288.2,536-554).
cagtaaagtgcctgagtat

SEQ ID NO: 34660 - DNA, 19 bp, Homo sapiens
  siRNA target sequence for PHF10 (NM_018288.2,543-561).
gtgcctgagtatattaaga

SEQ ID NO: 34661 - DNA, 19 bp, Homo sapiens
  siRNA target sequence for PHF10 (NM_018288.2,545-563).
gcctgagtatattaagaaa

SEQ ID NO: 34662 - DNA, 19 bp, Homo sapiens
  siRNA target sequence for PHF10 (NM_018288.2,696-714).
cgaacaaaggtcagttctt

SEQ ID NO: 34663 - DNA, 19 bp, Homo sapiens
  siRNA target sequence for PHF10 (NM_018288.2,697-715).
gaacaaaggtcagttctta

SEQ ID NO: 34664 - DNA, 19 bp, Homo sapiens
  siRNA target sequence for PHF10 (NM_018288.2,734-752).
cggacagttccaggaatat

SEQ ID NO: 34665 - DNA, 19 bp, Homo sapiens
  siRNA target sequence for PHF10 (NM_018288.2,735-753).
ggacagttccaggaatatt

SEQ ID NO: 34666 - DNA, 19 bp, Homo sapiens
  siRNA target sequence for PHF10 (NM_018288.2,777-795).
ctgcggtatctgccattaa

SEQ ID NO: 34667 - DNA, 19 bp, Homo sapiens
  siRNA target sequence for PHF10 (NM_018288.2,923-941).
ctctggcaatgtatctgaa

SEQ ID NO: 34668 - DNA, 19 bp, Homo sapiens
  siRNA target sequence for PHF10 (NM_018288.2,1070-1088).
gccaaaggtcattccaaat

SEQ ID NO: 34669 - DNA, 19 bp, Homo sapiens
  siRNA target sequence for PHF10 (NM_018288.2,1076-1094).
ggtcattccaaatgctata

SEQ ID NO: 34670 - DNA, 19 bp, Homo sapiens
  siRNA target sequence for PHF10 (NM_018288.2,1077-1095).
gtcattccaaatgctatat

SEQ ID NO: 34671 - DNA, 19 bp, Homo sapiens
  siRNA target sequence for PHF10 (NM_018288.2,1079-1097).
cattccaaatgctatatgt

SEQ ID NO: 34672 - DNA, 19 bp, Homo sapiens
  siRNA target sequence for PHF10 (NM_018288.2,1090-1108).
ctatatgtggaatttgtct

SEQ ID NO: 34673 - DNA, 19 bp, Homo sapiens
  siRNA target sequence for PHF10 (NM_018288.2,1140-1158).
gctgaatcacttatacact

SEQ ID NO: 34674 - DNA, 19 bp, Homo sapiens
  siRNA target sequence for PHF10 (NM_018288.2,1189-1207).
cttgcctggatatgacaat

SEQ ID NO: 34675 - DNA, 19 bp, Homo sapiens
  siRNA target sequence for PHF10 (NM_018288.2,1212-1230).
cttgtttctatgattaaga

SEQ ID NO: 34676 - DNA, 19 bp, Homo sapiens
  siRNA target sequence for PHF10 (NM_018288.2,1240-1258).
ggcagtgtatggaatgtaa

SEQ ID NO: 34677 - DNA, 19 bp, Homo sapiens
  siRNA target sequence for PHF10 (NM_018288.2,1362-1380).
ccatcaggtcgctggattt

SEQ ID NO: 34678 - DNA, 19 bp, Homo sapiens
  siRNA target sequence for PHF10 (NM_018288.2,1366-1384).
caggtcgctggatttgtga

SEQ ID NO: 34679 - DNA, 19 bp, Homo sapiens
  siRNA target sequence for PHF11 (NM_016119.1,154-172).
gccccaaagatgtcgaata

SEQ ID NO: 34680 - DNA, 19 bp, Homo sapiens
  siRNA target sequence for PHF11 (NM_016119.1,155-173).
ccccaaagatgtcgaatat

SEQ ID NO: 34681 - DNA, 19 bp, Homo sapiens
  siRNA target sequence for PHF11 (NM_016119.1,156-174).
cccaaagatgtcgaatata

SEQ ID NO: 34682 - DNA, 19 bp, Homo sapiens
  siRNA target sequence for PHF11 (NM_016119.1,157-175).
ccaaagatgtcgaatataa

SEQ ID NO: 34683 - DNA, 19 bp, Homo sapiens
  siRNA target sequence for PHF11 (NM_016119.1,158-176).
caaagatgtcgaatataat

SEQ ID NO: 34684 - DNA, 19 bp, Homo sapiens
  siRNA target sequence for PHF11 (NM_016119.1,216-234).
gagaattgtttgctgtatt

SEQ ID NO: 34685 - DNA, 19 bp, Homo sapiens
  siRNA target sequence for PHF11 (NM_016119.1,257-275).
ggatcaggatccacttaat

SEQ ID NO: 34686 - DNA, 19 bp, Homo sapiens
  siRNA target sequence for PHF11 (NM_016119.1,267-285).
ccacttaatcctgatagaa

SEQ ID NO: 34687 - DNA, 19 bp, Homo sapiens
  siRNA target sequence for PHF11 (NM_016119.1,363-381).
gccaccgtgggatgtgatt

SEQ ID NO: 34688 - DNA, 19 bp, Homo sapiens
  siRNA target sequence for PHF11 (NM_016119.1,364-382).
ccaccgtgggatgtgattt

SEQ ID NO: 34689 - DNA, 19 bp, Homo sapiens
  siRNA target sequence for PHF11 (NM_016119.1,365-383).
caccgtgggatgtgattta

SEQ ID NO: 34690 - DNA, 19 bp, Homo sapiens
  siRNA target sequence for PHF11 (NM_016119.1,367-385).
ccgtgggatgtgatttaaa

SEQ ID NO: 34691 - DNA, 19 bp, Homo sapiens
  siRNA target sequence for PHF11 (NM_016119.1,447-465).
gatggagttcgaggaattt

SEQ ID NO: 34692 - DNA, 19 bp, Homo sapiens
  siRNA target sequence for PHF11 (NM_016119.1,478-496).
gccagcaacatgctcaatt

SEQ ID NO: 34693 - DNA, 19 bp, Homo sapiens
  siRNA target sequence for PHF11 (NM_016119.1,497-515).
cccgatcatcgctcaaagt

SEQ ID NO: 34694 - DNA, 19 bp, Homo sapiens
  siRNA target sequence for PHF11 (NM_016119.1,506-524).
cgctcaaagtgctaaattt

SEQ ID NO: 34695 - DNA, 19 bp, Homo sapiens
  siRNA target sequence for PHF11 (NM_016119.1,560-578).
cctctcaggcaatcatgta

SEQ ID NO: 34696 - DNA, 19 bp, Homo sapiens
  siRNA target sequence for PHF11 (NM_016119.1,581-599).
gccacccgaaacaatgaaa

SEQ ID NO: 34697 - DNA, 19 bp, Homo sapiens
  siRNA target sequence for PHF11 (NM_016119.1,646-664).
cagatgcaactgtgaaagt

SEQ ID NO: 34698 - DNA, 19 bp, Homo sapiens
  siRNA target sequence for PHF11 (NM_016119.1,652-670).
caactgtgaaagttccttt

SEQ ID NO: 34699 - DNA, 19 bp, Homo sapiens
  siRNA target sequence for PHF12 (NM_020889.1,837-855).
gcactgttcgccgaaagaa

SEQ ID NO: 34700 - DNA, 19 bp, Homo sapiens
  siRNA target sequence for PHF12 (NM_020889.1,930-948).
gcagtgacactgacttgtt

SEQ ID NO: 34701 - DNA, 19 bp, Homo sapiens
  siRNA target sequence for PHF12 (NM_020889.1,1189-1207).
gcggaaccccacccaattt

SEQ ID NO: 34702 - DNA, 19 bp, Homo sapiens
  siRNA target sequence for PHF12 (NM_020889.1,1191-1209).
ggaaccccacccaatttca

SEQ ID NO: 34703 - DNA, 19 bp, Homo sapiens
  siRNA target sequence for PHF12 (NM_020889.1,1214-1232).
cccaatgaactgacttgta

SEQ ID NO: 34704 - DNA, 19 bp, Homo sapiens
  siRNA target sequence for PHF12 (NM_020889.1,1334-1352).
cccttacccgtcaaagtct

SEQ ID NO: 34705 - DNA, 19 bp, Homo sapiens
  siRNA target sequence for PHF12 (NM_020889.1,1349-1367).
gtctgcttcacgtgtaaca

SEQ ID NO: 34706 - DNA, 19 bp, Homo sapiens
  siRNA target sequence for PHF12 (NM_020889.1,1407-1425).
gccctctcctgtttcacat

SEQ ID NO: 34707 - DNA, 19 bp, Homo sapiens
  siRNA target sequence for PHF12 (NM_020889.1,1470-1488).
ggatgtgtccgaatcacat

SEQ ID NO: 34708 - DNA, 19 bp, Homo sapiens
  siRNA target sequence for PHF12 (NM_020889.1,1479-1497).
cgaatcacatcgaacatgt

SEQ ID NO: 34709 - DNA, 19 bp, Homo sapiens
  siRNA target sequence for PHF12 (NM_020889.1,1536-1554).
gccaggtgtttgatcgttt

SEQ ID NO: 34710 - DNA, 19 bp, Homo sapiens
  siRNA target sequence for PHF12 (NM_020889.1,1569-1587).
cgcagcatgtcgtcaaagt

SEQ ID NO: 34711 - DNA, 19 bp, Homo sapiens
  siRNA target sequence for PHF12 (NM_020889.1,1634-1652).
gtgctccagtcggtcaaaa

SEQ ID NO: 34712 - DNA, 19 bp, Homo sapiens
  siRNA target sequence for PHF12 (NM_020889.1,1636-1654).
gctccagtcggtcaaaaga

SEQ ID NO: 34713 - DNA, 19 bp, Homo sapiens
  siRNA target sequence for PHF12 (NM_020889.1,1637-1655).
ctccagtcggtcaaaagaa

SEQ ID NO: 34714 - DNA, 19 bp, Homo sapiens
  siRNA target sequence for PHF12 (NM_020889.1,1639-1657).
ccagtcggtcaaaagaaga

SEQ ID NO: 34715 - DNA, 19 bp, Homo sapiens
  siRNA target sequence for PHF12 (NM_020889.1,1640-1658).
cagtcggtcaaaagaagaa

SEQ ID NO: 34716 - DNA, 19 bp, Homo sapiens
  siRNA target sequence for PHF12 (NM_020889.1,1696-1714).
gtttccaccccctctcatt

SEQ ID NO: 34717 - DNA, 19 bp, Homo sapiens
  siRNA target sequence for PHF12 (NM_020889.1,1844-1862).
gcgctccagtgcagcatat

SEQ ID NO: 34718 - DNA, 19 bp, Homo sapiens
  siRNA target sequence for PHF12 (NM_020889.1,1845-1863).
cgctccagtgcagcatatt

SEQ ID NO: 34719 - DNA, 19 bp, Homo sapiens
  siRNA target sequence for PHF12 (NM_020889.1,1912-1930).
gacagagaaggctgatatt

SEQ ID NO: 34720 - DNA, 19 bp, Homo sapiens
  siRNA target sequence for PHF12 (NM_020889.1,2027-2045).
gggattagcacccagaatt

SEQ ID NO: 34721 - DNA, 19 bp, Homo sapiens
  siRNA target sequence for PHF12 (NM_020889.1,2087-2105).
gacatcggctgcagttctt

SEQ ID NO: 34722 - DNA, 19 bp, Homo sapiens
  siRNA target sequence for PHF12 (NM_020889.1,2098-2116).
cagttcttgtgcggaaaaa

SEQ ID NO: 34723 - DNA, 19 bp, Homo sapiens
  siRNA target sequence for PHF12 (NM_020889.1,2103-2121).
cttgtgcggaaaaatccaa

SEQ ID NO: 34724 - DNA, 19 bp, Homo sapiens
  siRNA target sequence for PHF12 (NM_020889.1,2108-2126).
gcggaaaaatccaagaaaa

SEQ ID NO: 34725 - DNA, 19 bp, Homo sapiens
  siRNA target sequence for PHF12 (NM_020889.1,2158-2176).
cacagaggtgaaagctaat

SEQ ID NO: 34726 - DNA, 19 bp, Homo sapiens
  siRNA target sequence for PHF12 (NM_020889.1,2188-2206).
ctacagcagccctactgat

SEQ ID NO: 34727 - DNA, 19 bp, Homo sapiens
  siRNA target sequence for PHF12 (NM_020889.1,2317-2335).
ccacaccgtcggcatcatt

SEQ ID NO: 34728 - DNA, 19 bp, Homo sapiens
  siRNA target sequence for PHF12 (NM_020889.1,2322-2340).
ccgtcggcatcattgtgaa

SEQ ID NO: 34729 - DNA, 19 bp, Homo sapiens
  siRNA target sequence for PHF12 (NM_020889.1,2371-2389).
cccccagaggagtttggtt

SEQ ID NO: 34730 - DNA, 19 bp, Homo sapiens
  siRNA target sequence for PHF12 (NM_020889.1,2460-2478).
gaaagactgtccaatcaca

SEQ ID NO: 34731 - DNA, 19 bp, Homo sapiens
  siRNA target sequence for PHF12 (NM_020889.1,2464-2482).
gactgtccaatcacagata

SEQ ID NO: 34732 - DNA, 19 bp, Homo sapiens
  siRNA target sequence for PHF12 (NM_020889.1,2483-2501).
ggacctccgttgacagatt

SEQ ID NO: 34733 - DNA, 19 bp, Homo sapiens
  siRNA target sequence for PHF12 (NM_020889.1,2486-2504).
cctccgttgacagattcaa

SEQ ID NO: 34734 - DNA, 19 bp, Homo sapiens
  siRNA target sequence for PHF12 (NM_020889.1,2580-2598).
caacagccaaccaacgatt

SEQ ID NO: 34735 - DNA, 19 bp, Homo sapiens
  siRNA target sequence for PHF13 (NM_153812.1,450-468).
ggaccgtggaagacttcaa

SEQ ID NO: 34736 - DNA, 19 bp, Homo sapiens
  siRNA target sequence for PHF13 (NM_153812.1,559-577).
cagcactgctggtaccatt

SEQ ID NO: 34737 - DNA, 19 bp, Homo sapiens
  siRNA target sequence for PHF13 (NM_153812.1,589-607).
ctgggacgcgggtttctca

SEQ ID NO: 34738 - DNA, 19 bp, Homo sapiens
  siRNA target sequence for PHF13 (NM_153812.1,635-653).
gtctctgaccgctgcttta

SEQ ID NO: 34739 - DNA, 19 bp, Homo sapiens
  siRNA target sequence for PHF13 (NM_153812.1,680-698).
cgagccaagcccagtaact

SEQ ID NO: 34740 - DNA, 19 bp, Homo sapiens
  siRNA target sequence for PHF13 (NM_153812.1,843-861).
gtcccaccttgcaggatat

SEQ ID NO: 34741 - DNA, 19 bp, Homo sapiens
  siRNA target sequence for PHF13 (NM_153812.1,938-956).
cctgatcaggtcaaagaaa

SEQ ID NO: 34742 - DNA, 19 bp, Homo sapiens
  siRNA target sequence for PHF13 (NM_153812.1,1114-1132).
ccccatgatcgagtgtaat

SEQ ID NO: 34743 - DNA, 19 bp, Homo sapiens
  siRNA target sequence for PHF13 (NM_153812.1,1116-1134).
ccatgatcgagtgtaatga

SEQ ID NO: 34744 - DNA, 19 bp, Homo sapiens
  siRNA target sequence for PHF13 (NM_153812.1,1163-1181).
gcgaaaatccggaaatcca

SEQ ID NO: 34745 - DNA, 19 bp, Homo sapiens
  siRNA target sequence for PHF13 (NM_153812.1,1164-1182).
cgaaaatccggaaatccaa

SEQ ID NO: 34746 - DNA, 19 bp, Homo sapiens
  siRNA target sequence for PHF13 (NM_153812.1,1165-1183).
gaaaatccggaaatccaat

SEQ ID NO: 34747 - DNA, 19 bp, Homo sapiens
  siRNA target sequence for PHF13 (NM_153812.1,1184-1202).
gttccagaagtgtttgtct

SEQ ID NO: 34748 - DNA, 19 bp, Homo sapiens
  siRNA target sequence for PHF13 (NM_153812.1,1212-1230).
gccgggactccaagtttga

SEQ ID NO: 34749 - DNA, 19 bp, Homo sapiens
  siRNA target sequence for PHF13 (NM_153812.1,1214-1232).
cgggactccaagtttgaca

SEQ ID NO: 34750 - DNA, 19 bp, Homo sapiens
  siRNA target sequence for PHF14 (NM_014660.1,462-480).
gaagctcttgattatgata

SEQ ID NO: 34751 - DNA, 19 bp, Homo sapiens
  siRNA target sequence for PHF14 (NM_014660.1,481-499).
gttcagatgacagtgattt

SEQ ID NO: 34752 - DNA, 19 bp, Homo sapiens
  siRNA target sequence for PHF14 (NM_014660.1,570-588).
gaaggttcctgtagtgatt

SEQ ID NO: 34753 - DNA, 19 bp, Homo sapiens
  siRNA target sequence for PHF14 (NM_014660.1,665-683).
ggaagaagtactatcatca

SEQ ID NO: 34754 - DNA, 19 bp, Homo sapiens
  siRNA target sequence for PHF14 (NM_014660.1,669-687).
gaagtactatcatcagaaa

SEQ ID NO: 34755 - DNA, 19 bp, Homo sapiens
  siRNA target sequence for PHF14 (NM_014660.1,871-889).
caagtcctcctgctgttaa

SEQ ID NO: 34756 - DNA, 19 bp, Homo sapiens
  siRNA target sequence for PHF14 (NM_014660.1,876-894).
cctcctgctgttaacacat

SEQ ID NO: 34757 - DNA, 19 bp, Homo sapiens
  siRNA target sequence for PHF14 (NM_014660.1,973-991).
gaccacttctggattttgt

SEQ ID NO: 34758 - DNA, 19 bp, Homo sapiens
  siRNA target sequence for PHF14 (NM_014660.1,975-993).
ccacttctggattttgtgt

SEQ ID NO: 34759 - DNA, 19 bp, Homo sapiens
  siRNA target sequence for PHF14 (NM_014660.1,1050-1068).
cgacctactgtagtaaaga

SEQ ID NO: 34760 - DNA, 19 bp, Homo sapiens
  siRNA target sequence for PHF14 (NM_014660.1,1133-1151).
gggaagcgggagtgatgaa

SEQ ID NO: 34761 - DNA, 19 bp, Homo sapiens
  siRNA target sequence for PHF14 (NM_014660.1,1257-1275).
gaggaactgaccaatgata

SEQ ID NO: 34762 - DNA, 19 bp, Homo sapiens
  siRNA target sequence for PHF14 (NM_014660.1,1441-1459).
cagtccatgaaggttgtta

SEQ ID NO: 34763 - DNA, 19 bp, Homo sapiens
  siRNA target sequence for PHF14 (NM_014660.1,1471-1489).
gagagagtgactctattat

SEQ ID NO: 34764 - DNA, 19 bp, Homo sapiens
  siRNA target sequence for PHF14 (NM_014660.1,1535-1553).
ctgtaaatgtggtgtttct

SEQ ID NO: 34765 - DNA, 19 bp, Homo sapiens
  siRNA target sequence for PHF14 (NM_014660.1,1561-1579).
gtgaactgtgtcctaatca

SEQ ID NO: 34766 - DNA, 19 bp, Homo sapiens
  siRNA target sequence for PHF14 (NM_014660.1,1570-1588).
gtcctaatcaggatggaat

SEQ ID NO: 34767 - DNA, 19 bp, Homo sapiens
  siRNA target sequence for PHF14 (NM_014660.1,1609-1627).
gaagatgggttcatattgt

SEQ ID NO: 34768 - DNA, 19 bp, Homo sapiens
  siRNA target sequence for PHF14 (NM_014660.1,1670-1688).
caaattacgaccagtaaca

SEQ ID NO: 34769 - DNA, 19 bp, Homo sapiens
  siRNA target sequence for PHF14 (NM_014660.1,1687-1705).
cactaacggaaatgaacta

SEQ ID NO: 34770 - DNA, 19 bp, Homo sapiens
  siRNA target sequence for PHF14 (NM_014660.1,1689-1707).
ctaacggaaatgaactatt

SEQ ID NO: 34771 - DNA, 19 bp, Homo sapiens
  siRNA target sequence for PHF14 (NM_014660.1,1693-1711).
cggaaatgaactattccaa

SEQ ID NO: 34772 - DNA, 19 bp, Homo sapiens
  siRNA target sequence for PHF14 (NM_014660.1,1694-1712).
ggaaatgaactattccaaa

SEQ ID NO: 34773 - DNA, 19 bp, Homo sapiens
  siRNA target sequence for PHF14 (NM_014660.1,1700-1718).
gaactattccaaatatggt

SEQ ID NO: 34774 - DNA, 19 bp, Homo sapiens
  siRNA target sequence for PHF14 (NM_014660.1,1721-1739).
caaggagtgtagcttttgt

SEQ ID NO: 34775 - DNA, 19 bp, Homo sapiens
  siRNA target sequence for PHF14 (NM_014660.1,1740-1758).
gaagaccctcgctttgcta

SEQ ID NO: 34776 - DNA, 19 bp, Homo sapiens
  siRNA target sequence for PHF14 (NM_014660.1,1745-1763).
ccctcgctttgctagaact

SEQ ID NO: 34777 - DNA, 19 bp, Homo sapiens
  siRNA target sequence for PHF14 (NM_014660.1,1793-1811).
gtgcagagcctatttccat

SEQ ID NO: 34778 - DNA, 19 bp, Homo sapiens
  siRNA target sequence for PHF14 (NM_014660.1,1899-1917).
catgcagataggttagaca

SEQ ID NO: 34779 - DNA, 19 bp, Homo sapiens
  siRNA target sequence for PHF14 (NM_014660.1,1943-1961).
ggctctacagtcctattgt

SEQ ID NO: 34780 - DNA, 19 bp, Homo sapiens
  siRNA target sequence for PHF14 (NM_014660.1,1945-1963).
ctctacagtcctattgtaa

SEQ ID NO: 34781 - DNA, 19 bp, Homo sapiens
  siRNA target sequence for PHF14 (NM_014660.1,1947-1965).
ctacagtcctattgtaaaa

SEQ ID NO: 34782 - DNA, 19 bp, Homo sapiens
  siRNA target sequence for PHF14 (NM_014660.1,2081-2099).
ctgggttccaagggaaaaa

SEQ ID NO: 34783 - DNA, 19 bp, Homo sapiens
  siRNA target sequence for PHF14 (NM_014660.1,2120-2138).
cagtgcttcagctattcgt

SEQ ID NO: 34784 - DNA, 19 bp, Homo sapiens
  siRNA target sequence for PHF14 (NM_014660.1,2122-2140).
gtgcttcagctattcgtaa

SEQ ID NO: 34785 - DNA, 19 bp, Homo sapiens
  siRNA target sequence for PHF14 (NM_014660.1,2125-2143).
cttcagctattcgtaaact

SEQ ID NO: 34786 - DNA, 19 bp, Homo sapiens
  siRNA target sequence for PHF14 (NM_014660.1,2157-2175).
gaactcatggggatcagta

SEQ ID NO: 34787 - DNA, 19 bp, Homo sapiens
  siRNA target sequence for PHF14 (NM_014660.1,2162-2180).
catggggatcagtacagat

SEQ ID NO: 34788 - DNA, 19 bp, Homo sapiens
  siRNA target sequence for PHF14 (NM_014660.1,2166-2184).
gggatcagtacagatatct

SEQ ID NO: 34789 - DNA, 19 bp, Homo sapiens
  siRNA target sequence for PHF14 (NM_014660.1,2167-2185).
ggatcagtacagatatctt

SEQ ID NO: 34790 - DNA, 19 bp, Homo sapiens
  siRNA target sequence for PHF14 (NM_014660.1,2168-2186).
gatcagtacagatatcttt

SEQ ID NO: 34791 - DNA, 19 bp, Homo sapiens
  siRNA target sequence for PHF14 (NM_014660.1,2187-2205).
ccagtggacaattcagata

SEQ ID NO: 34792 - DNA, 19 bp, Homo sapiens
  siRNA target sequence for PHF14 (NM_014660.1,2193-2211).
gacaattcagatactagtt

SEQ ID NO: 34793 - DNA, 19 bp, Homo sapiens
  siRNA target sequence for PHF14 (NM_014660.1,2250-2268).
ctcactgcagattttgtga

SEQ ID NO: 34794 - DNA, 19 bp, Homo sapiens
  siRNA target sequence for PHF14 (NM_014660.1,2284-2302).
gaaatatgcgcatgattca

SEQ ID NO: 34795 - DNA, 19 bp, Homo sapiens
  siRNA target sequence for PHF14 (NM_014660.1,2392-2410).
gtgaatctttagaagaact

SEQ ID NO: 34796 - DNA, 19 bp, Homo sapiens
  siRNA target sequence for PHF14 (NM_014660.1,2457-2475).
gctttactaggcagaatca

SEQ ID NO: 34797 - DNA, 19 bp, Homo sapiens
  siRNA target sequence for PHF14 (NM_014660.1,2470-2488).
gaatcacagggcagaagtt

SEQ ID NO: 34798 - DNA, 19 bp, Homo sapiens
  siRNA target sequence for PHF14 (NM_014660.1,2544-2562).
ggaggcacacaaaagacat

SEQ ID NO: 34799 - DNA, 19 bp, Homo sapiens
  siRNA target sequence for PHF14 (NM_014660.1,2547-2565).
ggcacacaaaagacatcta

SEQ ID NO: 34800 - DNA, 19 bp, Homo sapiens
  siRNA target sequence for PHF14 (NM_014660.1,2549-2567).
cacacaaaagacatctact

SEQ ID NO: 34801 - DNA, 19 bp, Homo sapiens
  siRNA target sequence for PHF14 (NM_014660.1,2571-2589).
cctgcagtactttatagtt

SEQ ID NO: 34802 - DNA, 19 bp, Homo sapiens
  siRNA target sequence for PHF14 (NM_014660.1,2618-2636).
gcatcttcttttattgtgt

SEQ ID NO: 34803 - DNA, 19 bp, Homo sapiens
  siRNA target sequence for PHF14 (NM_014660.1,2633-2651).
gtgtgatacctgtaaacta

SEQ ID NO: 34804 - DNA, 19 bp, Homo sapiens
  siRNA target sequence for PHF14 (NM_014660.1,2719-2737).
ggcagtgctcggaatgtga

SEQ ID NO: 34805 - DNA, 19 bp, Homo sapiens
  siRNA target sequence for PHF14 (NM_014660.1,2763-2781).
gcagatatggccatggaaa

SEQ ID NO: 34806 - DNA, 19 bp, Homo sapiens
  siRNA target sequence for PHF14 (NM_014660.1,2783-2801).
cctaccagatggaaccaaa

SEQ ID NO: 34807 - DNA, 19 bp, Homo sapiens
  siRNA target sequence for PHF14 (NM_014660.1,2787-2805).
ccagatggaaccaaacgat

SEQ ID NO: 34808 - DNA, 19 bp, Homo sapiens
  siRNA target sequence for PHF14 (NM_014660.1,2803-2821).
gatcaaggaggcagattaa

SEQ ID NO: 34809 - DNA, 19 bp, Homo sapiens
  siRNA target sequence for PHF14 (NM_014660.1,2864-2882).
caagaagattccgataaga

SEQ ID NO: 34810 - DNA, 19 bp, Homo sapiens
  siRNA target sequence for PHF14 (NM_014660.1,2993-3011).
caaggctgaagatttaaga

SEQ ID NO: 34811 - DNA, 19 bp, Homo sapiens
  siRNA target sequence for PHF14 (NM_014660.1,2996-3014).
ggctgaagatttaagaact

SEQ ID NO: 34812 - DNA, 19 bp, Homo sapiens
  siRNA target sequence for PHF14 (NM_014660.1,3040-3058).
gagacaatgaaaatcttgt

SEQ ID NO: 34813 - DNA, 19 bp, Homo sapiens
  siRNA target sequence for PHF15 (NM_015288.4,186-204).
gagaagaggcgaaaatact

SEQ ID NO: 34814 - DNA, 19 bp, Homo sapiens
  siRNA target sequence for PHF15 (NM_015288.4,234-252).
gacagtcatgcgacatcta

SEQ ID NO: 34815 - DNA, 19 bp, Homo sapiens
  siRNA target sequence for PHF15 (NM_015288.4,388-406).
gcccggatgactactacat

SEQ ID NO: 34816 - DNA, 19 bp, Homo sapiens
  siRNA target sequence for PHF15 (NM_015288.4,577-595).
ggggcagccgctatgactt

SEQ ID NO: 34817 - DNA, 19 bp, Homo sapiens
  siRNA target sequence for PHF15 (NM_015288.4,966-984).
gccttgaagcccactagaa

SEQ ID NO: 34818 - DNA, 19 bp, Homo sapiens
  siRNA target sequence for PHF15 (NM_015288.4,968-986).
cttgaagcccactagaagt

SEQ ID NO: 34819 - DNA, 19 bp, Homo sapiens
  siRNA target sequence for PHF15 (NM_015288.4,1205-1223).
cctggaaatgcggactata

SEQ ID NO: 34820 - DNA, 19 bp, Homo sapiens
  siRNA target sequence for PHF15 (NM_015288.4,1206-1224).
ctggaaatgcggactatat

SEQ ID NO: 34821 - DNA, 19 bp, Homo sapiens
  siRNA target sequence for PHF15 (NM_015288.4,1208-1226).
ggaaatgcggactatatta

SEQ ID NO: 34822 - DNA, 19 bp, Homo sapiens
  siRNA target sequence for PHF15 (NM_015288.4,1443-1461).
gcactggtcgacttcatct

SEQ ID NO: 34823 - DNA, 19 bp, Homo sapiens
  siRNA target sequence for PHF15 (NM_015288.4,1444-1462).
cactggtcgacttcatcta

SEQ ID NO: 34824 - DNA, 19 bp, Homo sapiens
  siRNA target sequence for PHF15 (NM_015288.4,1822-1840).
gcgagtggccactgaacaa

SEQ ID NO: 34825 - DNA, 19 bp, Homo sapiens
  siRNA target sequence for PHF15 (NM_015288.4,1823-1841).
cgagtggccactgaacaat

SEQ ID NO: 34826 - DNA, 19 bp, Homo sapiens
  siRNA target sequence for PHF15 (NM_015288.4,1974-1992).
cgcctgcctgccaagaaga

SEQ ID NO: 34827 - DNA, 19 bp, Homo sapiens
  siRNA target sequence for PHF15 (NM_015288.4,2118-2136).
ccaccacgtcggacatctt

SEQ ID NO: 34828 - DNA, 19 bp, Homo sapiens
  siRNA target sequence for PHF16 (NM_014735.2,366-384).
ctggctcaatgtataggat

SEQ ID NO: 34829 - DNA, 19 bp, Homo sapiens
  siRNA target sequence for PHF16 (NM_014735.2,376-394).
gtataggatcaagtcaaaa

SEQ ID NO: 34830 - DNA, 19 bp, Homo sapiens
  siRNA target sequence for PHF16 (NM_014735.2,461-479).
ccagattctcaccacatta

SEQ ID NO: 34831 - DNA, 19 bp, Homo sapiens
  siRNA target sequence for PHF16 (NM_014735.2,475-493).
cattaatcctgatagctat

SEQ ID NO: 34832 - DNA, 19 bp, Homo sapiens
  siRNA target sequence for PHF16 (NM_014735.2,599-617).
gtaaaggacgttctgttta

SEQ ID NO: 34833 - DNA, 19 bp, Homo sapiens
  siRNA target sequence for PHF16 (NM_014735.2,619-637).
ccgaccccggaagtatatt

SEQ ID NO: 34834 - DNA, 19 bp, Homo sapiens
  siRNA target sequence for PHF16 (NM_014735.2,621-639).
gaccccggaagtatattca

SEQ ID NO: 34835 - DNA, 19 bp, Homo sapiens
  siRNA target sequence for PHF16 (NM_014735.2,623-641).
ccccggaagtatattcact

SEQ ID NO: 34836 - DNA, 19 bp, Homo sapiens
  siRNA target sequence for PHF16 (NM_014735.2,685-703).
ggagttggcagcatctgtt

SEQ ID NO: 34837 - DNA, 19 bp, Homo sapiens
  siRNA target sequence for PHF16 (NM_014735.2,686-704).
gagttggcagcatctgttt

SEQ ID NO: 34838 - DNA, 19 bp, Homo sapiens
  siRNA target sequence for PHF16 (NM_014735.2,705-723).
gccgctatgacctagatga

SEQ ID NO: 34839 - DNA, 19 bp, Homo sapiens
  siRNA target sequence for PHF16 (NM_014735.2,738-756).
ggcttcaggaactcaatga

SEQ ID NO: 34840 - DNA, 19 bp, Homo sapiens
  siRNA target sequence for PHF16 (NM_014735.2,774-792).
gttgtgggccagttgatga

SEQ ID NO: 34841 - DNA, 19 bp, Homo sapiens
  siRNA target sequence for PHF16 (NM_014735.2,780-798).
ggccagttgatgagaatct

SEQ ID NO: 34842 - DNA, 19 bp, Homo sapiens
  siRNA target sequence for PHF16 (NM_014735.2,781-799).
gccagttgatgagaatctt

SEQ ID NO: 34843 - DNA, 19 bp, Homo sapiens
  siRNA target sequence for PHF16 (NM_014735.2,782-800).
ccagttgatgagaatctta

SEQ ID NO: 34844 - DNA, 19 bp, Homo sapiens
  siRNA target sequence for PHF16 (NM_014735.2,824-842).
gaacgccattgccatgaaa

SEQ ID NO: 34845 - DNA, 19 bp, Homo sapiens
  siRNA target sequence for PHF16 (NM_014735.2,1047-1065).
gcatttatccgcaatgtgt

SEQ ID NO: 34846 - DNA, 19 bp, Homo sapiens
  siRNA target sequence for PHF16 (NM_014735.2,1181-1199).
gaaccgatcacgaagatct

SEQ ID NO: 34847 - DNA, 19 bp, Homo sapiens
  siRNA target sequence for PHF16 (NM_014735.2,1223-1241).
gccttagtctgcaacttgt

SEQ ID NO: 34848 - DNA, 19 bp, Homo sapiens
  siRNA target sequence for PHF16 (NM_014735.2,1322-1340).
cacggcctagagatgaaga

SEQ ID NO: 34849 - DNA, 19 bp, Homo sapiens
  siRNA target sequence for PHF16 (NM_014735.2,1356-1374).
gagacgaagtgaagttcaa

SEQ ID NO: 34850 - DNA, 19 bp, Homo sapiens
  siRNA target sequence for PHF16 (NM_014735.2,1385-1403).
ctcaagcatagccaaaaca

SEQ ID NO: 34851 - DNA, 19 bp, Homo sapiens
  siRNA target sequence for PHF16 (NM_014735.2,1450-1468).
gcagagccaggccaaaagt

SEQ ID NO: 34852 - DNA, 19 bp, Homo sapiens
  siRNA target sequence for PHF16 (NM_014735.2,1574-1592).
gctgtggactttatctata

SEQ ID NO: 34853 - DNA, 19 bp, Homo sapiens
  siRNA target sequence for PHF16 (NM_014735.2,1577-1595).
gtggactttatctataact

SEQ ID NO: 34854 - DNA, 19 bp, Homo sapiens
  siRNA target sequence for PHF16 (NM_014735.2,1580-1598).
gactttatctataactact

SEQ ID NO: 34855 - DNA, 19 bp, Homo sapiens
  siRNA target sequence for PHF16 (NM_014735.2,1609-1627).
gcggaaaagtaacttcaat

SEQ ID NO: 34856 - DNA, 19 bp, Homo sapiens
  siRNA target sequence for PHF16 (NM_014735.2,1690-1708).
cattcacactcgaatgaga

SEQ ID NO: 34857 - DNA, 19 bp, Homo sapiens
  siRNA target sequence for PHF16 (NM_014735.2,1696-1714).
cactcgaatgagaatgttt

SEQ ID NO: 34858 - DNA, 19 bp, Homo sapiens
  siRNA target sequence for PHF16 (NM_014735.2,1742-1760).
gtccgaaatctgtgctata

SEQ ID NO: 34859 - DNA, 19 bp, Homo sapiens
  siRNA target sequence for PHF16 (NM_014735.2,1745-1763).
cgaaatctgtgctatatga

SEQ ID NO: 34860 - DNA, 19 bp, Homo sapiens
  siRNA target sequence for PHF16 (NM_014735.2,1902-1920).
caccaccaagaattacctt

SEQ ID NO: 34861 - DNA, 19 bp, Homo sapiens
  siRNA target sequence for PHF16 (NM_014735.2,1924-1942).
gttaaaaatgcccaaatca

SEQ ID NO: 34862 - DNA, 19 bp, Homo sapiens
  siRNA target sequence for PHF16 (NM_014735.2,1946-1964).
ccagaagaccacagaaaca

SEQ ID NO: 34863 - DNA, 19 bp, Homo sapiens
  siRNA target sequence for PHF16 (NM_014735.2,2007-2025).
gctcatctgttcacagtat

SEQ ID NO: 34864 - DNA, 19 bp, Homo sapiens
  siRNA target sequence for PHF16 (NM_014735.2,2008-2026).
ctcatctgttcacagtata

SEQ ID NO: 34865 - DNA, 19 bp, Homo sapiens
  siRNA target sequence for PHF16 (NM_014735.2,2041-2059).
gcctcaggagtcactagaa

SEQ ID NO: 34866 - DNA, 19 bp, Homo sapiens
  siRNA target sequence for PHF16 (NM_014735.2,2042-2060).
cctcaggagtcactagaaa

SEQ ID NO: 34867 - DNA, 19 bp, Homo sapiens
  siRNA target sequence for PHF16 (NM_014735.2,2043-2061).
ctcaggagtcactagaaat

SEQ ID NO: 34868 - DNA, 19 bp, Homo sapiens
  siRNA target sequence for PHF16 (NM_014735.2,2087-2105).
ccactagagagcaagaata

SEQ ID NO: 34869 - DNA, 19 bp, Homo sapiens
  siRNA target sequence for PHF16 (NM_014735.2,2117-2135).
gccagtctcagccattcta

SEQ ID NO: 34870 - DNA, 19 bp, Homo sapiens
  siRNA target sequence for PHF16 (NM_014735.2,2176-2194).
gtcctcggagtgctatcat

SEQ ID NO: 34871 - DNA, 19 bp, Homo sapiens
  siRNA target sequence for PHF16 (NM_014735.2,2280-2298).
ccaagtttgccaaatccaa

SEQ ID NO: 34872 - DNA, 19 bp, Homo sapiens
  siRNA target sequence for PHF16 (NM_014735.2,2402-2420).
ggcagctttagaaaatcca

SEQ ID NO: 34873 - DNA, 19 bp, Homo sapiens
  siRNA target sequence for PHF16 (NM_014735.2,2457-2475).
ccaataggtgggtgaagaa

SEQ ID NO: 34874 - DNA, 19 bp, Homo sapiens
  siRNA target sequence for PHF16 (NM_014735.2,2565-2583).
cagggagagctccatatca

SEQ ID NO: 34875 - DNA, 19 bp, Homo sapiens
  siRNA target sequence for PHF16 (NM_014735.2,2571-2589).
gagctccatatcaggaaaa

SEQ ID NO: 34876 - DNA, 19 bp, Homo sapiens
  siRNA target sequence for PHF16 (NM_014735.2,2595-2613).
gctattgcccagatttgga

SEQ ID NO: 34877 - DNA, 19 bp, Homo sapiens
  siRNA target sequence for PHF16 (NM_014735.2,2677-2695).
ctcagacagggaaaatcct

SEQ ID NO: 34878 - DNA, 19 bp, Homo sapiens
  siRNA target sequence for PHF16 (NM_014735.2,2709-2727).
gacgggattgccatggtaa

SEQ ID NO: 34879 - DNA, 19 bp, Homo sapiens
  siRNA target sequence for PHF16 (NM_014735.2,2711-2729).
cgggattgccatggtaaaa

SEQ ID NO: 34880 - DNA, 19 bp, Homo sapiens
  siRNA target sequence for PHF3 (NM_015153.1,37-55).
gttgatacatttaatcatt

SEQ ID NO: 34881 - DNA, 19 bp, Homo sapiens
  siRNA target sequence for PHF3 (NM_015153.1,123-141).
ggattttagtgcaagtcaa

SEQ ID NO: 34882 - DNA, 19 bp, Homo sapiens
  siRNA target sequence for PHF3 (NM_015153.1,124-142).
gattttagtgcaagtcaaa

SEQ ID NO: 34883 - DNA, 19 bp, Homo sapiens
  siRNA target sequence for PHF3 (NM_015153.1,131-149).
gtgcaagtcaaaatgtctt

SEQ ID NO: 34884 - DNA, 19 bp, Homo sapiens
  siRNA target sequence for PHF3 (NM_015153.1,168-186).
catgctcagcgataaggat

SEQ ID NO: 34885 - DNA, 19 bp, Homo sapiens
  siRNA target sequence for PHF3 (NM_015153.1,177-195).
cgataaggatcctatgcta

SEQ ID NO: 34886 - DNA, 19 bp, Homo sapiens
  siRNA target sequence for PHF3 (NM_015153.1,202-220).
gcaagtaaccagttctgtt

SEQ ID NO: 34887 - DNA, 19 bp, Homo sapiens
  siRNA target sequence for PHF3 (NM_015153.1,203-221).
caagtaaccagttctgttt

SEQ ID NO: 34888 - DNA, 19 bp, Homo sapiens
  siRNA target sequence for PHF3 (NM_015153.1,216-234).
ctgtttgcctgttttggat

SEQ ID NO: 34889 - DNA, 19 bp, Homo sapiens
  siRNA target sequence for PHF3 (NM_015153.1,255-273).
gatgccttgttcaacagtt

SEQ ID NO: 34890 - DNA, 19 bp, Homo sapiens
  siRNA target sequence for PHF3 (NM_015153.1,274-292).
gttggtcttgacgatatta

SEQ ID NO: 34891 - DNA, 19 bp, Homo sapiens
  siRNA target sequence for PHF3 (NM_015153.1,278-296).
gtcttgacgatattatgga

SEQ ID NO: 34892 - DNA, 19 bp, Homo sapiens
  siRNA target sequence for PHF3 (NM_015153.1,320-338).
gcaatgataccattgatga

SEQ ID NO: 34893 - DNA, 19 bp, Homo sapiens
  siRNA target sequence for PHF3 (NM_015153.1,419-437).
gtttaatggcacaagaaca

SEQ ID NO: 34894 - DNA, 19 bp, Homo sapiens
  siRNA target sequence for PHF3 (NM_015153.1,426-444).
ggcacaagaacaagtaaga

SEQ ID NO: 34895 - DNA, 19 bp, Homo sapiens
  siRNA target sequence for PHF3 (NM_015153.1,461-479).
ctattgccaagcgttcaaa

SEQ ID NO: 34896 - DNA, 19 bp, Homo sapiens
  siRNA target sequence for PHF3 (NM_015153.1,563-581).
gtcaggttaaagaagaagt

SEQ ID NO: 34897 - DNA, 19 bp, Homo sapiens
  siRNA target sequence for PHF3 (NM_015153.1,629-647).
gccgaaatagcggacaaat

SEQ ID NO: 34898 - DNA, 19 bp, Homo sapiens
  siRNA target sequence for PHF3 (NM_015153.1,630-648).
ccgaaatagcggacaaatt

SEQ ID NO: 34899 - DNA, 19 bp, Homo sapiens
  siRNA target sequence for PHF3 (NM_015153.1,632-650).
gaaatagcggacaaattga

SEQ ID NO: 34900 - DNA, 19 bp, Homo sapiens
  siRNA target sequence for PHF3 (NM_015153.1,649-667).
gaagtggtacctgaagtat

SEQ ID NO: 34901 - DNA, 19 bp, Homo sapiens
  siRNA target sequence for PHF3 (NM_015153.1,734-752).
ctaagcataagtgtaataa

SEQ ID NO: 34902 - DNA, 19 bp, Homo sapiens
  siRNA target sequence for PHF3 (NM_015153.1,807-825).
gacttgtgttactattgga

SEQ ID NO: 34903 - DNA, 19 bp, Homo sapiens
  siRNA target sequence for PHF3 (NM_015153.1,838-856).
gaagctttgatggaatgta

SEQ ID NO: 34904 - DNA, 19 bp, Homo sapiens
  siRNA target sequence for PHF3 (NM_015153.1,868-886).
gttggtagtccattgttta

SEQ ID NO: 34905 - DNA, 19 bp, Homo sapiens
  siRNA target sequence for PHF3 (NM_015153.1,872-890).
gtagtccattgtttaagtt

SEQ ID NO: 34906 - DNA, 19 bp, Homo sapiens
  siRNA target sequence for PHF3 (NM_015153.1,938-956).
cgggtgagactgttgttga

SEQ ID NO: 34907 - DNA, 19 bp, Homo sapiens
  siRNA target sequence for PHF3 (NM_015153.1,941-959).
gtgagactgttgttgaaga

SEQ ID NO: 34908 - DNA, 19 bp, Homo sapiens
  siRNA target sequence for PHF3 (NM_015153.1,1038-1056).
ggacgctggatcttctgat

SEQ ID NO: 34909 - DNA, 19 bp, Homo sapiens
  siRNA target sequence for PHF3 (NM_015153.1,1064-1082).
gtgatgctgcttgtacaaa

SEQ ID NO: 34910 - DNA, 19 bp, Homo sapiens
  siRNA target sequence for PHF3 (NM_015153.1,1069-1087).
gctgcttgtacaaatccaa

SEQ ID NO: 34911 - DNA, 19 bp, Homo sapiens
  siRNA target sequence for PHF3 (NM_015153.1,1116-1134).
gcctagttgtgtagatgaa

SEQ ID NO: 34912 - DNA, 19 bp, Homo sapiens
  siRNA target sequence for PHF3 (NM_015153.1,1118-1136).
ctagttgtgtagatgaagt

SEQ ID NO: 34913 - DNA, 19 bp, Homo sapiens
  siRNA target sequence for PHF3 (NM_015153.1,1129-1147).
gatgaagtgactgaatgta

SEQ ID NO: 34914 - DNA, 19 bp, Homo sapiens
  siRNA target sequence for PHF3 (NM_015153.1,1161-1179).
ggataccatgggtattgct

SEQ ID NO: 34915 - DNA, 19 bp, Homo sapiens
  siRNA target sequence for PHF3 (NM_015153.1,1166-1184).
ccatgggtattgctgataa

SEQ ID NO: 34916 - DNA, 19 bp, Homo sapiens
  siRNA target sequence for PHF3 (NM_015153.1,1170-1188).
gggtattgctgataaaact

SEQ ID NO: 34917 - DNA, 19 bp, Homo sapiens
  siRNA target sequence for PHF3 (NM_015153.1,1172-1190).
gtattgctgataaaactga

SEQ ID NO: 34918 - DNA, 19 bp, Homo sapiens
  siRNA target sequence for PHF3 (NM_015153.1,1232-1250).
gtgaagatgcggagtctaa

SEQ ID NO: 34919 - DNA, 19 bp, Homo sapiens
  siRNA target sequence for PHF3 (NM_015153.1,1234-1252).
gaagatgcggagtctaata

SEQ ID NO: 34920 - DNA, 19 bp, Homo sapiens
  siRNA target sequence for PHF3 (NM_015153.1,1291-1309).
gaggtggttgatactagta

SEQ ID NO: 34921 - DNA, 19 bp, Homo sapiens
  siRNA target sequence for PHF3 (NM_015153.1,1310-1328).
cttttggaccggaaagtaa

SEQ ID NO: 34922 - DNA, 19 bp, Homo sapiens
  siRNA target sequence for PHF3 (NM_015153.1,1315-1333).
ggaccggaaagtaatatct

SEQ ID NO: 34923 - DNA, 19 bp, Homo sapiens
  siRNA target sequence for PHF3 (NM_015153.1,1316-1334).
gaccggaaagtaatatctt

SEQ ID NO: 34924 - DNA, 19 bp, Homo sapiens
  siRNA target sequence for PHF3 (NM_015153.1,1349-1367).
gtgatgtgcctgaccaaaa

SEQ ID NO: 34925 - DNA, 19 bp, Homo sapiens
  siRNA target sequence for PHF3 (NM_015153.1,1351-1369).
gatgtgcctgaccaaaatt

SEQ ID NO: 34926 - DNA, 19 bp, Homo sapiens
  siRNA target sequence for PHF3 (NM_015153.1,1375-1393).
cagttgaatgctatagaaa

SEQ ID NO: 34927 - DNA, 19 bp, Homo sapiens
  siRNA target sequence for PHF3 (NM_015153.1,1377-1395).
gttgaatgctatagaaagt

SEQ ID NO: 34928 - DNA, 19 bp, Homo sapiens
  siRNA target sequence for PHF3 (NM_015153.1,1451-1469).
caagtagcgtttcttactt

SEQ ID NO: 34929 - DNA, 19 bp, Homo sapiens
  siRNA target sequence for PHF3 (NM_015153.1,1454-1472).
gtagcgtttcttacttaga

SEQ ID NO: 34930 - DNA, 19 bp, Homo sapiens
  siRNA target sequence for PHF3 (NM_015153.1,1562-1580).
caaagtatgaagtaataca

SEQ ID NO: 34931 - DNA, 19 bp, Homo sapiens
  siRNA target sequence for PHF3 (NM_015153.1,1602-1620).
caaaagtgtgaaacgaaat

SEQ ID NO: 34932 - DNA, 19 bp, Homo sapiens
  siRNA target sequence for PHF3 (NM_015153.1,1607-1625).
gtgtgaaacgaaatactga

SEQ ID NO: 34933 - DNA, 19 bp, Homo sapiens
  siRNA target sequence for PHF3 (NM_015153.1,1630-1648).
ccagaatctcagcaaaatt

SEQ ID NO: 34934 - DNA, 19 bp, Homo sapiens
  siRNA target sequence for PHF3 (NM_015153.1,1657-1675).
ccagtcaaagtcagaaaaa

SEQ ID NO: 34935 - DNA, 19 bp, Homo sapiens
  siRNA target sequence for PHF3 (NM_015153.1,1717-1735).
ggggttaaatctgtgaaaa

SEQ ID NO: 34936 - DNA, 19 bp, Homo sapiens
  siRNA target sequence for PHF3 (NM_015153.1,1741-1759).
gctcattctgtactgaaaa

SEQ ID NO: 34937 - DNA, 19 bp, Homo sapiens
  siRNA target sequence for PHF3 (NM_015153.1,1748-1766).
ctgtactgaaaaaaacatt

SEQ ID NO: 34938 - DNA, 19 bp, Homo sapiens
  siRNA target sequence for PHF3 (NM_015153.1,1794-1812).
caagcccttaactcattct

SEQ ID NO: 34939 - DNA, 19 bp, Homo sapiens
  siRNA target sequence for PHF3 (NM_015153.1,1805-1823).
ctcattctttgagtgataa

SEQ ID NO: 34940 - DNA, 19 bp, Homo sapiens
  siRNA target sequence for PHF3 (NM_015153.1,1807-1825).
cattctttgagtgataagt

SEQ ID NO: 34941 - DNA, 19 bp, Homo sapiens
  siRNA target sequence for PHF3 (NM_015153.1,1888-1906).
cattctagccagaaacagt

SEQ ID NO: 34942 - DNA, 19 bp, Homo sapiens
  siRNA target sequence for PHF3 (NM_015153.1,1974-1992).
cccaggcgttgagcatttt

SEQ ID NO: 34943 - DNA, 19 bp, Homo sapiens
  siRNA target sequence for PHF3 (NM_015153.1,1975-1993).
ccaggcgttgagcatttta

SEQ ID NO: 34944 - DNA, 19 bp, Homo sapiens
  siRNA target sequence for PHF3 (NM_015153.1,1999-2017).
gaggataaactgaaactga

SEQ ID NO: 34945 - DNA, 19 bp, Homo sapiens
  siRNA target sequence for PHF3 (NM_015153.1,2091-2109).
gttcattccagataacata

SEQ ID NO: 34946 - DNA, 19 bp, Homo sapiens
  siRNA target sequence for PHF3 (NM_015153.1,2101-2119).
gataacatagctaccataa

SEQ ID NO: 34947 - DNA, 19 bp, Homo sapiens
  siRNA target sequence for PHF3 (NM_015153.1,2137-2155).
catagctcctcatttgaaa

SEQ ID NO: 34948 - DNA, 19 bp, Homo sapiens
  siRNA target sequence for PHF3 (NM_015153.1,2181-2199).
gcagtgtgggttttgcaaa

SEQ ID NO: 34949 - DNA, 19 bp, Homo sapiens
  siRNA target sequence for PHF3 (NM_015153.1,2368-2386).
gatccagatactttggaaa

SEQ ID NO: 34950 - DNA, 19 bp, Homo sapiens
  siRNA target sequence for PHF3 (NM_015153.1,2430-2448).
gtgtgaaaagcttggatta

SEQ ID NO: 34951 - DNA, 19 bp, Homo sapiens
  siRNA target sequence for PHF3 (NM_015153.1,2434-2452).
gaaaagcttggattatcaa

SEQ ID NO: 34952 - DNA, 19 bp, Homo sapiens
  siRNA target sequence for PHF3 (NM_015153.1,2440-2458).
cttggattatcaaaacaca

SEQ ID NO: 34953 - DNA, 19 bp, Homo sapiens
  siRNA target sequence for PHF3 (NM_015153.1,2555-2573).
gtagagataatgaaattaa

SEQ ID NO: 34954 - DNA, 19 bp, Homo sapiens
  siRNA target sequence for PHF3 (NM_015153.1,2601-2619).
gatgggacaaccagtttta

SEQ ID NO: 34955 - DNA, 19 bp, Homo sapiens
  siRNA target sequence for PHF3 (NM_015153.1,2811-2829).
gcaaagtgtcagacattct

SEQ ID NO: 34956 - DNA, 19 bp, Homo sapiens
  siRNA target sequence for PHF3 (NM_015153.1,2852-2870).
gacttacagactcaaattt

SEQ ID NO: 34957 - DNA, 19 bp, Homo sapiens
  siRNA target sequence for PHF3 (NM_015153.1,2939-2957).
gggacacagatgctaaata

SEQ ID NO: 34958 - DNA, 19 bp, Homo sapiens
  siRNA target sequence for PHF3 (NM_015153.1,3040-3058).
gtaactcctgatcatctta

SEQ ID NO: 34959 - DNA, 19 bp, Homo sapiens
  siRNA target sequence for PHF3 (NM_015153.1,3113-3131).
gagaaaacagacataccat

SEQ ID NO: 34960 - DNA, 19 bp, Homo sapiens
  siRNA target sequence for PHF3 (NM_015153.1,3166-3184).
cgacggccaatcaccaaaa

SEQ ID NO: 34961 - DNA, 19 bp, Homo sapiens
  siRNA target sequence for PHF3 (NM_015153.1,3167-3185).
gacggccaatcaccaaaat

SEQ ID NO: 34962 - DNA, 19 bp, Homo sapiens
  siRNA target sequence for PHF3 (NM_015153.1,3169-3187).
cggccaatcaccaaaataa

SEQ ID NO: 34963 - DNA, 19 bp, Homo sapiens
  siRNA target sequence for PHF3 (NM_015153.1,3171-3189).
gccaatcaccaaaataact

SEQ ID NO: 34964 - DNA, 19 bp, Homo sapiens
  siRNA target sequence for PHF3 (NM_015153.1,3173-3191).
caatcaccaaaataactca

SEQ ID NO: 34965 - DNA, 19 bp, Homo sapiens
  siRNA target sequence for PHF3 (NM_015153.1,3180-3198).
caaaataactcataaaggt

SEQ ID NO: 34966 - DNA, 19 bp, Homo sapiens
  siRNA target sequence for PHF3 (NM_015153.1,3213-3231).
gagtgatgccccaatgaaa

SEQ ID NO: 34967 - DNA, 19 bp, Homo sapiens
  siRNA target sequence for PHF3 (NM_015153.1,3259-3277).
gaaccagccgccaataagt

SEQ ID NO: 34968 - DNA, 19 bp, Homo sapiens
  siRNA target sequence for PHF3 (NM_015153.1,3262-3280).
ccagccgccaataagtcat

SEQ ID NO: 34969 - DNA, 19 bp, Homo sapiens
  siRNA target sequence for PHF3 (NM_015153.1,3263-3281).
cagccgccaataagtcatt

SEQ ID NO: 34970 - DNA, 19 bp, Homo sapiens
  siRNA target sequence for PHF3 (NM_015153.1,3313-3331).
gaggaggttgactctatgt

SEQ ID NO: 34971 - DNA, 19 bp, Homo sapiens
  siRNA target sequence for PHF3 (NM_015153.1,3318-3336).
ggttgactctatgtctaaa

SEQ ID NO: 34972 - DNA, 19 bp, Homo sapiens
  siRNA target sequence for PHF3 (NM_015153.1,3370-3388).
gatctcaactgcaaaatct

SEQ ID NO: 34973 - DNA, 19 bp, Homo sapiens
  siRNA target sequence for PHF3 (NM_015153.1,3451-3469).
ggagtagctcgcaaacatt

SEQ ID NO: 34974 - DNA, 19 bp, Homo sapiens
  siRNA target sequence for PHF3 (NM_015153.1,3597-3615).
gatgcctggaactgttgaa

SEQ ID NO: 34975 - DNA, 19 bp, Homo sapiens
  siRNA target sequence for PHF3 (NM_015153.1,3696-3714).
caaagcctatccagtatct

SEQ ID NO: 34976 - DNA, 19 bp, Homo sapiens
  siRNA target sequence for PHF3 (NM_015153.1,3736-3754).
gaggacctaccagatagta

SEQ ID NO: 34977 - DNA, 19 bp, Homo sapiens
  siRNA target sequence for PHF3 (NM_015153.1,3738-3756).
ggacctaccagatagtatt

SEQ ID NO: 34978 - DNA, 19 bp, Homo sapiens
  siRNA target sequence for PHF3 (NM_015153.1,3845-3863).
gcttcacaccagtaactga

SEQ ID NO: 34979 - DNA, 19 bp, Homo sapiens
  siRNA target sequence for PHF3 (NM_015153.1,3865-3883).
gaagatcaaatttcttata

SEQ ID NO: 34980 - DNA, 19 bp, Homo sapiens
  siRNA target sequence for PHF3 (NM_015153.1,3955-3973).
gatatgtaccttattcctt

SEQ ID NO: 34981 - DNA, 19 bp, Homo sapiens
  siRNA target sequence for PHF3 (NM_015153.1,3999-4017).
ccctcttgtgccttttgat

SEQ ID NO: 34982 - DNA, 19 bp, Homo sapiens
  siRNA target sequence for PHF3 (NM_015153.1,4033-4051).
ctgcatagacctaatctat

SEQ ID NO: 34983 - DNA, 19 bp, Homo sapiens
  siRNA target sequence for PHF3 (NM_015153.1,4036-4054).
catagacctaatctattgt

SEQ ID NO: 34984 - DNA, 19 bp, Homo sapiens
  siRNA target sequence for PHF3 (NM_015153.1,4059-4077).
cttaattattcgtcagaaa

SEQ ID NO: 34985 - DNA, 19 bp, Homo sapiens
  siRNA target sequence for PHF3 (NM_015153.1,4100-4118).
gtgctagtactagtcatat

SEQ ID NO: 34986 - DNA, 19 bp, Homo sapiens
  siRNA target sequence for PHF3 (NM_015153.1,4136-4154).
gtgcaccaccaatagcatt

SEQ ID NO: 34987 - DNA, 19 bp, Homo sapiens
  siRNA target sequence for PHF3 (NM_015153.1,4150-4168).
gcattgccacctgataaaa

SEQ ID NO: 34988 - DNA, 19 bp, Homo sapiens
  siRNA target sequence for PHF3 (NM_015153.1,4229-4247).
cttttacaactgtattaca

SEQ ID NO: 34989 - DNA, 19 bp, Homo sapiens
  siRNA target sequence for PHF3 (NM_015153.1,4287-4305).
ccttccaacagcagttgaa

SEQ ID NO: 34990 - DNA, 19 bp, Homo sapiens
  siRNA target sequence for PHF3 (NM_015153.1,4377-4395).
ggagaatcaacctactact

SEQ ID NO: 34991 - DNA, 19 bp, Homo sapiens
  siRNA target sequence for PHF3 (NM_015153.1,4449-4467).
gggcaccactggtcaagta

SEQ ID NO: 34992 - DNA, 19 bp, Homo sapiens
  siRNA target sequence for PHF3 (NM_015153.1,4450-4468).
ggcaccactggtcaagtat

SEQ ID NO: 34993 - DNA, 19 bp, Homo sapiens
  siRNA target sequence for PHF3 (NM_015153.1,4451-4469).
gcaccactggtcaagtata

SEQ ID NO: 34994 - DNA, 19 bp, Homo sapiens
  siRNA target sequence for PHF3 (NM_015153.1,4452-4470).
caccactggtcaagtatat

SEQ ID NO: 34995 - DNA, 19 bp, Homo sapiens
  siRNA target sequence for PHF3 (NM_015153.1,4454-4472).
ccactggtcaagtatatga

SEQ ID NO: 34996 - DNA, 19 bp, Homo sapiens
  siRNA target sequence for PHF3 (NM_015153.1,4528-4546).
gagcagaccaactcaaaaa

SEQ ID NO: 34997 - DNA, 19 bp, Homo sapiens
  siRNA target sequence for PHF3 (NM_015153.1,4660-4678).
gtagggtcctcttccattt

SEQ ID NO: 34998 - DNA, 19 bp, Homo sapiens
  siRNA target sequence for PHF3 (NM_015153.1,4684-4702).
gggtctttgacgagtctta

SEQ ID NO: 34999 - DNA, 19 bp, Homo sapiens
  siRNA target sequence for PHF3 (NM_015153.1,4711-4729).
ggtaagccaccagatgttt

SEQ ID NO: 35000 - DNA, 19 bp, Homo sapiens
  siRNA target sequence for PHF3 (NM_015153.1,4846-4864).
gataaccagacttcaaata

SEQ ID NO: 35001 - DNA, 19 bp, Homo sapiens
  siRNA target sequence for PHF3 (NM_015153.1,4868-4886).
ctccatgcagatctaatgt

SEQ ID NO: 35002 - DNA, 19 bp, Homo sapiens
  siRNA target sequence for PHF3 (NM_015153.1,4945-4963).
gcgaggtctccacagttta

SEQ ID NO: 35003 - DNA, 19 bp, Homo sapiens
  siRNA target sequence for PHF3 (NM_015153.1,4946-4964).
cgaggtctccacagtttat

SEQ ID NO: 35004 - DNA, 19 bp, Homo sapiens
  siRNA target sequence for PHF3 (NM_015153.1,4999-5017).
cgaagtcagcctgtaacta

SEQ ID NO: 35005 - DNA, 19 bp, Homo sapiens
  siRNA target sequence for PHF3 (NM_015153.1,5008-5026).
cctgtaactacttcagaaa

SEQ ID NO: 35006 - DNA, 19 bp, Homo sapiens
  siRNA target sequence for PHF3 (NM_015153.1,5042-5060).
gttgccggaatggagaaaa

SEQ ID NO: 35007 - DNA, 19 bp, Homo sapiens
  siRNA target sequence for PHF3 (NM_015153.1,5045-5063).
gccggaatggagaaaaaca

SEQ ID NO: 35008 - DNA, 19 bp, Homo sapiens
  siRNA target sequence for PHF3 (NM_015153.1,5072-5090).
ctggcctgtcacacaacaa

SEQ ID NO: 35009 - DNA, 19 bp, Homo sapiens
  siRNA target sequence for PHF3 (NM_015153.1,5088-5106).
caaggagcacttaacagaa

SEQ ID NO: 35010 - DNA, 19 bp, Homo sapiens
  siRNA target sequence for PHF3 (NM_015153.1,5097-5115).
cttaacagaacaaatcaat

SEQ ID NO: 35011 - DNA, 19 bp, Homo sapiens
  siRNA target sequence for PHF3 (NM_015153.1,5155-5173).
gttcagcagagtgacaatt

SEQ ID NO: 35012 - DNA, 19 bp, Homo sapiens
  siRNA target sequence for PHF3 (NM_015153.1,5195-5213).
catcagtagaaaacataca

SEQ ID NO: 35013 - DNA, 19 bp, Homo sapiens
  siRNA target sequence for PHF3 (NM_015153.1,5214-5232).
gacttctcaagcagaacaa

SEQ ID NO: 35014 - DNA, 19 bp, Homo sapiens
  siRNA target sequence for PHF3 (NM_015153.1,5302-5320).
gcagtagcgacatctcatt

SEQ ID NO: 35015 - DNA, 19 bp, Homo sapiens
  siRNA target sequence for PHF3 (NM_015153.1,5303-5321).
cagtagcgacatctcattt

SEQ ID NO: 35016 - DNA, 19 bp, Homo sapiens
  siRNA target sequence for PHF3 (NM_015153.1,5309-5327).
cgacatctcattttgaagt

SEQ ID NO: 35017 - DNA, 19 bp, Homo sapiens
  siRNA target sequence for PHF3 (NM_015153.1,5393-5411).
ccagaacaagtacaaactt

SEQ ID NO: 35018 - DNA, 19 bp, Homo sapiens
  siRNA target sequence for PHF3 (NM_015153.1,5454-5472).
gtctagcccacctggattt

SEQ ID NO: 35019 - DNA, 19 bp, Homo sapiens
  siRNA target sequence for PHF3 (NM_015153.1,5500-5518).
ccacaaagcatgtttggat

SEQ ID NO: 35020 - DNA, 19 bp, Homo sapiens
  siRNA target sequence for PHF3 (NM_015153.1,5645-5663).
cacaagcatcaaggtatat

SEQ ID NO: 35021 - DNA, 19 bp, Homo sapiens
  siRNA target sequence for PHF3 (NM_015153.1,5752-5770).
ctggataggccatttaata

SEQ ID NO: 35022 - DNA, 19 bp, Homo sapiens
  siRNA target sequence for PHF3 (NM_015153.1,5780-5798).
gggaccgccagagatttta

SEQ ID NO: 35023 - DNA, 19 bp, Homo sapiens
  siRNA target sequence for PHF3 (NM_015153.1,5781-5799).
ggaccgccagagattttat

SEQ ID NO: 35024 - DNA, 19 bp, Homo sapiens
  siRNA target sequence for PHF3 (NM_015153.1,5784-5802).
ccgccagagattttatagt

SEQ ID NO: 35025 - DNA, 19 bp, Homo sapiens
  siRNA target sequence for PHF3 (NM_015153.1,5787-5805).
ccagagattttatagtgat

SEQ ID NO: 35026 - DNA, 19 bp, Homo sapiens
  siRNA target sequence for PHF3 (NM_015153.1,5788-5806).
cagagattttatagtgatt

SEQ ID NO: 35027 - DNA, 19 bp, Homo sapiens
  siRNA target sequence for PHF3 (NM_015153.1,5792-5810).
gattttatagtgattcaca

SEQ ID NO: 35028 - DNA, 19 bp, Homo sapiens
  siRNA target sequence for PHF3 (NM_015153.1,5824-5842).
gagcgacatgaaaaggaat

SEQ ID NO: 35029 - DNA, 19 bp, Homo sapiens
  siRNA target sequence for PHF3 (NM_015153.1,5937-5955).
gagggcacggttatcacat

SEQ ID NO: 35030 - DNA, 19 bp, Homo sapiens
  siRNA target sequence for PHF3 (NM_015153.1,6012-6030).
gccagataaacctaaaagt

SEQ ID NO: 35031 - DNA, 19 bp, Homo sapiens
  siRNA target sequence for PHF3 (NM_015153.1,6014-6032).
cagataaacctaaaagtga

SEQ ID NO: 35032 - DNA, 19 bp, Homo sapiens
  siRNA target sequence for PHF3 (NM_015153.1,6092-6110).
gggataggtaccacaaaga

SEQ ID NO: 35033 - DNA, 19 bp, Homo sapiens
  siRNA target sequence for PHF3 (NM_015153.1,6093-6111).
ggataggtaccacaaagat

SEQ ID NO: 35034 - DNA, 19 bp, Homo sapiens
  siRNA target sequence for PHF3 (NM_015153.1,6094-6112).
gataggtaccacaaagata

SEQ ID NO: 35035 - DNA, 19 bp, Homo sapiens
  siRNA target sequence for PHF3 (NM_015153.1,6115-6133).
gaccacactgacagaacta

SEQ ID NO: 35036 - DNA, 19 bp, Homo sapiens
  siRNA target sequence for PHF6 (NM_032335.1,227-245).
gacagttactaatatctga

SEQ ID NO: 35037 - DNA, 19 bp, Homo sapiens
  siRNA target sequence for PHF6 (NM_032335.1,229-247).
cagttactaatatctgaaa

SEQ ID NO: 35038 - DNA, 19 bp, Homo sapiens
  siRNA target sequence for PHF6 (NM_032335.1,256-274).
gtggcagcgcaccataagt

SEQ ID NO: 35039 - DNA, 19 bp, Homo sapiens
  siRNA target sequence for PHF6 (NM_032335.1,403-421).
cctggagcaacaattggtt

SEQ ID NO: 35040 - DNA, 19 bp, Homo sapiens
  siRNA target sequence for PHF6 (NM_032335.1,413-431).
caattggttgtgatgtgaa

SEQ ID NO: 35041 - DNA, 19 bp, Homo sapiens
  siRNA target sequence for PHF6 (NM_032335.1,457-475).
cactgtgcattgcatgata

SEQ ID NO: 35042 - DNA, 19 bp, Homo sapiens
  siRNA target sequence for PHF6 (NM_032335.1,468-486).
gcatgataaagctcaaata

SEQ ID NO: 35043 - DNA, 19 bp, Homo sapiens
  siRNA target sequence for PHF6 (NM_032335.1,497-515).
cttcacaaggaatttacat

SEQ ID NO: 35044 - DNA, 19 bp, Homo sapiens
  siRNA target sequence for PHF6 (NM_032335.1,552-570).
ctccgaagcagctgattta

SEQ ID NO: 35045 - DNA, 19 bp, Homo sapiens
  siRNA target sequence for PHF6 (NM_032335.1,554-572).
ccgaagcagctgatttaga

SEQ ID NO: 35046 - DNA, 19 bp, Homo sapiens
  siRNA target sequence for PHF6 (NM_032335.1,600-618).
gccctcatcacctaaaagt

SEQ ID NO: 35047 - DNA, 19 bp, Homo sapiens
  siRNA target sequence for PHF6 (NM_032335.1,641-659).
ggccaagaaaaactaattt

SEQ ID NO: 35048 - DNA, 19 bp, Homo sapiens
  siRNA target sequence for PHF6 (NM_032335.1,714-732).
ggaaagtagttcctataga

SEQ ID NO: 35049 - DNA, 19 bp, Homo sapiens
  siRNA target sequence for PHF6 (NM_032335.1,815-833).
cacgaggaaaactgcatat

SEQ ID NO: 35050 - DNA, 19 bp, Homo sapiens
  siRNA target sequence for PHF6 (NM_032335.1,817-835).
cgaggaaaactgcatatat

SEQ ID NO: 35051 - DNA, 19 bp, Homo sapiens
  siRNA target sequence for PHF6 (NM_032335.1,850-868).
gcagctgcccattataagt

SEQ ID NO: 35052 - DNA, 19 bp, Homo sapiens
  siRNA target sequence for PHF6 (NM_032335.1,894-912).
ccagctcacaacaacatca

SEQ ID NO: 35053 - DNA, 19 bp, Homo sapiens
  siRNA target sequence for PHF6 (NM_032335.1,944-962).
ctgtacttcaggagattaa

SEQ ID NO: 35054 - DNA, 19 bp, Homo sapiens
  siRNA target sequence for PHF6 (NM_032335.1,957-975).
gattaaacgaggaaaaaga

SEQ ID NO: 35055 - DNA, 19 bp, Homo sapiens
  siRNA target sequence for PHF6 (NM_032335.1,1003-1021).
gcaacattacacttgattt

SEQ ID NO: 35056 - DNA, 19 bp, Homo sapiens
  siRNA target sequence for PHF6 (NM_032335.1,1022-1040).
gctgctttaaatttagagt

SEQ ID NO: 35057 - DNA, 19 bp, Homo sapiens
  siRNA target sequence for PHF6 (NM_032335.1,1037-1055).
gagtacatcccaaatttat

SEQ ID NO: 35058 - DNA, 19 bp, Homo sapiens
  siRNA target sequence for PHF6 (NM_032458.1,578-596).
gtctattgccgaaaacaca

SEQ ID NO: 35059 - DNA, 19 bp, Homo sapiens
  siRNA target sequence for PHF6 (NM_032458.1,613-631).
ctccgaagctgatttagaa

SEQ ID NO: 35060 - DNA, 19 bp, Homo sapiens
  siRNA target sequence for PHF6 (NM_032458.1,1057-1075).
gcctggtgctactattgga

SEQ ID NO: 35061 - DNA, 19 bp, Homo sapiens
  siRNA target sequence for PHF6 (NM_032458.1,1064-1082).
gctactattggatgtgaaa

SEQ ID NO: 35062 - DNA, 19 bp, Homo sapiens
  siRNA target sequence for PHF6 (NM_032458.1,1065-1083).
ctactattggatgtgaaat

SEQ ID NO: 35063 - DNA, 19 bp, Homo sapiens
  siRNA target sequence for PHF6 (NM_032458.1,1090-1108).
ctgtgttaagacttaccat

SEQ ID NO: 35064 - DNA, 19 bp, Homo sapiens
  siRNA target sequence for PHF6 (NM_032458.1,1118-1136).
ggagtacaagacaaagcta

SEQ ID NO: 35065 - DNA, 19 bp, Homo sapiens
  siRNA target sequence for PHF6 (NM_032458.1,1121-1139).
gtacaagacaaagctaaat

SEQ ID NO: 35066 - DNA, 19 bp, Homo sapiens
  siRNA target sequence for PHF6 (NM_032458.1,1233-1251).
gtaaaagccgaggaaaagt

SEQ ID NO: 35067 - DNA, 19 bp, Homo sapiens
  siRNA target sequence for PIAS1 (NM_016166.1,100-118).
gcggacagtgcggaactaa

SEQ ID NO: 35068 - DNA, 19 bp, Homo sapiens
  siRNA target sequence for PIAS1 (NM_016166.1,101-119).
cggacagtgcggaactaaa

SEQ ID NO: 35069 - DNA, 19 bp, Homo sapiens
  siRNA target sequence for PIAS1 (NM_016166.1,105-123).
cagtgcggaactaaagcaa

SEQ ID NO: 35070 - DNA, 19 bp, Homo sapiens
  siRNA target sequence for PIAS1 (NM_016166.1,107-125).
gtgcggaactaaagcaaat

SEQ ID NO: 35071 - DNA, 19 bp, Homo sapiens
  siRNA target sequence for PIAS1 (NM_016166.1,110-128).
cggaactaaagcaaatggt

SEQ ID NO: 35072 - DNA, 19 bp, Homo sapiens
  siRNA target sequence for PIAS1 (NM_016166.1,126-144).
ggttatgagccttagagtt

SEQ ID NO: 35073 - DNA, 19 bp, Homo sapiens
  siRNA target sequence for PIAS1 (NM_016166.1,127-145).
gttatgagccttagagttt

SEQ ID NO: 35074 - DNA, 19 bp, Homo sapiens
  siRNA target sequence for PIAS1 (NM_016166.1,191-209).
gacgcaaacacgaacttct

SEQ ID NO: 35075 - DNA, 19 bp, Homo sapiens
  siRNA target sequence for PIAS1 (NM_016166.1,286-304).
cggttcccacagaaaatca

SEQ ID NO: 35076 - DNA, 19 bp, Homo sapiens
  siRNA target sequence for PIAS1 (NM_016166.1,374-392).
ccattccacaactcactta

SEQ ID NO: 35077 - DNA, 19 bp, Homo sapiens
  siRNA target sequence for PIAS1 (NM_016166.1,414-432).
gccattactccctgtttct

SEQ ID NO: 35078 - DNA, 19 bp, Homo sapiens
  siRNA target sequence for PIAS1 (NM_016166.1,454-472).
ctggaactcccacatctta

SEQ ID NO: 35079 - DNA, 19 bp, Homo sapiens
  siRNA target sequence for PIAS1 (NM_016166.1,456-474).
ggaactcccacatcttaca

SEQ ID NO: 35080 - DNA, 19 bp, Homo sapiens
  siRNA target sequence for PIAS1 (NM_016166.1,457-475).
gaactcccacatcttacat

SEQ ID NO: 35081 - DNA, 19 bp, Homo sapiens
  siRNA target sequence for PIAS1 (NM_016166.1,486-504).
cccagtccatccggatata

SEQ ID NO: 35082 - DNA, 19 bp, Homo sapiens
  siRNA target sequence for PIAS1 (NM_016166.1,487-505).
ccagtccatccggatataa

SEQ ID NO: 35083 - DNA, 19 bp, Homo sapiens
  siRNA target sequence for PIAS1 (NM_016166.1,488-506).
cagtccatccggatataaa

SEQ ID NO: 35084 - DNA, 19 bp, Homo sapiens
  siRNA target sequence for PIAS1 (NM_016166.1,496-514).
ccggatataaaacttcaaa

SEQ ID NO: 35085 - DNA, 19 bp, Homo sapiens
  siRNA target sequence for PIAS1 (NM_016166.1,589-607).
cgagaaacctgttttgcat

SEQ ID NO: 35086 - DNA, 19 bp, Homo sapiens
  siRNA target sequence for PIAS1 (NM_016166.1,620-638).
cacaacaagtgcagcaaat

SEQ ID NO: 35087 - DNA, 19 bp, Homo sapiens
  siRNA target sequence for PIAS1 (NM_016166.1,622-640).
caacaagtgcagcaaatca

SEQ ID NO: 35088 - DNA, 19 bp, Homo sapiens
  siRNA target sequence for PIAS1 (NM_016166.1,625-643).
caagtgcagcaaatcagta

SEQ ID NO: 35089 - DNA, 19 bp, Homo sapiens
  siRNA target sequence for PIAS1 (NM_016166.1,652-670).
gatatttctgggaccaaat

SEQ ID NO: 35090 - DNA, 19 bp, Homo sapiens
  siRNA target sequence for PIAS1 (NM_016166.1,682-700).
gtacaggtccagttaaggt

SEQ ID NO: 35091 - DNA, 19 bp, Homo sapiens
  siRNA target sequence for PIAS1 (NM_016166.1,690-708).
ccagttaaggttttgttta

SEQ ID NO: 35092 - DNA, 19 bp, Homo sapiens
  siRNA target sequence for PIAS1 (NM_016166.1,693-711).
gttaaggttttgtttatca

SEQ ID NO: 35093 - DNA, 19 bp, Homo sapiens
  siRNA target sequence for PIAS1 (NM_016166.1,829-847).
cgacccagccgaccaatta

SEQ ID NO: 35094 - DNA, 19 bp, Homo sapiens
  siRNA target sequence for PIAS1 (NM_016166.1,830-848).
gacccagccgaccaattaa

SEQ ID NO: 35095 - DNA, 19 bp, Homo sapiens
  siRNA target sequence for PIAS1 (NM_016166.1,833-851).
ccagccgaccaattaatat

SEQ ID NO: 35096 - DNA, 19 bp, Homo sapiens
  siRNA target sequence for PIAS1 (NM_016166.1,864-882).
ccgactgtccacaacagta

SEQ ID NO: 35097 - DNA, 19 bp, Homo sapiens
  siRNA target sequence for PIAS1 (NM_016166.1,933-951).
catggcagtatatcttgta

SEQ ID NO: 35098 - DNA, 19 bp, Homo sapiens
  siRNA target sequence for PIAS1 (NM_016166.1,1005-1023).
gaatccggatcattctaga

SEQ ID NO: 35099 - DNA, 19 bp, Homo sapiens
  siRNA target sequence for PIAS1 (NM_016166.1,1011-1029).
ggatcattctagagcttta

SEQ ID NO: 35100 - DNA, 19 bp, Homo sapiens
  siRNA target sequence for PIAS1 (NM_016166.1,1015-1033).
cattctagagctttaatta

SEQ ID NO: 35101 - DNA, 19 bp, Homo sapiens
  siRNA target sequence for PIAS1 (NM_016166.1,1049-1067).
cggatccagacagtgaaat

SEQ ID NO: 35102 - DNA, 19 bp, Homo sapiens
  siRNA target sequence for PIAS1 (NM_016166.1,1050-1068).
ggatccagacagtgaaata

SEQ ID NO: 35103 - DNA, 19 bp, Homo sapiens
  siRNA target sequence for PIAS1 (NM_016166.1,1054-1072).
ccagacagtgaaatagcta

SEQ ID NO: 35104 - DNA, 19 bp, Homo sapiens
  siRNA target sequence for PIAS1 (NM_016166.1,1081-1099).
ctaagggtttctctactat

SEQ ID NO: 35105 - DNA, 19 bp, Homo sapiens
  siRNA target sequence for PIAS1 (NM_016166.1,1148-1166).
gttctcatctacaatgttt

SEQ ID NO: 35106 - DNA, 19 bp, Homo sapiens
  siRNA target sequence for PIAS1 (NM_016166.1,1163-1181).
gttttgacgcaactcttta

SEQ ID NO: 35107 - DNA, 19 bp, Homo sapiens
  siRNA target sequence for PIAS1 (NM_016166.1,1171-1189).
gcaactctttacattcaga

SEQ ID NO: 35108 - DNA, 19 bp, Homo sapiens
  siRNA target sequence for PIAS1 (NM_016166.1,1241-1259).
catatgaacaccttattat

SEQ ID NO: 35109 - DNA, 19 bp, Homo sapiens
  siRNA target sequence for PIAS1 (NM_016166.1,1265-1283).
gcttgtttatggaaatcct

SEQ ID NO: 35110 - DNA, 19 bp, Homo sapiens
  siRNA target sequence for PIAS1 (NM_016166.1,1266-1284).
cttgtttatggaaatccta

SEQ ID NO: 35111 - DNA, 19 bp, Homo sapiens
  siRNA target sequence for PIAS1 (NM_016166.1,1276-1294).
gaaatcctaaagtactgta

SEQ ID NO: 35112 - DNA, 19 bp, Homo sapiens
  siRNA target sequence for PIAS1 (NM_016166.1,1334-1352).
gggcaccgatgagatcaaa

SEQ ID NO: 35113 - DNA, 19 bp, Homo sapiens
  siRNA target sequence for PIAS1 (NM_016166.1,1336-1354).
gcaccgatgagatcaaaaa

SEQ ID NO: 35114 - DNA, 19 bp, Homo sapiens
  siRNA target sequence for PIAS1 (NM_016166.1,1340-1358).
cgatgagatcaaaaaagga

SEQ ID NO: 35115 - DNA, 19 bp, Homo sapiens
  siRNA target sequence for PIAS1 (NM_016166.1,1366-1384).
gaagtttctgcctcttaca

SEQ ID NO: 35116 - DNA, 19 bp, Homo sapiens
  siRNA target sequence for PIAS1 (NM_016166.1,1435-1453).
caccaccagtcctcaaata

SEQ ID NO: 35117 - DNA, 19 bp, Homo sapiens
  siRNA target sequence for PIAS1 (NM_016166.1,1437-1455).
ccaccagtcctcaaataaa

SEQ ID NO: 35118 - DNA, 19 bp, Homo sapiens
  siRNA target sequence for PIAS1 (NM_016166.1,1438-1456).
caccagtcctcaaataaaa

SEQ ID NO: 35119 - DNA, 19 bp, Homo sapiens
  siRNA target sequence for PIAS1 (NM_016166.1,1485-1503).
catagacagttcatctgat

SEQ ID NO: 35120 - DNA, 19 bp, Homo sapiens
  siRNA target sequence for PIAS1 (NM_016166.1,1636-1654).
gtagacacaagctacatta

SEQ ID NO: 35121 - DNA, 19 bp, Homo sapiens
  siRNA target sequence for PIAS1 (NM_016166.1,1639-1657).
gacacaagctacattaata

SEQ ID NO: 35122 - DNA, 19 bp, Homo sapiens
  siRNA target sequence for PIAS1 (NM_016166.1,1701-1719).
catgccttacgacttacaa

SEQ ID NO: 35123 - DNA, 19 bp, Homo sapiens
  siRNA target sequence for PIAS1 (NM_016166.1,1706-1724).
cttacgacttacaaggatt

SEQ ID NO: 35124 - DNA, 19 bp, Homo sapiens
  siRNA target sequence for PIAS1 (NM_016166.1,1748-1766).
gagacaatcagcattacaa

SEQ ID NO: 35125 - DNA, 19 bp, Homo sapiens
  siRNA target sequence for PIAS1 (NM_016166.1,1831-1849).
cggtttttcccgtatacct

SEQ ID NO: 35126 - DNA, 19 bp, Homo sapiens
  siRNA target sequence for PIAS1 (NM_016166.1,2021-2039).
gcatcataccagacattat

SEQ ID NO: 35127 - DNA, 19 bp, Homo sapiens
  siRNA target sequence for PIAS3 (NM_006099.2,196-214).
cccctagtgtccagatgaa

SEQ ID NO: 35128 - DNA, 19 bp, Homo sapiens
  siRNA target sequence for PIAS3 (NM_006099.2,439-457).
cattgcccttctatgaagt

SEQ ID NO: 35129 - DNA, 19 bp, Homo sapiens
  siRNA target sequence for PIAS3 (NM_006099.2,443-461).
gcccttctatgaagtctat

SEQ ID NO: 35130 - DNA, 19 bp, Homo sapiens
  siRNA target sequence for PIAS3 (NM_006099.2,513-531).
gaggaagcgcactttacct

SEQ ID NO: 35131 - DNA, 19 bp, Homo sapiens
  siRNA target sequence for PIAS3 (NM_006099.2,592-610).
ccaaatgtgattataccat

SEQ ID NO: 35132 - DNA, 19 bp, Homo sapiens
  siRNA target sequence for PIAS3 (NM_006099.2,649-667).
gcccccaggaagattattt

SEQ ID NO: 35133 - DNA, 19 bp, Homo sapiens
  siRNA target sequence for PIAS3 (NM_006099.2,838-856).
ctgagttcggacggaatta

SEQ ID NO: 35134 - DNA, 19 bp, Homo sapiens
  siRNA target sequence for PIAS3 (NM_006099.2,840-858).
gagttcggacggaattact

SEQ ID NO: 35135 - DNA, 19 bp, Homo sapiens
  siRNA target sequence for PIAS3 (NM_006099.2,891-909).
gcaggaacccttctacaaa

SEQ ID NO: 35136 - DNA, 19 bp, Homo sapiens
  siRNA target sequence for PIAS3 (NM_006099.2,892-910).
caggaacccttctacaaaa

SEQ ID NO: 35137 - DNA, 19 bp, Homo sapiens
  siRNA target sequence for PIAS3 (NM_006099.2,895-913).
gaacccttctacaaaaact

SEQ ID NO: 35138 - DNA, 19 bp, Homo sapiens
  siRNA target sequence for PIAS3 (NM_006099.2,951-969).
gcactgatcaaggagaaat

SEQ ID NO: 35139 - DNA, 19 bp, Homo sapiens
  siRNA target sequence for PIAS3 (NM_006099.2,1091-1109).
cttcgatgctgccctttat

SEQ ID NO: 35140 - DNA, 19 bp, Homo sapiens
  siRNA target sequence for PIAS3 (NM_006099.2,1160-1178).
gaaggctccctatgaatct

SEQ ID NO: 35141 - DNA, 19 bp, Homo sapiens
  siRNA target sequence for PIAS3 (NM_006099.2,1167-1185).
ccctatgaatctcttatca

SEQ ID NO: 35142 - DNA, 19 bp, Homo sapiens
  siRNA target sequence for PIAS3 (NM_006099.2,1179-1197).
cttatcattgatggtttat

SEQ ID NO: 35143 - DNA, 19 bp, Homo sapiens
  siRNA target sequence for PIAS3 (NM_006099.2,1255-1273).
gatcctggtgcccaatgaa

SEQ ID NO: 35144 - DNA, 19 bp, Homo sapiens
  siRNA target sequence for PIAS3 (NM_006099.2,1352-1370).
gggagatccatcagagaat

SEQ ID NO: 35145 - DNA, 19 bp, Homo sapiens
  siRNA target sequence for PIAS3 (NM_006099.2,1353-1371).
ggagatccatcagagaata

SEQ ID NO: 35146 - DNA, 19 bp, Homo sapiens
  siRNA target sequence for PIAS3 (NM_006099.2,1354-1372).
gagatccatcagagaataa

SEQ ID NO: 35147 - DNA, 19 bp, Homo sapiens
  siRNA target sequence for PIAS3 (NM_006099.2,1552-1570).
cgttgggtggggatttcct

SEQ ID NO: 35148 - DNA, 19 bp, Homo sapiens
  siRNA target sequence for PIAS3 (NM_006099.2,1571-1589).
gtccagtctcccactacat

SEQ ID NO: 35149 - DNA, 19 bp, Homo sapiens
  siRNA target sequence for PIAS3 (NM_006099.2,1615-1633).
gagccgacatccaaggttt

SEQ ID NO: 35150 - DNA, 19 bp, Homo sapiens
  siRNA target sequence for PIAS3 (NM_006099.2,1618-1636).
ccgacatccaaggtttaga

SEQ ID NO: 35151 - DNA, 19 bp, Homo sapiens
  siRNA target sequence for PIAS3 (NM_006099.2,1619-1637).
cgacatccaaggtttagat

SEQ ID NO: 35152 - DNA, 19 bp, Homo sapiens
  siRNA target sequence for PIAS3 (NM_006099.2,1685-1703).
catcacctcactagatgaa

SEQ ID NO: 35153 - DNA, 19 bp, Homo sapiens
  siRNA target sequence for PIAS3 (NM_006099.2,1904-1922).
ctgtcggtcagacatcatt

SEQ ID NO: 35154 - DNA, 19 bp, Homo sapiens
  siRNA target sequence for PIASY (NM_015897.2,309-327).
cgctggcaggccccaatat

SEQ ID NO: 35155 - DNA, 19 bp, Homo sapiens
  siRNA target sequence for PIASY (NM_015897.2,310-328).
gctggcaggccccaatatt

SEQ ID NO: 35156 - DNA, 19 bp, Homo sapiens
  siRNA target sequence for PIASY (NM_015897.2,314-332).
gcaggccccaatattgact

SEQ ID NO: 35157 - DNA, 19 bp, Homo sapiens
  siRNA target sequence for PIASY (NM_015897.2,315-333).
caggccccaatattgacta

SEQ ID NO: 35158 - DNA, 19 bp, Homo sapiens
  siRNA target sequence for PIASY (NM_015897.2,336-354).
ccgtgctctacggaaagta

SEQ ID NO: 35159 - DNA, 19 bp, Homo sapiens
  siRNA target sequence for PIASY (NM_015897.2,340-358).
gctctacggaaagtactta

SEQ ID NO: 35160 - DNA, 19 bp, Homo sapiens
  siRNA target sequence for PIASY (NM_015897.2,412-430).
gaagctgccgttctttaat

SEQ ID NO: 35161 - DNA, 19 bp, Homo sapiens
  siRNA target sequence for PIASY (NM_015897.2,445-463).
gctgaagcccaccgaatta

SEQ ID NO: 35162 - DNA, 19 bp, Homo sapiens
  siRNA target sequence for PIASY (NM_015897.2,519-537).
caagacaggtggagttgat

SEQ ID NO: 35163 - DNA, 19 bp, Homo sapiens
  siRNA target sequence for PIASY (NM_015897.2,578-596).
caggtcgtcctgagaatct

SEQ ID NO: 35164 - DNA, 19 bp, Homo sapiens
  siRNA target sequence for PIASY (NM_015897.2,580-598).
ggtcgtcctgagaatctgt

SEQ ID NO: 35165 - DNA, 19 bp, Homo sapiens
  siRNA target sequence for PIASY (NM_015897.2,581-599).
gtcgtcctgagaatctgtt

SEQ ID NO: 35166 - DNA, 19 bp, Homo sapiens
  siRNA target sequence for PIASY (NM_015897.2,683-701).
ggctactacccctccaata

SEQ ID NO: 35167 - DNA, 19 bp, Homo sapiens
  siRNA target sequence for PIASY (NM_015897.2,684-702).
gctactacccctccaataa

SEQ ID NO: 35168 - DNA, 19 bp, Homo sapiens
  siRNA target sequence for PIK4CA (NM_002650.1,648-666).
gcttgttcccccagataat

SEQ ID NO: 35169 - DNA, 19 bp, Homo sapiens
  siRNA target sequence for PIK4CA (NM_002650.1,806-824).
gctcccagctgcacaaata

SEQ ID NO: 35170 - DNA, 19 bp, Homo sapiens
  siRNA target sequence for PIK4CA (NM_002650.1,809-827).
cccagctgcacaaatacta

SEQ ID NO: 35171 - DNA, 19 bp, Homo sapiens
  siRNA target sequence for PIK4CA (NM_002650.1,946-964).
gtggccaactggagatcta

SEQ ID NO: 35172 - DNA, 19 bp, Homo sapiens
  siRNA target sequence for PIK4CA (NM_002650.1,949-967).
gccaactggagatctaagt

SEQ ID NO: 35173 - DNA, 19 bp, Homo sapiens
  siRNA target sequence for PIK4CA (NM_002650.1,950-968).
ccaactggagatctaagta

SEQ ID NO: 35174 - DNA, 19 bp, Homo sapiens
  siRNA target sequence for PIK4CA (NM_002650.1,1110-1128).
cccgggagccgttagtgat

SEQ ID NO: 35175 - DNA, 19 bp, Homo sapiens
  siRNA target sequence for PIK4CA (NM_002650.1,1124-1142).
gtgatgtgcctgaagcaat

SEQ ID NO: 35176 - DNA, 19 bp, Homo sapiens
  siRNA target sequence for PIK4CA (NM_002650.1,1129-1147).
gtgcctgaagcaatcaagt

SEQ ID NO: 35177 - DNA, 19 bp, Homo sapiens
  siRNA target sequence for PIK4CA (NM_002650.1,1277-1295).
cgcagtacggggtgaaagt

SEQ ID NO: 35178 - DNA, 19 bp, Homo sapiens
  siRNA target sequence for PIK4CA (NM_002650.1,1352-1370).
ccctcaggtacgacaagat

SEQ ID NO: 35179 - DNA, 19 bp, Homo sapiens
  siRNA target sequence for PIK4CA (NM_002650.1,1372-1390).
ggctatgtgcgggagtata

SEQ ID NO: 35180 - DNA, 19 bp, Homo sapiens
  siRNA target sequence for PIK4CA (NM_002650.1,1373-1391).
gctatgtgcgggagtatat

SEQ ID NO: 35181 - DNA, 19 bp, Homo sapiens
  siRNA target sequence for PIK4CA (NM_002650.1,1374-1392).
ctatgtgcgggagtatatt

SEQ ID NO: 35182 - DNA, 19 bp, Homo sapiens
  siRNA target sequence for PIK4CA (NM_002650.1,1393-1411).
ctgtgggcagcgtctaaat

SEQ ID NO: 35183 - DNA, 19 bp, Homo sapiens
  siRNA target sequence for PIK4CA (NM_058004.1,23-41).
ggatcttccagttagatga

SEQ ID NO: 35184 - DNA, 19 bp, Homo sapiens
  siRNA target sequence for PIK4CA (NM_058004.1,142-160).
ggtcttccaaaagtgtatt

SEQ ID NO: 35185 - DNA, 19 bp, Homo sapiens
  siRNA target sequence for PIK4CA (NM_058004.1,221-239).
gcttctgcttggtaactct

SEQ ID NO: 35186 - DNA, 19 bp, Homo sapiens
  siRNA target sequence for PIK4CA (NM_058004.1,255-273).
ctatagggatccttcactt

SEQ ID NO: 35187 - DNA, 19 bp, Homo sapiens
  siRNA target sequence for PIK4CA (NM_058004.1,266-284).
cttcacttagggatgagat

SEQ ID NO: 35188 - DNA, 19 bp, Homo sapiens
  siRNA target sequence for PIK4CA (NM_058004.1,502-520).
gttcgaaggcgttccttta

SEQ ID NO: 35189 - DNA, 19 bp, Homo sapiens
  siRNA target sequence for PIK4CA (NM_058004.1,506-524).
gaaggcgttcctttaatga

SEQ ID NO: 35190 - DNA, 19 bp, Homo sapiens
  siRNA target sequence for PIK4CA (NM_058004.1,509-527).
ggcgttcctttaatgactt

SEQ ID NO: 35191 - DNA, 19 bp, Homo sapiens
  siRNA target sequence for PIK4CA (NM_058004.1,656-674).
gaggatctgcctttcacta

SEQ ID NO: 35192 - DNA, 19 bp, Homo sapiens
  siRNA target sequence for PIK4CA (NM_058004.1,662-680).
ctgcctttcactactttga

SEQ ID NO: 35193 - DNA, 19 bp, Homo sapiens
  siRNA target sequence for PIK4CA (NM_058004.1,707-725).
ccctagagcctgagtacta

SEQ ID NO: 35194 - DNA, 19 bp, Homo sapiens
  siRNA target sequence for PIK4CA (NM_058004.1,712-730).
gagcctgagtactactttt

SEQ ID NO: 35195 - DNA, 19 bp, Homo sapiens
  siRNA target sequence for PIK4CA (NM_058004.1,714-732).
gcctgagtactacttttca

SEQ ID NO: 35196 - DNA, 19 bp, Homo sapiens
  siRNA target sequence for PIK4CA (NM_058004.1,970-988).
cgtgacactctgtactaca

SEQ ID NO: 35197 - DNA, 19 bp, Homo sapiens
  siRNA target sequence for PIK4CA (NM_058004.1,971-989).
gtgacactctgtactacat

SEQ ID NO: 35198 - DNA, 19 bp, Homo sapiens
  siRNA target sequence for PIK4CA (NM_058004.1,997-1015).
ctcccgacctcttttgtga

SEQ ID NO: 35199 - DNA, 19 bp, Homo sapiens
  siRNA target sequence for PIK4CA (NM_058004.1,1062-1080).
ggagctccagaagattcta

SEQ ID NO: 35200 - DNA, 19 bp, Homo sapiens
  siRNA target sequence for PIK4CA (NM_058004.1,1088-1106).
cagaccggatccacaatga

SEQ ID NO: 35201 - DNA, 19 bp, Homo sapiens
  siRNA target sequence for PIK4CA (NM_058004.1,1233-1251).
gacgtccagcaaagtcatt

SEQ ID NO: 35202 - DNA, 19 bp, Homo sapiens
  siRNA target sequence for PIK4CA (NM_058004.1,1235-1253).
cgtccagcaaagtcattat

SEQ ID NO: 35203 - DNA, 19 bp, Homo sapiens
  siRNA target sequence for PIK4CA (NM_058004.1,1239-1257).
cagcaaagtcattattgct

SEQ ID NO: 35204 - DNA, 19 bp, Homo sapiens
  siRNA target sequence for PIK4CA (NM_058004.1,1522-1540).
cgagacatcgctattgaca

SEQ ID NO: 35205 - DNA, 19 bp, Homo sapiens
  siRNA target sequence for PIK4CA (NM_058004.1,1571-1589).
cggtggacccagtgattgt

SEQ ID NO: 35206 - DNA, 19 bp, Homo sapiens
  siRNA target sequence for PIK4CA (NM_058004.1,1677-1695).
ccgagccttgggacacatt

SEQ ID NO: 35207 - DNA, 19 bp, Homo sapiens
  siRNA target sequence for PIK4CA (NM_058004.1,1777-1795).
cccctcgatgtgctgatta

SEQ ID NO: 35208 - DNA, 19 bp, Homo sapiens
  siRNA target sequence for PIK4CA (NM_058004.1,1778-1796).
ccctcgatgtgctgattat

SEQ ID NO: 35209 - DNA, 19 bp, Homo sapiens
  siRNA target sequence for PIK4CA (NM_058004.1,1779-1797).
cctcgatgtgctgattatt

SEQ ID NO: 35210 - DNA, 19 bp, Homo sapiens
  siRNA target sequence for PIK4CA (NM_058004.1,1815-1833).
ggttatcaccggaaatcaa

SEQ ID NO: 35211 - DNA, 19 bp, Homo sapiens
  siRNA target sequence for PIK4CA (NM_058004.1,1816-1834).
gttatcaccggaaatcaat

SEQ ID NO: 35212 - DNA, 19 bp, Homo sapiens
  siRNA target sequence for PIK4CA (NM_058004.1,1823-1841).
ccggaaatcaatacatcta

SEQ ID NO: 35213 - DNA, 19 bp, Homo sapiens
  siRNA target sequence for PIK4CA (NM_058004.1,1824-1842).
cggaaatcaatacatctat

SEQ ID NO: 35214 - DNA, 19 bp, Homo sapiens
  siRNA target sequence for PIK4CA (NM_058004.1,1826-1844).
gaaatcaatacatctatca

SEQ ID NO: 35215 - DNA, 19 bp, Homo sapiens
  siRNA target sequence for PIK4CA (NM_058004.1,1882-1900).
gccagctccgttgtatact

SEQ ID NO: 35216 - DNA, 19 bp, Homo sapiens
  siRNA target sequence for PIK4CA (NM_058004.1,1884-1902).
cagctccgttgtatactca

SEQ ID NO: 35217 - DNA, 19 bp, Homo sapiens
  siRNA target sequence for PIK4CA (NM_058004.1,2129-2147).
gagtactcattcctgtaat

SEQ ID NO: 35218 - DNA, 19 bp, Homo sapiens
  siRNA target sequence for PIK4CA (NM_058004.1,2185-2203).
gctaagcctcggttacaga

SEQ ID NO: 35219 - DNA, 19 bp, Homo sapiens
  siRNA target sequence for PIK4CA (NM_058004.1,2186-2204).
ctaagcctcggttacagaa

SEQ ID NO: 35220 - DNA, 19 bp, Homo sapiens
  siRNA target sequence for PIK4CA (NM_058004.1,2212-2230).
cgagacttctggctgtatt

SEQ ID NO: 35221 - DNA, 19 bp, Homo sapiens
  siRNA target sequence for PIK4CA (NM_058004.1,2222-2240).
ggctgtattccgttctgat

SEQ ID NO: 35222 - DNA, 19 bp, Homo sapiens
  siRNA target sequence for PIK4CA (NM_058004.1,2350-2368).
cggtccgtcctccagtata

SEQ ID NO: 35223 - DNA, 19 bp, Homo sapiens
  siRNA target sequence for PIK4CA (NM_058004.1,2351-2369).
ggtccgtcctccagtataa

SEQ ID NO: 35224 - DNA, 19 bp, Homo sapiens
  siRNA target sequence for PIK4CA (NM_058004.1,2355-2373).
cgtcctccagtataactca

SEQ ID NO: 35225 - DNA, 19 bp, Homo sapiens
  siRNA target sequence for PIK4CA (NM_058004.1,2413-2431).
gagctccgcagcactatca

SEQ ID NO: 35226 - DNA, 19 bp, Homo sapiens
  siRNA target sequence for PIK4CA (NM_058004.1,2532-2550).
gagggtactgcgttcaaca

SEQ ID NO: 35227 - DNA, 19 bp, Homo sapiens
  siRNA target sequence for PIK4CA (NM_058004.1,2535-2553).
ggtactgcgttcaacagat

SEQ ID NO: 35228 - DNA, 19 bp, Homo sapiens
  siRNA target sequence for PIK4CA (NM_058004.1,2555-2573).
ctgatcgcttccaggtaat

SEQ ID NO: 35229 - DNA, 19 bp, Homo sapiens
  siRNA target sequence for PIK4CA (NM_058004.1,2557-2575).
gatcgcttccaggtaatgt

SEQ ID NO: 35230 - DNA, 19 bp, Homo sapiens
  siRNA target sequence for PIK4CA (NM_058004.1,2596-2614).
gctattcagaaagacaaat

SEQ ID NO: 35231 - DNA, 19 bp, Homo sapiens
  siRNA target sequence for PIK4CA (NM_058004.1,2638-2656).
gcagtcgcggacaaagtat

SEQ ID NO: 35232 - DNA, 19 bp, Homo sapiens
  siRNA target sequence for PIK4CA (NM_058004.1,2639-2657).
cagtcgcggacaaagtatt

SEQ ID NO: 35233 - DNA, 19 bp, Homo sapiens
  siRNA target sequence for PIK4CA (NM_058004.1,2643-2661).
cgcggacaaagtattcgat

SEQ ID NO: 35234 - DNA, 19 bp, Homo sapiens
  siRNA target sequence for PIK4CA (NM_058004.1,2670-2688).
gaacatgatggcggataaa

SEQ ID NO: 35235 - DNA, 19 bp, Homo sapiens
  siRNA target sequence for PIK4CA (NM_058004.1,2779-2797).
gtggcagacaagtatctat

SEQ ID NO: 35236 - DNA, 19 bp, Homo sapiens
  siRNA target sequence for PIK4CA (NM_058004.1,2798-2816).
ctggtctggtggataagtt

SEQ ID NO: 35237 - DNA, 19 bp, Homo sapiens
  siRNA target sequence for PIK4CA (NM_058004.1,2885-2903).
cactgagcgctgatattca

SEQ ID NO: 35238 - DNA, 19 bp, Homo sapiens
  siRNA target sequence for PIK4CA (NM_058004.1,2904-2922).
caaggatcagccttactat

SEQ ID NO: 35239 - DNA, 19 bp, Homo sapiens
  siRNA target sequence for PIK4CA (NM_058004.1,2971-2989).
gcccgtgagagcattgtga

SEQ ID NO: 35240 - DNA, 19 bp, Homo sapiens
  siRNA target sequence for PIK4CA (NM_058004.1,3326-3344).
ctgacctgaacaaaatgat

SEQ ID NO: 35241 - DNA, 19 bp, Homo sapiens
  siRNA target sequence for PIK4CA (NM_058004.1,3345-3363).
ggtccaggatctacattca

SEQ ID NO: 35242 - DNA, 19 bp, Homo sapiens
  siRNA target sequence for PIK4CA (NM_058004.1,3351-3369).
ggatctacattcagcttta

SEQ ID NO: 35243 - DNA, 19 bp, Homo sapiens
  siRNA target sequence for PIK4CA (NM_058004.1,3412-3430).
ctgaccgcaatgctcatta

SEQ ID NO: 35244 - DNA, 19 bp, Homo sapiens
  siRNA target sequence for PIK4CA (NM_058004.1,3424-3442).
ctcattagcagtaaagatt

SEQ ID NO: 35245 - DNA, 19 bp, Homo sapiens
  siRNA target sequence for PIK4CA (NM_058004.1,3426-3444).
cattagcagtaaagattgt

SEQ ID NO: 35246 - DNA, 19 bp, Homo sapiens
  siRNA target sequence for PIK4CA (NM_058004.1,3475-3493).
ggtcccctccggatgttca

SEQ ID NO: 35247 - DNA, 19 bp, Homo sapiens
  siRNA target sequence for PIK4CA (NM_058004.1,3476-3494).
gtcccctccggatgttcaa

SEQ ID NO: 35248 - DNA, 19 bp, Homo sapiens
  siRNA target sequence for PIK4CA (NM_058004.1,3479-3497).
ccctccggatgttcaatga

SEQ ID NO: 35249 - DNA, 19 bp, Homo sapiens
  siRNA target sequence for PJA2 (NM_014819.1,145-163).
gcagcaatggaccaagaat

SEQ ID NO: 35250 - DNA, 19 bp, Homo sapiens
  siRNA target sequence for PJA2 (NM_014819.1,191-209).
caggagggtatcagacaat

SEQ ID NO: 35251 - DNA, 19 bp, Homo sapiens
  siRNA target sequence for PJA2 (NM_014819.1,287-305).
gtcgggctggtgatgacta

SEQ ID NO: 35252 - DNA, 19 bp, Homo sapiens
  siRNA target sequence for PJA2 (NM_014819.1,290-308).
gggctggtgatgactatga

SEQ ID NO: 35253 - DNA, 19 bp, Homo sapiens
  siRNA target sequence for PJA2 (NM_014819.1,328-346).
gttccaaaggaaaattcct

SEQ ID NO: 35254 - DNA, 19 bp, Homo sapiens
  siRNA target sequence for PJA2 (NM_014819.1,358-376).
cctttggatcaagttgatt

SEQ ID NO: 35255 - DNA, 19 bp, Homo sapiens
  siRNA target sequence for PJA2 (NM_014819.1,363-381).
ggatcaagttgattcttct

SEQ ID NO: 35256 - DNA, 19 bp, Homo sapiens
  siRNA target sequence for PJA2 (NM_014819.1,364-382).
gatcaagttgattcttctt

SEQ ID NO: 35257 - DNA, 19 bp, Homo sapiens
  siRNA target sequence for PJA2 (NM_014819.1,380-398).
ctttacccagtgaacctat

SEQ ID NO: 35258 - DNA, 19 bp, Homo sapiens
  siRNA target sequence for PJA2 (NM_014819.1,386-404).
ccagtgaacctatatttga

SEQ ID NO: 35259 - DNA, 19 bp, Homo sapiens
  siRNA target sequence for PJA2 (NM_014819.1,395-413).
ctatatttgaaaaaagtga

SEQ ID NO: 35260 - DNA, 19 bp, Homo sapiens
  siRNA target sequence for PJA2 (NM_014819.1,428-446).
cttgtggttcagcattgaa

SEQ ID NO: 35261 - DNA, 19 bp, Homo sapiens
  siRNA target sequence for PJA2 (NM_014819.1,433-451).
ggttcagcattgaatcaaa

SEQ ID NO: 35262 - DNA, 19 bp, Homo sapiens
  siRNA target sequence for PJA2 (NM_014819.1,455-473).
ctgagagcagtcaatcctt

SEQ ID NO: 35263 - DNA, 19 bp, Homo sapiens
  siRNA target sequence for PJA2 (NM_014819.1,470-488).
cctttgttgcagtacatca

SEQ ID NO: 35264 - DNA, 19 bp, Homo sapiens
  siRNA target sequence for PJA2 (NM_014819.1,495-513).
ggaaggcagggatacctta

SEQ ID NO: 35265 - DNA, 19 bp, Homo sapiens
  siRNA target sequence for PJA2 (NM_014819.1,499-517).
ggcagggataccttaggaa

SEQ ID NO: 35266 - DNA, 19 bp, Homo sapiens
  siRNA target sequence for PJA2 (NM_014819.1,509-527).
ccttaggaagcagtacaaa

SEQ ID NO: 35267 - DNA, 19 bp, Homo sapiens
  siRNA target sequence for PJA2 (NM_014819.1,538-556).
cactctgagggagagtata

SEQ ID NO: 35268 - DNA, 19 bp, Homo sapiens
  siRNA target sequence for PJA2 (NM_014819.1,572-590).
gtgcttcaagtgtccaaaa

SEQ ID NO: 35269 - DNA, 19 bp, Homo sapiens
  siRNA target sequence for PJA2 (NM_014819.1,632-650).
gcaaacatggagaagataa

SEQ ID NO: 35270 - DNA, 19 bp, Homo sapiens
  siRNA target sequence for PJA2 (NM_014819.1,633-651).
caaacatggagaagataat

SEQ ID NO: 35271 - DNA, 19 bp, Homo sapiens
  siRNA target sequence for PJA2 (NM_014819.1,676-694).
gtcgtggaaggtagtagat

SEQ ID NO: 35272 - DNA, 19 bp, Homo sapiens
  siRNA target sequence for PJA2 (NM_014819.1,699-717).
ggaatcattaggcaataca

SEQ ID NO: 35273 - DNA, 19 bp, Homo sapiens
  siRNA target sequence for PJA2 (NM_014819.1,709-727).
ggcaatacagtatttgagt

SEQ ID NO: 35274 - DNA, 19 bp, Homo sapiens
  siRNA target sequence for PJA2 (NM_014819.1,804-822).
gtttgaagagttagattct

SEQ ID NO: 35275 - DNA, 19 bp, Homo sapiens
  siRNA target sequence for PJA2 (NM_014819.1,817-835).
gattctgtaccattagtga

SEQ ID NO: 35276 - DNA, 19 bp, Homo sapiens
  siRNA target sequence for PJA2 (NM_014819.1,854-872).
ctgagtttgtccatcagaa

SEQ ID NO: 35277 - DNA, 19 bp, Homo sapiens
  siRNA target sequence for PJA2 (NM_014819.1,856-874).
gagtttgtccatcagaata

SEQ ID NO: 35278 - DNA, 19 bp, Homo sapiens
  siRNA target sequence for PJA2 (NM_014819.1,890-908).
ggtcttctcaagatgaaat

SEQ ID NO: 35279 - DNA, 19 bp, Homo sapiens
  siRNA target sequence for PJA2 (NM_014819.1,909-927).
ggttagtacgaaacaacaa

SEQ ID NO: 35280 - DNA, 19 bp, Homo sapiens
  siRNA target sequence for PJA2 (NM_014819.1,910-928).
gttagtacgaaacaacaaa

SEQ ID NO: 35281 - DNA, 19 bp, Homo sapiens
  siRNA target sequence for PJA2 (NM_014819.1,942-960).
ggaaagacagacagaacat

SEQ ID NO: 35282 - DNA, 19 bp, Homo sapiens
  siRNA target sequence for PJA2 (NM_014819.1,982-1000).
ggtccagggcatatttgta

SEQ ID NO: 35283 - DNA, 19 bp, Homo sapiens
  siRNA target sequence for PJA2 (NM_014819.1,1053-1071).
ggtagtgaggccaaaagtt

SEQ ID NO: 35284 - DNA, 19 bp, Homo sapiens
  siRNA target sequence for PJA2 (NM_014819.1,1054-1072).
gtagtgaggccaaaagtta

SEQ ID NO: 35285 - DNA, 19 bp, Homo sapiens
  siRNA target sequence for PJA2 (NM_014819.1,1122-1140).
gcatgaggcgaaacaaaga

SEQ ID NO: 35286 - DNA, 19 bp, Homo sapiens
  siRNA target sequence for PJA2 (NM_014819.1,1184-1202).
gctcagatgacctcttaat

SEQ ID NO: 35287 - DNA, 19 bp, Homo sapiens
  siRNA target sequence for PJA2 (NM_014819.1,1185-1203).
ctcagatgacctcttaata

SEQ ID NO: 35288 - DNA, 19 bp, Homo sapiens
  siRNA target sequence for PJA2 (NM_014819.1,1225-1243).
gagcatgactgtatgttct

SEQ ID NO: 35289 - DNA, 19 bp, Homo sapiens
  siRNA target sequence for PJA2 (NM_014819.1,1249-1267).
ccaccatactcaagagtta

SEQ ID NO: 35290 - DNA, 19 bp, Homo sapiens
  siRNA target sequence for PJA2 (NM_014819.1,1250-1268).
caccatactcaagagttat

SEQ ID NO: 35291 - DNA, 19 bp, Homo sapiens
  siRNA target sequence for PJA2 (NM_014819.1,1252-1270).
ccatactcaagagttatta

SEQ ID NO: 35292 - DNA, 19 bp, Homo sapiens
  siRNA target sequence for PJA2 (NM_014819.1,1257-1275).
ctcaagagttattacacaa

SEQ ID NO: 35293 - DNA, 19 bp, Homo sapiens
  siRNA target sequence for PJA2 (NM_014819.1,1430-1448).
cttctttgcctcatcgatt

SEQ ID NO: 35294 - DNA, 19 bp, Homo sapiens
  siRNA target sequence for PJA2 (NM_014819.1,1444-1462).
cgattttctggtacagaaa

SEQ ID NO: 35295 - DNA, 19 bp, Homo sapiens
  siRNA target sequence for PJA2 (NM_014819.1,1619-1637).
cttggttacagtacaatga

SEQ ID NO: 35296 - DNA, 19 bp, Homo sapiens
  siRNA target sequence for PJA2 (NM_014819.1,1697-1715).
ctttcatgttggatggtaa

SEQ ID NO: 35297 - DNA, 19 bp, Homo sapiens
  siRNA target sequence for PJA2 (NM_014819.1,1701-1719).
catgttggatggtaacaat

SEQ ID NO: 35298 - DNA, 19 bp, Homo sapiens
  siRNA target sequence for PJA2 (NM_014819.1,1881-1899).
gactgctctggcccattta

SEQ ID NO: 35299 - DNA, 19 bp, Homo sapiens
  siRNA target sequence for PJA2 (NM_014819.1,1883-1901).
ctgctctggcccatttaga

SEQ ID NO: 35300 - DNA, 19 bp, Homo sapiens
  siRNA target sequence for PJA2 (NM_014819.1,1885-1903).
gctctggcccatttagagt

SEQ ID NO: 35301 - DNA, 19 bp, Homo sapiens
  siRNA target sequence for PJA2 (NM_014819.1,1933-1951).
ccaccagctagtaaggaaa

SEQ ID NO: 35302 - DNA, 19 bp, Homo sapiens
  siRNA target sequence for PJA2 (NM_014819.1,1937-1955).
cagctagtaaggaaagcat

SEQ ID NO: 35303 - DNA, 19 bp, Homo sapiens
  siRNA target sequence for PJA2 (NM_014819.1,1996-2014).
gctattggtcaggaacaat

SEQ ID NO: 35304 - DNA, 19 bp, Homo sapiens
  siRNA target sequence for PJA2 (NM_014819.1,2025-2043).
ctgttgcagtgagtatatt

SEQ ID NO: 35305 - DNA, 19 bp, Homo sapiens
  siRNA target sequence for PJA2 (NM_014819.1,2027-2045).
gttgcagtgagtatattaa

SEQ ID NO: 35306 - DNA, 19 bp, Homo sapiens
  siRNA target sequence for PJA2 (NM_014819.1,2037-2055).
gtatattaaggatgatata

SEQ ID NO: 35307 - DNA, 19 bp, Homo sapiens
  siRNA target sequence for PJA2 (NM_014819.1,2098-2116).
gtctcaatttggctacaaa

SEQ ID NO: 35308 - DNA, 19 bp, Homo sapiens
  siRNA target sequence for PLAC3 (NM_020318.1,1187-1205).
gaataagcctggcgatttt

SEQ ID NO: 35309 - DNA, 19 bp, Homo sapiens
  siRNA target sequence for PLAC3 (NM_020318.1,1242-1260).
gggctggacacgcaagaaa

SEQ ID NO: 35310 - DNA, 19 bp, Homo sapiens
  siRNA target sequence for PLAC3 (NM_020318.1,1243-1261).
ggctggacacgcaagaaat

SEQ ID NO: 35311 - DNA, 19 bp, Homo sapiens
  siRNA target sequence for PLAC3 (NM_020318.1,1247-1265).
ggacacgcaagaaatcctt

SEQ ID NO: 35312 - DNA, 19 bp, Homo sapiens
  siRNA target sequence for PLAC3 (NM_020318.1,1420-1438).
gagcaagaaatccatcata

SEQ ID NO: 35313 - DNA, 19 bp, Homo sapiens
  siRNA target sequence for PLAC3 (NM_020318.1,1422-1440).
gcaagaaatccatcataca

SEQ ID NO: 35314 - DNA, 19 bp, Homo sapiens
  siRNA target sequence for PLAC3 (NM_020318.1,1562-1580).
gtcctattgggcaatctga

SEQ ID NO: 35315 - DNA, 19 bp, Homo sapiens
  siRNA target sequence for PLAC3 (NM_020318.1,1589-1607).
gagatgatgacgcttatct

SEQ ID NO: 35316 - DNA, 19 bp, Homo sapiens
  siRNA target sequence for PLAC3 (NM_020318.1,1599-1617).
cgcttatctcggcaatcaa

SEQ ID NO: 35317 - DNA, 19 bp, Homo sapiens
  siRNA target sequence for PLAC3 (NM_020318.1,1600-1618).
gcttatctcggcaatcaaa

SEQ ID NO: 35318 - DNA, 19 bp, Homo sapiens
  siRNA target sequence for PLAC3 (NM_020318.1,1822-1840).
caaccttggcccaagcatt

SEQ ID NO: 35319 - DNA, 19 bp, Homo sapiens
  siRNA target sequence for PLAC3 (NM_020318.1,1830-1848).
gcccaagcattcccttaaa

SEQ ID NO: 35320 - DNA, 19 bp, Homo sapiens
  siRNA target sequence for PLAC3 (NM_020318.1,1843-1861).
cttaaacacagggtcaaaa

SEQ ID NO: 35321 - DNA, 19 bp, Homo sapiens
  siRNA target sequence for PLAC3 (NM_020318.1,1909-1927).
cgagaagcagagaccttta

SEQ ID NO: 35322 - DNA, 19 bp, Homo sapiens
  siRNA target sequence for PLAC3 (NM_020318.1,1910-1928).
gagaagcagagacctttaa

SEQ ID NO: 35323 - DNA, 19 bp, Homo sapiens
  siRNA target sequence for PLAC3 (NM_020318.1,1936-1954).
gtaggactgcccatcttat

SEQ ID NO: 35324 - DNA, 19 bp, Homo sapiens
  siRNA target sequence for PLAC3 (NM_020318.1,2073-2091).
catcatcgcaggtgtgttt

SEQ ID NO: 35325 - DNA, 19 bp, Homo sapiens
  siRNA target sequence for PLAC3 (NM_020318.1,2164-2182).
cgggatgctcgcttcttct

SEQ ID NO: 35326 - DNA, 19 bp, Homo sapiens
  siRNA target sequence for PLAC3 (NM_020318.1,2165-2183).
gggatgctcgcttcttctt

SEQ ID NO: 35327 - DNA, 19 bp, Homo sapiens
  siRNA target sequence for PLAC3 (NM_020318.1,2167-2185).
gatgctcgcttcttcttct

SEQ ID NO: 35328 - DNA, 19 bp, Homo sapiens
  siRNA target sequence for PLAC3 (NM_020318.1,2192-2210).
gcaccgaccgcgtgaagaa

SEQ ID NO: 35329 - DNA, 19 bp, Homo sapiens
  siRNA target sequence for PLAC3 (NM_020318.1,2285-2303).
ggcacatggccctgtatgt

SEQ ID NO: 35330 - DNA, 19 bp, Homo sapiens
  siRNA target sequence for PLAC3 (NM_020318.1,2402-2420).
ctgaggatgggcactattt

SEQ ID NO: 35331 - DNA, 19 bp, Homo sapiens
  siRNA target sequence for PLAC3 (NM_020318.1,2562-2580).
gtgggttccctttagagat

SEQ ID NO: 35332 - DNA, 19 bp, Homo sapiens
  siRNA target sequence for PLAC3 (NM_020318.1,2570-2588).
cctttagagatgagaagta

SEQ ID NO: 35333 - DNA, 19 bp, Homo sapiens
  siRNA target sequence for PLAC3 (NM_020318.1,2677-2695).
gacaatgtggaattgatct

SEQ ID NO: 35334 - DNA, 19 bp, Homo sapiens
  siRNA target sequence for PLAC3 (NM_020318.1,2919-2937).
ctgtgagcccagcaagatt

SEQ ID NO: 35335 - DNA, 19 bp, Homo sapiens
  siRNA target sequence for PLAC3 (NM_020318.1,2970-2988).
cccactcacaggctatgat

SEQ ID NO: 35336 - DNA, 19 bp, Homo sapiens
  siRNA target sequence for PLAC3 (NM_020318.1,3047-3065).
gtcacgtggagtgtaacaa

SEQ ID NO: 35337 - DNA, 19 bp, Homo sapiens
  siRNA target sequence for PLAC3 (NM_020318.1,3146-3164).
cacccaagagggcatacat

SEQ ID NO: 35338 - DNA, 19 bp, Homo sapiens
  siRNA target sequence for PLAC3 (NM_020318.1,3148-3166).
cccaagagggcatacatga

SEQ ID NO: 35339 - DNA, 19 bp, Homo sapiens
  siRNA target sequence for PLAC3 (NM_020318.1,3206-3224).
ctcacttcctcaacatcta

SEQ ID NO: 35340 - DNA, 19 bp, Homo sapiens
  siRNA target sequence for PLAC3 (NM_020318.1,3382-3400).
ggactctaccatgtcttta

SEQ ID NO: 35341 - DNA, 19 bp, Homo sapiens
  siRNA target sequence for PLAC3 (NM_020318.1,3565-3583).
gctccgttcaccaactaca

SEQ ID NO: 35342 - DNA, 19 bp, Homo sapiens
  siRNA target sequence for PLAC3 (NM_020318.1,3566-3584).
ctccgttcaccaactacat

SEQ ID NO: 35343 - DNA, 19 bp, Homo sapiens
  siRNA target sequence for PLAC3 (NM_020318.1,3568-3586).
ccgttcaccaactacatga

SEQ ID NO: 35344 - DNA, 19 bp, Homo sapiens
  siRNA target sequence for PLAC3 (NM_020318.1,3612-3630).
caacttcactcctaaccaa

SEQ ID NO: 35345 - DNA, 19 bp, Homo sapiens
  siRNA target sequence for PLAC3 (NM_020318.1,3627-3645).
ccaagtggcccgaatgcat

SEQ ID NO: 35346 - DNA, 19 bp, Homo sapiens
  siRNA target sequence for PLAC3 (NM_020318.1,3628-3646).
caagtggcccgaatgcatt

SEQ ID NO: 35347 - DNA, 19 bp, Homo sapiens
  siRNA target sequence for PLAC3 (NM_020318.1,3633-3651).
ggcccgaatgcattgctat

SEQ ID NO: 35348 - DNA, 19 bp, Homo sapiens
  siRNA target sequence for PLAC3 (NM_020318.1,3634-3652).
gcccgaatgcattgctatt

SEQ ID NO: 35349 - DNA, 19 bp, Homo sapiens
  siRNA target sequence for PLAC3 (NM_020318.1,3635-3653).
cccgaatgcattgctattt

SEQ ID NO: 35350 - DNA, 19 bp, Homo sapiens
  siRNA target sequence for PLAC3 (NM_020318.1,3638-3656).
gaatgcattgctatttgga

SEQ ID NO: 35351 - DNA, 19 bp, Homo sapiens
  siRNA target sequence for PLAC3 (NM_020318.1,3647-3665).
gctatttggacctagtcta

SEQ ID NO: 35352 - DNA, 19 bp, Homo sapiens
  siRNA target sequence for PLAC3 (NM_020318.1,3648-3666).
ctatttggacctagtctat

SEQ ID NO: 35353 - DNA, 19 bp, Homo sapiens
  siRNA target sequence for PLAC3 (NM_020318.1,3731-3749).
ccaacaagtccctcactat

SEQ ID NO: 35354 - DNA, 19 bp, Homo sapiens
  siRNA target sequence for PLAC3 (NM_020318.1,3753-3771).
ctggctgcctcctattagt

SEQ ID NO: 35355 - DNA, 19 bp, Homo sapiens
  siRNA target sequence for PLAC3 (NM_020318.1,3827-3845).
ggacctttcgtcagtatgt

SEQ ID NO: 35356 - DNA, 19 bp, Homo sapiens
  siRNA target sequence for PLAC3 (NM_020318.1,3870-3888).
gtgtgactcctcaggttat

SEQ ID NO: 35357 - DNA, 19 bp, Homo sapiens
  siRNA target sequence for PLAC3 (NM_020318.1,3874-3892).
gactcctcaggttattgga

SEQ ID NO: 35358 - DNA, 19 bp, Homo sapiens
  siRNA target sequence for PLAC3 (NM_020318.1,4094-4112).
cctcgcaggtcctctttga

SEQ ID NO: 35359 - DNA, 19 bp, Homo sapiens
  siRNA target sequence for PLAC3 (NM_020318.1,4155-4173).
ccccttagacactttctgt

SEQ ID NO: 35360 - DNA, 19 bp, Homo sapiens
  siRNA target sequence for PLAC3 (NM_020318.1,4360-4378).
cccgtggtggtgacacatt

SEQ ID NO: 35361 - DNA, 19 bp, Homo sapiens
  siRNA target sequence for PLAC3 (NM_020318.1,4362-4380).
cgtggtggtgacacattct

SEQ ID NO: 35362 - DNA, 19 bp, Homo sapiens
  siRNA target sequence for PLAC3 (NM_020318.1,4375-4393).
cattctcacaggaagttca

SEQ ID NO: 35363 - DNA, 19 bp, Homo sapiens
  siRNA target sequence for PLAC3 (NM_020318.1,4475-4493).
ctcctctgaaccacattca

SEQ ID NO: 35364 - DNA, 19 bp, Homo sapiens
  siRNA target sequence for PLAC3 (NM_020318.1,4488-4506).
cattcatggagctccttat

SEQ ID NO: 35365 - DNA, 19 bp, Homo sapiens
  siRNA target sequence for PLAC3 (NM_020318.1,4664-4682).
gtgaaccttttgagagaaa

SEQ ID NO: 35366 - DNA, 19 bp, Homo sapiens
  siRNA target sequence for PLAC3 (NM_020318.1,4746-4764).
ggcttactcctctcatgaa

SEQ ID NO: 35367 - DNA, 19 bp, Homo sapiens
  siRNA target sequence for PLAC3 (NM_020318.1,4754-4772).
cctctcatgaagacaagaa

SEQ ID NO: 35368 - DNA, 19 bp, Homo sapiens
  siRNA target sequence for PLAC3 (NM_020318.1,4811-4829).
ccctaatttgcacatcata

SEQ ID NO: 35369 - DNA, 19 bp, Homo sapiens
  siRNA target sequence for PLAC3 (NM_020318.1,4823-4841).
catcataccatccagattt

SEQ ID NO: 35370 - DNA, 19 bp, Homo sapiens
  siRNA target sequence for PLAC3 (NM_020318.1,4922-4940).
cagaaggtagcctgaagaa

SEQ ID NO: 35371 - DNA, 19 bp, Homo sapiens
  siRNA target sequence for PLAC3 (NM_020318.1,5119-5137).
cagcataatccactgatta

SEQ ID NO: 35372 - DNA, 19 bp, Homo sapiens
  siRNA target sequence for PLAC3 (NM_020318.1,5122-5140).
cataatccactgattatca

SEQ ID NO: 35373 - DNA, 19 bp, Homo sapiens
  siRNA target sequence for PLAC3 (NM_020318.1,5128-5146).
ccactgattatcaatgtga

SEQ ID NO: 35374 - DNA, 19 bp, Homo sapiens
  siRNA target sequence for PLAC3 (NM_020318.1,5257-5275).
ctttcggctcccagtaact

SEQ ID NO: 35375 - DNA, 19 bp, Homo sapiens
  siRNA target sequence for PLAC3 (NM_020318.1,5354-5372).
cgtcattgctgcttgatca

SEQ ID NO: 35376 - DNA, 19 bp, Homo sapiens
  siRNA target sequence for PLAC3 (NM_020318.1,5382-5400).
ggtgaactgtacctctata

SEQ ID NO: 35377 - DNA, 19 bp, Homo sapiens
  siRNA target sequence for PLAC3 (NM_020318.1,5568-5586).
cccgtctttggtgaactat

SEQ ID NO: 35378 - DNA, 19 bp, Homo sapiens
  siRNA target sequence for PLAC3 (NM_020318.1,5573-5591).
ctttggtgaactatgcaaa

SEQ ID NO: 35379 - DNA, 19 bp, Homo sapiens
  siRNA target sequence for PLAC3 (NM_020318.1,5578-5596).
gtgaactatgcaaacttct

SEQ ID NO: 35380 - DNA, 19 bp, Homo sapiens
  siRNA target sequence for PLAC3 (NM_020318.1,5601-5619).
ctcagagggaaccaaattt

SEQ ID NO: 35381 - DNA, 19 bp, Homo sapiens
  siRNA target sequence for PLAC3 (NM_020318.1,5607-5625).
gggaaccaaatttctgaaa

SEQ ID NO: 35382 - DNA, 19 bp, Homo sapiens
  siRNA target sequence for PLAC3 (NM_020318.1,5620-5638).
ctgaaacgctgctcaatct

SEQ ID NO: 35383 - DNA, 19 bp, Homo sapiens
  siRNA target sequence for PLAC3 (NM_020318.1,5622-5640).
gaaacgctgctcaatctct

SEQ ID NO: 35384 - DNA, 19 bp, Homo sapiens
  siRNA target sequence for PLAC3 (NM_020318.1,5673-5691).
cccatggctgacatgtctt

SEQ ID NO: 35385 - DNA, 19 bp, Homo sapiens
  siRNA target sequence for PLAC3 (NM_020318.1,5705-5723).
ggtctctccctgaagtcta

SEQ ID NO: 35386 - DNA, 19 bp, Homo sapiens
  siRNA target sequence for PLAC3 (NM_020318.1,5743-5761).
gctccccctattattctga

SEQ ID NO: 35387 - DNA, 19 bp, Homo sapiens
  siRNA target sequence for PLAC3 (NM_020318.1,5831-5849).
gcaaaccagggtactatgt

SEQ ID NO: 35388 - DNA, 19 bp, Homo sapiens
  siRNA target sequence for PLAC3 (NM_020318.1,5841-5859).
gtactatgtggcagaaagt

SEQ ID NO: 35389 - DNA, 19 bp, Homo sapiens
  siRNA target sequence for PLAC3 (NM_020318.1,5954-5972).
caccccctcctgtgtttga

SEQ ID NO: 35390 - DNA, 19 bp, Homo sapiens
  siRNA target sequence for PLAC3 (NM_020318.1,5967-5985).
gtttgaaggcatgtatgaa

SEQ ID NO: 35391 - DNA, 19 bp, Homo sapiens
  siRNA target sequence for PLAC3 (NM_020318.1,6029-6047).
gtaaccaggaacgtgaaaa

SEQ ID NO: 35392 - DNA, 19 bp, Homo sapiens
  siRNA target sequence for PLAC3 (NM_020318.1,6076-6094).
ctgtggacccaggagttta

SEQ ID NO: 35393 - DNA, 19 bp, Homo sapiens
  siRNA target sequence for PLAC3 (NM_020318.1,6090-6108).
gtttaagttgtgtgagaat

SEQ ID NO: 35394 - DNA, 19 bp, Homo sapiens
  siRNA target sequence for PLAC3 (NM_020318.1,6228-6246).
cgtgatgctacctgagaat

SEQ ID NO: 35395 - DNA, 19 bp, Homo sapiens
  siRNA target sequence for PLAC3 (NM_020318.1,6229-6247).
gtgatgctacctgagaata

SEQ ID NO: 35396 - DNA, 19 bp, Homo sapiens
  siRNA target sequence for PLAC3 (NM_020318.1,6272-6290).
ggatggaacctgtcaaagt

SEQ ID NO: 35397 - DNA, 19 bp, Homo sapiens
  siRNA target sequence for PLAC3 (NM_020318.1,6459-6477).
caagaaggtcattccattt

SEQ ID NO: 35398 - DNA, 19 bp, Homo sapiens
  siRNA target sequence for PLAGL1 (NM_002656.2,2222-2240).
ctagcggaaccaaggaaaa

SEQ ID NO: 35399 - DNA, 19 bp, Homo sapiens
  siRNA target sequence for PLAGL1 (NM_002656.2,2460-2478).
catctcgccttcattccaa

SEQ ID NO: 35400 - DNA, 19 bp, Homo sapiens
  siRNA target sequence for PLAGL1 (NM_002656.2,2744-2762).
ctaaaggtttttgcaatat

SEQ ID NO: 35401 - DNA, 19 bp, Homo sapiens
  siRNA target sequence for PLAGL1 (NM_002656.2,2756-2774).
gcaatatcagtttgtttga

SEQ ID NO: 35402 - DNA, 19 bp, Homo sapiens
  siRNA target sequence for PLAGL1 (NM_002656.2,2795-2813).
ctcagtcacctcaaaagct

SEQ ID NO: 35403 - DNA, 19 bp, Homo sapiens
  siRNA target sequence for PLAGL1 (NM_002656.2,2811-2829).
gctcaacccaggttttgat

SEQ ID NO: 35404 - DNA, 19 bp, Homo sapiens
  siRNA target sequence for PLAGL1 (NM_002656.2,2878-2896).
gcagatgctgtgaacctaa

SEQ ID NO: 35405 - DNA, 19 bp, Homo sapiens
  siRNA target sequence for PLAGL1 (NM_002656.2,2949-2967).
ccctcctgctacccaaaat

SEQ ID NO: 35406 - DNA, 19 bp, Homo sapiens
  siRNA target sequence for PLAGL1 (NM_002656.2,2953-2971).
cctgctacccaaaatacct

SEQ ID NO: 35407 - DNA, 19 bp, Homo sapiens
  siRNA target sequence for PLAGL1 (NM_006718.2,2292-2310).
gaagttcacgattcacaat

SEQ ID NO: 35408 - DNA, 19 bp, Homo sapiens
  siRNA target sequence for PLAGL1 (NM_006718.2,2367-2385).
ctttgtttccagatataaa

SEQ ID NO: 35409 - DNA, 19 bp, Homo sapiens
  siRNA target sequence for PMS1 (NM_000534.2,139-157).
cggtggtcagtgttgtaaa

SEQ ID NO: 35410 - DNA, 19 bp, Homo sapiens
  siRNA target sequence for PMS1 (NM_000534.2,140-158).
ggtggtcagtgttgtaaaa

SEQ ID NO: 35411 - DNA, 19 bp, Homo sapiens
  siRNA target sequence for PMS1 (NM_000534.2,187-205).
gtgccacaagcgtagatgt

SEQ ID NO: 35412 - DNA, 19 bp, Homo sapiens
  siRNA target sequence for PMS1 (NM_000534.2,190-208).
ccacaagcgtagatgttaa

SEQ ID NO: 35413 - DNA, 19 bp, Homo sapiens
  siRNA target sequence for PMS1 (NM_000534.2,191-209).
cacaagcgtagatgttaaa

SEQ ID NO: 35414 - DNA, 19 bp, Homo sapiens
  siRNA target sequence for PMS1 (NM_000534.2,193-211).
caagcgtagatgttaaact

SEQ ID NO: 35415 - DNA, 19 bp, Homo sapiens
  siRNA target sequence for PMS1 (NM_000534.2,213-231).
gagaactatggatttgata

SEQ ID NO: 35416 - DNA, 19 bp, Homo sapiens
  siRNA target sequence for PMS1 (NM_000534.2,257-275).
gggtatcaaggctgttgat

SEQ ID NO: 35417 - DNA, 19 bp, Homo sapiens
  siRNA target sequence for PMS1 (NM_000534.2,268-286).
ctgttgatgcacctgtaat

SEQ ID NO: 35418 - DNA, 19 bp, Homo sapiens
  siRNA target sequence for PMS1 (NM_000534.2,277-295).
cacctgtaatggcaatgaa

SEQ ID NO: 35419 - DNA, 19 bp, Homo sapiens
  siRNA target sequence for PMS1 (NM_000534.2,282-300).
gtaatggcaatgaagtact

SEQ ID NO: 35420 - DNA, 19 bp, Homo sapiens
  siRNA target sequence for PMS1 (NM_000534.2,341-359).
gacaacttacggttttcgt

SEQ ID NO: 35421 - DNA, 19 bp, Homo sapiens
  siRNA target sequence for PMS1 (NM_000534.2,363-381).
gaagccttggggtcaattt

SEQ ID NO: 35422 - DNA, 19 bp, Homo sapiens
  siRNA target sequence for PMS1 (NM_000534.2,366-384).
gccttggggtcaatttgtt

SEQ ID NO: 35423 - DNA, 19 bp, Homo sapiens
  siRNA target sequence for PMS1 (NM_000534.2,368-386).
cttggggtcaatttgttgt

SEQ ID NO: 35424 - DNA, 19 bp, Homo sapiens
  siRNA target sequence for PMS1 (NM_000534.2,371-389).
ggggtcaatttgttgtata

SEQ ID NO: 35425 - DNA, 19 bp, Homo sapiens
  siRNA target sequence for PMS1 (NM_000534.2,409-427).
caagaacggctgctgataa

SEQ ID NO: 35426 - DNA, 19 bp, Homo sapiens
  siRNA target sequence for PMS1 (NM_000534.2,412-430).
gaacggctgctgataattt

SEQ ID NO: 35427 - DNA, 19 bp, Homo sapiens
  siRNA target sequence for PMS1 (NM_000534.2,461-479).
ccacatactttctcagaaa

SEQ ID NO: 35428 - DNA, 19 bp, Homo sapiens
  siRNA target sequence for PMS1 (NM_000534.2,492-510).
ggtcaaggtacaactgtaa

SEQ ID NO: 35429 - DNA, 19 bp, Homo sapiens
  siRNA target sequence for PMS1 (NM_000534.2,603-621).
ctcctcatgagctttggta

SEQ ID NO: 35430 - DNA, 19 bp, Homo sapiens
  siRNA target sequence for PMS1 (NM_000534.2,608-626).
catgagctttggtatcctt

SEQ ID NO: 35431 - DNA, 19 bp, Homo sapiens
  siRNA target sequence for PMS1 (NM_000534.2,611-629).
gagctttggtatccttaaa

SEQ ID NO: 35432 - DNA, 19 bp, Homo sapiens
  siRNA target sequence for PMS1 (NM_000534.2,624-642).
cttaaacctgacttaagga

SEQ ID NO: 35433 - DNA, 19 bp, Homo sapiens
  siRNA target sequence for PMS1 (NM_000534.2,631-649).
ctgacttaaggattgtctt

SEQ ID NO: 35434 - DNA, 19 bp, Homo sapiens
  siRNA target sequence for PMS1 (NM_000534.2,685-703).
gagtatcagatcacaagat

SEQ ID NO: 35435 - DNA, 19 bp, Homo sapiens
  siRNA target sequence for PMS1 (NM_000534.2,730-748).
ctgttatgaacaatatgga

SEQ ID NO: 35436 - DNA, 19 bp, Homo sapiens
  siRNA target sequence for PMS1 (NM_000534.2,756-774).
cagtaccactctgaagaat

SEQ ID NO: 35437 - DNA, 19 bp, Homo sapiens
  siRNA target sequence for PMS1 (NM_000534.2,758-776).
gtaccactctgaagaatct

SEQ ID NO: 35438 - DNA, 19 bp, Homo sapiens
  siRNA target sequence for PMS1 (NM_000534.2,810-828).
gatgcagaccactctttca

SEQ ID NO: 35439 - DNA, 19 bp, Homo sapiens
  siRNA target sequence for PMS1 (NM_000534.2,813-831).
gcagaccactctttcacta

SEQ ID NO: 35440 - DNA, 19 bp, Homo sapiens
  siRNA target sequence for PMS1 (NM_000534.2,869-887).
cagtcgaccagtacatcaa

SEQ ID NO: 35441 - DNA, 19 bp, Homo sapiens
  siRNA target sequence for PMS1 (NM_000534.2,871-889).
gtcgaccagtacatcaaaa

SEQ ID NO: 35442 - DNA, 19 bp, Homo sapiens
  siRNA target sequence for PMS1 (NM_000534.2,874-892).
gaccagtacatcaaaaaga

SEQ ID NO: 35443 - DNA, 19 bp, Homo sapiens
  siRNA target sequence for PMS1 (NM_000534.2,909-927).
cgacatcattacaatctga

SEQ ID NO: 35444 - DNA, 19 bp, Homo sapiens
  siRNA target sequence for PMS1 (NM_000534.2,910-928).
gacatcattacaatctgaa

SEQ ID NO: 35445 - DNA, 19 bp, Homo sapiens
  siRNA target sequence for PMS1 (NM_000534.2,912-930).
catcattacaatctgaaat

SEQ ID NO: 35446 - DNA, 19 bp, Homo sapiens
  siRNA target sequence for PMS1 (NM_000534.2,938-956).
ggaatctactcgtttgtat

SEQ ID NO: 35447 - DNA, 19 bp, Homo sapiens
  siRNA target sequence for PMS1 (NM_000534.2,993-1011).
gatgttgatgtaaatttaa

SEQ ID NO: 35448 - DNA, 19 bp, Homo sapiens
  siRNA target sequence for PMS1 (NM_000534.2,1076-1094).
gatgacgacttgttatgga

SEQ ID NO: 35449 - DNA, 19 bp, Homo sapiens
  siRNA target sequence for PMS1 (NM_000534.2,1092-1110).
ggaccattacctagtacaa

SEQ ID NO: 35450 - DNA, 19 bp, Homo sapiens
  siRNA target sequence for PMS1 (NM_000534.2,1093-1111).
gaccattacctagtacaaa

SEQ ID NO: 35451 - DNA, 19 bp, Homo sapiens
  siRNA target sequence for PMS1 (NM_000534.2,1095-1113).
ccattacctagtacaaatt

SEQ ID NO: 35452 - DNA, 19 bp, Homo sapiens
  siRNA target sequence for PMS1 (NM_000534.2,1146-1164).
gctgacatcgttcttagta

SEQ ID NO: 35453 - DNA, 19 bp, Homo sapiens
  siRNA target sequence for PMS1 (NM_000534.2,1147-1165).
ctgacatcgttcttagtaa

SEQ ID NO: 35454 - DNA, 19 bp, Homo sapiens
  siRNA target sequence for PMS1 (NM_000534.2,1149-1167).
gacatcgttcttagtaaaa

SEQ ID NO: 35455 - DNA, 19 bp, Homo sapiens
  siRNA target sequence for PMS1 (NM_000534.2,1151-1169).
catcgttcttagtaaaaca

SEQ ID NO: 35456 - DNA, 19 bp, Homo sapiens
  siRNA target sequence for PMS1 (NM_000534.2,1230-1248).
gatacttcagtcattccat

SEQ ID NO: 35457 - DNA, 19 bp, Homo sapiens
  siRNA target sequence for PMS1 (NM_000534.2,1250-1268).
ccaaaatgatatgcataat

SEQ ID NO: 35458 - DNA, 19 bp, Homo sapiens
  siRNA target sequence for PMS1 (NM_000534.2,1310-1328).
gataagtattggtgacttt

SEQ ID NO: 35459 - DNA, 19 bp, Homo sapiens
  siRNA target sequence for PMS1 (NM_000534.2,1329-1347).
ggttatggtcattgtagta

SEQ ID NO: 35460 - DNA, 19 bp, Homo sapiens
  siRNA target sequence for PMS1 (NM_000534.2,1342-1360).
gtagtagtgaaatttctaa

SEQ ID NO: 35461 - DNA, 19 bp, Homo sapiens
  siRNA target sequence for PMS1 (NM_000534.2,1389-1407).
caggacatttcaatgagta

SEQ ID NO: 35462 - DNA, 19 bp, Homo sapiens
  siRNA target sequence for PMS1 (NM_000534.2,1391-1409).
ggacatttcaatgagtaat

SEQ ID NO: 35463 - DNA, 19 bp, Homo sapiens
  siRNA target sequence for PMS1 (NM_000534.2,1421-1439).
gaactctcagacggaatat

SEQ ID NO: 35464 - DNA, 19 bp, Homo sapiens
  siRNA target sequence for PMS1 (NM_000534.2,1424-1442).
ctctcagacggaatatagt

SEQ ID NO: 35465 - DNA, 19 bp, Homo sapiens
  siRNA target sequence for PMS1 (NM_000534.2,1489-1507).
gcaataaagaccatataga

SEQ ID NO: 35466 - DNA, 19 bp, Homo sapiens
  siRNA target sequence for PMS1 (NM_000534.2,1490-1508).
caataaagaccatatagat

SEQ ID NO: 35467 - DNA, 19 bp, Homo sapiens
  siRNA target sequence for PMS1 (NM_000534.2,1574-1592).
gagcaggggaaatatactt

SEQ ID NO: 35468 - DNA, 19 bp, Homo sapiens
  siRNA target sequence for PMS1 (NM_000534.2,1577-1595).
caggggaaatatacttaaa

SEQ ID NO: 35469 - DNA, 19 bp, Homo sapiens
  siRNA target sequence for PMS1 (NM_000534.2,1638-1656).
cctgaaaaaagtttaccat

SEQ ID NO: 35470 - DNA, 19 bp, Homo sapiens
  siRNA target sequence for PMS1 (NM_000534.2,1753-1771).
gaaaagttacagcttatga

SEQ ID NO: 35471 - DNA, 19 bp, Homo sapiens
  siRNA target sequence for PMS1 (NM_000534.2,1765-1783).
cttatgatttacttagcaa

SEQ ID NO: 35472 - DNA, 19 bp, Homo sapiens
  siRNA target sequence for PMS1 (NM_000534.2,1776-1794).
cttagcaatcgagtaatca

SEQ ID NO: 35473 - DNA, 19 bp, Homo sapiens
  siRNA target sequence for PMS1 (NM_000534.2,1854-1872).
gaaaatcctaagactagtt

SEQ ID NO: 35474 - DNA, 19 bp, Homo sapiens
  siRNA target sequence for PMS1 (NM_000534.2,1877-1895).
ggatgcaacactacaaatt

SEQ ID NO: 35475 - DNA, 19 bp, Homo sapiens
  siRNA target sequence for PMS1 (NM_000534.2,1885-1903).
cactacaaattgaagaact

SEQ ID NO: 35476 - DNA, 19 bp, Homo sapiens
  siRNA target sequence for PMS1 (NM_000534.2,1944-1962).
gagaaggctactaaagact

SEQ ID NO: 35477 - DNA, 19 bp, Homo sapiens
  siRNA target sequence for PMS1 (NM_000534.2,1961-1979).
cttggaacgatacaatagt

SEQ ID NO: 35478 - DNA, 19 bp, Homo sapiens
  siRNA target sequence for PMS1 (NM_000534.2,1965-1983).
gaacgatacaatagtcaaa

SEQ ID NO: 35479 - DNA, 19 bp, Homo sapiens
  siRNA target sequence for PMS1 (NM_000534.2,1968-1986).
cgatacaatagtcaaatga

SEQ ID NO: 35480 - DNA, 19 bp, Homo sapiens
  siRNA target sequence for PMS1 (NM_000534.2,1998-2016).
gaacaggagtcacaaatgt

SEQ ID NO: 35481 - DNA, 19 bp, Homo sapiens
  siRNA target sequence for PMS1 (NM_000534.2,2046-2064).
cccaccagcgcatggaatt

SEQ ID NO: 35482 - DNA, 19 bp, Homo sapiens
  siRNA target sequence for PMS1 (NM_000534.2,2146-2164).
gaaggagtcaaaatattaa

SEQ ID NO: 35483 - DNA, 19 bp, Homo sapiens
  siRNA target sequence for PMS1 (NM_000534.2,2251-2269).
cttgcttgatccacaatct

SEQ ID NO: 35484 - DNA, 19 bp, Homo sapiens
  siRNA target sequence for PMS1 (NM_000534.2,2277-2295).
cctgatgcatggctaatga

SEQ ID NO: 35485 - DNA, 19 bp, Homo sapiens
  siRNA target sequence for PMS1 (NM_000534.2,2280-2298).
gatgcatggctaatgacat

SEQ ID NO: 35486 - DNA, 19 bp, Homo sapiens
  siRNA target sequence for PMS1 (NM_000534.2,2315-2333).
gttattaaatccatataga

SEQ ID NO: 35487 - DNA, 19 bp, Homo sapiens
  siRNA target sequence for PMS1 (NM_000534.2,2392-2410).
cactggaaaagccaattat

SEQ ID NO: 35488 - DNA, 19 bp, Homo sapiens
  siRNA target sequence for PMS1 (NM_000534.2,2411-2429).
gttaacagagagtcttttt

SEQ ID NO: 35489 - DNA, 19 bp, Homo sapiens
  siRNA target sequence for PMS1 (NM_000534.2,2418-2436).
gagagtctttttaatggat

SEQ ID NO: 35490 - DNA, 19 bp, Homo sapiens
  siRNA target sequence for PMS1 (NM_000534.2,2437-2455).
ctcattatttagacgtttt

SEQ ID NO: 35491 - DNA, 19 bp, Homo sapiens
  siRNA target sequence for PMS1 (NM_000534.2,2448-2466).
gacgttttatataaaatga

SEQ ID NO: 35492 - DNA, 19 bp, Homo sapiens
  siRNA target sequence for PMS1 (NM_000534.2,2482-2500).
gatacagtggatcaactta

SEQ ID NO: 35493 - DNA, 19 bp, Homo sapiens
  siRNA target sequence for PMS1 (NM_000534.2,2514-2532).
cgtcttacagcgaatggtt

SEQ ID NO: 35494 - DNA, 19 bp, Homo sapiens
  siRNA target sequence for PMS1 (NM_000534.2,2515-2533).
gtcttacagcgaatggttt

SEQ ID NO: 35495 - DNA, 19 bp, Homo sapiens
  siRNA target sequence for PMS1 (NM_000534.2,2523-2541).
gcgaatggtttcaagataa

SEQ ID NO: 35496 - DNA, 19 bp, Homo sapiens
  siRNA target sequence for PMS1 (NM_000534.2,2524-2542).
cgaatggtttcaagataaa

SEQ ID NO: 35497 - DNA, 19 bp, Homo sapiens
  siRNA target sequence for PMS1 (NM_000534.2,2640-2658).
cttaatgctatattaaaca

SEQ ID NO: 35498 - DNA, 19 bp, Homo sapiens
  siRNA target sequence for PMS1 (NM_000534.2,2683-2701).
gtagacctcgcaaagtgat

SEQ ID NO: 35499 - DNA, 19 bp, Homo sapiens
  siRNA target sequence for PMS1 (NM_000534.2,2689-2707).
ctcgcaaagtgataagtta

SEQ ID NO: 35500 - DNA, 19 bp, Homo sapiens
  siRNA target sequence for PMS1 (NM_000534.2,2691-2709).
cgcaaagtgataagttatt

SEQ ID NO: 35501 - DNA, 19 bp, Homo sapiens
  siRNA target sequence for PMS1 (NM_000534.2,2724-2742).
gtgcgtctatccagacaat

SEQ ID NO: 35502 - DNA, 19 bp, Homo sapiens
  siRNA target sequence for PMS1 (NM_000534.2,2726-2744).
gcgtctatccagacaatta

SEQ ID NO: 35503 - DNA, 19 bp, Homo sapiens
  siRNA target sequence for PMS1 (NM_000534.2,2737-2755).
gacaattacccatgtactt

SEQ ID NO: 35504 - DNA, 19 bp, Homo sapiens
  siRNA target sequence for PMS1 (NM_000534.2,2739-2757).
caattacccatgtacttat

SEQ ID NO: 35505 - DNA, 19 bp, Homo sapiens
  siRNA target sequence for PMS2 (NM_000535.2,582-600).
ggtcttacatgcatactgt

SEQ ID NO: 35506 - DNA, 19 bp, Homo sapiens
  siRNA target sequence for PMS2 (NM_000535.2,589-607).
catgcatactgtatcattt

SEQ ID NO: 35507 - DNA, 19 bp, Homo sapiens
  siRNA target sequence for PMS2 (NM_000535.2,610-628).
gcaggcatccgtgtaagtt

SEQ ID NO: 35508 - DNA, 19 bp, Homo sapiens
  siRNA target sequence for PMS2 (NM_000535.2,639-657).
gcttggacaaggaaaacga

SEQ ID NO: 35509 - DNA, 19 bp, Homo sapiens
  siRNA target sequence for PMS2 (NM_000535.2,684-702).
ccccagcataaaggaaaat

SEQ ID NO: 35510 - DNA, 19 bp, Homo sapiens
  siRNA target sequence for PMS2 (NM_000535.2,685-703).
cccagcataaaggaaaata

SEQ ID NO: 35511 - DNA, 19 bp, Homo sapiens
  siRNA target sequence for PMS2 (NM_000535.2,686-704).
ccagcataaaggaaaatat

SEQ ID NO: 35512 - DNA, 19 bp, Homo sapiens
  siRNA target sequence for PMS2 (NM_000535.2,831-849).
ctcaggtttcatttcacaa

SEQ ID NO: 35513 - DNA, 19 bp, Homo sapiens
  siRNA target sequence for PMS2 (NM_000535.2,946-964).
gaggtctaccacatgtata

SEQ ID NO: 35514 - DNA, 19 bp, Homo sapiens
  siRNA target sequence for PMS2 (NM_000535.2,1010-1028).
cagaatgcgttgatatcaa

SEQ ID NO: 35515 - DNA, 19 bp, Homo sapiens
  siRNA target sequence for PMS2 (NM_000535.2,1017-1035).
cgttgatatcaatgttact

SEQ ID NO: 35516 - DNA, 19 bp, Homo sapiens
  siRNA target sequence for PMS2 (NM_000535.2,1097-1115).
ctttgataggaatgtttga

SEQ ID NO: 35517 - DNA, 19 bp, Homo sapiens
  siRNA target sequence for PMS2 (NM_000535.2,1101-1119).
gataggaatgtttgatagt

SEQ ID NO: 35518 - DNA, 19 bp, Homo sapiens
  siRNA target sequence for PMS2 (NM_000535.2,1118-1136).
gtgatgtcaacaagctaaa

SEQ ID NO: 35519 - DNA, 19 bp, Homo sapiens
  siRNA target sequence for PMS2 (NM_000535.2,1158-1176).
ggatgttgaaggtaactta

SEQ ID NO: 35520 - DNA, 19 bp, Homo sapiens
  siRNA target sequence for PMS2 (NM_000535.2,1159-1177).
gatgttgaaggtaacttaa

SEQ ID NO: 35521 - DNA, 19 bp, Homo sapiens
  siRNA target sequence for PMS2 (NM_000535.2,1162-1180).
gttgaaggtaacttaataa

SEQ ID NO: 35522 - DNA, 19 bp, Homo sapiens
  siRNA target sequence for PMS2 (NM_000535.2,1744-1762).
ccaaacacaaagcgtttta

SEQ ID NO: 35523 - DNA, 19 bp, Homo sapiens
  siRNA target sequence for POGK (NM_017542.3,133-151).
gcctaccctctcaatttga

SEQ ID NO: 35524 - DNA, 19 bp, Homo sapiens
  siRNA target sequence for POGK (NM_017542.3,209-227).
cggcagacatgcagaaagt

SEQ ID NO: 35525 - DNA, 19 bp, Homo sapiens
  siRNA target sequence for POGK (NM_017542.3,307-325).
gttttgacggagcaacaaa

SEQ ID NO: 35526 - DNA, 19 bp, Homo sapiens
  siRNA target sequence for POGK (NM_017542.3,402-420).
catgatcacccgtttggaa

SEQ ID NO: 35527 - DNA, 19 bp, Homo sapiens
  siRNA target sequence for POGK (NM_017542.3,577-595).
cgtctgcctcgggatatca

SEQ ID NO: 35528 - DNA, 19 bp, Homo sapiens
  siRNA target sequence for POGK (NM_017542.3,616-634).
gaggggtaccccttctaca

SEQ ID NO: 35529 - DNA, 19 bp, Homo sapiens
  siRNA target sequence for POGK (NM_017542.3,738-756).
gatggtagtggaatatgct

SEQ ID NO: 35530 - DNA, 19 bp, Homo sapiens
  siRNA target sequence for POGK (NM_017542.3,782-800).
ccaagcagtttggagtatt

SEQ ID NO: 35531 - DNA, 19 bp, Homo sapiens
  siRNA target sequence for POGK (NM_017542.3,794-812).
gagtattggaaaaaaacgt

SEQ ID NO: 35532 - DNA, 19 bp, Homo sapiens
  siRNA target sequence for POGK (NM_017542.3,909-927).
ccagcgtgtggccgaatat

SEQ ID NO: 35533 - DNA, 19 bp, Homo sapiens
  siRNA target sequence for POGK (NM_017542.3,913-931).
cgtgtggccgaatatgtca

SEQ ID NO: 35534 - DNA, 19 bp, Homo sapiens
  siRNA target sequence for POGK (NM_017542.3,1043-1061).
gttggtgtcgaagaatgat

SEQ ID NO: 35535 - DNA, 19 bp, Homo sapiens
  siRNA target sequence for POGK (NM_017542.3,1127-1145).
ctgagaaactcgtcactta

SEQ ID NO: 35536 - DNA, 19 bp, Homo sapiens
  siRNA target sequence for POGK (NM_017542.3,1169-1187).
gcagggcgcatgactatga

SEQ ID NO: 35537 - DNA, 19 bp, Homo sapiens
  siRNA target sequence for POGK (NM_017542.3,1210-1228).
gatgagacgcccatttgtt

SEQ ID NO: 35538 - DNA, 19 bp, Homo sapiens
  siRNA target sequence for POGK (NM_017542.3,1236-1254).
gccatcacgggtaactgtt

SEQ ID NO: 35539 - DNA, 19 bp, Homo sapiens
  siRNA target sequence for POGK (NM_017542.3,1241-1259).
cacgggtaactgttgataa

SEQ ID NO: 35540 - DNA, 19 bp, Homo sapiens
  siRNA target sequence for POGK (NM_017542.3,1335-1353).
ggctgatgggaggaagtta

SEQ ID NO: 35541 - DNA, 19 bp, Homo sapiens
  siRNA target sequence for POGK (NM_017542.3,1350-1368).
gttaccaccgtacatcatt

SEQ ID NO: 35542 - DNA, 19 bp, Homo sapiens
  siRNA target sequence for POGK (NM_017542.3,1354-1372).
ccaccgtacatcattttga

SEQ ID NO: 35543 - DNA, 19 bp, Homo sapiens
  siRNA target sequence for POGK (NM_017542.3,1513-1531).
cgagggatgctgatcttga

SEQ ID NO: 35544 - DNA, 19 bp, Homo sapiens
  siRNA target sequence for POGK (NM_017542.3,1721-1739).
gcccaaccgggaatgctaa

SEQ ID NO: 35545 - DNA, 19 bp, Homo sapiens
  siRNA target sequence for POGK (NM_017542.3,1724-1742).
caaccgggaatgctaagaa

SEQ ID NO: 35546 - DNA, 19 bp, Homo sapiens
  siRNA target sequence for POGK (NM_017542.3,1771-1789).
gtcatggtcgcgtggaata

SEQ ID NO: 35547 - DNA, 19 bp, Homo sapiens
  siRNA target sequence for POGK (NM_017542.3,1780-1798).
gcgtggaatagcatctcaa

SEQ ID NO: 35548 - DNA, 19 bp, Homo sapiens
  siRNA target sequence for POGZ (NM_015100.1,77-95).
cattgaggactctgtagtt

SEQ ID NO: 35549 - DNA, 19 bp, Homo sapiens
  siRNA target sequence for POGZ (NM_015100.1,90-108).
gtagttgaagattataatt

SEQ ID NO: 35550 - DNA, 19 bp, Homo sapiens
  siRNA target sequence for POGZ (NM_015100.1,192-210).
ggtctgggcacaatggtta

SEQ ID NO: 35551 - DNA, 19 bp, Homo sapiens
  siRNA target sequence for POGZ (NM_015100.1,249-267).
gccaatcatgtgactagtt

SEQ ID NO: 35552 - DNA, 19 bp, Homo sapiens
  siRNA target sequence for POGZ (NM_015100.1,273-291).
gtggcctcacaaccaatat

SEQ ID NO: 35553 - DNA, 19 bp, Homo sapiens
  siRNA target sequence for POGZ (NM_015100.1,275-293).
ggcctcacaaccaatattt

SEQ ID NO: 35554 - DNA, 19 bp, Homo sapiens
  siRNA target sequence for POGZ (NM_015100.1,282-300).
caaccaatatttatcacta

SEQ ID NO: 35555 - DNA, 19 bp, Homo sapiens
  siRNA target sequence for POGZ (NM_015100.1,296-314).
cactacgcagggatttcct

SEQ ID NO: 35556 - DNA, 19 bp, Homo sapiens
  siRNA target sequence for POGZ (NM_015100.1,305-323).
gggatttcctgtaaggaat

SEQ ID NO: 35557 - DNA, 19 bp, Homo sapiens
  siRNA target sequence for POGZ (NM_015100.1,327-345).
cggcctgtacaaaatgcaa

SEQ ID NO: 35558 - DNA, 19 bp, Homo sapiens
  siRNA target sequence for POGZ (NM_015100.1,328-346).
ggcctgtacaaaatgcaat

SEQ ID NO: 35559 - DNA, 19 bp, Homo sapiens
  siRNA target sequence for POGZ (NM_015100.1,383-401).
ccaaacggttagaccaatt

SEQ ID NO: 35560 - DNA, 19 bp, Homo sapiens
  siRNA target sequence for POGZ (NM_015100.1,388-406).
cggttagaccaattacact

SEQ ID NO: 35561 - DNA, 19 bp, Homo sapiens
  siRNA target sequence for POGZ (NM_015100.1,389-407).
ggttagaccaattacacta

SEQ ID NO: 35562 - DNA, 19 bp, Homo sapiens
  siRNA target sequence for POGZ (NM_015100.1,418-436).
caggtacccagtttgttaa

SEQ ID NO: 35563 - DNA, 19 bp, Homo sapiens
  siRNA target sequence for POGZ (NM_015100.1,758-776).
gaagcgacctggtgttaca

SEQ ID NO: 35564 - DNA, 19 bp, Homo sapiens
  siRNA target sequence for POGZ (NM_015100.1,768-786).
ggtgttacaggcgaaaata

SEQ ID NO: 35565 - DNA, 19 bp, Homo sapiens
  siRNA target sequence for POGZ (NM_015100.1,771-789).
gttacaggcgaaaatagca

SEQ ID NO: 35566 - DNA, 19 bp, Homo sapiens
  siRNA target sequence for POGZ (NM_015100.1,778-796).
gcgaaaatagcaatgaagt

SEQ ID NO: 35567 - DNA, 19 bp, Homo sapiens
  siRNA target sequence for POGZ (NM_015100.1,787-805).
gcaatgaagtggccaaatt

SEQ ID NO: 35568 - DNA, 19 bp, Homo sapiens
  siRNA target sequence for POGZ (NM_015100.1,901-919).
gcggacctgagtcttcaat

SEQ ID NO: 35569 - DNA, 19 bp, Homo sapiens
  siRNA target sequence for POGZ (NM_015100.1,903-921).
ggacctgagtcttcaatga

SEQ ID NO: 35570 - DNA, 19 bp, Homo sapiens
  siRNA target sequence for POGZ (NM_015100.1,904-922).
gacctgagtcttcaatgaa

SEQ ID NO: 35571 - DNA, 19 bp, Homo sapiens
  siRNA target sequence for POGZ (NM_015100.1,979-997).
cacgatgtaatgctcaatt

SEQ ID NO: 35572 - DNA, 19 bp, Homo sapiens
  siRNA target sequence for POGZ (NM_015100.1,991-1009).
ctcaatttcgtgttactga

SEQ ID NO: 35573 - DNA, 19 bp, Homo sapiens
  siRNA target sequence for POGZ (NM_015100.1,1039-1057).
gcccagaaatggttgaata

SEQ ID NO: 35574 - DNA, 19 bp, Homo sapiens
  siRNA target sequence for POGZ (NM_015100.1,1049-1067).
ggttgaataccagaagaaa

SEQ ID NO: 35575 - DNA, 19 bp, Homo sapiens
  siRNA target sequence for POGZ (NM_015100.1,1178-1196).
gtcaccgcctaccaaagta

SEQ ID NO: 35576 - DNA, 19 bp, Homo sapiens
  siRNA target sequence for POGZ (NM_015100.1,1309-1327).
ctaaggtcgccacatcttt

SEQ ID NO: 35577 - DNA, 19 bp, Homo sapiens
  siRNA target sequence for POGZ (NM_015100.1,1352-1370).
gctaaaaaacaatattcga

SEQ ID NO: 35578 - DNA, 19 bp, Homo sapiens
  siRNA target sequence for POGZ (NM_015100.1,1353-1371).
ctaaaaaacaatattcgat

SEQ ID NO: 35579 - DNA, 19 bp, Homo sapiens
  siRNA target sequence for POGZ (NM_015100.1,1368-1386).
cgattcatgaaccatatga

SEQ ID NO: 35580 - DNA, 19 bp, Homo sapiens
  siRNA target sequence for POGZ (NM_015100.1,1422-1440).
gtagatggtcacactatct

SEQ ID NO: 35581 - DNA, 19 bp, Homo sapiens
  siRNA target sequence for POGZ (NM_015100.1,1446-1464).
cactgttaccgccagtttt

SEQ ID NO: 35582 - DNA, 19 bp, Homo sapiens
  siRNA target sequence for POGZ (NM_015100.1,1479-1497).
cttcagtgccacttggaaa

SEQ ID NO: 35583 - DNA, 19 bp, Homo sapiens
  siRNA target sequence for POGZ (NM_015100.1,1484-1502).
gtgccacttggaaaatgtt

SEQ ID NO: 35584 - DNA, 19 bp, Homo sapiens
  siRNA target sequence for POGZ (NM_015100.1,1500-1518).
gttcatagtccctatgaat

SEQ ID NO: 35585 - DNA, 19 bp, Homo sapiens
  siRNA target sequence for POGZ (NM_015100.1,1503-1521).
catagtccctatgaatcta

SEQ ID NO: 35586 - DNA, 19 bp, Homo sapiens
  siRNA target sequence for POGZ (NM_015100.1,1538-1556).
ctgtgaatgggcgtttgaa

SEQ ID NO: 35587 - DNA, 19 bp, Homo sapiens
  siRNA target sequence for POGZ (NM_015100.1,1572-1590).
ctccagcatatgaaggata

SEQ ID NO: 35588 - DNA, 19 bp, Homo sapiens
  siRNA target sequence for POGZ (NM_015100.1,1617-1635).
gtttgccaggtgtgtcaat

SEQ ID NO: 35589 - DNA, 19 bp, Homo sapiens
  siRNA target sequence for POGZ (NM_015100.1,1654-1672).
ctgaggtagatgtccattt

SEQ ID NO: 35590 - DNA, 19 bp, Homo sapiens
  siRNA target sequence for POGZ (NM_015100.1,1718-1736).
cctgaaggtcttcaaaaat

SEQ ID NO: 35591 - DNA, 19 bp, Homo sapiens
  siRNA target sequence for POGZ (NM_015100.1,1743-1761).
gcattccaacagcattaca

SEQ ID NO: 35592 - DNA, 19 bp, Homo sapiens
  siRNA target sequence for POGZ (NM_015100.1,1766-1784).
gcaccagaagagaaatgtt

SEQ ID NO: 35593 - DNA, 19 bp, Homo sapiens
  siRNA target sequence for POGZ (NM_015100.1,1782-1800).
gtttatcactgcaacaaat

SEQ ID NO: 35594 - DNA, 19 bp, Homo sapiens
  siRNA target sequence for POGZ (NM_015100.1,1897-1915).
caggcaccaaggtgacaat

SEQ ID NO: 35595 - DNA, 19 bp, Homo sapiens
  siRNA target sequence for POGZ (NM_015100.1,1947-1965).
cctgtatcctctaatgata

SEQ ID NO: 35596 - DNA, 19 bp, Homo sapiens
  siRNA target sequence for POGZ (NM_015100.1,2200-2218).
cttatgccaaccacatgat

SEQ ID NO: 35597 - DNA, 19 bp, Homo sapiens
  siRNA target sequence for POGZ (NM_015100.1,2206-2224).
ccaaccacatgatcaacaa

SEQ ID NO: 35598 - DNA, 19 bp, Homo sapiens
  siRNA target sequence for POGZ (NM_015100.1,2207-2225).
caaccacatgatcaacaat

SEQ ID NO: 35599 - DNA, 19 bp, Homo sapiens
  siRNA target sequence for POGZ (NM_015100.1,2210-2228).
ccacatgatcaacaatcat

SEQ ID NO: 35600 - DNA, 19 bp, Homo sapiens
  siRNA target sequence for POGZ (NM_015100.1,2235-2253).
cggaagagccccaagtatt

SEQ ID NO: 35601 - DNA, 19 bp, Homo sapiens
  siRNA target sequence for POGZ (NM_015100.1,2288-2306).
gctggcctgcacttcatgt

SEQ ID NO: 35602 - DNA, 19 bp, Homo sapiens
  siRNA target sequence for POGZ (NM_015100.1,2289-2307).
ctggcctgcacttcatgta

SEQ ID NO: 35603 - DNA, 19 bp, Homo sapiens
  siRNA target sequence for POGZ (NM_015100.1,2297-2315).
cacttcatgtacctttgtt

SEQ ID NO: 35604 - DNA, 19 bp, Homo sapiens
  siRNA target sequence for POGZ (NM_015100.1,2338-2356).
ccaagcatttggtattcaa

SEQ ID NO: 35605 - DNA, 19 bp, Homo sapiens
  siRNA target sequence for POGZ (NM_015100.1,2445-2463).
gaccggaacgtgaagaata

SEQ ID NO: 35606 - DNA, 19 bp, Homo sapiens
  siRNA target sequence for POGZ (NM_015100.1,2448-2466).
cggaacgtgaagaatatgt

SEQ ID NO: 35607 - DNA, 19 bp, Homo sapiens
  siRNA target sequence for POGZ (NM_015100.1,2532-2550).
gagcctgaagagctactaa

SEQ ID NO: 35608 - DNA, 19 bp, Homo sapiens
  siRNA target sequence for POGZ (NM_015100.1,2651-2669).
gggagccgaatgtctgaat

SEQ ID NO: 35609 - DNA, 19 bp, Homo sapiens
  siRNA target sequence for POGZ (NM_015100.1,2653-2671).
gagccgaatgtctgaatgt

SEQ ID NO: 35610 - DNA, 19 bp, Homo sapiens
  siRNA target sequence for POGZ (NM_015100.1,2662-2680).
gtctgaatgttgatgatca

SEQ ID NO: 35611 - DNA, 19 bp, Homo sapiens
  siRNA target sequence for POGZ (NM_015100.1,2777-2795).
gcttcgagtagtactgttt

SEQ ID NO: 35612 - DNA, 19 bp, Homo sapiens
  siRNA target sequence for POGZ (NM_015100.1,2797-2815).
ctctatgctgcaatacaga

SEQ ID NO: 35613 - DNA, 19 bp, Homo sapiens
  siRNA target sequence for POGZ (NM_015100.1,2882-2900).
ctcccagggggagaatcta

SEQ ID NO: 35614 - DNA, 19 bp, Homo sapiens
  siRNA target sequence for POGZ (NM_015100.1,2884-2902).
cccagggggagaatctaga

SEQ ID NO: 35615 - DNA, 19 bp, Homo sapiens
  siRNA target sequence for POGZ (NM_015100.1,2894-2912).
gaatctagagggcaaatat

SEQ ID NO: 35616 - DNA, 19 bp, Homo sapiens
  siRNA target sequence for POGZ (NM_015100.1,3030-3048).
gaaggggggtttaagatct

SEQ ID NO: 35617 - DNA, 19 bp, Homo sapiens
  siRNA target sequence for POGZ (NM_015100.1,3116-3134).
ccacaccctacctaaggat

SEQ ID NO: 35618 - DNA, 19 bp, Homo sapiens
  siRNA target sequence for POGZ (NM_015100.1,3305-3323).
ggaaccttggtgtgatgta

SEQ ID NO: 35619 - DNA, 19 bp, Homo sapiens
  siRNA target sequence for POGZ (NM_015100.1,3558-3576).
gaggtactggctatgctta

SEQ ID NO: 35620 - DNA, 19 bp, Homo sapiens
  siRNA target sequence for POGZ (NM_015100.1,3609-3627).
gcaggctgtagctccaaaa

SEQ ID NO: 35621 - DNA, 19 bp, Homo sapiens
  siRNA target sequence for POGZ (NM_015100.1,3662-3680).
caagaacttcctgcataaa

SEQ ID NO: 35622 - DNA, 19 bp, Homo sapiens
  siRNA target sequence for POGZ (NM_015100.1,3665-3683).
gaacttcctgcataaaaaa

SEQ ID NO: 35623 - DNA, 19 bp, Homo sapiens
  siRNA target sequence for POGZ (NM_015100.1,3812-3830).
cttcctggtggctagtgtt

SEQ ID NO: 35624 - DNA, 19 bp, Homo sapiens
  siRNA target sequence for POGZ (NM_015100.1,3840-3858).
cccgatggcaacattaact

SEQ ID NO: 35625 - DNA, 19 bp, Homo sapiens
  siRNA target sequence for POGZ (NM_015100.1,3851-3869).
cattaactcacctacaaga

SEQ ID NO: 35626 - DNA, 19 bp, Homo sapiens
  siRNA target sequence for POGZ (NM_015100.1,3977-3995).
gacaattgagcctgaaagt

SEQ ID NO: 35627 - DNA, 19 bp, Homo sapiens
  siRNA target sequence for POLA (NM_016937.1,35-53).
gacgactctctgtcagatt

SEQ ID NO: 35628 - DNA, 19 bp, Homo sapiens
  siRNA target sequence for POLA (NM_016937.1,37-55).
cgactctctgtcagattca

SEQ ID NO: 35629 - DNA, 19 bp, Homo sapiens
  siRNA target sequence for POLA (NM_016937.1,143-161).
gctggtgagaagtataaat

SEQ ID NO: 35630 - DNA, 19 bp, Homo sapiens
  siRNA target sequence for POLA (NM_016937.1,172-190).
ggacttcacaggtgtttat

SEQ ID NO: 35631 - DNA, 19 bp, Homo sapiens
  siRNA target sequence for POLA (NM_016937.1,197-215).
gttgatgaagaacagtatt

SEQ ID NO: 35632 - DNA, 19 bp, Homo sapiens
  siRNA target sequence for POLA (NM_016937.1,200-218).
gatgaagaacagtattcga

SEQ ID NO: 35633 - DNA, 19 bp, Homo sapiens
  siRNA target sequence for POLA (NM_016937.1,280-298).
ggaagatggccgagagatt

SEQ ID NO: 35634 - DNA, 19 bp, Homo sapiens
  siRNA target sequence for POLA (NM_016937.1,354-372).
gtaaagcacgcaataaaga

SEQ ID NO: 35635 - DNA, 19 bp, Homo sapiens
  siRNA target sequence for POLA (NM_016937.1,402-420).
caaaaccgaacaacattaa

SEQ ID NO: 35636 - DNA, 19 bp, Homo sapiens
  siRNA target sequence for POLA (NM_016937.1,497-515).
gacattctacaggatctta

SEQ ID NO: 35637 - DNA, 19 bp, Homo sapiens
  siRNA target sequence for POLA (NM_016937.1,537-555).
ctccaccacctgtaatgat

SEQ ID NO: 35638 - DNA, 19 bp, Homo sapiens
  siRNA target sequence for POLA (NM_016937.1,542-560).
ccacctgtaatgatactga

SEQ ID NO: 35639 - DNA, 19 bp, Homo sapiens
  siRNA target sequence for POLA (NM_016937.1,578-596).
ggagcttcaccgaatcctt

SEQ ID NO: 35640 - DNA, 19 bp, Homo sapiens
  siRNA target sequence for POLA (NM_016937.1,579-597).
gagcttcaccgaatccttt

SEQ ID NO: 35641 - DNA, 19 bp, Homo sapiens
  siRNA target sequence for POLA (NM_016937.1,718-736).
ggtcgagagtacagaagaa

SEQ ID NO: 35642 - DNA, 19 bp, Homo sapiens
  siRNA target sequence for POLA (NM_016937.1,898-916).
gtcctacttaggaagtttt

SEQ ID NO: 35643 - DNA, 19 bp, Homo sapiens
  siRNA target sequence for POLA (NM_016937.1,917-935).
ctcccggatgtctcttgtt

SEQ ID NO: 35644 - DNA, 19 bp, Homo sapiens
  siRNA target sequence for POLA (NM_016937.1,928-946).
ctcttgttgggacattgat

SEQ ID NO: 35645 - DNA, 19 bp, Homo sapiens
  siRNA target sequence for POLA (NM_016937.1,930-948).
cttgttgggacattgatca

SEQ ID NO: 35646 - DNA, 19 bp, Homo sapiens
  siRNA target sequence for POLA (NM_016937.1,933-951).
gttgggacattgatcaaga

SEQ ID NO: 35647 - DNA, 19 bp, Homo sapiens
  siRNA target sequence for POLA (NM_016937.1,994-1012).
cagtcacctcccattggta

SEQ ID NO: 35648 - DNA, 19 bp, Homo sapiens
  siRNA target sequence for POLA (NM_016937.1,996-1014).
gtcacctcccattggtaaa

SEQ ID NO: 35649 - DNA, 19 bp, Homo sapiens
  siRNA target sequence for POLA (NM_016937.1,1017-1035).
gggcagatgaggaacaagt

SEQ ID NO: 35650 - DNA, 19 bp, Homo sapiens
  siRNA target sequence for POLA (NM_016937.1,1028-1046).
gaacaagtattccactttt

SEQ ID NO: 35651 - DNA, 19 bp, Homo sapiens
  siRNA target sequence for POLA (NM_016937.1,1034-1052).
gtattccacttttattggt

SEQ ID NO: 35652 - DNA, 19 bp, Homo sapiens
  siRNA target sequence for POLA (NM_016937.1,1143-1161).
gttgtgtcatggtgaaaaa

SEQ ID NO: 35653 - DNA, 19 bp, Homo sapiens
  siRNA target sequence for POLA (NM_016937.1,1183-1201).
ccttccccgtgaaatgaaa

SEQ ID NO: 35654 - DNA, 19 bp, Homo sapiens
  siRNA target sequence for POLA (NM_016937.1,1184-1202).
cttccccgtgaaatgaaaa

SEQ ID NO: 35655 - DNA, 19 bp, Homo sapiens
  siRNA target sequence for POLA (NM_016937.1,1188-1206).
cccgtgaaatgaaaattga

SEQ ID NO: 35656 - DNA, 19 bp, Homo sapiens
  siRNA target sequence for POLA (NM_016937.1,1189-1207).
ccgtgaaatgaaaattgat

SEQ ID NO: 35657 - DNA, 19 bp, Homo sapiens
  siRNA target sequence for POLA (NM_016937.1,1223-1241).
gaaacaggaactccaattt

SEQ ID NO: 35658 - DNA, 19 bp, Homo sapiens
  siRNA target sequence for POLA (NM_016937.1,1442-1460).
gtatttgggaccaacacat

SEQ ID NO: 35659 - DNA, 19 bp, Homo sapiens
  siRNA target sequence for POLA (NM_016937.1,1466-1484).
ctggaactgttcttgatga

SEQ ID NO: 35660 - DNA, 19 bp, Homo sapiens
  siRNA target sequence for POLA (NM_016937.1,1469-1487).
gaactgttcttgatgaaca

SEQ ID NO: 35661 - DNA, 19 bp, Homo sapiens
  siRNA target sequence for POLA (NM_016937.1,1500-1518).
gaccttgttggcttgaagt

SEQ ID NO: 35662 - DNA, 19 bp, Homo sapiens
  siRNA target sequence for POLA (NM_016937.1,1502-1520).
ccttgttggcttgaagtaa

SEQ ID NO: 35663 - DNA, 19 bp, Homo sapiens
  siRNA target sequence for POLA (NM_016937.1,1543-1561).
gccagtcagttggtgtaaa

SEQ ID NO: 35664 - DNA, 19 bp, Homo sapiens
  siRNA target sequence for POLA (NM_016937.1,1586-1604).
gacctggtgaatgtaatta

SEQ ID NO: 35665 - DNA, 19 bp, Homo sapiens
  siRNA target sequence for POLA (NM_016937.1,1591-1609).
ggtgaatgtaattaaggat

SEQ ID NO: 35666 - DNA, 19 bp, Homo sapiens
  siRNA target sequence for POLA (NM_016937.1,1669-1687).
gaaccatcaaaatgagatt

SEQ ID NO: 35667 - DNA, 19 bp, Homo sapiens
  siRNA target sequence for POLA (NM_016937.1,1866-1884).
cactgctaggttttttcct

SEQ ID NO: 35668 - DNA, 19 bp, Homo sapiens
  siRNA target sequence for POLA (NM_016937.1,1882-1900).
ccttgcaaaagttcacaaa

SEQ ID NO: 35669 - DNA, 19 bp, Homo sapiens
  siRNA target sequence for POLA (NM_016937.1,1915-1933).
cattgtgggtcataatatt

SEQ ID NO: 35670 - DNA, 19 bp, Homo sapiens
  siRNA target sequence for POLA (NM_016937.1,1952-1970).
gtactactgcagagaatta

SEQ ID NO: 35671 - DNA, 19 bp, Homo sapiens
  siRNA target sequence for POLA (NM_016937.1,2067-2085).
ctacctgtggtcgaatgat

SEQ ID NO: 35672 - DNA, 19 bp, Homo sapiens
  siRNA target sequence for POLA (NM_016937.1,2110-2128).
ggaattgattcgttgtaaa

SEQ ID NO: 35673 - DNA, 19 bp, Homo sapiens
  siRNA target sequence for POLA (NM_016937.1,2111-2129).
gaattgattcgttgtaaaa

SEQ ID NO: 35674 - DNA, 19 bp, Homo sapiens
  siRNA target sequence for POLA (NM_016937.1,2176-2194).
ggttgtaatcccaatggaa

SEQ ID NO: 35675 - DNA, 19 bp, Homo sapiens
  siRNA target sequence for POLA (NM_016937.1,2253-2271).
ggaaagatgccaagttcat

SEQ ID NO: 35676 - DNA, 19 bp, Homo sapiens
  siRNA target sequence for POLA (NM_016937.1,2370-2388).
ccgagcgtaacgagttctt

SEQ ID NO: 35677 - DNA, 19 bp, Homo sapiens
  siRNA target sequence for POLA (NM_016937.1,2372-2390).
gagcgtaacgagttcttgt

SEQ ID NO: 35678 - DNA, 19 bp, Homo sapiens
  siRNA target sequence for POLA (NM_016937.1,2400-2418).
cattttacgaaaacaacta

SEQ ID NO: 35679 - DNA, 19 bp, Homo sapiens
  siRNA target sequence for POLA (NM_016937.1,2545-2563).
ggttttggaccccaaagtt

SEQ ID NO: 35680 - DNA, 19 bp, Homo sapiens
  siRNA target sequence for POLA (NM_016937.1,2552-2570).
gaccccaaagttggttttt

SEQ ID NO: 35681 - DNA, 19 bp, Homo sapiens
  siRNA target sequence for POLA (NM_016937.1,2564-2582).
ggtttttatgataagttca

SEQ ID NO: 35682 - DNA, 19 bp, Homo sapiens
  siRNA target sequence for POLA (NM_016937.1,2593-2611).
ggacttcaacagtctatat

SEQ ID NO: 35683 - DNA, 19 bp, Homo sapiens
  siRNA target sequence for POLA (NM_016937.1,2596-2614).
cttcaacagtctatatcct

SEQ ID NO: 35684 - DNA, 19 bp, Homo sapiens
  siRNA target sequence for POLA (NM_016937.1,2716-2734).
gttgccagatccaagctta

SEQ ID NO: 35685 - DNA, 19 bp, Homo sapiens
  siRNA target sequence for POLA (NM_016937.1,2719-2737).
gccagatccaagcttagaa

SEQ ID NO: 35686 - DNA, 19 bp, Homo sapiens
  siRNA target sequence for POLA (NM_016937.1,2720-2738).
ccagatccaagcttagaaa

SEQ ID NO: 35687 - DNA, 19 bp, Homo sapiens
  siRNA target sequence for POLA (NM_016937.1,2721-2739).
cagatccaagcttagaaat

SEQ ID NO: 35688 - DNA, 19 bp, Homo sapiens
  siRNA target sequence for POLA (NM_016937.1,2823-2841).
cagaccttattcttcagta

SEQ ID NO: 35689 - DNA, 19 bp, Homo sapiens
  siRNA target sequence for POLA (NM_016937.1,2873-2891).
gcgaacagtatgtatggtt

SEQ ID NO: 35690 - DNA, 19 bp, Homo sapiens
  siRNA target sequence for POLA (NM_016937.1,2962-2980).
gattttgatgcatacgaaa

SEQ ID NO: 35691 - DNA, 19 bp, Homo sapiens
  siRNA target sequence for POLA (NM_016937.1,3051-3069).
gcaccaatctggaagaagt

SEQ ID NO: 35692 - DNA, 19 bp, Homo sapiens
  siRNA target sequence for POLA (NM_016937.1,3052-3070).
caccaatctggaagaagta

SEQ ID NO: 35693 - DNA, 19 bp, Homo sapiens
  siRNA target sequence for POLA (NM_016937.1,3054-3072).
ccaatctggaagaagtatt

SEQ ID NO: 35694 - DNA, 19 bp, Homo sapiens
  siRNA target sequence for POLA (NM_016937.1,3059-3077).
ctggaagaagtatttaagt

SEQ ID NO: 35695 - DNA, 19 bp, Homo sapiens
  siRNA target sequence for POLA (NM_016937.1,3096-3114).
gtgaagtgaataagttgta

SEQ ID NO: 35696 - DNA, 19 bp, Homo sapiens
  siRNA target sequence for POLA (NM_016937.1,3201-3219).
caacgtcggatgggaatta

SEQ ID NO: 35697 - DNA, 19 bp, Homo sapiens
  siRNA target sequence for POLA (NM_016937.1,3204-3222).
cgtcggatgggaattatgt

SEQ ID NO: 35698 - DNA, 19 bp, Homo sapiens
  siRNA target sequence for POLA (NM_016937.1,3334-3352).
cactatagtggaaaacatt

SEQ ID NO: 35699 - DNA, 19 bp, Homo sapiens
  siRNA target sequence for POLA (NM_016937.1,3401-3419).
ccagtgagccagtttgaaa

SEQ ID NO: 35700 - DNA, 19 bp, Homo sapiens
  siRNA target sequence for POLA (NM_016937.1,3402-3420).
cagtgagccagtttgaaat

SEQ ID NO: 35701 - DNA, 19 bp, Homo sapiens
  siRNA target sequence for POLA (NM_016937.1,3444-3462).
cccaggattaccctgataa

SEQ ID NO: 35702 - DNA, 19 bp, Homo sapiens
  siRNA target sequence for POLA (NM_016937.1,3445-3463).
ccaggattaccctgataaa

SEQ ID NO: 35703 - DNA, 19 bp, Homo sapiens
  siRNA target sequence for POLA (NM_016937.1,3485-3503).
gttgccctctggataaatt

SEQ ID NO: 35704 - DNA, 19 bp, Homo sapiens
  siRNA target sequence for POLA (NM_016937.1,3528-3546).
ctggagatactgtgtcata

SEQ ID NO: 35705 - DNA, 19 bp, Homo sapiens
  siRNA target sequence for POLA (NM_016937.1,3533-3551).
gatactgtgtcatatgtca

SEQ ID NO: 35706 - DNA, 19 bp, Homo sapiens
  siRNA target sequence for POLA (NM_016937.1,3620-3638).
gataatctaaccattgaca

SEQ ID NO: 35707 - DNA, 19 bp, Homo sapiens
  siRNA target sequence for POLA (NM_016937.1,3678-3696).
ctcggatctgtgaaccaat

SEQ ID NO: 35708 - DNA, 19 bp, Homo sapiens
  siRNA target sequence for POLA (NM_016937.1,3681-3699).
ggatctgtgaaccaataga

SEQ ID NO: 35709 - DNA, 19 bp, Homo sapiens
  siRNA target sequence for POLA (NM_016937.1,3742-3760).
ccccacccaatttagagtt

SEQ ID NO: 35710 - DNA, 19 bp, Homo sapiens
  siRNA target sequence for POLA (NM_016937.1,3756-3774).
gagttcatcattatcataa

SEQ ID NO: 35711 - DNA, 19 bp, Homo sapiens
  siRNA target sequence for POLA (NM_016937.1,3905-3923).
gatggttcgggaacagata

SEQ ID NO: 35712 - DNA, 19 bp, Homo sapiens
  siRNA target sequence for POLA (NM_016937.1,3909-3927).
gttcgggaacagatatgga

SEQ ID NO: 35713 - DNA, 19 bp, Homo sapiens
  siRNA target sequence for POLA (NM_016937.1,3926-3944).
gagcccagcttgtatcgtt

SEQ ID NO: 35714 - DNA, 19 bp, Homo sapiens
  siRNA target sequence for POLA (NM_016937.1,3941-3959).
cgttgcagtaacatcgatt

SEQ ID NO: 35715 - DNA, 19 bp, Homo sapiens
  siRNA target sequence for POLA (NM_016937.1,3945-3963).
gcagtaacatcgattgtaa

SEQ ID NO: 35716 - DNA, 19 bp, Homo sapiens
  siRNA target sequence for POLA (NM_016937.1,4012-4030).
ggacattagacgtttcatt

SEQ ID NO: 35717 - DNA, 19 bp, Homo sapiens
  siRNA target sequence for POLA (NM_016937.1,4013-4031).
gacattagacgtttcatta

SEQ ID NO: 35718 - DNA, 19 bp, Homo sapiens
  siRNA target sequence for POLA (NM_016937.1,4020-4038).
gacgtttcattaaaaagta

SEQ ID NO: 35719 - DNA, 19 bp, Homo sapiens
  siRNA target sequence for POLA (NM_016937.1,4022-4040).
cgtttcattaaaaagtact

SEQ ID NO: 35720 - DNA, 19 bp, Homo sapiens
  siRNA target sequence for POLA (NM_016937.1,4039-4057).
ctatgatggctggttgata

SEQ ID NO: 35721 - DNA, 19 bp, Homo sapiens
  siRNA target sequence for POLA (NM_016937.1,4067-4085).
ccaacctgtcgcaatcgaa

SEQ ID NO: 35722 - DNA, 19 bp, Homo sapiens
  siRNA target sequence for POLA (NM_016937.1,4138-4156).
catgaaagctacacttcaa

SEQ ID NO: 35723 - DNA, 19 bp, Homo sapiens
  siRNA target sequence for POLA (NM_016937.1,4192-4210).
gtgcttttaccggtacatt

SEQ ID NO: 35724 - DNA, 19 bp, Homo sapiens
  siRNA target sequence for POLA (NM_016937.1,4194-4212).
gcttttaccggtacatttt

SEQ ID NO: 35725 - DNA, 19 bp, Homo sapiens
  siRNA target sequence for POLA (NM_016937.1,4226-4244).
gcactggagaaacttacta

SEQ ID NO: 35726 - DNA, 19 bp, Homo sapiens
  siRNA target sequence for POLA (NM_016937.1,4242-4260).
ctaccgatcatgagaaaga

SEQ ID NO: 35727 - DNA, 19 bp, Homo sapiens
  siRNA target sequence for POLA (NM_016937.1,4245-4263).
ccgatcatgagaaagataa

SEQ ID NO: 35728 - DNA, 19 bp, Homo sapiens
  siRNA target sequence for POLA (NM_016937.1,4347-4365).
gtggctactccgaagtgaa

SEQ ID NO: 35729 - DNA, 19 bp, Homo sapiens
  siRNA target sequence for POLA (NM_016937.1,4350-4368).
gctactccgaagtgaatct

SEQ ID NO: 35730 - DNA, 19 bp, Homo sapiens
  siRNA target sequence for POLA (NM_016937.1,4361-4379).
gtgaatctgagcaaactct

SEQ ID NO: 35731 - DNA, 19 bp, Homo sapiens
  siRNA target sequence for POLB (NM_002690.1,174-192).
gaactcgcaaactttgaga

SEQ ID NO: 35732 - DNA, 19 bp, Homo sapiens
  siRNA target sequence for POLB (NM_002690.1,204-222).
caagctatccacaagtaca

SEQ ID NO: 35733 - DNA, 19 bp, Homo sapiens
  siRNA target sequence for POLB (NM_002690.1,215-233).
caagtacaatgcttacaga

SEQ ID NO: 35734 - DNA, 19 bp, Homo sapiens
  siRNA target sequence for POLB (NM_002690.1,260-278).
cccacacaaaataaagagt

SEQ ID NO: 35735 - DNA, 19 bp, Homo sapiens
  siRNA target sequence for POLB (NM_002690.1,345-363).
gcaactggaaaattacgta

SEQ ID NO: 35736 - DNA, 19 bp, Homo sapiens
  siRNA target sequence for POLB (NM_002690.1,349-367).
ctggaaaattacgtaaact

SEQ ID NO: 35737 - DNA, 19 bp, Homo sapiens
  siRNA target sequence for POLB (NM_002690.1,391-409).
cgagttcatccatcaattt

SEQ ID NO: 35738 - DNA, 19 bp, Homo sapiens
  siRNA target sequence for POLB (NM_002690.1,394-412).
gttcatccatcaatttcct

SEQ ID NO: 35739 - DNA, 19 bp, Homo sapiens
  siRNA target sequence for POLB (NM_002690.1,439-457).
ctgctgcaaggaagtttgt

SEQ ID NO: 35740 - DNA, 19 bp, Homo sapiens
  siRNA target sequence for POLB (NM_002690.1,521-539).
gcgaattgggctgaaatat

SEQ ID NO: 35741 - DNA, 19 bp, Homo sapiens
  siRNA target sequence for POLB (NM_002690.1,522-540).
cgaattgggctgaaatatt

SEQ ID NO: 35742 - DNA, 19 bp, Homo sapiens
  siRNA target sequence for POLB (NM_002690.1,544-562).
gggactttgaaaaaagaat

SEQ ID NO: 35743 - DNA, 19 bp, Homo sapiens
  siRNA target sequence for POLB (NM_002690.1,565-583).
ctcgtgaagagatgttaca

SEQ ID NO: 35744 - DNA, 19 bp, Homo sapiens
  siRNA target sequence for POLB (NM_002690.1,676-694).
gtggtgacatggatgttct

SEQ ID NO: 35745 - DNA, 19 bp, Homo sapiens
  siRNA target sequence for POLB (NM_002690.1,752-770).
ggttgtggagcagttacaa

SEQ ID NO: 35746 - DNA, 19 bp, Homo sapiens
  siRNA target sequence for POLB (NM_002690.1,753-771).
gttgtggagcagttacaaa

SEQ ID NO: 35747 - DNA, 19 bp, Homo sapiens
  siRNA target sequence for POLB (NM_002690.1,768-786).
caaaaggttcattttatca

SEQ ID NO: 35748 - DNA, 19 bp, Homo sapiens
  siRNA target sequence for POLB (NM_002690.1,774-792).
gttcattttatcacagata

SEQ ID NO: 35749 - DNA, 19 bp, Homo sapiens
  siRNA target sequence for POLB (NM_002690.1,894-912).
cccaaagatcagtattact

SEQ ID NO: 35750 - DNA, 19 bp, Homo sapiens
  siRNA target sequence for POLB (NM_002690.1,896-914).
caaagatcagtattactgt

SEQ ID NO: 35751 - DNA, 19 bp, Homo sapiens
  siRNA target sequence for POLB (NM_002690.1,939-957).
gatattttcaataagaata

SEQ ID NO: 35752 - DNA, 19 bp, Homo sapiens
  siRNA target sequence for POLB (NM_002690.1,971-989).
cctagaaaagggtttcaca

SEQ ID NO: 35753 - DNA, 19 bp, Homo sapiens
  siRNA target sequence for POLB (NM_002690.1,975-993).
gaaaagggtttcacaatca

SEQ ID NO: 35754 - DNA, 19 bp, Homo sapiens
  siRNA target sequence for POLB (NM_002690.1,981-999).
ggtttcacaatcaatgagt

SEQ ID NO: 35755 - DNA, 19 bp, Homo sapiens
  siRNA target sequence for POLB (NM_002690.1,1074-1092).
gattacatccagtggaaat

SEQ ID NO: 35756 - DNA, 19 bp, Homo sapiens
  siRNA target sequence for POLD1 (NM_002691.1,331-349).
ccctcatcttccaacagtt

SEQ ID NO: 35757 - DNA, 19 bp, Homo sapiens
  siRNA target sequence for POLD1 (NM_002691.1,480-498).
ggcttcgctccctacttct

SEQ ID NO: 35758 - DNA, 19 bp, Homo sapiens
  siRNA target sequence for POLD1 (NM_002691.1,632-650).
ctcccgagagagcatgttt

SEQ ID NO: 35759 - DNA, 19 bp, Homo sapiens
  siRNA target sequence for POLD1 (NM_002691.1,790-808).
ccaacgtcgactttgagat

SEQ ID NO: 35760 - DNA, 19 bp, Homo sapiens
  siRNA target sequence for POLD1 (NM_002691.1,984-1002).
cgcgtgctcagcttcgata

SEQ ID NO: 35761 - DNA, 19 bp, Homo sapiens
  siRNA target sequence for POLD1 (NM_002691.1,1227-1245).
gtgatcaccggttacaaca

SEQ ID NO: 35762 - DNA, 19 bp, Homo sapiens
  siRNA target sequence for POLD1 (NM_002691.1,1286-1304).
gaccctcaaggtacaaaca

SEQ ID NO: 35763 - DNA, 19 bp, Homo sapiens
  siRNA target sequence for POLD1 (NM_002691.1,1890-1908).
gcccacaacctgtgttaca

SEQ ID NO: 35764 - DNA, 19 bp, Homo sapiens
  siRNA target sequence for POLD1 (NM_002691.1,1975-1993).
ccaccggggacgagtttgt

SEQ ID NO: 35765 - DNA, 19 bp, Homo sapiens
  siRNA target sequence for POLD1 (NM_002691.1,1978-1996).
ccggggacgagtttgtgaa

SEQ ID NO: 35766 - DNA, 19 bp, Homo sapiens
  siRNA target sequence for POLD1 (NM_002691.1,2218-2236).
ggttcggacgtcagatgat

SEQ ID NO: 35767 - DNA, 19 bp, Homo sapiens
  siRNA target sequence for POLD1 (NM_002691.1,2667-2685).
ctgtgcaaccgcatcgata

SEQ ID NO: 35768 - DNA, 19 bp, Homo sapiens
  siRNA target sequence for POLD1 (NM_002691.1,3170-3188).
ggaggtatcccatctgaat

SEQ ID NO: 35769 - DNA, 19 bp, Homo sapiens
  siRNA target sequence for POLD3 (NM_006591.1,129-147).
caagatcgtgacatacaaa

SEQ ID NO: 35770 - DNA, 19 bp, Homo sapiens
  siRNA target sequence for POLD3 (NM_006591.1,144-162).
caaatggctgagctataca

SEQ ID NO: 35771 - DNA, 19 bp, Homo sapiens
  siRNA target sequence for POLD3 (NM_006591.1,161-179).
cactaggggttcatgttaa

SEQ ID NO: 35772 - DNA, 19 bp, Homo sapiens
  siRNA target sequence for POLD3 (NM_006591.1,175-193).
gttaaccaggccaaacaga

SEQ ID NO: 35773 - DNA, 19 bp, Homo sapiens
  siRNA target sequence for POLD3 (NM_006591.1,192-210).
gatgctgtatgattatgtt

SEQ ID NO: 35774 - DNA, 19 bp, Homo sapiens
  siRNA target sequence for POLD3 (NM_006591.1,195-213).
gctgtatgattatgttgaa

SEQ ID NO: 35775 - DNA, 19 bp, Homo sapiens
  siRNA target sequence for POLD3 (NM_006591.1,196-214).
ctgtatgattatgttgaaa

SEQ ID NO: 35776 - DNA, 19 bp, Homo sapiens
  siRNA target sequence for POLD3 (NM_006591.1,235-253).
ggagcccaactgcatgtta

SEQ ID NO: 35777 - DNA, 19 bp, Homo sapiens
  siRNA target sequence for POLD3 (NM_006591.1,239-257).
cccaactgcatgttaccta

SEQ ID NO: 35778 - DNA, 19 bp, Homo sapiens
  siRNA target sequence for POLD3 (NM_006591.1,266-284).
ctggcagtctcattcagaa

SEQ ID NO: 35779 - DNA, 19 bp, Homo sapiens
  siRNA target sequence for POLD3 (NM_006591.1,425-443).
ctgactatgacatccttaa

SEQ ID NO: 35780 - DNA, 19 bp, Homo sapiens
  siRNA target sequence for POLD3 (NM_006591.1,456-474).
gaactgcagcaaatttagt

SEQ ID NO: 35781 - DNA, 19 bp, Homo sapiens
  siRNA target sequence for POLD3 (NM_006591.1,464-482).
gcaaatttagtgctataca

SEQ ID NO: 35782 - DNA, 19 bp, Homo sapiens
  siRNA target sequence for POLD3 (NM_006591.1,518-536).
cctcttcgtcttccaaaaa

SEQ ID NO: 35783 - DNA, 19 bp, Homo sapiens
  siRNA target sequence for POLD3 (NM_006591.1,524-542).
cgtcttccaaaaagtttga

SEQ ID NO: 35784 - DNA, 19 bp, Homo sapiens
  siRNA target sequence for POLD3 (NM_006591.1,632-650).
cccagcagcccaaaggaat

SEQ ID NO: 35785 - DNA, 19 bp, Homo sapiens
  siRNA target sequence for POLD3 (NM_006591.1,758-776).
caccagggaaagggaatat

SEQ ID NO: 35786 - DNA, 19 bp, Homo sapiens
  siRNA target sequence for POLD3 (NM_006591.1,763-781).
gggaaagggaatatgatga

SEQ ID NO: 35787 - DNA, 19 bp, Homo sapiens
  siRNA target sequence for POLD3 (NM_006591.1,975-993).
ggggaagcgagtagcatta

SEQ ID NO: 35788 - DNA, 19 bp, Homo sapiens
  siRNA target sequence for POLD3 (NM_006591.1,976-994).
gggaagcgagtagcattat

SEQ ID NO: 35789 - DNA, 19 bp, Homo sapiens
  siRNA target sequence for POLD3 (NM_006591.1,1035-1053).
gaggagaagaatcaaactt

SEQ ID NO: 35790 - DNA, 19 bp, Homo sapiens
  siRNA target sequence for POLD3 (NM_006591.1,1228-1246).
cgcgtactaaaatctaaaa

SEQ ID NO: 35791 - DNA, 19 bp, Homo sapiens
  siRNA target sequence for POLD3 (NM_006591.1,1230-1248).
cgtactaaaatctaaaact

SEQ ID NO: 35792 - DNA, 19 bp, Homo sapiens
  siRNA target sequence for POLD3 (NM_006591.1,1258-1276).
ggggaaggctgcatagtga

SEQ ID NO: 35793 - DNA, 19 bp, Homo sapiens
  siRNA target sequence for POLD3 (NM_006591.1,1268-1286).
gcatagtgactgaaaaagt

SEQ ID NO: 35794 - DNA, 19 bp, Homo sapiens
  siRNA target sequence for POLD3 (NM_006591.1,1315-1333).
gaagaggagcttaacatga

SEQ ID NO: 35795 - DNA, 19 bp, Homo sapiens
  siRNA target sequence for POLD3 (NM_006591.1,1321-1339).
gagcttaacatgaagacat

SEQ ID NO: 35796 - DNA, 19 bp, Homo sapiens
  siRNA target sequence for POLD3 (NM_006591.1,1437-1455).
cagacaggtgtccattact

SEQ ID NO: 35797 - DNA, 19 bp, Homo sapiens
  siRNA target sequence for POLE (NM_006231.1,114-132).
ggcgccacttcctcagttt

SEQ ID NO: 35798 - DNA, 19 bp, Homo sapiens
  siRNA target sequence for POLE (NM_006231.1,157-175).
gtcagtggacggataagat

SEQ ID NO: 35799 - DNA, 19 bp, Homo sapiens
  siRNA target sequence for POLE (NM_006231.1,163-181).
ggacggataagatggattt

SEQ ID NO: 35800 - DNA, 19 bp, Homo sapiens
  siRNA target sequence for POLE (NM_006231.1,242-260).
gcatcctaccgagatttta

SEQ ID NO: 35801 - DNA, 19 bp, Homo sapiens
  siRNA target sequence for POLE (NM_006231.1,247-265).
ctaccgagattttagatga

SEQ ID NO: 35802 - DNA, 19 bp, Homo sapiens
  siRNA target sequence for POLE (NM_006231.1,280-298).
gcagtgcagtggattacta

SEQ ID NO: 35803 - DNA, 19 bp, Homo sapiens
  siRNA target sequence for POLE (NM_006231.1,283-301).
gtgcagtggattactactt

SEQ ID NO: 35804 - DNA, 19 bp, Homo sapiens
  siRNA target sequence for POLE (NM_006231.1,290-308).
ggattactactttattcaa

SEQ ID NO: 35805 - DNA, 19 bp, Homo sapiens
  siRNA target sequence for POLE (NM_006231.1,339-357).
ccctataaaccgtatttct

SEQ ID NO: 35806 - DNA, 19 bp, Homo sapiens
  siRNA target sequence for POLE (NM_006231.1,483-501).
ggtttgaagcgaaattaca

SEQ ID NO: 35807 - DNA, 19 bp, Homo sapiens
  siRNA target sequence for POLE (NM_006231.1,484-502).
gtttgaagcgaaattacat

SEQ ID NO: 35808 - DNA, 19 bp, Homo sapiens
  siRNA target sequence for POLE (NM_006231.1,556-574).
cccctgccgtgaagaagaa

SEQ ID NO: 35809 - DNA, 19 bp, Homo sapiens
  siRNA target sequence for POLE (NM_006231.1,679-697).
ctgaccagttggacaacat

SEQ ID NO: 35810 - DNA, 19 bp, Homo sapiens
  siRNA target sequence for POLE (NM_006231.1,761-779).
cgtggctcattggtacaat

SEQ ID NO: 35811 - DNA, 19 bp, Homo sapiens
  siRNA target sequence for POLE (NM_006231.1,765-783).
gctcattggtacaatgtca

SEQ ID NO: 35812 - DNA, 19 bp, Homo sapiens
  siRNA target sequence for POLE (NM_006231.1,798-816).
gcttttccggtagaaatca

SEQ ID NO: 35813 - DNA, 19 bp, Homo sapiens
  siRNA target sequence for POLE (NM_006231.1,821-839).
ccgagatgaccttgttgaa

SEQ ID NO: 35814 - DNA, 19 bp, Homo sapiens
  siRNA target sequence for POLE (NM_006231.1,906-924).
gctgagacagaccagatta

SEQ ID NO: 35815 - DNA, 19 bp, Homo sapiens
  siRNA target sequence for POLE (NM_006231.1,915-933).
gaccagattatgatgattt

SEQ ID NO: 35816 - DNA, 19 bp, Homo sapiens
  siRNA target sequence for POLE (NM_006231.1,965-983).
caccaacagggagattgtt

SEQ ID NO: 35817 - DNA, 19 bp, Homo sapiens
  siRNA target sequence for POLE (NM_006231.1,1013-1031).
ccccaagccagaatatgaa

SEQ ID NO: 35818 - DNA, 19 bp, Homo sapiens
  siRNA target sequence for POLE (NM_006231.1,1057-1075).
ccgatgaggctcatctgat

SEQ ID NO: 35819 - DNA, 19 bp, Homo sapiens
  siRNA target sequence for POLE (NM_006231.1,1062-1080).
gaggctcatctgatccaaa

SEQ ID NO: 35820 - DNA, 19 bp, Homo sapiens
  siRNA target sequence for POLE (NM_006231.1,1126-1144).
cctacaacggggacttttt

SEQ ID NO: 35821 - DNA, 19 bp, Homo sapiens
  siRNA target sequence for POLE (NM_006231.1,1127-1145).
ctacaacggggactttttt

SEQ ID NO: 35822 - DNA, 19 bp, Homo sapiens
  siRNA target sequence for POLE (NM_006231.1,1273-1291).
gggtgaagagggacagtta

SEQ ID NO: 35823 - DNA, 19 bp, Homo sapiens
  siRNA target sequence for POLE (NM_006231.1,1299-1317).
gtgggcagtcataatctca

SEQ ID NO: 35824 - DNA, 19 bp, Homo sapiens
  siRNA target sequence for POLE (NM_006231.1,1331-1349).
ggccaagctaggctatgat

SEQ ID NO: 35825 - DNA, 19 bp, Homo sapiens
  siRNA target sequence for POLE (NM_006231.1,1401-1419).
cagactctggccacgtatt

SEQ ID NO: 35826 - DNA, 19 bp, Homo sapiens
  siRNA target sequence for POLE (NM_006231.1,1428-1446).
gatgctgtcgccacttact

SEQ ID NO: 35827 - DNA, 19 bp, Homo sapiens
  siRNA target sequence for POLE (NM_006231.1,1814-1832).
ggagcaagtcaccaacttt

SEQ ID NO: 35828 - DNA, 19 bp, Homo sapiens
  siRNA target sequence for POLE (NM_006231.1,1817-1835).
gcaagtcaccaactttgaa

SEQ ID NO: 35829 - DNA, 19 bp, Homo sapiens
  siRNA target sequence for POLE (NM_006231.1,1839-1857).
gtgtgtgatgagattaaga

SEQ ID NO: 35830 - DNA, 19 bp, Homo sapiens
  siRNA target sequence for POLE (NM_006231.1,1930-1948).
ccatgtaccccaacatcat

SEQ ID NO: 35831 - DNA, 19 bp, Homo sapiens
  siRNA target sequence for POLE (NM_006231.1,2077-2095).
ccagtcgcagcgaatacca

SEQ ID NO: 35832 - DNA, 19 bp, Homo sapiens
  siRNA target sequence for POLE (NM_006231.1,2078-2096).
cagtcgcagcgaataccat

SEQ ID NO: 35833 - DNA, 19 bp, Homo sapiens
  siRNA target sequence for POLE (NM_006231.1,2155-2173).
ctcgggcctttcatgaact

SEQ ID NO: 35834 - DNA, 19 bp, Homo sapiens
  siRNA target sequence for POLE (NM_006231.1,2179-2197).
gcgaggaacaggcgaaata

SEQ ID NO: 35835 - DNA, 19 bp, Homo sapiens
  siRNA target sequence for POLE (NM_006231.1,2333-2351).
caggcgttacgagttcaaa

SEQ ID NO: 35836 - DNA, 19 bp, Homo sapiens
  siRNA target sequence for POLE (NM_006231.1,2618-2636).
gctggacacagatggtata

SEQ ID NO: 35837 - DNA, 19 bp, Homo sapiens
  siRNA target sequence for POLE (NM_006231.1,2622-2640).
gacacagatggtatatggt

SEQ ID NO: 35838 - DNA, 19 bp, Homo sapiens
  siRNA target sequence for POLE (NM_006231.1,2851-2869).
cctaccttgccatgattct

SEQ ID NO: 35839 - DNA, 19 bp, Homo sapiens
  siRNA target sequence for POLE (NM_006231.1,2852-2870).
ctaccttgccatgattctt

SEQ ID NO: 35840 - DNA, 19 bp, Homo sapiens
  siRNA target sequence for POLE (NM_006231.1,2906-2924).
gaggtatgctgtgttcaat

SEQ ID NO: 35841 - DNA, 19 bp, Homo sapiens
  siRNA target sequence for POLE (NM_006231.1,2908-2926).
ggtatgctgtgttcaatga

SEQ ID NO: 35842 - DNA, 19 bp, Homo sapiens
  siRNA target sequence for POLE (NM_006231.1,2973-2991).
ggggaactgcagctgatta

SEQ ID NO: 35843 - DNA, 19 bp, Homo sapiens
  siRNA target sequence for POLE (NM_006231.1,2976-2994).
gaactgcagctgattaaga

SEQ ID NO: 35844 - DNA, 19 bp, Homo sapiens
  siRNA target sequence for POLE (NM_006231.1,3118-3136).
ctgactctgagctattcga

SEQ ID NO: 35845 - DNA, 19 bp, Homo sapiens
  siRNA target sequence for POLE (NM_006231.1,3163-3181).
ctcggaagctggaagatta

SEQ ID NO: 35846 - DNA, 19 bp, Homo sapiens
  siRNA target sequence for POLE (NM_006231.1,3355-3373).
cggtgaggaagcactttct

SEQ ID NO: 35847 - DNA, 19 bp, Homo sapiens
  siRNA target sequence for POLE (NM_006231.1,3512-3530).
cccagtgccacgtgtcaaa

SEQ ID NO: 35848 - DNA, 19 bp, Homo sapiens
  siRNA target sequence for POLE (NM_006231.1,3731-3749).
gaagaggaagcgagttctt

SEQ ID NO: 35849 - DNA, 19 bp, Homo sapiens
  siRNA target sequence for POLE (NM_006231.1,4126-4144).
gcatcccccgtgtgttcta

SEQ ID NO: 35850 - DNA, 19 bp, Homo sapiens
  siRNA target sequence for POLE (NM_006231.1,4179-4197).
gcttcgtatcgcaaggtaa

SEQ ID NO: 35851 - DNA, 19 bp, Homo sapiens
  siRNA target sequence for POLE (NM_006231.1,4180-4198).
cttcgtatcgcaaggtaaa

SEQ ID NO: 35852 - DNA, 19 bp, Homo sapiens
  siRNA target sequence for POLE (NM_006231.1,4220-4238).
catggtctacaatctctat

SEQ ID NO: 35853 - DNA, 19 bp, Homo sapiens
  siRNA target sequence for POLE (NM_006231.1,4229-4247).
caatctctatgagtattca

SEQ ID NO: 35854 - DNA, 19 bp, Homo sapiens
  siRNA target sequence for POLE (NM_006231.1,4488-4506).
gggagtatccgccatatct

SEQ ID NO: 35855 - DNA, 19 bp, Homo sapiens
  siRNA target sequence for POLE (NM_006231.1,4489-4507).
ggagtatccgccatatcta

SEQ ID NO: 35856 - DNA, 19 bp, Homo sapiens
  siRNA target sequence for POLE (NM_006231.1,4537-4555).
cgctcttcgggatcttcat

SEQ ID NO: 35857 - DNA, 19 bp, Homo sapiens
  siRNA target sequence for POLE (NM_006231.1,4567-4585).
gcagggcatccgtctttgt

SEQ ID NO: 35858 - DNA, 19 bp, Homo sapiens
  siRNA target sequence for POLE (NM_006231.1,4703-4721).
cgaagttcgggcagaaact

SEQ ID NO: 35859 - DNA, 19 bp, Homo sapiens
  siRNA target sequence for POLE (NM_006231.1,4883-4901).
ggctgacaagatcaactat

SEQ ID NO: 35860 - DNA, 19 bp, Homo sapiens
  siRNA target sequence for POLE (NM_006231.1,4991-5009).
gagcaggtactttcacatt

SEQ ID NO: 35861 - DNA, 19 bp, Homo sapiens
  siRNA target sequence for POLE (NM_006231.1,5559-5577).
cgcacactccacaacatga

SEQ ID NO: 35862 - DNA, 19 bp, Homo sapiens
  siRNA target sequence for POLE (NM_006231.1,5563-5581).
cactccacaacatgatgaa

SEQ ID NO: 35863 - DNA, 19 bp, Homo sapiens
  siRNA target sequence for POLE (NM_006231.1,5652-5670).
cgcatcatcctctgtacaa

SEQ ID NO: 35864 - DNA, 19 bp, Homo sapiens
  siRNA target sequence for POLE (NM_006231.1,5653-5671).
gcatcatcctctgtacaaa

SEQ ID NO: 35865 - DNA, 19 bp, Homo sapiens
  siRNA target sequence for POLE (NM_006231.1,5697-5715).
gcttacgtggagtacatca

SEQ ID NO: 35866 - DNA, 19 bp, Homo sapiens
  siRNA target sequence for POLE (NM_006231.1,5765-5783).
ctctcgatgctgggaattt

SEQ ID NO: 35867 - DNA, 19 bp, Homo sapiens
  siRNA target sequence for POLE (NM_006231.1,5791-5809).
ggatggatccatctaacta

SEQ ID NO: 35868 - DNA, 19 bp, Homo sapiens
  siRNA target sequence for POLE (NM_006231.1,5792-5810).
gatggatccatctaactat

SEQ ID NO: 35869 - DNA, 19 bp, Homo sapiens
  siRNA target sequence for POLE (NM_006231.1,5803-5821).
ctaactatggcggaatcaa

SEQ ID NO: 35870 - DNA, 19 bp, Homo sapiens
  siRNA target sequence for POLE (NM_006231.1,5812-5830).
gcggaatcaaaggaaaagt

SEQ ID NO: 35871 - DNA, 19 bp, Homo sapiens
  siRNA target sequence for POLE (NM_006231.1,5813-5831).
cggaatcaaaggaaaagtt

SEQ ID NO: 35872 - DNA, 19 bp, Homo sapiens
  siRNA target sequence for POLE (NM_006231.1,5829-5847).
gtttcatctcgtattcact

SEQ ID NO: 35873 - DNA, 19 bp, Homo sapiens
  siRNA target sequence for POLE (NM_006231.1,6169-6187).
gagcccttcccggaatgat

SEQ ID NO: 35874 - DNA, 19 bp, Homo sapiens
  siRNA target sequence for POLE (NM_006231.1,6171-6189).
gcccttcccggaatgatca

SEQ ID NO: 35875 - DNA, 19 bp, Homo sapiens
  siRNA target sequence for POLE (NM_006231.1,6400-6418).
caaaccaggtgaataagct

SEQ ID NO: 35876 - DNA, 19 bp, Homo sapiens
  siRNA target sequence for POLE (NM_006231.1,6647-6665).
gacgctggtggaagttcta

SEQ ID NO: 35877 - DNA, 19 bp, Homo sapiens
  siRNA target sequence for POLE (NM_006231.1,6649-6667).
cgctggtggaagttctaca

SEQ ID NO: 35878 - DNA, 19 bp, Homo sapiens
  siRNA target sequence for POLE (NM_006231.1,6809-6827).
cggaatattccggaacatt

SEQ ID NO: 35879 - DNA, 19 bp, Homo sapiens
  siRNA target sequence for POLE2 (NM_002692.2,42-60).
gcgctctccgccttcaagt

SEQ ID NO: 35880 - DNA, 19 bp, Homo sapiens
  siRNA target sequence for POLE2 (NM_002692.2,43-61).
cgctctccgccttcaagtt

SEQ ID NO: 35881 - DNA, 19 bp, Homo sapiens
  siRNA target sequence for POLE2 (NM_002692.2,78-96).
cgtggtgaagctattaagt

SEQ ID NO: 35882 - DNA, 19 bp, Homo sapiens
  siRNA target sequence for POLE2 (NM_002692.2,180-198).
cccttgtcatcaaacatga

SEQ ID NO: 35883 - DNA, 19 bp, Homo sapiens
  siRNA target sequence for POLE2 (NM_002692.2,181-199).
ccttgtcatcaaacatgat

SEQ ID NO: 35884 - DNA, 19 bp, Homo sapiens
  siRNA target sequence for POLE2 (NM_002692.2,182-200).
cttgtcatcaaacatgatt

SEQ ID NO: 35885 - DNA, 19 bp, Homo sapiens
  siRNA target sequence for POLE2 (NM_002692.2,244-262).
ctgttgatgaaactataga

SEQ ID NO: 35886 - DNA, 19 bp, Homo sapiens
  siRNA target sequence for POLE2 (NM_002692.2,256-274).
ctatagagcacgttttcaa

SEQ ID NO: 35887 - DNA, 19 bp, Homo sapiens
  siRNA target sequence for POLE2 (NM_002692.2,261-279).
gagcacgttttcaatatca

SEQ ID NO: 35888 - DNA, 19 bp, Homo sapiens
  siRNA target sequence for POLE2 (NM_002692.2,263-281).
gcacgttttcaatatcata

SEQ ID NO: 35889 - DNA, 19 bp, Homo sapiens
  siRNA target sequence for POLE2 (NM_002692.2,272-290).
caatatcataggagcattt

SEQ ID NO: 35890 - DNA, 19 bp, Homo sapiens
  siRNA target sequence for POLE2 (NM_002692.2,354-372).
caccctgcaccaaatttat

SEQ ID NO: 35891 - DNA, 19 bp, Homo sapiens
  siRNA target sequence for POLE2 (NM_002692.2,360-378).
gcaccaaatttatttggaa

SEQ ID NO: 35892 - DNA, 19 bp, Homo sapiens
  siRNA target sequence for POLE2 (NM_002692.2,405-423).
cgtgagcgatataccattt

SEQ ID NO: 35893 - DNA, 19 bp, Homo sapiens
  siRNA target sequence for POLE2 (NM_002692.2,433-451).
ggacccacaggcatgaatt

SEQ ID NO: 35894 - DNA, 19 bp, Homo sapiens
  siRNA target sequence for POLE2 (NM_002692.2,434-452).
gacccacaggcatgaatta

SEQ ID NO: 35895 - DNA, 19 bp, Homo sapiens
  siRNA target sequence for POLE2 (NM_002692.2,437-455).
ccacaggcatgaattattt

SEQ ID NO: 35896 - DNA, 19 bp, Homo sapiens
  siRNA target sequence for POLE2 (NM_002692.2,483-501).
gatgaaagcggaagcaaat

SEQ ID NO: 35897 - DNA, 19 bp, Homo sapiens
  siRNA target sequence for POLE2 (NM_002692.2,503-521).
ccagcttaaaacaatagaa

SEQ ID NO: 35898 - DNA, 19 bp, Homo sapiens
  siRNA target sequence for POLE2 (NM_002692.2,548-566).
cggagatgcgattgttctt

SEQ ID NO: 35899 - DNA, 19 bp, Homo sapiens
  siRNA target sequence for POLE2 (NM_002692.2,556-574).
cgattgttcttggaatgat

SEQ ID NO: 35900 - DNA, 19 bp, Homo sapiens
  siRNA target sequence for POLE2 (NM_002692.2,648-666).
cagttccatagtggtttat

SEQ ID NO: 35901 - DNA, 19 bp, Homo sapiens
  siRNA target sequence for POLE2 (NM_002692.2,744-762).
cccactgagccctctagta

SEQ ID NO: 35902 - DNA, 19 bp, Homo sapiens
  siRNA target sequence for POLE2 (NM_002692.2,746-764).
cactgagccctctagtact

SEQ ID NO: 35903 - DNA, 19 bp, Homo sapiens
  siRNA target sequence for POLE2 (NM_002692.2,750-768).
gagccctctagtactacta

SEQ ID NO: 35904 - DNA, 19 bp, Homo sapiens
  siRNA target sequence for POLE2 (NM_002692.2,760-778).
gtactactagggcatacta

SEQ ID NO: 35905 - DNA, 19 bp, Homo sapiens
  siRNA target sequence for POLE2 (NM_002692.2,769-787).
gggcatactatggaaatat

SEQ ID NO: 35906 - DNA, 19 bp, Homo sapiens
  siRNA target sequence for POLE2 (NM_002692.2,857-875).
gaataaagatgctatgttt

SEQ ID NO: 35907 - DNA, 19 bp, Homo sapiens
  siRNA target sequence for POLE2 (NM_002692.2,908-926).
ggaagtattggaaaaactt

SEQ ID NO: 35908 - DNA, 19 bp, Homo sapiens
  siRNA target sequence for POLE2 (NM_002692.2,918-936).
gaaaaacttcgcataatgt

SEQ ID NO: 35909 - DNA, 19 bp, Homo sapiens
  siRNA target sequence for POLE2 (NM_002692.2,1071-1089).
ccagatattcaccaaagta

SEQ ID NO: 35910 - DNA, 19 bp, Homo sapiens
  siRNA target sequence for POLE2 (NM_002692.2,1083-1101).
caaagtagtcgttttgtgt

SEQ ID NO: 35911 - DNA, 19 bp, Homo sapiens
  siRNA target sequence for POLE2 (NM_002692.2,1155-1173).
cttgctgaaagcatcacta

SEQ ID NO: 35912 - DNA, 19 bp, Homo sapiens
  siRNA target sequence for POLE2 (NM_002692.2,1235-1253).
ctgtacacaggaaattact

SEQ ID NO: 35913 - DNA, 19 bp, Homo sapiens
  siRNA target sequence for POLE2 (NM_002692.2,1252-1270).
ctgtcttccgtgaagactt

SEQ ID NO: 35914 - DNA, 19 bp, Homo sapiens
  siRNA target sequence for POLE2 (NM_002692.2,1259-1277).
ccgtgaagacttagtaaat

SEQ ID NO: 35915 - DNA, 19 bp, Homo sapiens
  siRNA target sequence for POLE2 (NM_002692.2,1260-1278).
cgtgaagacttagtaaata

SEQ ID NO: 35916 - DNA, 19 bp, Homo sapiens
  siRNA target sequence for POLE2 (NM_002692.2,1261-1279).
gtgaagacttagtaaataa

SEQ ID NO: 35917 - DNA, 19 bp, Homo sapiens
  siRNA target sequence for POLE2 (NM_002692.2,1310-1328).
cagcaatttggctattcct

SEQ ID NO: 35918 - DNA, 19 bp, Homo sapiens
  siRNA target sequence for POLE2 (NM_002692.2,1332-1350).
cactttgtaaagactatct

SEQ ID NO: 35919 - DNA, 19 bp, Homo sapiens
  siRNA target sequence for POLE2 (NM_002692.2,1367-1385).
gactcccctacctctttat

SEQ ID NO: 35920 - DNA, 19 bp, Homo sapiens
  siRNA target sequence for POLE2 (NM_002692.2,1393-1411).
cagtgtattgggcatatga

SEQ ID NO: 35921 - DNA, 19 bp, Homo sapiens
  siRNA target sequence for POLE2 (NM_002692.2,1395-1413).
gtgtattgggcatatgact

SEQ ID NO: 35922 - DNA, 19 bp, Homo sapiens
  siRNA target sequence for POLE2 (NM_002692.2,1397-1415).
gtattgggcatatgactat

SEQ ID NO: 35923 - DNA, 19 bp, Homo sapiens
  siRNA target sequence for POLE2 (NM_002692.2,1412-1430).
ctatgctttgagagtgtat

SEQ ID NO: 35924 - DNA, 19 bp, Homo sapiens
  siRNA target sequence for POLE2 (NM_002692.2,1432-1450).
ctgtgcccgatctacttgt

SEQ ID NO: 35925 - DNA, 19 bp, Homo sapiens
  siRNA target sequence for POLE2 (NM_002692.2,1436-1454).
gcccgatctacttgtcatt

SEQ ID NO: 35926 - DNA, 19 bp, Homo sapiens
  siRNA target sequence for POLE2 (NM_002692.2,1460-1478).
caaatatgatcctttcact

SEQ ID NO: 35927 - DNA, 19 bp, Homo sapiens
  siRNA target sequence for POLE2 (NM_002692.2,1470-1488).
cctttcactacgacaaata

SEQ ID NO: 35928 - DNA, 19 bp, Homo sapiens
  siRNA target sequence for POLE3 (NM_017443.3,182-200).
ggcccgaggacctaaacct

SEQ ID NO: 35929 - DNA, 19 bp, Homo sapiens
  siRNA target sequence for POLE3 (NM_017443.3,241-259).
ccggacggtgtcaacatct

SEQ ID NO: 35930 - DNA, 19 bp, Homo sapiens
  siRNA target sequence for POLE3 (NM_017443.3,314-332).
ccacatcctgtgctaacaa

SEQ ID NO: 35931 - DNA, 19 bp, Homo sapiens
  siRNA target sequence for POLE3 (NM_017443.3,326-344).
ctaacaactttgcaatgaa

SEQ ID NO: 35932 - DNA, 19 bp, Homo sapiens
  siRNA target sequence for POLE3 (NM_017443.3,400-418).
gagttccagcggttcgtta

SEQ ID NO: 35933 - DNA, 19 bp, Homo sapiens
  siRNA target sequence for POLE4 (NM_019896.2,267-285).
gcaaaagatgcctactgtt

SEQ ID NO: 35934 - DNA, 19 bp, Homo sapiens
  siRNA target sequence for POLE4 (NM_019896.2,320-338).
gagagacttggataatgca

SEQ ID NO: 35935 - DNA, 19 bp, Homo sapiens
  siRNA target sequence for POLE4 (NM_019896.2,322-340).
gagacttggataatgcaat

SEQ ID NO: 35936 - DNA, 19 bp, Homo sapiens
  siRNA target sequence for POLE4 (NM_019896.2,345-363).
gctgtggatgaatttgctt

SEQ ID NO: 35937 - DNA, 19 bp, Homo sapiens
  siRNA target sequence for POLG (NM_002693.1,526-544).
gggctgcacgagcaaatct

SEQ ID NO: 35938 - DNA, 19 bp, Homo sapiens
  siRNA target sequence for POLG (NM_002693.1,527-545).
ggctgcacgagcaaatctt

SEQ ID NO: 35939 - DNA, 19 bp, Homo sapiens
  siRNA target sequence for POLG (NM_002693.1,966-984).
ggtggaagagcgttactct

SEQ ID NO: 35940 - DNA, 19 bp, Homo sapiens
  siRNA target sequence for POLG (NM_002693.1,967-985).
gtggaagagcgttactctt

SEQ ID NO: 35941 - DNA, 19 bp, Homo sapiens
  siRNA target sequence for POLG (NM_002693.1,1078-1096).
gtggtggggcacaatgttt

SEQ ID NO: 35942 - DNA, 19 bp, Homo sapiens
  siRNA target sequence for POLG (NM_002693.1,1097-1115).
cctttgaccgagctcatat

SEQ ID NO: 35943 - DNA, 19 bp, Homo sapiens
  siRNA target sequence for POLG (NM_002693.1,1352-1370).
cagaggtgcacagacttta

SEQ ID NO: 35944 - DNA, 19 bp, Homo sapiens
  siRNA target sequence for POLG (NM_002693.1,1356-1374).
ggtgcacagactttatgta

SEQ ID NO: 35945 - DNA, 19 bp, Homo sapiens
  siRNA target sequence for POLG (NM_002693.1,1395-1413).
ggagcctcgagaactgttt

SEQ ID NO: 35946 - DNA, 19 bp, Homo sapiens
  siRNA target sequence for POLG (NM_002693.1,1399-1417).
cctcgagaactgtttgtga

SEQ ID NO: 35947 - DNA, 19 bp, Homo sapiens
  siRNA target sequence for POLG (NM_002693.1,1400-1418).
ctcgagaactgtttgtgaa

SEQ ID NO: 35948 - DNA, 19 bp, Homo sapiens
  siRNA target sequence for POLG (NM_002693.1,1484-1502).
gggccacccatgaggtttt

SEQ ID NO: 35949 - DNA, 19 bp, Homo sapiens
  siRNA target sequence for POLG (NM_002693.1,1751-1769).
gggacctgcaagaatttaa

SEQ ID NO: 35950 - DNA, 19 bp, Homo sapiens
  siRNA target sequence for POLG (NM_002693.1,1890-1908).
ggaggagtttcaacaagat

SEQ ID NO: 35951 - DNA, 19 bp, Homo sapiens
  siRNA target sequence for POLG (NM_002693.1,2067-2085).
gatgcgggtcacacctaaa

SEQ ID NO: 35952 - DNA, 19 bp, Homo sapiens
  siRNA target sequence for POLG (NM_002693.1,2071-2089).
cgggtcacacctaaactca

SEQ ID NO: 35953 - DNA, 19 bp, Homo sapiens
  siRNA target sequence for POLG (NM_002693.1,2072-2090).
gggtcacacctaaactcat

SEQ ID NO: 35954 - DNA, 19 bp, Homo sapiens
  siRNA target sequence for POLG (NM_002693.1,2319-2337).
cctgctcactgacaatagt

SEQ ID NO: 35955 - DNA, 19 bp, Homo sapiens
  siRNA target sequence for POLG (NM_002693.1,2345-2363).
ggcaaacggtagaagaact

SEQ ID NO: 35956 - DNA, 19 bp, Homo sapiens
  siRNA target sequence for POLG (NM_002693.1,2542-2560).
cacaaggatggtaatagct

SEQ ID NO: 35957 - DNA, 19 bp, Homo sapiens
  siRNA target sequence for POLG (NM_002693.1,2547-2565).
ggatggtaatagctgtaat

SEQ ID NO: 35958 - DNA, 19 bp, Homo sapiens
  siRNA target sequence for POLG (NM_002693.1,2653-2671).
gctctggaaatcaacaaaa

SEQ ID NO: 35959 - DNA, 19 bp, Homo sapiens
  siRNA target sequence for POLG (NM_002693.1,2685-2703).
gaggaacgcccataaacgt

SEQ ID NO: 35960 - DNA, 19 bp, Homo sapiens
  siRNA target sequence for POLG (NM_002693.1,2687-2705).
ggaacgcccataaacgtat

SEQ ID NO: 35961 - DNA, 19 bp, Homo sapiens
  siRNA target sequence for POLG (NM_002693.1,2760-2778).
caggcaccccgactatgat

SEQ ID NO: 35962 - DNA, 19 bp, Homo sapiens
  siRNA target sequence for POLG (NM_002693.1,2762-2780).
ggcaccccgactatgatga

SEQ ID NO: 35963 - DNA, 19 bp, Homo sapiens
  siRNA target sequence for POLG (NM_002693.1,3057-3075).
gagcaggggcactgatcta

SEQ ID NO: 35964 - DNA, 19 bp, Homo sapiens
  siRNA target sequence for POLG (NM_002693.1,3059-3077).
gcaggggcactgatctaca

SEQ ID NO: 35965 - DNA, 19 bp, Homo sapiens
  siRNA target sequence for POLG (NM_002693.1,3107-3125).
gccgtgagcatgccaaaat

SEQ ID NO: 35966 - DNA, 19 bp, Homo sapiens
  siRNA target sequence for POLG (NM_002693.1,3110-3128).
gtgagcatgccaaaatctt

SEQ ID NO: 35967 - DNA, 19 bp, Homo sapiens
  siRNA target sequence for POLG (NM_002693.1,3112-3130).
gagcatgccaaaatcttca

SEQ ID NO: 35968 - DNA, 19 bp, Homo sapiens
  siRNA target sequence for POLG (NM_002693.1,3172-3190).
cgcttactaatgcagttta

SEQ ID NO: 35969 - DNA, 19 bp, Homo sapiens
  siRNA target sequence for POLG (NM_002693.1,3173-3191).
gcttactaatgcagtttaa

SEQ ID NO: 35970 - DNA, 19 bp, Homo sapiens
  siRNA target sequence for POLG (NM_002693.1,3805-3823).
cagtcagtcgcctttttca

SEQ ID NO: 35971 - DNA, 19 bp, Homo sapiens
  siRNA target sequence for POLG (NM_002693.1,3924-3942).
gggtgaagcgctggatatt

SEQ ID NO: 35972 - DNA, 19 bp, Homo sapiens
  siRNA target sequence for POLL (NM_013274.2,410-428).
ccaagcggcagaaaattca

SEQ ID NO: 35973 - DNA, 19 bp, Homo sapiens
  siRNA target sequence for POLL (NM_013274.2,411-429).
caagcggcagaaaattcat

SEQ ID NO: 35974 - DNA, 19 bp, Homo sapiens
  siRNA target sequence for POLL (NM_013274.2,1043-1061).
cccttgagggagattgtga

SEQ ID NO: 35975 - DNA, 19 bp, Homo sapiens
  siRNA target sequence for POLL (NM_013274.2,1232-1250).
ccctcaagagcttccataa

SEQ ID NO: 35976 - DNA, 19 bp, Homo sapiens
  siRNA target sequence for POLL (NM_013274.2,1347-1365).
gaagctggaccatatcagt

SEQ ID NO: 35977 - DNA, 19 bp, Homo sapiens
  siRNA target sequence for POLL (NM_013274.2,1498-1516).
gccatcggcctgaagcatt

SEQ ID NO: 35978 - DNA, 19 bp, Homo sapiens
  siRNA target sequence for POLL (NM_013274.2,1499-1517).
ccatcggcctgaagcatta

SEQ ID NO: 35979 - DNA, 19 bp, Homo sapiens
  siRNA target sequence for POLL (NM_013274.2,1503-1521).
cggcctgaagcattacagt

SEQ ID NO: 35980 - DNA, 19 bp, Homo sapiens
  siRNA target sequence for POLL (NM_013274.2,1520-1538).
gtgacttcctggaacgtat

SEQ ID NO: 35981 - DNA, 19 bp, Homo sapiens
  siRNA target sequence for POLL (NM_013274.2,1780-1798).
ggtcagcaacagaagtact

SEQ ID NO: 35982 - DNA, 19 bp, Homo sapiens
  siRNA target sequence for POLL (NM_013274.2,1781-1799).
gtcagcaacagaagtactt

SEQ ID NO: 35983 - DNA, 19 bp, Homo sapiens
  siRNA target sequence for POLL (NM_013274.2,1898-1916).
ccggctctgcacacttcaa

SEQ ID NO: 35984 - DNA, 19 bp, Homo sapiens
  siRNA target sequence for POLL (NM_013274.2,1928-1946).
gagccctggccaaaaccaa

SEQ ID NO: 35985 - DNA, 19 bp, Homo sapiens
  siRNA target sequence for POLM (NM_013284.1,234-252).
ctccgaagcgacacatgtt

SEQ ID NO: 35986 - DNA, 19 bp, Homo sapiens
  siRNA target sequence for POLM (NM_013284.1,236-254).
ccgaagcgacacatgttgt

SEQ ID NO: 35987 - DNA, 19 bp, Homo sapiens
  siRNA target sequence for POLM (NM_013284.1,515-533).
ccgaggctctggagatact

SEQ ID NO: 35988 - DNA, 19 bp, Homo sapiens
  siRNA target sequence for POLM (NM_013284.1,818-836).
gactgcgaaccttagatga

SEQ ID NO: 35989 - DNA, 19 bp, Homo sapiens
  siRNA target sequence for POLM (NM_013284.1,842-860).
gagagcagccccagaaact

SEQ ID NO: 35990 - DNA, 19 bp, Homo sapiens
  siRNA target sequence for POLM (NM_013284.1,915-933).
cctgcggtccgatgtagat

SEQ ID NO: 35991 - DNA, 19 bp, Homo sapiens
  siRNA target sequence for POLM (NM_013284.1,1186-1204).
cacatggacgcttttgaga

SEQ ID NO: 35992 - DNA, 19 bp, Homo sapiens
  siRNA target sequence for POLM (NM_013284.1,1192-1210).
gacgcttttgagagaagtt

SEQ ID NO: 35993 - DNA, 19 bp, Homo sapiens
  siRNA target sequence for POLM (NM_013284.1,1346-1364).
ggactggctccaagctttt

SEQ ID NO: 35994 - DNA, 19 bp, Homo sapiens
  siRNA target sequence for POLM (NM_013284.1,1436-1454).
cggagcagaagacattttt

SEQ ID NO: 35995 - DNA, 19 bp, Homo sapiens
  siRNA target sequence for POLM (NM_013284.1,1460-1478).
cggcttcagaggaagacat

SEQ ID NO: 35996 - DNA, 19 bp, Homo sapiens
  siRNA target sequence for POLM (NM_013284.1,1484-1502).
gacacctgggccttgagta

SEQ ID NO: 35997 - DNA, 19 bp, Homo sapiens
  siRNA target sequence for POLR1A (NM_015425.1,101-119).
cggctgcagggcatttcct

SEQ ID NO: 35998 - DNA, 19 bp, Homo sapiens
  siRNA target sequence for POLR1A (NM_015425.1,112-130).
catttccttcgggatgtat

SEQ ID NO: 35999 - DNA, 19 bp, Homo sapiens
  siRNA target sequence for POLR1A (NM_015425.1,156-174).
gtgttaaatccattacgaa

SEQ ID NO: 36000 - DNA, 19 bp, Homo sapiens
  siRNA target sequence for POLR1A (NM_015425.1,209-227).
gcaaacggcctgtacgatt

SEQ ID NO: 36001 - DNA, 19 bp, Homo sapiens
  siRNA target sequence for POLR1A (NM_015425.1,210-228).
caaacggcctgtacgattt

SEQ ID NO: 36002 - DNA, 19 bp, Homo sapiens
  siRNA target sequence for POLR1A (NM_015425.1,214-232).
cggcctgtacgatttagct

SEQ ID NO: 36003 - DNA, 19 bp, Homo sapiens
  siRNA target sequence for POLR1A (NM_015425.1,297-315).
ggcacctgggccacattga

SEQ ID NO: 36004 - DNA, 19 bp, Homo sapiens
  siRNA target sequence for POLR1A (NM_015425.1,339-357).
ctctcctcttcgataagct

SEQ ID NO: 36005 - DNA, 19 bp, Homo sapiens
  siRNA target sequence for POLR1A (NM_015425.1,365-383).
ctgcttcggggctcttgtt

SEQ ID NO: 36006 - DNA, 19 bp, Homo sapiens
  siRNA target sequence for POLR1A (NM_015425.1,367-385).
gcttcggggctcttgttta

SEQ ID NO: 36007 - DNA, 19 bp, Homo sapiens
  siRNA target sequence for POLR1A (NM_015425.1,414-432).
ccgtgattcacctcttact

SEQ ID NO: 36008 - DNA, 19 bp, Homo sapiens
  siRNA target sequence for POLR1A (NM_015425.1,475-493).
ctacgagcttgagagaatt

SEQ ID NO: 36009 - DNA, 19 bp, Homo sapiens
  siRNA target sequence for POLR1A (NM_015425.1,567-585).
ctgaaattgtgcagaacaa

SEQ ID NO: 36010 - DNA, 19 bp, Homo sapiens
  siRNA target sequence for POLR1A (NM_015425.1,595-613).
gtcccagggcgcacatgta

SEQ ID NO: 36011 - DNA, 19 bp, Homo sapiens
  siRNA target sequence for POLR1A (NM_015425.1,597-615).
cccagggcgcacatgtaaa

SEQ ID NO: 36012 - DNA, 19 bp, Homo sapiens
  siRNA target sequence for POLR1A (NM_015425.1,599-617).
cagggcgcacatgtaaaga

SEQ ID NO: 36013 - DNA, 19 bp, Homo sapiens
  siRNA target sequence for POLR1A (NM_015425.1,725-743).
cacaacagcaagttgacta

SEQ ID NO: 36014 - DNA, 19 bp, Homo sapiens
  siRNA target sequence for POLR1A (NM_015425.1,821-839).
ggaaaacgaggatacttaa

SEQ ID NO: 36015 - DNA, 19 bp, Homo sapiens
  siRNA target sequence for POLR1A (NM_015425.1,904-922).
ccttttttcgggaatggat

SEQ ID NO: 36016 - DNA, 19 bp, Homo sapiens
  siRNA target sequence for POLR1A (NM_015425.1,1012-1030).
cctaggagaccagatgttt

SEQ ID NO: 36017 - DNA, 19 bp, Homo sapiens
  siRNA target sequence for POLR1A (NM_015425.1,1013-1031).
ctaggagaccagatgttta

SEQ ID NO: 36018 - DNA, 19 bp, Homo sapiens
  siRNA target sequence for POLR1A (NM_015425.1,1017-1035).
gagaccagatgtttactaa

SEQ ID NO: 36019 - DNA, 19 bp, Homo sapiens
  siRNA target sequence for POLR1A (NM_015425.1,1066-1084).
gaaggatgtagttctgatt

SEQ ID NO: 36020 - DNA, 19 bp, Homo sapiens
  siRNA target sequence for POLR1A (NM_015425.1,1070-1088).
gatgtagttctgattcgaa

SEQ ID NO: 36021 - DNA, 19 bp, Homo sapiens
  siRNA target sequence for POLR1A (NM_015425.1,1086-1104).
gaaaacttctggcattgat

SEQ ID NO: 36022 - DNA, 19 bp, Homo sapiens
  siRNA target sequence for POLR1A (NM_015425.1,1098-1116).
cattgatggcccaagaaca

SEQ ID NO: 36023 - DNA, 19 bp, Homo sapiens
  siRNA target sequence for POLR1A (NM_015425.1,1135-1153).
ggccacacccactacagat

SEQ ID NO: 36024 - DNA, 19 bp, Homo sapiens
  siRNA target sequence for POLR1A (NM_015425.1,1175-1193).
gctattgaccgatcctttt

SEQ ID NO: 36025 - DNA, 19 bp, Homo sapiens
  siRNA target sequence for POLR1A (NM_015425.1,1181-1199).
gaccgatcctttttgagta

SEQ ID NO: 36026 - DNA, 19 bp, Homo sapiens
  siRNA target sequence for POLR1A (NM_015425.1,1210-1228).
ccagtccctcatagacaaa

SEQ ID NO: 36027 - DNA, 19 bp, Homo sapiens
  siRNA target sequence for POLR1A (NM_015425.1,1257-1275).
gccacgtcaatattgtgtt

SEQ ID NO: 36028 - DNA, 19 bp, Homo sapiens
  siRNA target sequence for POLR1A (NM_015425.1,1258-1276).
ccacgtcaatattgtgttt

SEQ ID NO: 36029 - DNA, 19 bp, Homo sapiens
  siRNA target sequence for POLR1A (NM_015425.1,1423-1441).
caacaccaacgaaattgga

SEQ ID NO: 36030 - DNA, 19 bp, Homo sapiens
  siRNA target sequence for POLR1A (NM_015425.1,1810-1828).
caactgcaaggcctataat

SEQ ID NO: 36031 - DNA, 19 bp, Homo sapiens
  siRNA target sequence for POLR1A (NM_015425.1,1993-2011).
gactactcggggttgcttt

SEQ ID NO: 36032 - DNA, 19 bp, Homo sapiens
  siRNA target sequence for POLR1A (NM_015425.1,1995-2013).
ctactcggggttgcttttt

SEQ ID NO: 36033 - DNA, 19 bp, Homo sapiens
  siRNA target sequence for POLR1A (NM_015425.1,2132-2150).
gtgtcaacgctgctcataa

SEQ ID NO: 36034 - DNA, 19 bp, Homo sapiens
  siRNA target sequence for POLR1A (NM_015425.1,2134-2152).
gtcaacgctgctcataaat

SEQ ID NO: 36035 - DNA, 19 bp, Homo sapiens
  siRNA target sequence for POLR1A (NM_015425.1,2136-2154).
caacgctgctcataaatat

SEQ ID NO: 36036 - DNA, 19 bp, Homo sapiens
  siRNA target sequence for POLR1A (NM_015425.1,2235-2253).
gatccgttcctggctttaa

SEQ ID NO: 36037 - DNA, 19 bp, Homo sapiens
  siRNA target sequence for POLR1A (NM_015425.1,2268-2286).
gcgagtcccaggtgatcat

SEQ ID NO: 36038 - DNA, 19 bp, Homo sapiens
  siRNA target sequence for POLR1A (NM_015425.1,2359-2377).
ctgctgctatgagatctat

SEQ ID NO: 36039 - DNA, 19 bp, Homo sapiens
  siRNA target sequence for POLR1A (NM_015425.1,2500-2518).
caagaggcaacgtatcatt

SEQ ID NO: 36040 - DNA, 19 bp, Homo sapiens
  siRNA target sequence for POLR1A (NM_015425.1,2569-2587).
gccagaagccgcatcatat

SEQ ID NO: 36041 - DNA, 19 bp, Homo sapiens
  siRNA target sequence for POLR1A (NM_015425.1,2588-2606).
gatgaggtccgaggaaaat

SEQ ID NO: 36042 - DNA, 19 bp, Homo sapiens
  siRNA target sequence for POLR1A (NM_015425.1,2633-2651).
cagagggattttaacatga

SEQ ID NO: 36043 - DNA, 19 bp, Homo sapiens
  siRNA target sequence for POLR1A (NM_015425.1,2635-2653).
gagggattttaacatgatt

SEQ ID NO: 36044 - DNA, 19 bp, Homo sapiens
  siRNA target sequence for POLR1A (NM_015425.1,2638-2656).
ggattttaacatgattgat

SEQ ID NO: 36045 - DNA, 19 bp, Homo sapiens
  siRNA target sequence for POLR1A (NM_015425.1,2681-2699).
cattacagcaatgagatta

SEQ ID NO: 36046 - DNA, 19 bp, Homo sapiens
  siRNA target sequence for POLR1A (NM_015425.1,2765-2783).
cagtcgggagccaaaggtt

SEQ ID NO: 36047 - DNA, 19 bp, Homo sapiens
  siRNA target sequence for POLR1A (NM_015425.1,2770-2788).
gggagccaaaggttcaact

SEQ ID NO: 36048 - DNA, 19 bp, Homo sapiens
  siRNA target sequence for POLR1A (NM_015425.1,2877-2895).
cctgctttgagccttatga

SEQ ID NO: 36049 - DNA, 19 bp, Homo sapiens
  siRNA target sequence for POLR1A (NM_015425.1,3063-3081).
ggctggtcgtgcagtatga

SEQ ID NO: 36050 - DNA, 19 bp, Homo sapiens
  siRNA target sequence for POLR1A (NM_015425.1,3064-3082).
gctggtcgtgcagtatgat

SEQ ID NO: 36051 - DNA, 19 bp, Homo sapiens
  siRNA target sequence for POLR1A (NM_015425.1,3195-3213).
gcaactacgaggtgataat

SEQ ID NO: 36052 - DNA, 19 bp, Homo sapiens
  siRNA target sequence for POLR1A (NM_015425.1,3223-3241).
gcatctccatgaagtttta

SEQ ID NO: 36053 - DNA, 19 bp, Homo sapiens
  siRNA target sequence for POLR1A (NM_015425.1,3227-3245).
ctccatgaagttttatcca

SEQ ID NO: 36054 - DNA, 19 bp, Homo sapiens
  siRNA target sequence for POLR1A (NM_015425.1,3243-3261).
ccagagcagatcccaaaaa

SEQ ID NO: 36055 - DNA, 19 bp, Homo sapiens
  siRNA target sequence for POLR1A (NM_015425.1,3271-3289).
ccacttcagagctatcaaa

SEQ ID NO: 36056 - DNA, 19 bp, Homo sapiens
  siRNA target sequence for POLR1A (NM_015425.1,3327-3345).
gaggcgccttcttgagtta

SEQ ID NO: 36057 - DNA, 19 bp, Homo sapiens
  siRNA target sequence for POLR1A (NM_015425.1,3329-3347).
ggcgccttcttgagttatt

SEQ ID NO: 36058 - DNA, 19 bp, Homo sapiens
  siRNA target sequence for POLR1A (NM_015425.1,3340-3358).
gagttattcccagaaaatt

SEQ ID NO: 36059 - DNA, 19 bp, Homo sapiens
  siRNA target sequence for POLR1A (NM_015425.1,3342-3360).
gttattcccagaaaattca

SEQ ID NO: 36060 - DNA, 19 bp, Homo sapiens
  siRNA target sequence for POLR1A (NM_015425.1,3458-3476).
gaggaaagccgaaggaaat

SEQ ID NO: 36061 - DNA, 19 bp, Homo sapiens
  siRNA target sequence for POLR1A (NM_015425.1,3522-3540).
ggcgtcctgacatctactt

SEQ ID NO: 36062 - DNA, 19 bp, Homo sapiens
  siRNA target sequence for POLR1A (NM_015425.1,3523-3541).
gcgtcctgacatctacttt

SEQ ID NO: 36063 - DNA, 19 bp, Homo sapiens
  siRNA target sequence for POLR1A (NM_015425.1,3542-3560).
gcatcagtgtcagaaacat

SEQ ID NO: 36064 - DNA, 19 bp, Homo sapiens
  siRNA target sequence for POLR1A (NM_015425.1,3600-3618).
ctcaaacagagaagagtta

SEQ ID NO: 36065 - DNA, 19 bp, Homo sapiens
  siRNA target sequence for POLR1A (NM_015425.1,3813-3831).
ggttgcgggagattctcat

SEQ ID NO: 36066 - DNA, 19 bp, Homo sapiens
  siRNA target sequence for POLR1A (NM_015425.1,4090-4108).
gcgcttcatggaaacaaga

SEQ ID NO: 36067 - DNA, 19 bp, Homo sapiens
  siRNA target sequence for POLR1A (NM_015425.1,4091-4109).
cgcttcatggaaacaagat

SEQ ID NO: 36068 - DNA, 19 bp, Homo sapiens
  siRNA target sequence for POLR1A (NM_015425.1,4158-4176).
cagctttcaggaacgtaaa

SEQ ID NO: 36069 - DNA, 19 bp, Homo sapiens
  siRNA target sequence for POLR1A (NM_015425.1,4585-4603).
gatccacccgttcatagat

SEQ ID NO: 36070 - DNA, 19 bp, Homo sapiens
  siRNA target sequence for POLR1A (NM_015425.1,4658-4676).
cctctgatgaagatcaact

SEQ ID NO: 36071 - DNA, 19 bp, Homo sapiens
  siRNA target sequence for POLR1A (NM_015425.1,4684-4702).
gagctccctggtagtatct

SEQ ID NO: 36072 - DNA, 19 bp, Homo sapiens
  siRNA target sequence for POLR1A (NM_015425.1,4686-4704).
gctccctggtagtatcttt

SEQ ID NO: 36073 - DNA, 19 bp, Homo sapiens
  siRNA target sequence for POLR1A (NM_015425.1,4708-4726).
ccatggtgccgtcatctat

SEQ ID NO: 36074 - DNA, 19 bp, Homo sapiens
  siRNA target sequence for POLR1A (NM_015425.1,4743-4761).
ctcggtgcctcctgaatga

SEQ ID NO: 36075 - DNA, 19 bp, Homo sapiens
  siRNA target sequence for POLR1A (NM_015425.1,4786-4804).
ggagcttgtgctaaacaca

SEQ ID NO: 36076 - DNA, 19 bp, Homo sapiens
  siRNA target sequence for POLR1A (NM_015425.1,4984-5002).
ctccctggttgctgattat

SEQ ID NO: 36077 - DNA, 19 bp, Homo sapiens
  siRNA target sequence for POLR1A (NM_015425.1,5007-5025).
gcttcgagggtgtttacaa

SEQ ID NO: 36078 - DNA, 19 bp, Homo sapiens
  siRNA target sequence for POLR1A (NM_015425.1,5042-5060).
gggatccggtcaaactctt

SEQ ID NO: 36079 - DNA, 19 bp, Homo sapiens
  siRNA target sequence for POLR1A (NM_015425.1,5063-5081).
ccgctacagcagatgacat

SEQ ID NO: 36080 - DNA, 19 bp, Homo sapiens
  siRNA target sequence for POLR1A (NM_015425.1,5064-5082).
cgctacagcagatgacatt

SEQ ID NO: 36081 - DNA, 19 bp, Homo sapiens
  siRNA target sequence for POLR1B (NM_019014.2,106-124).
cttgactgacccctcttat

SEQ ID NO: 36082 - DNA, 19 bp, Homo sapiens
  siRNA target sequence for POLR1B (NM_019014.2,176-194).
cacgtggagtccttcaact

SEQ ID NO: 36083 - DNA, 19 bp, Homo sapiens
  siRNA target sequence for POLR1B (NM_019014.2,220-238).
cgcggtgcaggctatacct

SEQ ID NO: 36084 - DNA, 19 bp, Homo sapiens
  siRNA target sequence for POLR1B (NM_019014.2,229-247).
ggctatacctccctttgaa

SEQ ID NO: 36085 - DNA, 19 bp, Homo sapiens
  siRNA target sequence for POLR1B (NM_019014.2,230-248).
gctatacctccctttgaat

SEQ ID NO: 36086 - DNA, 19 bp, Homo sapiens
  siRNA target sequence for POLR1B (NM_019014.2,256-274).
caaagatgagcgtatctct

SEQ ID NO: 36087 - DNA, 19 bp, Homo sapiens
  siRNA target sequence for POLR1B (NM_019014.2,263-281).
gagcgtatctcttttacta

SEQ ID NO: 36088 - DNA, 19 bp, Homo sapiens
  siRNA target sequence for POLR1B (NM_019014.2,265-283).
gcgtatctcttttactatt

SEQ ID NO: 36089 - DNA, 19 bp, Homo sapiens
  siRNA target sequence for POLR1B (NM_019014.2,328-346).
ctgcaaagaggccaatgtt

SEQ ID NO: 36090 - DNA, 19 bp, Homo sapiens
  siRNA target sequence for POLR1B (NM_019014.2,387-405).
ggaagttgacagctgatat

SEQ ID NO: 36091 - DNA, 19 bp, Homo sapiens
  siRNA target sequence for POLR1B (NM_019014.2,461-479).
gttcccatcatggtgaaat

SEQ ID NO: 36092 - DNA, 19 bp, Homo sapiens
  siRNA target sequence for POLR1B (NM_019014.2,584-602).
gtcatccgaatgttgatta

SEQ ID NO: 36093 - DNA, 19 bp, Homo sapiens
  siRNA target sequence for POLR1B (NM_019014.2,652-670).
cagagggcctggttatact

SEQ ID NO: 36094 - DNA, 19 bp, Homo sapiens
  siRNA target sequence for POLR1B (NM_019014.2,654-672).
gagggcctggttatactca

SEQ ID NO: 36095 - DNA, 19 bp, Homo sapiens
  siRNA target sequence for POLR1B (NM_019014.2,669-687).
ctcagtatggagtttcaat

SEQ ID NO: 36096 - DNA, 19 bp, Homo sapiens
  siRNA target sequence for POLR1B (NM_019014.2,704-722).
gaacattccgctgtcaata

SEQ ID NO: 36097 - DNA, 19 bp, Homo sapiens
  siRNA target sequence for POLR1B (NM_019014.2,869-887).
gaggatgattctttcctta

SEQ ID NO: 36098 - DNA, 19 bp, Homo sapiens
  siRNA target sequence for POLR1B (NM_019014.2,902-920).
cagatgttaaggattgtaa

SEQ ID NO: 36099 - DNA, 19 bp, Homo sapiens
  siRNA target sequence for POLR1B (NM_019014.2,926-944).
gagggttgttcgacacaaa

SEQ ID NO: 36100 - DNA, 19 bp, Homo sapiens
  siRNA target sequence for POLR1B (NM_019014.2,928-946).
gggttgttcgacacaaaaa

SEQ ID NO: 36101 - DNA, 19 bp, Homo sapiens
  siRNA target sequence for POLR1B (NM_019014.2,930-948).
gttgttcgacacaaaaaca

SEQ ID NO: 36102 - DNA, 19 bp, Homo sapiens
  siRNA target sequence for POLR1B (NM_019014.2,965-983).
ggtgaatgcttcagagtaa

SEQ ID NO: 36103 - DNA, 19 bp, Homo sapiens
  siRNA target sequence for POLR1B (NM_019014.2,1019-1037).
gctgcggagttcctgttta

SEQ ID NO: 36104 - DNA, 19 bp, Homo sapiens
  siRNA target sequence for POLR1B (NM_019014.2,1020-1038).
ctgcggagttcctgtttaa

SEQ ID NO: 36105 - DNA, 19 bp, Homo sapiens
  siRNA target sequence for POLR1B (NM_019014.2,1023-1041).
cggagttcctgtttaacca

SEQ ID NO: 36106 - DNA, 19 bp, Homo sapiens
  siRNA target sequence for POLR1B (NM_019014.2,1054-1072).
ccacttgaaatccaatact

SEQ ID NO: 36107 - DNA, 19 bp, Homo sapiens
  siRNA target sequence for POLR1B (NM_019014.2,1138-1156).
ggaggacaatcctgatagt

SEQ ID NO: 36108 - DNA, 19 bp, Homo sapiens
  siRNA target sequence for POLR1B (NM_019014.2,1139-1157).
gaggacaatcctgatagtt

SEQ ID NO: 36109 - DNA, 19 bp, Homo sapiens
  siRNA target sequence for POLR1B (NM_019014.2,1181-1199).
ccgggtcagctcttcctta

SEQ ID NO: 36110 - DNA, 19 bp, Homo sapiens
  siRNA target sequence for POLR1B (NM_019014.2,1182-1200).
cgggtcagctcttccttat

SEQ ID NO: 36111 - DNA, 19 bp, Homo sapiens
  siRNA target sequence for POLR1B (NM_019014.2,1332-1350).
caaaaccatttgaatacct

SEQ ID NO: 36112 - DNA, 19 bp, Homo sapiens
  siRNA target sequence for POLR1B (NM_019014.2,1385-1403).
cttggcctcctacaagatt

SEQ ID NO: 36113 - DNA, 19 bp, Homo sapiens
  siRNA target sequence for POLR1B (NM_019014.2,1421-1439).
gctgacaagctgaacttca

SEQ ID NO: 36114 - DNA, 19 bp, Homo sapiens
  siRNA target sequence for POLR1B (NM_019014.2,1468-1486).
gcacagaggggctgatttt

SEQ ID NO: 36115 - DNA, 19 bp, Homo sapiens
  siRNA target sequence for POLR1B (NM_019014.2,1610-1628).
gttgtcacacagtttgtgt

SEQ ID NO: 36116 - DNA, 19 bp, Homo sapiens
  siRNA target sequence for POLR1B (NM_019014.2,1613-1631).
gtcacacagtttgtgtata

SEQ ID NO: 36117 - DNA, 19 bp, Homo sapiens
  siRNA target sequence for POLR1B (NM_019014.2,1663-1681).
gggggtcactcccattgat

SEQ ID NO: 36118 - DNA, 19 bp, Homo sapiens
  siRNA target sequence for POLR1B (NM_019014.2,1776-1794).
cagattctcttcgtcattt

SEQ ID NO: 36119 - DNA, 19 bp, Homo sapiens
  siRNA target sequence for POLR1B (NM_019014.2,1782-1800).
ctcttcgtcattttaaggt

SEQ ID NO: 36120 - DNA, 19 bp, Homo sapiens
  siRNA target sequence for POLR1B (NM_019014.2,1827-1845).
ggatggaagtggtccttat

SEQ ID NO: 36121 - DNA, 19 bp, Homo sapiens
  siRNA target sequence for POLR1B (NM_019014.2,1828-1846).
gatggaagtggtccttata

SEQ ID NO: 36122 - DNA, 19 bp, Homo sapiens
  siRNA target sequence for POLR1B (NM_019014.2,1948-1966).
gctaattggaactatggaa

SEQ ID NO: 36123 - DNA, 19 bp, Homo sapiens
  siRNA target sequence for POLR1B (NM_019014.2,1956-1974).
gaactatggaacagatctt

SEQ ID NO: 36124 - DNA, 19 bp, Homo sapiens
  siRNA target sequence for POLR1B (NM_019014.2,2020-2038).
cacacaccaggaactcttt

SEQ ID NO: 36125 - DNA, 19 bp, Homo sapiens
  siRNA target sequence for POLR1B (NM_019014.2,2044-2062).
cagcctgctgagtgtgatt

SEQ ID NO: 36126 - DNA, 19 bp, Homo sapiens
  siRNA target sequence for POLR1B (NM_019014.2,2055-2073).
gtgtgattgccaacttcat

SEQ ID NO: 36127 - DNA, 19 bp, Homo sapiens
  siRNA target sequence for POLR1B (NM_019014.2,2065-2083).
caacttcatccctttctct

SEQ ID NO: 36128 - DNA, 19 bp, Homo sapiens
  siRNA target sequence for POLR1B (NM_019014.2,2099-2117).
ccacggaacatgtaccaat

SEQ ID NO: 36129 - DNA, 19 bp, Homo sapiens
  siRNA target sequence for POLR1B (NM_019014.2,2142-2160).
gctttccacttctcactta

SEQ ID NO: 36130 - DNA, 19 bp, Homo sapiens
  siRNA target sequence for POLR1B (NM_019014.2,2143-2161).
ctttccacttctcacttat

SEQ ID NO: 36131 - DNA, 19 bp, Homo sapiens
  siRNA target sequence for POLR1B (NM_019014.2,2148-2166).
cacttctcacttatcaaga

SEQ ID NO: 36132 - DNA, 19 bp, Homo sapiens
  siRNA target sequence for POLR1B (NM_019014.2,2162-2180).
caagaccgatcggataaca

SEQ ID NO: 36133 - DNA, 19 bp, Homo sapiens
  siRNA target sequence for POLR1B (NM_019014.2,2168-2186).
cgatcggataacaaactgt

SEQ ID NO: 36134 - DNA, 19 bp, Homo sapiens
  siRNA target sequence for POLR1B (NM_019014.2,2169-2187).
gatcggataacaaactgta

SEQ ID NO: 36135 - DNA, 19 bp, Homo sapiens
  siRNA target sequence for POLR1B (NM_019014.2,2215-2233).
ggtgagaccctccatgtat

SEQ ID NO: 36136 - DNA, 19 bp, Homo sapiens
  siRNA target sequence for POLR1B (NM_019014.2,2218-2236).
gagaccctccatgtatgat

SEQ ID NO: 36137 - DNA, 19 bp, Homo sapiens
  siRNA target sequence for POLR1B (NM_019014.2,2220-2238).
gaccctccatgtatgatta

SEQ ID NO: 36138 - DNA, 19 bp, Homo sapiens
  siRNA target sequence for POLR1B (NM_019014.2,2222-2240).
ccctccatgtatgattatt

SEQ ID NO: 36139 - DNA, 19 bp, Homo sapiens
  siRNA target sequence for POLR1B (NM_019014.2,2223-2241).
cctccatgtatgattatta

SEQ ID NO: 36140 - DNA, 19 bp, Homo sapiens
  siRNA target sequence for POLR1B (NM_019014.2,2224-2242).
ctccatgtatgattattat

SEQ ID NO: 36141 - DNA, 19 bp, Homo sapiens
  siRNA target sequence for POLR1B (NM_019014.2,2243-2261).
gacatggataactatccaa

SEQ ID NO: 36142 - DNA, 19 bp, Homo sapiens
  siRNA target sequence for POLR1B (NM_019014.2,2315-2333).
gatgccatgattgtgaata

SEQ ID NO: 36143 - DNA, 19 bp, Homo sapiens
  siRNA target sequence for POLR1B (NM_019014.2,2360-2378).
catggaagtgtctacaagt

SEQ ID NO: 36144 - DNA, 19 bp, Homo sapiens
  siRNA target sequence for POLR1B (NM_019014.2,2457-2475).
gcgttctgcagaagttaga

SEQ ID NO: 36145 - DNA, 19 bp, Homo sapiens
  siRNA target sequence for POLR1B (NM_019014.2,2458-2476).
cgttctgcagaagttagat

SEQ ID NO: 36146 - DNA, 19 bp, Homo sapiens
  siRNA target sequence for POLR1B (NM_019014.2,2479-2497).
cgatggattgccgtttata

SEQ ID NO: 36147 - DNA, 19 bp, Homo sapiens
  siRNA target sequence for POLR1B (NM_019014.2,2488-2506).
gccgtttataggagcaaaa

SEQ ID NO: 36148 - DNA, 19 bp, Homo sapiens
  siRNA target sequence for POLR1B (NM_019014.2,2490-2508).
cgtttataggagcaaaact

SEQ ID NO: 36149 - DNA, 19 bp, Homo sapiens
  siRNA target sequence for POLR1B (NM_019014.2,2543-2561).
ctcaacaccggggaaagtt

SEQ ID NO: 36150 - DNA, 19 bp, Homo sapiens
  siRNA target sequence for POLR1B (NM_019014.2,2545-2563).
caacaccggggaaagtttt

SEQ ID NO: 36151 - DNA, 19 bp, Homo sapiens
  siRNA target sequence for POLR1B (NM_019014.2,2564-2582).
gtgatgtactataagagta

SEQ ID NO: 36152 - DNA, 19 bp, Homo sapiens
  siRNA target sequence for POLR1B (NM_019014.2,2605-2623).
catcaaagtgtgcagtaat

SEQ ID NO: 36153 - DNA, 19 bp, Homo sapiens
  siRNA target sequence for POLR1B (NM_019014.2,2775-2793).
ggatggtcccagacattct

SEQ ID NO: 36154 - DNA, 19 bp, Homo sapiens
  siRNA target sequence for POLR1B (NM_019014.2,2794-2812).
gttcaatccccatggtttt

SEQ ID NO: 36155 - DNA, 19 bp, Homo sapiens
  siRNA target sequence for POLR1B (NM_019014.2,2826-2844).
ccattgggatgttaattga

SEQ ID NO: 36156 - DNA, 19 bp, Homo sapiens
  siRNA target sequence for POLR1B (NM_019014.2,2832-2850).
ggatgttaattgagagtat

SEQ ID NO: 36157 - DNA, 19 bp, Homo sapiens
  siRNA target sequence for POLR1B (NM_019014.2,2915-2933).
gagaactcggccttagaat

SEQ ID NO: 36158 - DNA, 19 bp, Homo sapiens
  siRNA target sequence for POLR1B (NM_019014.2,2920-2938).
ctcggccttagaatacttt

SEQ ID NO: 36159 - DNA, 19 bp, Homo sapiens
  siRNA target sequence for POLR1B (NM_019014.2,2955-2973).
ctgctggctacaatttcta

SEQ ID NO: 36160 - DNA, 19 bp, Homo sapiens
  siRNA target sequence for POLR1B (NM_019014.2,2977-2995).
caccgagaggttatatagt

SEQ ID NO: 36161 - DNA, 19 bp, Homo sapiens
  siRNA target sequence for POLR1B (NM_019014.2,2997-3015).
gcatcagtgggctagaact

SEQ ID NO: 36162 - DNA, 19 bp, Homo sapiens
  siRNA target sequence for POLR1B (NM_019014.2,3016-3034).
ggaagcagacatcttcata

SEQ ID NO: 36163 - DNA, 19 bp, Homo sapiens
  siRNA target sequence for POLR1B (NM_019014.2,3028-3046).
cttcataggagtggtttat

SEQ ID NO: 36164 - DNA, 19 bp, Homo sapiens
  siRNA target sequence for POLR1B (NM_019014.2,3031-3049).
cataggagtggtttattat

SEQ ID NO: 36165 - DNA, 19 bp, Homo sapiens
  siRNA target sequence for POLR1B (NM_019014.2,3067-3085).
ggtctcagacaaatttcaa

SEQ ID NO: 36166 - DNA, 19 bp, Homo sapiens
  siRNA target sequence for POLR1B (NM_019014.2,3070-3088).
ctcagacaaatttcaagta

SEQ ID NO: 36167 - DNA, 19 bp, Homo sapiens
  siRNA target sequence for POLR1B (NM_019014.2,3124-3142).
gcctattgggggaagaaat

SEQ ID NO: 36168 - DNA, 19 bp, Homo sapiens
  siRNA target sequence for POLR1B (NM_019014.2,3172-3190).
ggaacgggatgcgctttta

SEQ ID NO: 36169 - DNA, 19 bp, Homo sapiens
  siRNA target sequence for POLR1B (NM_019014.2,3215-3233).
catgaccgcctcttcaact

SEQ ID NO: 36170 - DNA, 19 bp, Homo sapiens
  siRNA target sequence for POLR1B (NM_019014.2,3320-3338).
gccatgcgcaacagaaaat

SEQ ID NO: 36171 - DNA, 19 bp, Homo sapiens
  siRNA target sequence for POLR1B (NM_019014.2,3354-3372).
gtagtcgcagtgacactat

SEQ ID NO: 36172 - DNA, 19 bp, Homo sapiens
  siRNA target sequence for POLR1B (NM_019014.2,3359-3377).
cgcagtgacactatcgata

SEQ ID NO: 36173 - DNA, 19 bp, Homo sapiens
  siRNA target sequence for POLR1B (NM_019014.2,3363-3381).
gtgacactatcgatactgt

SEQ ID NO: 36174 - DNA, 19 bp, Homo sapiens
  siRNA target sequence for POLR1B (NM_019014.2,3365-3383).
gacactatcgatactgttt

SEQ ID NO: 36175 - DNA, 19 bp, Homo sapiens
  siRNA target sequence for POLR1B (NM_019014.2,3416-3434).
gaactggcagctatgaaca

SEQ ID NO: 36176 - DNA, 19 bp, Homo sapiens
  siRNA target sequence for POLR1B (NM_019014.2,3419-3437).
ctggcagctatgaacatca

SEQ ID NO: 36177 - DNA, 19 bp, Homo sapiens
  siRNA target sequence for POLR1B (NM_019014.2,3423-3441).
cagctatgaacatcaaagt

SEQ ID NO: 36178 - DNA, 19 bp, Homo sapiens
  siRNA target sequence for POLR1C (NM_004875.1,83-101).
gttcgcaatgtccatacta

SEQ ID NO: 36179 - DNA, 19 bp, Homo sapiens
  siRNA target sequence for POLR1C (NM_004875.1,118-136).
ctattccggttatgatgat

SEQ ID NO: 36180 - DNA, 19 bp, Homo sapiens
  siRNA target sequence for POLR1C (NM_004875.1,171-189).
gtgtggatgtagtacacat

SEQ ID NO: 36181 - DNA, 19 bp, Homo sapiens
  siRNA target sequence for POLR1C (NM_004875.1,182-200).
gtacacatggatgaaaact

SEQ ID NO: 36182 - DNA, 19 bp, Homo sapiens
  siRNA target sequence for POLR1C (NM_004875.1,241-259).
caatgcttttcgacgaatt

SEQ ID NO: 36183 - DNA, 19 bp, Homo sapiens
  siRNA target sequence for POLR1C (NM_004875.1,296-314).
gtcctggtgtacaataata

SEQ ID NO: 36184 - DNA, 19 bp, Homo sapiens
  siRNA target sequence for POLR1C (NM_004875.1,304-322).
gtacaataatacatccatt

SEQ ID NO: 36185 - DNA, 19 bp, Homo sapiens
  siRNA target sequence for POLR1C (NM_004875.1,372-390).
ctgatccccgtctttttga

SEQ ID NO: 36186 - DNA, 19 bp, Homo sapiens
  siRNA target sequence for POLR1C (NM_004875.1,374-392).
gatccccgtctttttgagt

SEQ ID NO: 36187 - DNA, 19 bp, Homo sapiens
  siRNA target sequence for POLR1C (NM_004875.1,424-442).
gatagatactctacagttt

SEQ ID NO: 36188 - DNA, 19 bp, Homo sapiens
  siRNA target sequence for POLR1C (NM_004875.1,469-487).
cccccatgctgctaaagat

SEQ ID NO: 36189 - DNA, 19 bp, Homo sapiens
  siRNA target sequence for POLR1C (NM_004875.1,470-488).
ccccatgctgctaaagatt

SEQ ID NO: 36190 - DNA, 19 bp, Homo sapiens
  siRNA target sequence for POLR1C (NM_004875.1,511-529).
cgtgaaccacaaagtgtat

SEQ ID NO: 36191 - DNA, 19 bp, Homo sapiens
  siRNA target sequence for POLR1C (NM_004875.1,524-542).
gtgtataccaggcatatga

SEQ ID NO: 36192 - DNA, 19 bp, Homo sapiens
  siRNA target sequence for POLR1C (NM_004875.1,789-807).
gcttctcacctggtgttat

SEQ ID NO: 36193 - DNA, 19 bp, Homo sapiens
  siRNA target sequence for POLR1C (NM_004875.1,923-941).
cgggttcgagatcattata

SEQ ID NO: 36194 - DNA, 19 bp, Homo sapiens
  siRNA target sequence for POLR1C (NM_004875.1,926-944).
gttcgagatcattatatct

SEQ ID NO: 36195 - DNA, 19 bp, Homo sapiens
  siRNA target sequence for POLR1C (NM_004875.1,929-947).
cgagatcattatatctgta

SEQ ID NO: 36196 - DNA, 19 bp, Homo sapiens
  siRNA target sequence for POLR1C (NM_004875.1,930-948).
gagatcattatatctgtaa

SEQ ID NO: 36197 - DNA, 19 bp, Homo sapiens
  siRNA target sequence for POLR1C (NM_004875.1,932-950).
gatcattatatctgtaaga

SEQ ID NO: 36198 - DNA, 19 bp, Homo sapiens
  siRNA target sequence for POLR2A (NM_000937.2,494-512).
gacggagggtggcatcaaa

SEQ ID NO: 36199 - DNA, 19 bp, Homo sapiens
  siRNA target sequence for POLR2A (NM_000937.2,496-514).
cggagggtggcatcaaata

SEQ ID NO: 36200 - DNA, 19 bp, Homo sapiens
  siRNA target sequence for POLR2A (NM_000937.2,634-652).
gccactttggccacattga

SEQ ID NO: 36201 - DNA, 19 bp, Homo sapiens
  siRNA target sequence for POLR2A (NM_000937.2,757-775).
caaagatcaaggatatcct

SEQ ID NO: 36202 - DNA, 19 bp, Homo sapiens
  siRNA target sequence for POLR2A (NM_000937.2,986-1004).
ggaatggaagcacgttaat

SEQ ID NO: 36203 - DNA, 19 bp, Homo sapiens
  siRNA target sequence for POLR2A (NM_000937.2,1039-1057).
cagagcgagtgcatgagat

SEQ ID NO: 36204 - DNA, 19 bp, Homo sapiens
  siRNA target sequence for POLR2A (NM_000937.2,1044-1062).
cgagtgcatgagatcttca

SEQ ID NO: 36205 - DNA, 19 bp, Homo sapiens
  siRNA target sequence for POLR2A (NM_000937.2,1045-1063).
gagtgcatgagatcttcaa

SEQ ID NO: 36206 - DNA, 19 bp, Homo sapiens
  siRNA target sequence for POLR2A (NM_000937.2,1119-1137).
ccagagtggatgattgtca

SEQ ID NO: 36207 - DNA, 19 bp, Homo sapiens
  siRNA target sequence for POLR2A (NM_000937.2,1626-1644).
ccaggcgccaagtacatca

SEQ ID NO: 36208 - DNA, 19 bp, Homo sapiens
  siRNA target sequence for POLR2A (NM_000937.2,1627-1645).
caggcgccaagtacatcat

SEQ ID NO: 36209 - DNA, 19 bp, Homo sapiens
  siRNA target sequence for POLR2A (NM_000937.2,1637-1655).
gtacatcatccgagacaat

SEQ ID NO: 36210 - DNA, 19 bp, Homo sapiens
  siRNA target sequence for POLR2A (NM_000937.2,1736-1754).
gtgtgatggggacattgtt

SEQ ID NO: 36211 - DNA, 19 bp, Homo sapiens
  siRNA target sequence for POLR2A (NM_000937.2,1738-1756).
gtgatggggacattgttat

SEQ ID NO: 36212 - DNA, 19 bp, Homo sapiens
  siRNA target sequence for POLR2A (NM_000937.2,1744-1762).
gggacattgttatcttcaa

SEQ ID NO: 36213 - DNA, 19 bp, Homo sapiens
  siRNA target sequence for POLR2A (NM_000937.2,1823-1841).
gtctacctttcgcttgaat

SEQ ID NO: 36214 - DNA, 19 bp, Homo sapiens
  siRNA target sequence for POLR2A (NM_000937.2,1858-1876).
cgtacaatgcagactttga

SEQ ID NO: 36215 - DNA, 19 bp, Homo sapiens
  siRNA target sequence for POLR2A (NM_000937.2,1875-1893).
gacggggatgagatgaact

SEQ ID NO: 36216 - DNA, 19 bp, Homo sapiens
  siRNA target sequence for POLR2A (NM_000937.2,1943-1961).
catggttcctcgcatgatt

SEQ ID NO: 36217 - DNA, 19 bp, Homo sapiens
  siRNA target sequence for POLR2A (NM_000937.2,1947-1965).
gttcctcgcatgattgtca

SEQ ID NO: 36218 - DNA, 19 bp, Homo sapiens
  siRNA target sequence for POLR2A (NM_000937.2,2139-2157).
ctgtggacaggcaagcaaa

SEQ ID NO: 36219 - DNA, 19 bp, Homo sapiens
  siRNA target sequence for POLR2A (NM_000937.2,2143-2161).
ggacaggcaagcaaatctt

SEQ ID NO: 36220 - DNA, 19 bp, Homo sapiens
  siRNA target sequence for POLR2A (NM_000937.2,2175-2193).
cctggtcacatcaattgta

SEQ ID NO: 36221 - DNA, 19 bp, Homo sapiens
  siRNA target sequence for POLR2A (NM_000937.2,2396-2414).
caacattcagactgtcatt

SEQ ID NO: 36222 - DNA, 19 bp, Homo sapiens
  siRNA target sequence for POLR2A (NM_000937.2,2426-2444).
cctcatcgagggtcatact

SEQ ID NO: 36223 - DNA, 19 bp, Homo sapiens
  siRNA target sequence for POLR2A (NM_000937.2,2427-2445).
ctcatcgagggtcatacta

SEQ ID NO: 36224 - DNA, 19 bp, Homo sapiens
  siRNA target sequence for POLR2A (NM_000937.2,2429-2447).
catcgagggtcatactatt

SEQ ID NO: 36225 - DNA, 19 bp, Homo sapiens
  siRNA target sequence for POLR2A (NM_000937.2,2486-2504).
ggacattcagaacactatt

SEQ ID NO: 36226 - DNA, 19 bp, Homo sapiens
  siRNA target sequence for POLR2A (NM_000937.2,2487-2505).
gacattcagaacactatta

SEQ ID NO: 36227 - DNA, 19 bp, Homo sapiens
  siRNA target sequence for POLR2A (NM_000937.2,2510-2528).
ggccaagcaggacgtaata

SEQ ID NO: 36228 - DNA, 19 bp, Homo sapiens
  siRNA target sequence for POLR2A (NM_000937.2,2587-2605).
ggcagacgtttgagaatca

SEQ ID NO: 36229 - DNA, 19 bp, Homo sapiens
  siRNA target sequence for POLR2A (NM_000937.2,2604-2622).
caggtgaaccgcattctta

SEQ ID NO: 36230 - DNA, 19 bp, Homo sapiens
  siRNA target sequence for POLR2A (NM_000937.2,2609-2627).
gaaccgcattcttaacgat

SEQ ID NO: 36231 - DNA, 19 bp, Homo sapiens
  siRNA target sequence for POLR2A (NM_000937.2,2693-2711).
ggtcgtgtccggagctaaa

SEQ ID NO: 36232 - DNA, 19 bp, Homo sapiens
  siRNA target sequence for POLR2A (NM_000937.2,2696-2714).
cgtgtccggagctaaaggt

SEQ ID NO: 36233 - DNA, 19 bp, Homo sapiens
  siRNA target sequence for POLR2A (NM_000937.2,2697-2715).
gtgtccggagctaaaggtt

SEQ ID NO: 36234 - DNA, 19 bp, Homo sapiens
  siRNA target sequence for POLR2A (NM_000937.2,2707-2725).
ctaaaggttccaagattaa

SEQ ID NO: 36235 - DNA, 19 bp, Homo sapiens
  siRNA target sequence for POLR2A (NM_000937.2,2766-2784).
gagggcaagcggattccat

SEQ ID NO: 36236 - DNA, 19 bp, Homo sapiens
  siRNA target sequence for POLR2A (NM_000937.2,2768-2786).
gggcaagcggattccattt

SEQ ID NO: 36237 - DNA, 19 bp, Homo sapiens
  siRNA target sequence for POLR2A (NM_000937.2,2914-2932).
gtcgtgaggggctcattga

SEQ ID NO: 36238 - DNA, 19 bp, Homo sapiens
  siRNA target sequence for POLR2A (NM_000937.2,3146-3164).
ccgctttgattataccaat

SEQ ID NO: 36239 - DNA, 19 bp, Homo sapiens
  siRNA target sequence for POLR2A (NM_000937.2,3236-3254).
cgagttggagcgggaattt

SEQ ID NO: 36240 - DNA, 19 bp, Homo sapiens
  siRNA target sequence for POLR2A (NM_000937.2,3475-3493).
gtcgacaggcccaggaaaa

SEQ ID NO: 36241 - DNA, 19 bp, Homo sapiens
  siRNA target sequence for POLR2A (NM_000937.2,3519-3537).
ctgcggtccacgttgtgtt

SEQ ID NO: 36242 - DNA, 19 bp, Homo sapiens
  siRNA target sequence for POLR2A (NM_000937.2,3588-3606).
ctgcttggggagattgagt

SEQ ID NO: 36243 - DNA, 19 bp, Homo sapiens
  siRNA target sequence for POLR2A (NM_000937.2,3687-3705).
cagatgaccttgaatacct

SEQ ID NO: 36244 - DNA, 19 bp, Homo sapiens
  siRNA target sequence for POLR2A (NM_000937.2,3745-3763).
gtgtgccccgacttaagga

SEQ ID NO: 36245 - DNA, 19 bp, Homo sapiens
  siRNA target sequence for POLR2A (NM_000937.2,3837-3855).
gctgagagagccaaggata

SEQ ID NO: 36246 - DNA, 19 bp, Homo sapiens
  siRNA target sequence for POLR2A (NM_000937.2,3954-3972).
caggaatgggtgaatgtct

SEQ ID NO: 36247 - DNA, 19 bp, Homo sapiens
  siRNA target sequence for POLR2A (NM_000937.2,3962-3980).
ggtgaatgtctactatgaa

SEQ ID NO: 36248 - DNA, 19 bp, Homo sapiens
  siRNA target sequence for POLR2A (NM_000937.2,3963-3981).
gtgaatgtctactatgaaa

SEQ ID NO: 36249 - DNA, 19 bp, Homo sapiens
  siRNA target sequence for POLR2A (NM_000937.2,4088-4106).
gatcaatgctggttttggt

SEQ ID NO: 36250 - DNA, 19 bp, Homo sapiens
  siRNA target sequence for POLR2A (NM_000937.2,4109-4127).
cgacttgaactgcatcttt

SEQ ID NO: 36251 - DNA, 19 bp, Homo sapiens
  siRNA target sequence for POLR2A (NM_000937.2,4112-4130).
cttgaactgcatctttaat

SEQ ID NO: 36252 - DNA, 19 bp, Homo sapiens
  siRNA target sequence for POLR2A (NM_000937.2,4120-4138).
gcatctttaatgatgacaa

SEQ ID NO: 36253 - DNA, 19 bp, Homo sapiens
  siRNA target sequence for POLR2A (NM_000937.2,4121-4139).
catctttaatgatgacaat

SEQ ID NO: 36254 - DNA, 19 bp, Homo sapiens
  siRNA target sequence for POLR2A (NM_000937.2,4155-4173).
ctccgtattcgcatcatga

SEQ ID NO: 36255 - DNA, 19 bp, Homo sapiens
  siRNA target sequence for POLR2A (NM_000937.2,4158-4176).
cgtattcgcatcatgaaca

SEQ ID NO: 36256 - DNA, 19 bp, Homo sapiens
  siRNA target sequence for POLR2A (NM_000937.2,4452-4470).
cgcaccacgtccaatgaca

SEQ ID NO: 36257 - DNA, 19 bp, Homo sapiens
  siRNA target sequence for POLR2A (NM_000937.2,4456-4474).
ccacgtccaatgacattgt

SEQ ID NO: 36258 - DNA, 19 bp, Homo sapiens
  siRNA target sequence for POLR2A (NM_000937.2,4582-4600).
ctctcttgtgtgataccat

SEQ ID NO: 36259 - DNA, 19 bp, Homo sapiens
  siRNA target sequence for POLR2A (NM_000937.2,4690-4708).
cggtggacgtgcttatgga

SEQ ID NO: 36260 - DNA, 19 bp, Homo sapiens
  siRNA target sequence for POLR2A (NM_000937.2,5255-5273).
ccctacctctccatcctat

SEQ ID NO: 36261 - DNA, 19 bp, Homo sapiens
  siRNA target sequence for POLR2A (NM_000937.2,5594-5612).
cacttccccaagttactca

SEQ ID NO: 36262 - DNA, 19 bp, Homo sapiens
  siRNA target sequence for POLR2A (NM_000937.2,5613-5631).
cccaccagcccgaactatt

SEQ ID NO: 36263 - DNA, 19 bp, Homo sapiens
  siRNA target sequence for POLR2A (NM_000937.2,5615-5633).
caccagcccgaactattct

SEQ ID NO: 36264 - DNA, 19 bp, Homo sapiens
  siRNA target sequence for POLR2A (NM_000937.2,5697-5715).
cctactagtcccaactaca

SEQ ID NO: 36265 - DNA, 19 bp, Homo sapiens
  siRNA target sequence for POLR2A (NM_000937.2,5718-5736).
cctaccagccctaactaca

SEQ ID NO: 36266 - DNA, 19 bp, Homo sapiens
  siRNA target sequence for POLR2A (NM_000937.2,5779-5797).
ccccgacctcaccaagtta

SEQ ID NO: 36267 - DNA, 19 bp, Homo sapiens
  siRNA target sequence for POLR2A (NM_000937.2,5823-5841).
ccacagtctccaacctata

SEQ ID NO: 36268 - DNA, 19 bp, Homo sapiens
  siRNA target sequence for POLR2A (NM_000937.2,5928-5946).
cccagctccccagagtata

SEQ ID NO: 36269 - DNA, 19 bp, Homo sapiens
  siRNA target sequence for POLR2A (NM_000937.2,6052-6070).
ccccaacatctcctactta

SEQ ID NO: 36270 - DNA, 19 bp, Homo sapiens
  siRNA target sequence for POLR2A (NM_000937.2,6053-6071).
cccaacatctcctacttat

SEQ ID NO: 36271 - DNA, 19 bp, Homo sapiens
  siRNA target sequence for POLR2B (NM_000938.1,52-70).
cgcggatgaggatatgcaa

SEQ ID NO: 36272 - DNA, 19 bp, Homo sapiens
  siRNA target sequence for POLR2B (NM_000938.1,54-72).
cggatgaggatatgcaata

SEQ ID NO: 36273 - DNA, 19 bp, Homo sapiens
  siRNA target sequence for POLR2B (NM_000938.1,55-73).
ggatgaggatatgcaatat

SEQ ID NO: 36274 - DNA, 19 bp, Homo sapiens
  siRNA target sequence for POLR2B (NM_000938.1,89-107).
gaaatcaccccggatttgt

SEQ ID NO: 36275 - DNA, 19 bp, Homo sapiens
  siRNA target sequence for POLR2B (NM_000938.1,124-142).
gattgtaatcagttcctat

SEQ ID NO: 36276 - DNA, 19 bp, Homo sapiens
  siRNA target sequence for POLR2B (NM_000938.1,146-164).
gacgagaaaggcttggtta

SEQ ID NO: 36277 - DNA, 19 bp, Homo sapiens
  siRNA target sequence for POLR2B (NM_000938.1,199-217).
gatgtctgttcaaagaatt

SEQ ID NO: 36278 - DNA, 19 bp, Homo sapiens
  siRNA target sequence for POLR2B (NM_000938.1,259-277).
gcatgctagtggagaagtt

SEQ ID NO: 36279 - DNA, 19 bp, Homo sapiens
  siRNA target sequence for POLR2B (NM_000938.1,278-296).
gaagaaccgccacgatatt

SEQ ID NO: 36280 - DNA, 19 bp, Homo sapiens
  siRNA target sequence for POLR2B (NM_000938.1,330-348).
ctacccattgggaaagaga

SEQ ID NO: 36281 - DNA, 19 bp, Homo sapiens
  siRNA target sequence for POLR2B (NM_000938.1,351-369).
gtgctccttcaccaatgat

SEQ ID NO: 36282 - DNA, 19 bp, Homo sapiens
  siRNA target sequence for POLR2B (NM_000938.1,370-388).
gcccaatgaagctagatta

SEQ ID NO: 36283 - DNA, 19 bp, Homo sapiens
  siRNA target sequence for POLR2B (NM_000938.1,371-389).
cccaatgaagctagattaa

SEQ ID NO: 36284 - DNA, 19 bp, Homo sapiens
  siRNA target sequence for POLR2B (NM_000938.1,380-398).
gctagattaaggaatctca

SEQ ID NO: 36285 - DNA, 19 bp, Homo sapiens
  siRNA target sequence for POLR2B (NM_000938.1,405-423).
ctgctccgctttatgttga

SEQ ID NO: 36286 - DNA, 19 bp, Homo sapiens
  siRNA target sequence for POLR2B (NM_000938.1,407-425).
gctccgctttatgttgata

SEQ ID NO: 36287 - DNA, 19 bp, Homo sapiens
  siRNA target sequence for POLR2B (NM_000938.1,408-426).
ctccgctttatgttgatat

SEQ ID NO: 36288 - DNA, 19 bp, Homo sapiens
  siRNA target sequence for POLR2B (NM_000938.1,410-428).
ccgctttatgttgatataa

SEQ ID NO: 36289 - DNA, 19 bp, Homo sapiens
  siRNA target sequence for POLR2B (NM_000938.1,548-566).
cgtgatctttgtgagttaa

SEQ ID NO: 36290 - DNA, 19 bp, Homo sapiens
  siRNA target sequence for POLR2B (NM_000938.1,584-602).
cctggtggctatttcatta

SEQ ID NO: 36291 - DNA, 19 bp, Homo sapiens
  siRNA target sequence for POLR2B (NM_000938.1,585-603).
ctggtggctatttcattat

SEQ ID NO: 36292 - DNA, 19 bp, Homo sapiens
  siRNA target sequence for POLR2B (NM_000938.1,729-747).
cccgacccaccagtactat

SEQ ID NO: 36293 - DNA, 19 bp, Homo sapiens
  siRNA target sequence for POLR2B (NM_000938.1,730-748).
ccgacccaccagtactata

SEQ ID NO: 36294 - DNA, 19 bp, Homo sapiens
  siRNA target sequence for POLR2B (NM_000938.1,741-759).
gtactatatgggttagcat

SEQ ID NO: 36295 - DNA, 19 bp, Homo sapiens
  siRNA target sequence for POLR2B (NM_000938.1,773-791).
ggacagggtgccaagaaga

SEQ ID NO: 36296 - DNA, 19 bp, Homo sapiens
  siRNA target sequence for POLR2B (NM_000938.1,805-823).
gcgcattgtggcaactcta

SEQ ID NO: 36297 - DNA, 19 bp, Homo sapiens
  siRNA target sequence for POLR2B (NM_000938.1,812-830).
gtggcaactctaccatata

SEQ ID NO: 36298 - DNA, 19 bp, Homo sapiens
  siRNA target sequence for POLR2B (NM_000938.1,815-833).
gcaactctaccatatatca

SEQ ID NO: 36299 - DNA, 19 bp, Homo sapiens
  siRNA target sequence for POLR2B (NM_000938.1,835-853).
gcaagaagttcccatcatt

SEQ ID NO: 36300 - DNA, 19 bp, Homo sapiens
  siRNA target sequence for POLR2B (NM_000938.1,880-898).
gtccgacagagatatttta

SEQ ID NO: 36301 - DNA, 19 bp, Homo sapiens
  siRNA target sequence for POLR2B (NM_000938.1,882-900).
ccgacagagatattttaga

SEQ ID NO: 36302 - DNA, 19 bp, Homo sapiens
  siRNA target sequence for POLR2B (NM_000938.1,899-917).
gaacatattatttatgatt

SEQ ID NO: 36303 - DNA, 19 bp, Homo sapiens
  siRNA target sequence for POLR2B (NM_000938.1,934-952).
gatggaaatggttaaacct

SEQ ID NO: 36304 - DNA, 19 bp, Homo sapiens
  siRNA target sequence for POLR2B (NM_000938.1,951-969).
cttctctcgatgaagcttt

SEQ ID NO: 36305 - DNA, 19 bp, Homo sapiens
  siRNA target sequence for POLR2B (NM_000938.1,956-974).
ctcgatgaagcttttgtca

SEQ ID NO: 36306 - DNA, 19 bp, Homo sapiens
  siRNA target sequence for POLR2B (NM_000938.1,966-984).
cttttgtcatccaagaaca

SEQ ID NO: 36307 - DNA, 19 bp, Homo sapiens
  siRNA target sequence for POLR2B (NM_000938.1,992-1010).
gcactaaatttcattggtt

SEQ ID NO: 36308 - DNA, 19 bp, Homo sapiens
  siRNA target sequence for POLR2B (NM_000938.1,1025-1043).
cctggtgttactaaagaga

SEQ ID NO: 36309 - DNA, 19 bp, Homo sapiens
  siRNA target sequence for POLR2B (NM_000938.1,1128-1146).
cctatttcttgggatacat

SEQ ID NO: 36310 - DNA, 19 bp, Homo sapiens
  siRNA target sequence for POLR2B (NM_000938.1,1140-1158).
gatacatggttcataggtt

SEQ ID NO: 36311 - DNA, 19 bp, Homo sapiens
  siRNA target sequence for POLR2B (NM_000938.1,1144-1162).
catggttcataggttactt

SEQ ID NO: 36312 - DNA, 19 bp, Homo sapiens
  siRNA target sequence for POLR2B (NM_000938.1,1176-1194).
gtagaagagaactagatga

SEQ ID NO: 36313 - DNA, 19 bp, Homo sapiens
  siRNA target sequence for POLR2B (NM_000938.1,1235-1253).
ccgctgcttgcattcttat

SEQ ID NO: 36314 - DNA, 19 bp, Homo sapiens
  siRNA target sequence for POLR2B (NM_000938.1,1288-1306).
gcggatctatgcacagaaa

SEQ ID NO: 36315 - DNA, 19 bp, Homo sapiens
  siRNA target sequence for POLR2B (NM_000938.1,1333-1351).
cttggagttggcaattaaa

SEQ ID NO: 36316 - DNA, 19 bp, Homo sapiens
  siRNA target sequence for POLR2B (NM_000938.1,1336-1354).
ggagttggcaattaaaaca

SEQ ID NO: 36317 - DNA, 19 bp, Homo sapiens
  siRNA target sequence for POLR2B (NM_000938.1,1367-1385).
gatggcctaaaatactctt

SEQ ID NO: 36318 - DNA, 19 bp, Homo sapiens
  siRNA target sequence for POLR2B (NM_000938.1,1373-1391).
ctaaaatactctttagcta

SEQ ID NO: 36319 - DNA, 19 bp, Homo sapiens
  siRNA target sequence for POLR2B (NM_000938.1,1399-1417).
ctggggtgatcaaaagaaa

SEQ ID NO: 36320 - DNA, 19 bp, Homo sapiens
  siRNA target sequence for POLR2B (NM_000938.1,1436-1454).
ggagtatctcaggtgttaa

SEQ ID NO: 36321 - DNA, 19 bp, Homo sapiens
  siRNA target sequence for POLR2B (NM_000938.1,1437-1455).
gagtatctcaggtgttaaa

SEQ ID NO: 36322 - DNA, 19 bp, Homo sapiens
  siRNA target sequence for POLR2B (NM_000938.1,1450-1468).
gttaaaccgcctgactttt

SEQ ID NO: 36323 - DNA, 19 bp, Homo sapiens
  siRNA target sequence for POLR2B (NM_000938.1,1462-1480).
gacttttgcgtctactctt

SEQ ID NO: 36324 - DNA, 19 bp, Homo sapiens
  siRNA target sequence for POLR2B (NM_000938.1,1482-1500).
ctcacctgcgtcgtttaaa

SEQ ID NO: 36325 - DNA, 19 bp, Homo sapiens
  siRNA target sequence for POLR2B (NM_000938.1,1484-1502).
cacctgcgtcgtttaaatt

SEQ ID NO: 36326 - DNA, 19 bp, Homo sapiens
  siRNA target sequence for POLR2B (NM_000938.1,1486-1504).
cctgcgtcgtttaaattct

SEQ ID NO: 36327 - DNA, 19 bp, Homo sapiens
  siRNA target sequence for POLR2B (NM_000938.1,1519-1537).
cggcaagctagcaaaacca

SEQ ID NO: 36328 - DNA, 19 bp, Homo sapiens
  siRNA target sequence for POLR2B (NM_000938.1,1535-1553).
ccaagacagttgcataata

SEQ ID NO: 36329 - DNA, 19 bp, Homo sapiens
  siRNA target sequence for POLR2B (NM_000938.1,1539-1557).
gacagttgcataatacgtt

SEQ ID NO: 36330 - DNA, 19 bp, Homo sapiens
  siRNA target sequence for POLR2B (NM_000938.1,1627-1645).
gatggcgtatatttcagtt

SEQ ID NO: 36331 - DNA, 19 bp, Homo sapiens
  siRNA target sequence for POLR2B (NM_000938.1,1650-1668).
ctcaaccatctccaattct

SEQ ID NO: 36332 - DNA, 19 bp, Homo sapiens
  siRNA target sequence for POLR2B (NM_000938.1,1662-1680).
caattctggaatttttaga

SEQ ID NO: 36333 - DNA, 19 bp, Homo sapiens
  siRNA target sequence for POLR2B (NM_000938.1,1727-1745).
gctgatgcaaccaagattt

SEQ ID NO: 36334 - DNA, 19 bp, Homo sapiens
  siRNA target sequence for POLR2B (NM_000938.1,1728-1746).
ctgatgcaaccaagatttt

SEQ ID NO: 36335 - DNA, 19 bp, Homo sapiens
  siRNA target sequence for POLR2B (NM_000938.1,1755-1773).
gctgctgggttggaataca

SEQ ID NO: 36336 - DNA, 19 bp, Homo sapiens
  siRNA target sequence for POLR2B (NM_000938.1,1756-1774).
ctgctgggttggaatacat

SEQ ID NO: 36337 - DNA, 19 bp, Homo sapiens
  siRNA target sequence for POLR2B (NM_000938.1,1761-1779).
gggttggaatacataaaga

SEQ ID NO: 36338 - DNA, 19 bp, Homo sapiens
  siRNA target sequence for POLR2B (NM_000938.1,1778-1796).
gatcccgaacaacttatga

SEQ ID NO: 36339 - DNA, 19 bp, Homo sapiens
  siRNA target sequence for POLR2B (NM_000938.1,1781-1799).
cccgaacaacttatgaaca

SEQ ID NO: 36340 - DNA, 19 bp, Homo sapiens
  siRNA target sequence for POLR2B (NM_000938.1,1870-1888).
gagggagattcggatctat

SEQ ID NO: 36341 - DNA, 19 bp, Homo sapiens
  siRNA target sequence for POLR2B (NM_000938.1,1892-1910).
gatgcaggccgtatttgta

SEQ ID NO: 36342 - DNA, 19 bp, Homo sapiens
  siRNA target sequence for POLR2B (NM_000938.1,1908-1926).
gtagaccacttctgattgt

SEQ ID NO: 36343 - DNA, 19 bp, Homo sapiens
  siRNA target sequence for POLR2B (NM_000938.1,1956-1974).
ggcatattgaccaattgaa

SEQ ID NO: 36344 - DNA, 19 bp, Homo sapiens
  siRNA target sequence for POLR2B (NM_000938.1,2019-2037).
gtggggtagtggagtatat

SEQ ID NO: 36345 - DNA, 19 bp, Homo sapiens
  siRNA target sequence for POLR2B (NM_000938.1,2022-2040).
gggtagtggagtatattga

SEQ ID NO: 36346 - DNA, 19 bp, Homo sapiens
  siRNA target sequence for POLR2B (NM_000938.1,2023-2041).
ggtagtggagtatattgat

SEQ ID NO: 36347 - DNA, 19 bp, Homo sapiens
  siRNA target sequence for POLR2B (NM_000938.1,2024-2042).
gtagtggagtatattgata

SEQ ID NO: 36348 - DNA, 19 bp, Homo sapiens
  siRNA target sequence for POLR2B (NM_000938.1,2069-2087).
gcaatgactccagatgatt

SEQ ID NO: 36349 - DNA, 19 bp, Homo sapiens
  siRNA target sequence for POLR2B (NM_000938.1,2070-2088).
caatgactccagatgattt

SEQ ID NO: 36350 - DNA, 19 bp, Homo sapiens
  siRNA target sequence for POLR2B (NM_000938.1,2132-2150).
gagattcatccctcaatga

SEQ ID NO: 36351 - DNA, 19 bp, Homo sapiens
  siRNA target sequence for POLR2B (NM_000938.1,2156-2174).
ggtgtctgtgcatctatta

SEQ ID NO: 36352 - DNA, 19 bp, Homo sapiens
  siRNA target sequence for POLR2B (NM_000938.1,2157-2175).
gtgtctgtgcatctattat

SEQ ID NO: 36353 - DNA, 19 bp, Homo sapiens
  siRNA target sequence for POLR2B (NM_000938.1,2194-2212).
ccagtcccctagaaacaca

SEQ ID NO: 36354 - DNA, 19 bp, Homo sapiens
  siRNA target sequence for POLR2B (NM_000938.1,2284-2302).
ggcccatgttctctattat

SEQ ID NO: 36355 - DNA, 19 bp, Homo sapiens
  siRNA target sequence for POLR2B (NM_000938.1,2322-2340).
ctacacggtctatggaata

SEQ ID NO: 36356 - DNA, 19 bp, Homo sapiens
  siRNA target sequence for POLR2B (NM_000938.1,2325-2343).
cacggtctatggaatatct

SEQ ID NO: 36357 - DNA, 19 bp, Homo sapiens
  siRNA target sequence for POLR2B (NM_000938.1,2335-2353).
ggaatatctacgatttaga

SEQ ID NO: 36358 - DNA, 19 bp, Homo sapiens
  siRNA target sequence for POLR2B (NM_000938.1,2357-2375).
ctgccagcaggcatcaact

SEQ ID NO: 36359 - DNA, 19 bp, Homo sapiens
  siRNA target sequence for POLR2B (NM_000938.1,2360-2378).
ccagcaggcatcaactcaa

SEQ ID NO: 36360 - DNA, 19 bp, Homo sapiens
  siRNA target sequence for POLR2B (NM_000938.1,2361-2379).
cagcaggcatcaactcaat

SEQ ID NO: 36361 - DNA, 19 bp, Homo sapiens
  siRNA target sequence for POLR2B (NM_000938.1,2364-2382).
caggcatcaactcaattgt

SEQ ID NO: 36362 - DNA, 19 bp, Homo sapiens
  siRNA target sequence for POLR2B (NM_000938.1,2381-2399).
gtggccattgcatcataca

SEQ ID NO: 36363 - DNA, 19 bp, Homo sapiens
  siRNA target sequence for POLR2B (NM_000938.1,2383-2401).
ggccattgcatcatacact

SEQ ID NO: 36364 - DNA, 19 bp, Homo sapiens
  siRNA target sequence for POLR2B (NM_000938.1,2414-2432).
gaagactctgttatcatga

SEQ ID NO: 36365 - DNA, 19 bp, Homo sapiens
  siRNA target sequence for POLR2B (NM_000938.1,2453-2471).
ggcttcttcaggtctgttt

SEQ ID NO: 36366 - DNA, 19 bp, Homo sapiens
  siRNA target sequence for POLR2B (NM_000938.1,2468-2486).
gttttctatcgctcataca

SEQ ID NO: 36367 - DNA, 19 bp, Homo sapiens
  siRNA target sequence for POLR2B (NM_000938.1,2497-2515).
gtctaaaaaaggatttgat

SEQ ID NO: 36368 - DNA, 19 bp, Homo sapiens
  siRNA target sequence for POLR2B (NM_000938.1,2499-2517).
ctaaaaaaggatttgatca

SEQ ID NO: 36369 - DNA, 19 bp, Homo sapiens
  siRNA target sequence for POLR2B (NM_000938.1,2533-2551).
gaagcctacacgtgaaaca

SEQ ID NO: 36370 - DNA, 19 bp, Homo sapiens
  siRNA target sequence for POLR2B (NM_000938.1,2587-2605).
ggatgatgatggtttgata

SEQ ID NO: 36371 - DNA, 19 bp, Homo sapiens
  siRNA target sequence for POLR2B (NM_000938.1,2691-2709).
ccaatagacgctataccaa

SEQ ID NO: 36372 - DNA, 19 bp, Homo sapiens
  siRNA target sequence for POLR2B (NM_000938.1,2710-2728).
gagagactgtagcactttt

SEQ ID NO: 36373 - DNA, 19 bp, Homo sapiens
  siRNA target sequence for POLR2B (NM_000938.1,2748-2766).
gcattgtggatcaggttat

SEQ ID NO: 36374 - DNA, 19 bp, Homo sapiens
  siRNA target sequence for POLR2B (NM_000938.1,2753-2771).
gtggatcaggttatggtaa

SEQ ID NO: 36375 - DNA, 19 bp, Homo sapiens
  siRNA target sequence for POLR2B (NM_000938.1,2761-2779).
ggttatggtaactctcaat

SEQ ID NO: 36376 - DNA, 19 bp, Homo sapiens
  siRNA target sequence for POLR2B (NM_000938.1,2774-2792).
ctcaatcaggaaggatata

SEQ ID NO: 36377 - DNA, 19 bp, Homo sapiens
  siRNA target sequence for POLR2B (NM_000938.1,2783-2801).
gaaggatataaattttgta

SEQ ID NO: 36378 - DNA, 19 bp, Homo sapiens
  siRNA target sequence for POLR2B (NM_000938.1,2809-2827).
ggtacgctctgttaggatt

SEQ ID NO: 36379 - DNA, 19 bp, Homo sapiens
  siRNA target sequence for POLR2B (NM_000938.1,2870-2888).
ggtacttgtggtattcagt

SEQ ID NO: 36380 - DNA, 19 bp, Homo sapiens
  siRNA target sequence for POLR2B (NM_000938.1,2871-2889).
gtacttgtggtattcagta

SEQ ID NO: 36381 - DNA, 19 bp, Homo sapiens
  siRNA target sequence for POLR2B (NM_000938.1,2877-2895).
gtggtattcagtatagaca

SEQ ID NO: 36382 - DNA, 19 bp, Homo sapiens
  siRNA target sequence for POLR2B (NM_000938.1,2907-2925).
ctttcacctgtgaaggtat

SEQ ID NO: 36383 - DNA, 19 bp, Homo sapiens
  siRNA target sequence for POLR2B (NM_000938.1,2921-2939).
ggtatcacccctgatatca

SEQ ID NO: 36384 - DNA, 19 bp, Homo sapiens
  siRNA target sequence for POLR2B (NM_000938.1,2922-2940).
gtatcacccctgatatcat

SEQ ID NO: 36385 - DNA, 19 bp, Homo sapiens
  siRNA target sequence for POLR2B (NM_000938.1,2956-2974).
catcccctctcgtatgact

SEQ ID NO: 36386 - DNA, 19 bp, Homo sapiens
  siRNA target sequence for POLR2B (NM_000938.1,2959-2977).
cccctctcgtatgactatt

SEQ ID NO: 36387 - DNA, 19 bp, Homo sapiens
  siRNA target sequence for POLR2B (NM_000938.1,2962-2980).
ctctcgtatgactattggt

SEQ ID NO: 36388 - DNA, 19 bp, Homo sapiens
  siRNA target sequence for POLR2B (NM_000938.1,2971-2989).
gactattggtcacttaatt

SEQ ID NO: 36389 - DNA, 19 bp, Homo sapiens
  siRNA target sequence for POLR2B (NM_000938.1,3003-3021).
ggaaggtatcggctaacaa

SEQ ID NO: 36390 - DNA, 19 bp, Homo sapiens
  siRNA target sequence for POLR2B (NM_000938.1,3012-3030).
cggctaacaagggtgaaat

SEQ ID NO: 36391 - DNA, 19 bp, Homo sapiens
  siRNA target sequence for POLR2B (NM_000938.1,3090-3108).
ctgattatggctatcatct

SEQ ID NO: 36392 - DNA, 19 bp, Homo sapiens
  siRNA target sequence for POLR2B (NM_000938.1,3139-3157).
cactggtcgaaaaatcaca

SEQ ID NO: 36393 - DNA, 19 bp, Homo sapiens
  siRNA target sequence for POLR2B (NM_000938.1,3146-3164).
cgaaaaatcacatcacaaa

SEQ ID NO: 36394 - DNA, 19 bp, Homo sapiens
  siRNA target sequence for POLR2B (NM_000938.1,3200-3218).
catatggtggatgataaga

SEQ ID NO: 36395 - DNA, 19 bp, Homo sapiens
  siRNA target sequence for POLR2B (NM_000938.1,3239-3257).
cctattcagatcctcaata

SEQ ID NO: 36396 - DNA, 19 bp, Homo sapiens
  siRNA target sequence for POLR2B (NM_000938.1,3291-3309).
gcctgcgttttggagaaat

SEQ ID NO: 36397 - DNA, 19 bp, Homo sapiens
  siRNA target sequence for POLR2B (NM_000938.1,3295-3313).
gcgttttggagaaatggaa

SEQ ID NO: 36398 - DNA, 19 bp, Homo sapiens
  siRNA target sequence for POLR2B (NM_000938.1,3310-3328).
ggaacgagattgtcagatt

SEQ ID NO: 36399 - DNA, 19 bp, Homo sapiens
  siRNA target sequence for POLR2B (NM_000938.1,3399-3417).
gcaatctttgtggaataat

SEQ ID NO: 36400 - DNA, 19 bp, Homo sapiens
  siRNA target sequence for POLR2B (NM_000938.1,3433-3451).
caggacccatacatatgaa

SEQ ID NO: 36401 - DNA, 19 bp, Homo sapiens
  siRNA target sequence for POLR2B (NM_000938.1,3453-3471).
gcaggggctgccgcaataa

SEQ ID NO: 36402 - DNA, 19 bp, Homo sapiens
  siRNA target sequence for POLR2B (NM_000938.1,3454-3472).
caggggctgccgcaataaa

SEQ ID NO: 36403 - DNA, 19 bp, Homo sapiens
  siRNA target sequence for POLR2B (NM_000938.1,3497-3515).
ccttacgcatgcaaactat

SEQ ID NO: 36404 - DNA, 19 bp, Homo sapiens
  siRNA target sequence for POLR2B (NM_000938.1,3540-3558).
gtattgcaccgcgaatgat

SEQ ID NO: 36405 - DNA, 19 bp, Homo sapiens
  siRNA target sequence for POLR2B (NM_000938.1,3548-3566).
ccgcgaatgatgagtgttt

SEQ ID NO: 36406 - DNA, 19 bp, Homo sapiens
  siRNA target sequence for POLR2C (NM_002694.2,139-157).
ctggcggtggccaattcga

SEQ ID NO: 36407 - DNA, 19 bp, Homo sapiens
  siRNA target sequence for POLR2C (NM_002694.2,141-159).
ggcggtggccaattcgatt

SEQ ID NO: 36408 - DNA, 19 bp, Homo sapiens
  siRNA target sequence for POLR2C (NM_002694.2,155-173).
cgattcggagggtcttcat

SEQ ID NO: 36409 - DNA, 19 bp, Homo sapiens
  siRNA target sequence for POLR2C (NM_002694.2,174-192).
cgctgaggttcccataata

SEQ ID NO: 36410 - DNA, 19 bp, Homo sapiens
  siRNA target sequence for POLR2C (NM_002694.2,184-202).
cccataatagccattgact

SEQ ID NO: 36411 - DNA, 19 bp, Homo sapiens
  siRNA target sequence for POLR2C (NM_002694.2,262-280).
ggattaattcccctcatta

SEQ ID NO: 36412 - DNA, 19 bp, Homo sapiens
  siRNA target sequence for POLR2C (NM_002694.2,273-291).
cctcattagtgatgacatt

SEQ ID NO: 36413 - DNA, 19 bp, Homo sapiens
  siRNA target sequence for POLR2C (NM_002694.2,366-384).
cgatgtgcggtgcaatgaa

SEQ ID NO: 36414 - DNA, 19 bp, Homo sapiens
  siRNA target sequence for POLR2C (NM_002694.2,449-467).
catcccggaaccgagataa

SEQ ID NO: 36415 - DNA, 19 bp, Homo sapiens
  siRNA target sequence for POLR2C (NM_002694.2,452-470).
cccggaaccgagataatga

SEQ ID NO: 36416 - DNA, 19 bp, Homo sapiens
  siRNA target sequence for POLR2C (NM_002694.2,593-611).
ctgcaggggtggcttttga

SEQ ID NO: 36417 - DNA, 19 bp, Homo sapiens
  siRNA target sequence for POLR2C (NM_002694.2,596-614).
caggggtggcttttgaata

SEQ ID NO: 36418 - DNA, 19 bp, Homo sapiens
  siRNA target sequence for POLR2C (NM_002694.2,657-675).
cgaggaatggccaaagagt

SEQ ID NO: 36419 - DNA, 19 bp, Homo sapiens
  siRNA target sequence for POLR2C (NM_002694.2,726-744).
cggcaagccagaaaggttt

SEQ ID NO: 36420 - DNA, 19 bp, Homo sapiens
  siRNA target sequence for POLR2C (NM_002694.2,734-752).
cagaaaggttttactacaa

SEQ ID NO: 36421 - DNA, 19 bp, Homo sapiens
  siRNA target sequence for POLR2C (NM_002694.2,827-845).
gtgatttacaaactcaatt

SEQ ID NO: 36422 - DNA, 19 bp, Homo sapiens
  siRNA target sequence for POLR2C (NM_002694.2,861-879).
gagtgatgtgctaaccata

SEQ ID NO: 36423 - DNA, 19 bp, Homo sapiens
  siRNA target sequence for POLR2C (NM_002694.2,863-881).
gtgatgtgctaaccataaa

SEQ ID NO: 36424 - DNA, 19 bp, Homo sapiens
  siRNA target sequence for POLR2C (NM_002694.2,865-883).
gatgtgctaaccataaatt

SEQ ID NO: 36425 - DNA, 19 bp, Homo sapiens
  siRNA target sequence for POLR2E (NM_002695.2,42-60).
cgtaccggctctggaaaat

SEQ ID NO: 36426 - DNA, 19 bp, Homo sapiens
  siRNA target sequence for POLR2F (NM_021974.2,83-101).
cagacaacgaggacaattt

SEQ ID NO: 36427 - DNA, 19 bp, Homo sapiens
  siRNA target sequence for POLR2F (NM_021974.2,107-125).
gcgacgactttgatgatgt

SEQ ID NO: 36428 - DNA, 19 bp, Homo sapiens
  siRNA target sequence for POLR2F (NM_021974.2,230-248).
gaatcaccacaccatacat

SEQ ID NO: 36429 - DNA, 19 bp, Homo sapiens
  siRNA target sequence for POLR2F (NM_021974.2,376-394).
cgaaagatccccatcatca

SEQ ID NO: 36430 - DNA, 19 bp, Homo sapiens
  siRNA target sequence for POLR2J (NM_006234.3,361-379).
gctttcgggtggccataaa

SEQ ID NO: 36431 - DNA, 19 bp, Homo sapiens
  siRNA target sequence for POLR2J (NM_006234.3,362-380).
ctttcgggtggccataaaa

SEQ ID NO: 36432 - DNA, 19 bp, Homo sapiens
  siRNA target sequence for POLR2J (NM_006234.3,366-384).
cgggtggccataaaagaca

SEQ ID NO: 36433 - DNA, 19 bp, Homo sapiens
  siRNA target sequence for POLR2J (NM_006234.3,367-385).
gggtggccataaaagacaa

SEQ ID NO: 36434 - DNA, 19 bp, Homo sapiens
  siRNA target sequence for POLR2K (NM_005034.2,92-110).
ctccaaagcagcaaccaat

SEQ ID NO: 36435 - DNA, 19 bp, Homo sapiens
  siRNA target sequence for POLR2K (NM_005034.2,184-202).
ggatacagaataatgtaca

SEQ ID NO: 36436 - DNA, 19 bp, Homo sapiens
  siRNA target sequence for POLR2K (NM_005034.2,212-230).
ctaaaagattggtcgtttt

SEQ ID NO: 36437 - DNA, 19 bp, Homo sapiens
  siRNA target sequence for POLRMT (NM_005035.2,866-884).
ggagctggtatatgtgtta

SEQ ID NO: 36438 - DNA, 19 bp, Homo sapiens
  siRNA target sequence for POLRMT (NM_005035.2,867-885).
gagctggtatatgtgttat

SEQ ID NO: 36439 - DNA, 19 bp, Homo sapiens
  siRNA target sequence for POLRMT (NM_005035.2,1845-1863).
gtgctctaccacgtgtatt

SEQ ID NO: 36440 - DNA, 19 bp, Homo sapiens
  siRNA target sequence for POLRMT (NM_005035.2,1848-1866).
ctctaccacgtgtattcct

SEQ ID NO: 36441 - DNA, 19 bp, Homo sapiens
  siRNA target sequence for POLRMT (NM_005035.2,3607-3625).
gctctgagccccagaagat

SEQ ID NO: 36442 - DNA, 19 bp, Homo sapiens
  siRNA target sequence for POLS (NM_006999.2,77-95).
gtggtgaaacggatcgaaa

SEQ ID NO: 36443 - DNA, 19 bp, Homo sapiens
  siRNA target sequence for POLS (NM_006999.2,114-132).
ggccgacggctgatgtaca

SEQ ID NO: 36444 - DNA, 19 bp, Homo sapiens
  siRNA target sequence for POLS (NM_006999.2,117-135).
cgacggctgatgtacagat

SEQ ID NO: 36445 - DNA, 19 bp, Homo sapiens
  siRNA target sequence for POLS (NM_006999.2,118-136).
gacggctgatgtacagata

SEQ ID NO: 36446 - DNA, 19 bp, Homo sapiens
  siRNA target sequence for POLS (NM_006999.2,120-138).
cggctgatgtacagatatt

SEQ ID NO: 36447 - DNA, 19 bp, Homo sapiens
  siRNA target sequence for POLS (NM_006999.2,144-162).
gctttagtacaggtcttta

SEQ ID NO: 36448 - DNA, 19 bp, Homo sapiens
  siRNA target sequence for POLS (NM_006999.2,286-304).
caaggctacggtaccaata

SEQ ID NO: 36449 - DNA, 19 bp, Homo sapiens
  siRNA target sequence for POLS (NM_006999.2,289-307).
ggctacggtaccaataata

SEQ ID NO: 36450 - DNA, 19 bp, Homo sapiens
  siRNA target sequence for POLS (NM_006999.2,291-309).
ctacggtaccaataataaa

SEQ ID NO: 36451 - DNA, 19 bp, Homo sapiens
  siRNA target sequence for POLS (NM_006999.2,338-356).
gttgacatcagctttaaca

SEQ ID NO: 36452 - DNA, 19 bp, Homo sapiens
  siRNA target sequence for POLS (NM_006999.2,371-389).
cgggcagcggagttcatca

SEQ ID NO: 36453 - DNA, 19 bp, Homo sapiens
  siRNA target sequence for POLS (NM_006999.2,372-390).
gggcagcggagttcatcaa

SEQ ID NO: 36454 - DNA, 19 bp, Homo sapiens
  siRNA target sequence for POLS (NM_006999.2,378-396).
cggagttcatcaagaatta

SEQ ID NO: 36455 - DNA, 19 bp, Homo sapiens
  siRNA target sequence for POLS (NM_006999.2,482-500).
ggtggaattagctcataca

SEQ ID NO: 36456 - DNA, 19 bp, Homo sapiens
  siRNA target sequence for POLS (NM_006999.2,516-534).
ccattagctttctacagtt

SEQ ID NO: 36457 - DNA, 19 bp, Homo sapiens
  siRNA target sequence for POLS (NM_006999.2,532-550).
gttgcatccaagaattgat

SEQ ID NO: 36458 - DNA, 19 bp, Homo sapiens
  siRNA target sequence for POLS (NM_006999.2,625-643).
cttgaaaaccggtattaga

SEQ ID NO: 36459 - DNA, 19 bp, Homo sapiens
  siRNA target sequence for POLS (NM_006999.2,839-857).
ctggccaggtcctatccaa

SEQ ID NO: 36460 - DNA, 19 bp, Homo sapiens
  siRNA target sequence for POLS (NM_006999.2,844-862).
caggtcctatccaaacaga

SEQ ID NO: 36461 - DNA, 19 bp, Homo sapiens
  siRNA target sequence for POLS (NM_006999.2,859-877).
cagagacgccgaaagtact

SEQ ID NO: 36462 - DNA, 19 bp, Homo sapiens
  siRNA target sequence for POLS (NM_006999.2,861-879).
gagacgccgaaagtacttt

SEQ ID NO: 36463 - DNA, 19 bp, Homo sapiens
  siRNA target sequence for POLS (NM_006999.2,865-883).
cgccgaaagtactttagga

SEQ ID NO: 36464 - DNA, 19 bp, Homo sapiens
  siRNA target sequence for POLS (NM_006999.2,866-884).
gccgaaagtactttaggaa

SEQ ID NO: 36465 - DNA, 19 bp, Homo sapiens
  siRNA target sequence for POLS (NM_006999.2,916-934).
ctaccggaggtggatcaaa

SEQ ID NO: 36466 - DNA, 19 bp, Homo sapiens
  siRNA target sequence for POLS (NM_006999.2,997-1015).
gcgaatagccacatgcaat

SEQ ID NO: 36467 - DNA, 19 bp, Homo sapiens
  siRNA target sequence for POLS (NM_006999.2,1137-1155).
ggagtgacgttgattcaga

SEQ ID NO: 36468 - DNA, 19 bp, Homo sapiens
  siRNA target sequence for POLS (NM_006999.2,1272-1290).
cttccagaacactgatcat

SEQ ID NO: 36469 - DNA, 19 bp, Homo sapiens
  siRNA target sequence for POLS (NM_006999.2,1300-1318).
caatcagaccaggtttact

SEQ ID NO: 36470 - DNA, 19 bp, Homo sapiens
  siRNA target sequence for POLS (NM_006999.2,1306-1324).
gaccaggtttactatacct

SEQ ID NO: 36471 - DNA, 19 bp, Homo sapiens
  siRNA target sequence for POLS (NM_006999.2,1394-1412).
gccgtccaccacatgtctt

SEQ ID NO: 36472 - DNA, 19 bp, Homo sapiens
  siRNA target sequence for POLS (NM_006999.2,1447-1465).
ctcgagccctcatctgtat

SEQ ID NO: 36473 - DNA, 19 bp, Homo sapiens
  siRNA target sequence for POLS (NM_006999.2,1449-1467).
cgagccctcatctgtatca

SEQ ID NO: 36474 - DNA, 19 bp, Homo sapiens
  siRNA target sequence for POLS (NM_006999.2,1452-1470).
gccctcatctgtatcataa

SEQ ID NO: 36475 - DNA, 19 bp, Homo sapiens
  siRNA target sequence for POLS (NM_006999.2,1471-1489).
gcagcacaacggcatgaaa

SEQ ID NO: 36476 - DNA, 19 bp, Homo sapiens
  siRNA target sequence for POLS (NM_006999.2,1475-1493).
cacaacggcatgaaactgt

SEQ ID NO: 36477 - DNA, 19 bp, Homo sapiens
  siRNA target sequence for POLS (NM_006999.2,1578-1596).
ggggacaccaccagtataa

SEQ ID NO: 36478 - DNA, 19 bp, Homo sapiens
  siRNA target sequence for PPARBP (NM_004774.2,249-267).
ggaacggctccatgcaaaa

SEQ ID NO: 36479 - DNA, 19 bp, Homo sapiens
  siRNA target sequence for PPARBP (NM_004774.2,250-268).
gaacggctccatgcaaaat

SEQ ID NO: 36480 - DNA, 19 bp, Homo sapiens
  siRNA target sequence for PPARBP (NM_004774.2,253-271).
cggctccatgcaaaattta

SEQ ID NO: 36481 - DNA, 19 bp, Homo sapiens
  siRNA target sequence for PPARBP (NM_004774.2,287-305).
ggagtgaaaccattaagct

SEQ ID NO: 36482 - DNA, 19 bp, Homo sapiens
  siRNA target sequence for PPARBP (NM_004774.2,288-306).
gagtgaaaccattaagctt

SEQ ID NO: 36483 - DNA, 19 bp, Homo sapiens
  siRNA target sequence for PPARBP (NM_004774.2,413-431).
cagcaatgactgatcgttt

SEQ ID NO: 36484 - DNA, 19 bp, Homo sapiens
  siRNA target sequence for PPARBP (NM_004774.2,476-494).
ccagtggcactgaatgtta

SEQ ID NO: 36485 - DNA, 19 bp, Homo sapiens
  siRNA target sequence for PPARBP (NM_004774.2,479-497).
gtggcactgaatgttacat

SEQ ID NO: 36486 - DNA, 19 bp, Homo sapiens
  siRNA target sequence for PPARBP (NM_004774.2,491-509).
gttacatcacgtcagatat

SEQ ID NO: 36487 - DNA, 19 bp, Homo sapiens
  siRNA target sequence for PPARBP (NM_004774.2,500-518).
cgtcagatatgttctatgt

SEQ ID NO: 36488 - DNA, 19 bp, Homo sapiens
  siRNA target sequence for PPARBP (NM_004774.2,541-559).
ggacagctttgtgatgtaa

SEQ ID NO: 36489 - DNA, 19 bp, Homo sapiens
  siRNA target sequence for PPARBP (NM_004774.2,590-608).
gctgtccggagcttgtaca

SEQ ID NO: 36490 - DNA, 19 bp, Homo sapiens
  siRNA target sequence for PPARBP (NM_004774.2,648-666).
ccttaagggccttgttaat

SEQ ID NO: 36491 - DNA, 19 bp, Homo sapiens
  siRNA target sequence for PPARBP (NM_004774.2,654-672).
gggccttgttaatctgtat

SEQ ID NO: 36492 - DNA, 19 bp, Homo sapiens
  siRNA target sequence for PPARBP (NM_004774.2,655-673).
ggccttgttaatctgtata

SEQ ID NO: 36493 - DNA, 19 bp, Homo sapiens
  siRNA target sequence for PPARBP (NM_004774.2,656-674).
gccttgttaatctgtataa

SEQ ID NO: 36494 - DNA, 19 bp, Homo sapiens
  siRNA target sequence for PPARBP (NM_004774.2,679-697).
ccaggggacaacaaactga

SEQ ID NO: 36495 - DNA, 19 bp, Homo sapiens
  siRNA target sequence for PPARBP (NM_004774.2,711-729).
cttggctctccaatcctta

SEQ ID NO: 36496 - DNA, 19 bp, Homo sapiens
  siRNA target sequence for PPARBP (NM_004774.2,714-732).
ggctctccaatccttagaa

SEQ ID NO: 36497 - DNA, 19 bp, Homo sapiens
  siRNA target sequence for PPARBP (NM_004774.2,762-780).
ctggaaagcaactaatgct

SEQ ID NO: 36498 - DNA, 19 bp, Homo sapiens
  siRNA target sequence for PPARBP (NM_004774.2,805-823).
ggaagtgttggctatctca

SEQ ID NO: 36499 - DNA, 19 bp, Homo sapiens
  siRNA target sequence for PPARBP (NM_004774.2,827-845).
caaggagtgggggtcattt

SEQ ID NO: 36500 - DNA, 19 bp, Homo sapiens
  siRNA target sequence for PPARBP (NM_004774.2,830-848).
ggagtgggggtcatttaat

SEQ ID NO: 36501 - DNA, 19 bp, Homo sapiens
  siRNA target sequence for PPARBP (NM_004774.2,875-893).
ctgacctactggatgacaa

SEQ ID NO: 36502 - DNA, 19 bp, Homo sapiens
  siRNA target sequence for PPARBP (NM_004774.2,960-978).
gacaattgaaggaacatct

SEQ ID NO: 36503 - DNA, 19 bp, Homo sapiens
  siRNA target sequence for PPARBP (NM_004774.2,984-1002).
gtacaaactcccaattgca

SEQ ID NO: 36504 - DNA, 19 bp, Homo sapiens
  siRNA target sequence for PPARBP (NM_004774.2,994-1012).
ccaattgcaccattaatta

SEQ ID NO: 36505 - DNA, 19 bp, Homo sapiens
  siRNA target sequence for PPARBP (NM_004774.2,1019-1037).
cacatccagttgacaataa

SEQ ID NO: 36506 - DNA, 19 bp, Homo sapiens
  siRNA target sequence for PPARBP (NM_004774.2,1021-1039).
catccagttgacaataaat

SEQ ID NO: 36507 - DNA, 19 bp, Homo sapiens
  siRNA target sequence for PPARBP (NM_004774.2,1067-1085).
gtgccaacagtgttgatct

SEQ ID NO: 36508 - DNA, 19 bp, Homo sapiens
  siRNA target sequence for PPARBP (NM_004774.2,1116-1134).
gccaatcccagtatctaga

SEQ ID NO: 36509 - DNA, 19 bp, Homo sapiens
  siRNA target sequence for PPARBP (NM_004774.2,1122-1140).
cccagtatctagagcattt

SEQ ID NO: 36510 - DNA, 19 bp, Homo sapiens
  siRNA target sequence for PPARBP (NM_004774.2,1124-1142).
cagtatctagagcatttgt

SEQ ID NO: 36511 - DNA, 19 bp, Homo sapiens
  siRNA target sequence for PPARBP (NM_004774.2,1155-1173).
gaactgcacaggaattcca

SEQ ID NO: 36512 - DNA, 19 bp, Homo sapiens
  siRNA target sequence for PPARBP (NM_004774.2,1193-1211).
cttatgcacccctgtatga

SEQ ID NO: 36513 - DNA, 19 bp, Homo sapiens
  siRNA target sequence for PPARBP (NM_004774.2,1249-1267).
cccatacctttgaatcaca

SEQ ID NO: 36514 - DNA, 19 bp, Homo sapiens
  siRNA target sequence for PPARBP (NM_004774.2,1266-1284).
caacatgagattttatgct

SEQ ID NO: 36515 - DNA, 19 bp, Homo sapiens
  siRNA target sequence for PPARBP (NM_004774.2,1294-1312).
ggtcagcagcactgctatt

SEQ ID NO: 36516 - DNA, 19 bp, Homo sapiens
  siRNA target sequence for PPARBP (NM_004774.2,1356-1374).
gggaacccttgttagcaaa

SEQ ID NO: 36517 - DNA, 19 bp, Homo sapiens
  siRNA target sequence for PPARBP (NM_004774.2,1391-1409).
ctggccgagttcctcttat

SEQ ID NO: 36518 - DNA, 19 bp, Homo sapiens
  siRNA target sequence for PPARBP (NM_004774.2,1394-1412).
gccgagttcctcttatcct

SEQ ID NO: 36519 - DNA, 19 bp, Homo sapiens
  siRNA target sequence for PPARBP (NM_004774.2,1395-1413).
ccgagttcctcttatccta

SEQ ID NO: 36520 - DNA, 19 bp, Homo sapiens
  siRNA target sequence for PPARBP (NM_004774.2,1396-1414).
cgagttcctcttatcctaa

SEQ ID NO: 36521 - DNA, 19 bp, Homo sapiens
  siRNA target sequence for PPARBP (NM_004774.2,1397-1415).
gagttcctcttatcctaaa

SEQ ID NO: 36522 - DNA, 19 bp, Homo sapiens
  siRNA target sequence for PPARBP (NM_004774.2,1402-1420).
cctcttatcctaaatctga

SEQ ID NO: 36523 - DNA, 19 bp, Homo sapiens
  siRNA target sequence for PPARBP (NM_004774.2,1403-1421).
ctcttatcctaaatctgat

SEQ ID NO: 36524 - DNA, 19 bp, Homo sapiens
  siRNA target sequence for PPARBP (NM_004774.2,1614-1632).
gagctgtaaactctacaaa

SEQ ID NO: 36525 - DNA, 19 bp, Homo sapiens
  siRNA target sequence for PPARBP (NM_004774.2,1983-2001).
gtctcagaacccaattctt

SEQ ID NO: 36526 - DNA, 19 bp, Homo sapiens
  siRNA target sequence for PPARBP (NM_004774.2,2004-2022).
cagtttgttgcaaatcaca

SEQ ID NO: 36527 - DNA, 19 bp, Homo sapiens
  siRNA target sequence for PPARBP (NM_004774.2,2127-2145).
gaaccttcttaaagataat

SEQ ID NO: 36528 - DNA, 19 bp, Homo sapiens
  siRNA target sequence for PPARBP (NM_004774.2,2173-2191).
ggaagcagccctttagaaa

SEQ ID NO: 36529 - DNA, 19 bp, Homo sapiens
  siRNA target sequence for PPARBP (NM_004774.2,2209-2227).
ggctcaccccgcatggaaa

SEQ ID NO: 36530 - DNA, 19 bp, Homo sapiens
  siRNA target sequence for PPARBP (NM_004774.2,2210-2228).
gctcaccccgcatggaaat

SEQ ID NO: 36531 - DNA, 19 bp, Homo sapiens
  siRNA target sequence for PPARBP (NM_004774.2,2211-2229).
ctcaccccgcatggaaata

SEQ ID NO: 36532 - DNA, 19 bp, Homo sapiens
  siRNA target sequence for PPARBP (NM_004774.2,2215-2233).
ccccgcatggaaatatgct

SEQ ID NO: 36533 - DNA, 19 bp, Homo sapiens
  siRNA target sequence for PPARBP (NM_004774.2,2319-2337).
ggagctattttcaatggat

SEQ ID NO: 36534 - DNA, 19 bp, Homo sapiens
  siRNA target sequence for PPARBP (NM_004774.2,2343-2361).
ctcacagaaccctatcttt

SEQ ID NO: 36535 - DNA, 19 bp, Homo sapiens
  siRNA target sequence for PPARBP (NM_004774.2,2345-2363).
cacagaaccctatctttga

SEQ ID NO: 36536 - DNA, 19 bp, Homo sapiens
  siRNA target sequence for PPARBP (NM_004774.2,2426-2444).
gcactcccccaacaactta

SEQ ID NO: 36537 - DNA, 19 bp, Homo sapiens
  siRNA target sequence for PPARBP (NM_004774.2,2521-2539).
gatgtaactgacatccttt

SEQ ID NO: 36538 - DNA, 19 bp, Homo sapiens
  siRNA target sequence for PPARBP (NM_004774.2,2601-2619).
cacccctcttcgagattct

SEQ ID NO: 36539 - DNA, 19 bp, Homo sapiens
  siRNA target sequence for PPARBP (NM_004774.2,2604-2622).
ccctcttcgagattcttca

SEQ ID NO: 36540 - DNA, 19 bp, Homo sapiens
  siRNA target sequence for PPARBP (NM_004774.2,2605-2623).
cctcttcgagattcttcaa

SEQ ID NO: 36541 - DNA, 19 bp, Homo sapiens
  siRNA target sequence for PPARBP (NM_004774.2,2636-2654).
ctcagagtaccctgtttga

SEQ ID NO: 36542 - DNA, 19 bp, Homo sapiens
  siRNA target sequence for PPARBP (NM_004774.2,2694-2712).
cactgatccagctgatctt

SEQ ID NO: 36543 - DNA, 19 bp, Homo sapiens
  siRNA target sequence for PPARBP (NM_004774.2,2696-2714).
ctgatccagctgatcttat

SEQ ID NO: 36544 - DNA, 19 bp, Homo sapiens
  siRNA target sequence for PPARBP (NM_004774.2,2743-2761).
gactctcctaccaatcatt

SEQ ID NO: 36545 - DNA, 19 bp, Homo sapiens
  siRNA target sequence for PPARBP (NM_004774.2,2753-2771).
ccaatcatttttttcatga

SEQ ID NO: 36546 - DNA, 19 bp, Homo sapiens
  siRNA target sequence for PPARBP (NM_004774.2,2847-2865).
cagccaaagtggggataat

SEQ ID NO: 36547 - DNA, 19 bp, Homo sapiens
  siRNA target sequence for PPARBP (NM_004774.2,2849-2867).
gccaaagtggggataatga

SEQ ID NO: 36548 - DNA, 19 bp, Homo sapiens
  siRNA target sequence for PPARBP (NM_004774.2,2859-2877).
ggataatgatgatttcaaa

SEQ ID NO: 36549 - DNA, 19 bp, Homo sapiens
  siRNA target sequence for PPARBP (NM_004774.2,2888-2906).
ctcaggcactaaatacttt

SEQ ID NO: 36550 - DNA, 19 bp, Homo sapiens
  siRNA target sequence for PPARBP (NM_004774.2,2915-2933).
caatgcttggaggtgataa

SEQ ID NO: 36551 - DNA, 19 bp, Homo sapiens
  siRNA target sequence for PPARBP (NM_004774.2,2942-2960).
ccaagtttaagggcaataa

SEQ ID NO: 36552 - DNA, 19 bp, Homo sapiens
  siRNA target sequence for PPARBP (NM_004774.2,2961-2979).
ccaagccgacacagttgat

SEQ ID NO: 36553 - DNA, 19 bp, Homo sapiens
  siRNA target sequence for PPARBP (NM_004774.2,2962-2980).
caagccgacacagttgatt

SEQ ID NO: 36554 - DNA, 19 bp, Homo sapiens
  siRNA target sequence for PPARBP (NM_004774.2,2965-2983).
gccgacacagttgatttca

SEQ ID NO: 36555 - DNA, 19 bp, Homo sapiens
  siRNA target sequence for PPARBP (NM_004774.2,2967-2985).
cgacacagttgatttcagt

SEQ ID NO: 36556 - DNA, 19 bp, Homo sapiens
  siRNA target sequence for PPARBP (NM_004774.2,2993-3011).
cagtagccggcaaagcttt

SEQ ID NO: 36557 - DNA, 19 bp, Homo sapiens
  siRNA target sequence for PPARBP (NM_004774.2,3014-3032).
ctcctgcagatcttatgga

SEQ ID NO: 36558 - DNA, 19 bp, Homo sapiens
  siRNA target sequence for PPARBP (NM_004774.2,3044-3062).
gtagtcagggtcctttact

SEQ ID NO: 36559 - DNA, 19 bp, Homo sapiens
  siRNA target sequence for PPARBP (NM_004774.2,3092-3110).
ctcaaaagagggtaaagga

SEQ ID NO: 36560 - DNA, 19 bp, Homo sapiens
  siRNA target sequence for PPARBP (NM_004774.2,3112-3130).
ggcaatggcaccagtaata

SEQ ID NO: 36561 - DNA, 19 bp, Homo sapiens
  siRNA target sequence for PPARBP (NM_004774.2,3114-3132).
caatggcaccagtaatagt

SEQ ID NO: 36562 - DNA, 19 bp, Homo sapiens
  siRNA target sequence for PPARBP (NM_004774.2,3173-3191).
gcagtcggaccccttctaa

SEQ ID NO: 36563 - DNA, 19 bp, Homo sapiens
  siRNA target sequence for PPARBP (NM_004774.2,3188-3206).
ctaatgatgggaaaagcaa

SEQ ID NO: 36564 - DNA, 19 bp, Homo sapiens
  siRNA target sequence for PPARBP (NM_004774.2,3249-3267).
gtctccatctcatagttct

SEQ ID NO: 36565 - DNA, 19 bp, Homo sapiens
  siRNA target sequence for PPARBP (NM_004774.2,3253-3271).
ccatctcatagttcttcta

SEQ ID NO: 36566 - DNA, 19 bp, Homo sapiens
  siRNA target sequence for PPARBP (NM_004774.2,3567-3585).
gttaagtagcagtatgtat

SEQ ID NO: 36567 - DNA, 19 bp, Homo sapiens
  siRNA target sequence for PPARBP (NM_004774.2,3604-3622).
ggatctagccagtccaaaa

SEQ ID NO: 36568 - DNA, 19 bp, Homo sapiens
  siRNA target sequence for PPARBP (NM_004774.2,3605-3623).
gatctagccagtccaaaaa

SEQ ID NO: 36569 - DNA, 19 bp, Homo sapiens
  siRNA target sequence for PPARBP (NM_004774.2,3650-3668).
gctcctctcccataaccaa

SEQ ID NO: 36570 - DNA, 19 bp, Homo sapiens
  siRNA target sequence for PPARBP (NM_004774.2,3759-3777).
catatccccttctcattca

SEQ ID NO: 36571 - DNA, 19 bp, Homo sapiens
  siRNA target sequence for PPARBP (NM_004774.2,3850-3868).
gccaagtcccctatcagtt

SEQ ID NO: 36572 - DNA, 19 bp, Homo sapiens
  siRNA target sequence for PPARBP (NM_004774.2,3872-3890).
gttctggtggttctcatat

SEQ ID NO: 36573 - DNA, 19 bp, Homo sapiens
  siRNA target sequence for PPARBP (NM_004774.2,3946-3964).
ggctcgttgtcccagaaaa

SEQ ID NO: 36574 - DNA, 19 bp, Homo sapiens
  siRNA target sequence for PPARBP (NM_004774.2,3948-3966).
ctcgttgtcccagaaaact

SEQ ID NO: 36575 - DNA, 19 bp, Homo sapiens
  siRNA target sequence for PPARBP (NM_004774.2,4047-4065).
gcatgggagttctaaagga

SEQ ID NO: 36576 - DNA, 19 bp, Homo sapiens
  siRNA target sequence for PPARBP (NM_004774.2,4100-4118).
cagctgtcatagataaact

SEQ ID NO: 36577 - DNA, 19 bp, Homo sapiens
  siRNA target sequence for PPARBP (NM_004774.2,4205-4223).
ctatgtcctccaaacataa

SEQ ID NO: 36578 - DNA, 19 bp, Homo sapiens
  siRNA target sequence for PPARBP (NM_004774.2,4224-4242).
catgtcaggaggagagttt

SEQ ID NO: 36579 - DNA, 19 bp, Homo sapiens
  siRNA target sequence for PPARBP (NM_004774.2,4243-4261).
cagggcaagcgtgagaaaa

SEQ ID NO: 36580 - DNA, 19 bp, Homo sapiens
  siRNA target sequence for PPARBP (NM_004774.2,4245-4263).
gggcaagcgtgagaaaagt

SEQ ID NO: 36581 - DNA, 19 bp, Homo sapiens
  siRNA target sequence for PPARBP (NM_004774.2,4247-4265).
gcaagcgtgagaaaagtga

SEQ ID NO: 36582 - DNA, 19 bp, Homo sapiens
  siRNA target sequence for PPARBP (NM_004774.2,4248-4266).
caagcgtgagaaaagtgat

SEQ ID NO: 36583 - DNA, 19 bp, Homo sapiens
  siRNA target sequence for PPARBP (NM_004774.2,4298-4316).
gttcagtggattcttctaa

SEQ ID NO: 36584 - DNA, 19 bp, Homo sapiens
  siRNA target sequence for PPARBP (NM_004774.2,4422-4440).
gaaacctggggaaagtagt

SEQ ID NO: 36585 - DNA, 19 bp, Homo sapiens
  siRNA target sequence for PPARBP (NM_004774.2,4455-4473).
gcctcaaatggcttcttct

SEQ ID NO: 36586 - DNA, 19 bp, Homo sapiens
  siRNA target sequence for PPARBP (NM_004774.2,4456-4474).
cctcaaatggcttcttcta

SEQ ID NO: 36587 - DNA, 19 bp, Homo sapiens
  siRNA target sequence for PPARBP (NM_004774.2,4457-4475).
ctcaaatggcttcttctaa

SEQ ID NO: 36588 - DNA, 19 bp, Homo sapiens
  siRNA target sequence for PPARBP (NM_004774.2,4553-4571).
catataccccccagaatct

SEQ ID NO: 36589 - DNA, 19 bp, Homo sapiens
  siRNA target sequence for PPARBP (NM_004774.2,4598-4616).
ccatagcagagaaatctta

SEQ ID NO: 36590 - DNA, 19 bp, Homo sapiens
  siRNA target sequence for PPARBP (NM_004774.2,4603-4621).
gcagagaaatcttatcaga

SEQ ID NO: 36591 - DNA, 19 bp, Homo sapiens
  siRNA target sequence for PPARBP (NM_004774.2,4604-4622).
cagagaaatcttatcagaa

SEQ ID NO: 36592 - DNA, 19 bp, Homo sapiens
  siRNA target sequence for PPARBP (NM_004774.2,4608-4626).
gaaatcttatcagaatagt

SEQ ID NO: 36593 - DNA, 19 bp, Homo sapiens
  siRNA target sequence for PPARBP (NM_004774.2,4750-4768).
gacaagaaaaaatctcata

SEQ ID NO: 36594 - DNA, 19 bp, Homo sapiens
  siRNA target sequence for PPARBP (NM_004774.2,4808-4826).
cagaccagtccttgtctat

SEQ ID NO: 36595 - DNA, 19 bp, Homo sapiens
  siRNA target sequence for PPARBP (NM_004774.2,4867-4885).
ctcagcccagactttatga

SEQ ID NO: 36596 - DNA, 19 bp, Homo sapiens
  siRNA target sequence for PPARGC1 (NM_013261.2,142-160).
caggactctgagtctgtat

SEQ ID NO: 36597 - DNA, 19 bp, Homo sapiens
  siRNA target sequence for PPARGC1 (NM_013261.2,301-319).
caatcagaaataatatcca

SEQ ID NO: 36598 - DNA, 19 bp, Homo sapiens
  siRNA target sequence for PPARGC1 (NM_013261.2,538-556).
gagccgtctctacttaaga

SEQ ID NO: 36599 - DNA, 19 bp, Homo sapiens
  siRNA target sequence for PPARGC1 (NM_013261.2,581-599).
ctcagctaagttataatga

SEQ ID NO: 36600 - DNA, 19 bp, Homo sapiens
  siRNA target sequence for PPARGC1 (NM_013261.2,650-668).
gaacaaaccctgcaattgt

SEQ ID NO: 36601 - DNA, 19 bp, Homo sapiens
  siRNA target sequence for PPARGC1 (NM_013261.2,657-675).
ccctgcaattgttaagact

SEQ ID NO: 36602 - DNA, 19 bp, Homo sapiens
  siRNA target sequence for PPARGC1 (NM_013261.2,689-707).
gcaataaagcgaagagtat

SEQ ID NO: 36603 - DNA, 19 bp, Homo sapiens
  siRNA target sequence for PPARGC1 (NM_013261.2,690-708).
caataaagcgaagagtatt

SEQ ID NO: 36604 - DNA, 19 bp, Homo sapiens
  siRNA target sequence for PPARGC1 (NM_013261.2,737-755).
cctgctcggagcttctcaa

SEQ ID NO: 36605 - DNA, 19 bp, Homo sapiens
  siRNA target sequence for PPARGC1 (NM_013261.2,738-756).
ctgctcggagcttctcaaa

SEQ ID NO: 36606 - DNA, 19 bp, Homo sapiens
  siRNA target sequence for PPARGC1 (NM_013261.2,741-759).
ctcggagcttctcaaatat

SEQ ID NO: 36607 - DNA, 19 bp, Homo sapiens
  siRNA target sequence for PPARGC1 (NM_013261.2,743-761).
cggagcttctcaaatatct

SEQ ID NO: 36608 - DNA, 19 bp, Homo sapiens
  siRNA target sequence for PPARGC1 (NM_013261.2,855-873).
gtcgcagtcacaacactta

SEQ ID NO: 36609 - DNA, 19 bp, Homo sapiens
  siRNA target sequence for PPARGC1 (NM_013261.2,868-886).
cacttacaagccaaaccaa

SEQ ID NO: 36610 - DNA, 19 bp, Homo sapiens
  siRNA target sequence for PPARGC1 (NM_013261.2,874-892).
caagccaaaccaacaactt

SEQ ID NO: 36611 - DNA, 19 bp, Homo sapiens
  siRNA target sequence for PPARGC1 (NM_013261.2,906-924).
gaccccagagtcaccaaat

SEQ ID NO: 36612 - DNA, 19 bp, Homo sapiens
  siRNA target sequence for PPARGC1 (NM_013261.2,929-947).
ccaagggttccccatttga

SEQ ID NO: 36613 - DNA, 19 bp, Homo sapiens
  siRNA target sequence for PPARGC1 (NM_013261.2,1010-1028).
ccaccactcctcctcataa

SEQ ID NO: 36614 - DNA, 19 bp, Homo sapiens
  siRNA target sequence for PPARGC1 (NM_013261.2,1024-1042).
cataaagccaaccaagata

SEQ ID NO: 36615 - DNA, 19 bp, Homo sapiens
  siRNA target sequence for PPARGC1 (NM_013261.2,1132-1150).
ggtacacaaggcaataact

SEQ ID NO: 36616 - DNA, 19 bp, Homo sapiens
  siRNA target sequence for PPARGC1 (NM_013261.2,1166-1184).
cggagcaatccgagttgta

SEQ ID NO: 36617 - DNA, 19 bp, Homo sapiens
  siRNA target sequence for PPARGC1 (NM_013261.2,1167-1185).
ggagcaatccgagttgtat

SEQ ID NO: 36618 - DNA, 19 bp, Homo sapiens
  siRNA target sequence for PPARGC1 (NM_013261.2,1260-1278).
gtttggtgaccatgactat

SEQ ID NO: 36619 - DNA, 19 bp, Homo sapiens
  siRNA target sequence for PPARGC1 (NM_013261.2,1273-1291).
gactattgccagtcaatta

SEQ ID NO: 36620 - DNA, 19 bp, Homo sapiens
  siRNA target sequence for PPARGC1 (NM_013261.2,1286-1304).
caattaattccaaaacaga

SEQ ID NO: 36621 - DNA, 19 bp, Homo sapiens
  siRNA target sequence for PPARGC1 (NM_013261.2,1329-1347).
gctccaagactctagacaa

SEQ ID NO: 36622 - DNA, 19 bp, Homo sapiens
  siRNA target sequence for PPARGC1 (NM_013261.2,1332-1350).
ccaagactctagacaacta

SEQ ID NO: 36623 - DNA, 19 bp, Homo sapiens
  siRNA target sequence for PPARGC1 (NM_013261.2,1336-1354).
gactctagacaactagaaa

SEQ ID NO: 36624 - DNA, 19 bp, Homo sapiens
  siRNA target sequence for PPARGC1 (NM_013261.2,1377-1395).
gcaggggcagatttgttct

SEQ ID NO: 36625 - DNA, 19 bp, Homo sapiens
  siRNA target sequence for PPARGC1 (NM_013261.2,1454-1472).
ctccttgcagcacaagaaa

SEQ ID NO: 36626 - DNA, 19 bp, Homo sapiens
  siRNA target sequence for PPARGC1 (NM_013261.2,1526-1544).
ccagtcaagctgtttttga

SEQ ID NO: 36627 - DNA, 19 bp, Homo sapiens
  siRNA target sequence for PPARGC1 (NM_013261.2,1605-1623).
caaactacctatgtttata

SEQ ID NO: 36628 - DNA, 19 bp, Homo sapiens
  siRNA target sequence for PPARGC1 (NM_013261.2,1694-1712).
gggatggcacgcaatccta

SEQ ID NO: 36629 - DNA, 19 bp, Homo sapiens
  siRNA target sequence for PPARGC1 (NM_013261.2,1695-1713).
ggatggcacgcaatcctat

SEQ ID NO: 36630 - DNA, 19 bp, Homo sapiens
  siRNA target sequence for PPARGC1 (NM_013261.2,1696-1714).
gatggcacgcaatcctatt

SEQ ID NO: 36631 - DNA, 19 bp, Homo sapiens
  siRNA target sequence for PPARGC1 (NM_013261.2,1703-1721).
cgcaatcctattcattgtt

SEQ ID NO: 36632 - DNA, 19 bp, Homo sapiens
  siRNA target sequence for PPARGC1 (NM_013261.2,1777-1795).
ccacccaaatccttatttt

SEQ ID NO: 36633 - DNA, 19 bp, Homo sapiens
  siRNA target sequence for PPARGC1 (NM_013261.2,1851-1869).
gtgttcccgatcaccatat

SEQ ID NO: 36634 - DNA, 19 bp, Homo sapiens
  siRNA target sequence for PPARGC1 (NM_013261.2,1896-1914).
cagtagatcctcttcaaga

SEQ ID NO: 36635 - DNA, 19 bp, Homo sapiens
  siRNA target sequence for PPARGC1 (NM_013261.2,1948-1966).
caccgcacgcaccgaaatt

SEQ ID NO: 36636 - DNA, 19 bp, Homo sapiens
  siRNA target sequence for PPARGC1 (NM_013261.2,1950-1968).
ccgcacgcaccgaaattct

SEQ ID NO: 36637 - DNA, 19 bp, Homo sapiens
  siRNA target sequence for PPARGC1 (NM_013261.2,1959-1977).
ccgaaattctcccttgtat

SEQ ID NO: 36638 - DNA, 19 bp, Homo sapiens
  siRNA target sequence for PPARGC1 (NM_013261.2,2140-2158).
gaagagcgccgtgtgattt

SEQ ID NO: 36639 - DNA, 19 bp, Homo sapiens
  siRNA target sequence for PPARGC1 (NM_013261.2,2152-2170).
gtgatttatgtcggtaaaa

SEQ ID NO: 36640 - DNA, 19 bp, Homo sapiens
  siRNA target sequence for PPARGC1 (NM_013261.2,2199-2217).
gagggaccgttttgaagtt

SEQ ID NO: 36641 - DNA, 19 bp, Homo sapiens
  siRNA target sequence for PPARGC1 (NM_013261.2,2201-2219).
gggaccgttttgaagtttt

SEQ ID NO: 36642 - DNA, 19 bp, Homo sapiens
  siRNA target sequence for PPARGC1 (NM_013261.2,2336-2354).
gcaggtcaaacgaaactga

SEQ ID NO: 36643 - DNA, 19 bp, Homo sapiens
  siRNA target sequence for PPARGC1 (NM_013261.2,2374-2392).
ggacgcaagcaatttttca

SEQ ID NO: 36644 - DNA, 19 bp, Homo sapiens
  siRNA target sequence for PPFIBP1 (NM_003622.2,419-437).
gcagatggatggtatcata

SEQ ID NO: 36645 - DNA, 19 bp, Homo sapiens
  siRNA target sequence for PPFIBP1 (NM_003622.2,430-448).
gtatcatagcaggttctaa

SEQ ID NO: 36646 - DNA, 19 bp, Homo sapiens
  siRNA target sequence for PPFIBP1 (NM_003622.2,449-467).
ggctctggaatattccaat

SEQ ID NO: 36647 - DNA, 19 bp, Homo sapiens
  siRNA target sequence for PPFIBP1 (NM_003622.2,540-558).
ctgcgtggattgttagaga

SEQ ID NO: 36648 - DNA, 19 bp, Homo sapiens
  siRNA target sequence for PPFIBP1 (NM_003622.2,544-562).
gtggattgttagagatgat

SEQ ID NO: 36649 - DNA, 19 bp, Homo sapiens
  siRNA target sequence for PPFIBP1 (NM_003622.2,633-651).
cttcagagtcaaatgacaa

SEQ ID NO: 36650 - DNA, 19 bp, Homo sapiens
  siRNA target sequence for PPFIBP1 (NM_003622.2,691-709).
ggctggcacgtttagaaaa

SEQ ID NO: 36651 - DNA, 19 bp, Homo sapiens
  siRNA target sequence for PPFIBP1 (NM_003622.2,692-710).
gctggcacgtttagaaaat

SEQ ID NO: 36652 - DNA, 19 bp, Homo sapiens
  siRNA target sequence for PPFIBP1 (NM_003622.2,696-714).
gcacgtttagaaaatgata

SEQ ID NO: 36653 - DNA, 19 bp, Homo sapiens
  siRNA target sequence for PPFIBP1 (NM_003622.2,729-747).
cttcaggtaagtgtgttaa

SEQ ID NO: 36654 - DNA, 19 bp, Homo sapiens
  siRNA target sequence for PPFIBP1 (NM_003622.2,862-880).
ggacatccttagaaactca

SEQ ID NO: 36655 - DNA, 19 bp, Homo sapiens
  siRNA target sequence for PPFIBP1 (NM_003622.2,897-915).
gctgaaatatctaacttga

SEQ ID NO: 36656 - DNA, 19 bp, Homo sapiens
  siRNA target sequence for PPFIBP1 (NM_003622.2,898-916).
ctgaaatatctaacttgaa

SEQ ID NO: 36657 - DNA, 19 bp, Homo sapiens
  siRNA target sequence for PPFIBP1 (NM_003622.2,900-918).
gaaatatctaacttgaagt

SEQ ID NO: 36658 - DNA, 19 bp, Homo sapiens
  siRNA target sequence for PPFIBP1 (NM_003622.2,938-956).
gaaggacagattggattat

SEQ ID NO: 36659 - DNA, 19 bp, Homo sapiens
  siRNA target sequence for PPFIBP1 (NM_003622.2,1031-1049).
cagtgagagacttcagtat

SEQ ID NO: 36660 - DNA, 19 bp, Homo sapiens
  siRNA target sequence for PPFIBP1 (NM_003622.2,1033-1051).
gtgagagacttcagtatga

SEQ ID NO: 36661 - DNA, 19 bp, Homo sapiens
  siRNA target sequence for PPFIBP1 (NM_003622.2,1169-1187).
ggttgaaattgttgataga

SEQ ID NO: 36662 - DNA, 19 bp, Homo sapiens
  siRNA target sequence for PPFIBP1 (NM_003622.2,1256-1274).
gtccttgatggcagcaaat

SEQ ID NO: 36663 - DNA, 19 bp, Homo sapiens
  siRNA target sequence for PPFIBP1 (NM_003622.2,1283-1301).
ggatcggaaaatagaagat

SEQ ID NO: 36664 - DNA, 19 bp, Homo sapiens
  siRNA target sequence for PPFIBP1 (NM_003622.2,1346-1364).
ggtactggcccaaggtaaa

SEQ ID NO: 36665 - DNA, 19 bp, Homo sapiens
  siRNA target sequence for PPFIBP1 (NM_003622.2,1424-1442).
ggatgcacagggtttcagt

SEQ ID NO: 36666 - DNA, 19 bp, Homo sapiens
  siRNA target sequence for PPFIBP1 (NM_003622.2,1496-1514).
cccatttaacacaagtgtt

SEQ ID NO: 36667 - DNA, 19 bp, Homo sapiens
  siRNA target sequence for PPFIBP1 (NM_003622.2,1512-1530).
gttcccgaagagttccata

SEQ ID NO: 36668 - DNA, 19 bp, Homo sapiens
  siRNA target sequence for PPFIBP1 (NM_003622.2,1515-1533).
cccgaagagttccatacta

SEQ ID NO: 36669 - DNA, 19 bp, Homo sapiens
  siRNA target sequence for PPFIBP1 (NM_003622.2,1534-1552).
ccatcttgcaagtttccat

SEQ ID NO: 36670 - DNA, 19 bp, Homo sapiens
  siRNA target sequence for PPFIBP1 (NM_003622.2,1611-1629).
cctaagccagagacttcat

SEQ ID NO: 36671 - DNA, 19 bp, Homo sapiens
  siRNA target sequence for PPFIBP1 (NM_003622.2,1655-1673).
ccttggtgccactgttgat

SEQ ID NO: 36672 - DNA, 19 bp, Homo sapiens
  siRNA target sequence for PPFIBP1 (NM_003622.2,1656-1674).
cttggtgccactgttgata

SEQ ID NO: 36673 - DNA, 19 bp, Homo sapiens
  siRNA target sequence for PPFIBP1 (NM_003622.2,1868-1886).
ccccttcggcactcgaaaa

SEQ ID NO: 36674 - DNA, 19 bp, Homo sapiens
  siRNA target sequence for PPFIBP1 (NM_003622.2,1870-1888).
ccttcggcactcgaaaagt

SEQ ID NO: 36675 - DNA, 19 bp, Homo sapiens
  siRNA target sequence for PPFIBP1 (NM_003622.2,1939-1957).
cagcaagtgcaccaaactt

SEQ ID NO: 36676 - DNA, 19 bp, Homo sapiens
  siRNA target sequence for PPFIBP1 (NM_003622.2,1948-1966).
caccaaacttagatcgtaa

SEQ ID NO: 36677 - DNA, 19 bp, Homo sapiens
  siRNA target sequence for PPFIBP1 (NM_003622.2,2011-2029).
cagcagagcacctagatct

SEQ ID NO: 36678 - DNA, 19 bp, Homo sapiens
  siRNA target sequence for PPFIBP1 (NM_003622.2,2038-2056).
cttcttctcggccaaaaga

SEQ ID NO: 36679 - DNA, 19 bp, Homo sapiens
  siRNA target sequence for PPFIBP1 (NM_003622.2,2044-2062).
ctcggccaaaagattcaca

SEQ ID NO: 36680 - DNA, 19 bp, Homo sapiens
  siRNA target sequence for PPFIBP1 (NM_003622.2,2116-2134).
ccagaggtatcatgaaact

SEQ ID NO: 36681 - DNA, 19 bp, Homo sapiens
  siRNA target sequence for PPFIBP1 (NM_003622.2,2150-2168).
gagaagtcaatcaactaca

SEQ ID NO: 36682 - DNA, 19 bp, Homo sapiens
  siRNA target sequence for PPFIBP1 (NM_003622.2,2253-2271).
gacttgggacagtctaaca

SEQ ID NO: 36683 - DNA, 19 bp, Homo sapiens
  siRNA target sequence for PPFIBP1 (NM_003622.2,2255-2273).
cttgggacagtctaacagt

SEQ ID NO: 36684 - DNA, 19 bp, Homo sapiens
  siRNA target sequence for PPFIBP1 (NM_003622.2,2342-2360).
gggctcgtacctgaattct

SEQ ID NO: 36685 - DNA, 19 bp, Homo sapiens
  siRNA target sequence for PPFIBP1 (NM_003622.2,2380-2398).
ctggccaaacgcttttgca

SEQ ID NO: 36686 - DNA, 19 bp, Homo sapiens
  siRNA target sequence for PPFIBP1 (NM_003622.2,2390-2408).
gcttttgcaggcttctcaa

SEQ ID NO: 36687 - DNA, 19 bp, Homo sapiens
  siRNA target sequence for PPFIBP1 (NM_003622.2,2396-2414).
gcaggcttctcaacaagat

SEQ ID NO: 36688 - DNA, 19 bp, Homo sapiens
  siRNA target sequence for PPFIBP1 (NM_003622.2,2424-2442).
gaacttggaatcaagcatt

SEQ ID NO: 36689 - DNA, 19 bp, Homo sapiens
  siRNA target sequence for PPFIBP1 (NM_003622.2,2479-2497).
ccctgggatctgaagaaga

SEQ ID NO: 36690 - DNA, 19 bp, Homo sapiens
  siRNA target sequence for PPFIBP1 (NM_003622.2,2549-2567).
cattggcctccctcaatat

SEQ ID NO: 36691 - DNA, 19 bp, Homo sapiens
  siRNA target sequence for PPFIBP1 (NM_003622.2,2553-2571).
ggcctccctcaatataaga

SEQ ID NO: 36692 - DNA, 19 bp, Homo sapiens
  siRNA target sequence for PPFIBP1 (NM_003622.2,2591-2609).
ggttgatggtcgaatgcta

SEQ ID NO: 36693 - DNA, 19 bp, Homo sapiens
  siRNA target sequence for PPFIBP1 (NM_003622.2,2595-2613).
gatggtcgaatgctacatt

SEQ ID NO: 36694 - DNA, 19 bp, Homo sapiens
  siRNA target sequence for PPFIBP1 (NM_003622.2,2598-2616).
ggtcgaatgctacattaca

SEQ ID NO: 36695 - DNA, 19 bp, Homo sapiens
  siRNA target sequence for PPFIBP1 (NM_003622.2,2599-2617).
gtcgaatgctacattacat

SEQ ID NO: 36696 - DNA, 19 bp, Homo sapiens
  siRNA target sequence for PPFIBP1 (NM_003622.2,2601-2619).
cgaatgctacattacatga

SEQ ID NO: 36697 - DNA, 19 bp, Homo sapiens
  siRNA target sequence for PPFIBP1 (NM_003622.2,2634-2652).
ctgtctctgaaggttgtaa

SEQ ID NO: 36698 - DNA, 19 bp, Homo sapiens
  siRNA target sequence for PPFIBP1 (NM_003622.2,2636-2654).
gtctctgaaggttgtaagt

SEQ ID NO: 36699 - DNA, 19 bp, Homo sapiens
  siRNA target sequence for PPFIBP1 (NM_003622.2,2638-2656).
ctctgaaggttgtaagtgt

SEQ ID NO: 36700 - DNA, 19 bp, Homo sapiens
  siRNA target sequence for PPFIBP1 (NM_003622.2,2687-2705).
ccaggtcctgaggatcaat

SEQ ID NO: 36701 - DNA, 19 bp, Homo sapiens
  siRNA target sequence for PPFIBP1 (NM_003622.2,2688-2706).
caggtcctgaggatcaata

SEQ ID NO: 36702 - DNA, 19 bp, Homo sapiens
  siRNA target sequence for PPFIBP1 (NM_003622.2,2693-2711).
cctgaggatcaataacttt

SEQ ID NO: 36703 - DNA, 19 bp, Homo sapiens
  siRNA target sequence for PPFIBP1 (NM_003622.2,2736-2754).
ccatctgatgagaatacca

SEQ ID NO: 36704 - DNA, 19 bp, Homo sapiens
  siRNA target sequence for PPFIBP1 (NM_003622.2,2753-2771).
catcgccccatcagaagtt

SEQ ID NO: 36705 - DNA, 19 bp, Homo sapiens
  siRNA target sequence for PPFIBP1 (NM_003622.2,2758-2776).
ccccatcagaagttcagaa

SEQ ID NO: 36706 - DNA, 19 bp, Homo sapiens
  siRNA target sequence for PPFIBP1 (NM_003622.2,2812-2830).
ccgtggacttggcagaata

SEQ ID NO: 36707 - DNA, 19 bp, Homo sapiens
  siRNA target sequence for PPFIBP1 (NM_003622.2,2813-2831).
cgtggacttggcagaatat

SEQ ID NO: 36708 - DNA, 19 bp, Homo sapiens
  siRNA target sequence for PPFIBP1 (NM_003622.2,2863-2881).
gtgggctcatggttctaga

SEQ ID NO: 36709 - DNA, 19 bp, Homo sapiens
  siRNA target sequence for PPFIBP1 (NM_003622.2,2873-2891).
ggttctagagcctcgtttt

SEQ ID NO: 36710 - DNA, 19 bp, Homo sapiens
  siRNA target sequence for PPFIBP1 (NM_003622.2,2874-2892).
gttctagagcctcgtttta

SEQ ID NO: 36711 - DNA, 19 bp, Homo sapiens
  siRNA target sequence for PPFIBP1 (NM_003622.2,2883-2901).
cctcgttttaacgtagaaa

SEQ ID NO: 36712 - DNA, 19 bp, Homo sapiens
  siRNA target sequence for PPFIBP1 (NM_003622.2,2886-2904).
cgttttaacgtagaaacaa

SEQ ID NO: 36713 - DNA, 19 bp, Homo sapiens
  siRNA target sequence for PPFIBP1 (NM_003622.2,2887-2905).
gttttaacgtagaaacaat

SEQ ID NO: 36714 - DNA, 19 bp, Homo sapiens
  siRNA target sequence for PPFIBP1 (NM_003622.2,2936-2954).
gactttgctgcgaagacat

SEQ ID NO: 36715 - DNA, 19 bp, Homo sapiens
  siRNA target sequence for PPFIBP1 (NM_003622.2,2938-2956).
ctttgctgcgaagacattt

SEQ ID NO: 36716 - DNA, 19 bp, Homo sapiens
  siRNA target sequence for PPFIBP1 (NM_003622.2,3020-3038).
gctgccggattatgtactt

SEQ ID NO: 36717 - DNA, 19 bp, Homo sapiens
  siRNA target sequence for PPFIBP1 (NM_003622.2,3023-3041).
gccggattatgtacttcta

SEQ ID NO: 36718 - DNA, 19 bp, Homo sapiens
  siRNA target sequence for PPFIBP1 (NM_003622.2,3024-3042).
ccggattatgtacttctaa

SEQ ID NO: 36719 - DNA, 19 bp, Homo sapiens
  siRNA target sequence for PPFIBP1 (NM_003622.2,3026-3044).
ggattatgtacttctaaca

SEQ ID NO: 36720 - DNA, 19 bp, Homo sapiens
  siRNA target sequence for PPFIBP1 (NM_003622.2,3299-3317).
caatctgacgcacatgtta

SEQ ID NO: 36721 - DNA, 19 bp, Homo sapiens
  siRNA target sequence for PPFIBP1 (NM_003622.2,3307-3325).
cgcacatgttaaaagaaga

SEQ ID NO: 36722 - DNA, 19 bp, Homo sapiens
  siRNA target sequence for PPFIBP1 (NM_003622.2,3375-3393).
gatgaagactcaaacgttt

SEQ ID NO: 36723 - DNA, 19 bp, Homo sapiens
  siRNA target sequence for PQBP1 (NM_005710.1,298-316).
gaggcatcctcaaacatct

SEQ ID NO: 36724 - DNA, 19 bp, Homo sapiens
  siRNA target sequence for PQBP1 (NM_005710.1,499-517).
ccaactccgtggttaccaa

SEQ ID NO: 36725 - DNA, 19 bp, Homo sapiens
  siRNA target sequence for PQBP1 (NM_005710.1,500-518).
caactccgtggttaccaaa

SEQ ID NO: 36726 - DNA, 19 bp, Homo sapiens
  siRNA target sequence for PQBP1 (NM_005710.1,681-699).
cgagagcgtggctatgaca

SEQ ID NO: 36727 - DNA, 19 bp, Homo sapiens
  siRNA target sequence for PQBP1 (NM_005710.1,682-700).
gagagcgtggctatgacaa

SEQ ID NO: 36728 - DNA, 19 bp, Homo sapiens
  siRNA target sequence for PQBP1 (NM_005710.1,869-887).
ggaccctagctcatactca

SEQ ID NO: 36729 - DNA, 19 bp, Homo sapiens
  siRNA target sequence for PRDM10 (NM_020228.1,253-271).
gcctcattgccagttcata

SEQ ID NO: 36730 - DNA, 19 bp, Homo sapiens
  siRNA target sequence for PRDM10 (NM_020228.1,254-272).
cctcattgccagttcataa

SEQ ID NO: 36731 - DNA, 19 bp, Homo sapiens
  siRNA target sequence for PRDM10 (NM_020228.1,257-275).
cattgccagttcataacca

SEQ ID NO: 36732 - DNA, 19 bp, Homo sapiens
  siRNA target sequence for PRDM10 (NM_020228.1,479-497).
ggtgtgaggagtgcaataa

SEQ ID NO: 36733 - DNA, 19 bp, Homo sapiens
  siRNA target sequence for PRDM10 (NM_020228.1,689-707).
cggagctgaaagactgtta

SEQ ID NO: 36734 - DNA, 19 bp, Homo sapiens
  siRNA target sequence for PRDM10 (NM_020228.1,693-711).
gctgaaagactgttacatt

SEQ ID NO: 36735 - DNA, 19 bp, Homo sapiens
  siRNA target sequence for PRDM10 (NM_020228.1,763-781).
gaagacctatggtttgagt

SEQ ID NO: 36736 - DNA, 19 bp, Homo sapiens
  siRNA target sequence for PRDM10 (NM_020228.1,785-803).
ctgatgagacgctttgtaa

SEQ ID NO: 36737 - DNA, 19 bp, Homo sapiens
  siRNA target sequence for PRDM10 (NM_020228.1,787-805).
gatgagacgctttgtaact

SEQ ID NO: 36738 - DNA, 19 bp, Homo sapiens
  siRNA target sequence for PRDM10 (NM_020228.1,796-814).
ctttgtaactggatgatgt

SEQ ID NO: 36739 - DNA, 19 bp, Homo sapiens
  siRNA target sequence for PRDM10 (NM_020228.1,864-882).
gtatggccaccatgtgtat

SEQ ID NO: 36740 - DNA, 19 bp, Homo sapiens
  siRNA target sequence for PRDM10 (NM_020228.1,868-886).
ggccaccatgtgtattata

SEQ ID NO: 36741 - DNA, 19 bp, Homo sapiens
  siRNA target sequence for PRDM10 (NM_020228.1,871-889).
caccatgtgtattatacaa

SEQ ID NO: 36742 - DNA, 19 bp, Homo sapiens
  siRNA target sequence for PRDM10 (NM_020228.1,951-969).
gttcgtgaaccagaaaatt

SEQ ID NO: 36743 - DNA, 19 bp, Homo sapiens
  siRNA target sequence for PRDM10 (NM_020228.1,1033-1051).
gaatgtaaccgccgattta

SEQ ID NO: 36744 - DNA, 19 bp, Homo sapiens
  siRNA target sequence for PRDM10 (NM_020228.1,1085-1103).
ctcatgatgagaaactaga

SEQ ID NO: 36745 - DNA, 19 bp, Homo sapiens
  siRNA target sequence for PRDM10 (NM_020228.1,1093-1111).
gagaaactagatgtgttta

SEQ ID NO: 36746 - DNA, 19 bp, Homo sapiens
  siRNA target sequence for PRDM10 (NM_020228.1,1102-1120).
gatgtgtttagcagaacaa

SEQ ID NO: 36747 - DNA, 19 bp, Homo sapiens
  siRNA target sequence for PRDM10 (NM_020228.1,1175-1193).
ggcgtcctccaaaatttat

SEQ ID NO: 36748 - DNA, 19 bp, Homo sapiens
  siRNA target sequence for PRDM10 (NM_020228.1,1262-1280).
ccacaaaggagcaatttga

SEQ ID NO: 36749 - DNA, 19 bp, Homo sapiens
  siRNA target sequence for PRDM10 (NM_020228.1,1263-1281).
cacaaaggagcaatttgat

SEQ ID NO: 36750 - DNA, 19 bp, Homo sapiens
  siRNA target sequence for PRDM10 (NM_020228.1,1265-1283).
caaaggagcaatttgatga

SEQ ID NO: 36751 - DNA, 19 bp, Homo sapiens
  siRNA target sequence for PRDM10 (NM_020228.1,1640-1658).
cctgtgatctctgtaacaa

SEQ ID NO: 36752 - DNA, 19 bp, Homo sapiens
  siRNA target sequence for PRDM10 (NM_020228.1,1750-1768).
gaccgccttgatttgttga

SEQ ID NO: 36753 - DNA, 19 bp, Homo sapiens
  siRNA target sequence for PRDM10 (NM_020228.1,1752-1770).
ccgccttgatttgttgaaa

SEQ ID NO: 36754 - DNA, 19 bp, Homo sapiens
  siRNA target sequence for PRDM10 (NM_020228.1,1774-1792).
catgtggccattcatatca

SEQ ID NO: 36755 - DNA, 19 bp, Homo sapiens
  siRNA target sequence for PRDM10 (NM_020228.1,1837-1855).
gattttatccaggtgaaaa

SEQ ID NO: 36756 - DNA, 19 bp, Homo sapiens
  siRNA target sequence for PRDM10 (NM_020228.1,1954-1972).
cattcggaccgcaaagact

SEQ ID NO: 36757 - DNA, 19 bp, Homo sapiens
  siRNA target sequence for PRDM10 (NM_020228.1,1985-2003).
cctgtgggaagcaatttaa

SEQ ID NO: 36758 - DNA, 19 bp, Homo sapiens
  siRNA target sequence for PRDM10 (NM_020228.1,2028-2046).
catgcagaggatgcataat

SEQ ID NO: 36759 - DNA, 19 bp, Homo sapiens
  siRNA target sequence for PRDM10 (NM_020228.1,2262-2280).
caatcgtgattacttttgt

SEQ ID NO: 36760 - DNA, 19 bp, Homo sapiens
  siRNA target sequence for PRDM10 (NM_020228.1,2279-2297).
gtcagtattgcgataaggt

SEQ ID NO: 36761 - DNA, 19 bp, Homo sapiens
  siRNA target sequence for PRDM10 (NM_020228.1,2281-2299).
cagtattgcgataaggttt

SEQ ID NO: 36762 - DNA, 19 bp, Homo sapiens
  siRNA target sequence for PRDM10 (NM_020228.1,2317-2335).
cgcaaagcccacattctga

SEQ ID NO: 36763 - DNA, 19 bp, Homo sapiens
  siRNA target sequence for PRDM10 (NM_020228.1,2318-2336).
gcaaagcccacattctgaa

SEQ ID NO: 36764 - DNA, 19 bp, Homo sapiens
  siRNA target sequence for PRDM10 (NM_020228.1,2671-2689).
gaactgtcccagaccttaa

SEQ ID NO: 36765 - DNA, 19 bp, Homo sapiens
  siRNA target sequence for PRDM10 (NM_020228.1,2674-2692).
ctgtcccagaccttaacga

SEQ ID NO: 36766 - DNA, 19 bp, Homo sapiens
  siRNA target sequence for PRDM10 (NM_020228.1,2705-2723).
cgccacaaggggattacca

SEQ ID NO: 36767 - DNA, 19 bp, Homo sapiens
  siRNA target sequence for PRDM10 (NM_020228.1,2716-2734).
gattaccagagaattcagt

SEQ ID NO: 36768 - DNA, 19 bp, Homo sapiens
  siRNA target sequence for PRDM10 (NM_020228.1,3081-3099).
cttccgtggctattcatct

SEQ ID NO: 36769 - DNA, 19 bp, Homo sapiens
  siRNA target sequence for PRDM10 (NM_020228.1,3124-3142).
ccgggtcagtttgtgatta

SEQ ID NO: 36770 - DNA, 19 bp, Homo sapiens
  siRNA target sequence for PRDM10 (NM_020228.1,3154-3172).
gtggcaactccagttacta

SEQ ID NO: 36771 - DNA, 19 bp, Homo sapiens
  siRNA target sequence for PRDM10 (NM_020228.1,3178-3196).
caggtgaaggcggttactt

SEQ ID NO: 36772 - DNA, 19 bp, Homo sapiens
  siRNA target sequence for PRDM10 (NM_020228.1,3188-3206).
cggttacttcgggtcatta

SEQ ID NO: 36773 - DNA, 19 bp, Homo sapiens
  siRNA target sequence for PRDM10 (NM_020228.1,3189-3207).
ggttacttcgggtcattat

SEQ ID NO: 36774 - DNA, 19 bp, Homo sapiens
  siRNA target sequence for PRDM10 (NM_020228.1,3194-3212).
cttcgggtcattatgtgtt

SEQ ID NO: 36775 - DNA, 19 bp, Homo sapiens
  siRNA target sequence for PRDM10 (NM_020228.1,3208-3226).
gtgttatcagaaagtcaat

SEQ ID NO: 36776 - DNA, 19 bp, Homo sapiens
  siRNA target sequence for PRDM10 (NM_020228.1,3210-3228).
gttatcagaaagtcaatca

SEQ ID NO: 36777 - DNA, 19 bp, Homo sapiens
  siRNA target sequence for PRDM10 (NM_020228.1,3371-3389).
gaagcagcgaagtgcatat

SEQ ID NO: 36778 - DNA, 19 bp, Homo sapiens
  siRNA target sequence for PRDM10 (NM_020228.1,3382-3400).
gtgcatatcaccaaaccat

SEQ ID NO: 36779 - DNA, 19 bp, Homo sapiens
  siRNA target sequence for PRDM12 (NM_021619.2,127-145).
gcgctggccgaggttatca

SEQ ID NO: 36780 - DNA, 19 bp, Homo sapiens
  siRNA target sequence for PRDM12 (NM_021619.2,490-508).
ggcacggtgcgctacttca

SEQ ID NO: 36781 - DNA, 19 bp, Homo sapiens
  siRNA target sequence for PRDM12 (NM_021619.2,491-509).
gcacggtgcgctacttcat

SEQ ID NO: 36782 - DNA, 19 bp, Homo sapiens
  siRNA target sequence for PRDM12 (NM_021619.2,536-554).
gctggatgacctacatcaa

SEQ ID NO: 36783 - DNA, 19 bp, Homo sapiens
  siRNA target sequence for PRDM12 (NM_021619.2,552-570).
caagtgtgcacgtaacgaa

SEQ ID NO: 36784 - DNA, 19 bp, Homo sapiens
  siRNA target sequence for PRDM12 (NM_021619.2,657-675).
ggtgtggtacggaaactca

SEQ ID NO: 36785 - DNA, 19 bp, Homo sapiens
  siRNA target sequence for PRDM13 (NM_021620.1,557-575).
ccggaggacagatcttcta

SEQ ID NO: 36786 - DNA, 19 bp, Homo sapiens
  siRNA target sequence for PRDM13 (NM_021620.1,607-625).
gagctgacagtgtggtatt

SEQ ID NO: 36787 - DNA, 19 bp, Homo sapiens
  siRNA target sequence for PRDM13 (NM_021620.1,609-627).
gctgacagtgtggtattct

SEQ ID NO: 36788 - DNA, 19 bp, Homo sapiens
  siRNA target sequence for PRDM13 (NM_021620.1,610-628).
ctgacagtgtggtattcta

SEQ ID NO: 36789 - DNA, 19 bp, Homo sapiens
  siRNA target sequence for PRDM13 (NM_021620.1,716-734).
gctggaggacgtttagata

SEQ ID NO: 36790 - DNA, 19 bp, Homo sapiens
  siRNA target sequence for PRDM13 (NM_021620.1,1160-1178).
gcgtgcgctcagctttcaa

SEQ ID NO: 36791 - DNA, 19 bp, Homo sapiens
  siRNA target sequence for PRDM13 (NM_021620.1,1711-1729).
ccggccaccaccgcttatt

SEQ ID NO: 36792 - DNA, 19 bp, Homo sapiens
  siRNA target sequence for PRDM13 (NM_021620.1,1712-1730).
cggccaccaccgcttatta

SEQ ID NO: 36793 - DNA, 19 bp, Homo sapiens
  siRNA target sequence for PRDM13 (NM_021620.1,1723-1741).
gcttattacccgctcaaat

SEQ ID NO: 36794 - DNA, 19 bp, Homo sapiens
  siRNA target sequence for PRDM13 (NM_021620.1,1771-1789).
gagtccatctcctacttca

SEQ ID NO: 36795 - DNA, 19 bp, Homo sapiens
  siRNA target sequence for PRDM13 (NM_021620.1,2031-2049).
gctgtactcgcgcaagtat

SEQ ID NO: 36796 - DNA, 19 bp, Homo sapiens
  siRNA target sequence for PRDM13 (NM_021620.1,2123-2141).
gcgaccccagcaatctcaa

SEQ ID NO: 36797 - DNA, 19 bp, Homo sapiens
  siRNA target sequence for PRDM14 (NM_024504.1,306-324).
cctatggacactacagaaa

SEQ ID NO: 36798 - DNA, 19 bp, Homo sapiens
  siRNA target sequence for PRDM14 (NM_024504.1,633-651).
gtggacctgacactttaat

SEQ ID NO: 36799 - DNA, 19 bp, Homo sapiens
  siRNA target sequence for PRDM14 (NM_024504.1,692-710).
ctgaggacctcccagttat

SEQ ID NO: 36800 - DNA, 19 bp, Homo sapiens
  siRNA target sequence for PRDM14 (NM_024504.1,694-712).
gaggacctcccagttatta

SEQ ID NO: 36801 - DNA, 19 bp, Homo sapiens
  siRNA target sequence for PRDM14 (NM_024504.1,856-874).
cctgcaccatgcgatttca

SEQ ID NO: 36802 - DNA, 19 bp, Homo sapiens
  siRNA target sequence for PRDM14 (NM_024504.1,893-911).
gacagctctggatctgatt

SEQ ID NO: 36803 - DNA, 19 bp, Homo sapiens
  siRNA target sequence for PRDM14 (NM_024504.1,897-915).
gctctggatctgattctct

SEQ ID NO: 36804 - DNA, 19 bp, Homo sapiens
  siRNA target sequence for PRDM14 (NM_024504.1,920-938).
caaactctggataaagact

SEQ ID NO: 36805 - DNA, 19 bp, Homo sapiens
  siRNA target sequence for PRDM14 (NM_024504.1,1044-1062).
ggccctttcaaggtaaagt

SEQ ID NO: 36806 - DNA, 19 bp, Homo sapiens
  siRNA target sequence for PRDM14 (NM_024504.1,1081-1099).
gaagacctacggagacaat

SEQ ID NO: 36807 - DNA, 19 bp, Homo sapiens
  siRNA target sequence for PRDM14 (NM_024504.1,1086-1104).
cctacggagacaattctgt

SEQ ID NO: 36808 - DNA, 19 bp, Homo sapiens
  siRNA target sequence for PRDM14 (NM_024504.1,1105-1123).
gatgtgggagatctttgaa

SEQ ID NO: 36809 - DNA, 19 bp, Homo sapiens
  siRNA target sequence for PRDM14 (NM_024504.1,1127-1145).
ggtcatttgagccacttta

SEQ ID NO: 36810 - DNA, 19 bp, Homo sapiens
  siRNA target sequence for PRDM14 (NM_024504.1,1228-1246).
gcagtgtcaagggcatata

SEQ ID NO: 36811 - DNA, 19 bp, Homo sapiens
  siRNA target sequence for PRDM14 (NM_024504.1,1233-1251).
gtcaagggcatatatttta

SEQ ID NO: 36812 - DNA, 19 bp, Homo sapiens
  siRNA target sequence for PRDM14 (NM_024504.1,1397-1415).
ggctacagatgtgaaagat

SEQ ID NO: 36813 - DNA, 19 bp, Homo sapiens
  siRNA target sequence for PRDM14 (NM_024504.1,1423-1441).
ggtatttacctacaaatat

SEQ ID NO: 36814 - DNA, 19 bp, Homo sapiens
  siRNA target sequence for PRDM14 (NM_024504.1,1478-1496).
gacaagggcgataggaaat

SEQ ID NO: 36815 - DNA, 19 bp, Homo sapiens
  siRNA target sequence for PRDM14 (NM_024504.1,1480-1498).
caagggcgataggaaattt

SEQ ID NO: 36816 - DNA, 19 bp, Homo sapiens
  siRNA target sequence for PRDM14 (NM_024504.1,1512-1530).
gcaaacgatcctttgagaa

SEQ ID NO: 36817 - DNA, 19 bp, Homo sapiens
  siRNA target sequence for PRDM14 (NM_024504.1,1546-1564).
gatccacattcttcatgtt

SEQ ID NO: 36818 - DNA, 19 bp, Homo sapiens
  siRNA target sequence for PRDM14 (NM_024504.1,1574-1592).
caccggcctcacaagtgtt

SEQ ID NO: 36819 - DNA, 19 bp, Homo sapiens
  siRNA target sequence for PRDM14 (NM_024504.1,1577-1595).
cggcctcacaagtgttcta

SEQ ID NO: 36820 - DNA, 19 bp, Homo sapiens
  siRNA target sequence for PRDM14 (NM_024504.1,1579-1597).
gcctcacaagtgttctaca

SEQ ID NO: 36821 - DNA, 19 bp, Homo sapiens
  siRNA target sequence for PRDM14 (NM_024504.1,1580-1598).
cctcacaagtgttctacat

SEQ ID NO: 36822 - DNA, 19 bp, Homo sapiens
  siRNA target sequence for PRDM14 (NM_024504.1,1593-1611).
ctacatgtgggaaatgttt

SEQ ID NO: 36823 - DNA, 19 bp, Homo sapiens
  siRNA target sequence for PRDM14 (NM_024504.1,1620-1638).
cttccagcctaaacaaaca

SEQ ID NO: 36824 - DNA, 19 bp, Homo sapiens
  siRNA target sequence for PRDM14 (NM_024504.1,1669-1687).
ccagtgtgtgtattgtact

SEQ ID NO: 36825 - DNA, 19 bp, Homo sapiens
  siRNA target sequence for PRDM14 (NM_024504.1,1871-1889).
gatcaagaaacattctact

SEQ ID NO: 36826 - DNA, 19 bp, Homo sapiens
  siRNA target sequence for PRDM4 (NM_012406.2,417-435).
cacctggagagcagttatt

SEQ ID NO: 36827 - DNA, 19 bp, Homo sapiens
  siRNA target sequence for PRDM4 (NM_012406.2,497-515).
ccaccctaactctataaat

SEQ ID NO: 36828 - DNA, 19 bp, Homo sapiens
  siRNA target sequence for PRDM4 (NM_012406.2,502-520).
ctaactctataaatgttga

SEQ ID NO: 36829 - DNA, 19 bp, Homo sapiens
  siRNA target sequence for PRDM4 (NM_012406.2,519-537).
gatggtaatacagcattat

SEQ ID NO: 36830 - DNA, 19 bp, Homo sapiens
  siRNA target sequence for PRDM4 (NM_012406.2,522-540).
ggtaatacagcattatcta

SEQ ID NO: 36831 - DNA, 19 bp, Homo sapiens
  siRNA target sequence for PRDM4 (NM_012406.2,523-541).
gtaatacagcattatctat

SEQ ID NO: 36832 - DNA, 19 bp, Homo sapiens
  siRNA target sequence for PRDM4 (NM_012406.2,531-549).
gcattatctatcaccaata

SEQ ID NO: 36833 - DNA, 19 bp, Homo sapiens
  siRNA target sequence for PRDM4 (NM_012406.2,532-550).
cattatctatcaccaataa

SEQ ID NO: 36834 - DNA, 19 bp, Homo sapiens
  siRNA target sequence for PRDM4 (NM_012406.2,558-576).
gcactagatccctatcagt

SEQ ID NO: 36835 - DNA, 19 bp, Homo sapiens
  siRNA target sequence for PRDM4 (NM_012406.2,567-585).
ccctatcagtccaatggaa

SEQ ID NO: 36836 - DNA, 19 bp, Homo sapiens
  siRNA target sequence for PRDM4 (NM_012406.2,568-586).
cctatcagtccaatggaaa

SEQ ID NO: 36837 - DNA, 19 bp, Homo sapiens
  siRNA target sequence for PRDM4 (NM_012406.2,597-615).
gaaccaggcattgtttcaa

SEQ ID NO: 36838 - DNA, 19 bp, Homo sapiens
  siRNA target sequence for PRDM4 (NM_012406.2,603-621).
ggcattgtttcaatagact

SEQ ID NO: 36839 - DNA, 19 bp, Homo sapiens
  siRNA target sequence for PRDM4 (NM_012406.2,720-738).
gttaccagcccaatttcga

SEQ ID NO: 36840 - DNA, 19 bp, Homo sapiens
  siRNA target sequence for PRDM4 (NM_012406.2,730-748).
caatttcgacagatggaat

SEQ ID NO: 36841 - DNA, 19 bp, Homo sapiens
  siRNA target sequence for PRDM4 (NM_012406.2,1050-1068).
gcctccctagaatctgttt

SEQ ID NO: 36842 - DNA, 19 bp, Homo sapiens
  siRNA target sequence for PRDM4 (NM_012406.2,1136-1154).
ggggacaggtcatgtagat

SEQ ID NO: 36843 - DNA, 19 bp, Homo sapiens
  siRNA target sequence for PRDM4 (NM_012406.2,1138-1156).
ggacaggtcatgtagatgt

SEQ ID NO: 36844 - DNA, 19 bp, Homo sapiens
  siRNA target sequence for PRDM4 (NM_012406.2,1139-1157).
gacaggtcatgtagatgta

SEQ ID NO: 36845 - DNA, 19 bp, Homo sapiens
  siRNA target sequence for PRDM4 (NM_012406.2,1143-1161).
ggtcatgtagatgtatctt

SEQ ID NO: 36846 - DNA, 19 bp, Homo sapiens
  siRNA target sequence for PRDM4 (NM_012406.2,1166-1184).
cagtctttcttttgtatca

SEQ ID NO: 36847 - DNA, 19 bp, Homo sapiens
  siRNA target sequence for PRDM4 (NM_012406.2,1226-1244).
catggcaaccttgtttaca

SEQ ID NO: 36848 - DNA, 19 bp, Homo sapiens
  siRNA target sequence for PRDM4 (NM_012406.2,1229-1247).
ggcaaccttgtttacaatt

SEQ ID NO: 36849 - DNA, 19 bp, Homo sapiens
  siRNA target sequence for PRDM4 (NM_012406.2,1230-1248).
gcaaccttgtttacaattt

SEQ ID NO: 36850 - DNA, 19 bp, Homo sapiens
  siRNA target sequence for PRDM4 (NM_012406.2,1314-1332).
cctgacactccaatagaga

SEQ ID NO: 36851 - DNA, 19 bp, Homo sapiens
  siRNA target sequence for PRDM4 (NM_012406.2,1486-1504).
ggacagacaaggcagttaa

SEQ ID NO: 36852 - DNA, 19 bp, Homo sapiens
  siRNA target sequence for PRDM4 (NM_012406.2,1544-1562).
ctgcatcattacaactgat

SEQ ID NO: 36853 - DNA, 19 bp, Homo sapiens
  siRNA target sequence for PRDM4 (NM_012406.2,1569-1587).
gaatgtaattggatgatgt

SEQ ID NO: 36854 - DNA, 19 bp, Homo sapiens
  siRNA target sequence for PRDM4 (NM_012406.2,1630-1648).
cttatcctcatgatggaaa

SEQ ID NO: 36855 - DNA, 19 bp, Homo sapiens
  siRNA target sequence for PRDM4 (NM_012406.2,1747-1765).
cagatgtgcatctctgtaa

SEQ ID NO: 36856 - DNA, 19 bp, Homo sapiens
  siRNA target sequence for PRDM4 (NM_012406.2,1770-1788).
ggcaaggagtgcaattctt

SEQ ID NO: 36857 - DNA, 19 bp, Homo sapiens
  siRNA target sequence for PRDM4 (NM_012406.2,1775-1793).
ggagtgcaattcttacaca

SEQ ID NO: 36858 - DNA, 19 bp, Homo sapiens
  siRNA target sequence for PRDM4 (NM_012406.2,1809-1827).
ctgaccagccacatccata

SEQ ID NO: 36859 - DNA, 19 bp, Homo sapiens
  siRNA target sequence for PRDM4 (NM_012406.2,1813-1831).
ccagccacatccataacca

SEQ ID NO: 36860 - DNA, 19 bp, Homo sapiens
  siRNA target sequence for PRDM4 (NM_012406.2,1924-1942).
ctccttccaaacttcatgt

SEQ ID NO: 36861 - DNA, 19 bp, Homo sapiens
  siRNA target sequence for PRDM4 (NM_012406.2,2021-2039).
gcggacccacctcaagata

SEQ ID NO: 36862 - DNA, 19 bp, Homo sapiens
  siRNA target sequence for PRDM4 (NM_012406.2,2024-2042).
gacccacctcaagatacat

SEQ ID NO: 36863 - DNA, 19 bp, Homo sapiens
  siRNA target sequence for PRDM4 (NM_012406.2,2201-2219).
gctcatccacactcaagaa

SEQ ID NO: 36864 - DNA, 19 bp, Homo sapiens
  siRNA target sequence for PRDM4 (NM_012406.2,2212-2230).
ctcaagaacgccagatcaa

SEQ ID NO: 36865 - DNA, 19 bp, Homo sapiens
  siRNA target sequence for PRDM4 (NM_012406.2,2233-2251).
gtcccaagtgtgataagct

SEQ ID NO: 36866 - DNA, 19 bp, Homo sapiens
  siRNA target sequence for PRDM4 (NM_012406.2,2255-2273).
cttgagaacaaatcactta

SEQ ID NO: 36867 - DNA, 19 bp, Homo sapiens
  siRNA target sequence for PRDM4 (NM_012406.2,2298-2316).
ggaaaacgggattatgtct

SEQ ID NO: 36868 - DNA, 19 bp, Homo sapiens
  siRNA target sequence for PRDM4 (NM_012406.2,2304-2322).
cgggattatgtctgtgaaa

SEQ ID NO: 36869 - DNA, 19 bp, Homo sapiens
  siRNA target sequence for PRDM5 (NM_018699.1,179-197).
gagtgcgaaagggtgaaaa

SEQ ID NO: 36870 - DNA, 19 bp, Homo sapiens
  siRNA target sequence for PRDM5 (NM_018699.1,181-199).
gtgcgaaagggtgaaaagt

SEQ ID NO: 36871 - DNA, 19 bp, Homo sapiens
  siRNA target sequence for PRDM5 (NM_018699.1,281-299).
ggagtaagggagaagtttt

SEQ ID NO: 36872 - DNA, 19 bp, Homo sapiens
  siRNA target sequence for PRDM5 (NM_018699.1,338-356).
ggcttcgcttcgttcatga

SEQ ID NO: 36873 - DNA, 19 bp, Homo sapiens
  siRNA target sequence for PRDM5 (NM_018699.1,526-544).
ggggaagttgaaaattcta

SEQ ID NO: 36874 - DNA, 19 bp, Homo sapiens
  siRNA target sequence for PRDM5 (NM_018699.1,554-572).
caacagcgggcagaaaaga

SEQ ID NO: 36875 - DNA, 19 bp, Homo sapiens
  siRNA target sequence for PRDM5 (NM_018699.1,598-616).
gcttgtcctcaatgtgaat

SEQ ID NO: 36876 - DNA, 19 bp, Homo sapiens
  siRNA target sequence for PRDM5 (NM_018699.1,607-625).
caatgtgaatcgagtttta

SEQ ID NO: 36877 - DNA, 19 bp, Homo sapiens
  siRNA target sequence for PRDM5 (NM_018699.1,710-728).
ggaagaaattcccagttaa

SEQ ID NO: 36878 - DNA, 19 bp, Homo sapiens
  siRNA target sequence for PRDM5 (NM_018699.1,724-742).
gttaagcaggctttgcaaa

SEQ ID NO: 36879 - DNA, 19 bp, Homo sapiens
  siRNA target sequence for PRDM5 (NM_018699.1,799-817).
cagtgctctgtttgcaatt

SEQ ID NO: 36880 - DNA, 19 bp, Homo sapiens
  siRNA target sequence for PRDM5 (NM_018699.1,825-843).
cagttcagcatcgagtttt

SEQ ID NO: 36881 - DNA, 19 bp, Homo sapiens
  siRNA target sequence for PRDM5 (NM_018699.1,827-845).
gttcagcatcgagttttga

SEQ ID NO: 36882 - DNA, 19 bp, Homo sapiens
  siRNA target sequence for PRDM5 (NM_018699.1,964-982).
gatcctaagaaaaagctta

SEQ ID NO: 36883 - DNA, 19 bp, Homo sapiens
  siRNA target sequence for PRDM5 (NM_018699.1,1050-1068).
gatatttgattgtcaagaa

SEQ ID NO: 36884 - DNA, 19 bp, Homo sapiens
  siRNA target sequence for PRDM5 (NM_018699.1,1057-1075).
gattgtcaagaatgtatga

SEQ ID NO: 36885 - DNA, 19 bp, Homo sapiens
  siRNA target sequence for PRDM5 (NM_018699.1,1096-1114).
cagctaaaacgtcatatga

SEQ ID NO: 36886 - DNA, 19 bp, Homo sapiens
  siRNA target sequence for PRDM5 (NM_018699.1,1116-1134).
cacccactcagaaaaacga

SEQ ID NO: 36887 - DNA, 19 bp, Homo sapiens
  siRNA target sequence for PRDM5 (NM_018699.1,1124-1142).
cagaaaaacgaccctataa

SEQ ID NO: 36888 - DNA, 19 bp, Homo sapiens
  siRNA target sequence for PRDM5 (NM_018699.1,1126-1144).
gaaaaacgaccctataatt

SEQ ID NO: 36889 - DNA, 19 bp, Homo sapiens
  siRNA target sequence for PRDM5 (NM_018699.1,1135-1153).
ccctataattgcgagattt

SEQ ID NO: 36890 - DNA, 19 bp, Homo sapiens
  siRNA target sequence for PRDM5 (NM_018699.1,1146-1164).
cgagatttgtaataagtct

SEQ ID NO: 36891 - DNA, 19 bp, Homo sapiens
  siRNA target sequence for PRDM5 (NM_018699.1,1185-1203).
gggtgctcacaaagtaata

SEQ ID NO: 36892 - DNA, 19 bp, Homo sapiens
  siRNA target sequence for PRDM5 (NM_018699.1,1187-1205).
gtgctcacaaagtaataca

SEQ ID NO: 36893 - DNA, 19 bp, Homo sapiens
  siRNA target sequence for PRDM5 (NM_018699.1,1332-1350).
gttccggaccccattttct

SEQ ID NO: 36894 - DNA, 19 bp, Homo sapiens
  siRNA target sequence for PRDM5 (NM_018699.1,1356-1374).
gagacacctgctaatacat

SEQ ID NO: 36895 - DNA, 19 bp, Homo sapiens
  siRNA target sequence for PRDM5 (NM_018699.1,1358-1376).
gacacctgctaatacataa

SEQ ID NO: 36896 - DNA, 19 bp, Homo sapiens
  siRNA target sequence for PRDM5 (NM_018699.1,1360-1378).
cacctgctaatacataaca

SEQ ID NO: 36897 - DNA, 19 bp, Homo sapiens
  siRNA target sequence for PRDM5 (NM_018699.1,1422-1440).
gaggaaggatacattaaat

SEQ ID NO: 36898 - DNA, 19 bp, Homo sapiens
  siRNA target sequence for PRDM5 (NM_018699.1,1519-1537).
gtgcttagaagtcataaga

SEQ ID NO: 36899 - DNA, 19 bp, Homo sapiens
  siRNA target sequence for PRDM5 (NM_018699.1,1558-1576).
gagaaaatctgtccatatt

SEQ ID NO: 36900 - DNA, 19 bp, Homo sapiens
  siRNA target sequence for PRDM5 (NM_018699.1,1560-1578).
gaaaatctgtccatattgt

SEQ ID NO: 36901 - DNA, 19 bp, Homo sapiens
  siRNA target sequence for PRDM5 (NM_018699.1,1571-1589).
catattgtggccagaaatt

SEQ ID NO: 36902 - DNA, 19 bp, Homo sapiens
  siRNA target sequence for PRDM5 (NM_018699.1,1600-1618).
ggtacactcagagttcata

SEQ ID NO: 36903 - DNA, 19 bp, Homo sapiens
  siRNA target sequence for PRDM5 (NM_018699.1,1601-1619).
gtacactcagagttcatat

SEQ ID NO: 36904 - DNA, 19 bp, Homo sapiens
  siRNA target sequence for PRDM5 (NM_018699.1,1633-1651).
ggtgagcgtccctatcaat

SEQ ID NO: 36905 - DNA, 19 bp, Homo sapiens
  siRNA target sequence for PRDM5 (NM_018699.1,1907-1925).
gccagttttgccataagaa

SEQ ID NO: 36906 - DNA, 19 bp, Homo sapiens
  siRNA target sequence for PRDM5 (NM_018699.1,1934-1952).
ggaatgactacctcaaagt

SEQ ID NO: 36907 - DNA, 19 bp, Homo sapiens
  siRNA target sequence for PRDM7 (NM_052996.1,853-871).
ccacgctgctgtaatgaca

SEQ ID NO: 36908 - DNA, 19 bp, Homo sapiens
  siRNA target sequence for PRDM7 (NM_052996.1,854-872).
cacgctgctgtaatgacaa

SEQ ID NO: 36909 - DNA, 19 bp, Homo sapiens
  siRNA target sequence for PRDM7 (NM_052996.1,856-874).
cgctgctgtaatgacaaaa

SEQ ID NO: 36910 - DNA, 19 bp, Homo sapiens
  siRNA target sequence for PRDM9 (NM_020227.1,414-432).
ccacaggcagatcttctat

SEQ ID NO: 36911 - DNA, 19 bp, Homo sapiens
  siRNA target sequence for PRDM9 (NM_020227.1,417-435).
caggcagatcttctataga

SEQ ID NO: 36912 - DNA, 19 bp, Homo sapiens
  siRNA target sequence for PRDM9 (NM_020227.1,724-742).
ccacacagccgtaatgaca

SEQ ID NO: 36913 - DNA, 19 bp, Homo sapiens
  siRNA target sequence for PRDM9 (NM_020227.1,725-743).
cacacagccgtaatgacaa

SEQ ID NO: 36914 - DNA, 19 bp, Homo sapiens
  siRNA target sequence for PRDM9 (NM_020227.1,727-745).
cacagccgtaatgacaaaa

SEQ ID NO: 36915 - DNA, 19 bp, Homo sapiens
  siRNA target sequence for PREB (NM_013388.3,326-344).
ctgcagctagagctgatta

SEQ ID NO: 36916 - DNA, 19 bp, Homo sapiens
  siRNA target sequence for PREB (NM_013388.3,328-346).
gcagctagagctgattaat

SEQ ID NO: 36917 - DNA, 19 bp, Homo sapiens
  siRNA target sequence for PREB (NM_013388.3,619-637).
ggcggtgcagacagacttt

SEQ ID NO: 36918 - DNA, 19 bp, Homo sapiens
  siRNA target sequence for PREB (NM_013388.3,620-638).
gcggtgcagacagacttta

SEQ ID NO: 36919 - DNA, 19 bp, Homo sapiens
  siRNA target sequence for PREB (NM_013388.3,642-660).
ccgatccactgcagaaagt

SEQ ID NO: 36920 - DNA, 19 bp, Homo sapiens
  siRNA target sequence for PREB (NM_013388.3,643-661).
cgatccactgcagaaagtt

SEQ ID NO: 36921 - DNA, 19 bp, Homo sapiens
  siRNA target sequence for PREB (NM_013388.3,664-682).
gtgcttcaaccacgataat

SEQ ID NO: 36922 - DNA, 19 bp, Homo sapiens
  siRNA target sequence for PREB (NM_013388.3,766-784).
ccacgaaggggagattgaa

SEQ ID NO: 36923 - DNA, 19 bp, Homo sapiens
  siRNA target sequence for PREB (NM_013388.3,972-990).
gactcttcacagtgcaaat

SEQ ID NO: 36924 - DNA, 19 bp, Homo sapiens
  siRNA target sequence for PREB (NM_013388.3,1038-1056).
gggatggctccaacttctt

SEQ ID NO: 36925 - DNA, 19 bp, Homo sapiens
  siRNA target sequence for PREB (NM_013388.3,1267-1285).
ccttgggtcccatgaaact

SEQ ID NO: 36926 - DNA, 19 bp, Homo sapiens
  siRNA target sequence for PREB (NM_013388.3,1373-1391).
ctgtgtgtcgggcttatta

SEQ ID NO: 36927 - DNA, 19 bp, Homo sapiens
  siRNA target sequence for PREB (NM_013388.3,1375-1393).
gtgtgtcgggcttattatt

SEQ ID NO: 36928 - DNA, 19 bp, Homo sapiens
  siRNA target sequence for PREB (NM_013388.3,1377-1395).
gtgtcgggcttattattgt

SEQ ID NO: 36929 - DNA, 19 bp, Homo sapiens
  siRNA target sequence for PREB (NM_013388.3,1379-1397).
gtcgggcttattattgtga

SEQ ID NO: 36930 - DNA, 19 bp, Homo sapiens
  siRNA target sequence for PRIM2A (NM_000947.1,157-175).
cattgccttcagttttact

SEQ ID NO: 36931 - DNA, 19 bp, Homo sapiens
  siRNA target sequence for PRIM2A (NM_000947.1,219-237).
cttggctattgatagagtt

SEQ ID NO: 36932 - DNA, 19 bp, Homo sapiens
  siRNA target sequence for PRIM2A (NM_000947.1,222-240).
ggctattgatagagttaaa

SEQ ID NO: 36933 - DNA, 19 bp, Homo sapiens
  siRNA target sequence for PRIM2A (NM_000947.1,223-241).
gctattgatagagttaaat

SEQ ID NO: 36934 - DNA, 19 bp, Homo sapiens
  siRNA target sequence for PRIM2A (NM_000947.1,262-280).
cttggagtgagctatgtga

SEQ ID NO: 36935 - DNA, 19 bp, Homo sapiens
  siRNA target sequence for PRIM2A (NM_000947.1,268-286).
gtgagctatgtgaaaggaa

SEQ ID NO: 36936 - DNA, 19 bp, Homo sapiens
  siRNA target sequence for PRIM2A (NM_000947.1,373-391).
cgaagaagagatcatattt

SEQ ID NO: 36937 - DNA, 19 bp, Homo sapiens
  siRNA target sequence for PRIM2A (NM_000947.1,441-459).
ctggttcattcaacaagaa

SEQ ID NO: 36938 - DNA, 19 bp, Homo sapiens
  siRNA target sequence for PRIM2A (NM_000947.1,462-480).
ggatctccttcgatttaga

SEQ ID NO: 36939 - DNA, 19 bp, Homo sapiens
  siRNA target sequence for PRIM2A (NM_000947.1,463-481).
gatctccttcgatttagat

SEQ ID NO: 36940 - DNA, 19 bp, Homo sapiens
  siRNA target sequence for PRIM2A (NM_000947.1,466-484).
ctccttcgatttagattta

SEQ ID NO: 36941 - DNA, 19 bp, Homo sapiens
  siRNA target sequence for PRIM2A (NM_000947.1,468-486).
ccttcgatttagatttagt

SEQ ID NO: 36942 - DNA, 19 bp, Homo sapiens
  siRNA target sequence for PRIM2A (NM_000947.1,472-490).
cgatttagatttagtattt

SEQ ID NO: 36943 - DNA, 19 bp, Homo sapiens
  siRNA target sequence for PRIM2A (NM_000947.1,591-609).
ctcatcaccaagtttaagt

SEQ ID NO: 36944 - DNA, 19 bp, Homo sapiens
  siRNA target sequence for PRIM2A (NM_000947.1,602-620).
gtttaagtggacttaagtt

SEQ ID NO: 36945 - DNA, 19 bp, Homo sapiens
  siRNA target sequence for PRIM2A (NM_000947.1,621-639).
ggggttcgagtccatttat

SEQ ID NO: 36946 - DNA, 19 bp, Homo sapiens
  siRNA target sequence for PRIM2A (NM_000947.1,622-640).
gggttcgagtccatttata

SEQ ID NO: 36947 - DNA, 19 bp, Homo sapiens
  siRNA target sequence for PRIM2A (NM_000947.1,707-725).
cttacgtaccacttaagga

SEQ ID NO: 36948 - DNA, 19 bp, Homo sapiens
  siRNA target sequence for PRIM2A (NM_000947.1,835-853).
ctcaatcacctcagtcatt

SEQ ID NO: 36949 - DNA, 19 bp, Homo sapiens
  siRNA target sequence for PRIM2A (NM_000947.1,882-900).
gggaaatgttgggaagatt

SEQ ID NO: 36950 - DNA, 19 bp, Homo sapiens
  siRNA target sequence for PRIM2A (NM_000947.1,907-925).
gatcagattgatttgcttt

SEQ ID NO: 36951 - DNA, 19 bp, Homo sapiens
  siRNA target sequence for PRIM2A (NM_000947.1,1096-1114).
gatccagacaagtttgata

SEQ ID NO: 36952 - DNA, 19 bp, Homo sapiens
  siRNA target sequence for PRIM2A (NM_000947.1,1107-1125).
gtttgataaaggttactct

SEQ ID NO: 36953 - DNA, 19 bp, Homo sapiens
  siRNA target sequence for PRIM2A (NM_000947.1,1156-1174).
ggcaagaggacagactata

SEQ ID NO: 36954 - DNA, 19 bp, Homo sapiens
  siRNA target sequence for PRIM2A (NM_000947.1,1158-1176).
caagaggacagactataca

SEQ ID NO: 36955 - DNA, 19 bp, Homo sapiens
  siRNA target sequence for PRIM2A (NM_000947.1,1214-1232).
caagccaaggggattatca

SEQ ID NO: 36956 - DNA, 19 bp, Homo sapiens
  siRNA target sequence for PRIM2A (NM_000947.1,1304-1322).
gagggataagccagatttt

SEQ ID NO: 36957 - DNA, 19 bp, Homo sapiens
  siRNA target sequence for PRIM2A (NM_000947.1,1313-1331).
gccagattttggatttagt

SEQ ID NO: 36958 - DNA, 19 bp, Homo sapiens
  siRNA target sequence for PRIM2A (NM_000947.1,1351-1369).
gtagcctgtcaaaaatact

SEQ ID NO: 36959 - DNA, 19 bp, Homo sapiens
  siRNA target sequence for PRIM2A (NM_000947.1,1433-1451).
gtgagagccaacgtattct

SEQ ID NO: 36960 - DNA, 19 bp, Homo sapiens
  siRNA target sequence for PRIM2A (NM_000947.1,1435-1453).
gagagccaacgtattctaa

SEQ ID NO: 36961 - DNA, 19 bp, Homo sapiens
  siRNA target sequence for PRIM2A (NM_000947.1,1437-1455).
gagccaacgtattctaaat

SEQ ID NO: 36962 - DNA, 19 bp, Homo sapiens
  siRNA target sequence for PRIM2A (NM_000947.1,1440-1458).
ccaacgtattctaaatggt

SEQ ID NO: 36963 - DNA, 19 bp, Homo sapiens
  siRNA target sequence for PRKCBP1 (NM_012408.3,115-133).
gagggcatggatatctcta

SEQ ID NO: 36964 - DNA, 19 bp, Homo sapiens
  siRNA target sequence for PRKCBP1 (NM_012408.3,219-237).
gccgcaggacacatcaaca

SEQ ID NO: 36965 - DNA, 19 bp, Homo sapiens
  siRNA target sequence for PRKCBP1 (NM_012408.3,236-254).
caagccccattaaaaagaa

SEQ ID NO: 36966 - DNA, 19 bp, Homo sapiens
  siRNA target sequence for PRKCBP1 (NM_012408.3,262-280).
cctggcttactgaacagta

SEQ ID NO: 36967 - DNA, 19 bp, Homo sapiens
  siRNA target sequence for PRKCBP1 (NM_012408.3,263-281).
ctggcttactgaacagtaa

SEQ ID NO: 36968 - DNA, 19 bp, Homo sapiens
  siRNA target sequence for PRKCBP1 (NM_012408.3,266-284).
gcttactgaacagtaacaa

SEQ ID NO: 36969 - DNA, 19 bp, Homo sapiens
  siRNA target sequence for PRKCBP1 (NM_012408.3,305-323).
gacatggtccgttttacta

SEQ ID NO: 36970 - DNA, 19 bp, Homo sapiens
  siRNA target sequence for PRKCBP1 (NM_012408.3,307-325).
catggtccgttttactata

SEQ ID NO: 36971 - DNA, 19 bp, Homo sapiens
  siRNA target sequence for PRKCBP1 (NM_012408.3,310-328).
ggtccgttttactatatga

SEQ ID NO: 36972 - DNA, 19 bp, Homo sapiens
  siRNA target sequence for PRKCBP1 (NM_012408.3,311-329).
gtccgttttactatatgaa

SEQ ID NO: 36973 - DNA, 19 bp, Homo sapiens
  siRNA target sequence for PRKCBP1 (NM_012408.3,373-391).
ggacggaatgatttctact

SEQ ID NO: 36974 - DNA, 19 bp, Homo sapiens
  siRNA target sequence for PRKCBP1 (NM_012408.3,444-462).
ggtttatcacgctaagtgt

SEQ ID NO: 36975 - DNA, 19 bp, Homo sapiens
  siRNA target sequence for PRKCBP1 (NM_012408.3,558-576).
gacaatgctcaccattgaa

SEQ ID NO: 36976 - DNA, 19 bp, Homo sapiens
  siRNA target sequence for PRKCBP1 (NM_012408.3,564-582).
gctcaccattgaacagtta

SEQ ID NO: 36977 - DNA, 19 bp, Homo sapiens
  siRNA target sequence for PRKCBP1 (NM_012408.3,667-685).
cctgactatgcggaataca

SEQ ID NO: 36978 - DNA, 19 bp, Homo sapiens
  siRNA target sequence for PRKCBP1 (NM_012408.3,668-686).
ctgactatgcggaatacat

SEQ ID NO: 36979 - DNA, 19 bp, Homo sapiens
  siRNA target sequence for PRKCBP1 (NM_012408.3,670-688).
gactatgcggaatacatct

SEQ ID NO: 36980 - DNA, 19 bp, Homo sapiens
  siRNA target sequence for PRKCBP1 (NM_012408.3,691-709).
catccaatggacctttgta

SEQ ID NO: 36981 - DNA, 19 bp, Homo sapiens
  siRNA target sequence for PRKCBP1 (NM_012408.3,694-712).
ccaatggacctttgtacat

SEQ ID NO: 36982 - DNA, 19 bp, Homo sapiens
  siRNA target sequence for PRKCBP1 (NM_012408.3,699-717).
ggacctttgtacattggaa

SEQ ID NO: 36983 - DNA, 19 bp, Homo sapiens
  siRNA target sequence for PRKCBP1 (NM_012408.3,783-801).
gcacaactgcatcatttat

SEQ ID NO: 36984 - DNA, 19 bp, Homo sapiens
  siRNA target sequence for PRKCBP1 (NM_012408.3,786-804).
caactgcatcatttataat

SEQ ID NO: 36985 - DNA, 19 bp, Homo sapiens
  siRNA target sequence for PRKCBP1 (NM_012408.3,822-840).
gacgcaaatagcgaaagta

SEQ ID NO: 36986 - DNA, 19 bp, Homo sapiens
  siRNA target sequence for PRKCBP1 (NM_012408.3,824-842).
cgcaaatagcgaaagtagt

SEQ ID NO: 36987 - DNA, 19 bp, Homo sapiens
  siRNA target sequence for PRKCBP1 (NM_012408.3,832-850).
gcgaaagtagtcatcaaaa

SEQ ID NO: 36988 - DNA, 19 bp, Homo sapiens
  siRNA target sequence for PRKCBP1 (NM_012408.3,854-872).
gtgaacatgagatgaatga

SEQ ID NO: 36989 - DNA, 19 bp, Homo sapiens
  siRNA target sequence for PRKCBP1 (NM_012408.3,876-894).
cgaagtatgtccagaatgt

SEQ ID NO: 36990 - DNA, 19 bp, Homo sapiens
  siRNA target sequence for PRKCBP1 (NM_012408.3,877-895).
gaagtatgtccagaatgtt

SEQ ID NO: 36991 - DNA, 19 bp, Homo sapiens
  siRNA target sequence for PRKCBP1 (NM_012408.3,905-923).
cttgccaaaaacgagataa

SEQ ID NO: 36992 - DNA, 19 bp, Homo sapiens
  siRNA target sequence for PRKCBP1 (NM_012408.3,941-959).
gtagcaatccacatccttt

SEQ ID NO: 36993 - DNA, 19 bp, Homo sapiens
  siRNA target sequence for PRKCBP1 (NM_012408.3,1026-1044).
ggtcgatgcccgattcttt

SEQ ID NO: 36994 - DNA, 19 bp, Homo sapiens
  siRNA target sequence for PRKCBP1 (NM_012408.3,1035-1053).
ccgattctttggacaacat

SEQ ID NO: 36995 - DNA, 19 bp, Homo sapiens
  siRNA target sequence for PRKCBP1 (NM_012408.3,1037-1055).
gattctttggacaacatga

SEQ ID NO: 36996 - DNA, 19 bp, Homo sapiens
  siRNA target sequence for PRKCBP1 (NM_012408.3,1173-1191).
gaacatccgcaggaagttt

SEQ ID NO: 36997 - DNA, 19 bp, Homo sapiens
  siRNA target sequence for PRKCBP1 (NM_012408.3,1229-1247).
cacccaacagccagtatca

SEQ ID NO: 36998 - DNA, 19 bp, Homo sapiens
  siRNA target sequence for PRKCBP1 (NM_012408.3,1231-1249).
cccaacagccagtatcaaa

SEQ ID NO: 36999 - DNA, 19 bp, Homo sapiens
  siRNA target sequence for PRKCBP1 (NM_012408.3,1417-1435).
cccatgagcacaaactctt

SEQ ID NO: 37000 - DNA, 19 bp, Homo sapiens
  siRNA target sequence for PRKCBP1 (NM_012408.3,1514-1532).
ccatggacttcctggataa

SEQ ID NO: 37001 - DNA, 19 bp, Homo sapiens
  siRNA target sequence for PRKCBP1 (NM_012408.3,1618-1636).
gctcctatcacgacgaaaa

SEQ ID NO: 37002 - DNA, 19 bp, Homo sapiens
  siRNA target sequence for PRKCBP1 (NM_012408.3,1655-1673).
ccggcagcatcctgaatct

SEQ ID NO: 37003 - DNA, 19 bp, Homo sapiens
  siRNA target sequence for PRKCBP1 (NM_012408.3,1656-1674).
cggcagcatcctgaatctt

SEQ ID NO: 37004 - DNA, 19 bp, Homo sapiens
  siRNA target sequence for PRKCBP1 (NM_012408.3,1762-1780).
cccaagcgccagattcgta

SEQ ID NO: 37005 - DNA, 19 bp, Homo sapiens
  siRNA target sequence for PRKCBP1 (NM_012408.3,1798-1816).
cttgacaagaccatagaga

SEQ ID NO: 37006 - DNA, 19 bp, Homo sapiens
  siRNA target sequence for PRKCBP1 (NM_012408.3,1815-1833).
gagttgcaaagcacaatta

SEQ ID NO: 37007 - DNA, 19 bp, Homo sapiens
  siRNA target sequence for PRKCBP1 (NM_012408.3,1880-1898).
gcgattcggaggattctga

SEQ ID NO: 37008 - DNA, 19 bp, Homo sapiens
  siRNA target sequence for PRKCBP1 (NM_012408.3,1914-1932).
cgatagtgagtatatcagt

SEQ ID NO: 37009 - DNA, 19 bp, Homo sapiens
  siRNA target sequence for PRKCBP1 (NM_012408.3,2004-2022).
gccatctgctgttaaaaaa

SEQ ID NO: 37010 - DNA, 19 bp, Homo sapiens
  siRNA target sequence for PRKCBP1 (NM_012408.3,2165-2183).
cacctcaccccataaagga

SEQ ID NO: 37011 - DNA, 19 bp, Homo sapiens
  siRNA target sequence for PRKCBP1 (NM_012408.3,2167-2185).
cctcaccccataaaggata

SEQ ID NO: 37012 - DNA, 19 bp, Homo sapiens
  siRNA target sequence for PRKCBP1 (NM_012408.3,2168-2186).
ctcaccccataaaggataa

SEQ ID NO: 37013 - DNA, 19 bp, Homo sapiens
  siRNA target sequence for PRKCBP1 (NM_012408.3,2173-2191).
cccataaaggataaactga

SEQ ID NO: 37014 - DNA, 19 bp, Homo sapiens
  siRNA target sequence for PRKCBP1 (NM_012408.3,2253-2271).
cgaacttgtcatagattta

SEQ ID NO: 37015 - DNA, 19 bp, Homo sapiens
  siRNA target sequence for PRKCBP1 (NM_012408.3,2290-2308).
cgggagggtcgaaaaaata

SEQ ID NO: 37016 - DNA, 19 bp, Homo sapiens
  siRNA target sequence for PRKCBP1 (NM_012408.3,2291-2309).
gggagggtcgaaaaaataa

SEQ ID NO: 37017 - DNA, 19 bp, Homo sapiens
  siRNA target sequence for PRKCBP1 (NM_012408.3,2293-2311).
gagggtcgaaaaaataaga

SEQ ID NO: 37018 - DNA, 19 bp, Homo sapiens
  siRNA target sequence for PRKCBP1 (NM_012408.3,2569-2587).
gtcgtgtggaactcatcaa

SEQ ID NO: 37019 - DNA, 19 bp, Homo sapiens
  siRNA target sequence for PRKCBP1 (NM_012408.3,2571-2589).
cgtgtggaactcatcaact

SEQ ID NO: 37020 - DNA, 19 bp, Homo sapiens
  siRNA target sequence for PRKCBP1 (NM_012408.3,2741-2759).
ctgatgtcgccgctgatat

SEQ ID NO: 37021 - DNA, 19 bp, Homo sapiens
  siRNA target sequence for PRKCBP1 (NM_012408.3,2752-2770).
gctgatattgccaagtaca

SEQ ID NO: 37022 - DNA, 19 bp, Homo sapiens
  siRNA target sequence for PRKCBP1 (NM_012408.3,2755-2773).
gatattgccaagtacacta

SEQ ID NO: 37023 - DNA, 19 bp, Homo sapiens
  siRNA target sequence for PRKCBP1 (NM_012408.3,2761-2779).
gccaagtacactagcaaaa

SEQ ID NO: 37024 - DNA, 19 bp, Homo sapiens
  siRNA target sequence for PRKCBP1 (NM_012408.3,2781-2799).
gatggatgcaataaaagga

SEQ ID NO: 37025 - DNA, 19 bp, Homo sapiens
  siRNA target sequence for PRKCBP1 (NM_012408.3,2835-2853).
cactactggaagcacaata

SEQ ID NO: 37026 - DNA, 19 bp, Homo sapiens
  siRNA target sequence for PRKCBP1 (NM_012408.3,2919-2937).
cgaaatgaaacacaactta

SEQ ID NO: 37027 - DNA, 19 bp, Homo sapiens
  siRNA target sequence for PRKCBP1 (NM_012408.3,3210-3228).
ggtgaacacagaaacacta

SEQ ID NO: 37028 - DNA, 19 bp, Homo sapiens
  siRNA target sequence for PRKCBP1 (NM_012408.3,3249-3267).
ctcctcgagcacacaatca

SEQ ID NO: 37029 - DNA, 19 bp, Homo sapiens
  siRNA target sequence for PRKCBP1 (NM_012408.3,3408-3426).
ccattcccggagtaataaa

SEQ ID NO: 37030 - DNA, 19 bp, Homo sapiens
  siRNA target sequence for PRKCBP1 (NM_012408.3,3461-3479).
cgacacgttccgatcacaa

SEQ ID NO: 37031 - DNA, 19 bp, Homo sapiens
  siRNA target sequence for PRKCBP1 (NM_183047.1,3396-3414).
ccaaggctctgttagcaaa

SEQ ID NO: 37032 - DNA, 19 bp, Homo sapiens
  siRNA target sequence for PRKCBP1 (NM_183047.1,3397-3415).
caaggctctgttagcaaaa

SEQ ID NO: 37033 - DNA, 19 bp, Homo sapiens
  siRNA target sequence for PRKRIR (NM_004705.2,116-134).
ggagagcagacttagaaga

SEQ ID NO: 37034 - DNA, 19 bp, Homo sapiens
  siRNA target sequence for PRKRIR (NM_004705.2,117-135).
gagagcagacttagaagat

SEQ ID NO: 37035 - DNA, 19 bp, Homo sapiens
  siRNA target sequence for PRKRIR (NM_004705.2,119-137).
gagcagacttagaagataa

SEQ ID NO: 37036 - DNA, 19 bp, Homo sapiens
  siRNA target sequence for PRKRIR (NM_004705.2,140-158).
cacctgatcagctaaataa

SEQ ID NO: 37037 - DNA, 19 bp, Homo sapiens
  siRNA target sequence for PRKRIR (NM_004705.2,150-168).
gctaaataaacattatcga

SEQ ID NO: 37038 - DNA, 19 bp, Homo sapiens
  siRNA target sequence for PRKRIR (NM_004705.2,166-184).
cgattatgtgccaaacatt

SEQ ID NO: 37039 - DNA, 19 bp, Homo sapiens
  siRNA target sequence for PRKRIR (NM_004705.2,181-199).
cattttgagacctctatga

SEQ ID NO: 37040 - DNA, 19 bp, Homo sapiens
  siRNA target sequence for PRKRIR (NM_004705.2,201-219).
ctgtagaactagtccttat

SEQ ID NO: 37041 - DNA, 19 bp, Homo sapiens
  siRNA target sequence for PRKRIR (NM_004705.2,226-244).
gttcttcgagataatgcaa

SEQ ID NO: 37042 - DNA, 19 bp, Homo sapiens
  siRNA target sequence for PRKRIR (NM_004705.2,232-250).
cgagataatgcaataccaa

SEQ ID NO: 37043 - DNA, 19 bp, Homo sapiens
  siRNA target sequence for PRKRIR (NM_004705.2,259-277).
gatcttaccagtcatttga

SEQ ID NO: 37044 - DNA, 19 bp, Homo sapiens
  siRNA target sequence for PRKRIR (NM_004705.2,262-280).
cttaccagtcatttgaaca

SEQ ID NO: 37045 - DNA, 19 bp, Homo sapiens
  siRNA target sequence for PRKRIR (NM_004705.2,276-294).
gaacaacccacatagtaga

SEQ ID NO: 37046 - DNA, 19 bp, Homo sapiens
  siRNA target sequence for PRKRIR (NM_004705.2,284-302).
cacatagtagacacagaaa

SEQ ID NO: 37047 - DNA, 19 bp, Homo sapiens
  siRNA target sequence for PRKRIR (NM_004705.2,440-458).
ggcaagatgaggacatttt

SEQ ID NO: 37048 - DNA, 19 bp, Homo sapiens
  siRNA target sequence for PRKRIR (NM_004705.2,461-479).
ctctaacccttgaagagaa

SEQ ID NO: 37049 - DNA, 19 bp, Homo sapiens
  siRNA target sequence for PRKRIR (NM_004705.2,519-537).
gattctgatgggaaagcaa

SEQ ID NO: 37050 - DNA, 19 bp, Homo sapiens
  siRNA target sequence for PRKRIR (NM_004705.2,612-630).
gctggagtgtcggataaat

SEQ ID NO: 37051 - DNA, 19 bp, Homo sapiens
  siRNA target sequence for PRKRIR (NM_004705.2,613-631).
ctggagtgtcggataaatt

SEQ ID NO: 37052 - DNA, 19 bp, Homo sapiens
  siRNA target sequence for PRKRIR (NM_004705.2,670-688).
gcagttaacacgttgtttt

SEQ ID NO: 37053 - DNA, 19 bp, Homo sapiens
  siRNA target sequence for PRKRIR (NM_004705.2,678-696).
cacgttgttttgttcaaaa

SEQ ID NO: 37054 - DNA, 19 bp, Homo sapiens
  siRNA target sequence for PRKRIR (NM_004705.2,720-738).
gatctgtgagagctgtatt

SEQ ID NO: 37055 - DNA, 19 bp, Homo sapiens
  siRNA target sequence for PRKRIR (NM_004705.2,723-741).
ctgtgagagctgtattcga

SEQ ID NO: 37056 - DNA, 19 bp, Homo sapiens
  siRNA target sequence for PRKRIR (NM_004705.2,729-747).
gagctgtattcgagaagaa

SEQ ID NO: 37057 - DNA, 19 bp, Homo sapiens
  siRNA target sequence for PRKRIR (NM_004705.2,734-752).
gtattcgagaagaaactct

SEQ ID NO: 37058 - DNA, 19 bp, Homo sapiens
  siRNA target sequence for PRKRIR (NM_004705.2,898-916).
gaagccgatgcagaaattt

SEQ ID NO: 37059 - DNA, 19 bp, Homo sapiens
  siRNA target sequence for PRKRIR (NM_004705.2,946-964).
gagaagtggggattaaata

SEQ ID NO: 37060 - DNA, 19 bp, Homo sapiens
  siRNA target sequence for PRKRIR (NM_004705.2,974-992).
gtcgtggccaggcttacat

SEQ ID NO: 37061 - DNA, 19 bp, Homo sapiens
  siRNA target sequence for PRKRIR (NM_004705.2,977-995).
gtggccaggcttacattgt

SEQ ID NO: 37062 - DNA, 19 bp, Homo sapiens
  siRNA target sequence for PRKRIR (NM_004705.2,979-997).
ggccaggcttacattgtct

SEQ ID NO: 37063 - DNA, 19 bp, Homo sapiens
  siRNA target sequence for PRKRIR (NM_004705.2,1010-1028).
cttccaaaatgaaagttgt

SEQ ID NO: 37064 - DNA, 19 bp, Homo sapiens
  siRNA target sequence for PRKRIR (NM_004705.2,1030-1048).
gcttctagacttttagaga

SEQ ID NO: 37065 - DNA, 19 bp, Homo sapiens
  siRNA target sequence for PRKRIR (NM_004705.2,1125-1143).
gggagtatctgttgcatta

SEQ ID NO: 37066 - DNA, 19 bp, Homo sapiens
  siRNA target sequence for PRKRIR (NM_004705.2,1129-1147).
gtatctgttgcattaggaa

SEQ ID NO: 37067 - DNA, 19 bp, Homo sapiens
  siRNA target sequence for PRKRIR (NM_004705.2,1133-1151).
ctgttgcattaggaacaat

SEQ ID NO: 37068 - DNA, 19 bp, Homo sapiens
  siRNA target sequence for PRKRIR (NM_004705.2,1144-1162).
ggaacaattgaggaagttt

SEQ ID NO: 37069 - DNA, 19 bp, Homo sapiens
  siRNA target sequence for PRKRIR (NM_004705.2,1283-1301).
caggcaggcatgatgcttt

SEQ ID NO: 37070 - DNA, 19 bp, Homo sapiens
  siRNA target sequence for PRKRIR (NM_004705.2,1286-1304).
gcaggcatgatgcttttga

SEQ ID NO: 37071 - DNA, 19 bp, Homo sapiens
  siRNA target sequence for PRKRIR (NM_004705.2,1318-1336).
ctcctgcaagcacttgttt

SEQ ID NO: 37072 - DNA, 19 bp, Homo sapiens
  siRNA target sequence for PRKRIR (NM_004705.2,1391-1409).
ctggccgagcatttgtact

SEQ ID NO: 37073 - DNA, 19 bp, Homo sapiens
  siRNA target sequence for PRKRIR (NM_004705.2,1456-1474).
cttaaaaatgtcctatctt

SEQ ID NO: 37074 - DNA, 19 bp, Homo sapiens
  siRNA target sequence for PRKRIR (NM_004705.2,1626-1644).
ggcaaccaaacttgatatt

SEQ ID NO: 37075 - DNA, 19 bp, Homo sapiens
  siRNA target sequence for PRKRIR (NM_004705.2,1678-1696).
caccagggtaacttggaat

SEQ ID NO: 37076 - DNA, 19 bp, Homo sapiens
  siRNA target sequence for PRKRIR (NM_004705.2,1741-1759).
ccaacagtggagcacatta

SEQ ID NO: 37077 - DNA, 19 bp, Homo sapiens
  siRNA target sequence for PRKRIR (NM_004705.2,1792-1810).
cacctcaaagctcttaaat

SEQ ID NO: 37078 - DNA, 19 bp, Homo sapiens
  siRNA target sequence for PRKRIR (NM_004705.2,1829-1847).
cagtcatgggacaactcaa

SEQ ID NO: 37079 - DNA, 19 bp, Homo sapiens
  siRNA target sequence for PRKRIR (NM_004705.2,1831-1849).
gtcatgggacaactcaaat

SEQ ID NO: 37080 - DNA, 19 bp, Homo sapiens
  siRNA target sequence for PRKRIR (NM_004705.2,1878-1896).
catgtatagaagtgactta

SEQ ID NO: 37081 - DNA, 19 bp, Homo sapiens
  siRNA target sequence for PRKRIR (NM_004705.2,1914-1932).
gtcagctgagcttcattgt

SEQ ID NO: 37082 - DNA, 19 bp, Homo sapiens
  siRNA target sequence for PRKRIR (NM_004705.2,1971-1989).
gcttccgtccaccatctat

SEQ ID NO: 37083 - DNA, 19 bp, Homo sapiens
  siRNA target sequence for PRKRIR (NM_004705.2,1999-2017).
cacctgcctgacatcaagt

SEQ ID NO: 37084 - DNA, 19 bp, Homo sapiens
  siRNA target sequence for PRKRIR (NM_004705.2,2008-2026).
gacatcaagttttttccta

SEQ ID NO: 37085 - DNA, 19 bp, Homo sapiens
  siRNA target sequence for PRKRIR (NM_004705.2,2077-2095).
gagaatgagcggtatgaaa

SEQ ID NO: 37086 - DNA, 19 bp, Homo sapiens
  siRNA target sequence for PRKRIR (NM_004705.2,2079-2097).
gaatgagcggtatgaaaat

SEQ ID NO: 37087 - DNA, 19 bp, Homo sapiens
  siRNA target sequence for PRKRIR (NM_004705.2,2101-2119).
cgaaagcgtcttaaagcat

SEQ ID NO: 37088 - DNA, 19 bp, Homo sapiens
  siRNA target sequence for PRKRIR (NM_004705.2,2208-2226).
ggtggacacatatattaaa

SEQ ID NO: 37089 - DNA, 19 bp, Homo sapiens
  siRNA target sequence for PRKRIR (NM_004705.2,2241-2259).
gtcagagcttcctacagat

SEQ ID NO: 37090 - DNA, 19 bp, Homo sapiens
  siRNA target sequence for PROX1 (NM_002763.3,360-378).
gcatctgcattttttgcta

SEQ ID NO: 37091 - DNA, 19 bp, Homo sapiens
  siRNA target sequence for PROX1 (NM_002763.3,381-399).
gcaagagcaacgtttttta

SEQ ID NO: 37092 - DNA, 19 bp, Homo sapiens
  siRNA target sequence for PROX1 (NM_002763.3,456-474).
gcagatggggaaaagtcaa

SEQ ID NO: 37093 - DNA, 19 bp, Homo sapiens
  siRNA target sequence for PROX1 (NM_002763.3,497-515).
gagggcgaactcgtatgaa

SEQ ID NO: 37094 - DNA, 19 bp, Homo sapiens
  siRNA target sequence for PROX1 (NM_002763.3,499-517).
gggcgaactcgtatgaaga

SEQ ID NO: 37095 - DNA, 19 bp, Homo sapiens
  siRNA target sequence for PROX1 (NM_002763.3,500-518).
ggcgaactcgtatgaagat

SEQ ID NO: 37096 - DNA, 19 bp, Homo sapiens
  siRNA target sequence for PROX1 (NM_002763.3,590-608).
cacggagcccagtttccaa

SEQ ID NO: 37097 - DNA, 19 bp, Homo sapiens
  siRNA target sequence for PROX1 (NM_002763.3,609-627).
gccagcggtctctctagta

SEQ ID NO: 37098 - DNA, 19 bp, Homo sapiens
  siRNA target sequence for PROX1 (NM_002763.3,628-646).
caggctccgaagtacatca

SEQ ID NO: 37099 - DNA, 19 bp, Homo sapiens
  siRNA target sequence for PROX1 (NM_002763.3,642-660).
catcaggaggatatatgca

SEQ ID NO: 37100 - DNA, 19 bp, Homo sapiens
  siRNA target sequence for PROX1 (NM_002763.3,651-669).
gatatatgcagcaactctt

SEQ ID NO: 37101 - DNA, 19 bp, Homo sapiens
  siRNA target sequence for PROX1 (NM_002763.3,700-718).
cttttggcaggcctactat

SEQ ID NO: 37102 - DNA, 19 bp, Homo sapiens
  siRNA target sequence for PROX1 (NM_002763.3,715-733).
ctatgagccagtttgatat

SEQ ID NO: 37103 - DNA, 19 bp, Homo sapiens
  siRNA target sequence for PROX1 (NM_002763.3,719-737).
gagccagtttgatatggat

SEQ ID NO: 37104 - DNA, 19 bp, Homo sapiens
  siRNA target sequence for PROX1 (NM_002763.3,818-836).
ggcattaaggggcaatgaa

SEQ ID NO: 37105 - DNA, 19 bp, Homo sapiens
  siRNA target sequence for PROX1 (NM_002763.3,944-962).
ggtttcagcccgaaaagaa

SEQ ID NO: 37106 - DNA, 19 bp, Homo sapiens
  siRNA target sequence for PROX1 (NM_002763.3,1058-1076).
cagcactgattcggaaaat

SEQ ID NO: 37107 - DNA, 19 bp, Homo sapiens
  siRNA target sequence for PROX1 (NM_002763.3,1144-1162).
ctgtcggaaggtcagataa

SEQ ID NO: 37108 - DNA, 19 bp, Homo sapiens
  siRNA target sequence for PROX1 (NM_002763.3,1175-1193).
gctagacccaggacagttt

SEQ ID NO: 37109 - DNA, 19 bp, Homo sapiens
  siRNA target sequence for PROX1 (NM_002763.3,1176-1194).
ctagacccaggacagttta

SEQ ID NO: 37110 - DNA, 19 bp, Homo sapiens
  siRNA target sequence for PROX1 (NM_002763.3,1365-1383).
gacactgtggtcaaagtct

SEQ ID NO: 37111 - DNA, 19 bp, Homo sapiens
  siRNA target sequence for PROX1 (NM_002763.3,1433-1451).
gatcccccaggccagattt

SEQ ID NO: 37112 - DNA, 19 bp, Homo sapiens
  siRNA target sequence for PROX1 (NM_002763.3,1505-1523).
ctttggcgacgtcatcatt

SEQ ID NO: 37113 - DNA, 19 bp, Homo sapiens
  siRNA target sequence for PROX1 (NM_002763.3,1593-1611).
ctggttgtccgcaaaaact

SEQ ID NO: 37114 - DNA, 19 bp, Homo sapiens
  siRNA target sequence for PROX1 (NM_002763.3,1732-1750).
ccttgatggcctatccatt

SEQ ID NO: 37115 - DNA, 19 bp, Homo sapiens
  siRNA target sequence for PROX1 (NM_002763.3,1733-1751).
cttgatggcctatccattt

SEQ ID NO: 37116 - DNA, 19 bp, Homo sapiens
  siRNA target sequence for PROX1 (NM_002763.3,1946-1964).
gtgcggcgatcttcaagat

SEQ ID NO: 37117 - DNA, 19 bp, Homo sapiens
  siRNA target sequence for PROX1 (NM_002763.3,1948-1966).
gcggcgatcttcaagatat

SEQ ID NO: 37118 - DNA, 19 bp, Homo sapiens
  siRNA target sequence for PROX1 (NM_002763.3,1967-1985).
gtctgaaatatcaccttat

SEQ ID NO: 37119 - DNA, 19 bp, Homo sapiens
  siRNA target sequence for PROX1 (NM_002763.3,2008-2026).
gattgtcacccaatcactt

SEQ ID NO: 37120 - DNA, 19 bp, Homo sapiens
  siRNA target sequence for PROX1 (NM_002763.3,2012-2030).
gtcacccaatcacttgaaa

SEQ ID NO: 37121 - DNA, 19 bp, Homo sapiens
  siRNA target sequence for PROX1 (NM_002763.3,2058-2076).
cgttatcccagctccaata

SEQ ID NO: 37122 - DNA, 19 bp, Homo sapiens
  siRNA target sequence for PROX1 (NM_002763.3,2059-2077).
gttatcccagctccaatat

SEQ ID NO: 37123 - DNA, 19 bp, Homo sapiens
  siRNA target sequence for PROX1 (NM_002763.3,2097-2115).
gacgtaaagttcaacagat

SEQ ID NO: 37124 - DNA, 19 bp, Homo sapiens
  siRNA target sequence for PROX1 (NM_002763.3,2130-2148).
ctcatcaagtggtttagca

SEQ ID NO: 37125 - DNA, 19 bp, Homo sapiens
  siRNA target sequence for PROX1 (NM_002763.3,2132-2150).
catcaagtggtttagcaat

SEQ ID NO: 37126 - DNA, 19 bp, Homo sapiens
  siRNA target sequence for PROX1 (NM_002763.3,2265-2283).
ctgaacatgcactacaata

SEQ ID NO: 37127 - DNA, 19 bp, Homo sapiens
  siRNA target sequence for PROX1 (NM_002763.3,2270-2288).
catgcactacaataaagca

SEQ ID NO: 37128 - DNA, 19 bp, Homo sapiens
  siRNA target sequence for PROX1 (NM_002763.3,2357-2375).
cattatcgcaggcaaagat

SEQ ID NO: 37129 - DNA, 19 bp, Homo sapiens
  siRNA target sequence for PROX1 (NM_002763.3,2414-2432).
ctgcaagctggatagtgaa

SEQ ID NO: 37130 - DNA, 19 bp, Homo sapiens
  siRNA target sequence for PROX1 (NM_002763.3,2428-2446).
gtgaagtccctgagatttt

SEQ ID NO: 37131 - DNA, 19 bp, Homo sapiens
  siRNA target sequence for PROX1 (NM_002763.3,2452-2470).
ccccgaactgcctacaaga

SEQ ID NO: 37132 - DNA, 19 bp, Homo sapiens
  siRNA target sequence for PTPRF (NM_002840.2,433-451).
caaacctgtcttcattaaa

SEQ ID NO: 37133 - DNA, 19 bp, Homo sapiens
  siRNA target sequence for PTPRF (NM_002840.2,527-545).
cgcatcacatggatgaaga

SEQ ID NO: 37134 - DNA, 19 bp, Homo sapiens
  siRNA target sequence for PTPRF (NM_002840.2,570-588).
gcttcgaggtcattgagtt

SEQ ID NO: 37135 - DNA, 19 bp, Homo sapiens
  siRNA target sequence for PTPRF (NM_002840.2,571-589).
cttcgaggtcattgagttt

SEQ ID NO: 37136 - DNA, 19 bp, Homo sapiens
  siRNA target sequence for PTPRF (NM_002840.2,628-646).
gcgggtgcagcgagatgaa

SEQ ID NO: 37137 - DNA, 19 bp, Homo sapiens
  siRNA target sequence for PTPRF (NM_002840.2,656-674).
gagtgtacagctactaaca

SEQ ID NO: 37138 - DNA, 19 bp, Homo sapiens
  siRNA target sequence for PTPRF (NM_002840.2,677-695).
ctgggtgagatcaacacta

SEQ ID NO: 37139 - DNA, 19 bp, Homo sapiens
  siRNA target sequence for PTPRF (NM_002840.2,996-1014).
cccctgcgaacctgtatgt

SEQ ID NO: 37140 - DNA, 19 bp, Homo sapiens
  siRNA target sequence for PTPRF (NM_002840.2,1211-1229).
gtacgctctgccaactaca

SEQ ID NO: 37141 - DNA, 19 bp, Homo sapiens
  siRNA target sequence for PTPRF (NM_002840.2,1372-1390).
ggagcctgtaacctactat

SEQ ID NO: 37142 - DNA, 19 bp, Homo sapiens
  siRNA target sequence for PTPRF (NM_002840.2,1477-1495).
cagccctttctcggaatat

SEQ ID NO: 37143 - DNA, 19 bp, Homo sapiens
  siRNA target sequence for PTPRF (NM_002840.2,1675-1693).
gggataccgcgtctactat

SEQ ID NO: 37144 - DNA, 19 bp, Homo sapiens
  siRNA target sequence for PTPRF (NM_002840.2,1949-1967).
caggagcggatcatcatgt

SEQ ID NO: 37145 - DNA, 19 bp, Homo sapiens
  siRNA target sequence for PTPRF (NM_002840.2,1951-1969).
ggagcggatcatcatgtat

SEQ ID NO: 37146 - DNA, 19 bp, Homo sapiens
  siRNA target sequence for PTPRF (NM_002840.2,1954-1972).
gcggatcatcatgtatgaa

SEQ ID NO: 37147 - DNA, 19 bp, Homo sapiens
  siRNA target sequence for PTPRF (NM_002840.2,1956-1974).
ggatcatcatgtatgaact

SEQ ID NO: 37148 - DNA, 19 bp, Homo sapiens
  siRNA target sequence for PTPRF (NM_002840.2,2666-2684).
gagtccgaggactatgaaa

SEQ ID NO: 37149 - DNA, 19 bp, Homo sapiens
  siRNA target sequence for PTPRF (NM_002840.2,2712-2730).
ccacctactccgttactgt

SEQ ID NO: 37150 - DNA, 19 bp, Homo sapiens
  siRNA target sequence for PTPRF (NM_002840.2,2713-2731).
cacctactccgttactgtt

SEQ ID NO: 37151 - DNA, 19 bp, Homo sapiens
  siRNA target sequence for PTPRF (NM_002840.2,2773-2791).
caaaattgtcactacaaca

SEQ ID NO: 37152 - DNA, 19 bp, Homo sapiens
  siRNA target sequence for PTPRF (NM_002840.2,3087-3105).
gcggcttcccccaaaacct

SEQ ID NO: 37153 - DNA, 19 bp, Homo sapiens
  siRNA target sequence for PTPRF (NM_002840.2,3200-3218).
gtgttccgagacatcaaca

SEQ ID NO: 37154 - DNA, 19 bp, Homo sapiens
  siRNA target sequence for PTPRF (NM_002840.2,3440-3458).
gttcccgactcctataagt

SEQ ID NO: 37155 - DNA, 19 bp, Homo sapiens
  siRNA target sequence for PTPRF (NM_002840.2,3459-3477).
cagctgtgccctttaagat

SEQ ID NO: 37156 - DNA, 19 bp, Homo sapiens
  siRNA target sequence for PTPRF (NM_002840.2,3462-3480).
ctgtgccctttaagattct

SEQ ID NO: 37157 - DNA, 19 bp, Homo sapiens
  siRNA target sequence for PTPRF (NM_002840.2,3464-3482).
gtgccctttaagattctgt

SEQ ID NO: 37158 - DNA, 19 bp, Homo sapiens
  siRNA target sequence for PTPRF (NM_002840.2,3722-3740).
cttgtcaggtggttctaca

SEQ ID NO: 37159 - DNA, 19 bp, Homo sapiens
  siRNA target sequence for PTPRF (NM_002840.2,3727-3745).
caggtggttctacattgtt

SEQ ID NO: 37160 - DNA, 19 bp, Homo sapiens
  siRNA target sequence for PTPRF (NM_002840.2,3917-3935).
gtgctcccggagaccttta

SEQ ID NO: 37161 - DNA, 19 bp, Homo sapiens
  siRNA target sequence for PTPRF (NM_002840.2,4059-4077).
gcccctactcggatgagat

SEQ ID NO: 37162 - DNA, 19 bp, Homo sapiens
  siRNA target sequence for PTPRF (NM_002840.2,4210-4228).
ctctccgtcctctaaggat

SEQ ID NO: 37163 - DNA, 19 bp, Homo sapiens
  siRNA target sequence for PTPRF (NM_002840.2,4344-4362).
ccgacctggcggacaacat

SEQ ID NO: 37164 - DNA, 19 bp, Homo sapiens
  siRNA target sequence for PTPRF (NM_002840.2,4377-4395).
ccaacgatggcctcaagtt

SEQ ID NO: 37165 - DNA, 19 bp, Homo sapiens
  siRNA target sequence for PTPRF (NM_002840.2,4432-4450).
gttcacgtgggagaattca

SEQ ID NO: 37166 - DNA, 19 bp, Homo sapiens
  siRNA target sequence for PTPRF (NM_002840.2,4505-4523).
cactctcgagtcatcctta

SEQ ID NO: 37167 - DNA, 19 bp, Homo sapiens
  siRNA target sequence for PTPRF (NM_002840.2,4516-4534).
catccttacctctatcgat

SEQ ID NO: 37168 - DNA, 19 bp, Homo sapiens
  siRNA target sequence for PTPRF (NM_002840.2,4699-4717).
ggagaagtcccgggtaaaa

SEQ ID NO: 37169 - DNA, 19 bp, Homo sapiens
  siRNA target sequence for PTPRF (NM_002840.2,4700-4718).
gagaagtcccgggtaaaat

SEQ ID NO: 37170 - DNA, 19 bp, Homo sapiens
  siRNA target sequence for PTPRF (NM_002840.2,4705-4723).
gtcccgggtaaaatgtgat

SEQ ID NO: 37171 - DNA, 19 bp, Homo sapiens
  siRNA target sequence for PTPRF (NM_002840.2,4789-4807).
ggagctggccacatacact

SEQ ID NO: 37172 - DNA, 19 bp, Homo sapiens
  siRNA target sequence for PTPRF (NM_002840.2,5091-5109).
gatcacagaggaactacat

SEQ ID NO: 37173 - DNA, 19 bp, Homo sapiens
  siRNA target sequence for PTPRF (NM_002840.2,5430-5448).
ccagcttcctggatggtta

SEQ ID NO: 37174 - DNA, 19 bp, Homo sapiens
  siRNA target sequence for PTPRF (NM_002840.2,5770-5788).
gacaggcgagggattcatt

SEQ ID NO: 37175 - DNA, 19 bp, Homo sapiens
  siRNA target sequence for PTPRF (NM_002840.2,5772-5790).
caggcgagggattcattga

SEQ ID NO: 37176 - DNA, 19 bp, Homo sapiens
  siRNA target sequence for PTPRF (NM_002840.2,5774-5792).
ggcgagggattcattgact

SEQ ID NO: 37177 - DNA, 19 bp, Homo sapiens
  siRNA target sequence for PTPRF (NM_002840.2,5926-5944).
gggcgtggtcgacatgttt

SEQ ID NO: 37178 - DNA, 19 bp, Homo sapiens
  siRNA target sequence for PTPRF (NM_130440.1,2648-2666).
gcccaggaaaccactatca

SEQ ID NO: 37179 - DNA, 19 bp, Homo sapiens
  siRNA target sequence for PYGO1 (NM_015617.1,20-38).
cagctcccgcttacaaagt

SEQ ID NO: 37180 - DNA, 19 bp, Homo sapiens
  siRNA target sequence for PYGO1 (NM_015617.1,22-40).
gctcccgcttacaaagttt

SEQ ID NO: 37181 - DNA, 19 bp, Homo sapiens
  siRNA target sequence for PYGO1 (NM_015617.1,77-95).
gaggaccaggtgtacaact

SEQ ID NO: 37182 - DNA, 19 bp, Homo sapiens
  siRNA target sequence for PYGO1 (NM_015617.1,94-112).
ctaggaagcccagataaga

SEQ ID NO: 37183 - DNA, 19 bp, Homo sapiens
  siRNA target sequence for PYGO1 (NM_015617.1,196-214).
ctagtggctgctaatccat

SEQ ID NO: 37184 - DNA, 19 bp, Homo sapiens
  siRNA target sequence for PYGO1 (NM_015617.1,203-221).
ctgctaatccatttgatga

SEQ ID NO: 37185 - DNA, 19 bp, Homo sapiens
  siRNA target sequence for PYGO1 (NM_015617.1,206-224).
ctaatccatttgatgacaa

SEQ ID NO: 37186 - DNA, 19 bp, Homo sapiens
  siRNA target sequence for PYGO1 (NM_015617.1,211-229).
ccatttgatgacaactata

SEQ ID NO: 37187 - DNA, 19 bp, Homo sapiens
  siRNA target sequence for PYGO1 (NM_015617.1,250-268).
ctaccttcgtcaaatccat

SEQ ID NO: 37188 - DNA, 19 bp, Homo sapiens
  siRNA target sequence for PYGO1 (NM_015617.1,289-307).
ggctttggaggctatagta

SEQ ID NO: 37189 - DNA, 19 bp, Homo sapiens
  siRNA target sequence for PYGO1 (NM_015617.1,295-313).
ggaggctatagtacattca

SEQ ID NO: 37190 - DNA, 19 bp, Homo sapiens
  siRNA target sequence for PYGO1 (NM_015617.1,298-316).
ggctatagtacattcagaa

SEQ ID NO: 37191 - DNA, 19 bp, Homo sapiens
  siRNA target sequence for PYGO1 (NM_015617.1,325-343).
cacgttcccccaagaatgt

SEQ ID NO: 37192 - DNA, 19 bp, Homo sapiens
  siRNA target sequence for PYGO1 (NM_015617.1,327-345).
cgttcccccaagaatgtct

SEQ ID NO: 37193 - DNA, 19 bp, Homo sapiens
  siRNA target sequence for PYGO1 (NM_015617.1,408-426).
gggcatgggttttaatcga

SEQ ID NO: 37194 - DNA, 19 bp, Homo sapiens
  siRNA target sequence for PYGO1 (NM_015617.1,424-442).
cgacctcatgcttttaact

SEQ ID NO: 37195 - DNA, 19 bp, Homo sapiens
  siRNA target sequence for PYGO1 (NM_015617.1,447-465).
gccacatgataattcaagt

SEQ ID NO: 37196 - DNA, 19 bp, Homo sapiens
  siRNA target sequence for PYGO1 (NM_015617.1,468-486).
cggtaatccatcttataat

SEQ ID NO: 37197 - DNA, 19 bp, Homo sapiens
  siRNA target sequence for PYGO1 (NM_015617.1,470-488).
gtaatccatcttataataa

SEQ ID NO: 37198 - DNA, 19 bp, Homo sapiens
  siRNA target sequence for PYGO1 (NM_015617.1,513-531).
gcctaatcaacattttaga

SEQ ID NO: 37199 - DNA, 19 bp, Homo sapiens
  siRNA target sequence for PYGO1 (NM_015617.1,570-588).
gaatgctagccaagtttct

SEQ ID NO: 37200 - DNA, 19 bp, Homo sapiens
  siRNA target sequence for PYGO1 (NM_015617.1,591-609).
ccccgatttggcatctaat

SEQ ID NO: 37201 - DNA, 19 bp, Homo sapiens
  siRNA target sequence for PYGO1 (NM_015617.1,593-611).
ccgatttggcatctaattt

SEQ ID NO: 37202 - DNA, 19 bp, Homo sapiens
  siRNA target sequence for PYGO1 (NM_015617.1,594-612).
cgatttggcatctaatttt

SEQ ID NO: 37203 - DNA, 19 bp, Homo sapiens
  siRNA target sequence for PYGO1 (NM_015617.1,638-656).
cttctccgttagaatctaa

SEQ ID NO: 37204 - DNA, 19 bp, Homo sapiens
  siRNA target sequence for PYGO1 (NM_015617.1,641-659).
ctccgttagaatctaatca

SEQ ID NO: 37205 - DNA, 19 bp, Homo sapiens
  siRNA target sequence for PYGO1 (NM_015617.1,643-661).
ccgttagaatctaatcatt

SEQ ID NO: 37206 - DNA, 19 bp, Homo sapiens
  siRNA target sequence for PYGO1 (NM_015617.1,681-699).
cacttttggtcaagcaaaa

SEQ ID NO: 37207 - DNA, 19 bp, Homo sapiens
  siRNA target sequence for PYGO1 (NM_015617.1,708-726).
cccaaaacaagactttact

SEQ ID NO: 37208 - DNA, 19 bp, Homo sapiens
  siRNA target sequence for PYGO1 (NM_015617.1,730-748).
ggagcaaccaaaaacacta

SEQ ID NO: 37209 - DNA, 19 bp, Homo sapiens
  siRNA target sequence for PYGO1 (NM_015617.1,766-784).
catccacctcacttgaata

SEQ ID NO: 37210 - DNA, 19 bp, Homo sapiens
  siRNA target sequence for PYGO1 (NM_015617.1,794-812).
cagtgaatcagagtaatat

SEQ ID NO: 37211 - DNA, 19 bp, Homo sapiens
  siRNA target sequence for PYGO1 (NM_015617.1,798-816).
gaatcagagtaatattgaa

SEQ ID NO: 37212 - DNA, 19 bp, Homo sapiens
  siRNA target sequence for PYGO1 (NM_015617.1,899-917).
caaatgggacgcagaataa

SEQ ID NO: 37213 - DNA, 19 bp, Homo sapiens
  siRNA target sequence for PYGO1 (NM_015617.1,1018-1036).
gtgtatccttgtggaattt

SEQ ID NO: 37214 - DNA, 19 bp, Homo sapiens
  siRNA target sequence for PYGO1 (NM_015617.1,1020-1038).
gtatccttgtggaatttgt

SEQ ID NO: 37215 - DNA, 19 bp, Homo sapiens
  siRNA target sequence for PYGO1 (NM_015617.1,1024-1042).
ccttgtggaatttgtacaa

SEQ ID NO: 37216 - DNA, 19 bp, Homo sapiens
  siRNA target sequence for PYGO1 (NM_015617.1,1184-1202).
gtatggctgacaaagatgt

SEQ ID NO: 37217 - DNA, 19 bp, Homo sapiens
  siRNA target sequence for PYGO1 (NM_015617.1,1206-1224).
gttaatgcgtactagagaa

SEQ ID NO: 37218 - DNA, 19 bp, Homo sapiens
  siRNA target sequence for PYGO1 (NM_015617.1,1212-1230).
gcgtactagagaaactttt

SEQ ID NO: 37219 - DNA, 19 bp, Homo sapiens
  siRNA target sequence for PYGO2 (NM_138300.2,267-285).
gcaaggccggtctgcaaat

SEQ ID NO: 37220 - DNA, 19 bp, Homo sapiens
  siRNA target sequence for PYGO2 (NM_138300.2,680-698).
cctctgggtcaaaacttta

SEQ ID NO: 37221 - DNA, 19 bp, Homo sapiens
  siRNA target sequence for RAB10 (NM_016131.2,522-540).
cgtacgacctgcttttcaa

SEQ ID NO: 37222 - DNA, 19 bp, Homo sapiens
  siRNA target sequence for RAB10 (NM_016131.2,571-589).
gaagacctgcgtccttttt

SEQ ID NO: 37223 - DNA, 19 bp, Homo sapiens
  siRNA target sequence for RAB10 (NM_016131.2,574-592).
gacctgcgtcctttttcgt

SEQ ID NO: 37224 - DNA, 19 bp, Homo sapiens
  siRNA target sequence for RAB10 (NM_016131.2,598-616).
ggatgatgccttcaatact

SEQ ID NO: 37225 - DNA, 19 bp, Homo sapiens
  siRNA target sequence for RAB10 (NM_016131.2,599-617).
gatgatgccttcaatacta

SEQ ID NO: 37226 - DNA, 19 bp, Homo sapiens
  siRNA target sequence for RAB10 (NM_016131.2,605-623).
gccttcaatactaccttta

SEQ ID NO: 37227 - DNA, 19 bp, Homo sapiens
  siRNA target sequence for RAB10 (NM_016131.2,606-624).
ccttcaatactacctttat

SEQ ID NO: 37228 - DNA, 19 bp, Homo sapiens
  siRNA target sequence for RAB10 (NM_016131.2,636-654).
gaatagacttcaagatcaa

SEQ ID NO: 37229 - DNA, 19 bp, Homo sapiens
  siRNA target sequence for RAB10 (NM_016131.2,716-734).
cgatttcacaccatcacaa

SEQ ID NO: 37230 - DNA, 19 bp, Homo sapiens
  siRNA target sequence for RAB10 (NM_016131.2,747-765).
gaggcgcaatgggtatcat

SEQ ID NO: 37231 - DNA, 19 bp, Homo sapiens
  siRNA target sequence for RAB10 (NM_016131.2,759-777).
gtatcatgctagtatatga

SEQ ID NO: 37232 - DNA, 19 bp, Homo sapiens
  siRNA target sequence for RAB10 (NM_016131.2,778-796).
catcaccaatggtaaaagt

SEQ ID NO: 37233 - DNA, 19 bp, Homo sapiens
  siRNA target sequence for RAB10 (NM_016131.2,811-829).
caaatggcttagaaacata

SEQ ID NO: 37234 - DNA, 19 bp, Homo sapiens
  siRNA target sequence for RAB10 (NM_016131.2,816-834).
ggcttagaaacatagatga

SEQ ID NO: 37235 - DNA, 19 bp, Homo sapiens
  siRNA target sequence for RAB10 (NM_016131.2,897-915).
gagttgtacctaaaggaaa

SEQ ID NO: 37236 - DNA, 19 bp, Homo sapiens
  siRNA target sequence for RAB10 (NM_016131.2,933-951).
gggagcatggtattaggtt

SEQ ID NO: 37237 - DNA, 19 bp, Homo sapiens
  siRNA target sequence for RAB10 (NM_016131.2,935-953).
gagcatggtattaggtttt

SEQ ID NO: 37238 - DNA, 19 bp, Homo sapiens
  siRNA target sequence for RAB10 (NM_016131.2,941-959).
ggtattaggttttttgaga

SEQ ID NO: 37239 - DNA, 19 bp, Homo sapiens
  siRNA target sequence for RAB10 (NM_016131.2,971-989).
gcaaatataaacatcgaaa

SEQ ID NO: 37240 - DNA, 19 bp, Homo sapiens
  siRNA target sequence for RAB10 (NM_016131.2,972-990).
caaatataaacatcgaaaa

SEQ ID NO: 37241 - DNA, 19 bp, Homo sapiens
  siRNA target sequence for RAB10 (NM_016131.2,997-1015).
cctcacgttagctgaagat

SEQ ID NO: 37242 - DNA, 19 bp, Homo sapiens
  siRNA target sequence for RAB10 (NM_016131.2,998-1016).
ctcacgttagctgaagata

SEQ ID NO: 37243 - DNA, 19 bp, Homo sapiens
  siRNA target sequence for RAB10 (NM_016131.2,1003-1021).
gttagctgaagatatcctt

SEQ ID NO: 37244 - DNA, 19 bp, Homo sapiens
  siRNA target sequence for RAB10 (NM_016131.2,1008-1026).
ctgaagatatccttcgaaa

SEQ ID NO: 37245 - DNA, 19 bp, Homo sapiens
  siRNA target sequence for RAB13 (NM_002870.2,153-171).
gcaagacttgtctgatcat

SEQ ID NO: 37246 - DNA, 19 bp, Homo sapiens
  siRNA target sequence for RAB25 (NM_020387.1,304-322).
cgattcacgcgcaatgagt

SEQ ID NO: 37247 - DNA, 19 bp, Homo sapiens
  siRNA target sequence for RAB25 (NM_020387.1,362-380).
ccacccgcactgtgatgtt

SEQ ID NO: 37248 - DNA, 19 bp, Homo sapiens
  siRNA target sequence for RAB25 (NM_020387.1,623-641).
ctgaggaggcccgaatgtt

SEQ ID NO: 37249 - DNA, 19 bp, Homo sapiens
  siRNA target sequence for RAB25 (NM_020387.1,632-650).
cccgaatgttcgctgaaaa

SEQ ID NO: 37250 - DNA, 19 bp, Homo sapiens
  siRNA target sequence for RAB25 (NM_020387.1,634-652).
cgaatgttcgctgaaaaca

SEQ ID NO: 37251 - DNA, 19 bp, Homo sapiens
  siRNA target sequence for RAB25 (NM_020387.1,697-715).
gttgagctagcctttgaga

SEQ ID NO: 37252 - DNA, 19 bp, Homo sapiens
  siRNA target sequence for RAB25 (NM_020387.1,928-946).
gccctttggttccagatat

SEQ ID NO: 37253 - DNA, 19 bp, Homo sapiens
  siRNA target sequence for RABGEF1 (NM_014504.1,461-479).
ccggcaaaccagcattgaa

SEQ ID NO: 37254 - DNA, 19 bp, Homo sapiens
  siRNA target sequence for RABGEF1 (NM_014504.1,462-480).
cggcaaaccagcattgaaa

SEQ ID NO: 37255 - DNA, 19 bp, Homo sapiens
  siRNA target sequence for RABGEF1 (NM_014504.1,472-490).
gcattgaaacggatagagt

SEQ ID NO: 37256 - DNA, 19 bp, Homo sapiens
  siRNA target sequence for RABGEF1 (NM_014504.1,487-505).
gagtgtctaaggagttcat

SEQ ID NO: 37257 - DNA, 19 bp, Homo sapiens
  siRNA target sequence for RABGEF1 (NM_014504.1,493-511).
ctaaggagttcatagaatt

SEQ ID NO: 37258 - DNA, 19 bp, Homo sapiens
  siRNA target sequence for RABGEF1 (NM_014504.1,530-548).
gacaggccaagaaatctat

SEQ ID NO: 37259 - DNA, 19 bp, Homo sapiens
  siRNA target sequence for RABGEF1 (NM_014504.1,613-631).
cagagtgtgctcaggattt

SEQ ID NO: 37260 - DNA, 19 bp, Homo sapiens
  siRNA target sequence for RABGEF1 (NM_014504.1,642-660).
gtggccgaaaggatgcaaa

SEQ ID NO: 37261 - DNA, 19 bp, Homo sapiens
  siRNA target sequence for RABGEF1 (NM_014504.1,719-737).
catcatgactcgtctctat

SEQ ID NO: 37262 - DNA, 19 bp, Homo sapiens
  siRNA target sequence for RABGEF1 (NM_014504.1,722-740).
catgactcgtctctataaa

SEQ ID NO: 37263 - DNA, 19 bp, Homo sapiens
  siRNA target sequence for RABGEF1 (NM_014504.1,725-743).
gactcgtctctataaatat

SEQ ID NO: 37264 - DNA, 19 bp, Homo sapiens
  siRNA target sequence for RABGEF1 (NM_014504.1,729-747).
cgtctctataaatatgtat

SEQ ID NO: 37265 - DNA, 19 bp, Homo sapiens
  siRNA target sequence for RABGEF1 (NM_014504.1,833-851).
gctgtgtgtccctgttaat

SEQ ID NO: 37266 - DNA, 19 bp, Homo sapiens
  siRNA target sequence for RABGEF1 (NM_014504.1,882-900).
gtgaaggcgatcacagata

SEQ ID NO: 37267 - DNA, 19 bp, Homo sapiens
  siRNA target sequence for RABGEF1 (NM_014504.1,887-905).
ggcgatcacagatatcatt

SEQ ID NO: 37268 - DNA, 19 bp, Homo sapiens
  siRNA target sequence for RABGEF1 (NM_014504.1,889-907).
cgatcacagatatcattga

SEQ ID NO: 37269 - DNA, 19 bp, Homo sapiens
  siRNA target sequence for RABGEF1 (NM_014504.1,1182-1200).
ctagacgcccagtctttga

SEQ ID NO: 37270 - DNA, 19 bp, Homo sapiens
  siRNA target sequence for RABGEF1 (NM_014504.1,1190-1208).
ccagtctttgaatctaagt

SEQ ID NO: 37271 - DNA, 19 bp, Homo sapiens
  siRNA target sequence for RABGEF1 (NM_014504.1,1215-1233).
gattttgatcgctacatgt

SEQ ID NO: 37272 - DNA, 19 bp, Homo sapiens
  siRNA target sequence for RABGEF1 (NM_014504.1,1288-1306).
gcttaggcgtcaagcaaat

SEQ ID NO: 37273 - DNA, 19 bp, Homo sapiens
  siRNA target sequence for RABGEF1 (NM_014504.1,1293-1311).
ggcgtcaagcaaatgtata

SEQ ID NO: 37274 - DNA, 19 bp, Homo sapiens
  siRNA target sequence for RABGEF1 (NM_014504.1,1325-1343).
cttgtctcagttgaatgaa

SEQ ID NO: 37275 - DNA, 19 bp, Homo sapiens
  siRNA target sequence for RABGEF1 (NM_014504.1,1334-1352).
gttgaatgaacgacaagaa

SEQ ID NO: 37276 - DNA, 19 bp, Homo sapiens
  siRNA target sequence for RABGEF1 (NM_014504.1,1344-1362).
cgacaagaaaggatcatga

SEQ ID NO: 37277 - DNA, 19 bp, Homo sapiens
  siRNA target sequence for RABGEF1 (NM_014504.1,1425-1443).
caagacatcgttgagaaat

SEQ ID NO: 37278 - DNA, 19 bp, Homo sapiens
  siRNA target sequence for RABGEF1 (NM_014504.1,1473-1491).
ccgttagcagctattgact

SEQ ID NO: 37279 - DNA, 19 bp, Homo sapiens
  siRNA target sequence for RABGEF1 (NM_014504.1,1480-1498).
cagctattgactctgaaaa

SEQ ID NO: 37280 - DNA, 19 bp, Homo sapiens
  siRNA target sequence for RABGEF1 (NM_014504.1,1483-1501).
ctattgactctgaaaacgt

SEQ ID NO: 37281 - DNA, 19 bp, Homo sapiens
  siRNA target sequence for RAD17 (NM_002873.1,662-680).
gggttgacccatcatttga

SEQ ID NO: 37282 - DNA, 19 bp, Homo sapiens
  siRNA target sequence for RAD17 (NM_002873.1,669-687).
cccatcatttgatgatttt

SEQ ID NO: 37283 - DNA, 19 bp, Homo sapiens
  siRNA target sequence for RAD17 (NM_002873.1,695-713).
gtagtggcgtctctactat

SEQ ID NO: 37284 - DNA, 19 bp, Homo sapiens
  siRNA target sequence for RAD17 (NM_002873.1,720-738).
cacatcattaggtgtgaat

SEQ ID NO: 37285 - DNA, 19 bp, Homo sapiens
  siRNA target sequence for RAD17 (NM_002873.1,722-740).
catcattaggtgtgaataa

SEQ ID NO: 37286 - DNA, 19 bp, Homo sapiens
  siRNA target sequence for RAD17 (NM_002873.1,733-751).
gtgaataactcaagtcata

SEQ ID NO: 37287 - DNA, 19 bp, Homo sapiens
  siRNA target sequence for RAD17 (NM_002873.1,822-840).
cttagaacagatttatggt

SEQ ID NO: 37288 - DNA, 19 bp, Homo sapiens
  siRNA target sequence for RAD17 (NM_002873.1,943-961).
gaagtcgaaacctggttaa

SEQ ID NO: 37289 - DNA, 19 bp, Homo sapiens
  siRNA target sequence for RAD17 (NM_002873.1,948-966).
cgaaacctggttaaaagct

SEQ ID NO: 37290 - DNA, 19 bp, Homo sapiens
  siRNA target sequence for RAD17 (NM_002873.1,954-972).
ctggttaaaagctcaagtt

SEQ ID NO: 37291 - DNA, 19 bp, Homo sapiens
  siRNA target sequence for RAD17 (NM_002873.1,986-1004).
caaaacagggtggatctat

SEQ ID NO: 37292 - DNA, 19 bp, Homo sapiens
  siRNA target sequence for RAD17 (NM_002873.1,993-1011).
gggtggatctattttatta

SEQ ID NO: 37293 - DNA, 19 bp, Homo sapiens
  siRNA target sequence for RAD17 (NM_002873.1,1033-1051).
ggaaagacaacgaccttaa

SEQ ID NO: 37294 - DNA, 19 bp, Homo sapiens
  siRNA target sequence for RAD17 (NM_002873.1,1034-1052).
gaaagacaacgaccttaaa

SEQ ID NO: 37295 - DNA, 19 bp, Homo sapiens
  siRNA target sequence for RAD17 (NM_002873.1,1038-1056).
gacaacgaccttaaaaata

SEQ ID NO: 37296 - DNA, 19 bp, Homo sapiens
  siRNA target sequence for RAD17 (NM_002873.1,1040-1058).
caacgaccttaaaaatact

SEQ ID NO: 37297 - DNA, 19 bp, Homo sapiens
  siRNA target sequence for RAD17 (NM_002873.1,1065-1083).
ggagcatggtattcaagta

SEQ ID NO: 37298 - DNA, 19 bp, Homo sapiens
  siRNA target sequence for RAD17 (NM_002873.1,1078-1096).
caagtacaagagtggatta

SEQ ID NO: 37299 - DNA, 19 bp, Homo sapiens
  siRNA target sequence for RAD17 (NM_002873.1,1150-1168).
gaatcaagcttccatatgt

SEQ ID NO: 37300 - DNA, 19 bp, Homo sapiens
  siRNA target sequence for RAD17 (NM_002873.1,1162-1180).
catatgtttccctatcagt

SEQ ID NO: 37301 - DNA, 19 bp, Homo sapiens
  siRNA target sequence for RAD17 (NM_002873.1,1207-1225).
ctactaagagcgacaaagt

SEQ ID NO: 37302 - DNA, 19 bp, Homo sapiens
  siRNA target sequence for RAD17 (NM_002873.1,1210-1228).
ctaagagcgacaaagtata

SEQ ID NO: 37303 - DNA, 19 bp, Homo sapiens
  siRNA target sequence for RAD17 (NM_002873.1,1214-1232).
gagcgacaaagtataacaa

SEQ ID NO: 37304 - DNA, 19 bp, Homo sapiens
  siRNA target sequence for RAD17 (NM_002873.1,1216-1234).
gcgacaaagtataacaagt

SEQ ID NO: 37305 - DNA, 19 bp, Homo sapiens
  siRNA target sequence for RAD17 (NM_002873.1,1217-1235).
cgacaaagtataacaagtt

SEQ ID NO: 37306 - DNA, 19 bp, Homo sapiens
  siRNA target sequence for RAD17 (NM_002873.1,1279-1297).
ctggttgaagatttaccta

SEQ ID NO: 37307 - DNA, 19 bp, Homo sapiens
  siRNA target sequence for RAD17 (NM_002873.1,1288-1306).
gatttacctaaccagtttt

SEQ ID NO: 37308 - DNA, 19 bp, Homo sapiens
  siRNA target sequence for RAD17 (NM_002873.1,1302-1320).
gttttatcgggattctcat

SEQ ID NO: 37309 - DNA, 19 bp, Homo sapiens
  siRNA target sequence for RAD17 (NM_002873.1,1316-1334).
ctcatactttacatgaagt

SEQ ID NO: 37310 - DNA, 19 bp, Homo sapiens
  siRNA target sequence for RAD17 (NM_002873.1,1366-1384).
cctcttatatttataatct

SEQ ID NO: 37311 - DNA, 19 bp, Homo sapiens
  siRNA target sequence for RAD17 (NM_002873.1,1389-1407).
cagtctcagtggagataat

SEQ ID NO: 37312 - DNA, 19 bp, Homo sapiens
  siRNA target sequence for RAD17 (NM_002873.1,1395-1413).
cagtggagataataatcaa

SEQ ID NO: 37313 - DNA, 19 bp, Homo sapiens
  siRNA target sequence for RAD17 (NM_002873.1,1440-1458).
ggaagagtgttctatctca

SEQ ID NO: 37314 - DNA, 19 bp, Homo sapiens
  siRNA target sequence for RAD17 (NM_002873.1,1441-1459).
gaagagtgttctatctcaa

SEQ ID NO: 37315 - DNA, 19 bp, Homo sapiens
  siRNA target sequence for RAD17 (NM_002873.1,1444-1462).
gagtgttctatctcaaata

SEQ ID NO: 37316 - DNA, 19 bp, Homo sapiens
  siRNA target sequence for RAD17 (NM_002873.1,1474-1492).
cctgtggcaccaacaatta

SEQ ID NO: 37317 - DNA, 19 bp, Homo sapiens
  siRNA target sequence for RAD17 (NM_002873.1,1481-1499).
caccaacaattatgatgaa

SEQ ID NO: 37318 - DNA, 19 bp, Homo sapiens
  siRNA target sequence for RAD17 (NM_002873.1,1494-1512).
gatgaaatttcttaatcga

SEQ ID NO: 37319 - DNA, 19 bp, Homo sapiens
  siRNA target sequence for RAD17 (NM_002873.1,1497-1515).
gaaatttcttaatcgaata

SEQ ID NO: 37320 - DNA, 19 bp, Homo sapiens
  siRNA target sequence for RAD17 (NM_002873.1,1557-1575).
ccctgacaaaacttctcta

SEQ ID NO: 37321 - DNA, 19 bp, Homo sapiens
  siRNA target sequence for RAD17 (NM_002873.1,1603-1621).
gatatcagaagtgcaataa

SEQ ID NO: 37322 - DNA, 19 bp, Homo sapiens
  siRNA target sequence for RAD17 (NM_002873.1,1656-1674).
caacttacggccaaggaaa

SEQ ID NO: 37323 - DNA, 19 bp, Homo sapiens
  siRNA target sequence for RAD17 (NM_002873.1,1766-1784).
ctattggtggcaaagatgt

SEQ ID NO: 37324 - DNA, 19 bp, Homo sapiens
  siRNA target sequence for RAD17 (NM_002873.1,1859-1877).
ctcggttgccctctcattt

SEQ ID NO: 37325 - DNA, 19 bp, Homo sapiens
  siRNA target sequence for RAD17 (NM_002873.1,1882-1900).
gaatatgaacgggatacat

SEQ ID NO: 37326 - DNA, 19 bp, Homo sapiens
  siRNA target sequence for RAD17 (NM_002873.1,1941-1959).
gcctggagacttatttaat

SEQ ID NO: 37327 - DNA, 19 bp, Homo sapiens
  siRNA target sequence for RAD17 (NM_002873.1,1969-1987).
caccaaaactacatagatt

SEQ ID NO: 37328 - DNA, 19 bp, Homo sapiens
  siRNA target sequence for RAD17 (NM_002873.1,2060-2078).
ggaatacacgctctttact

SEQ ID NO: 37329 - DNA, 19 bp, Homo sapiens
  siRNA target sequence for RAD17 (NM_002873.1,2070-2088).
ctctttactcagggaatat

SEQ ID NO: 37330 - DNA, 19 bp, Homo sapiens
  siRNA target sequence for RAD17 (NM_002873.1,2081-2099).
gggaatatagcacatctat

SEQ ID NO: 37331 - DNA, 19 bp, Homo sapiens
  siRNA target sequence for RAD17 (NM_002873.1,2082-2100).
ggaatatagcacatctata

SEQ ID NO: 37332 - DNA, 19 bp, Homo sapiens
  siRNA target sequence for RAD17 (NM_002873.1,2127-2145).
caaagcccgaggatatgct

SEQ ID NO: 37333 - DNA, 19 bp, Homo sapiens
  siRNA target sequence for RAD17 (NM_002873.1,2301-2319).
ccttgctctactaaccatt

SEQ ID NO: 37334 - DNA, 19 bp, Homo sapiens
  siRNA target sequence for RAD17 (NM_002873.1,2305-2323).
gctctactaaccattccaa

SEQ ID NO: 37335 - DNA, 19 bp, Homo sapiens
  siRNA target sequence for RAD17 (NM_002873.1,2374-2392).
ctgaagcgacactttggaa

SEQ ID NO: 37336 - DNA, 19 bp, Homo sapiens
  siRNA target sequence for RAD17 (NM_002873.1,2420-2438).
gggaacatggaatgataga

SEQ ID NO: 37337 - DNA, 19 bp, Homo sapiens
  siRNA target sequence for RAD17 (NM_002873.1,2439-2457).
ccctgacagcggagatgaa

SEQ ID NO: 37338 - DNA, 19 bp, Homo sapiens
  siRNA target sequence for RAD17 (NM_133339.1,78-96).
cttagaccaaaggtatctt

SEQ ID NO: 37339 - DNA, 19 bp, Homo sapiens
  siRNA target sequence for RAD52 (NM_002879.2,252-270).
gggcccagaatacataagt

SEQ ID NO: 37340 - DNA, 19 bp, Homo sapiens
  siRNA target sequence for RAD52 (NM_002879.2,310-328).
gagggtcatcgggtaatta

SEQ ID NO: 37341 - DNA, 19 bp, Homo sapiens
  siRNA target sequence for RAD52 (NM_002879.2,312-330).
gggtcatcgggtaattaat

SEQ ID NO: 37342 - DNA, 19 bp, Homo sapiens
  siRNA target sequence for RAD52 (NM_002879.2,314-332).
gtcatcgggtaattaatct

SEQ ID NO: 37343 - DNA, 19 bp, Homo sapiens
  siRNA target sequence for RAD52 (NM_002879.2,423-441).
cgtgggagtctgtgcattt

SEQ ID NO: 37344 - DNA, 19 bp, Homo sapiens
  siRNA target sequence for RAD52 (NM_002879.2,464-482).
gttcatatcatgaagatgt

SEQ ID NO: 37345 - DNA, 19 bp, Homo sapiens
  siRNA target sequence for RAD52 (NM_002879.2,1054-1072).
gcaggagtgactcaagaat

SEQ ID NO: 37346 - DNA, 19 bp, Homo sapiens
  siRNA target sequence for RAD52 (NM_002879.2,1055-1073).
caggagtgactcaagaatt

SEQ ID NO: 37347 - DNA, 19 bp, Homo sapiens
  siRNA target sequence for RAD52 (NM_002879.2,1060-1078).
gtgactcaagaattaatca

SEQ ID NO: 37348 - DNA, 19 bp, Homo sapiens
  siRNA target sequence for RAD52 (NM_134424.1,718-736).
cgctacgcacaggagtttt

SEQ ID NO: 37349 - DNA, 19 bp, Homo sapiens
  siRNA target sequence for RAD54B (NM_012415.2,128-146).
gcaggggaattccttcaaa

SEQ ID NO: 37350 - DNA, 19 bp, Homo sapiens
  siRNA target sequence for RAD54B (NM_012415.2,181-199).
caggtctgaatgaagagat

SEQ ID NO: 37351 - DNA, 19 bp, Homo sapiens
  siRNA target sequence for RAD54B (NM_012415.2,183-201).
ggtctgaatgaagagatta

SEQ ID NO: 37352 - DNA, 19 bp, Homo sapiens
  siRNA target sequence for RAD54B (NM_012415.2,231-249).
gagggtgttgcaattaata

SEQ ID NO: 37353 - DNA, 19 bp, Homo sapiens
  siRNA target sequence for RAD54B (NM_012415.2,234-252).
ggtgttgcaattaataaca

SEQ ID NO: 37354 - DNA, 19 bp, Homo sapiens
  siRNA target sequence for RAD54B (NM_012415.2,260-278).
cccgtcacaaaatgatctt

SEQ ID NO: 37355 - DNA, 19 bp, Homo sapiens
  siRNA target sequence for RAD54B (NM_012415.2,261-279).
ccgtcacaaaatgatctta

SEQ ID NO: 37356 - DNA, 19 bp, Homo sapiens
  siRNA target sequence for RAD54B (NM_012415.2,321-339).
gaaatcaataacagagata

SEQ ID NO: 37357 - DNA, 19 bp, Homo sapiens
  siRNA target sequence for RAD54B (NM_012415.2,370-388).
ctacactggcaacattaga

SEQ ID NO: 37358 - DNA, 19 bp, Homo sapiens
  siRNA target sequence for RAD54B (NM_012415.2,441-459).
caagaagagaaatctgata

SEQ ID NO: 37359 - DNA, 19 bp, Homo sapiens
  siRNA target sequence for RAD54B (NM_012415.2,454-472).
ctgatagcctagttaaata

SEQ ID NO: 37360 - DNA, 19 bp, Homo sapiens
  siRNA target sequence for RAD54B (NM_012415.2,549-567).
ggaaagtcatttatattaa

SEQ ID NO: 37361 - DNA, 19 bp, Homo sapiens
  siRNA target sequence for RAD54B (NM_012415.2,592-610).
gaagaggcattggttataa

SEQ ID NO: 37362 - DNA, 19 bp, Homo sapiens
  siRNA target sequence for RAD54B (NM_012415.2,638-656).
gggccaaacactgatgatt

SEQ ID NO: 37363 - DNA, 19 bp, Homo sapiens
  siRNA target sequence for RAD54B (NM_012415.2,641-659).
ccaaacactgatgatttgt

SEQ ID NO: 37364 - DNA, 19 bp, Homo sapiens
  siRNA target sequence for RAD54B (NM_012415.2,672-690).
gaagtcatgggtgtaatct

SEQ ID NO: 37365 - DNA, 19 bp, Homo sapiens
  siRNA target sequence for RAD54B (NM_012415.2,725-743).
gcttggaggaggaagtact

SEQ ID NO: 37366 - DNA, 19 bp, Homo sapiens
  siRNA target sequence for RAD54B (NM_012415.2,769-787).
ccaggaaatgtttctctaa

SEQ ID NO: 37367 - DNA, 19 bp, Homo sapiens
  siRNA target sequence for RAD54B (NM_012415.2,801-819).
gtttgtaaaccaagttcaa

SEQ ID NO: 37368 - DNA, 19 bp, Homo sapiens
  siRNA target sequence for RAD54B (NM_012415.2,855-873).
ccacgccatgacccatata

SEQ ID NO: 37369 - DNA, 19 bp, Homo sapiens
  siRNA target sequence for RAD54B (NM_012415.2,864-882).
gacccatatacgccaaatt

SEQ ID NO: 37370 - DNA, 19 bp, Homo sapiens
  siRNA target sequence for RAD54B (NM_012415.2,874-892).
cgccaaattccctcgttat

SEQ ID NO: 37371 - DNA, 19 bp, Homo sapiens
  siRNA target sequence for RAD54B (NM_012415.2,895-913).
cacgaccagataagaatca

SEQ ID NO: 37372 - DNA, 19 bp, Homo sapiens
  siRNA target sequence for RAD54B (NM_012415.2,921-939).
gtattcaataagaactgtt

SEQ ID NO: 37373 - DNA, 19 bp, Homo sapiens
  siRNA target sequence for RAD54B (NM_012415.2,943-961).
ctcttgtggatgtagtgat

SEQ ID NO: 37374 - DNA, 19 bp, Homo sapiens
  siRNA target sequence for RAD54B (NM_012415.2,1089-1107).
gggaagacattgcaatgta

SEQ ID NO: 37375 - DNA, 19 bp, Homo sapiens
  siRNA target sequence for RAD54B (NM_012415.2,1146-1164).
ggaggcaagccagtaataa

SEQ ID NO: 37376 - DNA, 19 bp, Homo sapiens
  siRNA target sequence for RAD54B (NM_012415.2,1147-1165).
gaggcaagccagtaataaa

SEQ ID NO: 37377 - DNA, 19 bp, Homo sapiens
  siRNA target sequence for RAD54B (NM_012415.2,1185-1203).
cctggaagcttggtgaata

SEQ ID NO: 37378 - DNA, 19 bp, Homo sapiens
  siRNA target sequence for RAD54B (NM_012415.2,1188-1206).
ggaagcttggtgaataatt

SEQ ID NO: 37379 - DNA, 19 bp, Homo sapiens
  siRNA target sequence for RAD54B (NM_012415.2,1237-1255).
gtgaaaggatcaagatatt

SEQ ID NO: 37380 - DNA, 19 bp, Homo sapiens
  siRNA target sequence for RAD54B (NM_012415.2,1239-1257).
gaaaggatcaagatattta

SEQ ID NO: 37381 - DNA, 19 bp, Homo sapiens
  siRNA target sequence for RAD54B (NM_012415.2,1243-1261).
ggatcaagatatttactgt

SEQ ID NO: 37382 - DNA, 19 bp, Homo sapiens
  siRNA target sequence for RAD54B (NM_012415.2,1244-1262).
gatcaagatatttactgtt

SEQ ID NO: 37383 - DNA, 19 bp, Homo sapiens
  siRNA target sequence for RAD54B (NM_012415.2,1284-1302).
gaattcatcaagtctatat

SEQ ID NO: 37384 - DNA, 19 bp, Homo sapiens
  siRNA target sequence for RAD54B (NM_012415.2,1341-1359).
cgttccctggatcaaatta

SEQ ID NO: 37385 - DNA, 19 bp, Homo sapiens
  siRNA target sequence for RAD54B (NM_012415.2,1392-1410).
gaggggcatcgtttgaaga

SEQ ID NO: 37386 - DNA, 19 bp, Homo sapiens
  siRNA target sequence for RAD54B (NM_012415.2,1395-1413).
gggcatcgtttgaagaaca

SEQ ID NO: 37387 - DNA, 19 bp, Homo sapiens
  siRNA target sequence for RAD54B (NM_012415.2,1409-1427).
gaacagtgccattaagaca

SEQ ID NO: 37388 - DNA, 19 bp, Homo sapiens
  siRNA target sequence for RAD54B (NM_012415.2,1455-1473).
gagaaaagaataattctaa

SEQ ID NO: 37389 - DNA, 19 bp, Homo sapiens
  siRNA target sequence for RAD54B (NM_012415.2,1477-1495).
gtactccaattcagaatga

SEQ ID NO: 37390 - DNA, 19 bp, Homo sapiens
  siRNA target sequence for RAD54B (NM_012415.2,1499-1517).
gcaagaattttttgcatta

SEQ ID NO: 37391 - DNA, 19 bp, Homo sapiens
  siRNA target sequence for RAD54B (NM_012415.2,1536-1554).
ggaatattaggctctttgt

SEQ ID NO: 37392 - DNA, 19 bp, Homo sapiens
  siRNA target sequence for RAD54B (NM_012415.2,1549-1567).
ctttgtcatcttataggaa

SEQ ID NO: 37393 - DNA, 19 bp, Homo sapiens
  siRNA target sequence for RAD54B (NM_012415.2,1553-1571).
gtcatcttataggaaaata

SEQ ID NO: 37394 - DNA, 19 bp, Homo sapiens
  siRNA target sequence for RAD54B (NM_012415.2,1578-1596).
gaacccatcattttatcga

SEQ ID NO: 37395 - DNA, 19 bp, Homo sapiens
  siRNA target sequence for RAD54B (NM_012415.2,1660-1678).
gcctcactggactctttat

SEQ ID NO: 37396 - DNA, 19 bp, Homo sapiens
  siRNA target sequence for RAD54B (NM_012415.2,1664-1682).
cactggactctttatcctt

SEQ ID NO: 37397 - DNA, 19 bp, Homo sapiens
  siRNA target sequence for RAD54B (NM_012415.2,1713-1731).
ctcccacctaaaatagaga

SEQ ID NO: 37398 - DNA, 19 bp, Homo sapiens
  siRNA target sequence for RAD54B (NM_012415.2,1720-1738).
ctaaaatagagaatgttgt

SEQ ID NO: 37399 - DNA, 19 bp, Homo sapiens
  siRNA target sequence for RAD54B (NM_012415.2,1756-1774).
cactacagattgagcttta

SEQ ID NO: 37400 - DNA, 19 bp, Homo sapiens
  siRNA target sequence for RAD54B (NM_012415.2,1761-1779).
cagattgagctttatcgaa

SEQ ID NO: 37401 - DNA, 19 bp, Homo sapiens
  siRNA target sequence for RAD54B (NM_012415.2,1815-1833).
caagggttgttggaaaata

SEQ ID NO: 37402 - DNA, 19 bp, Homo sapiens
  siRNA target sequence for RAD54B (NM_012415.2,1827-1845).
gaaaatagtccccatctaa

SEQ ID NO: 37403 - DNA, 19 bp, Homo sapiens
  siRNA target sequence for RAD54B (NM_012415.2,1834-1852).
gtccccatctaatatgtat

SEQ ID NO: 37404 - DNA, 19 bp, Homo sapiens
  siRNA target sequence for RAD54B (NM_012415.2,1854-1872).
ggagctcttaaaaaactgt

SEQ ID NO: 37405 - DNA, 19 bp, Homo sapiens
  siRNA target sequence for RAD54B (NM_012415.2,1886-1904).
ccttttgttcaactctata

SEQ ID NO: 37406 - DNA, 19 bp, Homo sapiens
  siRNA target sequence for RAD54B (NM_012415.2,1887-1905).
cttttgttcaactctataa

SEQ ID NO: 37407 - DNA, 19 bp, Homo sapiens
  siRNA target sequence for RAD54B (NM_012415.2,1913-1931).
ggaatgtagctcaacttgt

SEQ ID NO: 37408 - DNA, 19 bp, Homo sapiens
  siRNA target sequence for RAD54B (NM_012415.2,1918-1936).
gtagctcaacttgtgataa

SEQ ID NO: 37409 - DNA, 19 bp, Homo sapiens
  siRNA target sequence for RAD54B (NM_012415.2,1921-1939).
gctcaacttgtgataaaaa

SEQ ID NO: 37410 - DNA, 19 bp, Homo sapiens
  siRNA target sequence for RAD54B (NM_012415.2,1922-1940).
ctcaacttgtgataaaaat

SEQ ID NO: 37411 - DNA, 19 bp, Homo sapiens
  siRNA target sequence for RAD54B (NM_012415.2,1991-2009).
caaccctctcctgtttact

SEQ ID NO: 37412 - DNA, 19 bp, Homo sapiens
  siRNA target sequence for RAD54B (NM_012415.2,1995-2013).
cctctcctgtttactgaaa

SEQ ID NO: 37413 - DNA, 19 bp, Homo sapiens
  siRNA target sequence for RAD54B (NM_012415.2,2063-2081).
cgaacttcgacctactgaa

SEQ ID NO: 37414 - DNA, 19 bp, Homo sapiens
  siRNA target sequence for RAD54B (NM_012415.2,2064-2082).
gaacttcgacctactgaaa

SEQ ID NO: 37415 - DNA, 19 bp, Homo sapiens
  siRNA target sequence for RAD54B (NM_012415.2,2079-2097).
gaaaaggtggtgttggtat

SEQ ID NO: 37416 - DNA, 19 bp, Homo sapiens
  siRNA target sequence for RAD54B (NM_012415.2,2087-2105).
ggtgttggtatccaactat

SEQ ID NO: 37417 - DNA, 19 bp, Homo sapiens
  siRNA target sequence for RAD54B (NM_012415.2,2093-2111).
ggtatccaactatacacaa

SEQ ID NO: 37418 - DNA, 19 bp, Homo sapiens
  siRNA target sequence for RAD54B (NM_012415.2,2098-2116).
ccaactatacacaaacctt

SEQ ID NO: 37419 - DNA, 19 bp, Homo sapiens
  siRNA target sequence for RAD54B (NM_012415.2,2141-2159).
gcgtcatggatatgcttat

SEQ ID NO: 37420 - DNA, 19 bp, Homo sapiens
  siRNA target sequence for RAD54B (NM_012415.2,2142-2160).
cgtcatggatatgcttata

SEQ ID NO: 37421 - DNA, 19 bp, Homo sapiens
  siRNA target sequence for RAD54B (NM_012415.2,2145-2163).
catggatatgcttatacaa

SEQ ID NO: 37422 - DNA, 19 bp, Homo sapiens
  siRNA target sequence for RAD54B (NM_012415.2,2219-2237).
cagtcaacactcttctttt

SEQ ID NO: 37423 - DNA, 19 bp, Homo sapiens
  siRNA target sequence for RAD54B (NM_012415.2,2263-2281).
ctggtggtgtaggacttaa

SEQ ID NO: 37424 - DNA, 19 bp, Homo sapiens
  siRNA target sequence for RAD54B (NM_012415.2,2296-2314).
ctcacttaattctctatga

SEQ ID NO: 37425 - DNA, 19 bp, Homo sapiens
  siRNA target sequence for RAD54B (NM_012415.2,2475-2493).
gtcgacctcaccaagacat

SEQ ID NO: 37426 - DNA, 19 bp, Homo sapiens
  siRNA target sequence for RAD54B (NM_012415.2,2480-2498).
cctcaccaagacatctgaa

SEQ ID NO: 37427 - DNA, 19 bp, Homo sapiens
  siRNA target sequence for RAD54B (NM_012415.2,2485-2503).
ccaagacatctgaacatat

SEQ ID NO: 37428 - DNA, 19 bp, Homo sapiens
  siRNA target sequence for RAD54B (NM_012415.2,2551-2569).
gttcagattgtgttactca

SEQ ID NO: 37429 - DNA, 19 bp, Homo sapiens
  siRNA target sequence for RAD54B (NM_012415.2,2588-2606).
gtgtacaggagaagaagtt

SEQ ID NO: 37430 - DNA, 19 bp, Homo sapiens
  siRNA target sequence for RAD54B (NM_012415.2,2611-2629).
caggtgattcgttggaaaa

SEQ ID NO: 37431 - DNA, 19 bp, Homo sapiens
  siRNA target sequence for RAD54B (NM_012415.2,2613-2631).
ggtgattcgttggaaaaat

SEQ ID NO: 37432 - DNA, 19 bp, Homo sapiens
  siRNA target sequence for RAD54B (NM_012415.2,2658-2676).
ggtccacatcaccagaaat

SEQ ID NO: 37433 - DNA, 19 bp, Homo sapiens
  siRNA target sequence for RAD54B (NM_012415.2,2661-2679).
ccacatcaccagaaatcta

SEQ ID NO: 37434 - DNA, 19 bp, Homo sapiens
  siRNA target sequence for RAD54B (NM_012415.2,2662-2680).
cacatcaccagaaatctaa

SEQ ID NO: 37435 - DNA, 19 bp, Homo sapiens
  siRNA target sequence for RAD54B (NM_012415.2,2664-2682).
catcaccagaaatctaact

SEQ ID NO: 37436 - DNA, 19 bp, Homo sapiens
  siRNA target sequence for RAD54B (NM_012415.2,2683-2701).
ccctgaaacctctttctat

SEQ ID NO: 37437 - DNA, 19 bp, Homo sapiens
  siRNA target sequence for RAD54B (NM_012415.2,2685-2703).
ctgaaacctctttctatgt

SEQ ID NO: 37438 - DNA, 19 bp, Homo sapiens
  siRNA target sequence for RAD54B (NM_012415.2,2731-2749).
ctggagatcatttaaatct

SEQ ID NO: 37439 - DNA, 19 bp, Homo sapiens
  siRNA target sequence for RAD54B (NM_012415.2,2733-2751).
ggagatcatttaaatctta

SEQ ID NO: 37440 - DNA, 19 bp, Homo sapiens
  siRNA target sequence for RAD54L (NM_003579.2,711-729).
gcaggtcctgtgatgatga

SEQ ID NO: 37441 - DNA, 19 bp, Homo sapiens
  siRNA target sequence for RAD54L (NM_003579.2,712-730).
caggtcctgtgatgatgaa

SEQ ID NO: 37442 - DNA, 19 bp, Homo sapiens
  siRNA target sequence for RAD54L (NM_003579.2,745-763).
cctagtgactcctaggaaa

SEQ ID NO: 37443 - DNA, 19 bp, Homo sapiens
  siRNA target sequence for RAD54L (NM_003579.2,807-825).
ctccttttcggaaaccttt

SEQ ID NO: 37444 - DNA, 19 bp, Homo sapiens
  siRNA target sequence for RAD54L (NM_003579.2,822-840).
ctttgagtcagctaaccaa

SEQ ID NO: 37445 - DNA, 19 bp, Homo sapiens
  siRNA target sequence for RAD54L (NM_003579.2,869-887).
catgaagcatttattcgaa

SEQ ID NO: 37446 - DNA, 19 bp, Homo sapiens
  siRNA target sequence for RAD54L (NM_003579.2,1091-1109).
gttgttgaccctattctca

SEQ ID NO: 37447 - DNA, 19 bp, Homo sapiens
  siRNA target sequence for RAD54L (NM_003579.2,1099-1117).
ccctattctcagtaaggtt

SEQ ID NO: 37448 - DNA, 19 bp, Homo sapiens
  siRNA target sequence for RAD54L (NM_003579.2,1100-1118).
cctattctcagtaaggttt

SEQ ID NO: 37449 - DNA, 19 bp, Homo sapiens
  siRNA target sequence for RAD54L (NM_003579.2,1101-1119).
ctattctcagtaaggtttt

SEQ ID NO: 37450 - DNA, 19 bp, Homo sapiens
  siRNA target sequence for RAD54L (NM_003579.2,1230-1248).
cgctgcagtgcatcacatt

SEQ ID NO: 37451 - DNA, 19 bp, Homo sapiens
  siRNA target sequence for RAD54L (NM_003579.2,1281-1299).
gcaagccagaaattgacaa

SEQ ID NO: 37452 - DNA, 19 bp, Homo sapiens
  siRNA target sequence for RAD54L (NM_003579.2,1386-1404).
ccatcgatggaggatctaa

SEQ ID NO: 37453 - DNA, 19 bp, Homo sapiens
  siRNA target sequence for RAD54L (NM_003579.2,1390-1408).
cgatggaggatctaaggat

SEQ ID NO: 37454 - DNA, 19 bp, Homo sapiens
  siRNA target sequence for RAD54L (NM_003579.2,1394-1412).
ggaggatctaaggatgaaa

SEQ ID NO: 37455 - DNA, 19 bp, Homo sapiens
  siRNA target sequence for RAD54L (NM_003579.2,1489-1507).
gaccttccgccttcatgtt

SEQ ID NO: 37456 - DNA, 19 bp, Homo sapiens
  siRNA target sequence for RAD54L (NM_003579.2,1553-1571).
ggacacaggctcaagaact

SEQ ID NO: 37457 - DNA, 19 bp, Homo sapiens
  siRNA target sequence for RAD54L (NM_003579.2,1669-1687).
cagcttggtacattttgtt

SEQ ID NO: 37458 - DNA, 19 bp, Homo sapiens
  siRNA target sequence for RAD54L (NM_003579.2,1712-1730).
catgaattcaagaagcatt

SEQ ID NO: 37459 - DNA, 19 bp, Homo sapiens
  siRNA target sequence for RAD54L (NM_003579.2,1811-1829).
ctcaccagcattgtgaata

SEQ ID NO: 37460 - DNA, 19 bp, Homo sapiens
  siRNA target sequence for RAD54L (NM_003579.2,1837-1855).
gatacggaggacttctgat

SEQ ID NO: 37461 - DNA, 19 bp, Homo sapiens
  siRNA target sequence for RAD54L (NM_003579.2,1886-1904).
gagcaggtcgtttgttgta

SEQ ID NO: 37462 - DNA, 19 bp, Homo sapiens
  siRNA target sequence for RAD54L (NM_003579.2,1913-1931).
ccccttcagactgagttat

SEQ ID NO: 37463 - DNA, 19 bp, Homo sapiens
  siRNA target sequence for RAD54L (NM_003579.2,1916-1934).
cttcagactgagttataca

SEQ ID NO: 37464 - DNA, 19 bp, Homo sapiens
  siRNA target sequence for RAD54L (NM_003579.2,1953-1971).
ccaaaccggcagaagaatt

SEQ ID NO: 37465 - DNA, 19 bp, Homo sapiens
  siRNA target sequence for RAD54L (NM_003579.2,2007-2025).
ccatcacctcgctaaagaa

SEQ ID NO: 37466 - DNA, 19 bp, Homo sapiens
  siRNA target sequence for RAD54L (NM_003579.2,2016-2034).
cgctaaagaagctttgtaa

SEQ ID NO: 37467 - DNA, 19 bp, Homo sapiens
  siRNA target sequence for RAD54L (NM_003579.2,2031-2049).
gtaatcatccagctctaat

SEQ ID NO: 37468 - DNA, 19 bp, Homo sapiens
  siRNA target sequence for RAD54L (NM_003579.2,2040-2058).
cagctctaatctatgataa

SEQ ID NO: 37469 - DNA, 19 bp, Homo sapiens
  siRNA target sequence for RAD54L (NM_003579.2,2042-2060).
gctctaatctatgataagt

SEQ ID NO: 37470 - DNA, 19 bp, Homo sapiens
  siRNA target sequence for RAD54L (NM_003579.2,2190-2208).
gccgtagcagtgacaaagt

SEQ ID NO: 37471 - DNA, 19 bp, Homo sapiens
  siRNA target sequence for RAD54L (NM_003579.2,2210-2228).
gtgctggtgtcgaattaca

SEQ ID NO: 37472 - DNA, 19 bp, Homo sapiens
  siRNA target sequence for RAD54L (NM_003579.2,2220-2238).
cgaattacacccagacttt

SEQ ID NO: 37473 - DNA, 19 bp, Homo sapiens
  siRNA target sequence for RAD54L (NM_003579.2,2260-2278).
ccgtgcccgaaggtactta

SEQ ID NO: 37474 - DNA, 19 bp, Homo sapiens
  siRNA target sequence for RAD54L (NM_003579.2,2261-2279).
cgtgcccgaaggtacttat

SEQ ID NO: 37475 - DNA, 19 bp, Homo sapiens
  siRNA target sequence for RAD54L (NM_003579.2,2262-2280).
gtgcccgaaggtacttata

SEQ ID NO: 37476 - DNA, 19 bp, Homo sapiens
  siRNA target sequence for RAD54L (NM_003579.2,2265-2283).
cccgaaggtacttatacgt

SEQ ID NO: 37477 - DNA, 19 bp, Homo sapiens
  siRNA target sequence for RAD54L (NM_003579.2,2295-2313).
gcacgatgtccattaagaa

SEQ ID NO: 37478 - DNA, 19 bp, Homo sapiens
  siRNA target sequence for RAD54L (NM_003579.2,2314-2332).
gcgagccaaggttgtagaa

SEQ ID NO: 37479 - DNA, 19 bp, Homo sapiens
  siRNA target sequence for RAD54L (NM_003579.2,2323-2341).
ggttgtagaacgcttcaat

SEQ ID NO: 37480 - DNA, 19 bp, Homo sapiens
  siRNA target sequence for RAD54L (NM_003579.2,2346-2364).
catcgagccctgactttgt

SEQ ID NO: 37481 - DNA, 19 bp, Homo sapiens
  siRNA target sequence for RAD54L (NM_003579.2,2388-2406).
ggggctgtggcctcaatct

SEQ ID NO: 37482 - DNA, 19 bp, Homo sapiens
  siRNA target sequence for RAD54L (NM_003579.2,2390-2408).
ggctgtggcctcaatctca

SEQ ID NO: 37483 - DNA, 19 bp, Homo sapiens
  siRNA target sequence for RAD54L (NM_003579.2,2415-2433).
ctaaccggctggtcatgtt

SEQ ID NO: 37484 - DNA, 19 bp, Homo sapiens
  siRNA target sequence for RAD54L (NM_003579.2,2778-2796).
ggaaccactgcactgataa

SEQ ID NO: 37485 - DNA, 19 bp, Homo sapiens
  siRNA target sequence for RAG1 (NM_000448.1,159-177).
gttctgccccagatgaaat

SEQ ID NO: 37486 - DNA, 19 bp, Homo sapiens
  siRNA target sequence for RAG1 (NM_000448.1,220-238).
gttccgggtgagatccttt

SEQ ID NO: 37487 - DNA, 19 bp, Homo sapiens
  siRNA target sequence for RAG1 (NM_000448.1,223-241).
ccgggtgagatcctttgaa

SEQ ID NO: 37488 - DNA, 19 bp, Homo sapiens
  siRNA target sequence for RAG1 (NM_000448.1,224-242).
cgggtgagatcctttgaaa

SEQ ID NO: 37489 - DNA, 19 bp, Homo sapiens
  siRNA target sequence for RAG1 (NM_000448.1,349-367).
cccaactcagccattgtta

SEQ ID NO: 37490 - DNA, 19 bp, Homo sapiens
  siRNA target sequence for RAG1 (NM_000448.1,350-368).
ccaactcagccattgttaa

SEQ ID NO: 37491 - DNA, 19 bp, Homo sapiens
  siRNA target sequence for RAG1 (NM_000448.1,351-369).
caactcagccattgttaaa

SEQ ID NO: 37492 - DNA, 19 bp, Homo sapiens
  siRNA target sequence for RAG1 (NM_000448.1,398-416).
cacgacaacgagaaagcaa

SEQ ID NO: 37493 - DNA, 19 bp, Homo sapiens
  siRNA target sequence for RAG1 (NM_000448.1,458-476).
cgcatctgtgggaattctt

SEQ ID NO: 37494 - DNA, 19 bp, Homo sapiens
  siRNA target sequence for RAG1 (NM_000448.1,490-508).
gcacaacaggagatatcca

SEQ ID NO: 37495 - DNA, 19 bp, Homo sapiens
  siRNA target sequence for RAG1 (NM_000448.1,515-533).
ggtcctgtggatggtaaaa

SEQ ID NO: 37496 - DNA, 19 bp, Homo sapiens
  siRNA target sequence for RAG1 (NM_000448.1,534-552).
ccctaggccttttacgaaa

SEQ ID NO: 37497 - DNA, 19 bp, Homo sapiens
  siRNA target sequence for RAG1 (NM_000448.1,690-708).
gtgccccatgtgaggttta

SEQ ID NO: 37498 - DNA, 19 bp, Homo sapiens
  siRNA target sequence for RAG1 (NM_000448.1,693-711).
ccccatgtgaggtttactt

SEQ ID NO: 37499 - DNA, 19 bp, Homo sapiens
  siRNA target sequence for RAG1 (NM_000448.1,897-915).
gcagcaaggatgtcatgaa

SEQ ID NO: 37500 - DNA, 19 bp, Homo sapiens
  siRNA target sequence for RAG1 (NM_000448.1,922-940).
cgccaactgcagtaagata

SEQ ID NO: 37501 - DNA, 19 bp, Homo sapiens
  siRNA target sequence for RAG1 (NM_000448.1,924-942).
ccaactgcagtaagataca

SEQ ID NO: 37502 - DNA, 19 bp, Homo sapiens
  siRNA target sequence for RAG1 (NM_000448.1,925-943).
caactgcagtaagatacat

SEQ ID NO: 37503 - DNA, 19 bp, Homo sapiens
  siRNA target sequence for RAG1 (NM_000448.1,931-949).
cagtaagatacatcttagt

SEQ ID NO: 37504 - DNA, 19 bp, Homo sapiens
  siRNA target sequence for RAG1 (NM_000448.1,973-991).
cccagagcactttgtgaaa

SEQ ID NO: 37505 - DNA, 19 bp, Homo sapiens
  siRNA target sequence for RAG1 (NM_000448.1,1032-1050).
ctgtggagaccaactgtaa

SEQ ID NO: 37506 - DNA, 19 bp, Homo sapiens
  siRNA target sequence for RAG1 (NM_000448.1,1036-1054).
ggagaccaactgtaagcat

SEQ ID NO: 37507 - DNA, 19 bp, Homo sapiens
  siRNA target sequence for RAG1 (NM_000448.1,1109-1127).
ccctcttgccgatatccat

SEQ ID NO: 37508 - DNA, 19 bp, Homo sapiens
  siRNA target sequence for RAG1 (NM_000448.1,1151-1169).
ccagtgaagtcctttctga

SEQ ID NO: 37509 - DNA, 19 bp, Homo sapiens
  siRNA target sequence for RAG1 (NM_000448.1,1161-1179).
cctttctgagcgtcttgaa

SEQ ID NO: 37510 - DNA, 19 bp, Homo sapiens
  siRNA target sequence for RAG1 (NM_000448.1,1189-1207).
ggtgaaatgtccagcaaaa

SEQ ID NO: 37511 - DNA, 19 bp, Homo sapiens
  siRNA target sequence for RAG1 (NM_000448.1,1212-1230).
gcaatgaggaggtcagttt

SEQ ID NO: 37512 - DNA, 19 bp, Homo sapiens
  siRNA target sequence for RAG1 (NM_000448.1,1566-1584).
gcagtcagtaccacaagat

SEQ ID NO: 37513 - DNA, 19 bp, Homo sapiens
  siRNA target sequence for RAG1 (NM_000448.1,1670-1688).
ggctaccaccactttgagt

SEQ ID NO: 37514 - DNA, 19 bp, Homo sapiens
  siRNA target sequence for RAG1 (NM_000448.1,1758-1776).
catcctctgtggatgatta

SEQ ID NO: 37515 - DNA, 19 bp, Homo sapiens
  siRNA target sequence for RAG1 (NM_000448.1,1798-1816).
gaggttccgctatgattca

SEQ ID NO: 37516 - DNA, 19 bp, Homo sapiens
  siRNA target sequence for RAG1 (NM_000448.1,1869-1887).
gatcccaagaccttgatga

SEQ ID NO: 37517 - DNA, 19 bp, Homo sapiens
  siRNA target sequence for RAG1 (NM_000448.1,1872-1890).
cccaagaccttgatgatta

SEQ ID NO: 37518 - DNA, 19 bp, Homo sapiens
  siRNA target sequence for RAG1 (NM_000448.1,1982-2000).
gaaaaggcagtccgttttt

SEQ ID NO: 37519 - DNA, 19 bp, Homo sapiens
  siRNA target sequence for RAG1 (NM_000448.1,1988-2006).
gcagtccgtttttcattca

SEQ ID NO: 37520 - DNA, 19 bp, Homo sapiens
  siRNA target sequence for RAG1 (NM_000448.1,1994-2012).
cgtttttcattcacaatca

SEQ ID NO: 37521 - DNA, 19 bp, Homo sapiens
  siRNA target sequence for RAG1 (NM_000448.1,2001-2019).
cattcacaatcatgaaaat

SEQ ID NO: 37522 - DNA, 19 bp, Homo sapiens
  siRNA target sequence for RAG1 (NM_000448.1,2005-2023).
cacaatcatgaaaattact

SEQ ID NO: 37523 - DNA, 19 bp, Homo sapiens
  siRNA target sequence for RAG1 (NM_000448.1,2028-2046).
cccacagctctcagaatgt

SEQ ID NO: 37524 - DNA, 19 bp, Homo sapiens
  siRNA target sequence for RAG1 (NM_000448.1,2210-2228).
ggcattctccggactttca

SEQ ID NO: 37525 - DNA, 19 bp, Homo sapiens
  siRNA target sequence for RAG1 (NM_000448.1,2211-2229).
gcattctccggactttcaa

SEQ ID NO: 37526 - DNA, 19 bp, Homo sapiens
  siRNA target sequence for RAG1 (NM_000448.1,2219-2237).
cggactttcaagttcatct

SEQ ID NO: 37527 - DNA, 19 bp, Homo sapiens
  siRNA target sequence for RAG1 (NM_000448.1,2242-2260).
gggcaccggctatgatgaa

SEQ ID NO: 37528 - DNA, 19 bp, Homo sapiens
  siRNA target sequence for RAG1 (NM_000448.1,2244-2262).
gcaccggctatgatgaaaa

SEQ ID NO: 37529 - DNA, 19 bp, Homo sapiens
  siRNA target sequence for RAG1 (NM_000448.1,2245-2263).
caccggctatgatgaaaaa

SEQ ID NO: 37530 - DNA, 19 bp, Homo sapiens
  siRNA target sequence for RAG1 (NM_000448.1,2247-2265).
ccggctatgatgaaaaact

SEQ ID NO: 37531 - DNA, 19 bp, Homo sapiens
  siRNA target sequence for RAG1 (NM_000448.1,2297-2315).
ggctcagtctacatttgta

SEQ ID NO: 37532 - DNA, 19 bp, Homo sapiens
  siRNA target sequence for RAG1 (NM_000448.1,2305-2323).
ctacatttgtactctttgt

SEQ ID NO: 37533 - DNA, 19 bp, Homo sapiens
  siRNA target sequence for RAG1 (NM_000448.1,2334-2352).
gtctggaagcctctcaaaa

SEQ ID NO: 37534 - DNA, 19 bp, Homo sapiens
  siRNA target sequence for RAG1 (NM_000448.1,2413-2431).
gcgttccaacccttaccat

SEQ ID NO: 37535 - DNA, 19 bp, Homo sapiens
  siRNA target sequence for RAG1 (NM_000448.1,2461-2479).
gaaaggggtctcagctaaa

SEQ ID NO: 37536 - DNA, 19 bp, Homo sapiens
  siRNA target sequence for RAG1 (NM_000448.1,2465-2483).
ggggtctcagctaaacctt

SEQ ID NO: 37537 - DNA, 19 bp, Homo sapiens
  siRNA target sequence for RAG1 (NM_000448.1,2466-2484).
gggtctcagctaaaccttt

SEQ ID NO: 37538 - DNA, 19 bp, Homo sapiens
  siRNA target sequence for RAG1 (NM_000448.1,2470-2488).
ctcagctaaacctttcatt

SEQ ID NO: 37539 - DNA, 19 bp, Homo sapiens
  siRNA target sequence for RAG1 (NM_000448.1,2474-2492).
gctaaacctttcattgaga

SEQ ID NO: 37540 - DNA, 19 bp, Homo sapiens
  siRNA target sequence for RAG1 (NM_000448.1,2529-2547).
gcaatgcagctgagttcta

SEQ ID NO: 37541 - DNA, 19 bp, Homo sapiens
  siRNA target sequence for RAG1 (NM_000448.1,2534-2552).
gcagctgagttctacaaga

SEQ ID NO: 37542 - DNA, 19 bp, Homo sapiens
  siRNA target sequence for RAG1 (NM_000448.1,2538-2556).
ctgagttctacaagatctt

SEQ ID NO: 37543 - DNA, 19 bp, Homo sapiens
  siRNA target sequence for RAG1 (NM_000448.1,2729-2747).
gtttgtgagttaattcctt

SEQ ID NO: 37544 - DNA, 19 bp, Homo sapiens
  siRNA target sequence for RAG1 (NM_000448.1,2804-2822).
ccagtatggcgatcatcat

SEQ ID NO: 37545 - DNA, 19 bp, Homo sapiens
  siRNA target sequence for RAG1 (NM_000448.1,2854-2872).
ccagtacagtttcaattca

SEQ ID NO: 37546 - DNA, 19 bp, Homo sapiens
  siRNA target sequence for RAG1 (NM_000448.1,2891-2909).
ctttctacgaagttcaagt

SEQ ID NO: 37547 - DNA, 19 bp, Homo sapiens
  siRNA target sequence for RAG1 (NM_000448.1,2898-2916).
cgaagttcaagtataggta

SEQ ID NO: 37548 - DNA, 19 bp, Homo sapiens
  siRNA target sequence for RAG1 (NM_000448.1,2899-2917).
gaagttcaagtataggtat

SEQ ID NO: 37549 - DNA, 19 bp, Homo sapiens
  siRNA target sequence for RAG1 (NM_000448.1,2953-2971).
ggcccatgttcctgaaatt

SEQ ID NO: 37550 - DNA, 19 bp, Homo sapiens
  siRNA target sequence for RAG1 (NM_000448.1,2955-2973).
cccatgttcctgaaattat

SEQ ID NO: 37551 - DNA, 19 bp, Homo sapiens
  siRNA target sequence for RAG1 (NM_000448.1,3012-3030).
gaaatgagtctggtaacaa

SEQ ID NO: 37552 - DNA, 19 bp, Homo sapiens
  siRNA target sequence for RAG1 (NM_000448.1,3060-3078).
ccaggcagtccaaatgcta

SEQ ID NO: 37553 - DNA, 19 bp, Homo sapiens
  siRNA target sequence for RAG1 (NM_000448.1,3061-3079).
caggcagtccaaatgctat

SEQ ID NO: 37554 - DNA, 19 bp, Homo sapiens
  siRNA target sequence for RAG1 (NM_000448.1,3108-3126).
ggttgtacacctccaaata

SEQ ID NO: 37555 - DNA, 19 bp, Homo sapiens
  siRNA target sequence for RAG2 (NM_000536.1,174-192).
gatggtaacagtcagtaat

SEQ ID NO: 37556 - DNA, 19 bp, Homo sapiens
  siRNA target sequence for RAG2 (NM_000536.1,188-206).
gtaataacatagccttaat

SEQ ID NO: 37557 - DNA, 19 bp, Homo sapiens
  siRNA target sequence for RAG2 (NM_000536.1,214-232).
ggcttctcactgatgaatt

SEQ ID NO: 37558 - DNA, 19 bp, Homo sapiens
  siRNA target sequence for RAG2 (NM_000536.1,235-253).
gatggacaagttttcttct

SEQ ID NO: 37559 - DNA, 19 bp, Homo sapiens
  siRNA target sequence for RAG2 (NM_000536.1,284-302).
gccccactggagttttcca

SEQ ID NO: 37560 - DNA, 19 bp, Homo sapiens
  siRNA target sequence for RAG2 (NM_000536.1,301-319).
catctggatgtaaagcata

SEQ ID NO: 37561 - DNA, 19 bp, Homo sapiens
  siRNA target sequence for RAG2 (NM_000536.1,316-334).
cataaccatgtcaaactga

SEQ ID NO: 37562 - DNA, 19 bp, Homo sapiens
  siRNA target sequence for RAG2 (NM_000536.1,331-349).
ctgaagcctacaattttct

SEQ ID NO: 37563 - DNA, 19 bp, Homo sapiens
  siRNA target sequence for RAG2 (NM_000536.1,386-404).
cagccacttgcacattcaa

SEQ ID NO: 37564 - DNA, 19 bp, Homo sapiens
  siRNA target sequence for RAG2 (NM_000536.1,458-476).
caaacaatgaggtttcaga

SEQ ID NO: 37565 - DNA, 19 bp, Homo sapiens
  siRNA target sequence for RAG2 (NM_000536.1,730-748).
gggtgtgctacatcataca

SEQ ID NO: 37566 - DNA, 19 bp, Homo sapiens
  siRNA target sequence for RAG2 (NM_000536.1,731-749).
ggtgtgctacatcatacat

SEQ ID NO: 37567 - DNA, 19 bp, Homo sapiens
  siRNA target sequence for RAG2 (NM_000536.1,804-822).
caccatctatattttagga

SEQ ID NO: 37568 - DNA, 19 bp, Homo sapiens
  siRNA target sequence for RAG2 (NM_000536.1,824-842).
gacattcacttgccaataa

SEQ ID NO: 37569 - DNA, 19 bp, Homo sapiens
  siRNA target sequence for RAG2 (NM_000536.1,826-844).
cattcacttgccaataata

SEQ ID NO: 37570 - DNA, 19 bp, Homo sapiens
  siRNA target sequence for RAG2 (NM_000536.1,853-871).
gccaacctgtacagaataa

SEQ ID NO: 37571 - DNA, 19 bp, Homo sapiens
  siRNA target sequence for RAG2 (NM_000536.1,888-906).
gggtagcccagctgtgaat

SEQ ID NO: 37572 - DNA, 19 bp, Homo sapiens
  siRNA target sequence for RAG2 (NM_000536.1,943-961).
gcaatcctgactcaaacta

SEQ ID NO: 37573 - DNA, 19 bp, Homo sapiens
  siRNA target sequence for RAG2 (NM_000536.1,948-966).
cctgactcaaactaacaat

SEQ ID NO: 37574 - DNA, 19 bp, Homo sapiens
  siRNA target sequence for RAG2 (NM_000536.1,985-1003).
ggtggctatcagcttgaaa

SEQ ID NO: 37575 - DNA, 19 bp, Homo sapiens
  siRNA target sequence for RAG2 (NM_000536.1,989-1007).
gctatcagcttgaaaatca

SEQ ID NO: 37576 - DNA, 19 bp, Homo sapiens
  siRNA target sequence for RAG2 (NM_000536.1,1020-1038).
ctgcaacatcatctcttta

SEQ ID NO: 37577 - DNA, 19 bp, Homo sapiens
  siRNA target sequence for RAG2 (NM_000536.1,1034-1052).
ctttagaggacaacaagat

SEQ ID NO: 37578 - DNA, 19 bp, Homo sapiens
  siRNA target sequence for RAG2 (NM_000536.1,1044-1062).
caacaagatagaaattcgt

SEQ ID NO: 37579 - DNA, 19 bp, Homo sapiens
  siRNA target sequence for RAG2 (NM_000536.1,1078-1096).
gattggaccccagacatta

SEQ ID NO: 37580 - DNA, 19 bp, Homo sapiens
  siRNA target sequence for RAG2 (NM_000536.1,1186-1204).
ggattctatttctatatgt

SEQ ID NO: 37581 - DNA, 19 bp, Homo sapiens
  siRNA target sequence for RAG2 (NM_000536.1,1234-1252).
gagcagacaacattcacaa

SEQ ID NO: 37582 - DNA, 19 bp, Homo sapiens
  siRNA target sequence for RAG2 (NM_000536.1,1239-1257).
gacaacattcacaaacagt

SEQ ID NO: 37583 - DNA, 19 bp, Homo sapiens
  siRNA target sequence for RAG2 (NM_000536.1,1362-1380).
cacctataatgaagatgat

SEQ ID NO: 37584 - DNA, 19 bp, Homo sapiens
  siRNA target sequence for RAG2 (NM_000536.1,1396-1414).
gagacaggctactggatta

SEQ ID NO: 37585 - DNA, 19 bp, Homo sapiens
  siRNA target sequence for RAG2 (NM_000536.1,1398-1416).
gacaggctactggattaca

SEQ ID NO: 37586 - DNA, 19 bp, Homo sapiens
  siRNA target sequence for RAG2 (NM_000536.1,1424-1442).
ctacttgtgatgtggatat

SEQ ID NO: 37587 - DNA, 19 bp, Homo sapiens
  siRNA target sequence for RAG2 (NM_000536.1,1427-1445).
cttgtgatgtggatatcaa

SEQ ID NO: 37588 - DNA, 19 bp, Homo sapiens
  siRNA target sequence for RAG2 (NM_000536.1,1446-1464).
cacttgggtaccattctat

SEQ ID NO: 37589 - DNA, 19 bp, Homo sapiens
  siRNA target sequence for RAG2 (NM_000536.1,1452-1470).
ggtaccattctattcaact

SEQ ID NO: 37590 - DNA, 19 bp, Homo sapiens
  siRNA target sequence for RAG2 (NM_000536.1,1574-1592).
caggaagcaacaagtatta

SEQ ID NO: 37591 - DNA, 19 bp, Homo sapiens
  siRNA target sequence for RAG2 (NM_000536.1,1701-1719).
cttgactcctgccaagaaa

SEQ ID NO: 37592 - DNA, 19 bp, Homo sapiens
  siRNA target sequence for RAG2 (NM_000536.1,1713-1731).
caagaaatcctttcttaga

SEQ ID NO: 37593 - DNA, 19 bp, Homo sapiens
  siRNA target sequence for RAI1 (NM_030665.3,526-544).
gacctcgcaggaaacatca

SEQ ID NO: 37594 - DNA, 19 bp, Homo sapiens
  siRNA target sequence for RAI1 (NM_030665.3,540-558).
catcacgcctagagaatta

SEQ ID NO: 37595 - DNA, 19 bp, Homo sapiens
  siRNA target sequence for RAI1 (NM_030665.3,602-620).
ctgctcgccaaggactatt

SEQ ID NO: 37596 - DNA, 19 bp, Homo sapiens
  siRNA target sequence for RAI1 (NM_030665.3,604-622).
gctcgccaaggactattat

SEQ ID NO: 37597 - DNA, 19 bp, Homo sapiens
  siRNA target sequence for RAI1 (NM_030665.3,876-894).
caggggtggccaagtatga

SEQ ID NO: 37598 - DNA, 19 bp, Homo sapiens
  siRNA target sequence for RAI1 (NM_030665.3,1166-1184).
gcccactcctataagagtt

SEQ ID NO: 37599 - DNA, 19 bp, Homo sapiens
  siRNA target sequence for RAI1 (NM_030665.3,1248-1266).
ggcagcgggtccagaatct

SEQ ID NO: 37600 - DNA, 19 bp, Homo sapiens
  siRNA target sequence for RAI1 (NM_030665.3,1249-1267).
gcagcgggtccagaatctt

SEQ ID NO: 37601 - DNA, 19 bp, Homo sapiens
  siRNA target sequence for RAI1 (NM_030665.3,1252-1270).
gcgggtccagaatcttcat

SEQ ID NO: 37602 - DNA, 19 bp, Homo sapiens
  siRNA target sequence for RAI1 (NM_030665.3,1374-1392).
ccctccattaccaaaacct

SEQ ID NO: 37603 - DNA, 19 bp, Homo sapiens
  siRNA target sequence for RAI1 (NM_030665.3,1384-1402).
ccaaaacctcgccaagtat

SEQ ID NO: 37604 - DNA, 19 bp, Homo sapiens
  siRNA target sequence for RAI1 (NM_030665.3,1523-1541).
cgctcaccttcctacagtt

SEQ ID NO: 37605 - DNA, 19 bp, Homo sapiens
  siRNA target sequence for RAI1 (NM_030665.3,1629-1647).
ctgaccacagccacttcat

SEQ ID NO: 37606 - DNA, 19 bp, Homo sapiens
  siRNA target sequence for RAI1 (NM_030665.3,1881-1899).
ggaccccagagcagcataa

SEQ ID NO: 37607 - DNA, 19 bp, Homo sapiens
  siRNA target sequence for RAI1 (NM_030665.3,2153-2171).
gacgacatgtccaccaaat

SEQ ID NO: 37608 - DNA, 19 bp, Homo sapiens
  siRNA target sequence for RAI1 (NM_030665.3,2155-2173).
cgacatgtccaccaaatct

SEQ ID NO: 37609 - DNA, 19 bp, Homo sapiens
  siRNA target sequence for RAI1 (NM_030665.3,2327-2345).
gagaaggccgacaaagctt

SEQ ID NO: 37610 - DNA, 19 bp, Homo sapiens
  siRNA target sequence for RAI1 (NM_030665.3,2553-2571).
ctacgcctgaccccaaaaa

SEQ ID NO: 37611 - DNA, 19 bp, Homo sapiens
  siRNA target sequence for RAI1 (NM_030665.3,2631-2649).
ccactacagcagcttttga

SEQ ID NO: 37612 - DNA, 19 bp, Homo sapiens
  siRNA target sequence for RAI1 (NM_030665.3,3261-3279).
cagtgggcaccgagtcaaa

SEQ ID NO: 37613 - DNA, 19 bp, Homo sapiens
  siRNA target sequence for RAI1 (NM_030665.3,3300-3318).
cctctctgtcacacatgaa

SEQ ID NO: 37614 - DNA, 19 bp, Homo sapiens
  siRNA target sequence for RAI1 (NM_030665.3,3443-3461).
gtgccacggggcaaaagct

SEQ ID NO: 37615 - DNA, 19 bp, Homo sapiens
  siRNA target sequence for RAI1 (NM_030665.3,3445-3463).
gccacggggcaaaagctta

SEQ ID NO: 37616 - DNA, 19 bp, Homo sapiens
  siRNA target sequence for RAI1 (NM_030665.3,3620-3638).
gggctccccaggatgtgta

SEQ ID NO: 37617 - DNA, 19 bp, Homo sapiens
  siRNA target sequence for RAI1 (NM_030665.3,3731-3749).
cagcgagccgccttcaagt

SEQ ID NO: 37618 - DNA, 19 bp, Homo sapiens
  siRNA target sequence for RAI1 (NM_030665.3,3905-3923).
cttcggtcacgcaccaaaa

SEQ ID NO: 37619 - DNA, 19 bp, Homo sapiens
  siRNA target sequence for RAI1 (NM_030665.3,4121-4139).
cccctccatgcgctcaaaa

SEQ ID NO: 37620 - DNA, 19 bp, Homo sapiens
  siRNA target sequence for RAI1 (NM_030665.3,4689-4707).
ccttaaaaggcaaactcat

SEQ ID NO: 37621 - DNA, 19 bp, Homo sapiens
  siRNA target sequence for RAI1 (NM_030665.3,4698-4716).
gcaaactcatgaacagtaa

SEQ ID NO: 37622 - DNA, 19 bp, Homo sapiens
  siRNA target sequence for RAI1 (NM_030665.3,4790-4808).
gccctggcgcctaagaaga

SEQ ID NO: 37623 - DNA, 19 bp, Homo sapiens
  siRNA target sequence for RAI1 (NM_030665.3,5187-5205).
ctgaaatccgcctcaagta

SEQ ID NO: 37624 - DNA, 19 bp, Homo sapiens
  siRNA target sequence for RAI1 (NM_030665.3,5195-5213).
cgcctcaagtacatttcct

SEQ ID NO: 37625 - DNA, 19 bp, Homo sapiens
  siRNA target sequence for RAI1 (NM_030665.3,5282-5300).
gacgcgttcaccaccatat

SEQ ID NO: 37626 - DNA, 19 bp, Homo sapiens
  siRNA target sequence for RAI1 (NM_030665.3,5866-5884).
cgacaagggtcgcaaacat

SEQ ID NO: 37627 - DNA, 19 bp, Homo sapiens
  siRNA target sequence for RAI1 (NM_030665.3,6020-6038).
gtggccgtggacatgatgt

SEQ ID NO: 37628 - DNA, 19 bp, Homo sapiens
  siRNA target sequence for RAI1 (NM_030665.3,6023-6041).
gccgtggacatgatgtgtt

SEQ ID NO: 37629 - DNA, 19 bp, Homo sapiens
  siRNA target sequence for RAI1 (NM_030665.3,6071-6089).
gggtgctgccacaaaggat

SEQ ID NO: 37630 - DNA, 19 bp, Homo sapiens
  siRNA target sequence for RAI1 (NM_030665.3,6118-6136).
cagcgatgcaggttgcata

SEQ ID NO: 37631 - DNA, 19 bp, Homo sapiens
  siRNA target sequence for RAI1 (NM_030665.3,6120-6138).
gcgatgcaggttgcatatt

SEQ ID NO: 37632 - DNA, 19 bp, Homo sapiens
  siRNA target sequence for RAI1 (NM_030665.3,6132-6150).
gcatattcatcgaagagaa

SEQ ID NO: 37633 - DNA, 19 bp, Homo sapiens
  siRNA target sequence for RAI1 (NM_030665.3,6139-6157).
catcgaagagaacttttct

SEQ ID NO: 37634 - DNA, 19 bp, Homo sapiens
  siRNA target sequence for RBL2 (NM_005611.2,300-318).
cacgctggagggaaatgat

SEQ ID NO: 37635 - DNA, 19 bp, Homo sapiens
  siRNA target sequence for RBL2 (NM_005611.2,302-320).
cgctggagggaaatgatct

SEQ ID NO: 37636 - DNA, 19 bp, Homo sapiens
  siRNA target sequence for RBL2 (NM_005611.2,316-334).
gatcttcattggttagcat

SEQ ID NO: 37637 - DNA, 19 bp, Homo sapiens
  siRNA target sequence for RBL2 (NM_005611.2,326-344).
ggttagcatgtgccttata

SEQ ID NO: 37638 - DNA, 19 bp, Homo sapiens
  siRNA target sequence for RBL2 (NM_005611.2,327-345).
gttagcatgtgccttatat

SEQ ID NO: 37639 - DNA, 19 bp, Homo sapiens
  siRNA target sequence for RBL2 (NM_005611.2,390-408).
ggaaggaaactatgtatct

SEQ ID NO: 37640 - DNA, 19 bp, Homo sapiens
  siRNA target sequence for RBL2 (NM_005611.2,399-417).
ctatgtatctttaactaga

SEQ ID NO: 37641 - DNA, 19 bp, Homo sapiens
  siRNA target sequence for RBL2 (NM_005611.2,431-449).
cagagcagagcttaatcga

SEQ ID NO: 37642 - DNA, 19 bp, Homo sapiens
  siRNA target sequence for RBL2 (NM_005611.2,433-451).
gagcagagcttaatcgaat

SEQ ID NO: 37643 - DNA, 19 bp, Homo sapiens
  siRNA target sequence for RBL2 (NM_005611.2,435-453).
gcagagcttaatcgaattt

SEQ ID NO: 37644 - DNA, 19 bp, Homo sapiens
  siRNA target sequence for RBL2 (NM_005611.2,438-456).
gagcttaatcgaatttttt

SEQ ID NO: 37645 - DNA, 19 bp, Homo sapiens
  siRNA target sequence for RBL2 (NM_005611.2,441-459).
cttaatcgaattttttaat

SEQ ID NO: 37646 - DNA, 19 bp, Homo sapiens
  siRNA target sequence for RBL2 (NM_005611.2,511-529).
cgtactgagagattagaaa

SEQ ID NO: 37647 - DNA, 19 bp, Homo sapiens
  siRNA target sequence for RBL2 (NM_005611.2,651-669).
ctgtactgtgtctgaaatt

SEQ ID NO: 37648 - DNA, 19 bp, Homo sapiens
  siRNA target sequence for RBL2 (NM_005611.2,714-732).
ccccatgattagtgatgat

SEQ ID NO: 37649 - DNA, 19 bp, Homo sapiens
  siRNA target sequence for RBL2 (NM_005611.2,716-734).
ccatgattagtgatgattt

SEQ ID NO: 37650 - DNA, 19 bp, Homo sapiens
  siRNA target sequence for RBL2 (NM_005611.2,761-779).
gtgctttggacttagttta

SEQ ID NO: 37651 - DNA, 19 bp, Homo sapiens
  siRNA target sequence for RBL2 (NM_005611.2,795-813).
gtgttctaatcgtaaagaa

SEQ ID NO: 37652 - DNA, 19 bp, Homo sapiens
  siRNA target sequence for RBL2 (NM_005611.2,797-815).
gttctaatcgtaaagaact

SEQ ID NO: 37653 - DNA, 19 bp, Homo sapiens
  siRNA target sequence for RBL2 (NM_005611.2,811-829).
gaacttgtgaaccctaatt

SEQ ID NO: 37654 - DNA, 19 bp, Homo sapiens
  siRNA target sequence for RBL2 (NM_005611.2,814-832).
cttgtgaaccctaatttta

SEQ ID NO: 37655 - DNA, 19 bp, Homo sapiens
  siRNA target sequence for RBL2 (NM_005611.2,856-874).
gctaaagattctaaacctt

SEQ ID NO: 37656 - DNA, 19 bp, Homo sapiens
  siRNA target sequence for RBL2 (NM_005611.2,878-896).
ctgaccccccttgtatcat

SEQ ID NO: 37657 - DNA, 19 bp, Homo sapiens
  siRNA target sequence for RBL2 (NM_005611.2,883-901).
cccccttgtatcattgaga

SEQ ID NO: 37658 - DNA, 19 bp, Homo sapiens
  siRNA target sequence for RBL2 (NM_005611.2,884-902).
ccccttgtatcattgagaa

SEQ ID NO: 37659 - DNA, 19 bp, Homo sapiens
  siRNA target sequence for RBL2 (NM_005611.2,885-903).
cccttgtatcattgagaaa

SEQ ID NO: 37660 - DNA, 19 bp, Homo sapiens
  siRNA target sequence for RBL2 (NM_005611.2,923-941).
gcctagttttggaagcaaa

SEQ ID NO: 37661 - DNA, 19 bp, Homo sapiens
  siRNA target sequence for RBL2 (NM_005611.2,962-980).
ggaaaccctatattaggaa

SEQ ID NO: 37662 - DNA, 19 bp, Homo sapiens
  siRNA target sequence for RBL2 (NM_005611.2,963-981).
gaaaccctatattaggaaa

SEQ ID NO: 37663 - DNA, 19 bp, Homo sapiens
  siRNA target sequence for RBL2 (NM_005611.2,967-985).
ccctatattaggaaacttt

SEQ ID NO: 37664 - DNA, 19 bp, Homo sapiens
  siRNA target sequence for RBL2 (NM_005611.2,1077-1095).
ggcctatgaggagtatgtt

SEQ ID NO: 37665 - DNA, 19 bp, Homo sapiens
  siRNA target sequence for RBL2 (NM_005611.2,1079-1097).
cctatgaggagtatgtttt

SEQ ID NO: 37666 - DNA, 19 bp, Homo sapiens
  siRNA target sequence for RBL2 (NM_005611.2,1080-1098).
ctatgaggagtatgtttta

SEQ ID NO: 37667 - DNA, 19 bp, Homo sapiens
  siRNA target sequence for RBL2 (NM_005611.2,1100-1118).
ctgttgggaatttagatga

SEQ ID NO: 37668 - DNA, 19 bp, Homo sapiens
  siRNA target sequence for RBL2 (NM_005611.2,1208-1226).
gggtgcagatgaaaaacat

SEQ ID NO: 37669 - DNA, 19 bp, Homo sapiens
  siRNA target sequence for RBL2 (NM_005611.2,1245-1263).
caagtccaaagcacttaga

SEQ ID NO: 37670 - DNA, 19 bp, Homo sapiens
  siRNA target sequence for RBL2 (NM_005611.2,1274-1292).
cactaactggtgttaggta

SEQ ID NO: 37671 - DNA, 19 bp, Homo sapiens
  siRNA target sequence for RBL2 (NM_005611.2,1280-1298).
ctggtgttaggtacattaa

SEQ ID NO: 37672 - DNA, 19 bp, Homo sapiens
  siRNA target sequence for RBL2 (NM_005611.2,1283-1301).
gtgttaggtacattaagga

SEQ ID NO: 37673 - DNA, 19 bp, Homo sapiens
  siRNA target sequence for RBL2 (NM_005611.2,1328-1346).
ctacagctacgcatagctt

SEQ ID NO: 37674 - DNA, 19 bp, Homo sapiens
  siRNA target sequence for RBL2 (NM_005611.2,1380-1398).
gaatgcaccaagtgagaaa

SEQ ID NO: 37675 - DNA, 19 bp, Homo sapiens
  siRNA target sequence for RBL2 (NM_005611.2,1432-1450).
ccaacccaggctattgcta

SEQ ID NO: 37676 - DNA, 19 bp, Homo sapiens
  siRNA target sequence for RBL2 (NM_005611.2,1492-1510).
cagccagacgaggatttca

SEQ ID NO: 37677 - DNA, 19 bp, Homo sapiens
  siRNA target sequence for RBL2 (NM_005611.2,1495-1513).
ccagacgaggatttcagta

SEQ ID NO: 37678 - DNA, 19 bp, Homo sapiens
  siRNA target sequence for RBL2 (NM_005611.2,1496-1514).
cagacgaggatttcagtaa

SEQ ID NO: 37679 - DNA, 19 bp, Homo sapiens
  siRNA target sequence for RBL2 (NM_005611.2,1498-1516).
gacgaggatttcagtaatt

SEQ ID NO: 37680 - DNA, 19 bp, Homo sapiens
  siRNA target sequence for RBL2 (NM_005611.2,1531-1549).
gccagcaaacattttcgtt

SEQ ID NO: 37681 - DNA, 19 bp, Homo sapiens
  siRNA target sequence for RBL2 (NM_005611.2,1532-1550).
ccagcaaacattttcgttt

SEQ ID NO: 37682 - DNA, 19 bp, Homo sapiens
  siRNA target sequence for RBL2 (NM_005611.2,1546-1564).
cgttttgcggagatgcttt

SEQ ID NO: 37683 - DNA, 19 bp, Homo sapiens
  siRNA target sequence for RBL2 (NM_005611.2,1552-1570).
gcggagatgctttactata

SEQ ID NO: 37684 - DNA, 19 bp, Homo sapiens
  siRNA target sequence for RBL2 (NM_005611.2,1553-1571).
cggagatgctttactataa

SEQ ID NO: 37685 - DNA, 19 bp, Homo sapiens
  siRNA target sequence for RBL2 (NM_005611.2,1585-1603).
gttattgagcaggaacaaa

SEQ ID NO: 37686 - DNA, 19 bp, Homo sapiens
  siRNA target sequence for RBL2 (NM_005611.2,1609-1627).
ctaggagacatggatttat

SEQ ID NO: 37687 - DNA, 19 bp, Homo sapiens
  siRNA target sequence for RBL2 (NM_005611.2,1628-1646).
ctggtattctggaacaaga

SEQ ID NO: 37688 - DNA, 19 bp, Homo sapiens
  siRNA target sequence for RBL2 (NM_005611.2,1676-1694).
gccttgaggtcgtcacttt

SEQ ID NO: 37689 - DNA, 19 bp, Homo sapiens
  siRNA target sequence for RBL2 (NM_005611.2,1677-1695).
ccttgaggtcgtcactttt

SEQ ID NO: 37690 - DNA, 19 bp, Homo sapiens
  siRNA target sequence for RBL2 (NM_005611.2,1678-1696).
cttgaggtcgtcacttttt

SEQ ID NO: 37691 - DNA, 19 bp, Homo sapiens
  siRNA target sequence for RBL2 (NM_005611.2,1683-1701).
ggtcgtcactttttcttat

SEQ ID NO: 37692 - DNA, 19 bp, Homo sapiens
  siRNA target sequence for RBL2 (NM_005611.2,1706-1724).
ctcctgggaattttccatt

SEQ ID NO: 37693 - DNA, 19 bp, Homo sapiens
  siRNA target sequence for RBL2 (NM_005611.2,1741-1759).
gatgtgcctctttatcatt

SEQ ID NO: 37694 - DNA, 19 bp, Homo sapiens
  siRNA target sequence for RBL2 (NM_005611.2,1767-1785).
ggtgatagaagtattcatt

SEQ ID NO: 37695 - DNA, 19 bp, Homo sapiens
  siRNA target sequence for RBL2 (NM_005611.2,1812-1830).
ggtggtaaaacaccttaat

SEQ ID NO: 37696 - DNA, 19 bp, Homo sapiens
  siRNA target sequence for RBL2 (NM_005611.2,1875-1893).
gtctccactctgggaaaaa

SEQ ID NO: 37697 - DNA, 19 bp, Homo sapiens
  siRNA target sequence for RBL2 (NM_005611.2,2035-2053).
cttggaaggagcataacat

SEQ ID NO: 37698 - DNA, 19 bp, Homo sapiens
  siRNA target sequence for RBL2 (NM_005611.2,2054-2072).
ctccaaccacattatacga

SEQ ID NO: 37699 - DNA, 19 bp, Homo sapiens
  siRNA target sequence for RBL2 (NM_005611.2,2056-2074).
ccaaccacattatacgata

SEQ ID NO: 37700 - DNA, 19 bp, Homo sapiens
  siRNA target sequence for RBL2 (NM_005611.2,2102-2120).
ccagaaggcggctatttgt

SEQ ID NO: 37701 - DNA, 19 bp, Homo sapiens
  siRNA target sequence for RBL2 (NM_005611.2,2112-2130).
gctatttgttgagaatgat

SEQ ID NO: 37702 - DNA, 19 bp, Homo sapiens
  siRNA target sequence for RBL2 (NM_005611.2,2188-2206).
gtccctgtgcagaatgtat

SEQ ID NO: 37703 - DNA, 19 bp, Homo sapiens
  siRNA target sequence for RBL2 (NM_005611.2,2203-2221).
gtatctggggagactgttt

SEQ ID NO: 37704 - DNA, 19 bp, Homo sapiens
  siRNA target sequence for RBL2 (NM_005611.2,2268-2286).
cactgtcacagccaacaat

SEQ ID NO: 37705 - DNA, 19 bp, Homo sapiens
  siRNA target sequence for RBL2 (NM_005611.2,2300-2318).
ccattcctgtgcaaggtat

SEQ ID NO: 37706 - DNA, 19 bp, Homo sapiens
  siRNA target sequence for RBL2 (NM_005611.2,2310-2328).
gcaaggtattgccaatgaa

SEQ ID NO: 37707 - DNA, 19 bp, Homo sapiens
  siRNA target sequence for RBL2 (NM_005611.2,2451-2469).
gacaggaacaactttgcaa

SEQ ID NO: 37708 - DNA, 19 bp, Homo sapiens
  siRNA target sequence for RBL2 (NM_005611.2,2477-2495).
gtcaagtggccattcaaca

SEQ ID NO: 37709 - DNA, 19 bp, Homo sapiens
  siRNA target sequence for RBL2 (NM_005611.2,2482-2500).
gtggccattcaacagattt

SEQ ID NO: 37710 - DNA, 19 bp, Homo sapiens
  siRNA target sequence for RBL2 (NM_005611.2,2534-2552).
ctgtaaccagcagtagtaa

SEQ ID NO: 37711 - DNA, 19 bp, Homo sapiens
  siRNA target sequence for RBL2 (NM_005611.2,2536-2554).
gtaaccagcagtagtaata

SEQ ID NO: 37712 - DNA, 19 bp, Homo sapiens
  siRNA target sequence for RBL2 (NM_005611.2,2625-2643).
ggatctctgtgccaaacta

SEQ ID NO: 37713 - DNA, 19 bp, Homo sapiens
  siRNA target sequence for RBL2 (NM_005611.2,2629-2647).
ctctgtgccaaactagata

SEQ ID NO: 37714 - DNA, 19 bp, Homo sapiens
  siRNA target sequence for RBL2 (NM_005611.2,2631-2649).
ctgtgccaaactagatatt

SEQ ID NO: 37715 - DNA, 19 bp, Homo sapiens
  siRNA target sequence for RBL2 (NM_005611.2,2636-2654).
ccaaactagatatttcaga

SEQ ID NO: 37716 - DNA, 19 bp, Homo sapiens
  siRNA target sequence for RBL2 (NM_005611.2,2728-2746).
catctggaccagttattaa

SEQ ID NO: 37717 - DNA, 19 bp, Homo sapiens
  siRNA target sequence for RBL2 (NM_005611.2,2733-2751).
ggaccagttattaatgtgt

SEQ ID NO: 37718 - DNA, 19 bp, Homo sapiens
  siRNA target sequence for RBL2 (NM_005611.2,2799-2817).
gaacattatgcgttgttat

SEQ ID NO: 37719 - DNA, 19 bp, Homo sapiens
  siRNA target sequence for RBL2 (NM_005611.2,2835-2853).
ccggagccaggtgtataga

SEQ ID NO: 37720 - DNA, 19 bp, Homo sapiens
  siRNA target sequence for RBL2 (NM_005611.2,2836-2854).
cggagccaggtgtatagaa

SEQ ID NO: 37721 - DNA, 19 bp, Homo sapiens
  siRNA target sequence for RBL2 (NM_005611.2,2838-2856).
gagccaggtgtatagaagt

SEQ ID NO: 37722 - DNA, 19 bp, Homo sapiens
  siRNA target sequence for RBL2 (NM_005611.2,2841-2859).
ccaggtgtatagaagtgtt

SEQ ID NO: 37723 - DNA, 19 bp, Homo sapiens
  siRNA target sequence for RBL2 (NM_005611.2,3079-3097).
gacctcattcagttctaca

SEQ ID NO: 37724 - DNA, 19 bp, Homo sapiens
  siRNA target sequence for RBL2 (NM_005611.2,3177-3195).
ctatccatttgtaagaaca

SEQ ID NO: 37725 - DNA, 19 bp, Homo sapiens
  siRNA target sequence for RBL2 (NM_005611.2,3197-3215).
gctcccctcgccgaataca

SEQ ID NO: 37726 - DNA, 19 bp, Homo sapiens
  siRNA target sequence for RBL2 (NM_005611.2,3200-3218).
cccctcgccgaatacagtt

SEQ ID NO: 37727 - DNA, 19 bp, Homo sapiens
  siRNA target sequence for RBL2 (NM_005611.2,3208-3226).
cgaatacagttgtctcaaa

SEQ ID NO: 37728 - DNA, 19 bp, Homo sapiens
  siRNA target sequence for RBL2 (NM_005611.2,3365-3383).
ctaaaaagagaggaattct

SEQ ID NO: 37729 - DNA, 19 bp, Homo sapiens
  siRNA target sequence for RBM5 (NM_005778.1,160-178).
caaaagagtgagtagaaca

SEQ ID NO: 37730 - DNA, 19 bp, Homo sapiens
  siRNA target sequence for RBM5 (NM_005778.1,177-195).
cagagcgtagtggaagata

SEQ ID NO: 37731 - DNA, 19 bp, Homo sapiens
  siRNA target sequence for RBM5 (NM_005778.1,192-210).
gatacggttccatcataga

SEQ ID NO: 37732 - DNA, 19 bp, Homo sapiens
  siRNA target sequence for RBM5 (NM_005778.1,246-264).
ggcggagggactcagatta

SEQ ID NO: 37733 - DNA, 19 bp, Homo sapiens
  siRNA target sequence for RBM5 (NM_005778.1,248-266).
cggagggactcagattaca

SEQ ID NO: 37734 - DNA, 19 bp, Homo sapiens
  siRNA target sequence for RBM5 (NM_005778.1,250-268).
gagggactcagattacaaa

SEQ ID NO: 37735 - DNA, 19 bp, Homo sapiens
  siRNA target sequence for RBM5 (NM_005778.1,254-272).
gactcagattacaaaagat

SEQ ID NO: 37736 - DNA, 19 bp, Homo sapiens
  siRNA target sequence for RBM5 (NM_005778.1,265-283).
caaaagatctagtgatgat

SEQ ID NO: 37737 - DNA, 19 bp, Homo sapiens
  siRNA target sequence for RBM5 (NM_005778.1,281-299).
gatcggaggggtgatagat

SEQ ID NO: 37738 - DNA, 19 bp, Homo sapiens
  siRNA target sequence for RBM5 (NM_005778.1,285-303).
ggaggggtgatagatatga

SEQ ID NO: 37739 - DNA, 19 bp, Homo sapiens
  siRNA target sequence for RBM5 (NM_005778.1,286-304).
gaggggtgatagatatgat

SEQ ID NO: 37740 - DNA, 19 bp, Homo sapiens
  siRNA target sequence for RBM5 (NM_005778.1,376-394).
ccattcagatggtgactat

SEQ ID NO: 37741 - DNA, 19 bp, Homo sapiens
  siRNA target sequence for RBM5 (NM_005778.1,483-501).
gcgatattcgagaaatgat

SEQ ID NO: 37742 - DNA, 19 bp, Homo sapiens
  siRNA target sequence for RBM5 (NM_005778.1,576-594).
ccttcgtggagttttatca

SEQ ID NO: 37743 - DNA, 19 bp, Homo sapiens
  siRNA target sequence for RBM5 (NM_005778.1,676-694).
caatcccagacctaagttt

SEQ ID NO: 37744 - DNA, 19 bp, Homo sapiens
  siRNA target sequence for RBM5 (NM_005778.1,681-699).
ccagacctaagtttgaaga

SEQ ID NO: 37745 - DNA, 19 bp, Homo sapiens
  siRNA target sequence for RBM5 (NM_005778.1,682-700).
cagacctaagtttgaagat

SEQ ID NO: 37746 - DNA, 19 bp, Homo sapiens
  siRNA target sequence for RBM5 (NM_005778.1,698-716).
gattggctttgtaacaagt

SEQ ID NO: 37747 - DNA, 19 bp, Homo sapiens
  siRNA target sequence for RBM5 (NM_005778.1,727-745).
caatttcaggaaaagacta

SEQ ID NO: 37748 - DNA, 19 bp, Homo sapiens
  siRNA target sequence for RBM5 (NM_005778.1,756-774).
gatgtggagcagacaagtt

SEQ ID NO: 37749 - DNA, 19 bp, Homo sapiens
  siRNA target sequence for RBM5 (NM_005778.1,813-831).
cggttcagtctgtggatta

SEQ ID NO: 37750 - DNA, 19 bp, Homo sapiens
  siRNA target sequence for RBM5 (NM_005778.1,824-842).
gtggattactactgtgata

SEQ ID NO: 37751 - DNA, 19 bp, Homo sapiens
  siRNA target sequence for RBM5 (NM_005778.1,832-850).
ctactgtgatacgatcatt

SEQ ID NO: 37752 - DNA, 19 bp, Homo sapiens
  siRNA target sequence for RBM5 (NM_005778.1,835-853).
ctgtgatacgatcattctt

SEQ ID NO: 37753 - DNA, 19 bp, Homo sapiens
  siRNA target sequence for RBM5 (NM_005778.1,844-862).
gatcattcttcggaacata

SEQ ID NO: 37754 - DNA, 19 bp, Homo sapiens
  siRNA target sequence for RBM5 (NM_005778.1,901-919).
gtctccttacgcgtcttta

SEQ ID NO: 37755 - DNA, 19 bp, Homo sapiens
  siRNA target sequence for RBM5 (NM_005778.1,910-928).
cgcgtctttagctgtcaat

SEQ ID NO: 37756 - DNA, 19 bp, Homo sapiens
  siRNA target sequence for RBM5 (NM_005778.1,911-929).
gcgtctttagctgtcaata

SEQ ID NO: 37757 - DNA, 19 bp, Homo sapiens
  siRNA target sequence for RBM5 (NM_005778.1,912-930).
cgtctttagctgtcaataa

SEQ ID NO: 37758 - DNA, 19 bp, Homo sapiens
  siRNA target sequence for RBM5 (NM_005778.1,915-933).
ctttagctgtcaataacat

SEQ ID NO: 37759 - DNA, 19 bp, Homo sapiens
  siRNA target sequence for RBM5 (NM_005778.1,936-954).
gcctcataaaagacaaaca

SEQ ID NO: 37760 - DNA, 19 bp, Homo sapiens
  siRNA target sequence for RBM5 (NM_005778.1,1011-1029).
ctcagctgcttcagatatt

SEQ ID NO: 37761 - DNA, 19 bp, Homo sapiens
  siRNA target sequence for RBM5 (NM_005778.1,1253-1271).
gcccaatatgctcagtatt

SEQ ID NO: 37762 - DNA, 19 bp, Homo sapiens
  siRNA target sequence for RBM5 (NM_005778.1,1255-1273).
ccaatatgctcagtattca

SEQ ID NO: 37763 - DNA, 19 bp, Homo sapiens
  siRNA target sequence for RBM5 (NM_005778.1,1301-1319).
caagctggaggattggaat

SEQ ID NO: 37764 - DNA, 19 bp, Homo sapiens
  siRNA target sequence for RBM5 (NM_005778.1,1442-1460).
cctagcactagcacaagta

SEQ ID NO: 37765 - DNA, 19 bp, Homo sapiens
  siRNA target sequence for RBM5 (NM_005778.1,1528-1546).
cacttaccagtatgatgaa

SEQ ID NO: 37766 - DNA, 19 bp, Homo sapiens
  siRNA target sequence for RBM5 (NM_005778.1,1534-1552).
ccagtatgatgaatcttca

SEQ ID NO: 37767 - DNA, 19 bp, Homo sapiens
  siRNA target sequence for RBM5 (NM_005778.1,1568-1586).
ccgacaacagggctctatt

SEQ ID NO: 37768 - DNA, 19 bp, Homo sapiens
  siRNA target sequence for RBM5 (NM_005778.1,1569-1587).
cgacaacagggctctatta

SEQ ID NO: 37769 - DNA, 19 bp, Homo sapiens
  siRNA target sequence for RBM5 (NM_005778.1,1570-1588).
gacaacagggctctattat

SEQ ID NO: 37770 - DNA, 19 bp, Homo sapiens
  siRNA target sequence for RBM5 (NM_005778.1,1589-1607).
gaccccaactcgcaatact

SEQ ID NO: 37771 - DNA, 19 bp, Homo sapiens
  siRNA target sequence for RBM5 (NM_005778.1,1593-1611).
ccaactcgcaatactacta

SEQ ID NO: 37772 - DNA, 19 bp, Homo sapiens
  siRNA target sequence for RBM5 (NM_005778.1,1594-1612).
caactcgcaatactactat

SEQ ID NO: 37773 - DNA, 19 bp, Homo sapiens
  siRNA target sequence for RBM5 (NM_005778.1,1597-1615).
ctcgcaatactactataat

SEQ ID NO: 37774 - DNA, 19 bp, Homo sapiens
  siRNA target sequence for RBM5 (NM_005778.1,1601-1619).
caatactactataattcct

SEQ ID NO: 37775 - DNA, 19 bp, Homo sapiens
  siRNA target sequence for RBM5 (NM_005778.1,1784-1802).
cgctgggctaagagtttga

SEQ ID NO: 37776 - DNA, 19 bp, Homo sapiens
  siRNA target sequence for RBM5 (NM_005778.1,1785-1803).
gctgggctaagagtttgaa

SEQ ID NO: 37777 - DNA, 19 bp, Homo sapiens
  siRNA target sequence for RBM5 (NM_005778.1,1786-1804).
ctgggctaagagtttgaat

SEQ ID NO: 37778 - DNA, 19 bp, Homo sapiens
  siRNA target sequence for RBM5 (NM_005778.1,1788-1806).
gggctaagagtttgaataa

SEQ ID NO: 37779 - DNA, 19 bp, Homo sapiens
  siRNA target sequence for RBM5 (NM_005778.1,1791-1809).
ctaagagtttgaataagca

SEQ ID NO: 37780 - DNA, 19 bp, Homo sapiens
  siRNA target sequence for RBM5 (NM_005778.1,2327-2345).
gatgccggcactgtgaatt

SEQ ID NO: 37781 - DNA, 19 bp, Homo sapiens
  siRNA target sequence for RBM5 (NM_005778.1,2331-2349).
ccggcactgtgaattacga

SEQ ID NO: 37782 - DNA, 19 bp, Homo sapiens
  siRNA target sequence for RBM5 (NM_005778.1,2347-2365).
cgagcaacccaccaaagat

SEQ ID NO: 37783 - DNA, 19 bp, Homo sapiens
  siRNA target sequence for RBM5 (NM_005778.1,2366-2384).
ggcattgaccacagtaaca

SEQ ID NO: 37784 - DNA, 19 bp, Homo sapiens
  siRNA target sequence for RBM5 (NM_005778.1,2379-2397).
gtaacattggcaacaagat

SEQ ID NO: 37785 - DNA, 19 bp, Homo sapiens
  siRNA target sequence for RBM5 (NM_005778.1,2506-2524).
caaaggcagcgcatatggt

SEQ ID NO: 37786 - DNA, 19 bp, Homo sapiens
  siRNA target sequence for RBM6 (NM_005777.1,160-178).
cagaactggaccttttcgt

SEQ ID NO: 37787 - DNA, 19 bp, Homo sapiens
  siRNA target sequence for RBM6 (NM_005777.1,208-226).
gtggaacagggattatcct

SEQ ID NO: 37788 - DNA, 19 bp, Homo sapiens
  siRNA target sequence for RBM6 (NM_005777.1,288-306).
cacttccctttgatttcca

SEQ ID NO: 37789 - DNA, 19 bp, Homo sapiens
  siRNA target sequence for RBM6 (NM_005777.1,318-336).
ggcctccttttgcaaatgt

SEQ ID NO: 37790 - DNA, 19 bp, Homo sapiens
  siRNA target sequence for RBM6 (NM_005777.1,370-388).
cggaccgcatggtgactat

SEQ ID NO: 37791 - DNA, 19 bp, Homo sapiens
  siRNA target sequence for RBM6 (NM_005777.1,397-415).
ggagggacctggacatgat

SEQ ID NO: 37792 - DNA, 19 bp, Homo sapiens
  siRNA target sequence for RBM6 (NM_005777.1,428-446).
gatttttcgtcttctgatt

SEQ ID NO: 37793 - DNA, 19 bp, Homo sapiens
  siRNA target sequence for RBM6 (NM_005777.1,448-466).
ccagagcagagattcatca

SEQ ID NO: 37794 - DNA, 19 bp, Homo sapiens
  siRNA target sequence for RBM6 (NM_005777.1,481-499).
gggtagggacatacattct

SEQ ID NO: 37795 - DNA, 19 bp, Homo sapiens
  siRNA target sequence for RBM6 (NM_005777.1,521-539).
ggaccacctatggactata

SEQ ID NO: 37796 - DNA, 19 bp, Homo sapiens
  siRNA target sequence for RBM6 (NM_005777.1,573-591).
gtagggaggcacctcatat

SEQ ID NO: 37797 - DNA, 19 bp, Homo sapiens
  siRNA target sequence for RBM6 (NM_005777.1,576-594).
gggaggcacctcatatgaa

SEQ ID NO: 37798 - DNA, 19 bp, Homo sapiens
  siRNA target sequence for RBM6 (NM_005777.1,578-596).
gaggcacctcatatgaact

SEQ ID NO: 37799 - DNA, 19 bp, Homo sapiens
  siRNA target sequence for RBM6 (NM_005777.1,581-599).
gcacctcatatgaactaca

SEQ ID NO: 37800 - DNA, 19 bp, Homo sapiens
  siRNA target sequence for RBM6 (NM_005777.1,758-776).
gaacagtcccgttctgatt

SEQ ID NO: 37801 - DNA, 19 bp, Homo sapiens
  siRNA target sequence for RBM6 (NM_005777.1,761-779).
cagtcccgttctgatttta

SEQ ID NO: 37802 - DNA, 19 bp, Homo sapiens
  siRNA target sequence for RBM6 (NM_005777.1,791-809).
gtatctgatttggacttta

SEQ ID NO: 37803 - DNA, 19 bp, Homo sapiens
  siRNA target sequence for RBM6 (NM_005777.1,814-832).
caaagacggaacacaagta

SEQ ID NO: 37804 - DNA, 19 bp, Homo sapiens
  siRNA target sequence for RBM6 (NM_005777.1,844-862).
ccgaggttcaggtactact

SEQ ID NO: 37805 - DNA, 19 bp, Homo sapiens
  siRNA target sequence for RBM6 (NM_005777.1,852-870).
caggtactactgatctaga

SEQ ID NO: 37806 - DNA, 19 bp, Homo sapiens
  siRNA target sequence for RBM6 (NM_005777.1,855-873).
gtactactgatctagactt

SEQ ID NO: 37807 - DNA, 19 bp, Homo sapiens
  siRNA target sequence for RBM6 (NM_005777.1,880-898).
cagggatacgccacattca

SEQ ID NO: 37808 - DNA, 19 bp, Homo sapiens
  siRNA target sequence for RBM6 (NM_005777.1,883-901).
ggatacgccacattcagat

SEQ ID NO: 37809 - DNA, 19 bp, Homo sapiens
  siRNA target sequence for RBM6 (NM_005777.1,884-902).
gatacgccacattcagatt

SEQ ID NO: 37810 - DNA, 19 bp, Homo sapiens
  siRNA target sequence for RBM6 (NM_005777.1,921-939).
ctaggactgatcaggattt

SEQ ID NO: 37811 - DNA, 19 bp, Homo sapiens
  siRNA target sequence for RBM6 (NM_005777.1,952-970).
gatgggatcttgtatggaa

SEQ ID NO: 37812 - DNA, 19 bp, Homo sapiens
  siRNA target sequence for RBM6 (NM_005777.1,957-975).
gatcttgtatggaatttaa

SEQ ID NO: 37813 - DNA, 19 bp, Homo sapiens
  siRNA target sequence for RBM6 (NM_005777.1,989-1007).
ccccctgtggatccaaata

SEQ ID NO: 37814 - DNA, 19 bp, Homo sapiens
  siRNA target sequence for RBM6 (NM_005777.1,990-1008).
cccctgtggatccaaatat

SEQ ID NO: 37815 - DNA, 19 bp, Homo sapiens
  siRNA target sequence for RBM6 (NM_005777.1,991-1009).
ccctgtggatccaaatatt

SEQ ID NO: 37816 - DNA, 19 bp, Homo sapiens
  siRNA target sequence for RBM6 (NM_005777.1,1026-1044).
cctctacacaagatagaga

SEQ ID NO: 37817 - DNA, 19 bp, Homo sapiens
  siRNA target sequence for RBM6 (NM_005777.1,1080-1098).
ccacacatgaccatacgat

SEQ ID NO: 37818 - DNA, 19 bp, Homo sapiens
  siRNA target sequence for RBM6 (NM_005777.1,1081-1099).
cacacatgaccatacgata

SEQ ID NO: 37819 - DNA, 19 bp, Homo sapiens
  siRNA target sequence for RBM6 (NM_005777.1,1085-1103).
catgaccatacgatagaaa

SEQ ID NO: 37820 - DNA, 19 bp, Homo sapiens
  siRNA target sequence for RBM6 (NM_005777.1,1170-1188).
gtgtagcctttgaacatga

SEQ ID NO: 37821 - DNA, 19 bp, Homo sapiens
  siRNA target sequence for RBM6 (NM_005777.1,1272-1290).
cagatgctggtctgtttaa

SEQ ID NO: 37822 - DNA, 19 bp, Homo sapiens
  siRNA target sequence for RBM6 (NM_005777.1,1319-1337).
cggcaagacaccgattaca

SEQ ID NO: 37823 - DNA, 19 bp, Homo sapiens
  siRNA target sequence for RBM6 (NM_005777.1,1321-1339).
gcaagacaccgattacaga

SEQ ID NO: 37824 - DNA, 19 bp, Homo sapiens
  siRNA target sequence for RBM6 (NM_005777.1,1372-1390).
gccaggaagccagatgttt

SEQ ID NO: 37825 - DNA, 19 bp, Homo sapiens
  siRNA target sequence for RBM6 (NM_005777.1,1446-1464).
gggaccttcaggatcaaga

SEQ ID NO: 37826 - DNA, 19 bp, Homo sapiens
  siRNA target sequence for RBM6 (NM_005777.1,1447-1465).
ggaccttcaggatcaagat

SEQ ID NO: 37827 - DNA, 19 bp, Homo sapiens
  siRNA target sequence for RBM6 (NM_005777.1,1454-1472).
caggatcaagattatagga

SEQ ID NO: 37828 - DNA, 19 bp, Homo sapiens
  siRNA target sequence for RBM6 (NM_005777.1,1489-1507).
gaaacccagcaggcttatt

SEQ ID NO: 37829 - DNA, 19 bp, Homo sapiens
  siRNA target sequence for RBM6 (NM_005777.1,1494-1512).
ccagcaggcttattcgatt

SEQ ID NO: 37830 - DNA, 19 bp, Homo sapiens
  siRNA target sequence for RBM6 (NM_005777.1,1571-1589).
gatggcatgcctgtaaaga

SEQ ID NO: 37831 - DNA, 19 bp, Homo sapiens
  siRNA target sequence for RBM6 (NM_005777.1,1575-1593).
gcatgcctgtaaagaactt

SEQ ID NO: 37832 - DNA, 19 bp, Homo sapiens
  siRNA target sequence for RBM6 (NM_005777.1,1595-1613).
cagttgaaggagtataaca

SEQ ID NO: 37833 - DNA, 19 bp, Homo sapiens
  siRNA target sequence for RBM6 (NM_005777.1,1683-1701).
ccaaccagggaactctaat

SEQ ID NO: 37834 - DNA, 19 bp, Homo sapiens
  siRNA target sequence for RBM6 (NM_005777.1,1718-1736).
gttaccctggagtatgtat

SEQ ID NO: 37835 - DNA, 19 bp, Homo sapiens
  siRNA target sequence for RBM6 (NM_005777.1,1787-1805).
caccgatcttcctgttcat

SEQ ID NO: 37836 - DNA, 19 bp, Homo sapiens
  siRNA target sequence for RBM6 (NM_005777.1,1832-1850).
gaggccaagcaagaattaa

SEQ ID NO: 37837 - DNA, 19 bp, Homo sapiens
  siRNA target sequence for RBM6 (NM_005777.1,1834-1852).
ggccaagcaagaattaata

SEQ ID NO: 37838 - DNA, 19 bp, Homo sapiens
  siRNA target sequence for RBM6 (NM_005777.1,1835-1853).
gccaagcaagaattaataa

SEQ ID NO: 37839 - DNA, 19 bp, Homo sapiens
  siRNA target sequence for RBM6 (NM_005777.1,1914-1932).
ccctaagaccagctgataa

SEQ ID NO: 37840 - DNA, 19 bp, Homo sapiens
  siRNA target sequence for RBM6 (NM_005777.1,1969-1987).
gtcacgcttaggacatcaa

SEQ ID NO: 37841 - DNA, 19 bp, Homo sapiens
  siRNA target sequence for RBM6 (NM_005777.1,1971-1989).
cacgcttaggacatcaaaa

SEQ ID NO: 37842 - DNA, 19 bp, Homo sapiens
  siRNA target sequence for RBM6 (NM_005777.1,1973-1991).
cgcttaggacatcaaaaga

SEQ ID NO: 37843 - DNA, 19 bp, Homo sapiens
  siRNA target sequence for RBM6 (NM_005777.1,1975-1993).
cttaggacatcaaaagaga

SEQ ID NO: 37844 - DNA, 19 bp, Homo sapiens
  siRNA target sequence for RBM6 (NM_005777.1,2097-2115).
gcaaaactatcatgctaaa

SEQ ID NO: 37845 - DNA, 19 bp, Homo sapiens
  siRNA target sequence for RBM6 (NM_005777.1,2107-2125).
catgctaaagcgtatctat

SEQ ID NO: 37846 - DNA, 19 bp, Homo sapiens
  siRNA target sequence for RBM6 (NM_005777.1,2111-2129).
ctaaagcgtatctatcgtt

SEQ ID NO: 37847 - DNA, 19 bp, Homo sapiens
  siRNA target sequence for RBM6 (NM_005777.1,2133-2151).
caccacctgaggtgatagt

SEQ ID NO: 37848 - DNA, 19 bp, Homo sapiens
  siRNA target sequence for RBM6 (NM_005777.1,2165-2183).
ccctatgtccgccttacta

SEQ ID NO: 37849 - DNA, 19 bp, Homo sapiens
  siRNA target sequence for RBM6 (NM_005777.1,2184-2202).
ctgccaacgtccgtatcat

SEQ ID NO: 37850 - DNA, 19 bp, Homo sapiens
  siRNA target sequence for RBM6 (NM_005777.1,2186-2204).
gccaacgtccgtatcatca

SEQ ID NO: 37851 - DNA, 19 bp, Homo sapiens
  siRNA target sequence for RBM6 (NM_005777.1,2187-2205).
ccaacgtccgtatcatcaa

SEQ ID NO: 37852 - DNA, 19 bp, Homo sapiens
  siRNA target sequence for RBM6 (NM_005777.1,2192-2210).
gtccgtatcatcaagaaca

SEQ ID NO: 37853 - DNA, 19 bp, Homo sapiens
  siRNA target sequence for RBM6 (NM_005777.1,2217-2235).
gccctatggggcataccta

SEQ ID NO: 37854 - DNA, 19 bp, Homo sapiens
  siRNA target sequence for RBM6 (NM_005777.1,2268-2286).
ctcttcgtgtggtgaagat

SEQ ID NO: 37855 - DNA, 19 bp, Homo sapiens
  siRNA target sequence for RBM6 (NM_005777.1,2270-2288).
cttcgtgtggtgaagatct

SEQ ID NO: 37856 - DNA, 19 bp, Homo sapiens
  siRNA target sequence for RBM6 (NM_005777.1,2297-2315).
cttgatccgccatttagca

SEQ ID NO: 37857 - DNA, 19 bp, Homo sapiens
  siRNA target sequence for RBM6 (NM_005777.1,2322-2340).
ggaagatggtagctgtaaa

SEQ ID NO: 37858 - DNA, 19 bp, Homo sapiens
  siRNA target sequence for RBM6 (NM_005777.1,2341-2359).
cctggccactggaaaacga

SEQ ID NO: 37859 - DNA, 19 bp, Homo sapiens
  siRNA target sequence for RBM6 (NM_005777.1,2382-2400).
ctgaccacatgcattacta

SEQ ID NO: 37860 - DNA, 19 bp, Homo sapiens
  siRNA target sequence for RBM6 (NM_005777.1,2398-2416).
ctatcagggtaaaaaatat

SEQ ID NO: 37861 - DNA, 19 bp, Homo sapiens
  siRNA target sequence for RBM6 (NM_005777.1,2452-2470).
ctggtcttcagatacaaat

SEQ ID NO: 37862 - DNA, 19 bp, Homo sapiens
  siRNA target sequence for RBM6 (NM_005777.1,2474-2492).
caaggacaacagtcatcat

SEQ ID NO: 37863 - DNA, 19 bp, Homo sapiens
  siRNA target sequence for RBM6 (NM_005777.1,2514-2532).
ctgctactggctactatta

SEQ ID NO: 37864 - DNA, 19 bp, Homo sapiens
  siRNA target sequence for RBM6 (NM_005777.1,2517-2535).
ctactggctactattatga

SEQ ID NO: 37865 - DNA, 19 bp, Homo sapiens
  siRNA target sequence for RBM6 (NM_005777.1,2536-2554).
ccccttggcaggaacttat

SEQ ID NO: 37866 - DNA, 19 bp, Homo sapiens
  siRNA target sequence for RBM6 (NM_005777.1,2539-2557).
cttggcaggaacttattat

SEQ ID NO: 37867 - DNA, 19 bp, Homo sapiens
  siRNA target sequence for RBM6 (NM_005777.1,2753-2771).
gcagaagacgtctttaaga

SEQ ID NO: 37868 - DNA, 19 bp, Homo sapiens
  siRNA target sequence for RBM6 (NM_005777.1,2803-2821).
gagtccccctccacctaaa

SEQ ID NO: 37869 - DNA, 19 bp, Homo sapiens
  siRNA target sequence for RBM6 (NM_005777.1,2805-2823).
gtccccctccacctaaagt

SEQ ID NO: 37870 - DNA, 19 bp, Homo sapiens
  siRNA target sequence for RBM6 (NM_005777.1,2839-2857).
cggcctcttgggtgaatat

SEQ ID NO: 37871 - DNA, 19 bp, Homo sapiens
  siRNA target sequence for RBM6 (NM_005777.1,2842-2860).
cctcttgggtgaatatgga

SEQ ID NO: 37872 - DNA, 19 bp, Homo sapiens
  siRNA target sequence for RBM6 (NM_005777.1,3085-3103).
ggaaatccaccggaagata

SEQ ID NO: 37873 - DNA, 19 bp, Homo sapiens
  siRNA target sequence for RBM6 (NM_005777.1,3086-3104).
gaaatccaccggaagataa

SEQ ID NO: 37874 - DNA, 19 bp, Homo sapiens
  siRNA target sequence for RBM6 (NM_005777.1,3249-3267).
gtgatcgtaaacttgttga

SEQ ID NO: 37875 - DNA, 19 bp, Homo sapiens
  siRNA target sequence for RBM6 (NM_005777.1,3251-3269).
gatcgtaaacttgttgata

SEQ ID NO: 37876 - DNA, 19 bp, Homo sapiens
  siRNA target sequence for RBM6 (NM_005777.1,3462-3480).
ctgttcgaagagtcatgtt

SEQ ID NO: 37877 - DNA, 19 bp, Homo sapiens
  siRNA target sequence for RBM6 (NM_005777.1,3473-3491).
gtcatgtttgctcgatata

SEQ ID NO: 37878 - DNA, 19 bp, Homo sapiens
  siRNA target sequence for RBPSUH (NM_005349.1,136-154).
gcgaggggatcaaacagta

SEQ ID NO: 37879 - DNA, 19 bp, Homo sapiens
  siRNA target sequence for RBPSUH (NM_005349.1,140-158).
ggggatcaaacagtactta

SEQ ID NO: 37880 - DNA, 19 bp, Homo sapiens
  siRNA target sequence for RBPSUH (NM_005349.1,141-159).
gggatcaaacagtacttat

SEQ ID NO: 37881 - DNA, 19 bp, Homo sapiens
  siRNA target sequence for RBPSUH (NM_005349.1,142-160).
ggatcaaacagtacttatt

SEQ ID NO: 37882 - DNA, 19 bp, Homo sapiens
  siRNA target sequence for RBPSUH (NM_005349.1,219-237).
ctccttgtgtatatcttat

SEQ ID NO: 37883 - DNA, 19 bp, Homo sapiens
  siRNA target sequence for RBPSUH (NM_005349.1,271-289).
ggaacgcgatggttgttct

SEQ ID NO: 37884 - DNA, 19 bp, Homo sapiens
  siRNA target sequence for RBPSUH (NM_005349.1,478-496).
cctcagcaagcggataaaa

SEQ ID NO: 37885 - DNA, 19 bp, Homo sapiens
  siRNA target sequence for RBPSUH (NM_005349.1,483-501).
gcaagcggataaaagtcat

SEQ ID NO: 37886 - DNA, 19 bp, Homo sapiens
  siRNA target sequence for RBPSUH (NM_005349.1,1216-1234).
ctgtgtcgtcccagacatt

SEQ ID NO: 37887 - DNA, 19 bp, Homo sapiens
  siRNA target sequence for RBPSUH (NM_005349.1,1274-1292).
gtccaggttccagtaactt

SEQ ID NO: 37888 - DNA, 19 bp, Homo sapiens
  siRNA target sequence for RBPSUH (NM_005349.1,1408-1426).
ccaggtgccccctaacgaa

SEQ ID NO: 37889 - DNA, 19 bp, Homo sapiens
  siRNA target sequence for RBPSUH (NM_005349.1,1409-1427).
caggtgccccctaacgaat

SEQ ID NO: 37890 - DNA, 19 bp, Homo sapiens
  siRNA target sequence for RBPSUH (NM_005349.1,1412-1430).
gtgccccctaacgaatcaa

SEQ ID NO: 37891 - DNA, 19 bp, Homo sapiens
  siRNA target sequence for RBPSUH (NM_005349.1,1415-1433).
ccccctaacgaatcaaaca

SEQ ID NO: 37892 - DNA, 19 bp, Homo sapiens
  siRNA target sequence for RBPSUH (NM_005349.1,1417-1435).
ccctaacgaatcaaacaca

SEQ ID NO: 37893 - DNA, 19 bp, Homo sapiens
  siRNA target sequence for RBPSUH (NM_005349.1,1418-1436).
cctaacgaatcaaacacaa

SEQ ID NO: 37894 - DNA, 19 bp, Homo sapiens
  siRNA target sequence for RBPSUH (NM_005349.1,1419-1437).
ctaacgaatcaaacacaaa

SEQ ID NO: 37895 - DNA, 19 bp, Homo sapiens
  siRNA target sequence for RBPSUH (NM_005349.1,1434-1452).
caaacagcgagggaagtta

SEQ ID NO: 37896 - DNA, 19 bp, Homo sapiens
  siRNA target sequence for RBPSUH (NM_005349.1,1438-1456).
cagcgagggaagttacaca

SEQ ID NO: 37897 - DNA, 19 bp, Homo sapiens
  siRNA target sequence for RBPSUH (NM_005349.1,1440-1458).
gcgagggaagttacacaaa

SEQ ID NO: 37898 - DNA, 19 bp, Homo sapiens
  siRNA target sequence for RBPSUH (NM_005349.1,1453-1471).
cacaaacgccagcacaaat

SEQ ID NO: 37899 - DNA, 19 bp, Homo sapiens
  siRNA target sequence for RBPSUH (NM_015874.2,199-217).
ccacctaaacgacttacta

SEQ ID NO: 37900 - DNA, 19 bp, Homo sapiens
  siRNA target sequence for RBPSUH (NM_015874.2,209-227).
gacttactagggaagctat

SEQ ID NO: 37901 - DNA, 19 bp, Homo sapiens
  siRNA target sequence for RBPSUH (NM_015874.2,218-236).
gggaagctatgcgaaatta

SEQ ID NO: 37902 - DNA, 19 bp, Homo sapiens
  siRNA target sequence for RBPSUH (NM_015874.2,223-241).
gctatgcgaaattatttaa

SEQ ID NO: 37903 - DNA, 19 bp, Homo sapiens
  siRNA target sequence for RBPSUHL (NM_014276.2,101-119).
cagtgcctcccaatccttt

SEQ ID NO: 37904 - DNA, 19 bp, Homo sapiens
  siRNA target sequence for RBPSUHL (NM_014276.2,425-443).
ccacggtctgcggttacat

SEQ ID NO: 37905 - DNA, 19 bp, Homo sapiens
  siRNA target sequence for RBPSUHL (NM_014276.2,475-493).
gagacgcagaagctgaatt

SEQ ID NO: 37906 - DNA, 19 bp, Homo sapiens
  siRNA target sequence for RBPSUHL (NM_014276.2,479-497).
cgcagaagctgaatttcga

SEQ ID NO: 37907 - DNA, 19 bp, Homo sapiens
  siRNA target sequence for RBPSUHL (NM_014276.2,936-954).
catgatcatccgtaaagta

SEQ ID NO: 37908 - DNA, 19 bp, Homo sapiens
  siRNA target sequence for RBPSUHL (NM_014276.2,1115-1133).
cgaacagggctctgcttaa

SEQ ID NO: 37909 - DNA, 19 bp, Homo sapiens
  siRNA target sequence for RBPSUHL (NM_014276.2,1160-1178).
gcaccgagtcggtggaatt

SEQ ID NO: 37910 - DNA, 19 bp, Homo sapiens
  siRNA target sequence for RBPSUHL (NM_014276.2,1417-1435).
ctgcgcgctcccatcacaa

SEQ ID NO: 37911 - DNA, 19 bp, Homo sapiens
  siRNA target sequence for RCOR (NM_015156.1,184-202).
cccaataatggccagaata

SEQ ID NO: 37912 - DNA, 19 bp, Homo sapiens
  siRNA target sequence for RCOR (NM_015156.1,360-378).
ggcaagacgcagtcaagaa

SEQ ID NO: 37913 - DNA, 19 bp, Homo sapiens
  siRNA target sequence for RCOR (NM_015156.1,400-418).
gtctggtcacccaatcaaa

SEQ ID NO: 37914 - DNA, 19 bp, Homo sapiens
  siRNA target sequence for RCOR (NM_015156.1,404-422).
ggtcacccaatcaaaatct

SEQ ID NO: 37915 - DNA, 19 bp, Homo sapiens
  siRNA target sequence for RCOR (NM_015156.1,498-516).
gatgctcttctggcataaa

SEQ ID NO: 37916 - DNA, 19 bp, Homo sapiens
  siRNA target sequence for RCOR (NM_015156.1,510-528).
gcataaacataatatcgaa

SEQ ID NO: 37917 - DNA, 19 bp, Homo sapiens
  siRNA target sequence for RCOR (NM_015156.1,678-696).
ggtgaaattttactattct

SEQ ID NO: 37918 - DNA, 19 bp, Homo sapiens
  siRNA target sequence for RCOR (NM_015156.1,702-720).
gaagacgaggactaaaact

SEQ ID NO: 37919 - DNA, 19 bp, Homo sapiens
  siRNA target sequence for RCOR (NM_015156.1,705-723).
gacgaggactaaaactagt

SEQ ID NO: 37920 - DNA, 19 bp, Homo sapiens
  siRNA target sequence for RCOR (NM_015156.1,733-751).
cgccatgcccggaaacaaa

SEQ ID NO: 37921 - DNA, 19 bp, Homo sapiens
  siRNA target sequence for RCOR (NM_015156.1,781-799).
ctggaagaggcaaatggaa

SEQ ID NO: 37922 - DNA, 19 bp, Homo sapiens
  siRNA target sequence for RCOR (NM_015156.1,797-815).
gaaacaatcccattgacat

SEQ ID NO: 37923 - DNA, 19 bp, Homo sapiens
  siRNA target sequence for RCOR (NM_015156.1,820-838).
gttgatcaaaacaaggaaa

SEQ ID NO: 37924 - DNA, 19 bp, Homo sapiens
  siRNA target sequence for RCOR (NM_015156.1,996-1014).
cacggtgctgagacaacta

SEQ ID NO: 37925 - DNA, 19 bp, Homo sapiens
  siRNA target sequence for RCOR (NM_015156.1,1012-1030).
ctagacatggaattggttt

SEQ ID NO: 37926 - DNA, 19 bp, Homo sapiens
  siRNA target sequence for RCOR (NM_015156.1,1073-1091).
ctctcaaagaaaaacttga

SEQ ID NO: 37927 - DNA, 19 bp, Homo sapiens
  siRNA target sequence for RCOR (NM_015156.1,1112-1130).
gacttccagaggtcattca

SEQ ID NO: 37928 - DNA, 19 bp, Homo sapiens
  siRNA target sequence for RCOR (NM_015156.1,1274-1292).
gacgccgcttcaacataga

SEQ ID NO: 37929 - DNA, 19 bp, Homo sapiens
  siRNA target sequence for RCOR (NM_015156.1,1277-1295).
gccgcttcaacatagatga

SEQ ID NO: 37930 - DNA, 19 bp, Homo sapiens
  siRNA target sequence for RCOR (NM_015156.1,1284-1302).
caacatagatgaagtttta

SEQ ID NO: 37931 - DNA, 19 bp, Homo sapiens
  siRNA target sequence for RCOR (NM_015156.1,1310-1328).
gggaggcagaacatggtaa

SEQ ID NO: 37932 - DNA, 19 bp, Homo sapiens
  siRNA target sequence for RCOR (NM_015156.1,1311-1329).
ggaggcagaacatggtaaa

SEQ ID NO: 37933 - DNA, 19 bp, Homo sapiens
  siRNA target sequence for RCOR (NM_015156.1,1363-1381).
gtgaagtccccagataatt

SEQ ID NO: 37934 - DNA, 19 bp, Homo sapiens
  siRNA target sequence for RCOR (NM_015156.1,1420-1438).
ctggatgtcagatatgcat

SEQ ID NO: 37935 - DNA, 19 bp, Homo sapiens
  siRNA target sequence for RECQL (NM_002907.2,496-514).
gaggaactggattctataa

SEQ ID NO: 37936 - DNA, 19 bp, Homo sapiens
  siRNA target sequence for RECQL (NM_002907.2,499-517).
gaactggattctataacca

SEQ ID NO: 37937 - DNA, 19 bp, Homo sapiens
  siRNA target sequence for RECQL (NM_002907.2,520-538).
gagctacatgcagtagaaa

SEQ ID NO: 37938 - DNA, 19 bp, Homo sapiens
  siRNA target sequence for RECQL (NM_002907.2,522-540).
gctacatgcagtagaaatt

SEQ ID NO: 37939 - DNA, 19 bp, Homo sapiens
  siRNA target sequence for RECQL (NM_002907.2,565-583).
caacaagagcttattcaga

SEQ ID NO: 37940 - DNA, 19 bp, Homo sapiens
  siRNA target sequence for RECQL (NM_002907.2,691-709).
ccatggtctggtaaagtta

SEQ ID NO: 37941 - DNA, 19 bp, Homo sapiens
  siRNA target sequence for RECQL (NM_002907.2,692-710).
catggtctggtaaagttaa

SEQ ID NO: 37942 - DNA, 19 bp, Homo sapiens
  siRNA target sequence for RECQL (NM_002907.2,695-713).
ggtctggtaaagttaaaga

SEQ ID NO: 37943 - DNA, 19 bp, Homo sapiens
  siRNA target sequence for RECQL (NM_002907.2,754-772).
cttcagcttgaaactatta

SEQ ID NO: 37944 - DNA, 19 bp, Homo sapiens
  siRNA target sequence for RECQL (NM_002907.2,759-777).
gcttgaaactattaacgta

SEQ ID NO: 37945 - DNA, 19 bp, Homo sapiens
  siRNA target sequence for RECQL (NM_002907.2,760-778).
cttgaaactattaacgtaa

SEQ ID NO: 37946 - DNA, 19 bp, Homo sapiens
  siRNA target sequence for RECQL (NM_002907.2,817-835).
ggaggtggaaagagcttat

SEQ ID NO: 37947 - DNA, 19 bp, Homo sapiens
  siRNA target sequence for RECQL (NM_002907.2,840-858).
ccagttaccagcattatgt

SEQ ID NO: 37948 - DNA, 19 bp, Homo sapiens
  siRNA target sequence for RECQL (NM_002907.2,857-875).
gttcagatggttttacact

SEQ ID NO: 37949 - DNA, 19 bp, Homo sapiens
  siRNA target sequence for RECQL (NM_002907.2,865-883).
ggttttacactcgtcattt

SEQ ID NO: 37950 - DNA, 19 bp, Homo sapiens
  siRNA target sequence for RECQL (NM_002907.2,884-902).
gcccattgatctctcttat

SEQ ID NO: 37951 - DNA, 19 bp, Homo sapiens
  siRNA target sequence for RECQL (NM_002907.2,887-905).
cattgatctctcttatgga

SEQ ID NO: 37952 - DNA, 19 bp, Homo sapiens
  siRNA target sequence for RECQL (NM_002907.2,903-921).
ggaagaccaattaatggtt

SEQ ID NO: 37953 - DNA, 19 bp, Homo sapiens
  siRNA target sequence for RECQL (NM_002907.2,904-922).
gaagaccaattaatggttt

SEQ ID NO: 37954 - DNA, 19 bp, Homo sapiens
  siRNA target sequence for RECQL (NM_002907.2,907-925).
gaccaattaatggttttaa

SEQ ID NO: 37955 - DNA, 19 bp, Homo sapiens
  siRNA target sequence for RECQL (NM_002907.2,1017-1035).
cgagttaaagctgatttat

SEQ ID NO: 37956 - DNA, 19 bp, Homo sapiens
  siRNA target sequence for RECQL (NM_002907.2,1040-1058).
ctccagagaaaattgcaaa

SEQ ID NO: 37957 - DNA, 19 bp, Homo sapiens
  siRNA target sequence for RECQL (NM_002907.2,1092-1110).
ctatgaagcaaggagattt

SEQ ID NO: 37958 - DNA, 19 bp, Homo sapiens
  siRNA target sequence for RECQL (NM_002907.2,1230-1248).
gactgcaactgcaacaaat

SEQ ID NO: 37959 - DNA, 19 bp, Homo sapiens
  siRNA target sequence for RECQL (NM_002907.2,1232-1250).
ctgcaactgcaacaaatca

SEQ ID NO: 37960 - DNA, 19 bp, Homo sapiens
  siRNA target sequence for RECQL (NM_002907.2,1259-1277).
cggatgctcagaaaatttt

SEQ ID NO: 37961 - DNA, 19 bp, Homo sapiens
  siRNA target sequence for RECQL (NM_002907.2,1319-1337).
ggccaaatctatattatga

SEQ ID NO: 37962 - DNA, 19 bp, Homo sapiens
  siRNA target sequence for RECQL (NM_002907.2,1342-1360).
cggcagaagccctcaaaca

SEQ ID NO: 37963 - DNA, 19 bp, Homo sapiens
  siRNA target sequence for RECQL (NM_002907.2,1378-1396).
gatattgtaaagctcatta

SEQ ID NO: 37964 - DNA, 19 bp, Homo sapiens
  siRNA target sequence for RECQL (NM_002907.2,1392-1410).
cattaatgggagatacaaa

SEQ ID NO: 37965 - DNA, 19 bp, Homo sapiens
  siRNA target sequence for RECQL (NM_002907.2,1411-1429).
gggcaatcaggaatcatat

SEQ ID NO: 37966 - DNA, 19 bp, Homo sapiens
  siRNA target sequence for RECQL (NM_002907.2,1412-1430).
ggcaatcaggaatcatata

SEQ ID NO: 37967 - DNA, 19 bp, Homo sapiens
  siRNA target sequence for RECQL (NM_002907.2,1453-1471).
gaacaagttacggttagtt

SEQ ID NO: 37968 - DNA, 19 bp, Homo sapiens
  siRNA target sequence for RECQL (NM_002907.2,1496-1514).
gtgcttaccatgccaattt

SEQ ID NO: 37969 - DNA, 19 bp, Homo sapiens
  siRNA target sequence for RECQL (NM_002907.2,1525-1543).
gataagaccacagttcata

SEQ ID NO: 37970 - DNA, 19 bp, Homo sapiens
  siRNA target sequence for RECQL (NM_002907.2,1530-1548).
gaccacagttcatagaaaa

SEQ ID NO: 37971 - DNA, 19 bp, Homo sapiens
  siRNA target sequence for RECQL (NM_002907.2,1550-1568).
ggtcagccaatgaaattca

SEQ ID NO: 37972 - DNA, 19 bp, Homo sapiens
  siRNA target sequence for RECQL (NM_002907.2,1611-1629).
gccagatgtgaggtttgtt

SEQ ID NO: 37973 - DNA, 19 bp, Homo sapiens
  siRNA target sequence for RECQL (NM_002907.2,1612-1630).
ccagatgtgaggtttgtta

SEQ ID NO: 37974 - DNA, 19 bp, Homo sapiens
  siRNA target sequence for RECQL (NM_002907.2,1623-1641).
gtttgttatccatcattca

SEQ ID NO: 37975 - DNA, 19 bp, Homo sapiens
  siRNA target sequence for RECQL (NM_002907.2,1627-1645).
gttatccatcattcaatga

SEQ ID NO: 37976 - DNA, 19 bp, Homo sapiens
  siRNA target sequence for RECQL (NM_002907.2,1682-1700).
gtgcaggtcgagatgacat

SEQ ID NO: 37977 - DNA, 19 bp, Homo sapiens
  siRNA target sequence for RECQL (NM_002907.2,1685-1703).
caggtcgagatgacatgaa

SEQ ID NO: 37978 - DNA, 19 bp, Homo sapiens
  siRNA target sequence for RECQL (NM_002907.2,1722-1740).
ctacggctttggagatata

SEQ ID NO: 37979 - DNA, 19 bp, Homo sapiens
  siRNA target sequence for RECQL (NM_002907.2,1732-1750).
ggagatatattcagaataa

SEQ ID NO: 37980 - DNA, 19 bp, Homo sapiens
  siRNA target sequence for RECQL (NM_002907.2,1776-1794).
gggacagcagaagctttat

SEQ ID NO: 37981 - DNA, 19 bp, Homo sapiens
  siRNA target sequence for RECQL (NM_002907.2,1778-1796).
gacagcagaagctttatga

SEQ ID NO: 37982 - DNA, 19 bp, Homo sapiens
  siRNA target sequence for RECQL (NM_002907.2,1872-1890).
ctcagaagcatgtaacaaa

SEQ ID NO: 37983 - DNA, 19 bp, Homo sapiens
  siRNA target sequence for RECQL (NM_002907.2,1942-1960).
gagtactgcagagatctaa

SEQ ID NO: 37984 - DNA, 19 bp, Homo sapiens
  siRNA target sequence for RECQL (NM_002907.2,1949-1967).
gcagagatctaatcaagat

SEQ ID NO: 37985 - DNA, 19 bp, Homo sapiens
  siRNA target sequence for RECQL (NM_002907.2,2003-2021).
ctccattgaaactgattga

SEQ ID NO: 37986 - DNA, 19 bp, Homo sapiens
  siRNA target sequence for RECQL (NM_002907.2,2005-2023).
ccattgaaactgattgatt

SEQ ID NO: 37987 - DNA, 19 bp, Homo sapiens
  siRNA target sequence for RECQL (NM_002907.2,2033-2051).
gaaagggtgcagcaaaact

SEQ ID NO: 37988 - DNA, 19 bp, Homo sapiens
  siRNA target sequence for RECQL (NM_002907.2,2078-2096).
cacttcctcgtgaagatct

SEQ ID NO: 37989 - DNA, 19 bp, Homo sapiens
  siRNA target sequence for RECQL (NM_002907.2,2119-2137).
ctaatacagcagtatctta

SEQ ID NO: 37990 - DNA, 19 bp, Homo sapiens
  siRNA target sequence for RECQL (NM_002907.2,2148-2166).
cagttttacagcttatgct

SEQ ID NO: 37991 - DNA, 19 bp, Homo sapiens
  siRNA target sequence for RECQL (NM_002907.2,2158-2176).
gcttatgctaccatttcgt

SEQ ID NO: 37992 - DNA, 19 bp, Homo sapiens
  siRNA target sequence for RECQL (NM_002907.2,2159-2177).
cttatgctaccatttcgta

SEQ ID NO: 37993 - DNA, 19 bp, Homo sapiens
  siRNA target sequence for RECQL (NM_002907.2,2164-2182).
gctaccatttcgtatttga

SEQ ID NO: 37994 - DNA, 19 bp, Homo sapiens
  siRNA target sequence for RECQL (NM_002907.2,2215-2233).
gaggcacatgctattacta

SEQ ID NO: 37995 - DNA, 19 bp, Homo sapiens
  siRNA target sequence for RECQL (NM_002907.2,2268-2286).
ggctgaatcgtctcaaact

SEQ ID NO: 37996 - DNA, 19 bp, Homo sapiens
  siRNA target sequence for REPIN1 (NM_013400.1,865-883).
cggcacaagcccaacttga

SEQ ID NO: 37997 - DNA, 19 bp, Homo sapiens
  siRNA target sequence for REPIN1 (NM_013400.1,866-884).
ggcacaagcccaacttgat

SEQ ID NO: 37998 - DNA, 19 bp, Homo sapiens
  siRNA target sequence for REPIN1 (NM_013400.1,938-956).
ggaagcgctttaccaataa

SEQ ID NO: 37999 - DNA, 19 bp, Homo sapiens
  siRNA target sequence for REV3L (NM_002912.1,833-851).
gtatcgacagagcacttaa

SEQ ID NO: 38000 - DNA, 19 bp, Homo sapiens
  siRNA target sequence for REV3L (NM_002912.1,853-871).
gtggctttaggcaatccat

SEQ ID NO: 38001 - DNA, 19 bp, Homo sapiens
  siRNA target sequence for REV3L (NM_002912.1,878-896).
ctgctcagcatgtgttcaa

SEQ ID NO: 38002 - DNA, 19 bp, Homo sapiens
  siRNA target sequence for REV3L (NM_002912.1,883-901).
cagcatgtgttcaaagtgt

SEQ ID NO: 38003 - DNA, 19 bp, Homo sapiens
  siRNA target sequence for REV3L (NM_002912.1,891-909).
gttcaaagtgtcattagta

SEQ ID NO: 38004 - DNA, 19 bp, Homo sapiens
  siRNA target sequence for REV3L (NM_002912.1,894-912).
caaagtgtcattagtatca

SEQ ID NO: 38005 - DNA, 19 bp, Homo sapiens
  siRNA target sequence for REV3L (NM_002912.1,1014-1032).
cggagccataatgaataaa

SEQ ID NO: 38006 - DNA, 19 bp, Homo sapiens
  siRNA target sequence for REV3L (NM_002912.1,1041-1059).
gcctcatgaagcgcatatt

SEQ ID NO: 38007 - DNA, 19 bp, Homo sapiens
  siRNA target sequence for REV3L (NM_002912.1,1089-1107).
caatctttatggcatgaat

SEQ ID NO: 38008 - DNA, 19 bp, Homo sapiens
  siRNA target sequence for REV3L (NM_002912.1,1126-1144).
gtcaagttccgaaaagcaa

SEQ ID NO: 38009 - DNA, 19 bp, Homo sapiens
  siRNA target sequence for REV3L (NM_002912.1,1174-1192).
ggatcctgcaagaatcatt

SEQ ID NO: 38010 - DNA, 19 bp, Homo sapiens
  siRNA target sequence for REV3L (NM_002912.1,1225-1243).
cggtgggaacaagatgaaa

SEQ ID NO: 38011 - DNA, 19 bp, Homo sapiens
  siRNA target sequence for REV3L (NM_002912.1,1247-1265).
caagctctttaatattgga

SEQ ID NO: 38012 - DNA, 19 bp, Homo sapiens
  siRNA target sequence for REV3L (NM_002912.1,1338-1356).
cattgaagctcaaattggt

SEQ ID NO: 38013 - DNA, 19 bp, Homo sapiens
  siRNA target sequence for REV3L (NM_002912.1,1434-1452).
ccaacctgagtcacaagat

SEQ ID NO: 38014 - DNA, 19 bp, Homo sapiens
  siRNA target sequence for REV3L (NM_002912.1,1458-1476).
gtttgtgccagcaacagaa

SEQ ID NO: 38015 - DNA, 19 bp, Homo sapiens
  siRNA target sequence for REV3L (NM_002912.1,1515-1533).
caaacagaatgatttctct

SEQ ID NO: 38016 - DNA, 19 bp, Homo sapiens
  siRNA target sequence for REV3L (NM_002912.1,1575-1593).
ggagttctctgctgagtta

SEQ ID NO: 38017 - DNA, 19 bp, Homo sapiens
  siRNA target sequence for REV3L (NM_002912.1,1634-1652).
gtacaccagccaatatggt

SEQ ID NO: 38018 - DNA, 19 bp, Homo sapiens
  siRNA target sequence for REV3L (NM_002912.1,1685-1703).
gtcacactagacacaaagt

SEQ ID NO: 38019 - DNA, 19 bp, Homo sapiens
  siRNA target sequence for REV3L (NM_002912.1,1702-1720).
gtggaagaagctcttatta

SEQ ID NO: 38020 - DNA, 19 bp, Homo sapiens
  siRNA target sequence for REV3L (NM_002912.1,1895-1913).
catgtcgctcctttggaaa

SEQ ID NO: 38021 - DNA, 19 bp, Homo sapiens
  siRNA target sequence for REV3L (NM_002912.1,1898-1916).
gtcgctcctttggaaataa

SEQ ID NO: 38022 - DNA, 19 bp, Homo sapiens
  siRNA target sequence for REV3L (NM_002912.1,2066-2084).
gaagttcaactgaagatga

SEQ ID NO: 38023 - DNA, 19 bp, Homo sapiens
  siRNA target sequence for REV3L (NM_002912.1,2130-2148).
gcttctagccagtctttct

SEQ ID NO: 38024 - DNA, 19 bp, Homo sapiens
  siRNA target sequence for REV3L (NM_002912.1,2131-2149).
cttctagccagtctttcta

SEQ ID NO: 38025 - DNA, 19 bp, Homo sapiens
  siRNA target sequence for REV3L (NM_002912.1,2164-2182).
ggaactgcagatgaaaata

SEQ ID NO: 38026 - DNA, 19 bp, Homo sapiens
  siRNA target sequence for REV3L (NM_002912.1,2183-2201).
gtgacaatccattgaacaa

SEQ ID NO: 38027 - DNA, 19 bp, Homo sapiens
  siRNA target sequence for REV3L (NM_002912.1,2271-2289).
caaagatgctgctacatta

SEQ ID NO: 38028 - DNA, 19 bp, Homo sapiens
  siRNA target sequence for REV3L (NM_002912.1,2294-2312).
cctcatcttctgctaagat

SEQ ID NO: 38029 - DNA, 19 bp, Homo sapiens
  siRNA target sequence for REV3L (NM_002912.1,2305-2323).
gctaagattacctttcagt

SEQ ID NO: 38030 - DNA, 19 bp, Homo sapiens
  siRNA target sequence for REV3L (NM_002912.1,2329-2347).
cacacaagtgccctttctt

SEQ ID NO: 38031 - DNA, 19 bp, Homo sapiens
  siRNA target sequence for REV3L (NM_002912.1,2483-2501).
gcagtactgttcattcaga

SEQ ID NO: 38032 - DNA, 19 bp, Homo sapiens
  siRNA target sequence for REV3L (NM_002912.1,2507-2525).
ctcataaagagaatagtaa

SEQ ID NO: 38033 - DNA, 19 bp, Homo sapiens
  siRNA target sequence for REV3L (NM_002912.1,2530-2548).
gagatcctcccagtatctt

SEQ ID NO: 38034 - DNA, 19 bp, Homo sapiens
  siRNA target sequence for REV3L (NM_002912.1,2546-2564).
cttcctgtgaaagtagtat

SEQ ID NO: 38035 - DNA, 19 bp, Homo sapiens
  siRNA target sequence for REV3L (NM_002912.1,2608-2626).
ccaagtagaaaatatacaa

SEQ ID NO: 38036 - DNA, 19 bp, Homo sapiens
  siRNA target sequence for REV3L (NM_002912.1,2624-2642).
caaacattagaaaaatcga

SEQ ID NO: 38037 - DNA, 19 bp, Homo sapiens
  siRNA target sequence for REV3L (NM_002912.1,2671-2689).
cgtcaccctaacgagaata

SEQ ID NO: 38038 - DNA, 19 bp, Homo sapiens
  siRNA target sequence for REV3L (NM_002912.1,2674-2692).
caccctaacgagaatacat

SEQ ID NO: 38039 - DNA, 19 bp, Homo sapiens
  siRNA target sequence for REV3L (NM_002912.1,2774-2792).
gcacagctctgagtagttt

SEQ ID NO: 38040 - DNA, 19 bp, Homo sapiens
  siRNA target sequence for REV3L (NM_002912.1,2797-2815).
ccttcatcatttactgaaa

SEQ ID NO: 38041 - DNA, 19 bp, Homo sapiens
  siRNA target sequence for REV3L (NM_002912.1,2804-2822).
catttactgaaaattgtga

SEQ ID NO: 38042 - DNA, 19 bp, Homo sapiens
  siRNA target sequence for REV3L (NM_002912.1,2849-2867).
gaactatggtgcattctct

SEQ ID NO: 38043 - DNA, 19 bp, Homo sapiens
  siRNA target sequence for REV3L (NM_002912.1,2857-2875).
gtgcattctcttaatagca

SEQ ID NO: 38044 - DNA, 19 bp, Homo sapiens
  siRNA target sequence for REV3L (NM_002912.1,2881-2899).
gatgaaagtggactaaata

SEQ ID NO: 38045 - DNA, 19 bp, Homo sapiens
  siRNA target sequence for REV3L (NM_002912.1,2888-2906).
gtggactaaataaacttaa

SEQ ID NO: 38046 - DNA, 19 bp, Homo sapiens
  siRNA target sequence for REV3L (NM_002912.1,2962-2980).
caagcagcacactatatgt

SEQ ID NO: 38047 - DNA, 19 bp, Homo sapiens
  siRNA target sequence for REV3L (NM_002912.1,2965-2983).
gcagcacactatatgtttt

SEQ ID NO: 38048 - DNA, 19 bp, Homo sapiens
  siRNA target sequence for REV3L (NM_002912.1,3067-3085).
ccatcccggttaaaattga

SEQ ID NO: 38049 - DNA, 19 bp, Homo sapiens
  siRNA target sequence for REV3L (NM_002912.1,3068-3086).
catcccggttaaaattgaa

SEQ ID NO: 38050 - DNA, 19 bp, Homo sapiens
  siRNA target sequence for REV3L (NM_002912.1,3111-3129).
ggagacttctaccaaaagt

SEQ ID NO: 38051 - DNA, 19 bp, Homo sapiens
  siRNA target sequence for REV3L (NM_002912.1,3202-3220).
gcattggctagtgatttaa

SEQ ID NO: 38052 - DNA, 19 bp, Homo sapiens
  siRNA target sequence for REV3L (NM_002912.1,3207-3225).
ggctagtgatttaactaaa

SEQ ID NO: 38053 - DNA, 19 bp, Homo sapiens
  siRNA target sequence for REV3L (NM_002912.1,3282-3300).
ctttggagatggaacgtta

SEQ ID NO: 38054 - DNA, 19 bp, Homo sapiens
  siRNA target sequence for REV3L (NM_002912.1,3286-3304).
ggagatggaacgttagaaa

SEQ ID NO: 38055 - DNA, 19 bp, Homo sapiens
  siRNA target sequence for REV3L (NM_002912.1,3312-3330).
gtcctttggactatatgga

SEQ ID NO: 38056 - DNA, 19 bp, Homo sapiens
  siRNA target sequence for REV3L (NM_002912.1,3314-3332).
cctttggactatatggaaa

SEQ ID NO: 38057 - DNA, 19 bp, Homo sapiens
  siRNA target sequence for REV3L (NM_002912.1,3315-3333).
ctttggactatatggaaat

SEQ ID NO: 38058 - DNA, 19 bp, Homo sapiens
  siRNA target sequence for REV3L (NM_002912.1,3347-3365).
gagccaaacgcaaggtaaa

SEQ ID NO: 38059 - DNA, 19 bp, Homo sapiens
  siRNA target sequence for REV3L (NM_002912.1,3349-3367).
gccaaacgcaaggtaaatt

SEQ ID NO: 38060 - DNA, 19 bp, Homo sapiens
  siRNA target sequence for REV3L (NM_002912.1,3350-3368).
ccaaacgcaaggtaaatta

SEQ ID NO: 38061 - DNA, 19 bp, Homo sapiens
  siRNA target sequence for REV3L (NM_002912.1,3351-3369).
caaacgcaaggtaaattat

SEQ ID NO: 38062 - DNA, 19 bp, Homo sapiens
  siRNA target sequence for REV3L (NM_002912.1,3355-3373).
cgcaaggtaaattatgaga

SEQ ID NO: 38063 - DNA, 19 bp, Homo sapiens
  siRNA target sequence for REV3L (NM_002912.1,3405-3423).
caactcaaaaattagtcta

SEQ ID NO: 38064 - DNA, 19 bp, Homo sapiens
  siRNA target sequence for REV3L (NM_002912.1,3421-3439).
ctacctcatcccatggaaa

SEQ ID NO: 38065 - DNA, 19 bp, Homo sapiens
  siRNA target sequence for REV3L (NM_002912.1,3463-3481).
ctcaaatcccgaaaacgaa

SEQ ID NO: 38066 - DNA, 19 bp, Homo sapiens
  siRNA target sequence for REV3L (NM_002912.1,3498-3516).
gctgccccctgtcatcata

SEQ ID NO: 38067 - DNA, 19 bp, Homo sapiens
  siRNA target sequence for REV3L (NM_002912.1,3499-3517).
ctgccccctgtcatcataa

SEQ ID NO: 38068 - DNA, 19 bp, Homo sapiens
  siRNA target sequence for REV3L (NM_002912.1,3651-3669).
ggacttttggccaaaagtt

SEQ ID NO: 38069 - DNA, 19 bp, Homo sapiens
  siRNA target sequence for REV3L (NM_002912.1,3672-3690).
cgactcccctgcaaccaaa

SEQ ID NO: 38070 - DNA, 19 bp, Homo sapiens
  siRNA target sequence for REV3L (NM_002912.1,3675-3693).
ctcccctgcaaccaaatat

SEQ ID NO: 38071 - DNA, 19 bp, Homo sapiens
  siRNA target sequence for REV3L (NM_002912.1,3869-3887).
ctgaaaccgaagattgtga

SEQ ID NO: 38072 - DNA, 19 bp, Homo sapiens
  siRNA target sequence for REV3L (NM_002912.1,3899-3917).
gtgatgttatgtctaaact

SEQ ID NO: 38073 - DNA, 19 bp, Homo sapiens
  siRNA target sequence for REV3L (NM_002912.1,4062-4080).
gactgttaattctcgtata

SEQ ID NO: 38074 - DNA, 19 bp, Homo sapiens
  siRNA target sequence for REV3L (NM_002912.1,4066-4084).
gttaattctcgtataggaa

SEQ ID NO: 38075 - DNA, 19 bp, Homo sapiens
  siRNA target sequence for REV3L (NM_002912.1,4093-4111).
cgcgcaagagcacagatta

SEQ ID NO: 38076 - DNA, 19 bp, Homo sapiens
  siRNA target sequence for REV3L (NM_002912.1,4094-4112).
gcgcaagagcacagattaa

SEQ ID NO: 38077 - DNA, 19 bp, Homo sapiens
  siRNA target sequence for REV3L (NM_002912.1,4096-4114).
gcaagagcacagattaaga

SEQ ID NO: 38078 - DNA, 19 bp, Homo sapiens
  siRNA target sequence for REV3L (NM_002912.1,4128-4146).
gcttgctaatccctctata

SEQ ID NO: 38079 - DNA, 19 bp, Homo sapiens
  siRNA target sequence for REV3L (NM_002912.1,4132-4150).
gctaatccctctatagtta

SEQ ID NO: 38080 - DNA, 19 bp, Homo sapiens
  siRNA target sequence for REV3L (NM_002912.1,4176-4194).
gacaaataaactagtagat

SEQ ID NO: 38081 - DNA, 19 bp, Homo sapiens
  siRNA target sequence for REV3L (NM_002912.1,4521-4539).
ccccagttcacgagatgat

SEQ ID NO: 38082 - DNA, 19 bp, Homo sapiens
  siRNA target sequence for REV3L (NM_002912.1,4523-4541).
ccagttcacgagatgattt

SEQ ID NO: 38083 - DNA, 19 bp, Homo sapiens
  siRNA target sequence for REV3L (NM_002912.1,4526-4544).
gttcacgagatgatttgca

SEQ ID NO: 38084 - DNA, 19 bp, Homo sapiens
  siRNA target sequence for REV3L (NM_002912.1,4543-4561).
catccatcagttgtttgta

SEQ ID NO: 38085 - DNA, 19 bp, Homo sapiens
  siRNA target sequence for REV3L (NM_002912.1,4546-4564).
ccatcagttgtttgtaatt

SEQ ID NO: 38086 - DNA, 19 bp, Homo sapiens
  siRNA target sequence for REV3L (NM_002912.1,4571-4589).
gacctggagtctcaaaaat

SEQ ID NO: 38087 - DNA, 19 bp, Homo sapiens
  siRNA target sequence for REV3L (NM_002912.1,4573-4591).
cctggagtctcaaaaatta

SEQ ID NO: 38088 - DNA, 19 bp, Homo sapiens
  siRNA target sequence for REV3L (NM_002912.1,4577-4595).
gagtctcaaaaattaatgt

SEQ ID NO: 38089 - DNA, 19 bp, Homo sapiens
  siRNA target sequence for REV3L (NM_002912.1,4616-4634).
gtgctatgtttactctaaa

SEQ ID NO: 38090 - DNA, 19 bp, Homo sapiens
  siRNA target sequence for REV3L (NM_002912.1,4630-4648).
ctaaaggaatcaacgttaa

SEQ ID NO: 38091 - DNA, 19 bp, Homo sapiens
  siRNA target sequence for REV3L (NM_002912.1,4635-4653).
ggaatcaacgttaattcaa

SEQ ID NO: 38092 - DNA, 19 bp, Homo sapiens
  siRNA target sequence for REV3L (NM_002912.1,4636-4654).
gaatcaacgttaattcaaa

SEQ ID NO: 38093 - DNA, 19 bp, Homo sapiens
  siRNA target sequence for REV3L (NM_002912.1,4643-4661).
cgttaattcaaaaaaatat

SEQ ID NO: 38094 - DNA, 19 bp, Homo sapiens
  siRNA target sequence for REV3L (NM_002912.1,4718-4736).
gtatgtcctcaaagataga

SEQ ID NO: 38095 - DNA, 19 bp, Homo sapiens
  siRNA target sequence for REV3L (NM_002912.1,4722-4740).
gtcctcaaagatagaagat

SEQ ID NO: 38096 - DNA, 19 bp, Homo sapiens
  siRNA target sequence for REV3L (NM_002912.1,4770-4788).
gtcatcaatcggaaagtta

SEQ ID NO: 38097 - DNA, 19 bp, Homo sapiens
  siRNA target sequence for REV3L (NM_002912.1,4775-4793).
caatcggaaagttaagtga

SEQ ID NO: 38098 - DNA, 19 bp, Homo sapiens
  siRNA target sequence for REV3L (NM_002912.1,4798-4816).
cgcaattccctagaatcaa

SEQ ID NO: 38099 - DNA, 19 bp, Homo sapiens
  siRNA target sequence for REV3L (NM_002912.1,4825-4843).
caagcatatacccctaatt

SEQ ID NO: 38100 - DNA, 19 bp, Homo sapiens
  siRNA target sequence for REV3L (NM_002912.1,4828-4846).
gcatatacccctaattttt

SEQ ID NO: 38101 - DNA, 19 bp, Homo sapiens
  siRNA target sequence for REV3L (NM_002912.1,4829-4847).
catatacccctaatttttt

SEQ ID NO: 38102 - DNA, 19 bp, Homo sapiens
  siRNA target sequence for REV3L (NM_002912.1,4880-4898).
gcatagcggaacagtcaaa

SEQ ID NO: 38103 - DNA, 19 bp, Homo sapiens
  siRNA target sequence for REV3L (NM_002912.1,4893-4911).
gtcaaagcacagtgaaact

SEQ ID NO: 38104 - DNA, 19 bp, Homo sapiens
  siRNA target sequence for REV3L (NM_002912.1,4945-4963).
caaatgcctaataattgct

SEQ ID NO: 38105 - DNA, 19 bp, Homo sapiens
  siRNA target sequence for REV3L (NM_002912.1,4973-4991).
ccttgagaagtccaatcaa

SEQ ID NO: 38106 - DNA, 19 bp, Homo sapiens
  siRNA target sequence for REV3L (NM_002912.1,4984-5002).
ccaatcaaacaaatagcat

SEQ ID NO: 38107 - DNA, 19 bp, Homo sapiens
  siRNA target sequence for REV3L (NM_002912.1,5013-5031).
gcaaaggggctttatttta

SEQ ID NO: 38108 - DNA, 19 bp, Homo sapiens
  siRNA target sequence for REV3L (NM_002912.1,5101-5119).
gcactttctcagtgtaaaa

SEQ ID NO: 38109 - DNA, 19 bp, Homo sapiens
  siRNA target sequence for REV3L (NM_002912.1,5209-5227).
gcacaaaatgcaaatacta

SEQ ID NO: 38110 - DNA, 19 bp, Homo sapiens
  siRNA target sequence for REV3L (NM_002912.1,5228-5246).
cacaagacccattatccaa

SEQ ID NO: 38111 - DNA, 19 bp, Homo sapiens
  siRNA target sequence for REV3L (NM_002912.1,5230-5248).
caagacccattatccaata

SEQ ID NO: 38112 - DNA, 19 bp, Homo sapiens
  siRNA target sequence for REV3L (NM_002912.1,5243-5261).
ccaataaacatcaaccaaa

SEQ ID NO: 38113 - DNA, 19 bp, Homo sapiens
  siRNA target sequence for REV3L (NM_002912.1,5273-5291).
ctggttcccttgagcataa

SEQ ID NO: 38114 - DNA, 19 bp, Homo sapiens
  siRNA target sequence for REV3L (NM_002912.1,5275-5293).
ggttcccttgagcataaca

SEQ ID NO: 38115 - DNA, 19 bp, Homo sapiens
  siRNA target sequence for REV3L (NM_002912.1,5276-5294).
gttcccttgagcataacaa

SEQ ID NO: 38116 - DNA, 19 bp, Homo sapiens
  siRNA target sequence for REV3L (NM_002912.1,5284-5302).
gagcataacaaagcaaata

SEQ ID NO: 38117 - DNA, 19 bp, Homo sapiens
  siRNA target sequence for REV3L (NM_002912.1,5335-5353).
cctcgaactcccagaagta

SEQ ID NO: 38118 - DNA, 19 bp, Homo sapiens
  siRNA target sequence for REV3L (NM_002912.1,5375-5393).
ccaaacttctcaaagtaga

SEQ ID NO: 38119 - DNA, 19 bp, Homo sapiens
  siRNA target sequence for REV3L (NM_002912.1,5383-5401).
ctcaaagtagactctttaa

SEQ ID NO: 38120 - DNA, 19 bp, Homo sapiens
  siRNA target sequence for REV3L (NM_002912.1,5419-5437).
cagttggataactctgtat

SEQ ID NO: 38121 - DNA, 19 bp, Homo sapiens
  siRNA target sequence for REV3L (NM_002912.1,5440-5458).
gatgatagtcccatctttt

SEQ ID NO: 38122 - DNA, 19 bp, Homo sapiens
  siRNA target sequence for REV3L (NM_002912.1,5470-5488).
ggctttgaaagttgttact

SEQ ID NO: 38123 - DNA, 19 bp, Homo sapiens
  siRNA target sequence for REV3L (NM_002912.1,5480-5498).
gttgttactcacttgaaga

SEQ ID NO: 38124 - DNA, 19 bp, Homo sapiens
  siRNA target sequence for REV3L (NM_002912.1,5487-5505).
ctcacttgaagatagttta

SEQ ID NO: 38125 - DNA, 19 bp, Homo sapiens
  siRNA target sequence for REV3L (NM_002912.1,5545-5563).
ggtcagactggattttgta

SEQ ID NO: 38126 - DNA, 19 bp, Homo sapiens
  siRNA target sequence for REV3L (NM_002912.1,5609-5627).
ctcagaagttcctaagtga

SEQ ID NO: 38127 - DNA, 19 bp, Homo sapiens
  siRNA target sequence for REV3L (NM_002912.1,5739-5757).
gattagatctggtacttta

SEQ ID NO: 38128 - DNA, 19 bp, Homo sapiens
  siRNA target sequence for REV3L (NM_002912.1,5750-5768).
gtactttaagtcctgaaat

SEQ ID NO: 38129 - DNA, 19 bp, Homo sapiens
  siRNA target sequence for REV3L (NM_002912.1,5773-5791).
gagaagtcaaccatagata

SEQ ID NO: 38130 - DNA, 19 bp, Homo sapiens
  siRNA target sequence for REV3L (NM_002912.1,5778-5796).
gtcaaccatagatagcaat

SEQ ID NO: 38131 - DNA, 19 bp, Homo sapiens
  siRNA target sequence for REV3L (NM_002912.1,5783-5801).
ccatagatagcaatgagaa

SEQ ID NO: 38132 - DNA, 19 bp, Homo sapiens
  siRNA target sequence for REV3L (NM_002912.1,5814-5832).
ccagtggaaaaatagcttt

SEQ ID NO: 38133 - DNA, 19 bp, Homo sapiens
  siRNA target sequence for REV3L (NM_002912.1,5839-5857).
ctaacaactcggtctaact

SEQ ID NO: 38134 - DNA, 19 bp, Homo sapiens
  siRNA target sequence for REV3L (NM_002912.1,5843-5861).
caactcggtctaactcaat

SEQ ID NO: 38135 - DNA, 19 bp, Homo sapiens
  siRNA target sequence for REV3L (NM_002912.1,5846-5864).
ctcggtctaactcaataat

SEQ ID NO: 38136 - DNA, 19 bp, Homo sapiens
  siRNA target sequence for REV3L (NM_002912.1,5849-5867).
ggtctaactcaataatgga

SEQ ID NO: 38137 - DNA, 19 bp, Homo sapiens
  siRNA target sequence for REV3L (NM_002912.1,5958-5976).
cccacagccaaacaattca

SEQ ID NO: 38138 - DNA, 19 bp, Homo sapiens
  siRNA target sequence for REV3L (NM_002912.1,5989-6007).
ggtcacaccagaaaagaaa

SEQ ID NO: 38139 - DNA, 19 bp, Homo sapiens
  siRNA target sequence for REV3L (NM_002912.1,6019-6037).
cttgactcagccaatacct

SEQ ID NO: 38140 - DNA, 19 bp, Homo sapiens
  siRNA target sequence for REV3L (NM_002912.1,6035-6053).
cctcttttactgcaatact

SEQ ID NO: 38141 - DNA, 19 bp, Homo sapiens
  siRNA target sequence for REV3L (NM_002912.1,6057-6075).
ctcccctgatggtgaactt

SEQ ID NO: 38142 - DNA, 19 bp, Homo sapiens
  siRNA target sequence for REV3L (NM_002912.1,6059-6077).
cccctgatggtgaacttgt

SEQ ID NO: 38143 - DNA, 19 bp, Homo sapiens
  siRNA target sequence for REV3L (NM_002912.1,6079-6097).
gacgtggcctgtgaagatt

SEQ ID NO: 38144 - DNA, 19 bp, Homo sapiens
  siRNA target sequence for REV3L (NM_002912.1,6100-6118).
gaactgtatgtttcaagaa

SEQ ID NO: 38145 - DNA, 19 bp, Homo sapiens
  siRNA target sequence for REV3L (NM_002912.1,6105-6123).
gtatgtttcaagaaacaat

SEQ ID NO: 38146 - DNA, 19 bp, Homo sapiens
  siRNA target sequence for REV3L (NM_002912.1,6109-6127).
gtttcaagaaacaatgata

SEQ ID NO: 38147 - DNA, 19 bp, Homo sapiens
  siRNA target sequence for REV3L (NM_002912.1,6167-6185).
gctctccttcacaatctaa

SEQ ID NO: 38148 - DNA, 19 bp, Homo sapiens
  siRNA target sequence for REV3L (NM_002912.1,6170-6188).
ctccttcacaatctaaaaa

SEQ ID NO: 38149 - DNA, 19 bp, Homo sapiens
  siRNA target sequence for REV3L (NM_002912.1,6200-6218).
cccctcgaactgctaacat

SEQ ID NO: 38150 - DNA, 19 bp, Homo sapiens
  siRNA target sequence for REV3L (NM_002912.1,6201-6219).
ccctcgaactgctaacatt

SEQ ID NO: 38151 - DNA, 19 bp, Homo sapiens
  siRNA target sequence for REV3L (NM_002912.1,6203-6221).
ctcgaactgctaacattct

SEQ ID NO: 38152 - DNA, 19 bp, Homo sapiens
  siRNA target sequence for REV3L (NM_002912.1,6205-6223).
cgaactgctaacattctga

SEQ ID NO: 38153 - DNA, 19 bp, Homo sapiens
  siRNA target sequence for REV3L (NM_002912.1,6263-6281).
caactttgttggatcatga

SEQ ID NO: 38154 - DNA, 19 bp, Homo sapiens
  siRNA target sequence for REV3L (NM_002912.1,6500-6518).
gtggccaaggagttgtcaa

SEQ ID NO: 38155 - DNA, 19 bp, Homo sapiens
  siRNA target sequence for REV3L (NM_002912.1,6503-6521).
gccaaggagttgtcaataa

SEQ ID NO: 38156 - DNA, 19 bp, Homo sapiens
  siRNA target sequence for REV3L (NM_002912.1,6514-6532).
gtcaataaagggtcaagta

SEQ ID NO: 38157 - DNA, 19 bp, Homo sapiens
  siRNA target sequence for REV3L (NM_002912.1,6516-6534).
caataaagggtcaagtaat

SEQ ID NO: 38158 - DNA, 19 bp, Homo sapiens
  siRNA target sequence for REV3L (NM_002912.1,6527-6545).
caagtaatagccctaagat

SEQ ID NO: 38159 - DNA, 19 bp, Homo sapiens
  siRNA target sequence for REV3L (NM_002912.1,6536-6554).
gccctaagatggttgaaga

SEQ ID NO: 38160 - DNA, 19 bp, Homo sapiens
  siRNA target sequence for REV3L (NM_002912.1,6538-6556).
cctaagatggttgaagata

SEQ ID NO: 38161 - DNA, 19 bp, Homo sapiens
  siRNA target sequence for REV3L (NM_002912.1,6539-6557).
ctaagatggttgaagataa

SEQ ID NO: 38162 - DNA, 19 bp, Homo sapiens
  siRNA target sequence for REV3L (NM_002912.1,6565-6583).
gtgattatgccttgcaaat

SEQ ID NO: 38163 - DNA, 19 bp, Homo sapiens
  siRNA target sequence for REV3L (NM_002912.1,6567-6585).
gattatgccttgcaaatgt

SEQ ID NO: 38164 - DNA, 19 bp, Homo sapiens
  siRNA target sequence for REV3L (NM_002912.1,6667-6685).
ccaactggagttgtaaaat

SEQ ID NO: 38165 - DNA, 19 bp, Homo sapiens
  siRNA target sequence for REV3L (NM_002912.1,6693-6711).
gaactttagctcttcagtt

SEQ ID NO: 38166 - DNA, 19 bp, Homo sapiens
  siRNA target sequence for REV3L (NM_002912.1,6727-6745).
cctgtagtgcctccaaaaa

SEQ ID NO: 38167 - DNA, 19 bp, Homo sapiens
  siRNA target sequence for REV3L (NM_002912.1,6747-6765).
ggatgtaagtccatgtata

SEQ ID NO: 38168 - DNA, 19 bp, Homo sapiens
  siRNA target sequence for REV3L (NM_002912.1,6831-6849).
cacgggatgtagtcaaact

SEQ ID NO: 38169 - DNA, 19 bp, Homo sapiens
  siRNA target sequence for REV3L (NM_002912.1,6887-6905).
caagtgatcccgaaaaaga

SEQ ID NO: 38170 - DNA, 19 bp, Homo sapiens
  siRNA target sequence for REV3L (NM_002912.1,6890-6908).
gtgatcccgaaaaagatga

SEQ ID NO: 38171 - DNA, 19 bp, Homo sapiens
  siRNA target sequence for REV3L (NM_002912.1,6944-6962).
cccctgattctccagtaat

SEQ ID NO: 38172 - DNA, 19 bp, Homo sapiens
  siRNA target sequence for REV3L (NM_002912.1,6980-6998).
caatatccccagattccaa

SEQ ID NO: 38173 - DNA, 19 bp, Homo sapiens
  siRNA target sequence for REV3L (NM_002912.1,7000-7018).
gcattaaatggagatgata

SEQ ID NO: 38174 - DNA, 19 bp, Homo sapiens
  siRNA target sequence for REV3L (NM_002912.1,7053-7071).
ggcttttgagaacttctta

SEQ ID NO: 38175 - DNA, 19 bp, Homo sapiens
  siRNA target sequence for REV3L (NM_002912.1,7054-7072).
gcttttgagaacttcttaa

SEQ ID NO: 38176 - DNA, 19 bp, Homo sapiens
  siRNA target sequence for REV3L (NM_002912.1,7115-7133).
ctcaagagcctctagtgat

SEQ ID NO: 38177 - DNA, 19 bp, Homo sapiens
  siRNA target sequence for REV3L (NM_002912.1,7126-7144).
ctagtgatatctccaatta

SEQ ID NO: 38178 - DNA, 19 bp, Homo sapiens
  siRNA target sequence for REV3L (NM_002912.1,7129-7147).
gtgatatctccaattaata

SEQ ID NO: 38179 - DNA, 19 bp, Homo sapiens
  siRNA target sequence for REV3L (NM_002912.1,7131-7149).
gatatctccaattaatact

SEQ ID NO: 38180 - DNA, 19 bp, Homo sapiens
  siRNA target sequence for REV3L (NM_002912.1,7162-7180).
gggaaatgtgaatcacttt

SEQ ID NO: 38181 - DNA, 19 bp, Homo sapiens
  siRNA target sequence for REV3L (NM_002912.1,7271-7289).
cacagaagttgagtaataa

SEQ ID NO: 38182 - DNA, 19 bp, Homo sapiens
  siRNA target sequence for REV3L (NM_002912.1,7273-7291).
cagaagttgagtaataaga

SEQ ID NO: 38183 - DNA, 19 bp, Homo sapiens
  siRNA target sequence for REV3L (NM_002912.1,7326-7344).
gttaacacaagcaaagaat

SEQ ID NO: 38184 - DNA, 19 bp, Homo sapiens
  siRNA target sequence for REV3L (NM_002912.1,7386-7404).
gattgatggaccatcttta

SEQ ID NO: 38185 - DNA, 19 bp, Homo sapiens
  siRNA target sequence for REV3L (NM_002912.1,7390-7408).
gatggaccatctttaaaca

SEQ ID NO: 38186 - DNA, 19 bp, Homo sapiens
  siRNA target sequence for REV3L (NM_002912.1,7456-7474).
gctttacatgagatacaaa

SEQ ID NO: 38187 - DNA, 19 bp, Homo sapiens
  siRNA target sequence for REV3L (NM_002912.1,7471-7489).
caaaatcttaccctaatca

SEQ ID NO: 38188 - DNA, 19 bp, Homo sapiens
  siRNA target sequence for REV3L (NM_002912.1,7497-7515).
gttgcatgctcgaactaga

SEQ ID NO: 38189 - DNA, 19 bp, Homo sapiens
  siRNA target sequence for REV3L (NM_002912.1,7558-7576).
ctgttctactgcatctcat

SEQ ID NO: 38190 - DNA, 19 bp, Homo sapiens
  siRNA target sequence for REV3L (NM_002912.1,7607-7625).
cagaactcacaggtgtaat

SEQ ID NO: 38191 - DNA, 19 bp, Homo sapiens
  siRNA target sequence for REV3L (NM_002912.1,7612-7630).
ctcacaggtgtaatagtga

SEQ ID NO: 38192 - DNA, 19 bp, Homo sapiens
  siRNA target sequence for REV3L (NM_002912.1,7618-7636).
ggtgtaatagtgattgata

SEQ ID NO: 38193 - DNA, 19 bp, Homo sapiens
  siRNA target sequence for REV3L (NM_002912.1,7648-7666).
gttttcagtcaagatatca

SEQ ID NO: 38194 - DNA, 19 bp, Homo sapiens
  siRNA target sequence for REV3L (NM_002912.1,7672-7690).
cagactccattacttatta

SEQ ID NO: 38195 - DNA, 19 bp, Homo sapiens
  siRNA target sequence for REV3L (NM_002912.1,7674-7692).
gactccattacttattaga

SEQ ID NO: 38196 - DNA, 19 bp, Homo sapiens
  siRNA target sequence for REV3L (NM_002912.1,7684-7702).
cttattagatctggaatta

SEQ ID NO: 38197 - DNA, 19 bp, Homo sapiens
  siRNA target sequence for REV3L (NM_002912.1,7734-7752).
gaaggcactttttcatgaa

SEQ ID NO: 38198 - DNA, 19 bp, Homo sapiens
  siRNA target sequence for REV3L (NM_002912.1,7781-7799).
ctgatattctgctaggata

SEQ ID NO: 38199 - DNA, 19 bp, Homo sapiens
  siRNA target sequence for REV3L (NM_002912.1,7792-7810).
ctaggatatgagattcaga

SEQ ID NO: 38200 - DNA, 19 bp, Homo sapiens
  siRNA target sequence for REV3L (NM_002912.1,7817-7835).
cctggggttacctcttaca

SEQ ID NO: 38201 - DNA, 19 bp, Homo sapiens
  siRNA target sequence for REV3L (NM_002912.1,7818-7836).
ctggggttacctcttacaa

SEQ ID NO: 38202 - DNA, 19 bp, Homo sapiens
  siRNA target sequence for REV3L (NM_002912.1,7834-7852).
caaagggctgccgctttaa

SEQ ID NO: 38203 - DNA, 19 bp, Homo sapiens
  siRNA target sequence for REV3L (NM_002912.1,7841-7859).
ctgccgctttaagtattga

SEQ ID NO: 38204 - DNA, 19 bp, Homo sapiens
  siRNA target sequence for REV3L (NM_002912.1,7843-7861).
gccgctttaagtattgact

SEQ ID NO: 38205 - DNA, 19 bp, Homo sapiens
  siRNA target sequence for REV3L (NM_002912.1,7858-7876).
gacttatgtcggatgatct

SEQ ID NO: 38206 - DNA, 19 bp, Homo sapiens
  siRNA target sequence for REV3L (NM_002912.1,7877-7895).
ctcgggtgccagatgacaa

SEQ ID NO: 38207 - DNA, 19 bp, Homo sapiens
  siRNA target sequence for REV3L (NM_002912.1,7879-7897).
cgggtgccagatgacaaaa

SEQ ID NO: 38208 - DNA, 19 bp, Homo sapiens
  siRNA target sequence for REV3L (NM_002912.1,7880-7898).
gggtgccagatgacaaaat

SEQ ID NO: 38209 - DNA, 19 bp, Homo sapiens
  siRNA target sequence for REV3L (NM_002912.1,7924-7942).
gatgagtatggatcatata

SEQ ID NO: 38210 - DNA, 19 bp, Homo sapiens
  siRNA target sequence for REV3L (NM_002912.1,7927-7945).
gagtatggatcatatacaa

SEQ ID NO: 38211 - DNA, 19 bp, Homo sapiens
  siRNA target sequence for REV3L (NM_002912.1,7943-7961).
caatgagtgagataaatat

SEQ ID NO: 38212 - DNA, 19 bp, Homo sapiens
  siRNA target sequence for REV3L (NM_002912.1,7963-7981).
gttggccgaattacactaa

SEQ ID NO: 38213 - DNA, 19 bp, Homo sapiens
  siRNA target sequence for REV3L (NM_002912.1,7967-7985).
gccgaattacactaaatct

SEQ ID NO: 38214 - DNA, 19 bp, Homo sapiens
  siRNA target sequence for REV3L (NM_002912.1,7968-7986).
ccgaattacactaaatctt

SEQ ID NO: 38215 - DNA, 19 bp, Homo sapiens
  siRNA target sequence for REV3L (NM_002912.1,7969-7987).
cgaattacactaaatcttt

SEQ ID NO: 38216 - DNA, 19 bp, Homo sapiens
  siRNA target sequence for REV3L (NM_002912.1,7984-8002).
ctttggagaatcatgagaa

SEQ ID NO: 38217 - DNA, 19 bp, Homo sapiens
  siRNA target sequence for REV3L (NM_002912.1,8005-8023).
gaggtggctctaactaact

SEQ ID NO: 38218 - DNA, 19 bp, Homo sapiens
  siRNA target sequence for REV3L (NM_002912.1,8008-8026).
gtggctctaactaactaca

SEQ ID NO: 38219 - DNA, 19 bp, Homo sapiens
  siRNA target sequence for REV3L (NM_002912.1,8093-8111).
cagactggtttgataacaa

SEQ ID NO: 38220 - DNA, 19 bp, Homo sapiens
  siRNA target sequence for REV3L (NM_002912.1,8104-8122).
gataacaagacagatctat

SEQ ID NO: 38221 - DNA, 19 bp, Homo sapiens
  siRNA target sequence for REV3L (NM_002912.1,8129-8147).
ggaaaatggttgatcatta

SEQ ID NO: 38222 - DNA, 19 bp, Homo sapiens
  siRNA target sequence for REV3L (NM_002912.1,8130-8148).
gaaaatggttgatcattat

SEQ ID NO: 38223 - DNA, 19 bp, Homo sapiens
  siRNA target sequence for REV3L (NM_002912.1,8153-8171).
gccgtgtccgtggaaatct

SEQ ID NO: 38224 - DNA, 19 bp, Homo sapiens
  siRNA target sequence for REV3L (NM_002912.1,8161-8179).
cgtggaaatctccaaatgt

SEQ ID NO: 38225 - DNA, 19 bp, Homo sapiens
  siRNA target sequence for REV3L (NM_002912.1,8208-8226).
cagtgagatggctagactt

SEQ ID NO: 38226 - DNA, 19 bp, Homo sapiens
  siRNA target sequence for REV3L (NM_002912.1,8210-8228).
gtgagatggctagactttt

SEQ ID NO: 38227 - DNA, 19 bp, Homo sapiens
  siRNA target sequence for REV3L (NM_002912.1,8266-8284).
cagtaccgtgtggaatcaa

SEQ ID NO: 38228 - DNA, 19 bp, Homo sapiens
  siRNA target sequence for REV3L (NM_002912.1,8272-8290).
cgtgtggaatcaatgatgt

SEQ ID NO: 38229 - DNA, 19 bp, Homo sapiens
  siRNA target sequence for REV3L (NM_002912.1,8273-8291).
gtgtggaatcaatgatgtt

SEQ ID NO: 38230 - DNA, 19 bp, Homo sapiens
  siRNA target sequence for REV3L (NM_002912.1,8286-8304).
gatgttgcgtattgctaaa

SEQ ID NO: 38231 - DNA, 19 bp, Homo sapiens
  siRNA target sequence for REV3L (NM_002912.1,8289-8307).
gttgcgtattgctaaacca

SEQ ID NO: 38232 - DNA, 19 bp, Homo sapiens
  siRNA target sequence for REV3L (NM_002912.1,8392-8410).
gaatcccgcttctatagca

SEQ ID NO: 38233 - DNA, 19 bp, Homo sapiens
  siRNA target sequence for REV3L (NM_002912.1,8419-8437).
ctcgttttggatttccaat

SEQ ID NO: 38234 - DNA, 19 bp, Homo sapiens
  siRNA target sequence for REV3L (NM_002912.1,8440-8458).
ctttatccttctattgtga

SEQ ID NO: 38235 - DNA, 19 bp, Homo sapiens
  siRNA target sequence for REV3L (NM_002912.1,8450-8468).
ctattgtgattgcatataa

SEQ ID NO: 38236 - DNA, 19 bp, Homo sapiens
  siRNA target sequence for REV3L (NM_002912.1,8461-8479).
gcatataactactgctttt

SEQ ID NO: 38237 - DNA, 19 bp, Homo sapiens
  siRNA target sequence for REV3L (NM_002912.1,8499-8517).
ggagaacttgggaaagtat

SEQ ID NO: 38238 - DNA, 19 bp, Homo sapiens
  siRNA target sequence for REV3L (NM_002912.1,8514-8532).
gtatgatgagttcaaattt

SEQ ID NO: 38239 - DNA, 19 bp, Homo sapiens
  siRNA target sequence for REV3L (NM_002912.1,8547-8565).
gagagtacctccagattta

SEQ ID NO: 38240 - DNA, 19 bp, Homo sapiens
  siRNA target sequence for REV3L (NM_002912.1,8549-8567).
gagtacctccagatttact

SEQ ID NO: 38241 - DNA, 19 bp, Homo sapiens
  siRNA target sequence for REV3L (NM_002912.1,8551-8569).
gtacctccagatttacttt

SEQ ID NO: 38242 - DNA, 19 bp, Homo sapiens
  siRNA target sequence for REV3L (NM_002912.1,8572-8590).
caagttaggcatgatatca

SEQ ID NO: 38243 - DNA, 19 bp, Homo sapiens
  siRNA target sequence for REV3L (NM_002912.1,8622-8640).
gccttcagtaagaaaaggt

SEQ ID NO: 38244 - DNA, 19 bp, Homo sapiens
  siRNA target sequence for REV3L (NM_002912.1,8662-8680).
gaaattttgaagactagat

SEQ ID NO: 38245 - DNA, 19 bp, Homo sapiens
  siRNA target sequence for REV3L (NM_002912.1,8744-8762).
cgcgtcagttgggacttaa

SEQ ID NO: 38246 - DNA, 19 bp, Homo sapiens
  siRNA target sequence for REV3L (NM_002912.1,8747-8765).
gtcagttgggacttaagct

SEQ ID NO: 38247 - DNA, 19 bp, Homo sapiens
  siRNA target sequence for REV3L (NM_002912.1,8778-8796).
cacatttggctatacatct

SEQ ID NO: 38248 - DNA, 19 bp, Homo sapiens
  siRNA target sequence for REV3L (NM_002912.1,8787-8805).
ctatacatctgctaatttt

SEQ ID NO: 38249 - DNA, 19 bp, Homo sapiens
  siRNA target sequence for REV3L (NM_002912.1,8829-8847).
ggttggcgatagtattgtt

SEQ ID NO: 38250 - DNA, 19 bp, Homo sapiens
  siRNA target sequence for REV3L (NM_002912.1,8834-8852).
gcgatagtattgttcacaa

SEQ ID NO: 38251 - DNA, 19 bp, Homo sapiens
  siRNA target sequence for REV3L (NM_002912.1,8862-8880).
gaccttggaacgagctatt

SEQ ID NO: 38252 - DNA, 19 bp, Homo sapiens
  siRNA target sequence for REV3L (NM_002912.1,8864-8882).
ccttggaacgagctattaa

SEQ ID NO: 38253 - DNA, 19 bp, Homo sapiens
  siRNA target sequence for REV3L (NM_002912.1,8865-8883).
cttggaacgagctattaaa

SEQ ID NO: 38254 - DNA, 19 bp, Homo sapiens
  siRNA target sequence for REV3L (NM_002912.1,8876-8894).
ctattaaactggtgaatga

SEQ ID NO: 38255 - DNA, 19 bp, Homo sapiens
  siRNA target sequence for REV3L (NM_002912.1,8926-8944).
ggcgatactgacagtatgt

SEQ ID NO: 38256 - DNA, 19 bp, Homo sapiens
  siRNA target sequence for REV3L (NM_002912.1,8927-8945).
gcgatactgacagtatgtt

SEQ ID NO: 38257 - DNA, 19 bp, Homo sapiens
  siRNA target sequence for REV3L (NM_002912.1,8928-8946).
cgatactgacagtatgttt

SEQ ID NO: 38258 - DNA, 19 bp, Homo sapiens
  siRNA target sequence for REV3L (NM_002912.1,8939-8957).
gtatgtttgtgctactgaa

SEQ ID NO: 38259 - DNA, 19 bp, Homo sapiens
  siRNA target sequence for REV3L (NM_002912.1,8964-8982).
cactaaggagcagtctttt

SEQ ID NO: 38260 - DNA, 19 bp, Homo sapiens
  siRNA target sequence for REV3L (NM_002912.1,8970-8988).
ggagcagtcttttaagatt

SEQ ID NO: 38261 - DNA, 19 bp, Homo sapiens
  siRNA target sequence for REV3L (NM_002912.1,9010-9028).
gtaactgctaccaatccta

SEQ ID NO: 38262 - DNA, 19 bp, Homo sapiens
  siRNA target sequence for REV3L (NM_002912.1,9089-9107).
ggtatgtgggttacatgta

SEQ ID NO: 38263 - DNA, 19 bp, Homo sapiens
  siRNA target sequence for REV3L (NM_002912.1,9090-9108).
gtatgtgggttacatgtat

SEQ ID NO: 38264 - DNA, 19 bp, Homo sapiens
  siRNA target sequence for REV3L (NM_002912.1,9098-9116).
gttacatgtatgaaacact

SEQ ID NO: 38265 - DNA, 19 bp, Homo sapiens
  siRNA target sequence for REV3L (NM_002912.1,9177-9195).
ccctgctgtttctaagata

SEQ ID NO: 38266 - DNA, 19 bp, Homo sapiens
  siRNA target sequence for REV3L (NM_002912.1,9203-9221).
gttctctaaagctgctatt

SEQ ID NO: 38267 - DNA, 19 bp, Homo sapiens
  siRNA target sequence for REV3L (NM_002912.1,9217-9235).
ctatttgaaacgagagata

SEQ ID NO: 38268 - DNA, 19 bp, Homo sapiens
  siRNA target sequence for REV3L (NM_002912.1,9227-9245).
cgagagatataagtctaat

SEQ ID NO: 38269 - DNA, 19 bp, Homo sapiens
  siRNA target sequence for REV3L (NM_002912.1,9228-9246).
gagagatataagtctaatt

SEQ ID NO: 38270 - DNA, 19 bp, Homo sapiens
  siRNA target sequence for REV3L (NM_002912.1,9230-9248).
gagatataagtctaattaa

SEQ ID NO: 38271 - DNA, 19 bp, Homo sapiens
  siRNA target sequence for REV3L (NM_002912.1,9239-9257).
gtctaattaaacagtatgt

SEQ ID NO: 38272 - DNA, 19 bp, Homo sapiens
  siRNA target sequence for REV3L (NM_002912.1,9252-9270).
gtatgttcagcgacaatgt

SEQ ID NO: 38273 - DNA, 19 bp, Homo sapiens
  siRNA target sequence for REV3L (NM_002912.1,9256-9274).
gttcagcgacaatgtatga

SEQ ID NO: 38274 - DNA, 19 bp, Homo sapiens
  siRNA target sequence for REV3L (NM_002912.1,9291-9309).
ggccagcatacaagacttt

SEQ ID NO: 38275 - DNA, 19 bp, Homo sapiens
  siRNA target sequence for REV3L (NM_002912.1,9292-9310).
gccagcatacaagacttta

SEQ ID NO: 38276 - DNA, 19 bp, Homo sapiens
  siRNA target sequence for REV3L (NM_002912.1,9293-9311).
ccagcatacaagactttat

SEQ ID NO: 38277 - DNA, 19 bp, Homo sapiens
  siRNA target sequence for REV3L (NM_002912.1,9361-9379).
gtgccagcccttgaactta

SEQ ID NO: 38278 - DNA, 19 bp, Homo sapiens
  siRNA target sequence for REV3L (NM_002912.1,9363-9381).
gccagcccttgaacttaca

SEQ ID NO: 38279 - DNA, 19 bp, Homo sapiens
  siRNA target sequence for REV3L (NM_002912.1,9431-9449).
gagtgccatacgtcatcat

SEQ ID NO: 38280 - DNA, 19 bp, Homo sapiens
  siRNA target sequence for REV3L (NM_002912.1,9433-9451).
gtgccatacgtcatcattt

SEQ ID NO: 38281 - DNA, 19 bp, Homo sapiens
  siRNA target sequence for REV3L (NM_002912.1,9435-9453).
gccatacgtcatcatttat

SEQ ID NO: 38282 - DNA, 19 bp, Homo sapiens
  siRNA target sequence for REV3L (NM_002912.1,9461-9479).
ccggagtaccacttatcca

SEQ ID NO: 38283 - DNA, 19 bp, Homo sapiens
  siRNA target sequence for REV3L (NM_002912.1,9524-9542).
gactgaatgctacttacta

SEQ ID NO: 38284 - DNA, 19 bp, Homo sapiens
  siRNA target sequence for REV3L (NM_002912.1,9528-9546).
gaatgctacttactatatt

SEQ ID NO: 38285 - DNA, 19 bp, Homo sapiens
  siRNA target sequence for REV3L (NM_002912.1,9532-9550).
gctacttactatattacca

SEQ ID NO: 38286 - DNA, 19 bp, Homo sapiens
  siRNA target sequence for REV3L (NM_002912.1,9563-9581).
cacccttggcaagaatctt

SEQ ID NO: 38287 - DNA, 19 bp, Homo sapiens
  siRNA target sequence for REV3L (NM_002912.1,9571-9589).
gcaagaatcttctcactta

SEQ ID NO: 38288 - DNA, 19 bp, Homo sapiens
  siRNA target sequence for REV3L (NM_002912.1,9579-9597).
cttctcacttattggtatt

SEQ ID NO: 38289 - DNA, 19 bp, Homo sapiens
  siRNA target sequence for REV3L (NM_002912.1,9619-9637).
gaattaccaaggatccata

SEQ ID NO: 38290 - DNA, 19 bp, Homo sapiens
  siRNA target sequence for REV3L (NM_002912.1,9645-9663).
cagctcctcgcgaagtgaa

SEQ ID NO: 38291 - DNA, 19 bp, Homo sapiens
  siRNA target sequence for REV3L (NM_002912.1,9672-9690).
gcggaaaggcactatttca

SEQ ID NO: 38292 - DNA, 19 bp, Homo sapiens
  siRNA target sequence for REV3L (NM_002912.1,9679-9697).
ggcactatttcacaatatt

SEQ ID NO: 38293 - DNA, 19 bp, Homo sapiens
  siRNA target sequence for REV3L (NM_002912.1,9680-9698).
gcactatttcacaatattt

SEQ ID NO: 38294 - DNA, 19 bp, Homo sapiens
  siRNA target sequence for REV3L (NM_002912.1,9738-9756).
gcatggcatctgtagtaaa

SEQ ID NO: 38295 - DNA, 19 bp, Homo sapiens
  siRNA target sequence for REV3L (NM_002912.1,9818-9836).
gtcaacaggagcaacttgt

SEQ ID NO: 38296 - DNA, 19 bp, Homo sapiens
  siRNA target sequence for REV3L (NM_002912.1,9820-9838).
caacaggagcaacttgtaa

SEQ ID NO: 38297 - DNA, 19 bp, Homo sapiens
  siRNA target sequence for REV3L (NM_002912.1,9829-9847).
caacttgtaaagatatgca

SEQ ID NO: 38298 - DNA, 19 bp, Homo sapiens
  siRNA target sequence for REV3L (NM_002912.1,9849-9867).
gaactgtacaggttgcttt

SEQ ID NO: 38299 - DNA, 19 bp, Homo sapiens
  siRNA target sequence for REV3L (NM_002912.1,9871-9889).
cgacacatcccatgtgttt

SEQ ID NO: 38300 - DNA, 19 bp, Homo sapiens
  siRNA target sequence for REV3L (NM_002912.1,9920-9938).
cccgagtaaatagagaatt

SEQ ID NO: 38301 - DNA, 19 bp, Homo sapiens
  siRNA target sequence for REV3L (NM_002912.1,9949-9967).
ccatatctccggcagttat

SEQ ID NO: 38302 - DNA, 19 bp, Homo sapiens
  siRNA target sequence for REV3L (NM_002912.1,9950-9968).
catatctccggcagttatt

SEQ ID NO: 38303 - DNA, 19 bp, Homo sapiens
  siRNA target sequence for RFC1 (NM_002913.3,172-190).
gaaagaaacttgtaagtga

SEQ ID NO: 38304 - DNA, 19 bp, Homo sapiens
  siRNA target sequence for RFC1 (NM_002913.3,258-276).
gaaatcaaggtaaatagct

SEQ ID NO: 38305 - DNA, 19 bp, Homo sapiens
  siRNA target sequence for RFC1 (NM_002913.3,280-298).
gtaaagaggatgacttcaa

SEQ ID NO: 38306 - DNA, 19 bp, Homo sapiens
  siRNA target sequence for RFC1 (NM_002913.3,326-344).
gatcatctatgattcagat

SEQ ID NO: 38307 - DNA, 19 bp, Homo sapiens
  siRNA target sequence for RFC1 (NM_002913.3,356-374).
ggagacgttgcaggtaaaa

SEQ ID NO: 38308 - DNA, 19 bp, Homo sapiens
  siRNA target sequence for RFC1 (NM_002913.3,359-377).
gacgttgcaggtaaaaaat

SEQ ID NO: 38309 - DNA, 19 bp, Homo sapiens
  siRNA target sequence for RFC1 (NM_002913.3,409-427).
cttctaaacctggtaaaat

SEQ ID NO: 38310 - DNA, 19 bp, Homo sapiens
  siRNA target sequence for RFC1 (NM_002913.3,432-450).
cggcaggatcctgttacat

SEQ ID NO: 38311 - DNA, 19 bp, Homo sapiens
  siRNA target sequence for RFC1 (NM_002913.3,435-453).
caggatcctgttacataca

SEQ ID NO: 38312 - DNA, 19 bp, Homo sapiens
  siRNA target sequence for RFC1 (NM_002913.3,442-460).
ctgttacatacatttcaga

SEQ ID NO: 38313 - DNA, 19 bp, Homo sapiens
  siRNA target sequence for RFC1 (NM_002913.3,535-553).
gtcatcttggaacatcaaa

SEQ ID NO: 38314 - DNA, 19 bp, Homo sapiens
  siRNA target sequence for RFC1 (NM_002913.3,584-602).
caagaataagcctttatca

SEQ ID NO: 38315 - DNA, 19 bp, Homo sapiens
  siRNA target sequence for RFC1 (NM_002913.3,619-637).
ccacatcagtacttgatta

SEQ ID NO: 38316 - DNA, 19 bp, Homo sapiens
  siRNA target sequence for RFC1 (NM_002913.3,620-638).
cacatcagtacttgattat

SEQ ID NO: 38317 - DNA, 19 bp, Homo sapiens
  siRNA target sequence for RFC1 (NM_002913.3,652-670).
gtgtccaaagatctaataa

SEQ ID NO: 38318 - DNA, 19 bp, Homo sapiens
  siRNA target sequence for RFC1 (NM_002913.3,654-672).
gtccaaagatctaataaga

SEQ ID NO: 38319 - DNA, 19 bp, Homo sapiens
  siRNA target sequence for RFC1 (NM_002913.3,712-730).
cagatgagtctggattaaa

SEQ ID NO: 38320 - DNA, 19 bp, Homo sapiens
  siRNA target sequence for RFC1 (NM_002913.3,739-757).
ccatcgccaagcaattaca

SEQ ID NO: 38321 - DNA, 19 bp, Homo sapiens
  siRNA target sequence for RFC1 (NM_002913.3,784-802).
ggcagttgcatgaagatga

SEQ ID NO: 38322 - DNA, 19 bp, Homo sapiens
  siRNA target sequence for RFC1 (NM_002913.3,868-886).
cagaagcgggagaaacgtt

SEQ ID NO: 38323 - DNA, 19 bp, Homo sapiens
  siRNA target sequence for RFC1 (NM_002913.3,873-891).
gcgggagaaacgttttcat

SEQ ID NO: 38324 - DNA, 19 bp, Homo sapiens
  siRNA target sequence for RFC1 (NM_002913.3,889-907).
catctgtccaagccaattt

SEQ ID NO: 38325 - DNA, 19 bp, Homo sapiens
  siRNA target sequence for RFC1 (NM_002913.3,894-912).
gtccaagccaatttaagta

SEQ ID NO: 38326 - DNA, 19 bp, Homo sapiens
  siRNA target sequence for RFC1 (NM_002913.3,896-914).
ccaagccaatttaagtaaa

SEQ ID NO: 38327 - DNA, 19 bp, Homo sapiens
  siRNA target sequence for RFC1 (NM_002913.3,982-1000).
gtcctaggaagcaaagtaa

SEQ ID NO: 38328 - DNA, 19 bp, Homo sapiens
  siRNA target sequence for RFC1 (NM_002913.3,1023-1041).
cagcaacattccaagtcat

SEQ ID NO: 38329 - DNA, 19 bp, Homo sapiens
  siRNA target sequence for RFC1 (NM_002913.3,1081-1099).
gttctaagctggcaattat

SEQ ID NO: 38330 - DNA, 19 bp, Homo sapiens
  siRNA target sequence for RFC1 (NM_002913.3,1117-1135).
gctcttataaagaaataga

SEQ ID NO: 38331 - DNA, 19 bp, Homo sapiens
  siRNA target sequence for RFC1 (NM_002913.3,1134-1152).
gagcctgtggcctcaaaaa

SEQ ID NO: 38332 - DNA, 19 bp, Homo sapiens
  siRNA target sequence for RFC1 (NM_002913.3,1136-1154).
gcctgtggcctcaaaaaga

SEQ ID NO: 38333 - DNA, 19 bp, Homo sapiens
  siRNA target sequence for RFC1 (NM_002913.3,1137-1155).
cctgtggcctcaaaaagaa

SEQ ID NO: 38334 - DNA, 19 bp, Homo sapiens
  siRNA target sequence for RFC1 (NM_002913.3,1218-1236).
gctaaaaaagagtctgtaa

SEQ ID NO: 38335 - DNA, 19 bp, Homo sapiens
  siRNA target sequence for RFC1 (NM_002913.3,1256-1274).
gaaacgcactaattatcaa

SEQ ID NO: 38336 - DNA, 19 bp, Homo sapiens
  siRNA target sequence for RFC1 (NM_002913.3,1261-1279).
gcactaattatcaagctta

SEQ ID NO: 38337 - DNA, 19 bp, Homo sapiens
  siRNA target sequence for RFC1 (NM_002913.3,1262-1280).
cactaattatcaagcttat

SEQ ID NO: 38338 - DNA, 19 bp, Homo sapiens
  siRNA target sequence for RFC1 (NM_002913.3,1275-1293).
gcttatcgaagctacttaa

SEQ ID NO: 38339 - DNA, 19 bp, Homo sapiens
  siRNA target sequence for RFC1 (NM_002913.3,1276-1294).
cttatcgaagctacttaaa

SEQ ID NO: 38340 - DNA, 19 bp, Homo sapiens
  siRNA target sequence for RFC1 (NM_002913.3,1316-1334).
gggctccaaagaaatacca

SEQ ID NO: 38341 - DNA, 19 bp, Homo sapiens
  siRNA target sequence for RFC1 (NM_002913.3,1351-1369).
gcttggaaggccttatatt

SEQ ID NO: 38342 - DNA, 19 bp, Homo sapiens
  siRNA target sequence for RFC1 (NM_002913.3,1378-1396).
caggcgtgctggagtctat

SEQ ID NO: 38343 - DNA, 19 bp, Homo sapiens
  siRNA target sequence for RFC1 (NM_002913.3,1409-1427).
ggccaagtctctaattgaa

SEQ ID NO: 38344 - DNA, 19 bp, Homo sapiens
  siRNA target sequence for RFC1 (NM_002913.3,1415-1433).
gtctctaattgaacgttat

SEQ ID NO: 38345 - DNA, 19 bp, Homo sapiens
  siRNA target sequence for RFC1 (NM_002913.3,1497-1515).
ggacagtccaagagtgata

SEQ ID NO: 38346 - DNA, 19 bp, Homo sapiens
  siRNA target sequence for RFC1 (NM_002913.3,1498-1516).
gacagtccaagagtgataa

SEQ ID NO: 38347 - DNA, 19 bp, Homo sapiens
  siRNA target sequence for RFC1 (NM_002913.3,1574-1592).
gactatgccaggcaagaaa

SEQ ID NO: 38348 - DNA, 19 bp, Homo sapiens
  siRNA target sequence for RFC1 (NM_002913.3,1718-1736).
gagcaggccgacttccaaa

SEQ ID NO: 38349 - DNA, 19 bp, Homo sapiens
  siRNA target sequence for RFC1 (NM_002913.3,1830-1848).
gacagcaaggctaggaatt

SEQ ID NO: 38350 - DNA, 19 bp, Homo sapiens
  siRNA target sequence for RFC1 (NM_002913.3,1886-1904).
gctctgggtggataaatat

SEQ ID NO: 38351 - DNA, 19 bp, Homo sapiens
  siRNA target sequence for RFC1 (NM_002913.3,1912-1930).
cctcgctcaagaccataat

SEQ ID NO: 38352 - DNA, 19 bp, Homo sapiens
  siRNA target sequence for RFC1 (NM_002913.3,1913-1931).
ctcgctcaagaccataatt

SEQ ID NO: 38353 - DNA, 19 bp, Homo sapiens
  siRNA target sequence for RFC1 (NM_002913.3,1994-2012).
gagttcttccgaagataaa

SEQ ID NO: 38354 - DNA, 19 bp, Homo sapiens
  siRNA target sequence for RFC1 (NM_002913.3,2016-2034).
cacgcaaagtttggtaaat

SEQ ID NO: 38355 - DNA, 19 bp, Homo sapiens
  siRNA target sequence for RFC1 (NM_002913.3,2172-2190).
cggagtaagagcagtttga

SEQ ID NO: 38356 - DNA, 19 bp, Homo sapiens
  siRNA target sequence for RFC1 (NM_002913.3,2173-2191).
ggagtaagagcagtttgaa

SEQ ID NO: 38357 - DNA, 19 bp, Homo sapiens
  siRNA target sequence for RFC1 (NM_002913.3,2202-2220).
gctgagtcactgaacaata

SEQ ID NO: 38358 - DNA, 19 bp, Homo sapiens
  siRNA target sequence for RFC1 (NM_002913.3,2269-2287).
cgaaacatgctctcatcat

SEQ ID NO: 38359 - DNA, 19 bp, Homo sapiens
  siRNA target sequence for RFC1 (NM_002913.3,2337-2355).
gaattaattggcctgataa

SEQ ID NO: 38360 - DNA, 19 bp, Homo sapiens
  siRNA target sequence for RFC1 (NM_002913.3,2346-2364).
ggcctgataaaacatacta

SEQ ID NO: 38361 - DNA, 19 bp, Homo sapiens
  siRNA target sequence for RFC1 (NM_002913.3,2347-2365).
gcctgataaaacatactaa

SEQ ID NO: 38362 - DNA, 19 bp, Homo sapiens
  siRNA target sequence for RFC1 (NM_002913.3,2431-2449).
gttttgatcttcgttttca

SEQ ID NO: 38363 - DNA, 19 bp, Homo sapiens
  siRNA target sequence for RFC1 (NM_002913.3,2454-2472).
cctcgggttgaacagatta

SEQ ID NO: 38364 - DNA, 19 bp, Homo sapiens
  siRNA target sequence for RFC1 (NM_002913.3,2455-2473).
ctcgggttgaacagattaa

SEQ ID NO: 38365 - DNA, 19 bp, Homo sapiens
  siRNA target sequence for RFC1 (NM_002913.3,2518-2536).
cccctccagctatgaatga

SEQ ID NO: 38366 - DNA, 19 bp, Homo sapiens
  siRNA target sequence for RFC1 (NM_002913.3,2519-2537).
ccctccagctatgaatgaa

SEQ ID NO: 38367 - DNA, 19 bp, Homo sapiens
  siRNA target sequence for RFC1 (NM_002913.3,2547-2565).
ggagccaatcaagatatca

SEQ ID NO: 38368 - DNA, 19 bp, Homo sapiens
  siRNA target sequence for RFC1 (NM_002913.3,2564-2582).
cagacaggttttacataat

SEQ ID NO: 38369 - DNA, 19 bp, Homo sapiens
  siRNA target sequence for RFC1 (NM_002913.3,2566-2584).
gacaggttttacataatct

SEQ ID NO: 38370 - DNA, 19 bp, Homo sapiens
  siRNA target sequence for RFC1 (NM_002913.3,2568-2586).
caggttttacataatctga

SEQ ID NO: 38371 - DNA, 19 bp, Homo sapiens
  siRNA target sequence for RFC1 (NM_002913.3,2591-2609).
gtggtgtgcacgaagtaaa

SEQ ID NO: 38372 - DNA, 19 bp, Homo sapiens
  siRNA target sequence for RFC1 (NM_002913.3,2596-2614).
gtgcacgaagtaaagcatt

SEQ ID NO: 38373 - DNA, 19 bp, Homo sapiens
  siRNA target sequence for RFC1 (NM_002913.3,2598-2616).
gcacgaagtaaagcattaa

SEQ ID NO: 38374 - DNA, 19 bp, Homo sapiens
  siRNA target sequence for RFC1 (NM_002913.3,2601-2619).
cgaagtaaagcattaacct

SEQ ID NO: 38375 - DNA, 19 bp, Homo sapiens
  siRNA target sequence for RFC1 (NM_002913.3,2647-2665).
gagccaaaaaggatatcaa

SEQ ID NO: 38376 - DNA, 19 bp, Homo sapiens
  siRNA target sequence for RFC1 (NM_002913.3,2663-2681).
caaaatgggcccatttgat

SEQ ID NO: 38377 - DNA, 19 bp, Homo sapiens
  siRNA target sequence for RFC1 (NM_002913.3,2679-2697).
gatgttgcccggaaagtgt

SEQ ID NO: 38378 - DNA, 19 bp, Homo sapiens
  siRNA target sequence for RFC1 (NM_002913.3,2824-2842).
ggggtgacatgaaaaagca

SEQ ID NO: 38379 - DNA, 19 bp, Homo sapiens
  siRNA target sequence for RFC1 (NM_002913.3,2933-2951).
gcctgcgcaggccatttat

SEQ ID NO: 38380 - DNA, 19 bp, Homo sapiens
  siRNA target sequence for RFC1 (NM_002913.3,3031-3049).
cgtctacaggcaaacatga

SEQ ID NO: 38381 - DNA, 19 bp, Homo sapiens
  siRNA target sequence for RFC1 (NM_002913.3,3032-3050).
gtctacaggcaaacatgat

SEQ ID NO: 38382 - DNA, 19 bp, Homo sapiens
  siRNA target sequence for RFC1 (NM_002913.3,3037-3055).
caggcaaacatgatcgtat

SEQ ID NO: 38383 - DNA, 19 bp, Homo sapiens
  siRNA target sequence for RFC1 (NM_002913.3,3040-3058).
gcaaacatgatcgtattgt

SEQ ID NO: 38384 - DNA, 19 bp, Homo sapiens
  siRNA target sequence for RFC1 (NM_002913.3,3041-3059).
caaacatgatcgtattgtt

SEQ ID NO: 38385 - DNA, 19 bp, Homo sapiens
  siRNA target sequence for RFC1 (NM_002913.3,3065-3083).
cctggccttgcatatgagt

SEQ ID NO: 38386 - DNA, 19 bp, Homo sapiens
  siRNA target sequence for RFC1 (NM_002913.3,3120-3138).
gattatctgtcgcttctaa

SEQ ID NO: 38387 - DNA, 19 bp, Homo sapiens
  siRNA target sequence for RFC1 (NM_002913.3,3201-3219).
cttatggacacatattatt

SEQ ID NO: 38388 - DNA, 19 bp, Homo sapiens
  siRNA target sequence for RFC1 (NM_002913.3,3207-3225).
gacacatattatttgatga

SEQ ID NO: 38389 - DNA, 19 bp, Homo sapiens
  siRNA target sequence for RFC1 (NM_002913.3,3211-3229).
catattatttgatgaaaga

SEQ ID NO: 38390 - DNA, 19 bp, Homo sapiens
  siRNA target sequence for RFC1 (NM_002913.3,3313-3331).
ccttcacaagagcttacaa

SEQ ID NO: 38391 - DNA, 19 bp, Homo sapiens
  siRNA target sequence for RFC1 (NM_002913.3,3341-3359).
ccaccttactccatactca

SEQ ID NO: 38392 - DNA, 19 bp, Homo sapiens
  siRNA target sequence for RFC1 (NM_002913.3,3352-3370).
catactcacttcaagctat

SEQ ID NO: 38393 - DNA, 19 bp, Homo sapiens
  siRNA target sequence for RFC1 (NM_002913.3,3400-3418).
ccctggattcggaatacaa

SEQ ID NO: 38394 - DNA, 19 bp, Homo sapiens
  siRNA target sequence for RFC1 (NM_002913.3,3404-3422).
ggattcggaatacaatgaa

SEQ ID NO: 38395 - DNA, 19 bp, Homo sapiens
  siRNA target sequence for RFC1 (NM_002913.3,3455-3473).
gaaagaccaagatgctata

SEQ ID NO: 38396 - DNA, 19 bp, Homo sapiens
  siRNA target sequence for RFC1 (NM_002913.3,3459-3477).
gaccaagatgctatagaaa

SEQ ID NO: 38397 - DNA, 19 bp, Homo sapiens
  siRNA target sequence for RFC1 (NM_002913.3,3474-3492).
gaaactgatgccatgatca

SEQ ID NO: 38398 - DNA, 19 bp, Homo sapiens
  siRNA target sequence for RFC2 (NM_002914.3,128-146).
gaactgccgtgggttgaaa

SEQ ID NO: 38399 - DNA, 19 bp, Homo sapiens
  siRNA target sequence for RFC2 (NM_002914.3,134-152).
ccgtgggttgaaaaatata

SEQ ID NO: 38400 - DNA, 19 bp, Homo sapiens
  siRNA target sequence for RFC2 (NM_002914.3,265-283).
cggcaagaccacaagcatt

SEQ ID NO: 38401 - DNA, 19 bp, Homo sapiens
  siRNA target sequence for RFC2 (NM_002914.3,387-405).
ggagaaccatggaaatcta

SEQ ID NO: 38402 - DNA, 19 bp, Homo sapiens
  siRNA target sequence for RFC2 (NM_002914.3,420-438).
gcttcgcccttgcttgtaa

SEQ ID NO: 38403 - DNA, 19 bp, Homo sapiens
  siRNA target sequence for RFC2 (NM_002914.3,435-453).
gtaatgcttcggataagat

SEQ ID NO: 38404 - DNA, 19 bp, Homo sapiens
  siRNA target sequence for RFC2 (NM_002914.3,479-497).
gcagtcctccggtacacaa

SEQ ID NO: 38405 - DNA, 19 bp, Homo sapiens
  siRNA target sequence for RFC2 (NM_002914.3,480-498).
cagtcctccggtacacaaa

SEQ ID NO: 38406 - DNA, 19 bp, Homo sapiens
  siRNA target sequence for RFC2 (NM_002914.3,525-543).
ggctgatgaatgttatcga

SEQ ID NO: 38407 - DNA, 19 bp, Homo sapiens
  siRNA target sequence for RFC2 (NM_002914.3,572-590).
ggcctagaagccatcatct

SEQ ID NO: 38408 - DNA, 19 bp, Homo sapiens
  siRNA target sequence for RFC2 (NM_002914.3,634-652).
gtccaccttctcaggattt

SEQ ID NO: 38409 - DNA, 19 bp, Homo sapiens
  siRNA target sequence for RFC2 (NM_002914.3,751-769).
cgaagcctacaagattctt

SEQ ID NO: 38410 - DNA, 19 bp, Homo sapiens
  siRNA target sequence for RFC2 (NM_002914.3,787-805).
gggctactcaccagaagat

SEQ ID NO: 38411 - DNA, 19 bp, Homo sapiens
  siRNA target sequence for RFC2 (NM_002914.3,788-806).
ggctactcaccagaagata

SEQ ID NO: 38412 - DNA, 19 bp, Homo sapiens
  siRNA target sequence for RFC2 (NM_002914.3,789-807).
gctactcaccagaagatat

SEQ ID NO: 38413 - DNA, 19 bp, Homo sapiens
  siRNA target sequence for RFC2 (NM_002914.3,820-838).
ctttcgagtgtgtaaaact

SEQ ID NO: 38414 - DNA, 19 bp, Homo sapiens
  siRNA target sequence for RFC2 (NM_002914.3,837-855).
ctttccaaatggcagaata

SEQ ID NO: 38415 - DNA, 19 bp, Homo sapiens
  siRNA target sequence for RFC2 (NM_002914.3,874-892).
caaggaaattggatacact

SEQ ID NO: 38416 - DNA, 19 bp, Homo sapiens
  siRNA target sequence for RFC2 (NM_002914.3,885-903).
gatacactcacatgaaaat

SEQ ID NO: 38417 - DNA, 19 bp, Homo sapiens
  siRNA target sequence for RFC2 (NM_181471.1,416-434).
cccaaaggccgacataaga

SEQ ID NO: 38418 - DNA, 19 bp, Homo sapiens
  siRNA target sequence for RFC2 (NM_181471.1,417-435).
ccaaaggccgacataagat

SEQ ID NO: 38419 - DNA, 19 bp, Homo sapiens
  siRNA target sequence for RFC2 (NM_181471.1,426-444).
gacataagatcatcattct

SEQ ID NO: 38420 - DNA, 19 bp, Homo sapiens
  siRNA target sequence for RFC3 (NM_002915.2,122-140).
ggacggctggactatcaca

SEQ ID NO: 38421 - DNA, 19 bp, Homo sapiens
  siRNA target sequence for RFC3 (NM_002915.2,123-141).
gacggctggactatcacaa

SEQ ID NO: 38422 - DNA, 19 bp, Homo sapiens
  siRNA target sequence for RFC3 (NM_002915.2,241-259).
gtgtattctacgtgaactt

SEQ ID NO: 38423 - DNA, 19 bp, Homo sapiens
  siRNA target sequence for RFC3 (NM_002915.2,243-261).
gtattctacgtgaacttta

SEQ ID NO: 38424 - DNA, 19 bp, Homo sapiens
  siRNA target sequence for RFC3 (NM_002915.2,290-308).
gaacatcagaccatcacaa

SEQ ID NO: 38425 - DNA, 19 bp, Homo sapiens
  siRNA target sequence for RFC3 (NM_002915.2,301-319).
catcacaactccatctaaa

SEQ ID NO: 38426 - DNA, 19 bp, Homo sapiens
  siRNA target sequence for RFC3 (NM_002915.2,329-347).
gaaattagcaccattgcaa

SEQ ID NO: 38427 - DNA, 19 bp, Homo sapiens
  siRNA target sequence for RFC3 (NM_002915.2,336-354).
gcaccattgcaagtaacta

SEQ ID NO: 38428 - DNA, 19 bp, Homo sapiens
  siRNA target sequence for RFC3 (NM_002915.2,348-366).
gtaactaccaccttgaagt

SEQ ID NO: 38429 - DNA, 19 bp, Homo sapiens
  siRNA target sequence for RFC3 (NM_002915.2,355-373).
ccaccttgaagttaatcct

SEQ ID NO: 38430 - DNA, 19 bp, Homo sapiens
  siRNA target sequence for RFC3 (NM_002915.2,390-408).
gtgaccgagtagtcattca

SEQ ID NO: 38431 - DNA, 19 bp, Homo sapiens
  siRNA target sequence for RFC3 (NM_002915.2,427-445).
ggcacaatcacaacaactt

SEQ ID NO: 38432 - DNA, 19 bp, Homo sapiens
  siRNA target sequence for RFC3 (NM_002915.2,431-449).
caatcacaacaacttgaaa

SEQ ID NO: 38433 - DNA, 19 bp, Homo sapiens
  siRNA target sequence for RFC3 (NM_002915.2,456-474).
ctcaaagggattttaaagt

SEQ ID NO: 38434 - DNA, 19 bp, Homo sapiens
  siRNA target sequence for RFC3 (NM_002915.2,571-589).
gtgctgcaattctacatct

SEQ ID NO: 38435 - DNA, 19 bp, Homo sapiens
  siRNA target sequence for RFC3 (NM_002915.2,641-659).
cccagcattgaagatattt

SEQ ID NO: 38436 - DNA, 19 bp, Homo sapiens
  siRNA target sequence for RFC3 (NM_002915.2,653-671).
gatatttgccacgtgttat

SEQ ID NO: 38437 - DNA, 19 bp, Homo sapiens
  siRNA target sequence for RFC3 (NM_002915.2,708-726).
cacaactggctcatagact

SEQ ID NO: 38438 - DNA, 19 bp, Homo sapiens
  siRNA target sequence for RFC3 (NM_002915.2,776-794).
gcctgcagagtgcaacaat

SEQ ID NO: 38439 - DNA, 19 bp, Homo sapiens
  siRNA target sequence for RFC3 (NM_002915.2,781-799).
cagagtgcaacaatatcct

SEQ ID NO: 38440 - DNA, 19 bp, Homo sapiens
  siRNA target sequence for RFC3 (NM_002915.2,785-803).
gtgcaacaatatcctttta

SEQ ID NO: 38441 - DNA, 19 bp, Homo sapiens
  siRNA target sequence for RFC3 (NM_002915.2,787-805).
gcaacaatatccttttact

SEQ ID NO: 38442 - DNA, 19 bp, Homo sapiens
  siRNA target sequence for RFC3 (NM_002915.2,830-848).
gattgggaggtgtatctga

SEQ ID NO: 38443 - DNA, 19 bp, Homo sapiens
  siRNA target sequence for RFC3 (NM_002915.2,847-865).
gagggagactgcaaatgct

SEQ ID NO: 38444 - DNA, 19 bp, Homo sapiens
  siRNA target sequence for RFC3 (NM_002915.2,850-868).
ggagactgcaaatgctatt

SEQ ID NO: 38445 - DNA, 19 bp, Homo sapiens
  siRNA target sequence for RFC3 (NM_002915.2,920-938).
gagcttctaactcattgta

SEQ ID NO: 38446 - DNA, 19 bp, Homo sapiens
  siRNA target sequence for RFC3 (NM_002915.2,1054-1072).
gggtagcaaagccatttat

SEQ ID NO: 38447 - DNA, 19 bp, Homo sapiens
  siRNA target sequence for RFC3 (NM_002915.2,1082-1100).
gcgtttgtggccaaattca

SEQ ID NO: 38448 - DNA, 19 bp, Homo sapiens
  siRNA target sequence for RFC4 (NM_002916.3,226-244).
gcaagcatttcttaaaggt

SEQ ID NO: 38449 - DNA, 19 bp, Homo sapiens
  siRNA target sequence for RFC4 (NM_002916.3,333-351).
ccgttccctgggtggaaaa

SEQ ID NO: 38450 - DNA, 19 bp, Homo sapiens
  siRNA target sequence for RFC4 (NM_002916.3,401-419).
gcagtgctgaaaaaatctt

SEQ ID NO: 38451 - DNA, 19 bp, Homo sapiens
  siRNA target sequence for RFC4 (NM_002916.3,642-660).
cgtgtccgccttttaagat

SEQ ID NO: 38452 - DNA, 19 bp, Homo sapiens
  siRNA target sequence for RFC4 (NM_002916.3,643-661).
gtgtccgccttttaagatt

SEQ ID NO: 38453 - DNA, 19 bp, Homo sapiens
  siRNA target sequence for RFC4 (NM_002916.3,645-663).
gtccgccttttaagattgt

SEQ ID NO: 38454 - DNA, 19 bp, Homo sapiens
  siRNA target sequence for RFC4 (NM_002916.3,648-666).
cgccttttaagattgtgat

SEQ ID NO: 38455 - DNA, 19 bp, Homo sapiens
  siRNA target sequence for RFC4 (NM_002916.3,671-689).
gatgaagcagattctatga

SEQ ID NO: 38456 - DNA, 19 bp, Homo sapiens
  siRNA target sequence for RFC4 (NM_002916.3,736-754).
gaaaaccacccgattctgt

SEQ ID NO: 38457 - DNA, 19 bp, Homo sapiens
  siRNA target sequence for RFC4 (NM_002916.3,745-763).
ccgattctgtcttatctgt

SEQ ID NO: 38458 - DNA, 19 bp, Homo sapiens
  siRNA target sequence for RFC4 (NM_002916.3,746-764).
cgattctgtcttatctgta

SEQ ID NO: 38459 - DNA, 19 bp, Homo sapiens
  siRNA target sequence for RFC4 (NM_002916.3,766-784).
ctatgtcagtcgaataatt

SEQ ID NO: 38460 - DNA, 19 bp, Homo sapiens
  siRNA target sequence for RFC4 (NM_002916.3,795-813).
cctctagatgttcaaaatt

SEQ ID NO: 38461 - DNA, 19 bp, Homo sapiens
  siRNA target sequence for RFC4 (NM_002916.3,823-841).
gcctctgtcagataaaatt

SEQ ID NO: 38462 - DNA, 19 bp, Homo sapiens
  siRNA target sequence for RFC4 (NM_002916.3,825-843).
ctctgtcagataaaattca

SEQ ID NO: 38463 - DNA, 19 bp, Homo sapiens
  siRNA target sequence for RFC4 (NM_002916.3,891-909).
gtgatgagggaatagctta

SEQ ID NO: 38464 - DNA, 19 bp, Homo sapiens
  siRNA target sequence for RFC4 (NM_002916.3,898-916).
gggaatagcttatcttgtt

SEQ ID NO: 38465 - DNA, 19 bp, Homo sapiens
  siRNA target sequence for RFC4 (NM_002916.3,905-923).
gcttatcttgttaaagtgt

SEQ ID NO: 38466 - DNA, 19 bp, Homo sapiens
  siRNA target sequence for RFC4 (NM_002916.3,959-977).
caaagcgctactcgattaa

SEQ ID NO: 38467 - DNA, 19 bp, Homo sapiens
  siRNA target sequence for RFC4 (NM_002916.3,1099-1117).
ggtcaaggatttaatagat

SEQ ID NO: 38468 - DNA, 19 bp, Homo sapiens
  siRNA target sequence for RFC4 (NM_002916.3,1134-1152).
ctcagctcgtcaatcaact

SEQ ID NO: 38469 - DNA, 19 bp, Homo sapiens
  siRNA target sequence for RFC4 (NM_002916.3,1291-1309).
gcagcagttatctcagaat

SEQ ID NO: 38470 - DNA, 19 bp, Homo sapiens
  siRNA target sequence for RFC4 (NM_002916.3,1292-1310).
cagcagttatctcagaatt

SEQ ID NO: 38471 - DNA, 19 bp, Homo sapiens
  siRNA target sequence for RFC5 (NM_007370.3,203-221).
ggccacagaccctgaatga

SEQ ID NO: 38472 - DNA, 19 bp, Homo sapiens
  siRNA target sequence for RFC5 (NM_007370.3,204-222).
gccacagaccctgaatgat

SEQ ID NO: 38473 - DNA, 19 bp, Homo sapiens
  siRNA target sequence for RFC5 (NM_007370.3,206-224).
cacagaccctgaatgatct

SEQ ID NO: 38474 - DNA, 19 bp, Homo sapiens
  siRNA target sequence for RFC5 (NM_007370.3,246-264).
gagtaccattcagaagttt

SEQ ID NO: 38475 - DNA, 19 bp, Homo sapiens
  siRNA target sequence for RFC5 (NM_007370.3,339-357).
ctgtgcgaaacagctatat

SEQ ID NO: 38476 - DNA, 19 bp, Homo sapiens
  siRNA target sequence for RFC5 (NM_007370.3,344-362).
cgaaacagctatataaaga

SEQ ID NO: 38477 - DNA, 19 bp, Homo sapiens
  siRNA target sequence for RFC5 (NM_007370.3,387-405).
ggagctgaatgcttcagat

SEQ ID NO: 38478 - DNA, 19 bp, Homo sapiens
  siRNA target sequence for RFC5 (NM_007370.3,433-451).
ccgatcctgagctttgcta

SEQ ID NO: 38479 - DNA, 19 bp, Homo sapiens
  siRNA target sequence for RFC5 (NM_007370.3,448-466).
gctagcacaaggacaatat

SEQ ID NO: 38480 - DNA, 19 bp, Homo sapiens
  siRNA target sequence for RFC5 (NM_007370.3,449-467).
ctagcacaaggacaatatt

SEQ ID NO: 38481 - DNA, 19 bp, Homo sapiens
  siRNA target sequence for RFC5 (NM_007370.3,476-494).
gctttaagctagtgatctt

SEQ ID NO: 38482 - DNA, 19 bp, Homo sapiens
  siRNA target sequence for RFC5 (NM_007370.3,528-546).
gaatgccttgagaagagta

SEQ ID NO: 38483 - DNA, 19 bp, Homo sapiens
  siRNA target sequence for RFC5 (NM_007370.3,762-780).
gcgtagggctctgaacatt

SEQ ID NO: 38484 - DNA, 19 bp, Homo sapiens
  siRNA target sequence for RFC5 (NM_007370.3,763-781).
cgtagggctctgaacattt

SEQ ID NO: 38485 - DNA, 19 bp, Homo sapiens
  siRNA target sequence for RFC5 (NM_007370.3,846-864).
cccgctcaagtcagacatt

SEQ ID NO: 38486 - DNA, 19 bp, Homo sapiens
  siRNA target sequence for RFC5 (NM_007370.3,879-897).
ctggatgttgaatcaagat

SEQ ID NO: 38487 - DNA, 19 bp, Homo sapiens
  siRNA target sequence for RFC5 (NM_007370.3,943-961).
gggttggcactgcatgata

SEQ ID NO: 38488 - DNA, 19 bp, Homo sapiens
  siRNA target sequence for RFC5 (NM_007370.3,944-962).
ggttggcactgcatgatat

SEQ ID NO: 38489 - DNA, 19 bp, Homo sapiens
  siRNA target sequence for RFC5 (NM_007370.3,966-984).
gacagagatacacttgttt

SEQ ID NO: 38490 - DNA, 19 bp, Homo sapiens
  siRNA target sequence for RFC5 (NM_007370.3,1007-1025).
cttcagttcgaatacattt

SEQ ID NO: 38491 - DNA, 19 bp, Homo sapiens
  siRNA target sequence for RFC5 (NM_007370.3,1012-1030).
gttcgaatacatttattga

SEQ ID NO: 38492 - DNA, 19 bp, Homo sapiens
  siRNA target sequence for RFP (NM_006510.3,443-461).
ctcgactgcggccataaca

SEQ ID NO: 38493 - DNA, 19 bp, Homo sapiens
  siRNA target sequence for RFP (NM_006510.3,790-808).
gaaccagctcgaccattta

SEQ ID NO: 38494 - DNA, 19 bp, Homo sapiens
  siRNA target sequence for RFP (NM_006510.3,794-812).
cagctcgaccatttaaaaa

SEQ ID NO: 38495 - DNA, 19 bp, Homo sapiens
  siRNA target sequence for RFP (NM_006510.3,933-951).
ccttaaaggagcatgagta

SEQ ID NO: 38496 - DNA, 19 bp, Homo sapiens
  siRNA target sequence for RFP (NM_006510.3,934-952).
cttaaaggagcatgagtat

SEQ ID NO: 38497 - DNA, 19 bp, Homo sapiens
  siRNA target sequence for RFP (NM_006510.3,977-995).
ctagacttggccatctaca

SEQ ID NO: 38498 - DNA, 19 bp, Homo sapiens
  siRNA target sequence for RFP (NM_006510.3,980-998).
gacttggccatctacaata

SEQ ID NO: 38499 - DNA, 19 bp, Homo sapiens
  siRNA target sequence for RFP (NM_006510.3,1106-1124).
gacattggggacacattga

SEQ ID NO: 38500 - DNA, 19 bp, Homo sapiens
  siRNA target sequence for RFP (NM_006510.3,1199-1217).
gcccaaaaatgtctattct

SEQ ID NO: 38501 - DNA, 19 bp, Homo sapiens
  siRNA target sequence for RFP (NM_006510.3,1365-1383).
ggcaagtgcggtacagtta

SEQ ID NO: 38502 - DNA, 19 bp, Homo sapiens
  siRNA target sequence for RFP (NM_006510.3,1411-1429).
cgagaggttcaatctgttt

SEQ ID NO: 38503 - DNA, 19 bp, Homo sapiens
  siRNA target sequence for RFP (NM_006510.3,1828-1846).
ccccatgagtgggatagat

SEQ ID NO: 38504 - DNA, 19 bp, Homo sapiens
  siRNA target sequence for RFP (NM_006510.3,1866-1884).
ggaatcatggtcattccat

SEQ ID NO: 38505 - DNA, 19 bp, Homo sapiens
  siRNA target sequence for RFX2 (NM_000635.2,467-485).
gcagcacggcttcttactt

SEQ ID NO: 38506 - DNA, 19 bp, Homo sapiens
  siRNA target sequence for RFX2 (NM_000635.2,875-893).
cctccttcgggaaactgat

SEQ ID NO: 38507 - DNA, 19 bp, Homo sapiens
  siRNA target sequence for RFX2 (NM_000635.2,889-907).
ctgatccgttctgtgttta

SEQ ID NO: 38508 - DNA, 19 bp, Homo sapiens
  siRNA target sequence for RFX2 (NM_000635.2,1287-1305).
ctgcgaggcaactgtagat

SEQ ID NO: 38509 - DNA, 19 bp, Homo sapiens
  siRNA target sequence for RFX2 (NM_000635.2,1289-1307).
gcgaggcaactgtagatgt

SEQ ID NO: 38510 - DNA, 19 bp, Homo sapiens
  siRNA target sequence for RFX2 (NM_000635.2,1571-1589).
cacaggccatccgtaactt

SEQ ID NO: 38511 - DNA, 19 bp, Homo sapiens
  siRNA target sequence for RFX2 (NM_000635.2,1990-2008).
cagttcttgctgaaatggt

SEQ ID NO: 38512 - DNA, 19 bp, Homo sapiens
  siRNA target sequence for RFX2 (NM_000635.2,2159-2177).
ctgtgatgggagagttcaa

SEQ ID NO: 38513 - DNA, 19 bp, Homo sapiens
  siRNA target sequence for RFX2 (NM_000635.2,2201-2219).
cgctgctcgacaaagatga

SEQ ID NO: 38514 - DNA, 19 bp, Homo sapiens
  siRNA target sequence for RFX4 (NM_002920.3,171-189).
cactgagagctggattgaa

SEQ ID NO: 38515 - DNA, 19 bp, Homo sapiens
  siRNA target sequence for RFX4 (NM_002920.3,191-209).
gatgtctcaacgaaagtga

SEQ ID NO: 38516 - DNA, 19 bp, Homo sapiens
  siRNA target sequence for RFX4 (NM_002920.3,194-212).
gtctcaacgaaagtgaaaa

SEQ ID NO: 38517 - DNA, 19 bp, Homo sapiens
  siRNA target sequence for RFX4 (NM_002920.3,364-382).
cctcgcagtgccctctata

SEQ ID NO: 38518 - DNA, 19 bp, Homo sapiens
  siRNA target sequence for RFX4 (NM_002920.3,365-383).
ctcgcagtgccctctatat

SEQ ID NO: 38519 - DNA, 19 bp, Homo sapiens
  siRNA target sequence for RFX4 (NM_002920.3,369-387).
cagtgccctctatatgcat

SEQ ID NO: 38520 - DNA, 19 bp, Homo sapiens
  siRNA target sequence for RFX4 (NM_002920.3,371-389).
gtgccctctatatgcatta

SEQ ID NO: 38521 - DNA, 19 bp, Homo sapiens
  siRNA target sequence for RFX4 (NM_002920.3,374-392).
ccctctatatgcattacct

SEQ ID NO: 38522 - DNA, 19 bp, Homo sapiens
  siRNA target sequence for RFX4 (NM_002920.3,435-453).
cagctttggaaagatcata

SEQ ID NO: 38523 - DNA, 19 bp, Homo sapiens
  siRNA target sequence for RFX4 (NM_002920.3,457-475).
cagcagtttcctcagttaa

SEQ ID NO: 38524 - DNA, 19 bp, Homo sapiens
  siRNA target sequence for RFX4 (NM_002920.3,491-509).
ggacccgaggacagtcaaa

SEQ ID NO: 38525 - DNA, 19 bp, Homo sapiens
  siRNA target sequence for RFX4 (NM_002920.3,494-512).
cccgaggacagtcaaagta

SEQ ID NO: 38526 - DNA, 19 bp, Homo sapiens
  siRNA target sequence for RFX4 (NM_002920.3,542-560).
gctcccaatattatgatgt

SEQ ID NO: 38527 - DNA, 19 bp, Homo sapiens
  siRNA target sequence for RFX4 (NM_002920.3,676-694).
cccaatgtcaaagatctaa

SEQ ID NO: 38528 - DNA, 19 bp, Homo sapiens
  siRNA target sequence for RFX4 (NM_002920.3,677-695).
ccaatgtcaaagatctaaa

SEQ ID NO: 38529 - DNA, 19 bp, Homo sapiens
  siRNA target sequence for RFX4 (NM_002920.3,720-738).
gaaggtttctacctttatt

SEQ ID NO: 38530 - DNA, 19 bp, Homo sapiens
  siRNA target sequence for RFX4 (NM_002920.3,728-746).
ctacctttattatgatgta

SEQ ID NO: 38531 - DNA, 19 bp, Homo sapiens
  siRNA target sequence for RFX4 (NM_002920.3,866-884).
cctccacggtggtgaacat

SEQ ID NO: 38532 - DNA, 19 bp, Homo sapiens
  siRNA target sequence for RFX4 (NM_002920.3,971-989).
ctcaggtgattcgaaagtt

SEQ ID NO: 38533 - DNA, 19 bp, Homo sapiens
  siRNA target sequence for RFX4 (NM_002920.3,1048-1066).
cgaaacatcaagttcgaat

SEQ ID NO: 38534 - DNA, 19 bp, Homo sapiens
  siRNA target sequence for RFX4 (NM_002920.3,1073-1091).
gaaggttctcccaaattct

SEQ ID NO: 38535 - DNA, 19 bp, Homo sapiens
  siRNA target sequence for RFX4 (NM_002920.3,1092-1110).
gagacggcaaacatcacta

SEQ ID NO: 38536 - DNA, 19 bp, Homo sapiens
  siRNA target sequence for RFX4 (NM_002920.3,1150-1168).
gcagacatcacgttccaaa

SEQ ID NO: 38537 - DNA, 19 bp, Homo sapiens
  siRNA target sequence for RFX4 (NM_002920.3,1151-1169).
cagacatcacgttccaaat

SEQ ID NO: 38538 - DNA, 19 bp, Homo sapiens
  siRNA target sequence for RFX4 (NM_002920.3,1310-1328).
ccatcgagtcctacattga

SEQ ID NO: 38539 - DNA, 19 bp, Homo sapiens
  siRNA target sequence for RFX4 (NM_002920.3,1379-1397).
gacaagggtccttgaagaa

SEQ ID NO: 38540 - DNA, 19 bp, Homo sapiens
  siRNA target sequence for RFX4 (NM_002920.3,1403-1421).
cccagcagttcctcttgat

SEQ ID NO: 38541 - DNA, 19 bp, Homo sapiens
  siRNA target sequence for RFX4 (NM_002920.3,1473-1491).
ccccagcttcgggtctttt

SEQ ID NO: 38542 - DNA, 19 bp, Homo sapiens
  siRNA target sequence for RFX4 (NM_002920.3,1475-1493).
ccagcttcgggtcttttca

SEQ ID NO: 38543 - DNA, 19 bp, Homo sapiens
  siRNA target sequence for RFX4 (NM_002920.3,1482-1500).
cgggtcttttcacctaatt

SEQ ID NO: 38544 - DNA, 19 bp, Homo sapiens
  siRNA target sequence for RFX4 (NM_002920.3,1484-1502).
ggtcttttcacctaattca

SEQ ID NO: 38545 - DNA, 19 bp, Homo sapiens
  siRNA target sequence for RFX4 (NM_002920.3,1609-1627).
gtccgagaagagatcatct

SEQ ID NO: 38546 - DNA, 19 bp, Homo sapiens
  siRNA target sequence for RFX4 (NM_002920.3,1668-1686).
gttttctccagcaaaatct

SEQ ID NO: 38547 - DNA, 19 bp, Homo sapiens
  siRNA target sequence for RFX4 (NM_002920.3,1755-1773).
cagcactacaggtaatgga

SEQ ID NO: 38548 - DNA, 19 bp, Homo sapiens
  siRNA target sequence for RFX4 (NM_032491.2,122-140).
gccttcggagggtctgaat

SEQ ID NO: 38549 - DNA, 19 bp, Homo sapiens
  siRNA target sequence for RFX4 (NM_032491.2,129-147).
gagggtctgaattcttcat

SEQ ID NO: 38550 - DNA, 19 bp, Homo sapiens
  siRNA target sequence for RFX4 (NM_032491.2,177-195).
gcccactaagcagaaatat

SEQ ID NO: 38551 - DNA, 19 bp, Homo sapiens
  siRNA target sequence for RFX4 (NM_032491.2,198-216).
cggaatggtaccattacta

SEQ ID NO: 38552 - DNA, 19 bp, Homo sapiens
  siRNA target sequence for RFX4 (NM_032491.2,199-217).
ggaatggtaccattactat

SEQ ID NO: 38553 - DNA, 19 bp, Homo sapiens
  siRNA target sequence for RFX4 (NM_032491.2,1458-1476).
caggagcaatgcagtctta

SEQ ID NO: 38554 - DNA, 19 bp, Homo sapiens
  siRNA target sequence for RFX4 (NM_032491.2,1622-1640).
ggatacacgggaagctata

SEQ ID NO: 38555 - DNA, 19 bp, Homo sapiens
  siRNA target sequence for RFX4 (NM_032491.2,1627-1645).
cacgggaagctataactat

SEQ ID NO: 38556 - DNA, 19 bp, Homo sapiens
  siRNA target sequence for RFX4 (NM_032491.2,1785-1803).
cccggatggaaccttgttt

SEQ ID NO: 38557 - DNA, 19 bp, Homo sapiens
  siRNA target sequence for RFX4 (NM_032491.2,1868-1886).
gccaacacgtgctacacaa

SEQ ID NO: 38558 - DNA, 19 bp, Homo sapiens
  siRNA target sequence for RFX4 (NM_032491.2,1904-1922).
gcgaggtacggaaactcta

SEQ ID NO: 38559 - DNA, 19 bp, Homo sapiens
  siRNA target sequence for RFX4 (NM_032491.2,1914-1932).
gaaactctagtgacatgta

SEQ ID NO: 38560 - DNA, 19 bp, Homo sapiens
  siRNA target sequence for RFX4 (NM_032491.2,1947-1965).
cgcgcaggaattctgaata

SEQ ID NO: 38561 - DNA, 19 bp, Homo sapiens
  siRNA target sequence for RFX4 (NM_032491.2,1948-1966).
gcgcaggaattctgaatat

SEQ ID NO: 38562 - DNA, 19 bp, Homo sapiens
  siRNA target sequence for RFXDC1 (NM_173560.1,164-182).
gcaagggcttgctagtcta

SEQ ID NO: 38563 - DNA, 19 bp, Homo sapiens
  siRNA target sequence for RFXDC1 (NM_173560.1,165-183).
caagggcttgctagtctat

SEQ ID NO: 38564 - DNA, 19 bp, Homo sapiens
  siRNA target sequence for RFXDC1 (NM_173560.1,175-193).
ctagtctatccggaagaaa

SEQ ID NO: 38565 - DNA, 19 bp, Homo sapiens
  siRNA target sequence for RFXDC1 (NM_173560.1,434-452).
cgctgcagtggcttgaaga

SEQ ID NO: 38566 - DNA, 19 bp, Homo sapiens
  siRNA target sequence for RFXDC1 (NM_173560.1,505-523).
cactacttagatttctgta

SEQ ID NO: 38567 - DNA, 19 bp, Homo sapiens
  siRNA target sequence for RFXDC1 (NM_173560.1,582-600).
gtttcccctcctaacaaca

SEQ ID NO: 38568 - DNA, 19 bp, Homo sapiens
  siRNA target sequence for RFXDC1 (NM_173560.1,614-632).
caagaggccattcaaagta

SEQ ID NO: 38569 - DNA, 19 bp, Homo sapiens
  siRNA target sequence for RFXDC1 (NM_173560.1,617-635).
gaggccattcaaagtatca

SEQ ID NO: 38570 - DNA, 19 bp, Homo sapiens
  siRNA target sequence for RFXDC1 (NM_173560.1,639-657).
ctatgggattggcatcaaa

SEQ ID NO: 38571 - DNA, 19 bp, Homo sapiens
  siRNA target sequence for RFXDC1 (NM_173560.1,643-661).
gggattggcatcaaagaga

SEQ ID NO: 38572 - DNA, 19 bp, Homo sapiens
  siRNA target sequence for RFXDC1 (NM_173560.1,654-672).
caaagagagcagtgcatat

SEQ ID NO: 38573 - DNA, 19 bp, Homo sapiens
  siRNA target sequence for RFXDC1 (NM_173560.1,713-731).
ctggaagcaagctaaagaa

SEQ ID NO: 38574 - DNA, 19 bp, Homo sapiens
  siRNA target sequence for RFXDC1 (NM_173560.1,736-754).
ggtggcttcactcgtaaat

SEQ ID NO: 38575 - DNA, 19 bp, Homo sapiens
  siRNA target sequence for RFXDC1 (NM_173560.1,737-755).
gtggcttcactcgtaaata

SEQ ID NO: 38576 - DNA, 19 bp, Homo sapiens
  siRNA target sequence for RFXDC1 (NM_173560.1,739-757).
ggcttcactcgtaaatatt

SEQ ID NO: 38577 - DNA, 19 bp, Homo sapiens
  siRNA target sequence for RFXDC1 (NM_173560.1,803-821).
ctcaacaccttgtatacca

SEQ ID NO: 38578 - DNA, 19 bp, Homo sapiens
  siRNA target sequence for RFXDC1 (NM_173560.1,844-862).
gttgatacgctcataatga

SEQ ID NO: 38579 - DNA, 19 bp, Homo sapiens
  siRNA target sequence for RFXDC1 (NM_173560.1,847-865).
gatacgctcataatgatgt

SEQ ID NO: 38580 - DNA, 19 bp, Homo sapiens
  siRNA target sequence for RFXDC1 (NM_173560.1,888-906).
cctggacaatgcaattaat

SEQ ID NO: 38581 - DNA, 19 bp, Homo sapiens
  siRNA target sequence for RFXDC1 (NM_173560.1,979-997).
ctcgaaaatcctgttatca

SEQ ID NO: 38582 - DNA, 19 bp, Homo sapiens
  siRNA target sequence for RFXDC1 (NM_173560.1,981-999).
cgaaaatcctgttatcatt

SEQ ID NO: 38583 - DNA, 19 bp, Homo sapiens
  siRNA target sequence for RFXDC1 (NM_173560.1,991-1009).
gttatcattgatattttct

SEQ ID NO: 38584 - DNA, 19 bp, Homo sapiens
  siRNA target sequence for RFXDC1 (NM_173560.1,1008-1026).
ctgtgtttgtgactcaatt

SEQ ID NO: 38585 - DNA, 19 bp, Homo sapiens
  siRNA target sequence for RFXDC1 (NM_173560.1,1010-1028).
gtgtttgtgactcaattct

SEQ ID NO: 38586 - DNA, 19 bp, Homo sapiens
  siRNA target sequence for RFXDC1 (NM_173560.1,1053-1071).
cattcctgcaacaatgcaa

SEQ ID NO: 38587 - DNA, 19 bp, Homo sapiens
  siRNA target sequence for RFXDC1 (NM_173560.1,1077-1095).
gcctgaaagcttattagca

SEQ ID NO: 38588 - DNA, 19 bp, Homo sapiens
  siRNA target sequence for RFXDC1 (NM_173560.1,1122-1140).
ggaacagtgggttgtttca

SEQ ID NO: 38589 - DNA, 19 bp, Homo sapiens
  siRNA target sequence for RFXDC1 (NM_173560.1,1123-1141).
gaacagtgggttgtttcat

SEQ ID NO: 38590 - DNA, 19 bp, Homo sapiens
  siRNA target sequence for RFXDC1 (NM_173560.1,1184-1202).
ctattgtgcgaagatttgt

SEQ ID NO: 38591 - DNA, 19 bp, Homo sapiens
  siRNA target sequence for RFXDC1 (NM_173560.1,1191-1209).
gcgaagatttgtatcttct

SEQ ID NO: 38592 - DNA, 19 bp, Homo sapiens
  siRNA target sequence for RFXDC1 (NM_173560.1,1210-1228).
ctgaaacgacaaacatctt

SEQ ID NO: 38593 - DNA, 19 bp, Homo sapiens
  siRNA target sequence for RFXDC1 (NM_173560.1,1443-1461).
cactgtggaggcttttatt

SEQ ID NO: 38594 - DNA, 19 bp, Homo sapiens
  siRNA target sequence for RFXDC1 (NM_173560.1,1445-1463).
ctgtggaggcttttattga

SEQ ID NO: 38595 - DNA, 19 bp, Homo sapiens
  siRNA target sequence for RFXDC1 (NM_173560.1,1447-1465).
gtggaggcttttattgaat

SEQ ID NO: 38596 - DNA, 19 bp, Homo sapiens
  siRNA target sequence for RFXDC1 (NM_173560.1,1477-1495).
gtggtagaacagagagtta

SEQ ID NO: 38597 - DNA, 19 bp, Homo sapiens
  siRNA target sequence for RFXDC1 (NM_173560.1,1479-1497).
ggtagaacagagagttatt

SEQ ID NO: 38598 - DNA, 19 bp, Homo sapiens
  siRNA target sequence for RFXDC1 (NM_173560.1,1570-1588).
ggtgctcgagtaatgcata

SEQ ID NO: 38599 - DNA, 19 bp, Homo sapiens
  siRNA target sequence for RFXDC1 (NM_173560.1,1591-1609).
ctcaccttgaacaatgcat

SEQ ID NO: 38600 - DNA, 19 bp, Homo sapiens
  siRNA target sequence for RFXDC1 (NM_173560.1,1602-1620).
caatgcatccagttttggt

SEQ ID NO: 38601 - DNA, 19 bp, Homo sapiens
  siRNA target sequence for RFXDC1 (NM_173560.1,1636-1654).
cgaatgcttctcgatgaat

SEQ ID NO: 38602 - DNA, 19 bp, Homo sapiens
  siRNA target sequence for RFXDC1 (NM_173560.1,1637-1655).
gaatgcttctcgatgaata

SEQ ID NO: 38603 - DNA, 19 bp, Homo sapiens
  siRNA target sequence for RFXDC1 (NM_173560.1,1641-1659).
gcttctcgatgaatacatt

SEQ ID NO: 38604 - DNA, 19 bp, Homo sapiens
  siRNA target sequence for RFXDC1 (NM_173560.1,1668-1686).
catggagacccagtttaat

SEQ ID NO: 38605 - DNA, 19 bp, Homo sapiens
  siRNA target sequence for RFXDC1 (NM_173560.1,1676-1694).
cccagtttaataatgacaa

SEQ ID NO: 38606 - DNA, 19 bp, Homo sapiens
  siRNA target sequence for RFXDC1 (NM_173560.1,1699-1717).
caggagttacagaatttat

SEQ ID NO: 38607 - DNA, 19 bp, Homo sapiens
  siRNA target sequence for RFXDC1 (NM_173560.1,1710-1728).
gaatttattggacaagtat

SEQ ID NO: 38608 - DNA, 19 bp, Homo sapiens
  siRNA target sequence for RFXDC1 (NM_173560.1,1734-1752).
gaattcagatgcgagtaaa

SEQ ID NO: 38609 - DNA, 19 bp, Homo sapiens
  siRNA target sequence for RFXDC1 (NM_173560.1,1820-1838).
gcgacgctgtgaagaatga

SEQ ID NO: 38610 - DNA, 19 bp, Homo sapiens
  siRNA target sequence for RFXDC1 (NM_173560.1,1821-1839).
cgacgctgtgaagaatgaa

SEQ ID NO: 38611 - DNA, 19 bp, Homo sapiens
  siRNA target sequence for RFXDC1 (NM_173560.1,1822-1840).
gacgctgtgaagaatgaaa

SEQ ID NO: 38612 - DNA, 19 bp, Homo sapiens
  siRNA target sequence for RFXDC1 (NM_173560.1,1842-1860).
ccacgtggagacaacctat

SEQ ID NO: 38613 - DNA, 19 bp, Homo sapiens
  siRNA target sequence for RFXDC1 (NM_173560.1,1949-1967).
gtcaaatggagctttcaca

SEQ ID NO: 38614 - DNA, 19 bp, Homo sapiens
  siRNA target sequence for RFXDC1 (NM_173560.1,2015-2033).
gccgaggaagtgtcattaa

SEQ ID NO: 38615 - DNA, 19 bp, Homo sapiens
  siRNA target sequence for RFXDC1 (NM_173560.1,2018-2036).
gaggaagtgtcattaacca

SEQ ID NO: 38616 - DNA, 19 bp, Homo sapiens
  siRNA target sequence for RFXDC1 (NM_173560.1,2102-2120).
catacccagagcccattta

SEQ ID NO: 38617 - DNA, 19 bp, Homo sapiens
  siRNA target sequence for RFXDC1 (NM_173560.1,2134-2152).
caagccaatcatgactttt

SEQ ID NO: 38618 - DNA, 19 bp, Homo sapiens
  siRNA target sequence for RFXDC1 (NM_173560.1,2137-2155).
gccaatcatgacttttata

SEQ ID NO: 38619 - DNA, 19 bp, Homo sapiens
  siRNA target sequence for RFXDC1 (NM_173560.1,2199-2217).
ctccacatcaggactctat

SEQ ID NO: 38620 - DNA, 19 bp, Homo sapiens
  siRNA target sequence for RFXDC1 (NM_173560.1,2266-2284).
ctttcaagagacttcttca

SEQ ID NO: 38621 - DNA, 19 bp, Homo sapiens
  siRNA target sequence for RFXDC1 (NM_173560.1,2350-2368).
gcccaggattcacacaata

SEQ ID NO: 38622 - DNA, 19 bp, Homo sapiens
  siRNA target sequence for RFXDC1 (NM_173560.1,2351-2369).
cccaggattcacacaatat

SEQ ID NO: 38623 - DNA, 19 bp, Homo sapiens
  siRNA target sequence for RFXDC1 (NM_173560.1,2362-2380).
cacaatatgcagtttttaa

SEQ ID NO: 38624 - DNA, 19 bp, Homo sapiens
  siRNA target sequence for RFXDC1 (NM_173560.1,2384-2402).
caggaagcttcaatttctt

SEQ ID NO: 38625 - DNA, 19 bp, Homo sapiens
  siRNA target sequence for RFXDC1 (NM_173560.1,2386-2404).
ggaagcttcaatttcttga

SEQ ID NO: 38626 - DNA, 19 bp, Homo sapiens
  siRNA target sequence for RFXDC1 (NM_173560.1,2442-2460).
gcctcctaattcaccaaat

SEQ ID NO: 38627 - DNA, 19 bp, Homo sapiens
  siRNA target sequence for RFXDC1 (NM_173560.1,2533-2551).
gtcatcagcagcattcgtt

SEQ ID NO: 38628 - DNA, 19 bp, Homo sapiens
  siRNA target sequence for RFXDC1 (NM_173560.1,2574-2592).
ccacgatccacttaacatt

SEQ ID NO: 38629 - DNA, 19 bp, Homo sapiens
  siRNA target sequence for RFXDC1 (NM_173560.1,2577-2595).
cgatccacttaacatttta

SEQ ID NO: 38630 - DNA, 19 bp, Homo sapiens
  siRNA target sequence for RFXDC1 (NM_173560.1,2616-2634).
gaccagctcgttttacaca

SEQ ID NO: 38631 - DNA, 19 bp, Homo sapiens
  siRNA target sequence for RFXDC1 (NM_173560.1,2702-2720).
cttcctcatcccaatgtat

SEQ ID NO: 38632 - DNA, 19 bp, Homo sapiens
  siRNA target sequence for RFXDC1 (NM_173560.1,2706-2724).
ctcatcccaatgtatgtat

SEQ ID NO: 38633 - DNA, 19 bp, Homo sapiens
  siRNA target sequence for RFXDC1 (NM_173560.1,2736-2754).
ccagtatccagctcaagaa

SEQ ID NO: 38634 - DNA, 19 bp, Homo sapiens
  siRNA target sequence for RFXDC1 (NM_173560.1,2795-2813).
cctctttaccacctatcaa

SEQ ID NO: 38635 - DNA, 19 bp, Homo sapiens
  siRNA target sequence for RNF11 (NM_014372.3,478-496).
cccccacctcggatgacat

SEQ ID NO: 38636 - DNA, 19 bp, Homo sapiens
  siRNA target sequence for RNF11 (NM_014372.3,518-536).
gtccgaccgggctagcttt

SEQ ID NO: 38637 - DNA, 19 bp, Homo sapiens
  siRNA target sequence for RNF11 (NM_014372.3,571-589).
cgccatatcaggaacaagt

SEQ ID NO: 38638 - DNA, 19 bp, Homo sapiens
  siRNA target sequence for RPC155 (NM_007055.2,120-138).
cggatgtggccaagaaaat

SEQ ID NO: 38639 - DNA, 19 bp, Homo sapiens
  siRNA target sequence for RPC155 (NM_007055.2,121-139).
ggatgtggccaagaaaata

SEQ ID NO: 38640 - DNA, 19 bp, Homo sapiens
  siRNA target sequence for RPC155 (NM_007055.2,233-251).
caacatgcccccttgctat

SEQ ID NO: 38641 - DNA, 19 bp, Homo sapiens
  siRNA target sequence for RPC155 (NM_007055.2,255-273).
gggtgctcgaccataggat

SEQ ID NO: 38642 - DNA, 19 bp, Homo sapiens
  siRNA target sequence for RPC155 (NM_007055.2,286-304).
gaaggatcgtccatgtgaa

SEQ ID NO: 38643 - DNA, 19 bp, Homo sapiens
  siRNA target sequence for RPC155 (NM_007055.2,336-354).
gccactatgggtatatcga

SEQ ID NO: 38644 - DNA, 19 bp, Homo sapiens
  siRNA target sequence for RPC155 (NM_007055.2,355-373).
cctggagttgccgtgtttt

SEQ ID NO: 38645 - DNA, 19 bp, Homo sapiens
  siRNA target sequence for RPC155 (NM_007055.2,358-376).
ggagttgccgtgttttcat

SEQ ID NO: 38646 - DNA, 19 bp, Homo sapiens
  siRNA target sequence for RPC155 (NM_007055.2,361-379).
gttgccgtgttttcatgta

SEQ ID NO: 38647 - DNA, 19 bp, Homo sapiens
  siRNA target sequence for RPC155 (NM_007055.2,382-400).
gtacttcagagcagtcata

SEQ ID NO: 38648 - DNA, 19 bp, Homo sapiens
  siRNA target sequence for RPC155 (NM_007055.2,401-419).
ggcatcttacagatgatct

SEQ ID NO: 38649 - DNA, 19 bp, Homo sapiens
  siRNA target sequence for RPC155 (NM_007055.2,463-481).
gcagtttctggactatcta

SEQ ID NO: 38650 - DNA, 19 bp, Homo sapiens
  siRNA target sequence for RPC155 (NM_007055.2,563-581).
catcactgtggcgctttta

SEQ ID NO: 38651 - DNA, 19 bp, Homo sapiens
  siRNA target sequence for RPC155 (NM_007055.2,568-586).
ctgtggcgcttttaatggt

SEQ ID NO: 38652 - DNA, 19 bp, Homo sapiens
  siRNA target sequence for RPC155 (NM_007055.2,600-618).
gtggactgctgaaaataat

SEQ ID NO: 38653 - DNA, 19 bp, Homo sapiens
  siRNA target sequence for RPC155 (NM_007055.2,647-665).
gtggtggatcccattgtat

SEQ ID NO: 38654 - DNA, 19 bp, Homo sapiens
  siRNA target sequence for RPC155 (NM_007055.2,657-675).
ccattgtatcaaatttcct

SEQ ID NO: 38655 - DNA, 19 bp, Homo sapiens
  siRNA target sequence for RPC155 (NM_007055.2,752-770).
cccttagtagttctgaatt

SEQ ID NO: 38656 - DNA, 19 bp, Homo sapiens
  siRNA target sequence for RPC155 (NM_007055.2,824-842).
gccggaaagccgtctgatt

SEQ ID NO: 38657 - DNA, 19 bp, Homo sapiens
  siRNA target sequence for RPC155 (NM_007055.2,825-843).
ccggaaagccgtctgattt

SEQ ID NO: 38658 - DNA, 19 bp, Homo sapiens
  siRNA target sequence for RPC155 (NM_007055.2,827-845).
ggaaagccgtctgatttga

SEQ ID NO: 38659 - DNA, 19 bp, Homo sapiens
  siRNA target sequence for RPC155 (NM_007055.2,828-846).
gaaagccgtctgatttgat

SEQ ID NO: 38660 - DNA, 19 bp, Homo sapiens
  siRNA target sequence for RPC155 (NM_007055.2,833-851).
ccgtctgatttgattctca

SEQ ID NO: 38661 - DNA, 19 bp, Homo sapiens
  siRNA target sequence for RPC155 (NM_007055.2,865-883).
gcctcctttgtgtatcaga

SEQ ID NO: 38662 - DNA, 19 bp, Homo sapiens
  siRNA target sequence for RPC155 (NM_007055.2,885-903).
cctccgttgtgagtgattt

SEQ ID NO: 38663 - DNA, 19 bp, Homo sapiens
  siRNA target sequence for RPC155 (NM_007055.2,888-906).
ccgttgtgagtgatttgaa

SEQ ID NO: 38664 - DNA, 19 bp, Homo sapiens
  siRNA target sequence for RPC155 (NM_007055.2,890-908).
gttgtgagtgatttgaagt

SEQ ID NO: 38665 - DNA, 19 bp, Homo sapiens
  siRNA target sequence for RPC155 (NM_007055.2,912-930).
gcaccaatgaagatgatct

SEQ ID NO: 38666 - DNA, 19 bp, Homo sapiens
  siRNA target sequence for RPC155 (NM_007055.2,920-938).
gaagatgatctgacaatga

SEQ ID NO: 38667 - DNA, 19 bp, Homo sapiens
  siRNA target sequence for RPC155 (NM_007055.2,926-944).
gatctgacaatgaaactga

SEQ ID NO: 38668 - DNA, 19 bp, Homo sapiens
  siRNA target sequence for RPC155 (NM_007055.2,1132-1150).
gggaaaacagggtcgattt

SEQ ID NO: 38669 - DNA, 19 bp, Homo sapiens
  siRNA target sequence for RPC155 (NM_007055.2,1133-1151).
ggaaaacagggtcgattta

SEQ ID NO: 38670 - DNA, 19 bp, Homo sapiens
  siRNA target sequence for RPC155 (NM_007055.2,1141-1159).
gggtcgatttagaggaaat

SEQ ID NO: 38671 - DNA, 19 bp, Homo sapiens
  siRNA target sequence for RPC155 (NM_007055.2,1143-1161).
gtcgatttagaggaaatct

SEQ ID NO: 38672 - DNA, 19 bp, Homo sapiens
  siRNA target sequence for RPC155 (NM_007055.2,1210-1228).
ccccaacctccggattgat

SEQ ID NO: 38673 - DNA, 19 bp, Homo sapiens
  siRNA target sequence for RPC155 (NM_007055.2,1231-1249).
ggtagctgtgccagttcat

SEQ ID NO: 38674 - DNA, 19 bp, Homo sapiens
  siRNA target sequence for RPC155 (NM_007055.2,1242-1260).
cagttcatgtggccaaaat

SEQ ID NO: 38675 - DNA, 19 bp, Homo sapiens
  siRNA target sequence for RPC155 (NM_007055.2,1414-1432).
ggctcaagagctcaagtat

SEQ ID NO: 38676 - DNA, 19 bp, Homo sapiens
  siRNA target sequence for RPC155 (NM_007055.2,1464-1482).
gagatgtggtgctgttcaa

SEQ ID NO: 38677 - DNA, 19 bp, Homo sapiens
  siRNA target sequence for RPC155 (NM_007055.2,1490-1508).
ccctcgctgcacaaattga

SEQ ID NO: 38678 - DNA, 19 bp, Homo sapiens
  siRNA target sequence for RPC155 (NM_007055.2,1538-1556).
ccccaccggaccttcagat

SEQ ID NO: 38679 - DNA, 19 bp, Homo sapiens
  siRNA target sequence for RPC155 (NM_007055.2,1541-1559).
caccggaccttcagattta

SEQ ID NO: 38680 - DNA, 19 bp, Homo sapiens
  siRNA target sequence for RPC155 (NM_007055.2,1543-1561).
ccggaccttcagatttaat

SEQ ID NO: 38681 - DNA, 19 bp, Homo sapiens
  siRNA target sequence for RPC155 (NM_007055.2,1570-1588).
ctgtacaccctataatgct

SEQ ID NO: 38682 - DNA, 19 bp, Homo sapiens
  siRNA target sequence for RPC155 (NM_007055.2,1623-1641).
ctcaaacagaagaagctaa

SEQ ID NO: 38683 - DNA, 19 bp, Homo sapiens
  siRNA target sequence for RPC155 (NM_007055.2,1658-1676).
ctgatggggactaaagcaa

SEQ ID NO: 38684 - DNA, 19 bp, Homo sapiens
  siRNA target sequence for RPC155 (NM_007055.2,1778-1796).
gccaaggcttgccaaatca

SEQ ID NO: 38685 - DNA, 19 bp, Homo sapiens
  siRNA target sequence for RPC155 (NM_007055.2,1789-1807).
ccaaatcattgcttcaata

SEQ ID NO: 38686 - DNA, 19 bp, Homo sapiens
  siRNA target sequence for RPC155 (NM_007055.2,1814-1832).
ggcaaggatgagaaaatta

SEQ ID NO: 38687 - DNA, 19 bp, Homo sapiens
  siRNA target sequence for RPC155 (NM_007055.2,1845-1863).
caccgcctacaatcctaaa

SEQ ID NO: 38688 - DNA, 19 bp, Homo sapiens
  siRNA target sequence for RPC155 (NM_007055.2,1878-1896).
ggacgggaaagcagatctt

SEQ ID NO: 38689 - DNA, 19 bp, Homo sapiens
  siRNA target sequence for RPC155 (NM_007055.2,1909-1927).
caggcctagcgatgacaat

SEQ ID NO: 38690 - DNA, 19 bp, Homo sapiens
  siRNA target sequence for RPC155 (NM_007055.2,1982-2000).
gatctctgtgccaatgatt

SEQ ID NO: 38691 - DNA, 19 bp, Homo sapiens
  siRNA target sequence for RPC155 (NM_007055.2,1987-2005).
ctgtgccaatgattcctat

SEQ ID NO: 38692 - DNA, 19 bp, Homo sapiens
  siRNA target sequence for RPC155 (NM_007055.2,1991-2009).
gccaatgattcctatgtta

SEQ ID NO: 38693 - DNA, 19 bp, Homo sapiens
  siRNA target sequence for RPC155 (NM_007055.2,1993-2011).
caatgattcctatgttaca

SEQ ID NO: 38694 - DNA, 19 bp, Homo sapiens
  siRNA target sequence for RPC155 (NM_007055.2,2060-2078).
gggtcaggatccaagaaca

SEQ ID NO: 38695 - DNA, 19 bp, Homo sapiens
  siRNA target sequence for RPC155 (NM_007055.2,2098-2116).
gcgagactggggacagaat

SEQ ID NO: 38696 - DNA, 19 bp, Homo sapiens
  siRNA target sequence for RPC155 (NM_007055.2,2167-2185).
gtctaaccgtggtttctca

SEQ ID NO: 38697 - DNA, 19 bp, Homo sapiens
  siRNA target sequence for RPC155 (NM_007055.2,2250-2268).
ccggctacaagaaatgtga

SEQ ID NO: 38698 - DNA, 19 bp, Homo sapiens
  siRNA target sequence for RPC155 (NM_007055.2,2251-2269).
cggctacaagaaatgtgat

SEQ ID NO: 38699 - DNA, 19 bp, Homo sapiens
  siRNA target sequence for RPC155 (NM_007055.2,2438-2456).
ctgtgcggctccaaaggtt

SEQ ID NO: 38700 - DNA, 19 bp, Homo sapiens
  siRNA target sequence for RPC155 (NM_007055.2,2457-2475).
ccttcattaacatatcaca

SEQ ID NO: 38701 - DNA, 19 bp, Homo sapiens
  siRNA target sequence for RPC155 (NM_007055.2,2588-2606).
ggctttgtggctaatagct

SEQ ID NO: 38702 - DNA, 19 bp, Homo sapiens
  siRNA target sequence for RPC155 (NM_007055.2,2589-2607).
gctttgtggctaatagctt

SEQ ID NO: 38703 - DNA, 19 bp, Homo sapiens
  siRNA target sequence for RPC155 (NM_007055.2,2590-2608).
ctttgtggctaatagcttt

SEQ ID NO: 38704 - DNA, 19 bp, Homo sapiens
  siRNA target sequence for RPC155 (NM_007055.2,2669-2687).
gtcgacacggctgtaaaga

SEQ ID NO: 38705 - DNA, 19 bp, Homo sapiens
  siRNA target sequence for RPC155 (NM_007055.2,2671-2689).
cgacacggctgtaaagaca

SEQ ID NO: 38706 - DNA, 19 bp, Homo sapiens
  siRNA target sequence for RPC155 (NM_007055.2,2688-2706).
cagctgaaacgggatacat

SEQ ID NO: 38707 - DNA, 19 bp, Homo sapiens
  siRNA target sequence for RPC155 (NM_007055.2,2707-2725).
gcagcgaaggcttgtcaaa

SEQ ID NO: 38708 - DNA, 19 bp, Homo sapiens
  siRNA target sequence for RPC155 (NM_007055.2,2708-2726).
cagcgaaggcttgtcaaat

SEQ ID NO: 38709 - DNA, 19 bp, Homo sapiens
  siRNA target sequence for RPC155 (NM_007055.2,2710-2728).
gcgaaggcttgtcaaatct

SEQ ID NO: 38710 - DNA, 19 bp, Homo sapiens
  siRNA target sequence for RPC155 (NM_007055.2,2712-2730).
gaaggcttgtcaaatctct

SEQ ID NO: 38711 - DNA, 19 bp, Homo sapiens
  siRNA target sequence for RPC155 (NM_007055.2,2769-2787).
gctctactggcgatattat

SEQ ID NO: 38712 - DNA, 19 bp, Homo sapiens
  siRNA target sequence for RPC155 (NM_007055.2,2778-2796).
gcgatattatccagttcat

SEQ ID NO: 38713 - DNA, 19 bp, Homo sapiens
  siRNA target sequence for RPC155 (NM_007055.2,2779-2797).
cgatattatccagttcatt

SEQ ID NO: 38714 - DNA, 19 bp, Homo sapiens
  siRNA target sequence for RPC155 (NM_007055.2,2907-2925).
ctgctctcagcaaaaacga

SEQ ID NO: 38715 - DNA, 19 bp, Homo sapiens
  siRNA target sequence for RPC155 (NM_007055.2,3116-3134).
cccacccaagtagaaaagt

SEQ ID NO: 38716 - DNA, 19 bp, Homo sapiens
  siRNA target sequence for RPC155 (NM_007055.2,3117-3135).
ccacccaagtagaaaagtt

SEQ ID NO: 38717 - DNA, 19 bp, Homo sapiens
  siRNA target sequence for RPC155 (NM_007055.2,3144-3162).
cctgtagggacaagtacat

SEQ ID NO: 38718 - DNA, 19 bp, Homo sapiens
  siRNA target sequence for RPC155 (NM_007055.2,3264-3282).
gtgtggcctccatgaacat

SEQ ID NO: 38719 - DNA, 19 bp, Homo sapiens
  siRNA target sequence for RPC155 (NM_007055.2,3334-3352).
cagcactccaattatcaca

SEQ ID NO: 38720 - DNA, 19 bp, Homo sapiens
  siRNA target sequence for RPC155 (NM_007055.2,3391-3409).
cctcgtgaaagggagaatt

SEQ ID NO: 38721 - DNA, 19 bp, Homo sapiens
  siRNA target sequence for RPC155 (NM_007055.2,3425-3443).
ggagagatttccgagtata

SEQ ID NO: 38722 - DNA, 19 bp, Homo sapiens
  siRNA target sequence for RPC155 (NM_007055.2,3430-3448).
gatttccgagtatattgaa

SEQ ID NO: 38723 - DNA, 19 bp, Homo sapiens
  siRNA target sequence for RPC155 (NM_007055.2,3435-3453).
ccgagtatattgaagaagt

SEQ ID NO: 38724 - DNA, 19 bp, Homo sapiens
  siRNA target sequence for RPC155 (NM_007055.2,3529-3547).
cgctgagacagtgagatat

SEQ ID NO: 38725 - DNA, 19 bp, Homo sapiens
  siRNA target sequence for RPC155 (NM_007055.2,3533-3551).
gagacagtgagatattcca

SEQ ID NO: 38726 - DNA, 19 bp, Homo sapiens
  siRNA target sequence for RPC155 (NM_007055.2,3580-3598).
cggtgatgtggctgttcat

SEQ ID NO: 38727 - DNA, 19 bp, Homo sapiens
  siRNA target sequence for RPC155 (NM_007055.2,3720-3738).
gagctgtcatccacattga

SEQ ID NO: 38728 - DNA, 19 bp, Homo sapiens
  siRNA target sequence for RPC155 (NM_007055.2,3747-3765).
gtggaaaggagaagtacaa

SEQ ID NO: 38729 - DNA, 19 bp, Homo sapiens
  siRNA target sequence for RPC155 (NM_007055.2,3825-3843).
cccgaaccacctccaataa

SEQ ID NO: 38730 - DNA, 19 bp, Homo sapiens
  siRNA target sequence for RPC155 (NM_007055.2,3827-3845).
cgaaccacctccaataaca

SEQ ID NO: 38731 - DNA, 19 bp, Homo sapiens
  siRNA target sequence for RPC155 (NM_007055.2,3883-3901).
ccggacaacgatcatcaat

SEQ ID NO: 38732 - DNA, 19 bp, Homo sapiens
  siRNA target sequence for RPC155 (NM_007055.2,3886-3904).
gacaacgatcatcaatgaa

SEQ ID NO: 38733 - DNA, 19 bp, Homo sapiens
  siRNA target sequence for RPC155 (NM_007055.2,3888-3906).
caacgatcatcaatgaaat

SEQ ID NO: 38734 - DNA, 19 bp, Homo sapiens
  siRNA target sequence for RPC155 (NM_007055.2,3891-3909).
cgatcatcaatgaaatcca

SEQ ID NO: 38735 - DNA, 19 bp, Homo sapiens
  siRNA target sequence for RPC155 (NM_007055.2,4063-4081).
gacggctgaccatctcttt

SEQ ID NO: 38736 - DNA, 19 bp, Homo sapiens
  siRNA target sequence for RPC155 (NM_007055.2,4065-4083).
cggctgaccatctctttga

SEQ ID NO: 38737 - DNA, 19 bp, Homo sapiens
  siRNA target sequence for RPC155 (NM_007055.2,4212-4230).
ccaagaggcccctgatctt

SEQ ID NO: 38738 - DNA, 19 bp, Homo sapiens
  siRNA target sequence for RPC155 (NM_007055.2,4222-4240).
cctgatcttcgacacaaat

SEQ ID NO: 38739 - DNA, 19 bp, Homo sapiens
  siRNA target sequence for RPC155 (NM_007055.2,4225-4243).
gatcttcgacacaaatgaa

SEQ ID NO: 38740 - DNA, 19 bp, Homo sapiens
  siRNA target sequence for RREB1 (NM_002955.3,527-545).
gaaggttcagacctatctt

SEQ ID NO: 38741 - DNA, 19 bp, Homo sapiens
  siRNA target sequence for RREB1 (NM_002955.3,680-698).
gaggagaagtcttcctata

SEQ ID NO: 38742 - DNA, 19 bp, Homo sapiens
  siRNA target sequence for RREB1 (NM_002955.3,683-701).
gagaagtcttcctataact

SEQ ID NO: 38743 - DNA, 19 bp, Homo sapiens
  siRNA target sequence for RREB1 (NM_002955.3,911-929).
gggaacatgcacagacata

SEQ ID NO: 38744 - DNA, 19 bp, Homo sapiens
  siRNA target sequence for RREB1 (NM_002955.3,977-995).
ccatctcctctgaaacgta

SEQ ID NO: 38745 - DNA, 19 bp, Homo sapiens
  siRNA target sequence for RREB1 (NM_002955.3,1120-1138).
ctttcactgcccagtatgt

SEQ ID NO: 38746 - DNA, 19 bp, Homo sapiens
  siRNA target sequence for RREB1 (NM_002955.3,1177-1195).
catggagacccattcagat

SEQ ID NO: 38747 - DNA, 19 bp, Homo sapiens
  siRNA target sequence for RREB1 (NM_002955.3,1198-1216).
cccactaagatgtgacatt

SEQ ID NO: 38748 - DNA, 19 bp, Homo sapiens
  siRNA target sequence for RREB1 (NM_002955.3,1199-1217).
ccactaagatgtgacattt

SEQ ID NO: 38749 - DNA, 19 bp, Homo sapiens
  siRNA target sequence for RREB1 (NM_002955.3,1202-1220).
ctaagatgtgacatttgtt

SEQ ID NO: 38750 - DNA, 19 bp, Homo sapiens
  siRNA target sequence for RREB1 (NM_002955.3,1261-1279).
cgcgcttgtccacaaacaa

SEQ ID NO: 38751 - DNA, 19 bp, Homo sapiens
  siRNA target sequence for RREB1 (NM_002955.3,1263-1281).
cgcttgtccacaaacaact

SEQ ID NO: 38752 - DNA, 19 bp, Homo sapiens
  siRNA target sequence for RREB1 (NM_002955.3,1293-1311).
caatgggcagacctttcat

SEQ ID NO: 38753 - DNA, 19 bp, Homo sapiens
  siRNA target sequence for RREB1 (NM_002955.3,1337-1355).
ggcttccacgacttaggat

SEQ ID NO: 38754 - DNA, 19 bp, Homo sapiens
  siRNA target sequence for RREB1 (NM_002955.3,1338-1356).
gcttccacgacttaggatt

SEQ ID NO: 38755 - DNA, 19 bp, Homo sapiens
  siRNA target sequence for RREB1 (NM_002955.3,1431-1449).
gcgagcaacaccgttttgt

SEQ ID NO: 38756 - DNA, 19 bp, Homo sapiens
  siRNA target sequence for RREB1 (NM_002955.3,1433-1451).
gagcaacaccgttttgtct

SEQ ID NO: 38757 - DNA, 19 bp, Homo sapiens
  siRNA target sequence for RREB1 (NM_002955.3,1519-1537).
ggcagaccagggtcaagaa

SEQ ID NO: 38758 - DNA, 19 bp, Homo sapiens
  siRNA target sequence for RREB1 (NM_002955.3,1729-1747).
gagcctgtcacctttcgaa

SEQ ID NO: 38759 - DNA, 19 bp, Homo sapiens
  siRNA target sequence for RREB1 (NM_002955.3,1784-1802).
gcgaccaaggacagcataa

SEQ ID NO: 38760 - DNA, 19 bp, Homo sapiens
  siRNA target sequence for RREB1 (NM_002955.3,1785-1803).
cgaccaaggacagcataaa

SEQ ID NO: 38761 - DNA, 19 bp, Homo sapiens
  siRNA target sequence for RREB1 (NM_002955.3,1985-2003).
ccactgcaggcgatcttca

SEQ ID NO: 38762 - DNA, 19 bp, Homo sapiens
  siRNA target sequence for RREB1 (NM_002955.3,1986-2004).
cactgcaggcgatcttcaa

SEQ ID NO: 38763 - DNA, 19 bp, Homo sapiens
  siRNA target sequence for RREB1 (NM_002955.3,2261-2279).
ggccagcctgagatgaaga

SEQ ID NO: 38764 - DNA, 19 bp, Homo sapiens
  siRNA target sequence for RREB1 (NM_002955.3,2673-2691).
ccacccgcaaggatatcga

SEQ ID NO: 38765 - DNA, 19 bp, Homo sapiens
  siRNA target sequence for RREB1 (NM_002955.3,3093-3111).
cccagaacggctttcttca

SEQ ID NO: 38766 - DNA, 19 bp, Homo sapiens
  siRNA target sequence for RREB1 (NM_002955.3,3137-3155).
ccccatgtctcgatcaagt

SEQ ID NO: 38767 - DNA, 19 bp, Homo sapiens
  siRNA target sequence for RREB1 (NM_002955.3,3138-3156).
cccatgtctcgatcaagtt

SEQ ID NO: 38768 - DNA, 19 bp, Homo sapiens
  siRNA target sequence for RREB1 (NM_002955.3,3172-3190).
ctttgcggtggacttcaat

SEQ ID NO: 38769 - DNA, 19 bp, Homo sapiens
  siRNA target sequence for RREB1 (NM_002955.3,3539-3557).
ctggcggtcccaatctact

SEQ ID NO: 38770 - DNA, 19 bp, Homo sapiens
  siRNA target sequence for RREB1 (NM_002955.3,3734-3752).
cccaccctgctgaaaacca

SEQ ID NO: 38771 - DNA, 19 bp, Homo sapiens
  siRNA target sequence for RREB1 (NM_002955.3,3735-3753).
ccaccctgctgaaaaccaa

SEQ ID NO: 38772 - DNA, 19 bp, Homo sapiens
  siRNA target sequence for RREB1 (NM_002955.3,3938-3956).
gcgggcacgtcgaagaaga

SEQ ID NO: 38773 - DNA, 19 bp, Homo sapiens
  siRNA target sequence for RREB1 (NM_002955.3,4960-4978).
gagcgacgatgacaagaaa

SEQ ID NO: 38774 - DNA, 19 bp, Homo sapiens
  siRNA target sequence for RREB1 (NM_002955.3,5427-5445).
ctggccagggtgaccttaa

SEQ ID NO: 38775 - DNA, 19 bp, Homo sapiens
  siRNA target sequence for RUNX3 (NM_004350.1,379-397).
gcctcggccgtcatgaaga

SEQ ID NO: 38776 - DNA, 19 bp, Homo sapiens
  siRNA target sequence for RUNX3 (NM_004350.1,380-398).
cctcggccgtcatgaagaa

SEQ ID NO: 38777 - DNA, 19 bp, Homo sapiens
  siRNA target sequence for SAFB2 (NM_014649.1,213-231).
gctcaagaaggcggttaaa

SEQ ID NO: 38778 - DNA, 19 bp, Homo sapiens
  siRNA target sequence for SAFB2 (NM_014649.1,288-306).
gtcagccaagagatgtgtt

SEQ ID NO: 38779 - DNA, 19 bp, Homo sapiens
  siRNA target sequence for SAFB2 (NM_014649.1,294-312).
caagagatgtgttaaagga

SEQ ID NO: 38780 - DNA, 19 bp, Homo sapiens
  siRNA target sequence for SAFB2 (NM_014649.1,495-513).
cggccttctcgattccttt

SEQ ID NO: 38781 - DNA, 19 bp, Homo sapiens
  siRNA target sequence for SAFB2 (NM_014649.1,496-514).
ggccttctcgattcctttt

SEQ ID NO: 38782 - DNA, 19 bp, Homo sapiens
  siRNA target sequence for SAFB2 (NM_014649.1,498-516).
ccttctcgattccttttgt

SEQ ID NO: 38783 - DNA, 19 bp, Homo sapiens
  siRNA target sequence for SAFB2 (NM_014649.1,515-533).
gtgatagtaaagaatacgt

SEQ ID NO: 38784 - DNA, 19 bp, Homo sapiens
  siRNA target sequence for SAFB2 (NM_014649.1,580-598).
gtggatggggaaggattta

SEQ ID NO: 38785 - DNA, 19 bp, Homo sapiens
  siRNA target sequence for SAFB2 (NM_014649.1,610-628).
gaaacttcatcgttgaact

SEQ ID NO: 38786 - DNA, 19 bp, Homo sapiens
  siRNA target sequence for SAFB2 (NM_014649.1,617-635).
catcgttgaacttcaaagt

SEQ ID NO: 38787 - DNA, 19 bp, Homo sapiens
  siRNA target sequence for SAFB2 (NM_014649.1,1289-1307).
cacgcgctacggatctcaa

SEQ ID NO: 38788 - DNA, 19 bp, Homo sapiens
  siRNA target sequence for SAFB2 (NM_014649.1,1292-1310).
gcgctacggatctcaagaa

SEQ ID NO: 38789 - DNA, 19 bp, Homo sapiens
  siRNA target sequence for SAFB2 (NM_014649.1,1298-1316).
cggatctcaagaacctttt

SEQ ID NO: 38790 - DNA, 19 bp, Homo sapiens
  siRNA target sequence for SAFB2 (NM_014649.1,1373-1391).
gggctcgatgctatggatt

SEQ ID NO: 38791 - DNA, 19 bp, Homo sapiens
  siRNA target sequence for SAFB2 (NM_014649.1,1453-1471).
ctgcatggacgaatgatct

SEQ ID NO: 38792 - DNA, 19 bp, Homo sapiens
  siRNA target sequence for SAFB2 (NM_014649.1,1463-1481).
gaatgatctccgtagagaa

SEQ ID NO: 38793 - DNA, 19 bp, Homo sapiens
  siRNA target sequence for SAFB2 (NM_014649.1,1520-1538).
gaaaagagtgcgaagtgaa

SEQ ID NO: 38794 - DNA, 19 bp, Homo sapiens
  siRNA target sequence for SAFB2 (NM_014649.1,1686-1704).
gaaacccggacctacaaat

SEQ ID NO: 38795 - DNA, 19 bp, Homo sapiens
  siRNA target sequence for SAFB2 (NM_014649.1,1705-1723).
cggtctagagtcaccaaat

SEQ ID NO: 38796 - DNA, 19 bp, Homo sapiens
  siRNA target sequence for SAFB2 (NM_014649.1,1707-1725).
gtctagagtcaccaaatca

SEQ ID NO: 38797 - DNA, 19 bp, Homo sapiens
  siRNA target sequence for SAFB2 (NM_014649.1,1744-1762).
cggacggtcgtgatggata

SEQ ID NO: 38798 - DNA, 19 bp, Homo sapiens
  siRNA target sequence for SAFB2 (NM_014649.1,1745-1763).
ggacggtcgtgatggataa

SEQ ID NO: 38799 - DNA, 19 bp, Homo sapiens
  siRNA target sequence for SAFB2 (NM_014649.1,1746-1764).
gacggtcgtgatggataaa

SEQ ID NO: 38800 - DNA, 19 bp, Homo sapiens
  siRNA target sequence for SAFB2 (NM_014649.1,1750-1768).
gtcgtgatggataaatcga

SEQ ID NO: 38801 - DNA, 19 bp, Homo sapiens
  siRNA target sequence for SAFB2 (NM_014649.1,1777-1795).
cccgtcattagcgtgaaaa

SEQ ID NO: 38802 - DNA, 19 bp, Homo sapiens
  siRNA target sequence for SAFB2 (NM_014649.1,1780-1798).
gtcattagcgtgaaaacca

SEQ ID NO: 38803 - DNA, 19 bp, Homo sapiens
  siRNA target sequence for SAFB2 (NM_014649.1,1831-1849).
caggatcgcaagtcagaaa

SEQ ID NO: 38804 - DNA, 19 bp, Homo sapiens
  siRNA target sequence for SAFB2 (NM_014649.1,1874-1892).
cgtttgataaaatcaaaga

SEQ ID NO: 38805 - DNA, 19 bp, Homo sapiens
  siRNA target sequence for SAFB2 (NM_014649.1,2292-2310).
ccgatatcgtgcagacttt

SEQ ID NO: 38806 - DNA, 19 bp, Homo sapiens
  siRNA target sequence for SALL1 (NM_002968.1,15-33).
gcaagcgaagcctcaacat

SEQ ID NO: 38807 - DNA, 19 bp, Homo sapiens
  siRNA target sequence for SALL1 (NM_002968.1,16-34).
caagcgaagcctcaacatt

SEQ ID NO: 38808 - DNA, 19 bp, Homo sapiens
  siRNA target sequence for SALL1 (NM_002968.1,21-39).
gaagcctcaacatttccaa

SEQ ID NO: 38809 - DNA, 19 bp, Homo sapiens
  siRNA target sequence for SALL1 (NM_002968.1,97-115).
ccgagtcgccctactaaga

SEQ ID NO: 38810 - DNA, 19 bp, Homo sapiens
  siRNA target sequence for SALL1 (NM_002968.1,148-166).
gccgagttctttgaattat

SEQ ID NO: 38811 - DNA, 19 bp, Homo sapiens
  siRNA target sequence for SALL1 (NM_002968.1,150-168).
cgagttctttgaattatca

SEQ ID NO: 38812 - DNA, 19 bp, Homo sapiens
  siRNA target sequence for SALL1 (NM_002968.1,181-199).
cacaagaagaactgtacta

SEQ ID NO: 38813 - DNA, 19 bp, Homo sapiens
  siRNA target sequence for SALL1 (NM_002968.1,205-223).
caattagttttaatcgtaa

SEQ ID NO: 38814 - DNA, 19 bp, Homo sapiens
  siRNA target sequence for SALL1 (NM_002968.1,327-345).
ctgcagcgacctttcagaa

SEQ ID NO: 38815 - DNA, 19 bp, Homo sapiens
  siRNA target sequence for SALL1 (NM_002968.1,502-520).
ggtacctcagcgatcacaa

SEQ ID NO: 38816 - DNA, 19 bp, Homo sapiens
  siRNA target sequence for SALL1 (NM_002968.1,556-574).
ggcaacttctccgtaatca

SEQ ID NO: 38817 - DNA, 19 bp, Homo sapiens
  siRNA target sequence for SALL1 (NM_002968.1,557-575).
gcaacttctccgtaatcaa

SEQ ID NO: 38818 - DNA, 19 bp, Homo sapiens
  siRNA target sequence for SALL1 (NM_002968.1,680-698).
cagccctcatggaacaact

SEQ ID NO: 38819 - DNA, 19 bp, Homo sapiens
  siRNA target sequence for SALL1 (NM_002968.1,732-750).
gcaattgatcgaacagatt

SEQ ID NO: 38820 - DNA, 19 bp, Homo sapiens
  siRNA target sequence for SALL1 (NM_002968.1,745-763).
cagattcgtcaccaaatat

SEQ ID NO: 38821 - DNA, 19 bp, Homo sapiens
  siRNA target sequence for SALL1 (NM_002968.1,841-859).
cccttgtccacgctaagtt

SEQ ID NO: 38822 - DNA, 19 bp, Homo sapiens
  siRNA target sequence for SALL1 (NM_002968.1,915-933).
ccaatctgccagcattagt

SEQ ID NO: 38823 - DNA, 19 bp, Homo sapiens
  siRNA target sequence for SALL1 (NM_002968.1,1004-1022).
gcggctcttctcccaatat

SEQ ID NO: 38824 - DNA, 19 bp, Homo sapiens
  siRNA target sequence for SALL1 (NM_002968.1,1010-1028).
cttctcccaatatgaacat

SEQ ID NO: 38825 - DNA, 19 bp, Homo sapiens
  siRNA target sequence for SALL1 (NM_002968.1,1013-1031).
ctcccaatatgaacatatt

SEQ ID NO: 38826 - DNA, 19 bp, Homo sapiens
  siRNA target sequence for SALL1 (NM_002968.1,1126-1144).
ccagcttttgcaataagca

SEQ ID NO: 38827 - DNA, 19 bp, Homo sapiens
  siRNA target sequence for SALL1 (NM_002968.1,1218-1236).
gcccaacatcggaacaact

SEQ ID NO: 38828 - DNA, 19 bp, Homo sapiens
  siRNA target sequence for SALL1 (NM_002968.1,1262-1280).
ccttggcccagcaaagaaa

SEQ ID NO: 38829 - DNA, 19 bp, Homo sapiens
  siRNA target sequence for SALL1 (NM_002968.1,1415-1433).
ccggagagaggccattcaa

SEQ ID NO: 38830 - DNA, 19 bp, Homo sapiens
  siRNA target sequence for SALL1 (NM_002968.1,1463-1481).
ccaaggggaatctgaaagt

SEQ ID NO: 38831 - DNA, 19 bp, Homo sapiens
  siRNA target sequence for SALL1 (NM_002968.1,1694-1712).
gcctcatacccttcatcaa

SEQ ID NO: 38832 - DNA, 19 bp, Homo sapiens
  siRNA target sequence for SALL1 (NM_002968.1,1970-1988).
ccttcaccaaccctttgtt

SEQ ID NO: 38833 - DNA, 19 bp, Homo sapiens
  siRNA target sequence for SALL1 (NM_002968.1,2113-2131).
cccaatgagtgcatcatct

SEQ ID NO: 38834 - DNA, 19 bp, Homo sapiens
  siRNA target sequence for SALL1 (NM_002968.1,2148-2166).
ctgccagagcgccttgaaa

SEQ ID NO: 38835 - DNA, 19 bp, Homo sapiens
  siRNA target sequence for SALL1 (NM_002968.1,2150-2168).
gccagagcgccttgaaaat

SEQ ID NO: 38836 - DNA, 19 bp, Homo sapiens
  siRNA target sequence for SALL1 (NM_002968.1,2195-2213).
ggccctttaagtgtaagat

SEQ ID NO: 38837 - DNA, 19 bp, Homo sapiens
  siRNA target sequence for SALL1 (NM_002968.1,2229-2247).
caccacgaaagggaatctt

SEQ ID NO: 38838 - DNA, 19 bp, Homo sapiens
  siRNA target sequence for SALL1 (NM_002968.1,2231-2249).
ccacgaaagggaatcttaa

SEQ ID NO: 38839 - DNA, 19 bp, Homo sapiens
  siRNA target sequence for SALL1 (NM_002968.1,2232-2250).
cacgaaagggaatcttaaa

SEQ ID NO: 38840 - DNA, 19 bp, Homo sapiens
  siRNA target sequence for SALL1 (NM_002968.1,2685-2703).
ggatgtcctgaccaatgat

SEQ ID NO: 38841 - DNA, 19 bp, Homo sapiens
  siRNA target sequence for SALL1 (NM_002968.1,2861-2879).
gcgagtttgccaatggttt

SEQ ID NO: 38842 - DNA, 19 bp, Homo sapiens
  siRNA target sequence for SALL1 (NM_002968.1,2905-2923).
gctttggatttgacatcta

SEQ ID NO: 38843 - DNA, 19 bp, Homo sapiens
  siRNA target sequence for SALL1 (NM_002968.1,2921-2939).
ctagtcacgcagagaaaat

SEQ ID NO: 38844 - DNA, 19 bp, Homo sapiens
  siRNA target sequence for SALL1 (NM_002968.1,2924-2942).
gtcacgcagagaaaatcat

SEQ ID NO: 38845 - DNA, 19 bp, Homo sapiens
  siRNA target sequence for SALL1 (NM_002968.1,2959-2977).
gggatcctcttccctttta

SEQ ID NO: 38846 - DNA, 19 bp, Homo sapiens
  siRNA target sequence for SALL1 (NM_002968.1,3041-3059).
gtgccttggacattcacta

SEQ ID NO: 38847 - DNA, 19 bp, Homo sapiens
  siRNA target sequence for SALL1 (NM_002968.1,3043-3061).
gccttggacattcactata

SEQ ID NO: 38848 - DNA, 19 bp, Homo sapiens
  siRNA target sequence for SALL1 (NM_002968.1,3045-3063).
cttggacattcactataga

SEQ ID NO: 38849 - DNA, 19 bp, Homo sapiens
  siRNA target sequence for SALL1 (NM_002968.1,3048-3066).
ggacattcactatagaagt

SEQ ID NO: 38850 - DNA, 19 bp, Homo sapiens
  siRNA target sequence for SALL1 (NM_002968.1,3057-3075).
ctatagaagtcataccaaa

SEQ ID NO: 38851 - DNA, 19 bp, Homo sapiens
  siRNA target sequence for SALL1 (NM_002968.1,3229-3247).
cccgccaactcgttgtcat

SEQ ID NO: 38852 - DNA, 19 bp, Homo sapiens
  siRNA target sequence for SALL1 (NM_002968.1,3437-3455).
cgagtgccctgcagattca

SEQ ID NO: 38853 - DNA, 19 bp, Homo sapiens
  siRNA target sequence for SALL1 (NM_002968.1,3513-3531).
cacgactaaaggcaatctt

SEQ ID NO: 38854 - DNA, 19 bp, Homo sapiens
  siRNA target sequence for SALL1 (NM_002968.1,3515-3533).
cgactaaaggcaatcttaa

SEQ ID NO: 38855 - DNA, 19 bp, Homo sapiens
  siRNA target sequence for SALL1 (NM_002968.1,3595-3613).
gtggatggccccatgacat

SEQ ID NO: 38856 - DNA, 19 bp, Homo sapiens
  siRNA target sequence for SALL1 (NM_002968.1,3620-3638).
gaggcaatcccgtcaagtt

SEQ ID NO: 38857 - DNA, 19 bp, Homo sapiens
  siRNA target sequence for SALL1 (NM_002968.1,3692-3710).
ccagcttctggaatcagta

SEQ ID NO: 38858 - DNA, 19 bp, Homo sapiens
  siRNA target sequence for SALL1 (NM_002968.1,3693-3711).
cagcttctggaatcagtat

SEQ ID NO: 38859 - DNA, 19 bp, Homo sapiens
  siRNA target sequence for SALL3 (NM_171999.1,1238-1256).
ccgaggacccgttcttcaa

SEQ ID NO: 38860 - DNA, 19 bp, Homo sapiens
  siRNA target sequence for SALL3 (NM_171999.1,1246-1264).
ccgttcttcaagcacaaat

SEQ ID NO: 38861 - DNA, 19 bp, Homo sapiens
  siRNA target sequence for SALL3 (NM_171999.1,1913-1931).
ccgtctccgagcagttcaa

SEQ ID NO: 38862 - DNA, 19 bp, Homo sapiens
  siRNA target sequence for SALL3 (NM_171999.1,1954-1972).
ctgctagactcgatgcaaa

SEQ ID NO: 38863 - DNA, 19 bp, Homo sapiens
  siRNA target sequence for SALL3 (NM_171999.1,2069-2087).
gccagagcgcgctgaagat

SEQ ID NO: 38864 - DNA, 19 bp, Homo sapiens
  siRNA target sequence for SALL3 (NM_171999.1,3167-3185).
ccgcacccaccatgatcaa

SEQ ID NO: 38865 - DNA, 19 bp, Homo sapiens
  siRNA target sequence for SALL3 (NM_171999.1,3169-3187).
gcacccaccatgatcaaaa

SEQ ID NO: 38866 - DNA, 19 bp, Homo sapiens
  siRNA target sequence for SALL3 (NM_171999.1,3170-3188).
cacccaccatgatcaaaat

SEQ ID NO: 38867 - DNA, 19 bp, Homo sapiens
  siRNA target sequence for SALL3 (NM_171999.1,3174-3192).
caccatgatcaaaatggaa

SEQ ID NO: 38868 - DNA, 19 bp, Homo sapiens
  siRNA target sequence for SALL3 (NM_171999.1,3615-3633).
gaacgtcgaccccagtttt

SEQ ID NO: 38869 - DNA, 19 bp, Homo sapiens
  siRNA target sequence for SALL3 (NM_171999.1,3619-3637).
gtcgaccccagtttttgga

SEQ ID NO: 38870 - DNA, 19 bp, Homo sapiens
  siRNA target sequence for SALL3 (NM_171999.1,3665-3683).
ggctcgccatgaagaacaa

SEQ ID NO: 38871 - DNA, 19 bp, Homo sapiens
  siRNA target sequence for SALL3 (NM_171999.1,3823-3841).
gacaaagcgagctcagaaa

SEQ ID NO: 38872 - DNA, 19 bp, Homo sapiens
  siRNA target sequence for SALL3 (NM_171999.1,3854-3872).
gcccattcacgcggtttat

SEQ ID NO: 38873 - DNA, 19 bp, Homo sapiens
  siRNA target sequence for SALL3 (NM_171999.1,3857-3875).
cattcacgcggtttatcga

SEQ ID NO: 38874 - DNA, 19 bp, Homo sapiens
  siRNA target sequence for SALL3 (NM_171999.1,3863-3881).
cgcggtttatcgaggataa

SEQ ID NO: 38875 - DNA, 19 bp, Homo sapiens
  siRNA target sequence for SALL3 (NM_171999.1,3865-3883).
cggtttatcgaggataaca

SEQ ID NO: 38876 - DNA, 19 bp, Homo sapiens
  siRNA target sequence for SALL3 (NM_171999.1,3866-3884).
ggtttatcgaggataacaa

SEQ ID NO: 38877 - DNA, 19 bp, Homo sapiens
  siRNA target sequence for SALL3 (NM_171999.1,3877-3895).
gataacaaggagattggta

SEQ ID NO: 38878 - DNA, 19 bp, Homo sapiens
  siRNA target sequence for SALL4 (NM_020436.2,277-295).
gacgcacgtctgtgagaaa

SEQ ID NO: 38879 - DNA, 19 bp, Homo sapiens
  siRNA target sequence for SALL4 (NM_020436.2,393-411).
ctgtgccttcagaagactt

SEQ ID NO: 38880 - DNA, 19 bp, Homo sapiens
  siRNA target sequence for SALL4 (NM_020436.2,558-576).
ccccccaggacataagcta

SEQ ID NO: 38881 - DNA, 19 bp, Homo sapiens
  siRNA target sequence for SALL4 (NM_020436.2,560-578).
ccccaggacataagctatt

SEQ ID NO: 38882 - DNA, 19 bp, Homo sapiens
  siRNA target sequence for SALL4 (NM_020436.2,561-579).
cccaggacataagctattt

SEQ ID NO: 38883 - DNA, 19 bp, Homo sapiens
  siRNA target sequence for SALL4 (NM_020436.2,705-723).
gggtcctcgagcagatctt

SEQ ID NO: 38884 - DNA, 19 bp, Homo sapiens
  siRNA target sequence for SALL4 (NM_020436.2,707-725).
gtcctcgagcagatcttgt

SEQ ID NO: 38885 - DNA, 19 bp, Homo sapiens
  siRNA target sequence for SALL4 (NM_020436.2,773-791).
cgcatccaggtgaacatgt

SEQ ID NO: 38886 - DNA, 19 bp, Homo sapiens
  siRNA target sequence for SALL4 (NM_020436.2,1463-1481).
gatgaaccgagtctttctt

SEQ ID NO: 38887 - DNA, 19 bp, Homo sapiens
  siRNA target sequence for SALL4 (NM_020436.2,1469-1487).
ccgagtctttctttagaca

SEQ ID NO: 38888 - DNA, 19 bp, Homo sapiens
  siRNA target sequence for SALL4 (NM_020436.2,1517-1535).
gggctacctcagaatcttt

SEQ ID NO: 38889 - DNA, 19 bp, Homo sapiens
  siRNA target sequence for SALL4 (NM_020436.2,1632-1650).
ctggggtgggaccaaacta

SEQ ID NO: 38890 - DNA, 19 bp, Homo sapiens
  siRNA target sequence for SALL4 (NM_020436.2,1634-1652).
ggggtgggaccaaactata

SEQ ID NO: 38891 - DNA, 19 bp, Homo sapiens
  siRNA target sequence for SALL4 (NM_020436.2,1635-1653).
gggtgggaccaaactataa

SEQ ID NO: 38892 - DNA, 19 bp, Homo sapiens
  siRNA target sequence for SALL4 (NM_020436.2,1636-1654).
ggtgggaccaaactataat

SEQ ID NO: 38893 - DNA, 19 bp, Homo sapiens
  siRNA target sequence for SALL4 (NM_020436.2,1701-1719).
ggtcagagaccctgaaatt

SEQ ID NO: 38894 - DNA, 19 bp, Homo sapiens
  siRNA target sequence for SALL4 (NM_020436.2,1704-1722).
cagagaccctgaaattgca

SEQ ID NO: 38895 - DNA, 19 bp, Homo sapiens
  siRNA target sequence for SALL4 (NM_020436.2,1755-1773).
ctgatcccaacgaatgtct

SEQ ID NO: 38896 - DNA, 19 bp, Homo sapiens
  siRNA target sequence for SALL4 (NM_020436.2,1797-1815).
gtcagagctccctcaagat

SEQ ID NO: 38897 - DNA, 19 bp, Homo sapiens
  siRNA target sequence for SALL4 (NM_020436.2,1803-1821).
gctccctcaagatgcatta

SEQ ID NO: 38898 - DNA, 19 bp, Homo sapiens
  siRNA target sequence for SALL4 (NM_020436.2,1842-1860).
gaccgttccagtgtaagat

SEQ ID NO: 38899 - DNA, 19 bp, Homo sapiens
  siRNA target sequence for SALL4 (NM_020436.2,1910-1928).
gttcaccgaaccaacacat

SEQ ID NO: 38900 - DNA, 19 bp, Homo sapiens
  siRNA target sequence for SALL4 (NM_020436.2,1915-1933).
ccgaaccaacacatccatt

SEQ ID NO: 38901 - DNA, 19 bp, Homo sapiens
  siRNA target sequence for SALL4 (NM_020436.2,2109-2127).
ctatctgccatgatgatgt

SEQ ID NO: 38902 - DNA, 19 bp, Homo sapiens
  siRNA target sequence for SALL4 (NM_020436.2,2447-2465).
caagccgaaagcatcaagt

SEQ ID NO: 38903 - DNA, 19 bp, Homo sapiens
  siRNA target sequence for SALL4 (NM_020436.2,2450-2468).
gccgaaagcatcaagtcaa

SEQ ID NO: 38904 - DNA, 19 bp, Homo sapiens
  siRNA target sequence for SALL4 (NM_020436.2,2451-2469).
ccgaaagcatcaagtcaaa

SEQ ID NO: 38905 - DNA, 19 bp, Homo sapiens
  siRNA target sequence for SALL4 (NM_020436.2,2538-2556).
gtctcccttccacgtttat

SEQ ID NO: 38906 - DNA, 19 bp, Homo sapiens
  siRNA target sequence for SALL4 (NM_020436.2,2571-2589).
cctatgtcaaggttgaagt

SEQ ID NO: 38907 - DNA, 19 bp, Homo sapiens
  siRNA target sequence for SALL4 (NM_020436.2,2572-2590).
ctatgtcaaggttgaagtt

SEQ ID NO: 38908 - DNA, 19 bp, Homo sapiens
  siRNA target sequence for SALL4 (NM_020436.2,2603-2621).
gtgggaccctcgacattgt

SEQ ID NO: 38909 - DNA, 19 bp, Homo sapiens
  siRNA target sequence for SALL4 (NM_020436.2,2687-2705).
cggtgtgggaagaacttct

SEQ ID NO: 38910 - DNA, 19 bp, Homo sapiens
  siRNA target sequence for SALL4 (NM_020436.2,2709-2727).
ctgctagcgctcttcagat

SEQ ID NO: 38911 - DNA, 19 bp, Homo sapiens
  siRNA target sequence for SALL4 (NM_020436.2,2895-2913).
gtacggacggaaaaagagt

SEQ ID NO: 38912 - DNA, 19 bp, Homo sapiens
  siRNA target sequence for SALL4 (NM_020436.2,3054-3072).
ctaccctcccggtttcctt

SEQ ID NO: 38913 - DNA, 19 bp, Homo sapiens
  siRNA target sequence for SALL4 (NM_020436.2,3121-3139).
ctcccagtcgggtatcagt

SEQ ID NO: 38914 - DNA, 19 bp, Homo sapiens
  siRNA target sequence for SCOTIN (NM_016479.3,211-229).
cacgtggtgaggtgtgtat

SEQ ID NO: 38915 - DNA, 19 bp, Homo sapiens
  siRNA target sequence for SCOTIN (NM_016479.3,256-274).
ccgagtcctgtccagattt

SEQ ID NO: 38916 - DNA, 19 bp, Homo sapiens
  siRNA target sequence for SCOTIN (NM_016479.3,258-276).
gagtcctgtccagatttct

SEQ ID NO: 38917 - DNA, 19 bp, Homo sapiens
  siRNA target sequence for SCOTIN (NM_016479.3,283-301).
gtacctgtgatgaccaata

SEQ ID NO: 38918 - DNA, 19 bp, Homo sapiens
  siRNA target sequence for SCOTIN (NM_016479.3,310-328).
ctgacgtgctgaagaaatt

SEQ ID NO: 38919 - DNA, 19 bp, Homo sapiens
  siRNA target sequence for SE20-4 (NM_022117.1,295-313).
caggtgctggccgatatga

SEQ ID NO: 38920 - DNA, 19 bp, Homo sapiens
  siRNA target sequence for SE20-4 (NM_022117.1,347-365).
cgcctccctatgtcattct

SEQ ID NO: 38921 - DNA, 19 bp, Homo sapiens
  siRNA target sequence for SE20-4 (NM_022117.1,376-394).
gggatccgcgcatacttca

SEQ ID NO: 38922 - DNA, 19 bp, Homo sapiens
  siRNA target sequence for SE20-4 (NM_022117.1,505-523).
gggagcctggaaatcgatt

SEQ ID NO: 38923 - DNA, 19 bp, Homo sapiens
  siRNA target sequence for SE20-4 (NM_022117.1,507-525).
gagcctggaaatcgatttt

SEQ ID NO: 38924 - DNA, 19 bp, Homo sapiens
  siRNA target sequence for SE20-4 (NM_022117.1,509-527).
gcctggaaatcgattttca

SEQ ID NO: 38925 - DNA, 19 bp, Homo sapiens
  siRNA target sequence for SE20-4 (NM_022117.1,624-642).
ggaagaggcgatcatcata

SEQ ID NO: 38926 - DNA, 19 bp, Homo sapiens
  siRNA target sequence for SE20-4 (NM_022117.1,661-679).
gatgagcgggagagtatga

SEQ ID NO: 38927 - DNA, 19 bp, Homo sapiens
  siRNA target sequence for SE20-4 (NM_022117.1,844-862).
cgtctcaagcgcaagttca

SEQ ID NO: 38928 - DNA, 19 bp, Homo sapiens
  siRNA target sequence for SE20-4 (NM_022117.1,845-863).
gtctcaagcgcaagttcat

SEQ ID NO: 38929 - DNA, 19 bp, Homo sapiens
  siRNA target sequence for SE20-4 (NM_022117.1,942-960).
caaccaccccagaatttca

SEQ ID NO: 38930 - DNA, 19 bp, Homo sapiens
  siRNA target sequence for SE20-4 (NM_022117.1,966-984).
gatcaaccgacgtgatgaa

SEQ ID NO: 38931 - DNA, 19 bp, Homo sapiens
  siRNA target sequence for SE20-4 (NM_022117.1,973-991).
cgacgtgatgaagacattt

SEQ ID NO: 38932 - DNA, 19 bp, Homo sapiens
  siRNA target sequence for SE20-4 (NM_022117.1,985-1003).
gacattttccgctacttga

SEQ ID NO: 38933 - DNA, 19 bp, Homo sapiens
  siRNA target sequence for SE20-4 (NM_022117.1,1018-1036).
caggatctcagacatatct

SEQ ID NO: 38934 - DNA, 19 bp, Homo sapiens
  siRNA target sequence for SE20-4 (NM_022117.1,1066-1084).
cagactaacccctacttca

SEQ ID NO: 38935 - DNA, 19 bp, Homo sapiens
  siRNA target sequence for SE20-4 (NM_022117.1,1306-1324).
cgctactacctgagagaaa

SEQ ID NO: 38936 - DNA, 19 bp, Homo sapiens
  siRNA target sequence for SE20-4 (NM_022117.1,1327-1345).
ggctccaggataaagagaa

SEQ ID NO: 38937 - DNA, 19 bp, Homo sapiens
  siRNA target sequence for SE20-4 (NM_022117.1,1401-1419).
ggaagacgcccctgactat

SEQ ID NO: 38938 - DNA, 19 bp, Homo sapiens
  siRNA target sequence for SE20-4 (NM_022117.1,1402-1420).
gaagacgcccctgactatt

SEQ ID NO: 38939 - DNA, 19 bp, Homo sapiens
  siRNA target sequence for SE20-4 (NM_022117.1,1407-1425).
cgcccctgactattatgca

SEQ ID NO: 38940 - DNA, 19 bp, Homo sapiens
  siRNA target sequence for SE20-4 (NM_022117.1,1440-1458).
cagcgagatctcagacatt

SEQ ID NO: 38941 - DNA, 19 bp, Homo sapiens
  siRNA target sequence for SE20-4 (NM_022117.1,1443-1461).
cgagatctcagacattgat

SEQ ID NO: 38942 - DNA, 19 bp, Homo sapiens
  siRNA target sequence for SE20-4 (NM_022117.1,1512-1530).
cttcgagaccactgacaat

SEQ ID NO: 38943 - DNA, 19 bp, Homo sapiens
  siRNA target sequence for SE20-4 (NM_022117.1,1518-1536).
gaccactgacaatgagata

SEQ ID NO: 38944 - DNA, 19 bp, Homo sapiens
  siRNA target sequence for SE20-4 (NM_022117.1,1523-1541).
ctgacaatgagataactga

SEQ ID NO: 38945 - DNA, 19 bp, Homo sapiens
  siRNA target sequence for SE20-4 (NM_022117.1,1635-1653).
cgaaaccactgacaacaat

SEQ ID NO: 38946 - DNA, 19 bp, Homo sapiens
  siRNA target sequence for SE20-4 (NM_022117.1,1924-1942).
gacgacagagacattgagt

SEQ ID NO: 38947 - DNA, 19 bp, Homo sapiens
  siRNA target sequence for SE20-4 (NM_022117.1,1929-1947).
cagagacattgagtactat

SEQ ID NO: 38948 - DNA, 19 bp, Homo sapiens
  siRNA target sequence for SE20-4 (NM_022117.1,1993-2011).
gacgtgatagagatcatct

SEQ ID NO: 38949 - DNA, 19 bp, Homo sapiens
  siRNA target sequence for SET (NM_003011.1,61-79).
gccgacgagacctcagaaa

SEQ ID NO: 38950 - DNA, 19 bp, Homo sapiens
  siRNA target sequence for SET (NM_003011.1,62-80).
ccgacgagacctcagaaaa

SEQ ID NO: 38951 - DNA, 19 bp, Homo sapiens
  siRNA target sequence for SET (NM_003011.1,63-81).
cgacgagacctcagaaaaa

SEQ ID NO: 38952 - DNA, 19 bp, Homo sapiens
  siRNA target sequence for SETBP1 (NM_015559.1,62-80).
caacgcggacagtgagaaa

SEQ ID NO: 38953 - DNA, 19 bp, Homo sapiens
  siRNA target sequence for SETBP1 (NM_015559.1,148-166).
gtctgaagctaaagattca

SEQ ID NO: 38954 - DNA, 19 bp, Homo sapiens
  siRNA target sequence for SETBP1 (NM_015559.1,169-187).
ccacaaagcgggctaagaa

SEQ ID NO: 38955 - DNA, 19 bp, Homo sapiens
  siRNA target sequence for SETBP1 (NM_015559.1,170-188).
cacaaagcgggctaagaaa

SEQ ID NO: 38956 - DNA, 19 bp, Homo sapiens
  siRNA target sequence for SETBP1 (NM_015559.1,219-237).
ccacctgagatcaagatca

SEQ ID NO: 38957 - DNA, 19 bp, Homo sapiens
  siRNA target sequence for SETBP1 (NM_015559.1,263-281).
ggtgtcccgtgctggaaaa

SEQ ID NO: 38958 - DNA, 19 bp, Homo sapiens
  siRNA target sequence for SETBP1 (NM_015559.1,354-372).
gccagtgacctcaaaggat

SEQ ID NO: 38959 - DNA, 19 bp, Homo sapiens
  siRNA target sequence for SETBP1 (NM_015559.1,355-373).
ccagtgacctcaaaggatt

SEQ ID NO: 38960 - DNA, 19 bp, Homo sapiens
  siRNA target sequence for SETBP1 (NM_015559.1,395-413).
gccccagaaacattcaact

SEQ ID NO: 38961 - DNA, 19 bp, Homo sapiens
  siRNA target sequence for SETBP1 (NM_015559.1,446-464).
caccggtgacaccttaaaa

SEQ ID NO: 38962 - DNA, 19 bp, Homo sapiens
  siRNA target sequence for SETBP1 (NM_015559.1,449-467).
cggtgacaccttaaaacca

SEQ ID NO: 38963 - DNA, 19 bp, Homo sapiens
  siRNA target sequence for SETBP1 (NM_015559.1,450-468).
ggtgacaccttaaaaccaa

SEQ ID NO: 38964 - DNA, 19 bp, Homo sapiens
  siRNA target sequence for SETBP1 (NM_015559.1,451-469).
gtgacaccttaaaaccaaa

SEQ ID NO: 38965 - DNA, 19 bp, Homo sapiens
  siRNA target sequence for SETBP1 (NM_015559.1,527-545).
cggacccgtcactcagaat

SEQ ID NO: 38966 - DNA, 19 bp, Homo sapiens
  siRNA target sequence for SETBP1 (NM_015559.1,532-550).
ccgtcactcagaattgctt

SEQ ID NO: 38967 - DNA, 19 bp, Homo sapiens
  siRNA target sequence for SETBP1 (NM_015559.1,609-627).
cccgtggcttcctttgcaa

SEQ ID NO: 38968 - DNA, 19 bp, Homo sapiens
  siRNA target sequence for SETBP1 (NM_015559.1,779-797).
gcccttggtggatcaagat

SEQ ID NO: 38969 - DNA, 19 bp, Homo sapiens
  siRNA target sequence for SETBP1 (NM_015559.1,896-914).
cctggattgggtcaagaat

SEQ ID NO: 38970 - DNA, 19 bp, Homo sapiens
  siRNA target sequence for SETBP1 (NM_015559.1,1001-1019).
cgtgagttctgccagtaat

SEQ ID NO: 38971 - DNA, 19 bp, Homo sapiens
  siRNA target sequence for SETBP1 (NM_015559.1,1004-1022).
gagttctgccagtaatcct

SEQ ID NO: 38972 - DNA, 19 bp, Homo sapiens
  siRNA target sequence for SETBP1 (NM_015559.1,1009-1027).
ctgccagtaatcctgaaaa

SEQ ID NO: 38973 - DNA, 19 bp, Homo sapiens
  siRNA target sequence for SETBP1 (NM_015559.1,1036-1054).
gtcatgtccggattactat

SEQ ID NO: 38974 - DNA, 19 bp, Homo sapiens
  siRNA target sequence for SETBP1 (NM_015559.1,1077-1095).
gatccaaccaaccataaga

SEQ ID NO: 38975 - DNA, 19 bp, Homo sapiens
  siRNA target sequence for SETBP1 (NM_015559.1,1168-1186).
ccatgagcagtgaagtagt

SEQ ID NO: 38976 - DNA, 19 bp, Homo sapiens
  siRNA target sequence for SETBP1 (NM_015559.1,1169-1187).
catgagcagtgaagtagtt

SEQ ID NO: 38977 - DNA, 19 bp, Homo sapiens
  siRNA target sequence for SETBP1 (NM_015559.1,1227-1245).
ccccgtgtccctaagttga

SEQ ID NO: 38978 - DNA, 19 bp, Homo sapiens
  siRNA target sequence for SETBP1 (NM_015559.1,1230-1248).
cgtgtccctaagttgagta

SEQ ID NO: 38979 - DNA, 19 bp, Homo sapiens
  siRNA target sequence for SETBP1 (NM_015559.1,1233-1251).
gtccctaagttgagtaaaa

SEQ ID NO: 38980 - DNA, 19 bp, Homo sapiens
  siRNA target sequence for SETBP1 (NM_015559.1,1269-1287).
ccctcagttggccttgaaa

SEQ ID NO: 38981 - DNA, 19 bp, Homo sapiens
  siRNA target sequence for SETBP1 (NM_015559.1,1399-1417).
cagaaatccagcatccaaa

SEQ ID NO: 38982 - DNA, 19 bp, Homo sapiens
  siRNA target sequence for SETBP1 (NM_015559.1,1438-1456).
ggacttgcagcaaaccaaa

SEQ ID NO: 38983 - DNA, 19 bp, Homo sapiens
  siRNA target sequence for SETBP1 (NM_015559.1,1482-1500).
gttatggccacctctgata

SEQ ID NO: 38984 - DNA, 19 bp, Homo sapiens
  siRNA target sequence for SETBP1 (NM_015559.1,1489-1507).
ccacctctgataaactgat

SEQ ID NO: 38985 - DNA, 19 bp, Homo sapiens
  siRNA target sequence for SETBP1 (NM_015559.1,1631-1649).
cacagtcgagacgattcat

SEQ ID NO: 38986 - DNA, 19 bp, Homo sapiens
  siRNA target sequence for SETBP1 (NM_015559.1,1633-1651).
cagtcgagacgattcatga

SEQ ID NO: 38987 - DNA, 19 bp, Homo sapiens
  siRNA target sequence for SETBP1 (NM_015559.1,1711-1729).
gaaagcgacgacgcaattt

SEQ ID NO: 38988 - DNA, 19 bp, Homo sapiens
  siRNA target sequence for SETBP1 (NM_015559.1,1774-1792).
gcgagatgaaatttcacaa

SEQ ID NO: 38989 - DNA, 19 bp, Homo sapiens
  siRNA target sequence for SETBP1 (NM_015559.1,1806-1824).
ctcggcgtgttggataaga

SEQ ID NO: 38990 - DNA, 19 bp, Homo sapiens
  siRNA target sequence for SETBP1 (NM_015559.1,1809-1827).
ggcgtgttggataagaaga

SEQ ID NO: 38991 - DNA, 19 bp, Homo sapiens
  siRNA target sequence for SETBP1 (NM_015559.1,1944-1962).
ggggcagcagccattgaaa

SEQ ID NO: 38992 - DNA, 19 bp, Homo sapiens
  siRNA target sequence for SETBP1 (NM_015559.1,1971-1989).
ggcaagcagattaatgtca

SEQ ID NO: 38993 - DNA, 19 bp, Homo sapiens
  siRNA target sequence for SETBP1 (NM_015559.1,1994-2012).
gaggggaaccatctacatt

SEQ ID NO: 38994 - DNA, 19 bp, Homo sapiens
  siRNA target sequence for SETBP1 (NM_015559.1,2166-2184).
gctatgcacccactttcaa

SEQ ID NO: 38995 - DNA, 19 bp, Homo sapiens
  siRNA target sequence for SETBP1 (NM_015559.1,2375-2393).
gattggctccctaaaggaa

SEQ ID NO: 38996 - DNA, 19 bp, Homo sapiens
  siRNA target sequence for SETBP1 (NM_015559.1,2686-2704).
gcgatgacctccagtttct

SEQ ID NO: 38997 - DNA, 19 bp, Homo sapiens
  siRNA target sequence for SETBP1 (NM_015559.1,2791-2809).
ccagcatttttcggattaa

SEQ ID NO: 38998 - DNA, 19 bp, Homo sapiens
  siRNA target sequence for SETBP1 (NM_015559.1,2792-2810).
cagcatttttcggattaat

SEQ ID NO: 38999 - DNA, 19 bp, Homo sapiens
  siRNA target sequence for SETBP1 (NM_015559.1,2866-2884).
gtaggacttcagacttgaa

SEQ ID NO: 39000 - DNA, 19 bp, Homo sapiens
  siRNA target sequence for SETBP1 (NM_015559.1,2901-2919).
ggtaggcctgcaaaaacca

SEQ ID NO: 39001 - DNA, 19 bp, Homo sapiens
  siRNA target sequence for SETBP1 (NM_015559.1,2902-2920).
gtaggcctgcaaaaaccaa

SEQ ID NO: 39002 - DNA, 19 bp, Homo sapiens
  siRNA target sequence for SETBP1 (NM_015559.1,2965-2983).
ctattcccagtggaagtta

SEQ ID NO: 39003 - DNA, 19 bp, Homo sapiens
  siRNA target sequence for SETBP1 (NM_015559.1,2998-3016).
gaatgccttacacatcaat

SEQ ID NO: 39004 - DNA, 19 bp, Homo sapiens
  siRNA target sequence for SETBP1 (NM_015559.1,3019-3037).
ctatgatgaaccttggtta

SEQ ID NO: 39005 - DNA, 19 bp, Homo sapiens
  siRNA target sequence for SETBP1 (NM_015559.1,3120-3138).
cctcagttccacacaaact

SEQ ID NO: 39006 - DNA, 19 bp, Homo sapiens
  siRNA target sequence for SETBP1 (NM_015559.1,3152-3170).
gtccggtgcagctaagcat

SEQ ID NO: 39007 - DNA, 19 bp, Homo sapiens
  siRNA target sequence for SETBP1 (NM_015559.1,3154-3172).
ccggtgcagctaagcataa

SEQ ID NO: 39008 - DNA, 19 bp, Homo sapiens
  siRNA target sequence for SETBP1 (NM_015559.1,3155-3173).
cggtgcagctaagcataaa

SEQ ID NO: 39009 - DNA, 19 bp, Homo sapiens
  siRNA target sequence for SETBP1 (NM_015559.1,3271-3289).
ccagtggtcggctccataa

SEQ ID NO: 39010 - DNA, 19 bp, Homo sapiens
  siRNA target sequence for SETBP1 (NM_015559.1,3410-3428).
gctgagtagcgcagacaaa

SEQ ID NO: 39011 - DNA, 19 bp, Homo sapiens
  siRNA target sequence for SETBP1 (NM_015559.1,3495-3513).
ggccacaaagcttctaaga

SEQ ID NO: 39012 - DNA, 19 bp, Homo sapiens
  siRNA target sequence for SETBP1 (NM_015559.1,3609-3627).
gtggactcatgcacgaaaa

SEQ ID NO: 39013 - DNA, 19 bp, Homo sapiens
  siRNA target sequence for SETBP1 (NM_015559.1,3611-3629).
ggactcatgcacgaaaaga

SEQ ID NO: 39014 - DNA, 19 bp, Homo sapiens
  siRNA target sequence for SETBP1 (NM_015559.1,3612-3630).
gactcatgcacgaaaagat

SEQ ID NO: 39015 - DNA, 19 bp, Homo sapiens
  siRNA target sequence for SETBP1 (NM_015559.1,3675-3693).
ctggacgtgttcagtgaaa

SEQ ID NO: 39016 - DNA, 19 bp, Homo sapiens
  siRNA target sequence for SETBP1 (NM_015559.1,3763-3781).
gaacgtacagggaaaagga

SEQ ID NO: 39017 - DNA, 19 bp, Homo sapiens
  siRNA target sequence for SETBP1 (NM_015559.1,3806-3824).
caaggagagaagttcttat

SEQ ID NO: 39018 - DNA, 19 bp, Homo sapiens
  siRNA target sequence for SETBP1 (NM_015559.1,3936-3954).
gccgcagttgacagtgtta

SEQ ID NO: 39019 - DNA, 19 bp, Homo sapiens
  siRNA target sequence for SETBP1 (NM_015559.1,3938-3956).
cgcagttgacagtgttaca

SEQ ID NO: 39020 - DNA, 19 bp, Homo sapiens
  siRNA target sequence for SETBP1 (NM_015559.1,3939-3957).
gcagttgacagtgttacaa

SEQ ID NO: 39021 - DNA, 19 bp, Homo sapiens
  siRNA target sequence for SETBP1 (NM_015559.1,3940-3958).
cagttgacagtgttacaat

SEQ ID NO: 39022 - DNA, 19 bp, Homo sapiens
  siRNA target sequence for SETBP1 (NM_015559.1,4154-4172).
gcggctgcagagacaatca

SEQ ID NO: 39023 - DNA, 19 bp, Homo sapiens
  siRNA target sequence for SETBP1 (NM_015559.1,4180-4198).
gcaacaacttcgtgaagaa

SEQ ID NO: 39024 - DNA, 19 bp, Homo sapiens
  siRNA target sequence for SETBP1 (NM_015559.1,4280-4298).
cgacctgcccagcaaaaga

SEQ ID NO: 39025 - DNA, 19 bp, Homo sapiens
  siRNA target sequence for SETDB1 (NM_012432.1,96-114).
cttcctgggtgcattggtt

SEQ ID NO: 39026 - DNA, 19 bp, Homo sapiens
  siRNA target sequence for SETDB1 (NM_012432.1,264-282).
cagctagcagagttagaga

SEQ ID NO: 39027 - DNA, 19 bp, Homo sapiens
  siRNA target sequence for SETDB1 (NM_012432.1,279-297).
gagacatgggtaatacaga

SEQ ID NO: 39028 - DNA, 19 bp, Homo sapiens
  siRNA target sequence for SETDB1 (NM_012432.1,313-331).
ctcacgttgaccaactctt

SEQ ID NO: 39029 - DNA, 19 bp, Homo sapiens
  siRNA target sequence for SETDB1 (NM_012432.1,317-335).
cgttgaccaactctttgat

SEQ ID NO: 39030 - DNA, 19 bp, Homo sapiens
  siRNA target sequence for SETDB1 (NM_012432.1,344-362).
cagggcagtgactaattgt

SEQ ID NO: 39031 - DNA, 19 bp, Homo sapiens
  siRNA target sequence for SETDB1 (NM_012432.1,367-385).
ctttggtgaaggacttcta

SEQ ID NO: 39032 - DNA, 19 bp, Homo sapiens
  siRNA target sequence for SETDB1 (NM_012432.1,388-406).
ccaagctgggactacaata

SEQ ID NO: 39033 - DNA, 19 bp, Homo sapiens
  siRNA target sequence for SETDB1 (NM_012432.1,477-495).
gatgtcctcagtattgatt

SEQ ID NO: 39034 - DNA, 19 bp, Homo sapiens
  siRNA target sequence for SETDB1 (NM_012432.1,508-526).
ggagcagaactccaaaaga

SEQ ID NO: 39035 - DNA, 19 bp, Homo sapiens
  siRNA target sequence for SETDB1 (NM_012432.1,544-562).
ctatggctgccttaagaaa

SEQ ID NO: 39036 - DNA, 19 bp, Homo sapiens
  siRNA target sequence for SETDB1 (NM_012432.1,548-566).
ggctgccttaagaaagtca

SEQ ID NO: 39037 - DNA, 19 bp, Homo sapiens
  siRNA target sequence for SETDB1 (NM_012432.1,617-635).
ccaggatctgcataaagga

SEQ ID NO: 39038 - DNA, 19 bp, Homo sapiens
  siRNA target sequence for SETDB1 (NM_012432.1,779-797).
ggtgaaatttgacaacaaa

SEQ ID NO: 39039 - DNA, 19 bp, Homo sapiens
  siRNA target sequence for SETDB1 (NM_012432.1,807-825).
ctactgtcggggaaccata

SEQ ID NO: 39040 - DNA, 19 bp, Homo sapiens
  siRNA target sequence for SETDB1 (NM_012432.1,818-836).
gaaccatattgcctatgat

SEQ ID NO: 39041 - DNA, 19 bp, Homo sapiens
  siRNA target sequence for SETDB1 (NM_012432.1,871-889).
gtcgggtggtcgccaaata

SEQ ID NO: 39042 - DNA, 19 bp, Homo sapiens
  siRNA target sequence for SETDB1 (NM_012432.1,873-891).
cgggtggtcgccaaataca

SEQ ID NO: 39043 - DNA, 19 bp, Homo sapiens
  siRNA target sequence for SETDB1 (NM_012432.1,874-892).
gggtggtcgccaaatacaa

SEQ ID NO: 39044 - DNA, 19 bp, Homo sapiens
  siRNA target sequence for SETDB1 (NM_012432.1,875-893).
ggtggtcgccaaatacaaa

SEQ ID NO: 39045 - DNA, 19 bp, Homo sapiens
  siRNA target sequence for SETDB1 (NM_012432.1,1001-1019).
cacacagtcggaactgtat

SEQ ID NO: 39046 - DNA, 19 bp, Homo sapiens
  siRNA target sequence for SETDB1 (NM_012432.1,1048-1066).
gggaggacatagaagacat

SEQ ID NO: 39047 - DNA, 19 bp, Homo sapiens
  siRNA target sequence for SETDB1 (NM_012432.1,1069-1087).
cctgccgtgacttcataga

SEQ ID NO: 39048 - DNA, 19 bp, Homo sapiens
  siRNA target sequence for SETDB1 (NM_012432.1,1223-1241).
cctggatgacaaaagatgt

SEQ ID NO: 39049 - DNA, 19 bp, Homo sapiens
  siRNA target sequence for SETDB1 (NM_012432.1,1274-1292).
gcccatgttcagcatgaaa

SEQ ID NO: 39050 - DNA, 19 bp, Homo sapiens
  siRNA target sequence for SETDB1 (NM_012432.1,1331-1349).
gctcaggacacgtccaaat

SEQ ID NO: 39051 - DNA, 19 bp, Homo sapiens
  siRNA target sequence for SETDB1 (NM_012432.1,1332-1350).
ctcaggacacgtccaaata

SEQ ID NO: 39052 - DNA, 19 bp, Homo sapiens
  siRNA target sequence for SETDB1 (NM_012432.1,1645-1663).
ctgggatcaaccagacata

SEQ ID NO: 39053 - DNA, 19 bp, Homo sapiens
  siRNA target sequence for SETDB1 (NM_012432.1,1649-1667).
gatcaaccagacatataga

SEQ ID NO: 39054 - DNA, 19 bp, Homo sapiens
  siRNA target sequence for SETDB1 (NM_012432.1,1652-1670).
caaccagacatatagatca

SEQ ID NO: 39055 - DNA, 19 bp, Homo sapiens
  siRNA target sequence for SETDB1 (NM_012432.1,1658-1676).
gacatatagatcaccttta

SEQ ID NO: 39056 - DNA, 19 bp, Homo sapiens
  siRNA target sequence for SETDB1 (NM_012432.1,1809-1827).
cctcatgtctgcagctata

SEQ ID NO: 39057 - DNA, 19 bp, Homo sapiens
  siRNA target sequence for SETDB1 (NM_012432.1,1886-1904).
gctggtcccgttactatat

SEQ ID NO: 39058 - DNA, 19 bp, Homo sapiens
  siRNA target sequence for SETDB1 (NM_012432.1,1890-1908).
gtcccgttactatatgact

SEQ ID NO: 39059 - DNA, 19 bp, Homo sapiens
  siRNA target sequence for SETDB1 (NM_012432.1,1942-1960).
gcaagatgggctttcatgt

SEQ ID NO: 39060 - DNA, 19 bp, Homo sapiens
  siRNA target sequence for SETDB1 (NM_012432.1,1943-1961).
caagatgggctttcatgtt

SEQ ID NO: 39061 - DNA, 19 bp, Homo sapiens
  siRNA target sequence for SETDB1 (NM_012432.1,1949-1967).
gggctttcatgttatctat

SEQ ID NO: 39062 - DNA, 19 bp, Homo sapiens
  siRNA target sequence for SETDB1 (NM_012432.1,1950-1968).
ggctttcatgttatctata

SEQ ID NO: 39063 - DNA, 19 bp, Homo sapiens
  siRNA target sequence for SETDB1 (NM_012432.1,1951-1969).
gctttcatgttatctataa

SEQ ID NO: 39064 - DNA, 19 bp, Homo sapiens
  siRNA target sequence for SETDB1 (NM_012432.1,2004-2022).
gagatagaacgctaccttt

SEQ ID NO: 39065 - DNA, 19 bp, Homo sapiens
  siRNA target sequence for SETDB1 (NM_012432.1,2057-2075).
gttctgtttggatccatat

SEQ ID NO: 39066 - DNA, 19 bp, Homo sapiens
  siRNA target sequence for SETDB1 (NM_012432.1,2060-2078).
ctgtttggatccatatgtt

SEQ ID NO: 39067 - DNA, 19 bp, Homo sapiens
  siRNA target sequence for SETDB1 (NM_012432.1,2100-2118).
ccctataagcctttttact

SEQ ID NO: 39068 - DNA, 19 bp, Homo sapiens
  siRNA target sequence for SETDB1 (NM_012432.1,2155-2173).
ccctatcctgtgtcaatga

SEQ ID NO: 39069 - DNA, 19 bp, Homo sapiens
  siRNA target sequence for SETDB1 (NM_012432.1,2310-2328).
gcctgccatcaactaacta

SEQ ID NO: 39070 - DNA, 19 bp, Homo sapiens
  siRNA target sequence for SETDB1 (NM_012432.1,2311-2329).
cctgccatcaactaactat

SEQ ID NO: 39071 - DNA, 19 bp, Homo sapiens
  siRNA target sequence for SETDB1 (NM_012432.1,2409-2427).
cccacaggggtatatgagt

SEQ ID NO: 39072 - DNA, 19 bp, Homo sapiens
  siRNA target sequence for SETDB1 (NM_012432.1,2415-2433).
ggggtatatgagtgtaaca

SEQ ID NO: 39073 - DNA, 19 bp, Homo sapiens
  siRNA target sequence for SETDB1 (NM_012432.1,2416-2434).
gggtatatgagtgtaacaa

SEQ ID NO: 39074 - DNA, 19 bp, Homo sapiens
  siRNA target sequence for SETDB1 (NM_012432.1,2417-2435).
ggtatatgagtgtaacaaa

SEQ ID NO: 39075 - DNA, 19 bp, Homo sapiens
  siRNA target sequence for SETDB1 (NM_012432.1,2474-2492).
ggtgcaacatggactacaa

SEQ ID NO: 39076 - DNA, 19 bp, Homo sapiens
  siRNA target sequence for SETDB1 (NM_012432.1,2493-2511).
gttcggctacagctattca

SEQ ID NO: 39077 - DNA, 19 bp, Homo sapiens
  siRNA target sequence for SETDB1 (NM_012432.1,2496-2514).
cggctacagctattcaaga

SEQ ID NO: 39078 - DNA, 19 bp, Homo sapiens
  siRNA target sequence for SETDB1 (NM_012432.1,2635-2653).
gtgatgagtactttgcaaa

SEQ ID NO: 39079 - DNA, 19 bp, Homo sapiens
  siRNA target sequence for SETDB1 (NM_012432.1,2847-2865).
gtgtggcggagctatgcta

SEQ ID NO: 39080 - DNA, 19 bp, Homo sapiens
  siRNA target sequence for SETDB1 (NM_012432.1,2898-2916).
ggactctctgagacaactt

SEQ ID NO: 39081 - DNA, 19 bp, Homo sapiens
  siRNA target sequence for SETDB1 (NM_012432.1,3037-3055).
ggttgagctgcaatagtgt

SEQ ID NO: 39082 - DNA, 19 bp, Homo sapiens
  siRNA target sequence for SETDB1 (NM_012432.1,3182-3200).
ggatgagggagacatcaaa

SEQ ID NO: 39083 - DNA, 19 bp, Homo sapiens
  siRNA target sequence for SETDB1 (NM_012432.1,3220-3238).
ctgacgaccgaaacaagat

SEQ ID NO: 39084 - DNA, 19 bp, Homo sapiens
  siRNA target sequence for SETDB1 (NM_012432.1,3222-3240).
gacgaccgaaacaagatgt

SEQ ID NO: 39085 - DNA, 19 bp, Homo sapiens
  siRNA target sequence for SETDB1 (NM_012432.1,3233-3251).
caagatgtcagtagttact

SEQ ID NO: 39086 - DNA, 19 bp, Homo sapiens
  siRNA target sequence for SETDB1 (NM_012432.1,3236-3254).
gatgtcagtagttactgaa

SEQ ID NO: 39087 - DNA, 19 bp, Homo sapiens
  siRNA target sequence for SETDB1 (NM_012432.1,3312-3330).
ccacctagtaagactagta

SEQ ID NO: 39088 - DNA, 19 bp, Homo sapiens
  siRNA target sequence for SETDB1 (NM_012432.1,3390-3408).
ctgtccagcagcacagaaa

SEQ ID NO: 39089 - DNA, 19 bp, Homo sapiens
  siRNA target sequence for SETDB1 (NM_012432.1,3392-3410).
gtccagcagcacagaaagt

SEQ ID NO: 39090 - DNA, 19 bp, Homo sapiens
  siRNA target sequence for SETDB1 (NM_012432.1,3394-3412).
ccagcagcacagaaagtga

SEQ ID NO: 39091 - DNA, 19 bp, Homo sapiens
  siRNA target sequence for SETDB1 (NM_012432.1,3465-3483).
gcggttgacagtgatgata

SEQ ID NO: 39092 - DNA, 19 bp, Homo sapiens
  siRNA target sequence for SETDB1 (NM_012432.1,3477-3495).
gatgatatccagaccatat

SEQ ID NO: 39093 - DNA, 19 bp, Homo sapiens
  siRNA target sequence for SETDB1 (NM_012432.1,3480-3498).
gatatccagaccatatcct

SEQ ID NO: 39094 - DNA, 19 bp, Homo sapiens
  siRNA target sequence for SETDB1 (NM_012432.1,3578-3596).
ccgaggctttgctcttaaa

SEQ ID NO: 39095 - DNA, 19 bp, Homo sapiens
  siRNA target sequence for SETDB1 (NM_012432.1,3579-3597).
cgaggctttgctcttaaat

SEQ ID NO: 39096 - DNA, 19 bp, Homo sapiens
  siRNA target sequence for SETDB1 (NM_012432.1,3598-3616).
caacccatgggattgcaat

SEQ ID NO: 39097 - DNA, 19 bp, Homo sapiens
  siRNA target sequence for SETDB1 (NM_012432.1,3601-3619).
cccatgggattgcaattaa

SEQ ID NO: 39098 - DNA, 19 bp, Homo sapiens
  siRNA target sequence for SETDB1 (NM_012432.1,3602-3620).
ccatgggattgcaattaaa

SEQ ID NO: 39099 - DNA, 19 bp, Homo sapiens
  siRNA target sequence for SETDB1 (NM_012432.1,3655-3673).
gcgcacctgttcgtaagaa

SEQ ID NO: 39100 - DNA, 19 bp, Homo sapiens
  siRNA target sequence for SETDB1 (NM_012432.1,3657-3675).
gcacctgttcgtaagaaca

SEQ ID NO: 39101 - DNA, 19 bp, Homo sapiens
  siRNA target sequence for SETDB1 (NM_012432.1,3671-3689).
gaacacacgccaattctat

SEQ ID NO: 39102 - DNA, 19 bp, Homo sapiens
  siRNA target sequence for SETDB1 (NM_012432.1,3701-3719).
gtcttgctacatcattgat

SEQ ID NO: 39103 - DNA, 19 bp, Homo sapiens
  siRNA target sequence for SETDB1 (NM_012432.1,3867-3885).
cttacttgggactacaact

SEQ ID NO: 39104 - DNA, 19 bp, Homo sapiens
  siRNA target sequence for SETDB2 (NM_031915.1,841-859).
ggcgatgcaaaaactttct

SEQ ID NO: 39105 - DNA, 19 bp, Homo sapiens
  siRNA target sequence for SETDB2 (NM_031915.1,946-964).
gatgggtctgccaccaata

SEQ ID NO: 39106 - DNA, 19 bp, Homo sapiens
  siRNA target sequence for SETDB2 (NM_031915.1,950-968).
ggtctgccaccaataaaga

SEQ ID NO: 39107 - DNA, 19 bp, Homo sapiens
  siRNA target sequence for SETDB2 (NM_031915.1,951-969).
gtctgccaccaataaagaa

SEQ ID NO: 39108 - DNA, 19 bp, Homo sapiens
  siRNA target sequence for SETDB2 (NM_031915.1,955-973).
gccaccaataaagaataca

SEQ ID NO: 39109 - DNA, 19 bp, Homo sapiens
  siRNA target sequence for SETDB2 (NM_031915.1,972-990).
catccaagcaatgattcta

SEQ ID NO: 39110 - DNA, 19 bp, Homo sapiens
  siRNA target sequence for SETDB2 (NM_031915.1,1058-1076).
cccaaagcagtgatcctat

SEQ ID NO: 39111 - DNA, 19 bp, Homo sapiens
  siRNA target sequence for SETDB2 (NM_031915.1,1193-1211).
ctcttgaagataaagttgt

SEQ ID NO: 39112 - DNA, 19 bp, Homo sapiens
  siRNA target sequence for SETDB2 (NM_031915.1,1207-1225).
gttgtagactttagagaaa

SEQ ID NO: 39113 - DNA, 19 bp, Homo sapiens
  siRNA target sequence for SETDB2 (NM_031915.1,1228-1246).
gactcatcttcgaatttat

SEQ ID NO: 39114 - DNA, 19 bp, Homo sapiens
  siRNA target sequence for SETDB2 (NM_031915.1,1232-1250).
catcttcgaatttatctta

SEQ ID NO: 39115 - DNA, 19 bp, Homo sapiens
  siRNA target sequence for SETDB2 (NM_031915.1,1316-1334).
ctctgcagctgccaatcaa

SEQ ID NO: 39116 - DNA, 19 bp, Homo sapiens
  siRNA target sequence for SETDB2 (NM_031915.1,1349-1367).
gacgacatgcaaagacaaa

SEQ ID NO: 39117 - DNA, 19 bp, Homo sapiens
  siRNA target sequence for SETDB2 (NM_031915.1,1351-1369).
cgacatgcaaagacaaact

SEQ ID NO: 39118 - DNA, 19 bp, Homo sapiens
  siRNA target sequence for SETDB2 (NM_031915.1,1362-1380).
gacaaactctcattcttca

SEQ ID NO: 39119 - DNA, 19 bp, Homo sapiens
  siRNA target sequence for SETDB2 (NM_031915.1,1379-1397).
cagcactccacgtgagtta

SEQ ID NO: 39120 - DNA, 19 bp, Homo sapiens
  siRNA target sequence for SETDB2 (NM_031915.1,1381-1399).
gcactccacgtgagttata

SEQ ID NO: 39121 - DNA, 19 bp, Homo sapiens
  siRNA target sequence for SETDB2 (NM_031915.1,1423-1441).
cgaaacgtggaggaagttt

SEQ ID NO: 39122 - DNA, 19 bp, Homo sapiens
  siRNA target sequence for SETDB2 (NM_031915.1,1424-1442).
gaaacgtggaggaagtttt

SEQ ID NO: 39123 - DNA, 19 bp, Homo sapiens
  siRNA target sequence for SETDB2 (NM_031915.1,1428-1446).
cgtggaggaagtttttcgt

SEQ ID NO: 39124 - DNA, 19 bp, Homo sapiens
  siRNA target sequence for SETDB2 (NM_031915.1,1429-1447).
gtggaggaagtttttcgtt

SEQ ID NO: 39125 - DNA, 19 bp, Homo sapiens
  siRNA target sequence for SETDB2 (NM_031915.1,1520-1538).
ggaattacccaaagcaaaa

SEQ ID NO: 39126 - DNA, 19 bp, Homo sapiens
  siRNA target sequence for SETDB2 (NM_031915.1,1550-1568).
ctgatgtggatattagcaa

SEQ ID NO: 39127 - DNA, 19 bp, Homo sapiens
  siRNA target sequence for SETDB2 (NM_031915.1,1565-1583).
gcaatggagtggaatcagt

SEQ ID NO: 39128 - DNA, 19 bp, Homo sapiens
  siRNA target sequence for SETDB2 (NM_031915.1,1575-1593).
ggaatcagtgcccatttct

SEQ ID NO: 39129 - DNA, 19 bp, Homo sapiens
  siRNA target sequence for SETDB2 (NM_031915.1,1621-1639).
ctcccacagtttaagtaca

SEQ ID NO: 39130 - DNA, 19 bp, Homo sapiens
  siRNA target sequence for SETDB2 (NM_031915.1,1654-1672).
cctcgagcatataatctaa

SEQ ID NO: 39131 - DNA, 19 bp, Homo sapiens
  siRNA target sequence for SETDB2 (NM_031915.1,1658-1676).
gagcatataatctaaccaa

SEQ ID NO: 39132 - DNA, 19 bp, Homo sapiens
  siRNA target sequence for SETDB2 (NM_031915.1,1712-1730).
ctgagggctgcatagacat

SEQ ID NO: 39133 - DNA, 19 bp, Homo sapiens
  siRNA target sequence for SETDB2 (NM_031915.1,1714-1732).
gagggctgcatagacataa

SEQ ID NO: 39134 - DNA, 19 bp, Homo sapiens
  siRNA target sequence for SETDB2 (NM_031915.1,1716-1734).
gggctgcatagacataaca

SEQ ID NO: 39135 - DNA, 19 bp, Homo sapiens
  siRNA target sequence for SETDB2 (NM_031915.1,1722-1740).
catagacataacaaaatgt

SEQ ID NO: 39136 - DNA, 19 bp, Homo sapiens
  siRNA target sequence for SETDB2 (NM_031915.1,1840-1858).
cctactggcatttatgaat

SEQ ID NO: 39137 - DNA, 19 bp, Homo sapiens
  siRNA target sequence for SETDB2 (NM_031915.1,1860-1878).
cagccttttgtgcaaatgt

SEQ ID NO: 39138 - DNA, 19 bp, Homo sapiens
  siRNA target sequence for SETDB2 (NM_031915.1,1871-1889).
gcaaatgtaatcgacaatt

SEQ ID NO: 39139 - DNA, 19 bp, Homo sapiens
  siRNA target sequence for SETDB2 (NM_031915.1,1926-1944).
gaggttacaggtgttcaaa

SEQ ID NO: 39140 - DNA, 19 bp, Homo sapiens
  siRNA target sequence for SETDB2 (NM_031915.1,1962-1980).
gggtgtacgctgtctagat

SEQ ID NO: 39141 - DNA, 19 bp, Homo sapiens
  siRNA target sequence for SETDB2 (NM_031915.1,1964-1982).
gtgtacgctgtctagatga

SEQ ID NO: 39142 - DNA, 19 bp, Homo sapiens
  siRNA target sequence for SETDB2 (NM_031915.1,2007-2025).
catttattcaggaagatta

SEQ ID NO: 39143 - DNA, 19 bp, Homo sapiens
  siRNA target sequence for SETDB2 (NM_031915.1,2070-2088).
cgggagagatgagaatact

SEQ ID NO: 39144 - DNA, 19 bp, Homo sapiens
  siRNA target sequence for SETDB2 (NM_031915.1,2132-2150).
gttcagattgtgaagttga

SEQ ID NO: 39145 - DNA, 19 bp, Homo sapiens
  siRNA target sequence for SETDB2 (NM_031915.1,2169-2187).
ggaaacacatcctagaact

SEQ ID NO: 39146 - DNA, 19 bp, Homo sapiens
  siRNA target sequence for SETDB2 (NM_031915.1,2180-2198).
ctagaactgctaaaactga

SEQ ID NO: 39147 - DNA, 19 bp, Homo sapiens
  siRNA target sequence for SETDB2 (NM_031915.1,2204-2222).
gtccaccaaagttcagtaa

SEQ ID NO: 39148 - DNA, 19 bp, Homo sapiens
  siRNA target sequence for SETDB2 (NM_031915.1,2207-2225).
caccaaagttcagtaataa

SEQ ID NO: 39149 - DNA, 19 bp, Homo sapiens
  siRNA target sequence for SETDB2 (NM_031915.1,2270-2288).
gaattcaatatcattcagt

SEQ ID NO: 39150 - DNA, 19 bp, Homo sapiens
  siRNA target sequence for SETDB2 (NM_031915.1,2396-2414).
caccccgagagcatctgaa

SEQ ID NO: 39151 - DNA, 19 bp, Homo sapiens
  siRNA target sequence for SETDB2 (NM_031915.1,2401-2419).
cgagagcatctgaactcta

SEQ ID NO: 39152 - DNA, 19 bp, Homo sapiens
  siRNA target sequence for SETDB2 (NM_031915.1,2402-2420).
gagagcatctgaactctaa

SEQ ID NO: 39153 - DNA, 19 bp, Homo sapiens
  siRNA target sequence for SETDB2 (NM_031915.1,2404-2422).
gagcatctgaactctaaaa

SEQ ID NO: 39154 - DNA, 19 bp, Homo sapiens
  siRNA target sequence for SETDB2 (NM_031915.1,2407-2425).
catctgaactctaaaacca

SEQ ID NO: 39155 - DNA, 19 bp, Homo sapiens
  siRNA target sequence for SETDB2 (NM_031915.1,2444-2462).
caagttcaaaccatgttga

SEQ ID NO: 39156 - DNA, 19 bp, Homo sapiens
  siRNA target sequence for SETDB2 (NM_031915.1,2447-2465).
gttcaaaccatgttgatga

SEQ ID NO: 39157 - DNA, 19 bp, Homo sapiens
  siRNA target sequence for SETDB2 (NM_031915.1,2450-2468).
caaaccatgttgatgagtt

SEQ ID NO: 39158 - DNA, 19 bp, Homo sapiens
  siRNA target sequence for SETDB2 (NM_031915.1,2484-2502).
gattgaatcagatgtgata

SEQ ID NO: 39159 - DNA, 19 bp, Homo sapiens
  siRNA target sequence for SETDB2 (NM_031915.1,2488-2506).
gaatcagatgtgatagata

SEQ ID NO: 39160 - DNA, 19 bp, Homo sapiens
  siRNA target sequence for SETDB2 (NM_031915.1,2497-2515).
gtgatagatataactaaat

SEQ ID NO: 39161 - DNA, 19 bp, Homo sapiens
  siRNA target sequence for SETDB2 (NM_031915.1,2550-2568).
ccaggcgaccacattggat

SEQ ID NO: 39162 - DNA, 19 bp, Homo sapiens
  siRNA target sequence for SETDB2 (NM_031915.1,2558-2576).
ccacattggataatcagaa

SEQ ID NO: 39163 - DNA, 19 bp, Homo sapiens
  siRNA target sequence for SETDB2 (NM_031915.1,2559-2577).
cacattggataatcagaat

SEQ ID NO: 39164 - DNA, 19 bp, Homo sapiens
  siRNA target sequence for SETDB2 (NM_031915.1,2586-2604).
ggcaattgaggttcaaatt

SEQ ID NO: 39165 - DNA, 19 bp, Homo sapiens
  siRNA target sequence for SETDB2 (NM_031915.1,2613-2631).
ccaagagggacgatctaca

SEQ ID NO: 39166 - DNA, 19 bp, Homo sapiens
  siRNA target sequence for SETDB2 (NM_031915.1,2623-2641).
cgatctacagcatgtcaaa

SEQ ID NO: 39167 - DNA, 19 bp, Homo sapiens
  siRNA target sequence for SETDB2 (NM_031915.1,2670-2688).
gctaagtgaaaccaagaat

SEQ ID NO: 39168 - DNA, 19 bp, Homo sapiens
  siRNA target sequence for SETDB2 (NM_031915.1,2671-2689).
ctaagtgaaaccaagaata

SEQ ID NO: 39169 - DNA, 19 bp, Homo sapiens
  siRNA target sequence for SETDB2 (NM_031915.1,2682-2700).
caagaatacttcatctgat

SEQ ID NO: 39170 - DNA, 19 bp, Homo sapiens
  siRNA target sequence for SETDB2 (NM_031915.1,2702-2720).
ctctaacaaagttcaataa

SEQ ID NO: 39171 - DNA, 19 bp, Homo sapiens
  siRNA target sequence for SETDB2 (NM_031915.1,2766-2784).
ccgcttccttaatcatagt

SEQ ID NO: 39172 - DNA, 19 bp, Homo sapiens
  siRNA target sequence for SETDB2 (NM_031915.1,2767-2785).
cgcttccttaatcatagtt

SEQ ID NO: 39173 - DNA, 19 bp, Homo sapiens
  siRNA target sequence for SETDB2 (NM_031915.1,2769-2787).
cttccttaatcatagttgt

SEQ ID NO: 39174 - DNA, 19 bp, Homo sapiens
  siRNA target sequence for SETDB2 (NM_031915.1,2878-2896).
gcaagaacagagctaacat

SEQ ID NO: 39175 - DNA, 19 bp, Homo sapiens
  siRNA target sequence for SETDB2 (NM_031915.1,2945-2963).
gccaatgtggggttaataa

SEQ ID NO: 39176 - DNA, 19 bp, Homo sapiens
  siRNA target sequence for SFPQ (NM_005066.1,196-214).
catgggcctcaatcagaat

SEQ ID NO: 39177 - DNA, 19 bp, Homo sapiens
  siRNA target sequence for SFPQ (NM_005066.1,903-921).
cggactcggaggggtttaa

SEQ ID NO: 39178 - DNA, 19 bp, Homo sapiens
  siRNA target sequence for SFPQ (NM_005066.1,970-988).
gcgatgtcggttgtttgtt

SEQ ID NO: 39179 - DNA, 19 bp, Homo sapiens
  siRNA target sequence for SFPQ (NM_005066.1,1004-1022).
gatatcacggaggatgaat

SEQ ID NO: 39180 - DNA, 19 bp, Homo sapiens
  siRNA target sequence for SFPQ (NM_005066.1,1009-1027).
cacggaggatgaattcaaa

SEQ ID NO: 39181 - DNA, 19 bp, Homo sapiens
  siRNA target sequence for SFPQ (NM_005066.1,1052-1070).
ccaggagaagtttttatca

SEQ ID NO: 39182 - DNA, 19 bp, Homo sapiens
  siRNA target sequence for SFPQ (NM_005066.1,1053-1071).
caggagaagtttttatcaa

SEQ ID NO: 39183 - DNA, 19 bp, Homo sapiens
  siRNA target sequence for SFPQ (NM_005066.1,1056-1074).
gagaagtttttatcaacaa

SEQ ID NO: 39184 - DNA, 19 bp, Homo sapiens
  siRNA target sequence for SFPQ (NM_005066.1,1076-1094).
ggcaaaggattcggattta

SEQ ID NO: 39185 - DNA, 19 bp, Homo sapiens
  siRNA target sequence for SFPQ (NM_005066.1,1077-1095).
gcaaaggattcggatttat

SEQ ID NO: 39186 - DNA, 19 bp, Homo sapiens
  siRNA target sequence for SFPQ (NM_005066.1,1078-1096).
caaaggattcggatttatt

SEQ ID NO: 39187 - DNA, 19 bp, Homo sapiens
  siRNA target sequence for SFPQ (NM_005066.1,1083-1101).
gattcggatttattaagct

SEQ ID NO: 39188 - DNA, 19 bp, Homo sapiens
  siRNA target sequence for SFPQ (NM_005066.1,1107-1125).
ctagagctttggctgaaat

SEQ ID NO: 39189 - DNA, 19 bp, Homo sapiens
  siRNA target sequence for SFPQ (NM_005066.1,1197-1215).
ctgccctttctgttcgtaa

SEQ ID NO: 39190 - DNA, 19 bp, Homo sapiens
  siRNA target sequence for SFPQ (NM_005066.1,1200-1218).
ccctttctgttcgtaatct

SEQ ID NO: 39191 - DNA, 19 bp, Homo sapiens
  siRNA target sequence for SFPQ (NM_005066.1,1201-1219).
cctttctgttcgtaatctt

SEQ ID NO: 39192 - DNA, 19 bp, Homo sapiens
  siRNA target sequence for SFPQ (NM_005066.1,1202-1220).
ctttctgttcgtaatcttt

SEQ ID NO: 39193 - DNA, 19 bp, Homo sapiens
  siRNA target sequence for SFPQ (NM_005066.1,1212-1230).
gtaatctttcaccttatgt

SEQ ID NO: 39194 - DNA, 19 bp, Homo sapiens
  siRNA target sequence for SFPQ (NM_005066.1,1260-1278).
gccaatttggtcctattga

SEQ ID NO: 39195 - DNA, 19 bp, Homo sapiens
  siRNA target sequence for SFPQ (NM_005066.1,1261-1279).
ccaatttggtcctattgaa

SEQ ID NO: 39196 - DNA, 19 bp, Homo sapiens
  siRNA target sequence for SFPQ (NM_005066.1,1262-1280).
caatttggtcctattgaaa

SEQ ID NO: 39197 - DNA, 19 bp, Homo sapiens
  siRNA target sequence for SFPQ (NM_005066.1,1325-1343).
ggcattgttgaatttgctt

SEQ ID NO: 39198 - DNA, 19 bp, Homo sapiens
  siRNA target sequence for SFPQ (NM_005066.1,1431-1449).
cacttgaacaactagatga

SEQ ID NO: 39199 - DNA, 19 bp, Homo sapiens
  siRNA target sequence for SFPQ (NM_005066.1,1477-1495).
ccagaagaatccaatgtat

SEQ ID NO: 39200 - DNA, 19 bp, Homo sapiens
  siRNA target sequence for SFPQ (NM_005066.1,1480-1498).
gaagaatccaatgtatcaa

SEQ ID NO: 39201 - DNA, 19 bp, Homo sapiens
  siRNA target sequence for SFPQ (NM_005066.1,1535-1553).
ggcacgtttgagtacgaat

SEQ ID NO: 39202 - DNA, 19 bp, Homo sapiens
  siRNA target sequence for SFPQ (NM_005066.1,1536-1554).
gcacgtttgagtacgaata

SEQ ID NO: 39203 - DNA, 19 bp, Homo sapiens
  siRNA target sequence for SFPQ (NM_005066.1,1537-1555).
cacgtttgagtacgaatat

SEQ ID NO: 39204 - DNA, 19 bp, Homo sapiens
  siRNA target sequence for SFPQ (NM_005066.1,1540-1558).
gtttgagtacgaatattct

SEQ ID NO: 39205 - DNA, 19 bp, Homo sapiens
  siRNA target sequence for SFPQ (NM_005066.1,1561-1579).
gcgatggaagtctttggat

SEQ ID NO: 39206 - DNA, 19 bp, Homo sapiens
  siRNA target sequence for SFPQ (NM_005066.1,1654-1672).
ggaagatgcctatcatgaa

SEQ ID NO: 39207 - DNA, 19 bp, Homo sapiens
  siRNA target sequence for SFPQ (NM_005066.1,1670-1688).
gaacatcaggcaaatcttt

SEQ ID NO: 39208 - DNA, 19 bp, Homo sapiens
  siRNA target sequence for SFPQ (NM_005066.1,1705-1723).
gagacgacaggaagaatta

SEQ ID NO: 39209 - DNA, 19 bp, Homo sapiens
  siRNA target sequence for SFPQ (NM_005066.1,1725-1743).
gacgcatggaagaacttca

SEQ ID NO: 39210 - DNA, 19 bp, Homo sapiens
  siRNA target sequence for SFPQ (NM_005066.1,1789-1807).
ggaggaacgacgtagaaga

SEQ ID NO: 39211 - DNA, 19 bp, Homo sapiens
  siRNA target sequence for SFPQ (NM_005066.1,1856-1874).
cgccaaagagaggaaagtt

SEQ ID NO: 39212 - DNA, 19 bp, Homo sapiens
  siRNA target sequence for SFPQ (NM_005066.1,1923-1941).
gtggcggaggagcaatgaa

SEQ ID NO: 39213 - DNA, 19 bp, Homo sapiens
  siRNA target sequence for SFPQ (NM_005066.1,1925-1943).
ggcggaggagcaatgaaca

SEQ ID NO: 39214 - DNA, 19 bp, Homo sapiens
  siRNA target sequence for SFPQ (NM_005066.1,1926-1944).
gcggaggagcaatgaacat

SEQ ID NO: 39215 - DNA, 19 bp, Homo sapiens
  siRNA target sequence for SFPQ (NM_005066.1,1991-2009).
ggtggtggtggcataggtt

SEQ ID NO: 39216 - DNA, 19 bp, Homo sapiens
  siRNA target sequence for SFPQ (NM_005066.1,1992-2010).
gtggtggtggcataggtta

SEQ ID NO: 39217 - DNA, 19 bp, Homo sapiens
  siRNA target sequence for SFPQ (NM_005066.1,1995-2013).
gtggtggcataggttatga

SEQ ID NO: 39218 - DNA, 19 bp, Homo sapiens
  siRNA target sequence for SFPQ (NM_005066.1,2001-2019).
gcataggttatgaagctaa

SEQ ID NO: 39219 - DNA, 19 bp, Homo sapiens
  siRNA target sequence for SFPQ (NM_005066.1,2002-2020).
cataggttatgaagctaat

SEQ ID NO: 39220 - DNA, 19 bp, Homo sapiens
  siRNA target sequence for SFPQ (NM_005066.1,2176-2194).
gtacgaaggcccaaacaaa

SEQ ID NO: 39221 - DNA, 19 bp, Homo sapiens
  siRNA target sequence for SHPRH (NM_173082.1,547-565).
cttctgctcattatatcat

SEQ ID NO: 39222 - DNA, 19 bp, Homo sapiens
  siRNA target sequence for SHPRH (NM_173082.1,550-568).
ctgctcattatatcattct

SEQ ID NO: 39223 - DNA, 19 bp, Homo sapiens
  siRNA target sequence for SHPRH (NM_173082.1,626-644).
ggtgagcttctcaaaacca

SEQ ID NO: 39224 - DNA, 19 bp, Homo sapiens
  siRNA target sequence for SHPRH (NM_173082.1,627-645).
gtgagcttctcaaaaccaa

SEQ ID NO: 39225 - DNA, 19 bp, Homo sapiens
  siRNA target sequence for SHPRH (NM_173082.1,654-672).
gaagagactgttggtattt

SEQ ID NO: 39226 - DNA, 19 bp, Homo sapiens
  siRNA target sequence for SHPRH (NM_173082.1,678-696).
cctttgtctgtaaagttaa

SEQ ID NO: 39227 - DNA, 19 bp, Homo sapiens
  siRNA target sequence for SHPRH (NM_173082.1,702-720).
gtgatttctccctatcatt

SEQ ID NO: 39228 - DNA, 19 bp, Homo sapiens
  siRNA target sequence for SHPRH (NM_173082.1,704-722).
gatttctccctatcatttt

SEQ ID NO: 39229 - DNA, 19 bp, Homo sapiens
  siRNA target sequence for SHPRH (NM_173082.1,768-786).
cttcctgcacagagtttaa

SEQ ID NO: 39230 - DNA, 19 bp, Homo sapiens
  siRNA target sequence for SHPRH (NM_173082.1,772-790).
ctgcacagagtttaattga

SEQ ID NO: 39231 - DNA, 19 bp, Homo sapiens
  siRNA target sequence for SHPRH (NM_173082.1,774-792).
gcacagagtttaattgaaa

SEQ ID NO: 39232 - DNA, 19 bp, Homo sapiens
  siRNA target sequence for SHPRH (NM_173082.1,801-819).
gaaaggagtattacattga

SEQ ID NO: 39233 - DNA, 19 bp, Homo sapiens
  siRNA target sequence for SHPRH (NM_173082.1,938-956).
cttcagtggtgaaatgtta

SEQ ID NO: 39234 - DNA, 19 bp, Homo sapiens
  siRNA target sequence for SHPRH (NM_173082.1,960-978).
gatttggggtggctacaaa

SEQ ID NO: 39235 - DNA, 19 bp, Homo sapiens
  siRNA target sequence for SHPRH (NM_173082.1,966-984).
gggtggctacaaaagaaga

SEQ ID NO: 39236 - DNA, 19 bp, Homo sapiens
  siRNA target sequence for SHPRH (NM_173082.1,983-1001).
gagaagaataaaactctat

SEQ ID NO: 39237 - DNA, 19 bp, Homo sapiens
  siRNA target sequence for SHPRH (NM_173082.1,1054-1072).
ctggcctagcaaaactaga

SEQ ID NO: 39238 - DNA, 19 bp, Homo sapiens
  siRNA target sequence for SHPRH (NM_173082.1,1062-1080).
gcaaaactagacttcttga

SEQ ID NO: 39239 - DNA, 19 bp, Homo sapiens
  siRNA target sequence for SHPRH (NM_173082.1,1113-1131).
cagctcatgaagaaagtaa

SEQ ID NO: 39240 - DNA, 19 bp, Homo sapiens
  siRNA target sequence for SHPRH (NM_173082.1,1139-1157).
gttacacaattctattatt

SEQ ID NO: 39241 - DNA, 19 bp, Homo sapiens
  siRNA target sequence for SHPRH (NM_173082.1,1150-1168).
ctattattccagatgtgtt

SEQ ID NO: 39242 - DNA, 19 bp, Homo sapiens
  siRNA target sequence for SHPRH (NM_173082.1,1221-1239).
gagctgtatcactttgtga

SEQ ID NO: 39243 - DNA, 19 bp, Homo sapiens
  siRNA target sequence for SHPRH (NM_173082.1,1305-1323).
gtgttgagaccctaccaaa

SEQ ID NO: 39244 - DNA, 19 bp, Homo sapiens
  siRNA target sequence for SHPRH (NM_173082.1,1319-1337).
ccaaagagaggctgtcaat

SEQ ID NO: 39245 - DNA, 19 bp, Homo sapiens
  siRNA target sequence for SHPRH (NM_173082.1,1324-1342).
gagaggctgtcaattggat

SEQ ID NO: 39246 - DNA, 19 bp, Homo sapiens
  siRNA target sequence for SHPRH (NM_173082.1,1334-1352).
caattggatgctacaacaa

SEQ ID NO: 39247 - DNA, 19 bp, Homo sapiens
  siRNA target sequence for SHPRH (NM_173082.1,1397-1415).
cttatggcgagagattgtt

SEQ ID NO: 39248 - DNA, 19 bp, Homo sapiens
  siRNA target sequence for SHPRH (NM_173082.1,1420-1438).
ctgagggtctgaaactcta

SEQ ID NO: 39249 - DNA, 19 bp, Homo sapiens
  siRNA target sequence for SHPRH (NM_173082.1,1424-1442).
gggtctgaaactctactat

SEQ ID NO: 39250 - DNA, 19 bp, Homo sapiens
  siRNA target sequence for SHPRH (NM_173082.1,1425-1443).
ggtctgaaactctactata

SEQ ID NO: 39251 - DNA, 19 bp, Homo sapiens
  siRNA target sequence for SHPRH (NM_173082.1,1434-1452).
ctctactataatccatata

SEQ ID NO: 39252 - DNA, 19 bp, Homo sapiens
  siRNA target sequence for SHPRH (NM_173082.1,1436-1454).
ctactataatccatataca

SEQ ID NO: 39253 - DNA, 19 bp, Homo sapiens
  siRNA target sequence for SHPRH (NM_173082.1,1496-1514).
gcttggtggaattttagca

SEQ ID NO: 39254 - DNA, 19 bp, Homo sapiens
  siRNA target sequence for SHPRH (NM_173082.1,1562-1580).
gacacatactcgacaagat

SEQ ID NO: 39255 - DNA, 19 bp, Homo sapiens
  siRNA target sequence for SHPRH (NM_173082.1,1671-1689).
gaaatccagaatatcgaat

SEQ ID NO: 39256 - DNA, 19 bp, Homo sapiens
  siRNA target sequence for SHPRH (NM_173082.1,1720-1738).
ctacacgtgtgatgatact

SEQ ID NO: 39257 - DNA, 19 bp, Homo sapiens
  siRNA target sequence for SHPRH (NM_173082.1,1830-1848).
cggaacaggagtcttttga

SEQ ID NO: 39258 - DNA, 19 bp, Homo sapiens
  siRNA target sequence for SHPRH (NM_173082.1,1879-1897).
gtctcgtgaaacagatcaa

SEQ ID NO: 39259 - DNA, 19 bp, Homo sapiens
  siRNA target sequence for SHPRH (NM_173082.1,1943-1961).
ggaagaggatatatgtgat

SEQ ID NO: 39260 - DNA, 19 bp, Homo sapiens
  siRNA target sequence for SHPRH (NM_173082.1,2107-2125).
ggagaaatcgcagtaaatt

SEQ ID NO: 39261 - DNA, 19 bp, Homo sapiens
  siRNA target sequence for SHPRH (NM_173082.1,2115-2133).
cgcagtaaattgaggaaaa

SEQ ID NO: 39262 - DNA, 19 bp, Homo sapiens
  siRNA target sequence for SHPRH (NM_173082.1,2157-2175).
ggaaaaagtcaaccattta

SEQ ID NO: 39263 - DNA, 19 bp, Homo sapiens
  siRNA target sequence for SHPRH (NM_173082.1,2212-2230).
gcgactctggaataactga

SEQ ID NO: 39264 - DNA, 19 bp, Homo sapiens
  siRNA target sequence for SHPRH (NM_173082.1,2213-2231).
cgactctggaataactgat

SEQ ID NO: 39265 - DNA, 19 bp, Homo sapiens
  siRNA target sequence for SHPRH (NM_173082.1,2221-2239).
gaataactgatgttgctat

SEQ ID NO: 39266 - DNA, 19 bp, Homo sapiens
  siRNA target sequence for SHPRH (NM_173082.1,2235-2253).
gctatgtctaaaagtacat

SEQ ID NO: 39267 - DNA, 19 bp, Homo sapiens
  siRNA target sequence for SHPRH (NM_173082.1,2289-2307).
gactgtgctgaatctctaa

SEQ ID NO: 39268 - DNA, 19 bp, Homo sapiens
  siRNA target sequence for SHPRH (NM_173082.1,2320-2338).
gtgatgtaccaccttctaa

SEQ ID NO: 39269 - DNA, 19 bp, Homo sapiens
  siRNA target sequence for SHPRH (NM_173082.1,2369-2387).
ccgctttgagtgtatatgt

SEQ ID NO: 39270 - DNA, 19 bp, Homo sapiens
  siRNA target sequence for SHPRH (NM_173082.1,2389-2407).
gtgaacttgatcagataga

SEQ ID NO: 39271 - DNA, 19 bp, Homo sapiens
  siRNA target sequence for SHPRH (NM_173082.1,2409-2427).
cgtaagcctcgtgttcaat

SEQ ID NO: 39272 - DNA, 19 bp, Homo sapiens
  siRNA target sequence for SHPRH (NM_173082.1,2444-2462).
gtggcaacatgcaaagtgt

SEQ ID NO: 39273 - DNA, 19 bp, Homo sapiens
  siRNA target sequence for SHPRH (NM_173082.1,2528-2546).
ggaaccagtgtcaacaaga

SEQ ID NO: 39274 - DNA, 19 bp, Homo sapiens
  siRNA target sequence for SHPRH (NM_173082.1,2623-2641).
ctcttcgagtcttggtata

SEQ ID NO: 39275 - DNA, 19 bp, Homo sapiens
  siRNA target sequence for SHPRH (NM_173082.1,2684-2702).
ggcagaacaggatatagtt

SEQ ID NO: 39276 - DNA, 19 bp, Homo sapiens
  siRNA target sequence for SHPRH (NM_173082.1,2694-2712).
gatatagttatcattacct

SEQ ID NO: 39277 - DNA, 19 bp, Homo sapiens
  siRNA target sequence for SHPRH (NM_173082.1,2715-2733).
gatgtactgcgttcagaat

SEQ ID NO: 39278 - DNA, 19 bp, Homo sapiens
  siRNA target sequence for SHPRH (NM_173082.1,2718-2736).
gtactgcgttcagaattaa

SEQ ID NO: 39279 - DNA, 19 bp, Homo sapiens
  siRNA target sequence for SHPRH (NM_173082.1,2721-2739).
ctgcgttcagaattaaatt

SEQ ID NO: 39280 - DNA, 19 bp, Homo sapiens
  siRNA target sequence for SHPRH (NM_173082.1,2723-2741).
gcgttcagaattaaattat

SEQ ID NO: 39281 - DNA, 19 bp, Homo sapiens
  siRNA target sequence for SHPRH (NM_173082.1,2725-2743).
gttcagaattaaattatgt

SEQ ID NO: 39282 - DNA, 19 bp, Homo sapiens
  siRNA target sequence for SHPRH (NM_173082.1,2744-2762).
cgatatcccacatagcaat

SEQ ID NO: 39283 - DNA, 19 bp, Homo sapiens
  siRNA target sequence for SHPRH (NM_173082.1,2745-2763).
gatatcccacatagcaata

SEQ ID NO: 39284 - DNA, 19 bp, Homo sapiens
  siRNA target sequence for SHPRH (NM_173082.1,2785-2803).
ggaaccagaagcgctatat

SEQ ID NO: 39285 - DNA, 19 bp, Homo sapiens
  siRNA target sequence for SHPRH (NM_173082.1,2839-2857).
ggaggatctgccttgatga

SEQ ID NO: 39286 - DNA, 19 bp, Homo sapiens
  siRNA target sequence for SHPRH (NM_173082.1,2840-2858).
gaggatctgccttgatgaa

SEQ ID NO: 39287 - DNA, 19 bp, Homo sapiens
  siRNA target sequence for SHPRH (NM_173082.1,2868-2886).
gttgagtgtcccacagtaa

SEQ ID NO: 39288 - DNA, 19 bp, Homo sapiens
  siRNA target sequence for SHPRH (NM_173082.1,2873-2891).
gtgtcccacagtaaaagct

SEQ ID NO: 39289 - DNA, 19 bp, Homo sapiens
  siRNA target sequence for SHPRH (NM_173082.1,2906-2924).
gcgtttgagtgggattaat

SEQ ID NO: 39290 - DNA, 19 bp, Homo sapiens
  siRNA target sequence for SHPRH (NM_173082.1,2956-2974).
gaggattagaggatctttt

SEQ ID NO: 39291 - DNA, 19 bp, Homo sapiens
  siRNA target sequence for SHPRH (NM_173082.1,3003-3021).
ccttactgtgtcaaacact

SEQ ID NO: 39292 - DNA, 19 bp, Homo sapiens
  siRNA target sequence for SHPRH (NM_173082.1,3022-3040).
ggtgggttcgacttctcta

SEQ ID NO: 39293 - DNA, 19 bp, Homo sapiens
  siRNA target sequence for SHPRH (NM_173082.1,3098-3116).
gtggaggtctgcaaagaaa

SEQ ID NO: 39294 - DNA, 19 bp, Homo sapiens
  siRNA target sequence for SHPRH (NM_173082.1,3120-3138).
gtgattgaccaaatccaaa

SEQ ID NO: 39295 - DNA, 19 bp, Homo sapiens
  siRNA target sequence for SHPRH (NM_173082.1,3141-3159).
ccaccacaaaccgaagaaa

SEQ ID NO: 39296 - DNA, 19 bp, Homo sapiens
  siRNA target sequence for SHPRH (NM_173082.1,3142-3160).
caccacaaaccgaagaaat

SEQ ID NO: 39297 - DNA, 19 bp, Homo sapiens
  siRNA target sequence for SHPRH (NM_173082.1,3180-3198).
ccagtggaaaggcatttct

SEQ ID NO: 39298 - DNA, 19 bp, Homo sapiens
  siRNA target sequence for SHPRH (NM_173082.1,3228-3246).
gatgtggtggtaaaactca

SEQ ID NO: 39299 - DNA, 19 bp, Homo sapiens
  siRNA target sequence for SHPRH (NM_173082.1,3455-3473).
gaaatgtggaactgaatgt

SEQ ID NO: 39300 - DNA, 19 bp, Homo sapiens
  siRNA target sequence for SHPRH (NM_173082.1,3480-3498).
gcacatcgacagctagttt

SEQ ID NO: 39301 - DNA, 19 bp, Homo sapiens
  siRNA target sequence for SHPRH (NM_173082.1,3491-3509).
gctagtttgtgctctcaat

SEQ ID NO: 39302 - DNA, 19 bp, Homo sapiens
  siRNA target sequence for SHPRH (NM_173082.1,3510-3528).
ggcttagcaggcattcata

SEQ ID NO: 39303 - DNA, 19 bp, Homo sapiens
  siRNA target sequence for SHPRH (NM_173082.1,3511-3529).
gcttagcaggcattcatat

SEQ ID NO: 39304 - DNA, 19 bp, Homo sapiens
  siRNA target sequence for SHPRH (NM_173082.1,3547-3565).
ccttggcagcagaattgta

SEQ ID NO: 39305 - DNA, 19 bp, Homo sapiens
  siRNA target sequence for SHPRH (NM_173082.1,3630-3648).
cttcatgctacccataact

SEQ ID NO: 39306 - DNA, 19 bp, Homo sapiens
  siRNA target sequence for SHPRH (NM_173082.1,3633-3651).
catgctacccataacttga

SEQ ID NO: 39307 - DNA, 19 bp, Homo sapiens
  siRNA target sequence for SHPRH (NM_173082.1,3640-3658).
cccataacttgatggaatt

SEQ ID NO: 39308 - DNA, 19 bp, Homo sapiens
  siRNA target sequence for SHPRH (NM_173082.1,3738-3756).
cactacatgagcaagtgta

SEQ ID NO: 39309 - DNA, 19 bp, Homo sapiens
  siRNA target sequence for SHPRH (NM_173082.1,3740-3758).
ctacatgagcaagtgtaat

SEQ ID NO: 39310 - DNA, 19 bp, Homo sapiens
  siRNA target sequence for SHPRH (NM_173082.1,3743-3761).
catgagcaagtgtaataca

SEQ ID NO: 39311 - DNA, 19 bp, Homo sapiens
  siRNA target sequence for SHPRH (NM_173082.1,3746-3764).
gagcaagtgtaatacagaa

SEQ ID NO: 39312 - DNA, 19 bp, Homo sapiens
  siRNA target sequence for SHPRH (NM_173082.1,3806-3824).
catccatgagcttcaaaga

SEQ ID NO: 39313 - DNA, 19 bp, Homo sapiens
  siRNA target sequence for SHPRH (NM_173082.1,3843-3861).
ccttggtggctaaatgtga

SEQ ID NO: 39314 - DNA, 19 bp, Homo sapiens
  siRNA target sequence for SHPRH (NM_173082.1,3860-3878).
gatccacagagcaatagaa

SEQ ID NO: 39315 - DNA, 19 bp, Homo sapiens
  siRNA target sequence for SHPRH (NM_173082.1,3868-3886).
gagcaatagaatttactat

SEQ ID NO: 39316 - DNA, 19 bp, Homo sapiens
  siRNA target sequence for SHPRH (NM_173082.1,3903-3921).
cagcgagtgcgaaatgaaa

SEQ ID NO: 39317 - DNA, 19 bp, Homo sapiens
  siRNA target sequence for SHPRH (NM_173082.1,3905-3923).
gcgagtgcgaaatgaaata

SEQ ID NO: 39318 - DNA, 19 bp, Homo sapiens
  siRNA target sequence for SHPRH (NM_173082.1,3906-3924).
cgagtgcgaaatgaaataa

SEQ ID NO: 39319 - DNA, 19 bp, Homo sapiens
  siRNA target sequence for SHPRH (NM_173082.1,3918-3936).
gaaataaccagcaactaca

SEQ ID NO: 39320 - DNA, 19 bp, Homo sapiens
  siRNA target sequence for SHPRH (NM_173082.1,3942-3960).
caaactggcaagctttcta

SEQ ID NO: 39321 - DNA, 19 bp, Homo sapiens
  siRNA target sequence for SHPRH (NM_173082.1,3953-3971).
gctttctatgtcagagaaa

SEQ ID NO: 39322 - DNA, 19 bp, Homo sapiens
  siRNA target sequence for SHPRH (NM_173082.1,3980-3998).
gttcttacttacaacacaa

SEQ ID NO: 39323 - DNA, 19 bp, Homo sapiens
  siRNA target sequence for SHPRH (NM_173082.1,4029-4047).
gtaagagaggctgtaaaaa

SEQ ID NO: 39324 - DNA, 19 bp, Homo sapiens
  siRNA target sequence for SHPRH (NM_173082.1,4033-4051).
gagaggctgtaaaaaacct

SEQ ID NO: 39325 - DNA, 19 bp, Homo sapiens
  siRNA target sequence for SHPRH (NM_173082.1,4059-4077).
cctccatctcgtaatgtta

SEQ ID NO: 39326 - DNA, 19 bp, Homo sapiens
  siRNA target sequence for SHPRH (NM_173082.1,4060-4078).
ctccatctcgtaatgttat

SEQ ID NO: 39327 - DNA, 19 bp, Homo sapiens
  siRNA target sequence for SHPRH (NM_173082.1,4063-4081).
catctcgtaatgttattga

SEQ ID NO: 39328 - DNA, 19 bp, Homo sapiens
  siRNA target sequence for SHPRH (NM_173082.1,4164-4182).
gagtatgaatcaaagctat

SEQ ID NO: 39329 - DNA, 19 bp, Homo sapiens
  siRNA target sequence for SHPRH (NM_173082.1,4196-4214).
caaaggccagactgcaata

SEQ ID NO: 39330 - DNA, 19 bp, Homo sapiens
  siRNA target sequence for SHPRH (NM_173082.1,4201-4219).
gccagactgcaatatttga

SEQ ID NO: 39331 - DNA, 19 bp, Homo sapiens
  siRNA target sequence for SHPRH (NM_173082.1,4298-4316).
gacagagcgatctatgaaa

SEQ ID NO: 39332 - DNA, 19 bp, Homo sapiens
  siRNA target sequence for SHPRH (NM_173082.1,4302-4320).
gagcgatctatgaaagcaa

SEQ ID NO: 39333 - DNA, 19 bp, Homo sapiens
  siRNA target sequence for SHPRH (NM_173082.1,4304-4322).
gcgatctatgaaagcaata

SEQ ID NO: 39334 - DNA, 19 bp, Homo sapiens
  siRNA target sequence for SHPRH (NM_173082.1,4306-4324).
gatctatgaaagcaatact

SEQ ID NO: 39335 - DNA, 19 bp, Homo sapiens
  siRNA target sequence for SHPRH (NM_173082.1,4375-4393).
gcacttcaatggatctctt

SEQ ID NO: 39336 - DNA, 19 bp, Homo sapiens
  siRNA target sequence for SHPRH (NM_173082.1,4376-4394).
cacttcaatggatctcttt

SEQ ID NO: 39337 - DNA, 19 bp, Homo sapiens
  siRNA target sequence for SHPRH (NM_173082.1,4481-4499).
ggctacagaacgactaaga

SEQ ID NO: 39338 - DNA, 19 bp, Homo sapiens
  siRNA target sequence for SHPRH (NM_173082.1,4483-4501).
ctacagaacgactaagagt

SEQ ID NO: 39339 - DNA, 19 bp, Homo sapiens
  siRNA target sequence for SHPRH (NM_173082.1,4523-4541).
gcctaatccgcctgttctt

SEQ ID NO: 39340 - DNA, 19 bp, Homo sapiens
  siRNA target sequence for SHPRH (NM_173082.1,4530-4548).
ccgcctgttcttcatatca

SEQ ID NO: 39341 - DNA, 19 bp, Homo sapiens
  siRNA target sequence for SHPRH (NM_173082.1,4531-4549).
cgcctgttcttcatatcat

SEQ ID NO: 39342 - DNA, 19 bp, Homo sapiens
  siRNA target sequence for SHPRH (NM_173082.1,4554-4572).
ccacatgaggtagaacaaa

SEQ ID NO: 39343 - DNA, 19 bp, Homo sapiens
  siRNA target sequence for SHPRH (NM_173082.1,4632-4650).
gggcagcttctttacctaa

SEQ ID NO: 39344 - DNA, 19 bp, Homo sapiens
  siRNA target sequence for SHPRH (NM_173082.1,4635-4653).
cagcttctttacctaacta

SEQ ID NO: 39345 - DNA, 19 bp, Homo sapiens
  siRNA target sequence for SHPRH (NM_173082.1,4714-4732).
gtgctcgacagctaggaaa

SEQ ID NO: 39346 - DNA, 19 bp, Homo sapiens
  siRNA target sequence for SHPRH (NM_173082.1,4719-4737).
cgacagctaggaaaacagt

SEQ ID NO: 39347 - DNA, 19 bp, Homo sapiens
  siRNA target sequence for SHPRH (NM_173082.1,4852-4870).
ccacatctcacaaagaaat

SEQ ID NO: 39348 - DNA, 19 bp, Homo sapiens
  siRNA target sequence for SHPRH (NM_173082.1,4866-4884).
gaaatctcgtatgtcttta

SEQ ID NO: 39349 - DNA, 19 bp, Homo sapiens
  siRNA target sequence for SHPRH (NM_173082.1,4920-4938).
gtgaagggcagccattcta

SEQ ID NO: 39350 - DNA, 19 bp, Homo sapiens
  siRNA target sequence for SHPRH (NM_173082.1,4922-4940).
gaagggcagccattctaca

SEQ ID NO: 39351 - DNA, 19 bp, Homo sapiens
  siRNA target sequence for SHPRH (NM_173082.1,4955-4973).
ggtcagaactctgatgaaa

SEQ ID NO: 39352 - DNA, 19 bp, Homo sapiens
  siRNA target sequence for SHPRH (NM_173082.1,4993-5011).
gggccaaagcactcgtttt

SEQ ID NO: 39353 - DNA, 19 bp, Homo sapiens
  siRNA target sequence for SHPRH (NM_173082.1,4995-5013).
gccaaagcactcgttttct

SEQ ID NO: 39354 - DNA, 19 bp, Homo sapiens
  siRNA target sequence for SHPRH (NM_173082.1,5014-5032).
caacgtggcaagatgtatt

SEQ ID NO: 39355 - DNA, 19 bp, Homo sapiens
  siRNA target sequence for SHPRH (NM_173082.1,5017-5035).
cgtggcaagatgtattaga

SEQ ID NO: 39356 - DNA, 19 bp, Homo sapiens
  siRNA target sequence for SHPRH (NM_173082.1,5018-5036).
gtggcaagatgtattagat

SEQ ID NO: 39357 - DNA, 19 bp, Homo sapiens
  siRNA target sequence for SHPRH (NM_173082.1,5020-5038).
ggcaagatgtattagatat

SEQ ID NO: 39358 - DNA, 19 bp, Homo sapiens
  siRNA target sequence for SHPRH (NM_173082.1,5021-5039).
gcaagatgtattagatatt

SEQ ID NO: 39359 - DNA, 19 bp, Homo sapiens
  siRNA target sequence for SHPRH (NM_173082.1,5069-5087).
ggaatttgcacaaatcagt

SEQ ID NO: 39360 - DNA, 19 bp, Homo sapiens
  siRNA target sequence for SHPRH (NM_173082.1,5084-5102).
cagtcgtgttaagacattt

SEQ ID NO: 39361 - DNA, 19 bp, Homo sapiens
  siRNA target sequence for SHPRH (NM_173082.1,5086-5104).
gtcgtgttaagacatttca

SEQ ID NO: 39362 - DNA, 19 bp, Homo sapiens
  siRNA target sequence for SHPRH (NM_173082.1,5105-5123).
ggagaacctttcagcattt

SEQ ID NO: 39363 - DNA, 19 bp, Homo sapiens
  siRNA target sequence for SHPRH (NM_173082.1,5106-5124).
gagaacctttcagcattta

SEQ ID NO: 39364 - DNA, 19 bp, Homo sapiens
  siRNA target sequence for SHPRH (NM_173082.1,5111-5129).
cctttcagcatttaaacgt

SEQ ID NO: 39365 - DNA, 19 bp, Homo sapiens
  siRNA target sequence for SHPRH (NM_173082.1,5163-5181).
cacacaggttctaatggat

SEQ ID NO: 39366 - DNA, 19 bp, Homo sapiens
  siRNA target sequence for SHPRH (NM_173082.1,5165-5183).
cacaggttctaatggatta

SEQ ID NO: 39367 - DNA, 19 bp, Homo sapiens
  siRNA target sequence for SHPRH (NM_173082.1,5169-5187).
ggttctaatggattaacta

SEQ ID NO: 39368 - DNA, 19 bp, Homo sapiens
  siRNA target sequence for SHPRH (NM_173082.1,5170-5188).
gttctaatggattaactat

SEQ ID NO: 39369 - DNA, 19 bp, Homo sapiens
  siRNA target sequence for SHPRH (NM_173082.1,5258-5276).
gagggtgcaccgaattgga

SEQ ID NO: 39370 - DNA, 19 bp, Homo sapiens
  siRNA target sequence for SHPRH (NM_173082.1,5267-5285).
ccgaattggacagacaaaa

SEQ ID NO: 39371 - DNA, 19 bp, Homo sapiens
  siRNA target sequence for SHPRH (NM_173082.1,5287-5305).
ctactattgtacacagatt

SEQ ID NO: 39372 - DNA, 19 bp, Homo sapiens
  siRNA target sequence for SHPRH (NM_173082.1,5290-5308).
ctattgtacacagattctt

SEQ ID NO: 39373 - DNA, 19 bp, Homo sapiens
  siRNA target sequence for SHPRH (NM_173082.1,5295-5313).
gtacacagattcttaatta

SEQ ID NO: 39374 - DNA, 19 bp, Homo sapiens
  siRNA target sequence for SHPRH (NM_173082.1,5353-5371).
ctgctgagagaagtatcta

SEQ ID NO: 39375 - DNA, 19 bp, Homo sapiens
  siRNA target sequence for SIRT1 (NM_012238.3,394-412).
caccgctggccgacaactt

SEQ ID NO: 39376 - DNA, 19 bp, Homo sapiens
  siRNA target sequence for SIRT1 (NM_012238.3,396-414).
ccgctggccgacaacttgt

SEQ ID NO: 39377 - DNA, 19 bp, Homo sapiens
  siRNA target sequence for SIRT1 (NM_012238.3,397-415).
cgctggccgacaacttgta

SEQ ID NO: 39378 - DNA, 19 bp, Homo sapiens
  siRNA target sequence for SIRT1 (NM_012238.3,469-487).
cgattgggtaccgagataa

SEQ ID NO: 39379 - DNA, 19 bp, Homo sapiens
  siRNA target sequence for SIRT1 (NM_012238.3,492-510).
ctgttcggtgatgaaatta

SEQ ID NO: 39380 - DNA, 19 bp, Homo sapiens
  siRNA target sequence for SIRT1 (NM_012238.3,590-608).
gccacggataggtccatat

SEQ ID NO: 39381 - DNA, 19 bp, Homo sapiens
  siRNA target sequence for SIRT1 (NM_012238.3,591-609).
ccacggataggtccatata

SEQ ID NO: 39382 - DNA, 19 bp, Homo sapiens
  siRNA target sequence for SIRT1 (NM_012238.3,594-612).
cggataggtccatatactt

SEQ ID NO: 39383 - DNA, 19 bp, Homo sapiens
  siRNA target sequence for SIRT1 (NM_012238.3,595-613).
ggataggtccatatacttt

SEQ ID NO: 39384 - DNA, 19 bp, Homo sapiens
  siRNA target sequence for SIRT1 (NM_012238.3,596-614).
gataggtccatatactttt

SEQ ID NO: 39385 - DNA, 19 bp, Homo sapiens
  siRNA target sequence for SIRT1 (NM_012238.3,637-655).
gcacagatcctcgaacaat

SEQ ID NO: 39386 - DNA, 19 bp, Homo sapiens
  siRNA target sequence for SIRT1 (NM_012238.3,638-656).
cacagatcctcgaacaatt

SEQ ID NO: 39387 - DNA, 19 bp, Homo sapiens
  siRNA target sequence for SIRT1 (NM_012238.3,640-658).
cagatcctcgaacaattct

SEQ ID NO: 39388 - DNA, 19 bp, Homo sapiens
  siRNA target sequence for SIRT1 (NM_012238.3,642-660).
gatcctcgaacaattctta

SEQ ID NO: 39389 - DNA, 19 bp, Homo sapiens
  siRNA target sequence for SIRT1 (NM_012238.3,646-664).
ctcgaacaattcttaaaga

SEQ ID NO: 39390 - DNA, 19 bp, Homo sapiens
  siRNA target sequence for SIRT1 (NM_012238.3,648-666).
cgaacaattcttaaagatt

SEQ ID NO: 39391 - DNA, 19 bp, Homo sapiens
  siRNA target sequence for SIRT1 (NM_012238.3,707-725).
gacactgtggcagattgtt

SEQ ID NO: 39392 - DNA, 19 bp, Homo sapiens
  siRNA target sequence for SIRT1 (NM_012238.3,711-729).
ctgtggcagattgttatta

SEQ ID NO: 39393 - DNA, 19 bp, Homo sapiens
  siRNA target sequence for SIRT1 (NM_012238.3,713-731).
gtggcagattgttattaat

SEQ ID NO: 39394 - DNA, 19 bp, Homo sapiens
  siRNA target sequence for SIRT1 (NM_012238.3,837-855).
gctggggtgtctgtttcat

SEQ ID NO: 39395 - DNA, 19 bp, Homo sapiens
  siRNA target sequence for SIRT1 (NM_012238.3,845-863).
gtctgtttcatgtggaata

SEQ ID NO: 39396 - DNA, 19 bp, Homo sapiens
  siRNA target sequence for SIRT1 (NM_012238.3,895-913).
ctcgccttgctgtagactt

SEQ ID NO: 39397 - DNA, 19 bp, Homo sapiens
  siRNA target sequence for SIRT1 (NM_012238.3,936-954).
gcgatgtttgatattgaat

SEQ ID NO: 39398 - DNA, 19 bp, Homo sapiens
  siRNA target sequence for SIRT1 (NM_012238.3,937-955).
cgatgtttgatattgaata

SEQ ID NO: 39399 - DNA, 19 bp, Homo sapiens
  siRNA target sequence for SIRT1 (NM_012238.3,970-988).
caagaccattcttcaagtt

SEQ ID NO: 39400 - DNA, 19 bp, Homo sapiens
  siRNA target sequence for SIRT1 (NM_012238.3,1021-1039).
catctctctgtcacaaatt

SEQ ID NO: 39401 - DNA, 19 bp, Homo sapiens
  siRNA target sequence for SIRT1 (NM_012238.3,1113-1131).
gcgggaatccaaaggataa

SEQ ID NO: 39402 - DNA, 19 bp, Homo sapiens
  siRNA target sequence for SIRT1 (NM_012238.3,1115-1133).
gggaatccaaaggataatt

SEQ ID NO: 39403 - DNA, 19 bp, Homo sapiens
  siRNA target sequence for SIRT1 (NM_012238.3,1117-1135).
gaatccaaaggataattca

SEQ ID NO: 39404 - DNA, 19 bp, Homo sapiens
  siRNA target sequence for SIRT1 (NM_012238.3,1158-1176).
gcatcttgcctgatttgta

SEQ ID NO: 39405 - DNA, 19 bp, Homo sapiens
  siRNA target sequence for SIRT1 (NM_012238.3,1257-1275).
gaaccgcttgctatcatga

SEQ ID NO: 39406 - DNA, 19 bp, Homo sapiens
  siRNA target sequence for SIRT1 (NM_012238.3,1350-1368).
gttgacctcctcattgtta

SEQ ID NO: 39407 - DNA, 19 bp, Homo sapiens
  siRNA target sequence for SIRT1 (NM_012238.3,1371-1389).
gggtcttccctcaaagtaa

SEQ ID NO: 39408 - DNA, 19 bp, Homo sapiens
  siRNA target sequence for SIRT1 (NM_012238.3,1392-1410).
ccagtagcactaattccaa

SEQ ID NO: 39409 - DNA, 19 bp, Homo sapiens
  siRNA target sequence for SIRT1 (NM_012238.3,1411-1429).
gttccataccccatgaagt

SEQ ID NO: 39410 - DNA, 19 bp, Homo sapiens
  siRNA target sequence for SIRT1 (NM_012238.3,1430-1448).
gcctcagatattaattaat

SEQ ID NO: 39411 - DNA, 19 bp, Homo sapiens
  siRNA target sequence for SIRT1 (NM_012238.3,1431-1449).
cctcagatattaattaata

SEQ ID NO: 39412 - DNA, 19 bp, Homo sapiens
  siRNA target sequence for SIRT1 (NM_012238.3,1460-1478).
gcctcatctgcattttgat

SEQ ID NO: 39413 - DNA, 19 bp, Homo sapiens
  siRNA target sequence for SIRT1 (NM_012238.3,1491-1509).
ggagactgtgatgtcataa

SEQ ID NO: 39414 - DNA, 19 bp, Homo sapiens
  siRNA target sequence for SIRT1 (NM_012238.3,1494-1512).
gactgtgatgtcataatta

SEQ ID NO: 39415 - DNA, 19 bp, Homo sapiens
  siRNA target sequence for SIRT1 (NM_012238.3,1496-1514).
ctgtgatgtcataattaat

SEQ ID NO: 39416 - DNA, 19 bp, Homo sapiens
  siRNA target sequence for SIRT1 (NM_012238.3,1596-1614).
ccacgaacacaaaaagaat

SEQ ID NO: 39417 - DNA, 19 bp, Homo sapiens
  siRNA target sequence for SIRT1 (NM_012238.3,1722-1740).
gaccaagcagctaagagta

SEQ ID NO: 39418 - DNA, 19 bp, Homo sapiens
  siRNA target sequence for SIRT1 (NM_012238.3,1724-1742).
ccaagcagctaagagtaat

SEQ ID NO: 39419 - DNA, 19 bp, Homo sapiens
  siRNA target sequence for SIRT1 (NM_012238.3,1729-1747).
cagctaagagtaatgatga

SEQ ID NO: 39420 - DNA, 19 bp, Homo sapiens
  siRNA target sequence for SIRT1 (NM_012238.3,1746-1764).
gatttagatgtgtctgaat

SEQ ID NO: 39421 - DNA, 19 bp, Homo sapiens
  siRNA target sequence for SIRT1 (NM_012238.3,1759-1777).
ctgaatcaaaaggttgtat

SEQ ID NO: 39422 - DNA, 19 bp, Homo sapiens
  siRNA target sequence for SIRT1 (NM_012238.3,1791-1809).
caggaagtacaaacttcta

SEQ ID NO: 39423 - DNA, 19 bp, Homo sapiens
  siRNA target sequence for SIRT1 (NM_012238.3,1807-1825).
ctaggaatgttgaaagtat

SEQ ID NO: 39424 - DNA, 19 bp, Homo sapiens
  siRNA target sequence for SIRT1 (NM_012238.3,1839-1857).
gaaaatccggatttgaaga

SEQ ID NO: 39425 - DNA, 19 bp, Homo sapiens
  siRNA target sequence for SIRT1 (NM_012238.3,1853-1871).
gaagaatgttggttctagt

SEQ ID NO: 39426 - DNA, 19 bp, Homo sapiens
  siRNA target sequence for SIRT1 (NM_012238.3,1937-1955).
ggcaaaggagcagattagt

SEQ ID NO: 39427 - DNA, 19 bp, Homo sapiens
  siRNA target sequence for SIRT1 (NM_012238.3,1938-1956).
gcaaaggagcagattagta

SEQ ID NO: 39428 - DNA, 19 bp, Homo sapiens
  siRNA target sequence for SIRT1 (NM_012238.3,1954-1972).
gtaggcggcttgatggtaa

SEQ ID NO: 39429 - DNA, 19 bp, Homo sapiens
  siRNA target sequence for SIRT1 (NM_012238.3,1959-1977).
cggcttgatggtaatcagt

SEQ ID NO: 39430 - DNA, 19 bp, Homo sapiens
  siRNA target sequence for SIRT1 (NM_012238.3,1960-1978).
ggcttgatggtaatcagta

SEQ ID NO: 39431 - DNA, 19 bp, Homo sapiens
  siRNA target sequence for SIRT1 (NM_012238.3,1961-1979).
gcttgatggtaatcagtat

SEQ ID NO: 39432 - DNA, 19 bp, Homo sapiens
  siRNA target sequence for SIRT1 (NM_012238.3,1965-1983).
gatggtaatcagtatctgt

SEQ ID NO: 39433 - DNA, 19 bp, Homo sapiens
  siRNA target sequence for SIRT1 (NM_012238.3,1982-2000).
gtttttgccaccaaatcgt

SEQ ID NO: 39434 - DNA, 19 bp, Homo sapiens
  siRNA target sequence for SIRT1 (NM_012238.3,1989-2007).
ccaccaaatcgttacattt

SEQ ID NO: 39435 - DNA, 19 bp, Homo sapiens
  siRNA target sequence for SIRT1 (NM_012238.3,1990-2008).
caccaaatcgttacatttt

SEQ ID NO: 39436 - DNA, 19 bp, Homo sapiens
  siRNA target sequence for SIRT1 (NM_012238.3,2009-2027).
ccatggcgctgaggtatat

SEQ ID NO: 39437 - DNA, 19 bp, Homo sapiens
  siRNA target sequence for SIRT1 (NM_012238.3,2010-2028).
catggcgctgaggtatatt

SEQ ID NO: 39438 - DNA, 19 bp, Homo sapiens
  siRNA target sequence for SIRT1 (NM_012238.3,2043-2061).
gacgtcttatcctctagtt

SEQ ID NO: 39439 - DNA, 19 bp, Homo sapiens
  siRNA target sequence for SIRT1 (NM_012238.3,2045-2063).
cgtcttatcctctagttct

SEQ ID NO: 39440 - DNA, 19 bp, Homo sapiens
  siRNA target sequence for SIRT1 (NM_012238.3,2046-2064).
gtcttatcctctagttctt

SEQ ID NO: 39441 - DNA, 19 bp, Homo sapiens
  siRNA target sequence for SIRT1 (NM_012238.3,2048-2066).
cttatcctctagttcttgt

SEQ ID NO: 39442 - DNA, 19 bp, Homo sapiens
  siRNA target sequence for SIRT1 (NM_012238.3,2092-2110).
gccagagtccaagtttaga

SEQ ID NO: 39443 - DNA, 19 bp, Homo sapiens
  siRNA target sequence for SIRT1 (NM_012238.3,2096-2114).
gagtccaagtttagaagaa

SEQ ID NO: 39444 - DNA, 19 bp, Homo sapiens
  siRNA target sequence for SIRT1 (NM_012238.3,2217-2235).
gatgatcaagaggcaatta

SEQ ID NO: 39445 - DNA, 19 bp, Homo sapiens
  siRNA target sequence for SIRT2 (NM_012237.2,314-332).
ggacttcctgcggaactta

SEQ ID NO: 39446 - DNA, 19 bp, Homo sapiens
  siRNA target sequence for SIRT2 (NM_012237.2,427-445).
gtcgcagagtcatctgttt

SEQ ID NO: 39447 - DNA, 19 bp, Homo sapiens
  siRNA target sequence for SIRT2 (NM_012237.2,496-514).
catccaccggcctctatga

SEQ ID NO: 39448 - DNA, 19 bp, Homo sapiens
  siRNA target sequence for SIRT2 (NM_012237.2,499-517).
ccaccggcctctatgacaa

SEQ ID NO: 39449 - DNA, 19 bp, Homo sapiens
  siRNA target sequence for SIRT2 (NM_012237.2,544-562).
cagaggccatctttgagat

SEQ ID NO: 39450 - DNA, 19 bp, Homo sapiens
  siRNA target sequence for SIRT2 (NM_012237.2,634-652).
caaccatctgtcactactt

SEQ ID NO: 39451 - DNA, 19 bp, Homo sapiens
  siRNA target sequence for SIRT2 (NM_012237.2,756-774).
gcgcacggcaccttctaca

SEQ ID NO: 39452 - DNA, 19 bp, Homo sapiens
  siRNA target sequence for SIRT2 (NM_012237.2,793-811).
ccagctgccggcacgaata

SEQ ID NO: 39453 - DNA, 19 bp, Homo sapiens
  siRNA target sequence for SIRT2 (NM_012237.2,814-832).
cgctaagctggatgaaaga

SEQ ID NO: 39454 - DNA, 19 bp, Homo sapiens
  siRNA target sequence for SIRT2 (NM_012237.2,913-931).
gcctcccagcgcgtttctt

SEQ ID NO: 39455 - DNA, 19 bp, Homo sapiens
  siRNA target sequence for SIRT2 (NM_012237.2,915-933).
ctcccagcgcgtttcttct

SEQ ID NO: 39456 - DNA, 19 bp, Homo sapiens
  siRNA target sequence for SIRT2 (NM_012237.2,1084-1102).
ctttcctggggatgattat

SEQ ID NO: 39457 - DNA, 19 bp, Homo sapiens
  siRNA target sequence for SIRT2 (NM_012237.2,1113-1131).
ggaggcatggactttgact

SEQ ID NO: 39458 - DNA, 19 bp, Homo sapiens
  siRNA target sequence for SIRT3 (NM_012239.3,364-382).
cccagtttcttcttttcga

SEQ ID NO: 39459 - DNA, 19 bp, Homo sapiens
  siRNA target sequence for SIRT3 (NM_012239.3,372-390).
cttcttttcgagtattaaa

SEQ ID NO: 39460 - DNA, 19 bp, Homo sapiens
  siRNA target sequence for SIRT3 (NM_012239.3,420-438).
gggtgcttcaagtgttgtt

SEQ ID NO: 39461 - DNA, 19 bp, Homo sapiens
  siRNA target sequence for SIRT3 (NM_012239.3,623-641).
cgtaccccgaggccatttt

SEQ ID NO: 39462 - DNA, 19 bp, Homo sapiens
  siRNA target sequence for SIRT3 (NM_012239.3,624-642).
gtaccccgaggccattttt

SEQ ID NO: 39463 - DNA, 19 bp, Homo sapiens
  siRNA target sequence for SIRT3 (NM_012239.3,697-715).
ctgtaccctggaaactaca

SEQ ID NO: 39464 - DNA, 19 bp, Homo sapiens
  siRNA target sequence for SIRT3 (NM_012239.3,961-979).
gtgaagcccgacattgtgt

SEQ ID NO: 39465 - DNA, 19 bp, Homo sapiens
  siRNA target sequence for SIRT3 (NM_012239.3,966-984).
gcccgacattgtgttcttt

SEQ ID NO: 39466 - DNA, 19 bp, Homo sapiens
  siRNA target sequence for SIRT3 (NM_012239.3,1282-1300).
cttgatggaccagacaaat

SEQ ID NO: 39467 - DNA, 19 bp, Homo sapiens
  siRNA target sequence for SIRT4 (NM_012240.1,41-59).
gactttcaggtcagcaaaa

SEQ ID NO: 39468 - DNA, 19 bp, Homo sapiens
  siRNA target sequence for SIRT4 (NM_012240.1,156-174).
gagttacagcgcttcatca

SEQ ID NO: 39469 - DNA, 19 bp, Homo sapiens
  siRNA target sequence for SIRT4 (NM_012240.1,166-184).
gcttcatcaccctttccaa

SEQ ID NO: 39470 - DNA, 19 bp, Homo sapiens
  siRNA target sequence for SIRT4 (NM_012240.1,234-252).
ccagactacaggtcagaaa

SEQ ID NO: 39471 - DNA, 19 bp, Homo sapiens
  siRNA target sequence for SIRT4 (NM_012240.1,235-253).
cagactacaggtcagaaaa

SEQ ID NO: 39472 - DNA, 19 bp, Homo sapiens
  siRNA target sequence for SIRT4 (NM_012240.1,286-304).
ccatccagcatggtgattt

SEQ ID NO: 39473 - DNA, 19 bp, Homo sapiens
  siRNA target sequence for SIRT4 (NM_012240.1,287-305).
catccagcatggtgatttt

SEQ ID NO: 39474 - DNA, 19 bp, Homo sapiens
  siRNA target sequence for SIRT4 (NM_012240.1,330-348).
cggtactgggcgagaaact

SEQ ID NO: 39475 - DNA, 19 bp, Homo sapiens
  siRNA target sequence for SIRT4 (NM_012240.1,331-349).
ggtactgggcgagaaactt

SEQ ID NO: 39476 - DNA, 19 bp, Homo sapiens
  siRNA target sequence for SIRT4 (NM_012240.1,434-452).
ctggttggtgacccaaaat

SEQ ID NO: 39477 - DNA, 19 bp, Homo sapiens
  siRNA target sequence for SIRT4 (NM_012240.1,436-454).
ggttggtgacccaaaatgt

SEQ ID NO: 39478 - DNA, 19 bp, Homo sapiens
  siRNA target sequence for SIRT4 (NM_012240.1,669-687).
gtcccaacctgcgttcaat

SEQ ID NO: 39479 - DNA, 19 bp, Homo sapiens
  siRNA target sequence for SIRT4 (NM_012240.1,854-872).
gaagctcccgattgcaata

SEQ ID NO: 39480 - DNA, 19 bp, Homo sapiens
  siRNA target sequence for SIRT4 (NM_012240.1,862-880).
cgattgcaatactgaacat

SEQ ID NO: 39481 - DNA, 19 bp, Homo sapiens
  siRNA target sequence for SIRT5 (NM_012241.2,315-333).
gtcccaagtcgattgattt

SEQ ID NO: 39482 - DNA, 19 bp, Homo sapiens
  siRNA target sequence for SIRT5 (NM_012241.2,325-343).
gattgatttcccagctata

SEQ ID NO: 39483 - DNA, 19 bp, Homo sapiens
  siRNA target sequence for SIRT5 (NM_012241.2,464-482).
ctcaggagctggtgttagt

SEQ ID NO: 39484 - DNA, 19 bp, Homo sapiens
  siRNA target sequence for SIRT5 (NM_012241.2,583-601).
cccgggtgtgggagttcta

SEQ ID NO: 39485 - DNA, 19 bp, Homo sapiens
  siRNA target sequence for SIRT5 (NM_012241.2,761-779).
ggagatccatggtagctta

SEQ ID NO: 39486 - DNA, 19 bp, Homo sapiens
  siRNA target sequence for SIRT5 (NM_012241.2,762-780).
gagatccatggtagcttat

SEQ ID NO: 39487 - DNA, 19 bp, Homo sapiens
  siRNA target sequence for SIRT5 (NM_012241.2,764-782).
gatccatggtagcttattt

SEQ ID NO: 39488 - DNA, 19 bp, Homo sapiens
  siRNA target sequence for SIRT5 (NM_012241.2,807-825).
gttgtggctgagaattaca

SEQ ID NO: 39489 - DNA, 19 bp, Homo sapiens
  siRNA target sequence for SIRT5 (NM_012241.2,890-908).
catcccagttgagaaactt

SEQ ID NO: 39490 - DNA, 19 bp, Homo sapiens
  siRNA target sequence for SIRT5 (NM_012241.2,1010-1028).
gctcgcccactgtgattta

SEQ ID NO: 39491 - DNA, 19 bp, Homo sapiens
  siRNA target sequence for SIRT5 (NM_012241.2,1011-1029).
ctcgcccactgtgatttat

SEQ ID NO: 39492 - DNA, 19 bp, Homo sapiens
  siRNA target sequence for SIRT5 (NM_012241.2,1016-1034).
ccactgtgatttatgtcta

SEQ ID NO: 39493 - DNA, 19 bp, Homo sapiens
  siRNA target sequence for SIRT5 (NM_012241.2,1099-1117).
gcgtgccagtggctgaatt

SEQ ID NO: 39494 - DNA, 19 bp, Homo sapiens
  siRNA target sequence for SIRT5 (NM_012241.2,1100-1118).
cgtgccagtggctgaattt

SEQ ID NO: 39495 - DNA, 19 bp, Homo sapiens
  siRNA target sequence for SIRT6 (NM_016539.1,428-446).
gcttccccagggacaaact

SEQ ID NO: 39496 - DNA, 19 bp, Homo sapiens
  siRNA target sequence for SIRT7 (NM_016538.1,839-857).
ccagcctgaaggttctaaa

SEQ ID NO: 39497 - DNA, 19 bp, Homo sapiens
  siRNA target sequence for SIRT7 (NM_016538.1,1041-1059).
gcaggatcccattttctca

SEQ ID NO: 39498 - DNA, 19 bp, Homo sapiens
  siRNA target sequence for SLK (NM_014720.1,592-610).
cctgaaccccgaagacttt

SEQ ID NO: 39499 - DNA, 19 bp, Homo sapiens
  siRNA target sequence for SLK (NM_014720.1,593-611).
ctgaaccccgaagactttt

SEQ ID NO: 39500 - DNA, 19 bp, Homo sapiens
  siRNA target sequence for SLK (NM_014720.1,607-625).
cttttgggagattatagga

SEQ ID NO: 39501 - DNA, 19 bp, Homo sapiens
  siRNA target sequence for SLK (NM_014720.1,696-714).
caaaagtgattgacactaa

SEQ ID NO: 39502 - DNA, 19 bp, Homo sapiens
  siRNA target sequence for SLK (NM_014720.1,703-721).
gattgacactaaatctgaa

SEQ ID NO: 39503 - DNA, 19 bp, Homo sapiens
  siRNA target sequence for SLK (NM_014720.1,742-760).
ggtagagattgacatatta

SEQ ID NO: 39504 - DNA, 19 bp, Homo sapiens
  siRNA target sequence for SLK (NM_014720.1,746-764).
gagattgacatattagcat

SEQ ID NO: 39505 - DNA, 19 bp, Homo sapiens
  siRNA target sequence for SLK (NM_014720.1,765-783).
cttgtgatcacccaaatat

SEQ ID NO: 39506 - DNA, 19 bp, Homo sapiens
  siRNA target sequence for SLK (NM_014720.1,768-786).
gtgatcacccaaatatagt

SEQ ID NO: 39507 - DNA, 19 bp, Homo sapiens
  siRNA target sequence for SLK (NM_014720.1,770-788).
gatcacccaaatatagtca

SEQ ID NO: 39508 - DNA, 19 bp, Homo sapiens
  siRNA target sequence for SLK (NM_014720.1,790-808).
gcttctagatgccttctat

SEQ ID NO: 39509 - DNA, 19 bp, Homo sapiens
  siRNA target sequence for SLK (NM_014720.1,791-809).
cttctagatgccttctatt

SEQ ID NO: 39510 - DNA, 19 bp, Homo sapiens
  siRNA target sequence for SLK (NM_014720.1,797-815).
gatgccttctattatgaga

SEQ ID NO: 39511 - DNA, 19 bp, Homo sapiens
  siRNA target sequence for SLK (NM_014720.1,805-823).
ctattatgagaacaatctt

SEQ ID NO: 39512 - DNA, 19 bp, Homo sapiens
  siRNA target sequence for SLK (NM_014720.1,898-916).
gtcccaaatacaagtagtt

SEQ ID NO: 39513 - DNA, 19 bp, Homo sapiens
  siRNA target sequence for SLK (NM_014720.1,983-1001).
gctggcaacattctcttta

SEQ ID NO: 39514 - DNA, 19 bp, Homo sapiens
  siRNA target sequence for SLK (NM_014720.1,988-1006).
caacattctctttacctta

SEQ ID NO: 39515 - DNA, 19 bp, Homo sapiens
  siRNA target sequence for SLK (NM_014720.1,1148-1166).
gactacaaagctgatgttt

SEQ ID NO: 39516 - DNA, 19 bp, Homo sapiens
  siRNA target sequence for SLK (NM_014720.1,1167-1185).
ggtccctgggtatcacttt

SEQ ID NO: 39517 - DNA, 19 bp, Homo sapiens
  siRNA target sequence for SLK (NM_014720.1,1168-1186).
gtccctgggtatcacttta

SEQ ID NO: 39518 - DNA, 19 bp, Homo sapiens
  siRNA target sequence for SLK (NM_014720.1,1170-1188).
ccctgggtatcactttaat

SEQ ID NO: 39519 - DNA, 19 bp, Homo sapiens
  siRNA target sequence for SLK (NM_014720.1,1171-1189).
cctgggtatcactttaata

SEQ ID NO: 39520 - DNA, 19 bp, Homo sapiens
  siRNA target sequence for SLK (NM_014720.1,1174-1192).
gggtatcactttaatagaa

SEQ ID NO: 39521 - DNA, 19 bp, Homo sapiens
  siRNA target sequence for SLK (NM_014720.1,1175-1193).
ggtatcactttaatagaaa

SEQ ID NO: 39522 - DNA, 19 bp, Homo sapiens
  siRNA target sequence for SLK (NM_014720.1,1208-1226).
ccacctcatcatgaattaa

SEQ ID NO: 39523 - DNA, 19 bp, Homo sapiens
  siRNA target sequence for SLK (NM_014720.1,1209-1227).
cacctcatcatgaattaaa

SEQ ID NO: 39524 - DNA, 19 bp, Homo sapiens
  siRNA target sequence for SLK (NM_014720.1,1230-1248).
caatgcgagtgctgctaaa

SEQ ID NO: 39525 - DNA, 19 bp, Homo sapiens
  siRNA target sequence for SLK (NM_014720.1,1234-1252).
gcgagtgctgctaaaaata

SEQ ID NO: 39526 - DNA, 19 bp, Homo sapiens
  siRNA target sequence for SLK (NM_014720.1,1243-1261).
gctaaaaatagcaaaatct

SEQ ID NO: 39527 - DNA, 19 bp, Homo sapiens
  siRNA target sequence for SLK (NM_014720.1,1343-1361).
gatgccaggtggactacat

SEQ ID NO: 39528 - DNA, 19 bp, Homo sapiens
  siRNA target sequence for SLK (NM_014720.1,1372-1390).
gcagcatccctttgttact

SEQ ID NO: 39529 - DNA, 19 bp, Homo sapiens
  siRNA target sequence for SLK (NM_014720.1,1526-1544).
gcatcttctgaccttagta

SEQ ID NO: 39530 - DNA, 19 bp, Homo sapiens
  siRNA target sequence for SLK (NM_014720.1,1527-1545).
catcttctgaccttagtat

SEQ ID NO: 39531 - DNA, 19 bp, Homo sapiens
  siRNA target sequence for SLK (NM_014720.1,1616-1634).
cgtagtaactctgaagata

SEQ ID NO: 39532 - DNA, 19 bp, Homo sapiens
  siRNA target sequence for SLK (NM_014720.1,1637-1655).
ctcaacagcaaaattctta

SEQ ID NO: 39533 - DNA, 19 bp, Homo sapiens
  siRNA target sequence for SLK (NM_014720.1,1639-1657).
caacagcaaaattcttaat

SEQ ID NO: 39534 - DNA, 19 bp, Homo sapiens
  siRNA target sequence for SLK (NM_014720.1,1687-1705).
ggctgtggaggatattaat

SEQ ID NO: 39535 - DNA, 19 bp, Homo sapiens
  siRNA target sequence for SLK (NM_014720.1,1693-1711).
ggaggatattaatgaacat

SEQ ID NO: 39536 - DNA, 19 bp, Homo sapiens
  siRNA target sequence for SLK (NM_014720.1,1789-1807).
gaggcccaagcttgaaaat

SEQ ID NO: 39537 - DNA, 19 bp, Homo sapiens
  siRNA target sequence for SLK (NM_014720.1,1833-1851).
ctgtggacattaattcagt

SEQ ID NO: 39538 - DNA, 19 bp, Homo sapiens
  siRNA target sequence for SLK (NM_014720.1,1999-2017).
gcaaacagtagatttagtt

SEQ ID NO: 39539 - DNA, 19 bp, Homo sapiens
  siRNA target sequence for SLK (NM_014720.1,2064-2082).
gtgaagttgggcttacaaa

SEQ ID NO: 39540 - DNA, 19 bp, Homo sapiens
  siRNA target sequence for SLK (NM_014720.1,2108-2126).
gaagacgacaaaactcaaa

SEQ ID NO: 39541 - DNA, 19 bp, Homo sapiens
  siRNA target sequence for SLK (NM_014720.1,2208-2226).
ctgaggatacgcagagtaa

SEQ ID NO: 39542 - DNA, 19 bp, Homo sapiens
  siRNA target sequence for SLK (NM_014720.1,2212-2230).
ggatacgcagagtaatgat

SEQ ID NO: 39543 - DNA, 19 bp, Homo sapiens
  siRNA target sequence for SLK (NM_014720.1,2243-2261).
gtcgaagtaggccagaaat

SEQ ID NO: 39544 - DNA, 19 bp, Homo sapiens
  siRNA target sequence for SLK (NM_014720.1,2298-2316).
gtactaaggaagttcctat

SEQ ID NO: 39545 - DNA, 19 bp, Homo sapiens
  siRNA target sequence for SLK (NM_014720.1,2386-2404).
gaacataatggacatcaat

SEQ ID NO: 39546 - DNA, 19 bp, Homo sapiens
  siRNA target sequence for SLK (NM_014720.1,2492-2510).
gaccaaaaggctttaggaa

SEQ ID NO: 39547 - DNA, 19 bp, Homo sapiens
  siRNA target sequence for SLK (NM_014720.1,2502-2520).
ctttaggaagtgaagttca

SEQ ID NO: 39548 - DNA, 19 bp, Homo sapiens
  siRNA target sequence for SLK (NM_014720.1,2636-2654).
ctaatacccagtattaata

SEQ ID NO: 39549 - DNA, 19 bp, Homo sapiens
  siRNA target sequence for SLK (NM_014720.1,2681-2699).
gaagaaataggttctttat

SEQ ID NO: 39550 - DNA, 19 bp, Homo sapiens
  siRNA target sequence for SLK (NM_014720.1,2719-2737).
gccaccagaatctgagaat

SEQ ID NO: 39551 - DNA, 19 bp, Homo sapiens
  siRNA target sequence for SLK (NM_014720.1,2723-2741).
ccagaatctgagaatccaa

SEQ ID NO: 39552 - DNA, 19 bp, Homo sapiens
  siRNA target sequence for SLK (NM_014720.1,2778-2796).
ctgatactagcagtattga

SEQ ID NO: 39553 - DNA, 19 bp, Homo sapiens
  siRNA target sequence for SLK (NM_014720.1,2780-2798).
gatactagcagtattgact

SEQ ID NO: 39554 - DNA, 19 bp, Homo sapiens
  siRNA target sequence for SLK (NM_014720.1,2787-2805).
gcagtattgacttgaattt

SEQ ID NO: 39555 - DNA, 19 bp, Homo sapiens
  siRNA target sequence for SLK (NM_014720.1,2809-2827).
catctctagctttctaagt

SEQ ID NO: 39556 - DNA, 19 bp, Homo sapiens
  siRNA target sequence for SLK (NM_014720.1,2817-2835).
gctttctaagtaaaactaa

SEQ ID NO: 39557 - DNA, 19 bp, Homo sapiens
  siRNA target sequence for SLK (NM_014720.1,2818-2836).
ctttctaagtaaaactaaa

SEQ ID NO: 39558 - DNA, 19 bp, Homo sapiens
  siRNA target sequence for SLK (NM_014720.1,2822-2840).
ctaagtaaaactaaagaca

SEQ ID NO: 39559 - DNA, 19 bp, Homo sapiens
  siRNA target sequence for SLK (NM_014720.1,2837-2855).
gacagtggatcgatatctt

SEQ ID NO: 39560 - DNA, 19 bp, Homo sapiens
  siRNA target sequence for SLK (NM_014720.1,2839-2857).
cagtggatcgatatcttta

SEQ ID NO: 39561 - DNA, 19 bp, Homo sapiens
  siRNA target sequence for SLK (NM_014720.1,2918-2936).
gtagaagtgagtgtaacaa

SEQ ID NO: 39562 - DNA, 19 bp, Homo sapiens
  siRNA target sequence for SLK (NM_014720.1,2921-2939).
gaagtgagtgtaacaacat

SEQ ID NO: 39563 - DNA, 19 bp, Homo sapiens
  siRNA target sequence for SLK (NM_014720.1,2924-2942).
gtgagtgtaacaacatcaa

SEQ ID NO: 39564 - DNA, 19 bp, Homo sapiens
  siRNA target sequence for SLK (NM_014720.1,2928-2946).
gtgtaacaacatcaaagat

SEQ ID NO: 39565 - DNA, 19 bp, Homo sapiens
  siRNA target sequence for SLK (NM_014720.1,2999-3017).
gaacttcgggaattaagat

SEQ ID NO: 39566 - DNA, 19 bp, Homo sapiens
  siRNA target sequence for SLK (NM_014720.1,3044-3062).
caacaacagctcaatagca

SEQ ID NO: 39567 - DNA, 19 bp, Homo sapiens
  siRNA target sequence for SLK (NM_014720.1,3101-3119).
gagcaggaaatgatgagta

SEQ ID NO: 39568 - DNA, 19 bp, Homo sapiens
  siRNA target sequence for SLK (NM_014720.1,3115-3133).
gagtaaaaagcgacaatat

SEQ ID NO: 39569 - DNA, 19 bp, Homo sapiens
  siRNA target sequence for SLK (NM_014720.1,3117-3135).
gtaaaaagcgacaatatga

SEQ ID NO: 39570 - DNA, 19 bp, Homo sapiens
  siRNA target sequence for SLK (NM_014720.1,3369-3387).
cagagttagctaatattga

SEQ ID NO: 39571 - DNA, 19 bp, Homo sapiens
  siRNA target sequence for SLK (NM_014720.1,3448-3466).
gctcgaagaacgacactta

SEQ ID NO: 39572 - DNA, 19 bp, Homo sapiens
  siRNA target sequence for SLK (NM_014720.1,3451-3469).
cgaagaacgacacttacaa

SEQ ID NO: 39573 - DNA, 19 bp, Homo sapiens
  siRNA target sequence for SLK (NM_014720.1,3455-3473).
gaacgacacttacaagaaa

SEQ ID NO: 39574 - DNA, 19 bp, Homo sapiens
  siRNA target sequence for SLK (NM_014720.1,3493-3511).
gcagcttaaagatcagtat

SEQ ID NO: 39575 - DNA, 19 bp, Homo sapiens
  siRNA target sequence for SLK (NM_014720.1,3508-3526).
gtatttcatgcaaagacat

SEQ ID NO: 39576 - DNA, 19 bp, Homo sapiens
  siRNA target sequence for SLK (NM_014720.1,3559-3577).
gcaaatgcagcgttacaat

SEQ ID NO: 39577 - DNA, 19 bp, Homo sapiens
  siRNA target sequence for SLK (NM_014720.1,3568-3586).
gcgttacaatcaaagactt

SEQ ID NO: 39578 - DNA, 19 bp, Homo sapiens
  siRNA target sequence for SLK (NM_014720.1,3569-3587).
cgttacaatcaaagactta

SEQ ID NO: 39579 - DNA, 19 bp, Homo sapiens
  siRNA target sequence for SLK (NM_014720.1,3570-3588).
gttacaatcaaagacttat

SEQ ID NO: 39580 - DNA, 19 bp, Homo sapiens
  siRNA target sequence for SLK (NM_014720.1,3660-3678).
ctcgaatggccatgtttaa

SEQ ID NO: 39581 - DNA, 19 bp, Homo sapiens
  siRNA target sequence for SLK (NM_014720.1,3662-3680).
cgaatggccatgtttaaga

SEQ ID NO: 39582 - DNA, 19 bp, Homo sapiens
  siRNA target sequence for SLK (NM_014720.1,3668-3686).
gccatgtttaagaagagtt

SEQ ID NO: 39583 - DNA, 19 bp, Homo sapiens
  siRNA target sequence for SLK (NM_014720.1,3682-3700).
gagtttgagaattaactca

SEQ ID NO: 39584 - DNA, 19 bp, Homo sapiens
  siRNA target sequence for SLK (NM_014720.1,3713-3731).
gatcaggaccgtgataaaa

SEQ ID NO: 39585 - DNA, 19 bp, Homo sapiens
  siRNA target sequence for SLK (NM_014720.1,3722-3740).
cgtgataaaattaaacagt

SEQ ID NO: 39586 - DNA, 19 bp, Homo sapiens
  siRNA target sequence for SLK (NM_014720.1,3783-3801).
ctcagcatcagaaacatga

SEQ ID NO: 39587 - DNA, 19 bp, Homo sapiens
  siRNA target sequence for SLK (NM_014720.1,3914-3932).
gagttagatgaggaacata

SEQ ID NO: 39588 - DNA, 19 bp, Homo sapiens
  siRNA target sequence for SMAP1 (NM_021940.2,171-189).
cagcaccagctcatcctat

SEQ ID NO: 39589 - DNA, 19 bp, Homo sapiens
  siRNA target sequence for SMAP1 (NM_021940.2,204-222).
gaggaggacaacaagtact

SEQ ID NO: 39590 - DNA, 19 bp, Homo sapiens
  siRNA target sequence for SMAP1 (NM_021940.2,249-267).
cgatgggcttcctggaata

SEQ ID NO: 39591 - DNA, 19 bp, Homo sapiens
  siRNA target sequence for SMAP1 (NM_021940.2,250-268).
gatgggcttcctggaatat

SEQ ID NO: 39592 - DNA, 19 bp, Homo sapiens
  siRNA target sequence for SMAP1 (NM_021940.2,263-281).
gaatattggtgtgtttatt

SEQ ID NO: 39593 - DNA, 19 bp, Homo sapiens
  siRNA target sequence for SMAP1 (NM_021940.2,321-339).
catatatccagggtcaaat

SEQ ID NO: 39594 - DNA, 19 bp, Homo sapiens
  siRNA target sequence for SMAP1 (NM_021940.2,459-477).
gatcaagcagtggaatttt

SEQ ID NO: 39595 - DNA, 19 bp, Homo sapiens
  siRNA target sequence for SMAP1 (NM_021940.2,503-521).
gaaatactacgataaaaat

SEQ ID NO: 39596 - DNA, 19 bp, Homo sapiens
  siRNA target sequence for SMAP1 (NM_021940.2,636-654).
cagcaactggagcctaaaa

SEQ ID NO: 39597 - DNA, 19 bp, Homo sapiens
  siRNA target sequence for SMAP1 (NM_021940.2,639-657).
caactggagcctaaaaaaa

SEQ ID NO: 39598 - DNA, 19 bp, Homo sapiens
  siRNA target sequence for SMAP1 (NM_021940.2,642-660).
ctggagcctaaaaaaagta

SEQ ID NO: 39599 - DNA, 19 bp, Homo sapiens
  siRNA target sequence for SMAP1 (NM_021940.2,686-704).
cactgtggatcttttagga

SEQ ID NO: 39600 - DNA, 19 bp, Homo sapiens
  siRNA target sequence for SMAP1 (NM_021940.2,692-710).
ggatcttttaggacttgat

SEQ ID NO: 39601 - DNA, 19 bp, Homo sapiens
  siRNA target sequence for SMAP1 (NM_021940.2,729-747).
gtgaccaacgggaacacaa

SEQ ID NO: 39602 - DNA, 19 bp, Homo sapiens
  siRNA target sequence for SMAP1 (NM_021940.2,754-772).
cacccctgaacgatgatct

SEQ ID NO: 39603 - DNA, 19 bp, Homo sapiens
  siRNA target sequence for SMAP1 (NM_021940.2,764-782).
cgatgatctggacatcttt

SEQ ID NO: 39604 - DNA, 19 bp, Homo sapiens
  siRNA target sequence for SMAP1 (NM_021940.2,776-794).
catctttggaccgatgatt

SEQ ID NO: 39605 - DNA, 19 bp, Homo sapiens
  siRNA target sequence for SMAP1 (NM_021940.2,858-876).
gcaaccctgtctacagtaa

SEQ ID NO: 39606 - DNA, 19 bp, Homo sapiens
  siRNA target sequence for SMAP1 (NM_021940.2,877-895).
catctggggatctagattt

SEQ ID NO: 39607 - DNA, 19 bp, Homo sapiens
  siRNA target sequence for SMAP1 (NM_021940.2,947-965).
caaagactccatcttatct

SEQ ID NO: 39608 - DNA, 19 bp, Homo sapiens
  siRNA target sequence for SMAP1 (NM_021940.2,968-986).
gtatggcacaggaaccatt

SEQ ID NO: 39609 - DNA, 19 bp, Homo sapiens
  siRNA target sequence for SMAP1 (NM_021940.2,997-1015).
gtactcctggtgtatttat

SEQ ID NO: 39610 - DNA, 19 bp, Homo sapiens
  siRNA target sequence for SMAP1 (NM_021940.2,1156-1174).
ccatgcccaatgggtttat

SEQ ID NO: 39611 - DNA, 19 bp, Homo sapiens
  siRNA target sequence for SMAP1 (NM_021940.2,1300-1318).
ggagcctctcacagatgaa

SEQ ID NO: 39612 - DNA, 19 bp, Homo sapiens
  siRNA target sequence for SMAP1 (NM_021940.2,1301-1319).
gagcctctcacagatgaat

SEQ ID NO: 39613 - DNA, 19 bp, Homo sapiens
  siRNA target sequence for SMAP1 (NM_021940.2,1303-1321).
gcctctcacagatgaatca

SEQ ID NO: 39614 - DNA, 19 bp, Homo sapiens
  siRNA target sequence for SMAP1 (NM_021940.2,1329-1347).
gctggcatgagtatcagta

SEQ ID NO: 39615 - DNA, 19 bp, Homo sapiens
  siRNA target sequence for SMARCA1 (NM_003069.2,150-168).
ccactatcgtggtcataga

SEQ ID NO: 39616 - DNA, 19 bp, Homo sapiens
  siRNA target sequence for SMARCA1 (NM_003069.2,279-297).
cttcatttcaactcaaact

SEQ ID NO: 39617 - DNA, 19 bp, Homo sapiens
  siRNA target sequence for SMARCA1 (NM_003069.2,299-317).
gctgctaaagcgcctaaat

SEQ ID NO: 39618 - DNA, 19 bp, Homo sapiens
  siRNA target sequence for SMARCA1 (NM_003069.2,309-327).
cgcctaaatctgaaaagga

SEQ ID NO: 39619 - DNA, 19 bp, Homo sapiens
  siRNA target sequence for SMARCA1 (NM_003069.2,359-377).
gccgaccgagcaaagagat

SEQ ID NO: 39620 - DNA, 19 bp, Homo sapiens
  siRNA target sequence for SMARCA1 (NM_003069.2,360-378).
ccgaccgagcaaagagatt

SEQ ID NO: 39621 - DNA, 19 bp, Homo sapiens
  siRNA target sequence for SMARCA1 (NM_003069.2,361-379).
cgaccgagcaaagagattt

SEQ ID NO: 39622 - DNA, 19 bp, Homo sapiens
  siRNA target sequence for SMARCA1 (NM_003069.2,364-382).
ccgagcaaagagatttgaa

SEQ ID NO: 39623 - DNA, 19 bp, Homo sapiens
  siRNA target sequence for SMARCA1 (NM_003069.2,447-465).
catctccactgaacatgaa

SEQ ID NO: 39624 - DNA, 19 bp, Homo sapiens
  siRNA target sequence for SMARCA1 (NM_003069.2,450-468).
ctccactgaacatgaaatt

SEQ ID NO: 39625 - DNA, 19 bp, Homo sapiens
  siRNA target sequence for SMARCA1 (NM_003069.2,470-488).
ggacgtccccgaataaaga

SEQ ID NO: 39626 - DNA, 19 bp, Homo sapiens
  siRNA target sequence for SMARCA1 (NM_003069.2,471-489).
gacgtccccgaataaagaa

SEQ ID NO: 39627 - DNA, 19 bp, Homo sapiens
  siRNA target sequence for SMARCA1 (NM_003069.2,572-590).
gagagtcggaaaacatcta

SEQ ID NO: 39628 - DNA, 19 bp, Homo sapiens
  siRNA target sequence for SMARCA1 (NM_003069.2,574-592).
gagtcggaaaacatctaat

SEQ ID NO: 39629 - DNA, 19 bp, Homo sapiens
  siRNA target sequence for SMARCA1 (NM_003069.2,576-594).
gtcggaaaacatctaatgt

SEQ ID NO: 39630 - DNA, 19 bp, Homo sapiens
  siRNA target sequence for SMARCA1 (NM_003069.2,578-596).
cggaaaacatctaatgtgt

SEQ ID NO: 39631 - DNA, 19 bp, Homo sapiens
  siRNA target sequence for SMARCA1 (NM_003069.2,611-629).
gtgtcaccttcatatgtga

SEQ ID NO: 39632 - DNA, 19 bp, Homo sapiens
  siRNA target sequence for SMARCA1 (NM_003069.2,613-631).
gtcaccttcatatgtgaaa

SEQ ID NO: 39633 - DNA, 19 bp, Homo sapiens
  siRNA target sequence for SMARCA1 (NM_003069.2,638-656).
ccactgagagattatcaga

SEQ ID NO: 39634 - DNA, 19 bp, Homo sapiens
  siRNA target sequence for SMARCA1 (NM_003069.2,667-685).
gaattggttgatctcttta

SEQ ID NO: 39635 - DNA, 19 bp, Homo sapiens
  siRNA target sequence for SMARCA1 (NM_003069.2,673-691).
gttgatctctttatatgaa

SEQ ID NO: 39636 - DNA, 19 bp, Homo sapiens
  siRNA target sequence for SMARCA1 (NM_003069.2,676-694).
gatctctttatatgaaaat

SEQ ID NO: 39637 - DNA, 19 bp, Homo sapiens
  siRNA target sequence for SMARCA1 (NM_003069.2,747-765).
caattgctttgcttggtta

SEQ ID NO: 39638 - DNA, 19 bp, Homo sapiens
  siRNA target sequence for SMARCA1 (NM_003069.2,769-787).
gaaacactaccgaaatatt

SEQ ID NO: 39639 - DNA, 19 bp, Homo sapiens
  siRNA target sequence for SMARCA1 (NM_003069.2,835-853).
gatgaatgaatttaaacga

SEQ ID NO: 39640 - DNA, 19 bp, Homo sapiens
  siRNA target sequence for SMARCA1 (NM_003069.2,860-878).
ccatctctccgtgtcattt

SEQ ID NO: 39641 - DNA, 19 bp, Homo sapiens
  siRNA target sequence for SMARCA1 (NM_003069.2,908-926).
gcttttattcgtgatgaaa

SEQ ID NO: 39642 - DNA, 19 bp, Homo sapiens
  siRNA target sequence for SMARCA1 (NM_003069.2,943-961).
ggatgtttgcgttacttct

SEQ ID NO: 39643 - DNA, 19 bp, Homo sapiens
  siRNA target sequence for SMARCA1 (NM_003069.2,944-962).
gatgtttgcgttacttctt

SEQ ID NO: 39644 - DNA, 19 bp, Homo sapiens
  siRNA target sequence for SMARCA1 (NM_003069.2,960-978).
cttatgagatggtaattaa

SEQ ID NO: 39645 - DNA, 19 bp, Homo sapiens
  siRNA target sequence for SMARCA1 (NM_003069.2,989-1007).
gtattcaaaaagtttcact

SEQ ID NO: 39646 - DNA, 19 bp, Homo sapiens
  siRNA target sequence for SMARCA1 (NM_003069.2,1008-1026).
ggcgatacctggtcattga

SEQ ID NO: 39647 - DNA, 19 bp, Homo sapiens
  siRNA target sequence for SMARCA1 (NM_003069.2,1009-1027).
gcgatacctggtcattgat

SEQ ID NO: 39648 - DNA, 19 bp, Homo sapiens
  siRNA target sequence for SMARCA1 (NM_003069.2,1149-1167).
ccttactcaactttttatt

SEQ ID NO: 39649 - DNA, 19 bp, Homo sapiens
  siRNA target sequence for SMARCA1 (NM_003069.2,1207-1225).
gtttgacactaaaaattgt

SEQ ID NO: 39650 - DNA, 19 bp, Homo sapiens
  siRNA target sequence for SMARCA1 (NM_003069.2,1279-1297).
gttacgccgtataaaaact

SEQ ID NO: 39651 - DNA, 19 bp, Homo sapiens
  siRNA target sequence for SMARCA1 (NM_003069.2,1315-1333).
gccacctaaaaaggaaata

SEQ ID NO: 39652 - DNA, 19 bp, Homo sapiens
  siRNA target sequence for SMARCA1 (NM_003069.2,1357-1375).
gatgcaacgagaatggtat

SEQ ID NO: 39653 - DNA, 19 bp, Homo sapiens
  siRNA target sequence for SMARCA1 (NM_003069.2,1360-1378).
gcaacgagaatggtataca

SEQ ID NO: 39654 - DNA, 19 bp, Homo sapiens
  siRNA target sequence for SMARCA1 (NM_003069.2,1361-1379).
caacgagaatggtatacaa

SEQ ID NO: 39655 - DNA, 19 bp, Homo sapiens
  siRNA target sequence for SMARCA1 (NM_003069.2,1364-1382).
cgagaatggtatacaaaaa

SEQ ID NO: 39656 - DNA, 19 bp, Homo sapiens
  siRNA target sequence for SMARCA1 (NM_003069.2,1426-1444).
ggacaagatgcgactctta

SEQ ID NO: 39657 - DNA, 19 bp, Homo sapiens
  siRNA target sequence for SMARCA1 (NM_003069.2,1427-1445).
gacaagatgcgactcttaa

SEQ ID NO: 39658 - DNA, 19 bp, Homo sapiens
  siRNA target sequence for SMARCA1 (NM_003069.2,1436-1454).
cgactcttaaacattctga

SEQ ID NO: 39659 - DNA, 19 bp, Homo sapiens
  siRNA target sequence for SMARCA1 (NM_003069.2,1453-1471).
gatgcagcttcgaaagtgt

SEQ ID NO: 39660 - DNA, 19 bp, Homo sapiens
  siRNA target sequence for SMARCA1 (NM_003069.2,1457-1475).
cagcttcgaaagtgttgta

SEQ ID NO: 39661 - DNA, 19 bp, Homo sapiens
  siRNA target sequence for SMARCA1 (NM_003069.2,1459-1477).
gcttcgaaagtgttgtaat

SEQ ID NO: 39662 - DNA, 19 bp, Homo sapiens
  siRNA target sequence for SMARCA1 (NM_003069.2,1521-1539).
ccactgatgagcatattgt

SEQ ID NO: 39663 - DNA, 19 bp, Homo sapiens
  siRNA target sequence for SMARCA1 (NM_003069.2,1597-1615).
gggttcaagggttctcatt

SEQ ID NO: 39664 - DNA, 19 bp, Homo sapiens
  siRNA target sequence for SMARCA1 (NM_003069.2,1598-1616).
ggttcaagggttctcattt

SEQ ID NO: 39665 - DNA, 19 bp, Homo sapiens
  siRNA target sequence for SMARCA1 (NM_003069.2,1627-1645).
gactcgcttgctggatatt

SEQ ID NO: 39666 - DNA, 19 bp, Homo sapiens
  siRNA target sequence for SMARCA1 (NM_003069.2,1629-1647).
ctcgcttgctggatatttt

SEQ ID NO: 39667 - DNA, 19 bp, Homo sapiens
  siRNA target sequence for SMARCA1 (NM_003069.2,1659-1677).
gcatgtggcgtggttatga

SEQ ID NO: 39668 - DNA, 19 bp, Homo sapiens
  siRNA target sequence for SMARCA1 (NM_003069.2,1666-1684).
gcgtggttatgagtattgt

SEQ ID NO: 39669 - DNA, 19 bp, Homo sapiens
  siRNA target sequence for SMARCA1 (NM_003069.2,1695-1713).
gacaaaccccgcatgaaga

SEQ ID NO: 39670 - DNA, 19 bp, Homo sapiens
  siRNA target sequence for SMARCA1 (NM_003069.2,1697-1715).
caaaccccgcatgaagaaa

SEQ ID NO: 39671 - DNA, 19 bp, Homo sapiens
  siRNA target sequence for SMARCA1 (NM_003069.2,1749-1767).
gtcaaagggaagcaataga

SEQ ID NO: 39672 - DNA, 19 bp, Homo sapiens
  siRNA target sequence for SMARCA1 (NM_003069.2,1778-1796).
gctcctaatagtagcaaat

SEQ ID NO: 39673 - DNA, 19 bp, Homo sapiens
  siRNA target sequence for SMARCA1 (NM_003069.2,1779-1797).
ctcctaatagtagcaaatt

SEQ ID NO: 39674 - DNA, 19 bp, Homo sapiens
  siRNA target sequence for SMARCA1 (NM_003069.2,1781-1799).
cctaatagtagcaaattca

SEQ ID NO: 39675 - DNA, 19 bp, Homo sapiens
  siRNA target sequence for SMARCA1 (NM_003069.2,1782-1800).
ctaatagtagcaaattcat

SEQ ID NO: 39676 - DNA, 19 bp, Homo sapiens
  siRNA target sequence for SMARCA1 (NM_003069.2,1824-1842).
gaggtctcggaattaacct

SEQ ID NO: 39677 - DNA, 19 bp, Homo sapiens
  siRNA target sequence for SMARCA1 (NM_003069.2,1851-1869).
ctgatgtggttatactata

SEQ ID NO: 39678 - DNA, 19 bp, Homo sapiens
  siRNA target sequence for SMARCA1 (NM_003069.2,1856-1874).
gtggttatactatatgatt

SEQ ID NO: 39679 - DNA, 19 bp, Homo sapiens
  siRNA target sequence for SMARCA1 (NM_003069.2,1885-1903).
cccacaggttgatctacaa

SEQ ID NO: 39680 - DNA, 19 bp, Homo sapiens
  siRNA target sequence for SMARCA1 (NM_003069.2,1909-1927).
ggatcgagcacatcgtatt

SEQ ID NO: 39681 - DNA, 19 bp, Homo sapiens
  siRNA target sequence for SMARCA1 (NM_003069.2,2014-2032).
gagactcgattcaattgtt

SEQ ID NO: 39682 - DNA, 19 bp, Homo sapiens
  siRNA target sequence for SMARCA1 (NM_003069.2,2016-2034).
gactcgattcaattgttat

SEQ ID NO: 39683 - DNA, 19 bp, Homo sapiens
  siRNA target sequence for SMARCA1 (NM_003069.2,2020-2038).
cgattcaattgttatacaa

SEQ ID NO: 39684 - DNA, 19 bp, Homo sapiens
  siRNA target sequence for SMARCA1 (NM_003069.2,2105-2123).
catggagccacccatgttt

SEQ ID NO: 39685 - DNA, 19 bp, Homo sapiens
  siRNA target sequence for SMARCA1 (NM_003069.2,2111-2129).
gccacccatgtttttgctt

SEQ ID NO: 39686 - DNA, 19 bp, Homo sapiens
  siRNA target sequence for SMARCA1 (NM_003069.2,2254-2272).
ggacattgaacaaagttta

SEQ ID NO: 39687 - DNA, 19 bp, Homo sapiens
  siRNA target sequence for SMARCA1 (NM_003069.2,2397-2415).
gtgtcagcgagccaaagat

SEQ ID NO: 39688 - DNA, 19 bp, Homo sapiens
  siRNA target sequence for SMARCA1 (NM_003069.2,2403-2421).
gcgagccaaagattccaaa

SEQ ID NO: 39689 - DNA, 19 bp, Homo sapiens
  siRNA target sequence for SMARCA1 (NM_003069.2,2507-2525).
ctttattatcggaagacaa

SEQ ID NO: 39690 - DNA, 19 bp, Homo sapiens
  siRNA target sequence for SMARCA1 (NM_003069.2,2665-2683).
cacaaactggactaaacga

SEQ ID NO: 39691 - DNA, 19 bp, Homo sapiens
  siRNA target sequence for SMARCA1 (NM_003069.2,2671-2689).
ctggactaaacgagatttt

SEQ ID NO: 39692 - DNA, 19 bp, Homo sapiens
  siRNA target sequence for SMARCA1 (NM_003069.2,2676-2694).
ctaaacgagattttaacca

SEQ ID NO: 39693 - DNA, 19 bp, Homo sapiens
  siRNA target sequence for SMARCA1 (NM_003069.2,2773-2791).
ggaggtcatggagtattca

SEQ ID NO: 39694 - DNA, 19 bp, Homo sapiens
  siRNA target sequence for SMARCA1 (NM_003069.2,2803-2821).
ggaacgttgcaatgaatta

SEQ ID NO: 39695 - DNA, 19 bp, Homo sapiens
  siRNA target sequence for SMARCA1 (NM_003069.2,2876-2894).
cgaaggatcagtatcaaga

SEQ ID NO: 39696 - DNA, 19 bp, Homo sapiens
  siRNA target sequence for SMARCA1 (NM_003069.2,2899-2917).
cctggatgccaaaattgca

SEQ ID NO: 39697 - DNA, 19 bp, Homo sapiens
  siRNA target sequence for SMARCA1 (NM_003069.2,2900-2918).
ctggatgccaaaattgcaa

SEQ ID NO: 39698 - DNA, 19 bp, Homo sapiens
  siRNA target sequence for SMARCA1 (NM_003069.2,2936-2954).
catcagttgcgcattcagt

SEQ ID NO: 39699 - DNA, 19 bp, Homo sapiens
  siRNA target sequence for SMARCA1 (NM_003069.2,2987-3005).
gaagaagatagattcttga

SEQ ID NO: 39700 - DNA, 19 bp, Homo sapiens
  siRNA target sequence for SMARCA1 (NM_003069.2,2997-3015).
gattcttgatttgtatgtt

SEQ ID NO: 39701 - DNA, 19 bp, Homo sapiens
  siRNA target sequence for SMARCA1 (NM_003069.2,3095-3113).
gactggtttatcaagtcta

SEQ ID NO: 39702 - DNA, 19 bp, Homo sapiens
  siRNA target sequence for SMARCA1 (NM_003069.2,3211-3229).
gaaacgggcaactaaaact

SEQ ID NO: 39703 - DNA, 19 bp, Homo sapiens
  siRNA target sequence for SMARCA2 (NM_003070.2,251-269).
caagtgtctcccatcctat

SEQ ID NO: 39704 - DNA, 19 bp, Homo sapiens
  siRNA target sequence for SMARCA2 (NM_003070.2,326-344).
ccatcgatggtatacatga

SEQ ID NO: 39705 - DNA, 19 bp, Homo sapiens
  siRNA target sequence for SMARCA2 (NM_003070.2,442-460).
caacacagccaaggttata

SEQ ID NO: 39706 - DNA, 19 bp, Homo sapiens
  siRNA target sequence for SMARCA2 (NM_003070.2,445-463).
cacagccaaggttatatgt

SEQ ID NO: 39707 - DNA, 19 bp, Homo sapiens
  siRNA target sequence for SMARCA2 (NM_003070.2,498-516).
cgtctccagccctatgtct

SEQ ID NO: 39708 - DNA, 19 bp, Homo sapiens
  siRNA target sequence for SMARCA2 (NM_003070.2,646-664).
cgagctcagattttagctt

SEQ ID NO: 39709 - DNA, 19 bp, Homo sapiens
  siRNA target sequence for SMARCA2 (NM_003070.2,649-667).
gctcagattttagcttata

SEQ ID NO: 39710 - DNA, 19 bp, Homo sapiens
  siRNA target sequence for SMARCA2 (NM_003070.2,1143-1161).
ccgcatagctcataggata

SEQ ID NO: 39711 - DNA, 19 bp, Homo sapiens
  siRNA target sequence for SMARCA2 (NM_003070.2,1146-1164).
catagctcataggatacaa

SEQ ID NO: 39712 - DNA, 19 bp, Homo sapiens
  siRNA target sequence for SMARCA2 (NM_003070.2,1151-1169).
ctcataggatacaagaact

SEQ ID NO: 39713 - DNA, 19 bp, Homo sapiens
  siRNA target sequence for SMARCA2 (NM_003070.2,1231-1249).
gcacttcggttactcaatt

SEQ ID NO: 39714 - DNA, 19 bp, Homo sapiens
  siRNA target sequence for SMARCA2 (NM_003070.2,1412-1430).
ggaaacgccgtcagaaaca

SEQ ID NO: 39715 - DNA, 19 bp, Homo sapiens
  siRNA target sequence for SMARCA2 (NM_003070.2,1434-1452).
ggaatacctgaacagtatt

SEQ ID NO: 39716 - DNA, 19 bp, Homo sapiens
  siRNA target sequence for SMARCA2 (NM_003070.2,1435-1453).
gaatacctgaacagtattt

SEQ ID NO: 39717 - DNA, 19 bp, Homo sapiens
  siRNA target sequence for SMARCA2 (NM_003070.2,1455-1473).
gcaacatgcaaaagatttt

SEQ ID NO: 39718 - DNA, 19 bp, Homo sapiens
  siRNA target sequence for SMARCA2 (NM_003070.2,1456-1474).
caacatgcaaaagatttta

SEQ ID NO: 39719 - DNA, 19 bp, Homo sapiens
  siRNA target sequence for SMARCA2 (NM_003070.2,1599-1617).
gcgactgatggctgaagat

SEQ ID NO: 39720 - DNA, 19 bp, Homo sapiens
  siRNA target sequence for SMARCA2 (NM_003070.2,1615-1633).
gatgaggagggttatagaa

SEQ ID NO: 39721 - DNA, 19 bp, Homo sapiens
  siRNA target sequence for SMARCA2 (NM_003070.2,1621-1639).
gagggttatagaaaactga

SEQ ID NO: 39722 - DNA, 19 bp, Homo sapiens
  siRNA target sequence for SMARCA2 (NM_003070.2,1658-1676).
ggcgtttagcttacctttt

SEQ ID NO: 39723 - DNA, 19 bp, Homo sapiens
  siRNA target sequence for SMARCA2 (NM_003070.2,1680-1698).
gcagaccgatgagtatgta

SEQ ID NO: 39724 - DNA, 19 bp, Homo sapiens
  siRNA target sequence for SMARCA2 (NM_003070.2,1824-1842).
ggatggagagcccatagat

SEQ ID NO: 39725 - DNA, 19 bp, Homo sapiens
  siRNA target sequence for SMARCA2 (NM_003070.2,1859-1877).
gtgacctccctgtcaaagt

SEQ ID NO: 39726 - DNA, 19 bp, Homo sapiens
  siRNA target sequence for SMARCA2 (NM_003070.2,1956-1974).
gaatcctggttatgaagtt

SEQ ID NO: 39727 - DNA, 19 bp, Homo sapiens
  siRNA target sequence for SMARCA2 (NM_003070.2,2103-2121).
ggatgctaagcagatcatt

SEQ ID NO: 39728 - DNA, 19 bp, Homo sapiens
  siRNA target sequence for SMARCA2 (NM_003070.2,2118-2136).
cattgagacagctaagcaa

SEQ ID NO: 39729 - DNA, 19 bp, Homo sapiens
  siRNA target sequence for SMARCA2 (NM_003070.2,2252-2270).
ggaccctaaagcattacca

SEQ ID NO: 39730 - DNA, 19 bp, Homo sapiens
  siRNA target sequence for SMARCA2 (NM_003070.2,2288-2306).
ggatggtttccctgtataa

SEQ ID NO: 39731 - DNA, 19 bp, Homo sapiens
  siRNA target sequence for SMARCA2 (NM_003070.2,2293-2311).
gtttccctgtataataaca

SEQ ID NO: 39732 - DNA, 19 bp, Homo sapiens
  siRNA target sequence for SMARCA2 (NM_003070.2,2310-2328).
caacttgaacggaatctta

SEQ ID NO: 39733 - DNA, 19 bp, Homo sapiens
  siRNA target sequence for SMARCA2 (NM_003070.2,2320-2338).
ggaatcttagccgatgaaa

SEQ ID NO: 39734 - DNA, 19 bp, Homo sapiens
  siRNA target sequence for SMARCA2 (NM_003070.2,2363-2381).
ccattgcactcatcactta

SEQ ID NO: 39735 - DNA, 19 bp, Homo sapiens
  siRNA target sequence for SMARCA2 (NM_003070.2,2408-2426).
gcccctatctcatcattgt

SEQ ID NO: 39736 - DNA, 19 bp, Homo sapiens
  siRNA target sequence for SMARCA2 (NM_003070.2,2409-2427).
cccctatctcatcattgtt

SEQ ID NO: 39737 - DNA, 19 bp, Homo sapiens
  siRNA target sequence for SMARCA2 (NM_003070.2,2425-2443).
gttcccctttcgactctat

SEQ ID NO: 39738 - DNA, 19 bp, Homo sapiens
  siRNA target sequence for SMARCA2 (NM_003070.2,2428-2446).
cccctttcgactctatcta

SEQ ID NO: 39739 - DNA, 19 bp, Homo sapiens
  siRNA target sequence for SMARCA2 (NM_003070.2,2429-2447).
ccctttcgactctatctaa

SEQ ID NO: 39740 - DNA, 19 bp, Homo sapiens
  siRNA target sequence for SMARCA2 (NM_003070.2,2476-2494).
ccttctgtggtgaagattt

SEQ ID NO: 39741 - DNA, 19 bp, Homo sapiens
  siRNA target sequence for SMARCA2 (NM_003070.2,2563-2581).
ctcttgactacttatgagt

SEQ ID NO: 39742 - DNA, 19 bp, Homo sapiens
  siRNA target sequence for SMARCA2 (NM_003070.2,2565-2583).
cttgactacttatgagtat

SEQ ID NO: 39743 - DNA, 19 bp, Homo sapiens
  siRNA target sequence for SMARCA2 (NM_003070.2,2608-2626).
gcaaagattcggtggaaat

SEQ ID NO: 39744 - DNA, 19 bp, Homo sapiens
  siRNA target sequence for SMARCA2 (NM_003070.2,2645-2663).
gccaccgaatgaagaatca

SEQ ID NO: 39745 - DNA, 19 bp, Homo sapiens
  siRNA target sequence for SMARCA2 (NM_003070.2,2682-2700).
ggtcttgaacactcactat

SEQ ID NO: 39746 - DNA, 19 bp, Homo sapiens
  siRNA target sequence for SMARCA2 (NM_003070.2,2728-2746).
gggaccccgctgcagaata

SEQ ID NO: 39747 - DNA, 19 bp, Homo sapiens
  siRNA target sequence for SMARCA2 (NM_003070.2,2782-2800).
ctcccaacaatttttaaga

SEQ ID NO: 39748 - DNA, 19 bp, Homo sapiens
  siRNA target sequence for SMARCA2 (NM_003070.2,2807-2825).
gcacatttgaacaatggtt

SEQ ID NO: 39749 - DNA, 19 bp, Homo sapiens
  siRNA target sequence for SMARCA2 (NM_003070.2,2848-2866).
ggtgaaagggtggacttaa

SEQ ID NO: 39750 - DNA, 19 bp, Homo sapiens
  siRNA target sequence for SMARCA2 (NM_003070.2,2875-2893).
gaaactatattgatcatca

SEQ ID NO: 39751 - DNA, 19 bp, Homo sapiens
  siRNA target sequence for SMARCA2 (NM_003070.2,2886-2904).
gatcatcaggcgtctacat

SEQ ID NO: 39752 - DNA, 19 bp, Homo sapiens
  siRNA target sequence for SMARCA2 (NM_003070.2,2896-2914).
cgtctacataaggtgttaa

SEQ ID NO: 39753 - DNA, 19 bp, Homo sapiens
  siRNA target sequence for SMARCA2 (NM_003070.2,2907-2925).
ggtgttaagaccattttta

SEQ ID NO: 39754 - DNA, 19 bp, Homo sapiens
  siRNA target sequence for SMARCA2 (NM_003070.2,2963-2981).
ccgaaaaagtggaatatgt

SEQ ID NO: 39755 - DNA, 19 bp, Homo sapiens
  siRNA target sequence for SMARCA2 (NM_003070.2,3088-3106).
ggtgctaagacacttatga

SEQ ID NO: 39756 - DNA, 19 bp, Homo sapiens
  siRNA target sequence for SMARCA2 (NM_003070.2,3089-3107).
gtgctaagacacttatgaa

SEQ ID NO: 39757 - DNA, 19 bp, Homo sapiens
  siRNA target sequence for SMARCA2 (NM_003070.2,3091-3109).
gctaagacacttatgaaca

SEQ ID NO: 39758 - DNA, 19 bp, Homo sapiens
  siRNA target sequence for SMARCA2 (NM_003070.2,3096-3114).
gacacttatgaacactatt

SEQ ID NO: 39759 - DNA, 19 bp, Homo sapiens
  siRNA target sequence for SMARCA2 (NM_003070.2,3098-3116).
cacttatgaacactattat

SEQ ID NO: 39760 - DNA, 19 bp, Homo sapiens
  siRNA target sequence for SMARCA2 (NM_003070.2,3178-3196).
gaacacctaggctattcaa

SEQ ID NO: 39761 - DNA, 19 bp, Homo sapiens
  siRNA target sequence for SMARCA2 (NM_003070.2,3207-3225).
caatggggctgaactgtat

SEQ ID NO: 39762 - DNA, 19 bp, Homo sapiens
  siRNA target sequence for SMARCA2 (NM_003070.2,3253-3271).
gatcgtattctgccaaaat

SEQ ID NO: 39763 - DNA, 19 bp, Homo sapiens
  siRNA target sequence for SMARCA2 (NM_003070.2,3256-3274).
cgtattctgccaaaattga

SEQ ID NO: 39764 - DNA, 19 bp, Homo sapiens
  siRNA target sequence for SMARCA2 (NM_003070.2,3347-3365).
cttttcggaacttccttta

SEQ ID NO: 39765 - DNA, 19 bp, Homo sapiens
  siRNA target sequence for SMARCA2 (NM_003070.2,3476-3494).
gcctgggcttaaatcttca

SEQ ID NO: 39766 - DNA, 19 bp, Homo sapiens
  siRNA target sequence for SMARCA2 (NM_003070.2,3500-3518).
ctgatacagtggtcatctt

SEQ ID NO: 39767 - DNA, 19 bp, Homo sapiens
  siRNA target sequence for SMARCA2 (NM_003070.2,3796-3814).
gagactctgaaccaaatga

SEQ ID NO: 39768 - DNA, 19 bp, Homo sapiens
  siRNA target sequence for SMARCA2 (NM_003070.2,3798-3816).
gactctgaaccaaatgatt

SEQ ID NO: 39769 - DNA, 19 bp, Homo sapiens
  siRNA target sequence for SMARCA2 (NM_003070.2,3813-3831).
gattgctcgacgagaagaa

SEQ ID NO: 39770 - DNA, 19 bp, Homo sapiens
  siRNA target sequence for SMARCA2 (NM_003070.2,3818-3836).
ctcgacgagaagaagaatt

SEQ ID NO: 39771 - DNA, 19 bp, Homo sapiens
  siRNA target sequence for SMARCA2 (NM_003070.2,3924-3942).
gctgccctcctggatcatt

SEQ ID NO: 39772 - DNA, 19 bp, Homo sapiens
  siRNA target sequence for SMARCA2 (NM_003070.2,3945-3963).
ggatgacgctgaagtagaa

SEQ ID NO: 39773 - DNA, 19 bp, Homo sapiens
  siRNA target sequence for SMARCA2 (NM_003070.2,4070-4088).
ccatcgaagacggcaattt

SEQ ID NO: 39774 - DNA, 19 bp, Homo sapiens
  siRNA target sequence for SMARCA2 (NM_003070.2,4111-4129).
cggcttaagaagcgaaaaa

SEQ ID NO: 39775 - DNA, 19 bp, Homo sapiens
  siRNA target sequence for SMARCA2 (NM_003070.2,4130-4148).
gacgaagaaatgtggataa

SEQ ID NO: 39776 - DNA, 19 bp, Homo sapiens
  siRNA target sequence for SMARCA2 (NM_003070.2,4267-4285).
gtgataaactacaaagata

SEQ ID NO: 39777 - DNA, 19 bp, Homo sapiens
  siRNA target sequence for SMARCA2 (NM_003070.2,4299-4317).
gaaggtgcccagtaattct

SEQ ID NO: 39778 - DNA, 19 bp, Homo sapiens
  siRNA target sequence for SMARCA2 (NM_003070.2,4310-4328).
gtaattctcagttggaaat

SEQ ID NO: 39779 - DNA, 19 bp, Homo sapiens
  siRNA target sequence for SMARCA2 (NM_003070.2,4349-4367).
gacagctcagtgaagtctt

SEQ ID NO: 39780 - DNA, 19 bp, Homo sapiens
  siRNA target sequence for SMARCA2 (NM_003070.2,4385-4403).
ggaaagaattaccagaata

SEQ ID NO: 39781 - DNA, 19 bp, Homo sapiens
  siRNA target sequence for SMARCA2 (NM_003070.2,4418-4436).
ggaagccagtggatttcaa

SEQ ID NO: 39782 - DNA, 19 bp, Homo sapiens
  siRNA target sequence for SMARCA2 (NM_003070.2,4446-4464).
ggaaaggattcgtaatcat

SEQ ID NO: 39783 - DNA, 19 bp, Homo sapiens
  siRNA target sequence for SMARCA2 (NM_003070.2,4447-4465).
gaaaggattcgtaatcata

SEQ ID NO: 39784 - DNA, 19 bp, Homo sapiens
  siRNA target sequence for SMARCA2 (NM_003070.2,4451-4469).
ggattcgtaatcataagta

SEQ ID NO: 39785 - DNA, 19 bp, Homo sapiens
  siRNA target sequence for SMARCA3 (NM_003071.2,216-234).
gatccagtttggaagtact

SEQ ID NO: 39786 - DNA, 19 bp, Homo sapiens
  siRNA target sequence for SMARCA3 (NM_003071.2,270-288).
ccacgcctctcatatccaa

SEQ ID NO: 39787 - DNA, 19 bp, Homo sapiens
  siRNA target sequence for SMARCA3 (NM_003071.2,274-292).
gcctctcatatccaacttt

SEQ ID NO: 39788 - DNA, 19 bp, Homo sapiens
  siRNA target sequence for SMARCA3 (NM_003071.2,354-372).
gaagtagattccgttttat

SEQ ID NO: 39789 - DNA, 19 bp, Homo sapiens
  siRNA target sequence for SMARCA3 (NM_003071.2,407-425).
ctattacacgggagtagtt

SEQ ID NO: 39790 - DNA, 19 bp, Homo sapiens
  siRNA target sequence for SMARCA3 (NM_003071.2,413-431).
cacgggagtagttaataat

SEQ ID NO: 39791 - DNA, 19 bp, Homo sapiens
  siRNA target sequence for SMARCA3 (NM_003071.2,445-463).
cattacaacgagatcctaa

SEQ ID NO: 39792 - DNA, 19 bp, Homo sapiens
  siRNA target sequence for SMARCA3 (NM_003071.2,459-477).
cctaataacccttatgata

SEQ ID NO: 39793 - DNA, 19 bp, Homo sapiens
  siRNA target sequence for SMARCA3 (NM_003071.2,541-559).
caggtgctttggcctatat

SEQ ID NO: 39794 - DNA, 19 bp, Homo sapiens
  siRNA target sequence for SMARCA3 (NM_003071.2,544-562).
gtgctttggcctatatcat

SEQ ID NO: 39795 - DNA, 19 bp, Homo sapiens
  siRNA target sequence for SMARCA3 (NM_003071.2,553-571).
cctatatcatggacaacaa

SEQ ID NO: 39796 - DNA, 19 bp, Homo sapiens
  siRNA target sequence for SMARCA3 (NM_003071.2,554-572).
ctatatcatggacaacaaa

SEQ ID NO: 39797 - DNA, 19 bp, Homo sapiens
  siRNA target sequence for SMARCA3 (NM_003071.2,670-688).
cggtttcagatcagttgaa

SEQ ID NO: 39798 - DNA, 19 bp, Homo sapiens
  siRNA target sequence for SMARCA3 (NM_003071.2,672-690).
gtttcagatcagttgaaga

SEQ ID NO: 39799 - DNA, 19 bp, Homo sapiens
  siRNA target sequence for SMARCA3 (NM_003071.2,707-725).
gggtcctgcaccaaaaact

SEQ ID NO: 39800 - DNA, 19 bp, Homo sapiens
  siRNA target sequence for SMARCA3 (NM_003071.2,765-783).
gctggaccaagctatagta

SEQ ID NO: 39801 - DNA, 19 bp, Homo sapiens
  siRNA target sequence for SMARCA3 (NM_003071.2,766-784).
ctggaccaagctatagtat

SEQ ID NO: 39802 - DNA, 19 bp, Homo sapiens
  siRNA target sequence for SMARCA3 (NM_003071.2,888-906).
ccagctgaggctattgaaa

SEQ ID NO: 39803 - DNA, 19 bp, Homo sapiens
  siRNA target sequence for SMARCA3 (NM_003071.2,910-928).
cactgcttccacatcaaaa

SEQ ID NO: 39804 - DNA, 19 bp, Homo sapiens
  siRNA target sequence for SMARCA3 (NM_003071.2,944-962).
gatggtgtcacgggaaaat

SEQ ID NO: 39805 - DNA, 19 bp, Homo sapiens
  siRNA target sequence for SMARCA3 (NM_003071.2,948-966).
gtgtcacgggaaaatagca

SEQ ID NO: 39806 - DNA, 19 bp, Homo sapiens
  siRNA target sequence for SMARCA3 (NM_003071.2,985-1003).
gggaacagcgaaatgactt

SEQ ID NO: 39807 - DNA, 19 bp, Homo sapiens
  siRNA target sequence for SMARCA3 (NM_003071.2,987-1005).
gaacagcgaaatgacttat

SEQ ID NO: 39808 - DNA, 19 bp, Homo sapiens
  siRNA target sequence for SMARCA3 (NM_003071.2,1034-1052).
gaaggaccgaccagaaaat

SEQ ID NO: 39809 - DNA, 19 bp, Homo sapiens
  siRNA target sequence for SMARCA3 (NM_003071.2,1104-1122).
gccattgcagtaatcctta

SEQ ID NO: 39810 - DNA, 19 bp, Homo sapiens
  siRNA target sequence for SMARCA3 (NM_003071.2,1184-1202).
ggaatataatgttaacgat

SEQ ID NO: 39811 - DNA, 19 bp, Homo sapiens
  siRNA target sequence for SMARCA3 (NM_003071.2,1194-1212).
gttaacgatgactctatga

SEQ ID NO: 39812 - DNA, 19 bp, Homo sapiens
  siRNA target sequence for SMARCA3 (NM_003071.2,1199-1217).
cgatgactctatgaaactt

SEQ ID NO: 39813 - DNA, 19 bp, Homo sapiens
  siRNA target sequence for SMARCA3 (NM_003071.2,1256-1274).
caaagacgcatctagatgt

SEQ ID NO: 39814 - DNA, 19 bp, Homo sapiens
  siRNA target sequence for SMARCA3 (NM_003071.2,1262-1280).
cgcatctagatgtagtgaa

SEQ ID NO: 39815 - DNA, 19 bp, Homo sapiens
  siRNA target sequence for SMARCA3 (NM_003071.2,1320-1338).
cgcatgtcagaattgtcta

SEQ ID NO: 39816 - DNA, 19 bp, Homo sapiens
  siRNA target sequence for SMARCA3 (NM_003071.2,1365-1383).
gctgtccagtacatagaaa

SEQ ID NO: 39817 - DNA, 19 bp, Homo sapiens
  siRNA target sequence for SMARCA3 (NM_003071.2,1411-1429).
gtgaattgccgcagaaaat

SEQ ID NO: 39818 - DNA, 19 bp, Homo sapiens
  siRNA target sequence for SMARCA3 (NM_003071.2,1515-1533).
gcatgtgcattaacttcat

SEQ ID NO: 39819 - DNA, 19 bp, Homo sapiens
  siRNA target sequence for SMARCA3 (NM_003071.2,1589-1607).
gtcaaagaaaactgatgtt

SEQ ID NO: 39820 - DNA, 19 bp, Homo sapiens
  siRNA target sequence for SMARCA3 (NM_003071.2,1641-1659).
ccgctttctgtgttaagca

SEQ ID NO: 39821 - DNA, 19 bp, Homo sapiens
  siRNA target sequence for SMARCA3 (NM_003071.2,1642-1660).
cgctttctgtgttaagcaa

SEQ ID NO: 39822 - DNA, 19 bp, Homo sapiens
  siRNA target sequence for SMARCA3 (NM_003071.2,1726-1744).
gtcctgatcgtattagaga

SEQ ID NO: 39823 - DNA, 19 bp, Homo sapiens
  siRNA target sequence for SMARCA3 (NM_003071.2,1743-1761).
gaaccggccttactttcaa

SEQ ID NO: 39824 - DNA, 19 bp, Homo sapiens
  siRNA target sequence for SMARCA3 (NM_003071.2,1764-1782).
caggatattgttttgacta

SEQ ID NO: 39825 - DNA, 19 bp, Homo sapiens
  siRNA target sequence for SMARCA3 (NM_003071.2,1783-1801).
cgtataatattttaactca

SEQ ID NO: 39826 - DNA, 19 bp, Homo sapiens
  siRNA target sequence for SMARCA3 (NM_003071.2,1818-1836).
ggagatagtccattacata

SEQ ID NO: 39827 - DNA, 19 bp, Homo sapiens
  siRNA target sequence for SMARCA3 (NM_003071.2,1827-1845).
ccattacatagcataaggt

SEQ ID NO: 39828 - DNA, 19 bp, Homo sapiens
  siRNA target sequence for SMARCA3 (NM_003071.2,1837-1855).
gcataaggtggctaagagt

SEQ ID NO: 39829 - DNA, 19 bp, Homo sapiens
  siRNA target sequence for SMARCA3 (NM_003071.2,1866-1884).
gaaggacatgccatacgaa

SEQ ID NO: 39830 - DNA, 19 bp, Homo sapiens
  siRNA target sequence for SMARCA3 (NM_003071.2,1898-1916).
gcagacaaaagctgtactt

SEQ ID NO: 39831 - DNA, 19 bp, Homo sapiens
  siRNA target sequence for SMARCA3 (NM_003071.2,1903-1921).
caaaagctgtacttgactt

SEQ ID NO: 39832 - DNA, 19 bp, Homo sapiens
  siRNA target sequence for SMARCA3 (NM_003071.2,2032-2050).
ggtggcatagaacaataca

SEQ ID NO: 39833 - DNA, 19 bp, Homo sapiens
  siRNA target sequence for SMARCA3 (NM_003071.2,2079-2097).
ggacttaggcgtttacagt

SEQ ID NO: 39834 - DNA, 19 bp, Homo sapiens
  siRNA target sequence for SMARCA3 (NM_003071.2,2087-2105).
gcgtttacagtccctaatt

SEQ ID NO: 39835 - DNA, 19 bp, Homo sapiens
  siRNA target sequence for SMARCA3 (NM_003071.2,2088-2106).
cgtttacagtccctaatta

SEQ ID NO: 39836 - DNA, 19 bp, Homo sapiens
  siRNA target sequence for SMARCA3 (NM_003071.2,2089-2107).
gtttacagtccctaattaa

SEQ ID NO: 39837 - DNA, 19 bp, Homo sapiens
  siRNA target sequence for SMARCA3 (NM_003071.2,2169-2187).
ccagaacgtaaagtattta

SEQ ID NO: 39838 - DNA, 19 bp, Homo sapiens
  siRNA target sequence for SMARCA3 (NM_003071.2,2170-2188).
cagaacgtaaagtatttat

SEQ ID NO: 39839 - DNA, 19 bp, Homo sapiens
  siRNA target sequence for SMARCA3 (NM_003071.2,2253-2271).
gccactattggaaggtatt

SEQ ID NO: 39840 - DNA, 19 bp, Homo sapiens
  siRNA target sequence for SMARCA3 (NM_003071.2,2281-2299).
ggactgtcctggcacatta

SEQ ID NO: 39841 - DNA, 19 bp, Homo sapiens
  siRNA target sequence for SMARCA3 (NM_003071.2,2321-2339).
gcttagactgcggcaaatt

SEQ ID NO: 39842 - DNA, 19 bp, Homo sapiens
  siRNA target sequence for SMARCA3 (NM_003071.2,2322-2340).
cttagactgcggcaaattt

SEQ ID NO: 39843 - DNA, 19 bp, Homo sapiens
  siRNA target sequence for SMARCA3 (NM_003071.2,2334-2352).
caaatttgttgccatactt

SEQ ID NO: 39844 - DNA, 19 bp, Homo sapiens
  siRNA target sequence for SMARCA3 (NM_003071.2,2382-2400).
ggcccctcaggaaatgata

SEQ ID NO: 39845 - DNA, 19 bp, Homo sapiens
  siRNA target sequence for SMARCA3 (NM_003071.2,2475-2493).
gcaatttgcctggattctt

SEQ ID NO: 39846 - DNA, 19 bp, Homo sapiens
  siRNA target sequence for SMARCA3 (NM_003071.2,2499-2517).
gttcctgtgataacacatt

SEQ ID NO: 39847 - DNA, 19 bp, Homo sapiens
  siRNA target sequence for SMARCA3 (NM_003071.2,2514-2532).
cattgtgcacatgtatttt

SEQ ID NO: 39848 - DNA, 19 bp, Homo sapiens
  siRNA target sequence for SMARCA3 (NM_003071.2,2577-2595).
gctaaatgccctttatgca

SEQ ID NO: 39849 - DNA, 19 bp, Homo sapiens
  siRNA target sequence for SMARCA3 (NM_003071.2,2586-2604).
cctttatgcagaaatgata

SEQ ID NO: 39850 - DNA, 19 bp, Homo sapiens
  siRNA target sequence for SMARCA3 (NM_003071.2,2647-2665).
cacgtgacagtgagaaaaa

SEQ ID NO: 39851 - DNA, 19 bp, Homo sapiens
  siRNA target sequence for SMARCA3 (NM_003071.2,2660-2678).
gaaaaagtctgatatggaa

SEQ ID NO: 39852 - DNA, 19 bp, Homo sapiens
  siRNA target sequence for SMARCA3 (NM_003071.2,2676-2694).
gaatggacatccagttcaa

SEQ ID NO: 39853 - DNA, 19 bp, Homo sapiens
  siRNA target sequence for SMARCA3 (NM_003071.2,2705-2723).
gctaatgcacgcattgact

SEQ ID NO: 39854 - DNA, 19 bp, Homo sapiens
  siRNA target sequence for SMARCA3 (NM_003071.2,2711-2729).
gcacgcattgactgactta

SEQ ID NO: 39855 - DNA, 19 bp, Homo sapiens
  siRNA target sequence for SMARCA3 (NM_003071.2,2714-2732).
cgcattgactgacttaaga

SEQ ID NO: 39856 - DNA, 19 bp, Homo sapiens
  siRNA target sequence for SMARCA3 (NM_003071.2,2715-2733).
gcattgactgacttaagaa

SEQ ID NO: 39857 - DNA, 19 bp, Homo sapiens
  siRNA target sequence for SMARCA3 (NM_003071.2,2716-2734).
cattgactgacttaagaaa

SEQ ID NO: 39858 - DNA, 19 bp, Homo sapiens
  siRNA target sequence for SMARCA3 (NM_003071.2,2760-2778).
gttgtttctcagtttacaa

SEQ ID NO: 39859 - DNA, 19 bp, Homo sapiens
  siRNA target sequence for SMARCA3 (NM_003071.2,2940-2958).
ggagttggtttgaatctgt

SEQ ID NO: 39860 - DNA, 19 bp, Homo sapiens
  siRNA target sequence for SMARCA3 (NM_003071.2,2961-2979).
gcagcttctcgagtgtttt

SEQ ID NO: 39861 - DNA, 19 bp, Homo sapiens
  siRNA target sequence for SMARCA3 (NM_003071.2,3009-3027).
gaagatcagtgctttgaca

SEQ ID NO: 39862 - DNA, 19 bp, Homo sapiens
  siRNA target sequence for SMARCA3 (NM_003071.2,3043-3061).
gtcagaagcaagaagttat

SEQ ID NO: 39863 - DNA, 19 bp, Homo sapiens
  siRNA target sequence for SMARCA3 (NM_003071.2,3051-3069).
caagaagttatcatcacaa

SEQ ID NO: 39864 - DNA, 19 bp, Homo sapiens
  siRNA target sequence for SMARCA3 (NM_003071.2,3054-3072).
gaagttatcatcacaaaat

SEQ ID NO: 39865 - DNA, 19 bp, Homo sapiens
  siRNA target sequence for SMARCA3 (NM_003071.2,3162-3180).
ccaaatgctgacgaaatga

SEQ ID NO: 39866 - DNA, 19 bp, Homo sapiens
  siRNA target sequence for SMARCA5 (NM_003601.2,627-645).
cgccgagatggaggaaata

SEQ ID NO: 39867 - DNA, 19 bp, Homo sapiens
  siRNA target sequence for SMARCA5 (NM_003601.2,628-646).
gccgagatggaggaaatat

SEQ ID NO: 39868 - DNA, 19 bp, Homo sapiens
  siRNA target sequence for SMARCA5 (NM_003601.2,629-647).
ccgagatggaggaaatatt

SEQ ID NO: 39869 - DNA, 19 bp, Homo sapiens
  siRNA target sequence for SMARCA5 (NM_003601.2,691-709).
gatcctacctatgaagaaa

SEQ ID NO: 39870 - DNA, 19 bp, Homo sapiens
  siRNA target sequence for SMARCA5 (NM_003601.2,719-737).
ctgaccgggcaaatagatt

SEQ ID NO: 39871 - DNA, 19 bp, Homo sapiens
  siRNA target sequence for SMARCA5 (NM_003601.2,727-745).
gcaaatagattcgagtatt

SEQ ID NO: 39872 - DNA, 19 bp, Homo sapiens
  siRNA target sequence for SMARCA5 (NM_003601.2,728-746).
caaatagattcgagtattt

SEQ ID NO: 39873 - DNA, 19 bp, Homo sapiens
  siRNA target sequence for SMARCA5 (NM_003601.2,912-930).
ggatgaagagctattaaca

SEQ ID NO: 39874 - DNA, 19 bp, Homo sapiens
  siRNA target sequence for SMARCA5 (NM_003601.2,936-954).
ctccaaagcaaccaatgtt

SEQ ID NO: 39875 - DNA, 19 bp, Homo sapiens
  siRNA target sequence for SMARCA5 (NM_003601.2,948-966).
caatgtttgcactcgattt

SEQ ID NO: 39876 - DNA, 19 bp, Homo sapiens
  siRNA target sequence for SMARCA5 (NM_003601.2,970-988).
gactctccatcgtatgtaa

SEQ ID NO: 39877 - DNA, 19 bp, Homo sapiens
  siRNA target sequence for SMARCA5 (NM_003601.2,972-990).
ctctccatcgtatgtaaaa

SEQ ID NO: 39878 - DNA, 19 bp, Homo sapiens
  siRNA target sequence for SMARCA5 (NM_003601.2,1012-1030).
caggtccgaggattaaact

SEQ ID NO: 39879 - DNA, 19 bp, Homo sapiens
  siRNA target sequence for SMARCA5 (NM_003601.2,1048-1066).
gagaatggcatcaatggta

SEQ ID NO: 39880 - DNA, 19 bp, Homo sapiens
  siRNA target sequence for SMARCA5 (NM_003601.2,1063-1081).
ggtatccttgcagatgaaa

SEQ ID NO: 39881 - DNA, 19 bp, Homo sapiens
  siRNA target sequence for SMARCA5 (NM_003601.2,1064-1082).
gtatccttgcagatgaaat

SEQ ID NO: 39882 - DNA, 19 bp, Homo sapiens
  siRNA target sequence for SMARCA5 (NM_003601.2,1090-1108).
ggaaagactcttcaaacaa

SEQ ID NO: 39883 - DNA, 19 bp, Homo sapiens
  siRNA target sequence for SMARCA5 (NM_003601.2,1120-1138).
gggtacatgaaacattata

SEQ ID NO: 39884 - DNA, 19 bp, Homo sapiens
  siRNA target sequence for SMARCA5 (NM_003601.2,1152-1170).
gcctcatatggttttggtt

SEQ ID NO: 39885 - DNA, 19 bp, Homo sapiens
  siRNA target sequence for SMARCA5 (NM_003601.2,1209-1227).
gagatgggtaccaacactt

SEQ ID NO: 39886 - DNA, 19 bp, Homo sapiens
  siRNA target sequence for SMARCA5 (NM_003601.2,1215-1233).
ggtaccaacacttagatct

SEQ ID NO: 39887 - DNA, 19 bp, Homo sapiens
  siRNA target sequence for SMARCA5 (NM_003601.2,1316-1334).
catcttatgaaatgcttat

SEQ ID NO: 39888 - DNA, 19 bp, Homo sapiens
  siRNA target sequence for SMARCA5 (NM_003601.2,1346-1364).
ctgtgttcaaaaaatttaa

SEQ ID NO: 39889 - DNA, 19 bp, Homo sapiens
  siRNA target sequence for SMARCA5 (NM_003601.2,1432-1450).
gtgagggaattcaagacta

SEQ ID NO: 39890 - DNA, 19 bp, Homo sapiens
  siRNA target sequence for SMARCA5 (NM_003601.2,1443-1461).
caagactacaaatagacta

SEQ ID NO: 39891 - DNA, 19 bp, Homo sapiens
  siRNA target sequence for SMARCA5 (NM_003601.2,1446-1464).
gactacaaatagactatta

SEQ ID NO: 39892 - DNA, 19 bp, Homo sapiens
  siRNA target sequence for SMARCA5 (NM_003601.2,1498-1516).
gagctgtggtcacttctta

SEQ ID NO: 39893 - DNA, 19 bp, Homo sapiens
  siRNA target sequence for SMARCA5 (NM_003601.2,1503-1521).
gtggtcacttcttaacttt

SEQ ID NO: 39894 - DNA, 19 bp, Homo sapiens
  siRNA target sequence for SMARCA5 (NM_003601.2,1522-1540).
ctgttgccagatgtgttta

SEQ ID NO: 39895 - DNA, 19 bp, Homo sapiens
  siRNA target sequence for SMARCA5 (NM_003601.2,1527-1545).
gccagatgtgtttaattca

SEQ ID NO: 39896 - DNA, 19 bp, Homo sapiens
  siRNA target sequence for SMARCA5 (NM_003601.2,1562-1580).
cctggtttgatacaaacaa

SEQ ID NO: 39897 - DNA, 19 bp, Homo sapiens
  siRNA target sequence for SMARCA5 (NM_003601.2,1581-1599).
ctgccttggggatcaaaaa

SEQ ID NO: 39898 - DNA, 19 bp, Homo sapiens
  siRNA target sequence for SMARCA5 (NM_003601.2,1646-1664).
gaattaaggctgatgttga

SEQ ID NO: 39899 - DNA, 19 bp, Homo sapiens
  siRNA target sequence for SMARCA5 (NM_003601.2,1730-1748).
ggtatactcggatattaat

SEQ ID NO: 39900 - DNA, 19 bp, Homo sapiens
  siRNA target sequence for SMARCA5 (NM_003601.2,1870-1888).
ccaccttatacaacagata

SEQ ID NO: 39901 - DNA, 19 bp, Homo sapiens
  siRNA target sequence for SMARCA5 (NM_003601.2,1871-1889).
caccttatacaacagatat

SEQ ID NO: 39902 - DNA, 19 bp, Homo sapiens
  siRNA target sequence for SMARCA5 (NM_003601.2,1932-1950).
gctgctccctaagttaaaa

SEQ ID NO: 39903 - DNA, 19 bp, Homo sapiens
  siRNA target sequence for SMARCA5 (NM_003601.2,1935-1953).
gctccctaagttaaaagaa

SEQ ID NO: 39904 - DNA, 19 bp, Homo sapiens
  siRNA target sequence for SMARCA5 (NM_003601.2,1954-1972).
caaggttcacgagtactaa

SEQ ID NO: 39905 - DNA, 19 bp, Homo sapiens
  siRNA target sequence for SMARCA5 (NM_003601.2,1958-1976).
gttcacgagtactaatctt

SEQ ID NO: 39906 - DNA, 19 bp, Homo sapiens
  siRNA target sequence for SMARCA5 (NM_003601.2,1969-1987).
ctaatcttcagtcaaatga

SEQ ID NO: 39907 - DNA, 19 bp, Homo sapiens
  siRNA target sequence for SMARCA5 (NM_003601.2,2073-2091).
gagacaagactccatcaat

SEQ ID NO: 39908 - DNA, 19 bp, Homo sapiens
  siRNA target sequence for SMARCA5 (NM_003601.2,2082-2100).
ctccatcaatgcatacaat

SEQ ID NO: 39909 - DNA, 19 bp, Homo sapiens
  siRNA target sequence for SMARCA5 (NM_003601.2,2085-2103).
catcaatgcatacaatgaa

SEQ ID NO: 39910 - DNA, 19 bp, Homo sapiens
  siRNA target sequence for SMARCA5 (NM_003601.2,2105-2123).
caaacagcacaaagtttgt

SEQ ID NO: 39911 - DNA, 19 bp, Homo sapiens
  siRNA target sequence for SMARCA5 (NM_003601.2,2111-2129).
gcacaaagtttgttttcat

SEQ ID NO: 39912 - DNA, 19 bp, Homo sapiens
  siRNA target sequence for SMARCA5 (NM_003601.2,2167-2185).
gcgactgctgatgtagtaa

SEQ ID NO: 39913 - DNA, 19 bp, Homo sapiens
  siRNA target sequence for SMARCA5 (NM_003601.2,2168-2186).
cgactgctgatgtagtaat

SEQ ID NO: 39914 - DNA, 19 bp, Homo sapiens
  siRNA target sequence for SMARCA5 (NM_003601.2,2173-2191).
gctgatgtagtaattttgt

SEQ ID NO: 39915 - DNA, 19 bp, Homo sapiens
  siRNA target sequence for SMARCA5 (NM_003601.2,2174-2192).
ctgatgtagtaattttgta

SEQ ID NO: 39916 - DNA, 19 bp, Homo sapiens
  siRNA target sequence for SMARCA5 (NM_003601.2,2179-2197).
gtagtaattttgtatgatt

SEQ ID NO: 39917 - DNA, 19 bp, Homo sapiens
  siRNA target sequence for SMARCA5 (NM_003601.2,2204-2222).
ggaatccccaagtagatct

SEQ ID NO: 39918 - DNA, 19 bp, Homo sapiens
  siRNA target sequence for SMARCA5 (NM_003601.2,2205-2223).
gaatccccaagtagatctt

SEQ ID NO: 39919 - DNA, 19 bp, Homo sapiens
  siRNA target sequence for SMARCA5 (NM_003601.2,2232-2250).
ggaccgagcacatagaatt

SEQ ID NO: 39920 - DNA, 19 bp, Homo sapiens
  siRNA target sequence for SMARCA5 (NM_003601.2,2320-2338).
cgtgctgagatgaaactca

SEQ ID NO: 39921 - DNA, 19 bp, Homo sapiens
  siRNA target sequence for SMARCA5 (NM_003601.2,2339-2357).
gactggattcaatagtcat

SEQ ID NO: 39922 - DNA, 19 bp, Homo sapiens
  siRNA target sequence for SMARCA5 (NM_003601.2,2412-2430).
gcttcaaatgattagacat

SEQ ID NO: 39923 - DNA, 19 bp, Homo sapiens
  siRNA target sequence for SMARCA5 (NM_003601.2,2541-2559).
caagatgggcgaaagttca

SEQ ID NO: 39924 - DNA, 19 bp, Homo sapiens
  siRNA target sequence for SMARCA5 (NM_003601.2,2547-2565).
gggcgaaagttcacttaga

SEQ ID NO: 39925 - DNA, 19 bp, Homo sapiens
  siRNA target sequence for SMARCA5 (NM_003601.2,2548-2566).
ggcgaaagttcacttagaa

SEQ ID NO: 39926 - DNA, 19 bp, Homo sapiens
  siRNA target sequence for SMARCA5 (NM_003601.2,2549-2567).
gcgaaagttcacttagaaa

SEQ ID NO: 39927 - DNA, 19 bp, Homo sapiens
  siRNA target sequence for SMARCA5 (NM_003601.2,2685-2703).
ctatgccgttgatgcatat

SEQ ID NO: 39928 - DNA, 19 bp, Homo sapiens
  siRNA target sequence for SMARCA5 (NM_003601.2,2709-2727).
ggaagctcttcgtgttagt

SEQ ID NO: 39929 - DNA, 19 bp, Homo sapiens
  siRNA target sequence for SMARCA5 (NM_003601.2,2787-2805).
gttctttcctccacgttta

SEQ ID NO: 39930 - DNA, 19 bp, Homo sapiens
  siRNA target sequence for SMARCA5 (NM_003601.2,2824-2842).
gaaattctgttttacagaa

SEQ ID NO: 39931 - DNA, 19 bp, Homo sapiens
  siRNA target sequence for SMARCA5 (NM_003601.2,2853-2871).
gtacaaggtacctcgaaat

SEQ ID NO: 39932 - DNA, 19 bp, Homo sapiens
  siRNA target sequence for SMARCA5 (NM_003601.2,2856-2874).
caaggtacctcgaaatcct

SEQ ID NO: 39933 - DNA, 19 bp, Homo sapiens
  siRNA target sequence for SMARCA5 (NM_003601.2,2936-2954).
cccttaatgatgaagagtt

SEQ ID NO: 39934 - DNA, 19 bp, Homo sapiens
  siRNA target sequence for SMARCA5 (NM_003601.2,2937-2955).
ccttaatgatgaagagtta

SEQ ID NO: 39935 - DNA, 19 bp, Homo sapiens
  siRNA target sequence for SMARCA5 (NM_003601.2,2984-3002).
gatttaccaattggaataa

SEQ ID NO: 39936 - DNA, 19 bp, Homo sapiens
  siRNA target sequence for SMARCA5 (NM_003601.2,3036-3054).
gaagtggggtcgtgatgat

SEQ ID NO: 39937 - DNA, 19 bp, Homo sapiens
  siRNA target sequence for SMARCA5 (NM_003601.2,3039-3057).
gtggggtcgtgatgatatt

SEQ ID NO: 39938 - DNA, 19 bp, Homo sapiens
  siRNA target sequence for SMARCA5 (NM_003601.2,3041-3059).
ggggtcgtgatgatattga

SEQ ID NO: 39939 - DNA, 19 bp, Homo sapiens
  siRNA target sequence for SMARCA5 (NM_003601.2,3042-3060).
gggtcgtgatgatattgaa

SEQ ID NO: 39940 - DNA, 19 bp, Homo sapiens
  siRNA target sequence for SMARCA5 (NM_003601.2,3043-3061).
ggtcgtgatgatattgaaa

SEQ ID NO: 39941 - DNA, 19 bp, Homo sapiens
  siRNA target sequence for SMARCA5 (NM_003601.2,3184-3202).
gaggcgagaattcaaagaa

SEQ ID NO: 39942 - DNA, 19 bp, Homo sapiens
  siRNA target sequence for SMARCA5 (NM_003601.2,3264-3282).
gctgagaatatcatatggt

SEQ ID NO: 39943 - DNA, 19 bp, Homo sapiens
  siRNA target sequence for SMARCA5 (NM_003601.2,3265-3283).
ctgagaatatcatatggta

SEQ ID NO: 39944 - DNA, 19 bp, Homo sapiens
  siRNA target sequence for SMARCA5 (NM_003601.2,3310-3328).
gaagaagatcgttttctga

SEQ ID NO: 39945 - DNA, 19 bp, Homo sapiens
  siRNA target sequence for SMARCA5 (NM_003601.2,3313-3331).
gaagatcgttttctgattt

SEQ ID NO: 39946 - DNA, 19 bp, Homo sapiens
  siRNA target sequence for SMARCA5 (NM_003601.2,3450-3468).
gctccagaggagatgtaat

SEQ ID NO: 39947 - DNA, 19 bp, Homo sapiens
  siRNA target sequence for SMARCA5 (NM_003601.2,3451-3469).
ctccagaggagatgtaata

SEQ ID NO: 39948 - DNA, 19 bp, Homo sapiens
  siRNA target sequence for SMARCA5 (NM_003601.2,3454-3472).
cagaggagatgtaatacct

SEQ ID NO: 39949 - DNA, 19 bp, Homo sapiens
  siRNA target sequence for SMARCA5 (NM_003601.2,3456-3474).
gaggagatgtaatacctta

SEQ ID NO: 39950 - DNA, 19 bp, Homo sapiens
  siRNA target sequence for SMARCA5 (NM_003601.2,3458-3476).
ggagatgtaataccttaat

SEQ ID NO: 39951 - DNA, 19 bp, Homo sapiens
  siRNA target sequence for SMARCA5 (NM_003601.2,3459-3477).
gagatgtaataccttaatt

SEQ ID NO: 39952 - DNA, 19 bp, Homo sapiens
  siRNA target sequence for SMARCA5 (NM_003601.2,3551-3569).
cttcaacacagaaacgtaa

SEQ ID NO: 39953 - DNA, 19 bp, Homo sapiens
  siRNA target sequence for SMARCA5 (NM_003601.2,3554-3572).
caacacagaaacgtaaaat

SEQ ID NO: 39954 - DNA, 19 bp, Homo sapiens
  siRNA target sequence for SMARCAD1 (NM_020159.1,100-118).
cgttttcgctttgagaaaa

SEQ ID NO: 39955 - DNA, 19 bp, Homo sapiens
  siRNA target sequence for SMARCAD1 (NM_020159.1,311-329).
caagtatatcatatttcaa

SEQ ID NO: 39956 - DNA, 19 bp, Homo sapiens
  siRNA target sequence for SMARCAD1 (NM_020159.1,338-356).
gaggaatacagtatattga

SEQ ID NO: 39957 - DNA, 19 bp, Homo sapiens
  siRNA target sequence for SMARCAD1 (NM_020159.1,346-364).
cagtatattgatttgtctt

SEQ ID NO: 39958 - DNA, 19 bp, Homo sapiens
  siRNA target sequence for SMARCAD1 (NM_020159.1,376-394).
gatgtcgtttccccaaatt

SEQ ID NO: 39959 - DNA, 19 bp, Homo sapiens
  siRNA target sequence for SMARCAD1 (NM_020159.1,379-397).
gtcgtttccccaaattgct

SEQ ID NO: 39960 - DNA, 19 bp, Homo sapiens
  siRNA target sequence for SMARCAD1 (NM_020159.1,395-413).
gctccaatacagttcaaga

SEQ ID NO: 39961 - DNA, 19 bp, Homo sapiens
  siRNA target sequence for SMARCAD1 (NM_020159.1,485-503).
ctaccatggcacgtagaaa

SEQ ID NO: 39962 - DNA, 19 bp, Homo sapiens
  siRNA target sequence for SMARCAD1 (NM_020159.1,533-551).
cggaattggaagaccttaa

SEQ ID NO: 39963 - DNA, 19 bp, Homo sapiens
  siRNA target sequence for SMARCAD1 (NM_020159.1,593-611).
gaagtgacaatgatttact

SEQ ID NO: 39964 - DNA, 19 bp, Homo sapiens
  siRNA target sequence for SMARCAD1 (NM_020159.1,633-651).
cactatggatggagcaatt

SEQ ID NO: 39965 - DNA, 19 bp, Homo sapiens
  siRNA target sequence for SMARCAD1 (NM_020159.1,713-731).
cttcttcagagccatatga

SEQ ID NO: 39966 - DNA, 19 bp, Homo sapiens
  siRNA target sequence for SMARCAD1 (NM_020159.1,778-796).
gatcatggagaggaatcaa

SEQ ID NO: 39967 - DNA, 19 bp, Homo sapiens
  siRNA target sequence for SMARCAD1 (NM_020159.1,805-823).
gcagaatctagcagtaatt

SEQ ID NO: 39968 - DNA, 19 bp, Homo sapiens
  siRNA target sequence for SMARCAD1 (NM_020159.1,825-843).
ggaaaagcaggaaagtatt

SEQ ID NO: 39969 - DNA, 19 bp, Homo sapiens
  siRNA target sequence for SMARCAD1 (NM_020159.1,839-857).
gtattgtactgaaattgca

SEQ ID NO: 39970 - DNA, 19 bp, Homo sapiens
  siRNA target sequence for SMARCAD1 (NM_020159.1,1012-1030).
gtttcttcaagaagtcaaa

SEQ ID NO: 39971 - DNA, 19 bp, Homo sapiens
  siRNA target sequence for SMARCAD1 (NM_020159.1,1084-1102).
gcacaaaatggctttaaca

SEQ ID NO: 39972 - DNA, 19 bp, Homo sapiens
  siRNA target sequence for SMARCAD1 (NM_020159.1,1094-1112).
gctttaacaagaaacgtaa

SEQ ID NO: 39973 - DNA, 19 bp, Homo sapiens
  siRNA target sequence for SMARCAD1 (NM_020159.1,1202-1220).
gtagtggtgaagaagtgat

SEQ ID NO: 39974 - DNA, 19 bp, Homo sapiens
  siRNA target sequence for SMARCAD1 (NM_020159.1,1222-1240).
gaggatggctataaaggta

SEQ ID NO: 39975 - DNA, 19 bp, Homo sapiens
  siRNA target sequence for SMARCAD1 (NM_020159.1,1264-1282).
gcttcaattggtgaactta

SEQ ID NO: 39976 - DNA, 19 bp, Homo sapiens
  siRNA target sequence for SMARCAD1 (NM_020159.1,1268-1286).
caattggtgaacttacttt

SEQ ID NO: 39977 - DNA, 19 bp, Homo sapiens
  siRNA target sequence for SMARCAD1 (NM_020159.1,1374-1392).
caaaactaatggcttatca

SEQ ID NO: 39978 - DNA, 19 bp, Homo sapiens
  siRNA target sequence for SMARCAD1 (NM_020159.1,1422-1440).
gatccaagaaagagatgta

SEQ ID NO: 39979 - DNA, 19 bp, Homo sapiens
  siRNA target sequence for SMARCAD1 (NM_020159.1,1441-1459).
gttataaggcttatgaaca

SEQ ID NO: 39980 - DNA, 19 bp, Homo sapiens
  siRNA target sequence for SMARCAD1 (NM_020159.1,1500-1518).
catgcttactggaaatgga

SEQ ID NO: 39981 - DNA, 19 bp, Homo sapiens
  siRNA target sequence for SMARCAD1 (NM_020159.1,1517-1535).
gaggtggatggaacataga

SEQ ID NO: 39982 - DNA, 19 bp, Homo sapiens
  siRNA target sequence for SMARCAD1 (NM_020159.1,1534-1552).
gaacaaccttccattctaa

SEQ ID NO: 39983 - DNA, 19 bp, Homo sapiens
  siRNA target sequence for SMARCAD1 (NM_020159.1,1565-1583).
cactcaagccctatcagaa

SEQ ID NO: 39984 - DNA, 19 bp, Homo sapiens
  siRNA target sequence for SMARCAD1 (NM_020159.1,1598-1616).
ggctggcattggtacataa

SEQ ID NO: 39985 - DNA, 19 bp, Homo sapiens
  siRNA target sequence for SMARCAD1 (NM_020159.1,1599-1617).
gctggcattggtacataaa

SEQ ID NO: 39986 - DNA, 19 bp, Homo sapiens
  siRNA target sequence for SMARCAD1 (NM_020159.1,1693-1711).
ctctatcaggagggtaata

SEQ ID NO: 39987 - DNA, 19 bp, Homo sapiens
  siRNA target sequence for SMARCAD1 (NM_020159.1,1729-1747).
gttgttccagcttcaacta

SEQ ID NO: 39988 - DNA, 19 bp, Homo sapiens
  siRNA target sequence for SMARCAD1 (NM_020159.1,1735-1753).
ccagcttcaactatagata

SEQ ID NO: 39989 - DNA, 19 bp, Homo sapiens
  siRNA target sequence for SMARCAD1 (NM_020159.1,1736-1754).
cagcttcaactatagataa

SEQ ID NO: 39990 - DNA, 19 bp, Homo sapiens
  siRNA target sequence for SMARCAD1 (NM_020159.1,1738-1756).
gcttcaactatagataact

SEQ ID NO: 39991 - DNA, 19 bp, Homo sapiens
  siRNA target sequence for SMARCAD1 (NM_020159.1,1755-1773).
ctggttaagggaagttaat

SEQ ID NO: 39992 - DNA, 19 bp, Homo sapiens
  siRNA target sequence for SMARCAD1 (NM_020159.1,1758-1776).
gttaagggaagttaattta

SEQ ID NO: 39993 - DNA, 19 bp, Homo sapiens
  siRNA target sequence for SMARCAD1 (NM_020159.1,1791-1809).
gaaggtcctctgttactat

SEQ ID NO: 39994 - DNA, 19 bp, Homo sapiens
  siRNA target sequence for SMARCAD1 (NM_020159.1,1806-1824).
ctatggttctcaagaagaa

SEQ ID NO: 39995 - DNA, 19 bp, Homo sapiens
  siRNA target sequence for SMARCAD1 (NM_020159.1,1814-1832).
ctcaagaagaacgtaaaca

SEQ ID NO: 39996 - DNA, 19 bp, Homo sapiens
  siRNA target sequence for SMARCAD1 (NM_020159.1,1819-1837).
gaagaacgtaaacaaatta

SEQ ID NO: 39997 - DNA, 19 bp, Homo sapiens
  siRNA target sequence for SMARCAD1 (NM_020159.1,1822-1840).
gaacgtaaacaaattagat

SEQ ID NO: 39998 - DNA, 19 bp, Homo sapiens
  siRNA target sequence for SMARCAD1 (NM_020159.1,1853-1871).
gtagatatgaagattacaa

SEQ ID NO: 39999 - DNA, 19 bp, Homo sapiens
  siRNA target sequence for SMARCAD1 (NM_020159.1,1926-1944).
gtttcgacggctgaaactt

SEQ ID NO: 40000 - DNA, 19 bp, Homo sapiens
  siRNA target sequence for SMARCAD1 (NM_020159.1,1930-1948).
cgacggctgaaacttaatt

SEQ ID NO: 40001 - DNA, 19 bp, Homo sapiens
  siRNA target sequence for SMARCAD1 (NM_020159.1,1931-1949).
gacggctgaaacttaatta

SEQ ID NO: 40002 - DNA, 19 bp, Homo sapiens
  siRNA target sequence for SMARCAD1 (NM_020159.1,1965-1983).
gggccatatgctgaagaat

SEQ ID NO: 40003 - DNA, 19 bp, Homo sapiens
  siRNA target sequence for SMARCAD1 (NM_020159.1,1966-1984).
ggccatatgctgaagaata

SEQ ID NO: 40004 - DNA, 19 bp, Homo sapiens
  siRNA target sequence for SMARCAD1 (NM_020159.1,2002-2020).
cagcaccttatgacaatta

SEQ ID NO: 40005 - DNA, 19 bp, Homo sapiens
  siRNA target sequence for SMARCAD1 (NM_020159.1,2007-2025).
ccttatgacaattaatgca

SEQ ID NO: 40006 - DNA, 19 bp, Homo sapiens
  siRNA target sequence for SMARCAD1 (NM_020159.1,2049-2067).
cacacctgtacagaacaat

SEQ ID NO: 40007 - DNA, 19 bp, Homo sapiens
  siRNA target sequence for SMARCAD1 (NM_020159.1,2077-2095).
ctcatgtcgctgttgaatt

SEQ ID NO: 40008 - DNA, 19 bp, Homo sapiens
  siRNA target sequence for SMARCAD1 (NM_020159.1,2079-2097).
catgtcgctgttgaatttt

SEQ ID NO: 40009 - DNA, 19 bp, Homo sapiens
  siRNA target sequence for SMARCAD1 (NM_020159.1,2103-2121).
gccacacatgtttagtagt

SEQ ID NO: 40010 - DNA, 19 bp, Homo sapiens
  siRNA target sequence for SMARCAD1 (NM_020159.1,2117-2135).
gtagtagcaccagtgaaat

SEQ ID NO: 40011 - DNA, 19 bp, Homo sapiens
  siRNA target sequence for SMARCAD1 (NM_020159.1,2173-2191).
gagcaaagcatatatgaaa

SEQ ID NO: 40012 - DNA, 19 bp, Homo sapiens
  siRNA target sequence for SMARCAD1 (NM_020159.1,2203-2221).
gcacatgcaaaacaaatta

SEQ ID NO: 40013 - DNA, 19 bp, Homo sapiens
  siRNA target sequence for SMARCAD1 (NM_020159.1,2265-2283).
gcagttaccccccaagaaa

SEQ ID NO: 40014 - DNA, 19 bp, Homo sapiens
  siRNA target sequence for SMARCAD1 (NM_020159.1,2274-2292).
ccccaagaaagatcgaatt

SEQ ID NO: 40015 - DNA, 19 bp, Homo sapiens
  siRNA target sequence for SMARCAD1 (NM_020159.1,2276-2294).
ccaagaaagatcgaattga

SEQ ID NO: 40016 - DNA, 19 bp, Homo sapiens
  siRNA target sequence for SMARCAD1 (NM_020159.1,2326-2344).
ctctatttgggtcttttca

SEQ ID NO: 40017 - DNA, 19 bp, Homo sapiens
  siRNA target sequence for SMARCAD1 (NM_020159.1,2348-2366).
gattgaaaaaatctatcaa

SEQ ID NO: 40018 - DNA, 19 bp, Homo sapiens
  siRNA target sequence for SMARCAD1 (NM_020159.1,2423-2441).
ccaatcatcctttattaca

SEQ ID NO: 40019 - DNA, 19 bp, Homo sapiens
  siRNA target sequence for SMARCAD1 (NM_020159.1,2480-2498).
ctcagcttatgctaaagga

SEQ ID NO: 40020 - DNA, 19 bp, Homo sapiens
  siRNA target sequence for SMARCAD1 (NM_020159.1,2490-2508).
gctaaaggaacctacacat

SEQ ID NO: 40021 - DNA, 19 bp, Homo sapiens
  siRNA target sequence for SMARCAD1 (NM_020159.1,2516-2534).
ctaaccctgacctgatctt

SEQ ID NO: 40022 - DNA, 19 bp, Homo sapiens
  siRNA target sequence for SMARCAD1 (NM_020159.1,2553-2571).
gacagacttcgaactacat

SEQ ID NO: 40023 - DNA, 19 bp, Homo sapiens
  siRNA target sequence for SMARCAD1 (NM_020159.1,2555-2573).
cagacttcgaactacatgt

SEQ ID NO: 40024 - DNA, 19 bp, Homo sapiens
  siRNA target sequence for SMARCAD1 (NM_020159.1,2589-2607).
ccgacacattaataacttt

SEQ ID NO: 40025 - DNA, 19 bp, Homo sapiens
  siRNA target sequence for SMARCAD1 (NM_020159.1,2591-2609).
gacacattaataactttca

SEQ ID NO: 40026 - DNA, 19 bp, Homo sapiens
  siRNA target sequence for SMARCAD1 (NM_020159.1,2593-2611).
cacattaataactttcagt

SEQ ID NO: 40027 - DNA, 19 bp, Homo sapiens
  siRNA target sequence for SMARCAD1 (NM_020159.1,2610-2628).
gttagacatggacttgatt

SEQ ID NO: 40028 - DNA, 19 bp, Homo sapiens
  siRNA target sequence for SMARCAD1 (NM_020159.1,2686-2704).
ggtgatagagttgtgttat

SEQ ID NO: 40029 - DNA, 19 bp, Homo sapiens
  siRNA target sequence for SMARCAD1 (NM_020159.1,2717-2735).
ccatgatgctggatatctt

SEQ ID NO: 40030 - DNA, 19 bp, Homo sapiens
  siRNA target sequence for SMARCAD1 (NM_020159.1,2728-2746).
gatatcttagaggttctat

SEQ ID NO: 40031 - DNA, 19 bp, Homo sapiens
  siRNA target sequence for SMARCAD1 (NM_020159.1,2760-2778).
gcataggtacctcagatta

SEQ ID NO: 40032 - DNA, 19 bp, Homo sapiens
  siRNA target sequence for SMARCAD1 (NM_020159.1,2793-2811).
gatttctgaaaggattcat

SEQ ID NO: 40033 - DNA, 19 bp, Homo sapiens
  siRNA target sequence for SMARCAD1 (NM_020159.1,2798-2816).
ctgaaaggattcatctaat

SEQ ID NO: 40034 - DNA, 19 bp, Homo sapiens
  siRNA target sequence for SMARCAD1 (NM_020159.1,2809-2827).
catctaattgatgagttta

SEQ ID NO: 40035 - DNA, 19 bp, Homo sapiens
  siRNA target sequence for SMARCAD1 (NM_020159.1,2823-2841).
gtttaataccgatatggat

SEQ ID NO: 40036 - DNA, 19 bp, Homo sapiens
  siRNA target sequence for SMARCAD1 (NM_020159.1,2831-2849).
ccgatatggatatctttgt

SEQ ID NO: 40037 - DNA, 19 bp, Homo sapiens
  siRNA target sequence for SMARCAD1 (NM_020159.1,2870-2888).
ctggtggattaggaataaa

SEQ ID NO: 40038 - DNA, 19 bp, Homo sapiens
  siRNA target sequence for SMARCAD1 (NM_020159.1,2873-2891).
gtggattaggaataaatct

SEQ ID NO: 40039 - DNA, 19 bp, Homo sapiens
  siRNA target sequence for SMARCAD1 (NM_020159.1,2875-2893).
ggattaggaataaatctga

SEQ ID NO: 40040 - DNA, 19 bp, Homo sapiens
  siRNA target sequence for SMARCAD1 (NM_020159.1,2919-2937).
cgatattgactgtaatcct

SEQ ID NO: 40041 - DNA, 19 bp, Homo sapiens
  siRNA target sequence for SMARCAD1 (NM_020159.1,2920-2938).
gatattgactgtaatcctt

SEQ ID NO: 40042 - DNA, 19 bp, Homo sapiens
  siRNA target sequence for SMARCAD1 (NM_020159.1,2995-3013).
ctagttataaaactaataa

SEQ ID NO: 40043 - DNA, 19 bp, Homo sapiens
  siRNA target sequence for SMARCAD1 (NM_020159.1,3014-3032).
gccaagggacgattgaaga

SEQ ID NO: 40044 - DNA, 19 bp, Homo sapiens
  siRNA target sequence for SMARCAD1 (NM_020159.1,3020-3038).
ggacgattgaagaatccat

SEQ ID NO: 40045 - DNA, 19 bp, Homo sapiens
  siRNA target sequence for SMARCAD1 (NM_020159.1,3127-3145).
gccacattactaaaaacat

SEQ ID NO: 40046 - DNA, 19 bp, Homo sapiens
  siRNA target sequence for SMARCAD1 (NM_020159.1,3129-3147).
cacattactaaaaacatca

SEQ ID NO: 40047 - DNA, 19 bp, Homo sapiens
  siRNA target sequence for SMARCAL1 (NM_014140.2,167-185).
cgcagagctgagaagttat

SEQ ID NO: 40048 - DNA, 19 bp, Homo sapiens
  siRNA target sequence for SMARCAL1 (NM_014140.2,168-186).
gcagagctgagaagttatt

SEQ ID NO: 40049 - DNA, 19 bp, Homo sapiens
  siRNA target sequence for SMARCAL1 (NM_014140.2,250-268).
gcaaggcccatcccaaaat

SEQ ID NO: 40050 - DNA, 19 bp, Homo sapiens
  siRNA target sequence for SMARCAL1 (NM_014140.2,293-311).
gtgagccatggtgtcattt

SEQ ID NO: 40051 - DNA, 19 bp, Homo sapiens
  siRNA target sequence for SMARCAL1 (NM_014140.2,430-448).
ccacagtccacgtagtcaa

SEQ ID NO: 40052 - DNA, 19 bp, Homo sapiens
  siRNA target sequence for SMARCAL1 (NM_014140.2,451-469).
ggctctcactggaatctct

SEQ ID NO: 40053 - DNA, 19 bp, Homo sapiens
  siRNA target sequence for SMARCAL1 (NM_014140.2,574-592).
ctttgctaacccaactcat

SEQ ID NO: 40054 - DNA, 19 bp, Homo sapiens
  siRNA target sequence for SMARCAL1 (NM_014140.2,651-669).
ctcccagggatgctaagtt

SEQ ID NO: 40055 - DNA, 19 bp, Homo sapiens
  siRNA target sequence for SMARCAL1 (NM_014140.2,694-712).
cccttcggggcagaacatt

SEQ ID NO: 40056 - DNA, 19 bp, Homo sapiens
  siRNA target sequence for SMARCAL1 (NM_014140.2,695-713).
ccttcggggcagaacattt

SEQ ID NO: 40057 - DNA, 19 bp, Homo sapiens
  siRNA target sequence for SMARCAL1 (NM_014140.2,699-717).
cggggcagaacatttctta

SEQ ID NO: 40058 - DNA, 19 bp, Homo sapiens
  siRNA target sequence for SMARCAL1 (NM_014140.2,701-719).
gggcagaacatttcttaca

SEQ ID NO: 40059 - DNA, 19 bp, Homo sapiens
  siRNA target sequence for SMARCAL1 (NM_014140.2,702-720).
ggcagaacatttcttacat

SEQ ID NO: 40060 - DNA, 19 bp, Homo sapiens
  siRNA target sequence for SMARCAL1 (NM_014140.2,777-795).
cagggtcctcagtccaaaa

SEQ ID NO: 40061 - DNA, 19 bp, Homo sapiens
  siRNA target sequence for SMARCAL1 (NM_014140.2,847-865).
ggtgttgattgggtacaat

SEQ ID NO: 40062 - DNA, 19 bp, Homo sapiens
  siRNA target sequence for SMARCAL1 (NM_014140.2,858-876).
ggtacaatgcggaactcat

SEQ ID NO: 40063 - DNA, 19 bp, Homo sapiens
  siRNA target sequence for SMARCAL1 (NM_014140.2,859-877).
gtacaatgcggaactcatt

SEQ ID NO: 40064 - DNA, 19 bp, Homo sapiens
  siRNA target sequence for SMARCAL1 (NM_014140.2,895-913).
gcccagcaagaattatgat

SEQ ID NO: 40065 - DNA, 19 bp, Homo sapiens
  siRNA target sequence for SMARCAL1 (NM_014140.2,949-967).
ctatagtgccctgatgaaa

SEQ ID NO: 40066 - DNA, 19 bp, Homo sapiens
  siRNA target sequence for SMARCAL1 (NM_014140.2,1074-1092).
ctccatccctttcatttgt

SEQ ID NO: 40067 - DNA, 19 bp, Homo sapiens
  siRNA target sequence for SMARCAL1 (NM_014140.2,1076-1094).
ccatccctttcatttgtca

SEQ ID NO: 40068 - DNA, 19 bp, Homo sapiens
  siRNA target sequence for SMARCAL1 (NM_014140.2,1077-1095).
catccctttcatttgtcaa

SEQ ID NO: 40069 - DNA, 19 bp, Homo sapiens
  siRNA target sequence for SMARCAL1 (NM_014140.2,1134-1152).
cagacatcagttattcaca

SEQ ID NO: 40070 - DNA, 19 bp, Homo sapiens
  siRNA target sequence for SMARCAL1 (NM_014140.2,1153-1171).
ggaccttattgcgcttttt

SEQ ID NO: 40071 - DNA, 19 bp, Homo sapiens
  siRNA target sequence for SMARCAL1 (NM_014140.2,1154-1172).
gaccttattgcgcttttta

SEQ ID NO: 40072 - DNA, 19 bp, Homo sapiens
  siRNA target sequence for SMARCAL1 (NM_014140.2,1185-1203).
ccagaagatatgatgtcaa

SEQ ID NO: 40073 - DNA, 19 bp, Homo sapiens
  siRNA target sequence for SMARCAL1 (NM_014140.2,1229-1247).
gaagagcacagtaaactaa

SEQ ID NO: 40074 - DNA, 19 bp, Homo sapiens
  siRNA target sequence for SMARCAL1 (NM_014140.2,1387-1405).
ccccaagctcgtgtctaat

SEQ ID NO: 40075 - DNA, 19 bp, Homo sapiens
  siRNA target sequence for SMARCAL1 (NM_014140.2,1791-1809).
cagctatgccggtcctaaa

SEQ ID NO: 40076 - DNA, 19 bp, Homo sapiens
  siRNA target sequence for SMARCAL1 (NM_014140.2,1794-1812).
ctatgccggtcctaaaggt

SEQ ID NO: 40077 - DNA, 19 bp, Homo sapiens
  siRNA target sequence for SMARCAL1 (NM_014140.2,1886-1904).
gcagtcaagccaactttct

SEQ ID NO: 40078 - DNA, 19 bp, Homo sapiens
  siRNA target sequence for SMARCAL1 (NM_014140.2,2152-2170).
gaccaccaaggacaaaact

SEQ ID NO: 40079 - DNA, 19 bp, Homo sapiens
  siRNA target sequence for SMARCAL1 (NM_014140.2,2154-2172).
ccaccaaggacaaaactaa

SEQ ID NO: 40080 - DNA, 19 bp, Homo sapiens
  siRNA target sequence for SMARCAL1 (NM_014140.2,2155-2173).
caccaaggacaaaactaaa

SEQ ID NO: 40081 - DNA, 19 bp, Homo sapiens
  siRNA target sequence for SMARCAL1 (NM_014140.2,2231-2249).
ccatctgtcattgaatata

SEQ ID NO: 40082 - DNA, 19 bp, Homo sapiens
  siRNA target sequence for SMARCAL1 (NM_014140.2,2235-2253).
ctgtcattgaatatatctt

SEQ ID NO: 40083 - DNA, 19 bp, Homo sapiens
  siRNA target sequence for SMARCAL1 (NM_014140.2,2306-2324).
gtggtcctggacgcaatta

SEQ ID NO: 40084 - DNA, 19 bp, Homo sapiens
  siRNA target sequence for SMARCAL1 (NM_014140.2,2669-2687).
gggctttctgagaccaatt

SEQ ID NO: 40085 - DNA, 19 bp, Homo sapiens
  siRNA target sequence for SMARCAL1 (NM_014140.2,2706-2724).
ccactgattacctctacaa

SEQ ID NO: 40086 - DNA, 19 bp, Homo sapiens
  siRNA target sequence for SMARCAL1 (NM_014140.2,2729-2747).
ccaaagcagcagaagatct

SEQ ID NO: 40087 - DNA, 19 bp, Homo sapiens
  siRNA target sequence for SMARCAL1 (NM_014140.2,2933-2951).
gataactgggacagcttta

SEQ ID NO: 40088 - DNA, 19 bp, Homo sapiens
  siRNA target sequence for SMARCF1 (NM_006015.3,659-677).
gagccggacctgaagaact

SEQ ID NO: 40089 - DNA, 19 bp, Homo sapiens
  siRNA target sequence for SMARCF1 (NM_006015.3,1507-1525).
gccatccagtccaatggat

SEQ ID NO: 40090 - DNA, 19 bp, Homo sapiens
  siRNA target sequence for SMARCF1 (NM_006015.3,1512-1530).
ccagtccaatggatcagat

SEQ ID NO: 40091 - DNA, 19 bp, Homo sapiens
  siRNA target sequence for SMARCF1 (NM_006015.3,2166-2184).
caccgcaggagctatctca

SEQ ID NO: 40092 - DNA, 19 bp, Homo sapiens
  siRNA target sequence for SMARCF1 (NM_006015.3,2170-2188).
gcaggagctatctcaagat

SEQ ID NO: 40093 - DNA, 19 bp, Homo sapiens
  siRNA target sequence for SMARCF1 (NM_006015.3,2171-2189).
caggagctatctcaagatt

SEQ ID NO: 40094 - DNA, 19 bp, Homo sapiens
  siRNA target sequence for SMARCF1 (NM_006015.3,2173-2191).
ggagctatctcaagattca

SEQ ID NO: 40095 - DNA, 19 bp, Homo sapiens
  siRNA target sequence for SMARCF1 (NM_006015.3,2278-2296).
ctccagcttgcctgatcta

SEQ ID NO: 40096 - DNA, 19 bp, Homo sapiens
  siRNA target sequence for SMARCF1 (NM_006015.3,2281-2299).
cagcttgcctgatctatct

SEQ ID NO: 40097 - DNA, 19 bp, Homo sapiens
  siRNA target sequence for SMARCF1 (NM_006015.3,2289-2307).
ctgatctatctggttcaat

SEQ ID NO: 40098 - DNA, 19 bp, Homo sapiens
  siRNA target sequence for SMARCF1 (NM_006015.3,2377-2395).
ccaaggagagcagagtaat

SEQ ID NO: 40099 - DNA, 19 bp, Homo sapiens
  siRNA target sequence for SMARCF1 (NM_006015.3,2582-2600).
catccttccatgaaccaat

SEQ ID NO: 40100 - DNA, 19 bp, Homo sapiens
  siRNA target sequence for SMARCF1 (NM_006015.3,2590-2608).
catgaaccaatcaagcatt

SEQ ID NO: 40101 - DNA, 19 bp, Homo sapiens
  siRNA target sequence for SMARCF1 (NM_006015.3,2609-2627).
gcccaagatcgaggttata

SEQ ID NO: 40102 - DNA, 19 bp, Homo sapiens
  siRNA target sequence for SMARCF1 (NM_006015.3,2695-2713).
gccttccggaggacagata

SEQ ID NO: 40103 - DNA, 19 bp, Homo sapiens
  siRNA target sequence for SMARCF1 (NM_006015.3,2697-2715).
cttccggaggacagataca

SEQ ID NO: 40104 - DNA, 19 bp, Homo sapiens
  siRNA target sequence for SMARCF1 (NM_006015.3,2798-2816).
cccaggcagccaaactata

SEQ ID NO: 40105 - DNA, 19 bp, Homo sapiens
  siRNA target sequence for SMARCF1 (NM_006015.3,2799-2817).
ccaggcagccaaactataa

SEQ ID NO: 40106 - DNA, 19 bp, Homo sapiens
  siRNA target sequence for SMARCF1 (NM_006015.3,2850-2868).
gcatggctggaggcataaa

SEQ ID NO: 40107 - DNA, 19 bp, Homo sapiens
  siRNA target sequence for SMARCF1 (NM_006015.3,2877-2895).
gtgccggaggtcaaatgca

SEQ ID NO: 40108 - DNA, 19 bp, Homo sapiens
  siRNA target sequence for SMARCF1 (NM_006015.3,2902-2920).
gcctggcatcccaccttat

SEQ ID NO: 40109 - DNA, 19 bp, Homo sapiens
  siRNA target sequence for SMARCF1 (NM_006015.3,2976-2994).
gccctaacatggccaatat

SEQ ID NO: 40110 - DNA, 19 bp, Homo sapiens
  siRNA target sequence for SMARCF1 (NM_006015.3,3080-3098).
gctgccaactctatccaaa

SEQ ID NO: 40111 - DNA, 19 bp, Homo sapiens
  siRNA target sequence for SMARCF1 (NM_006015.3,3105-3123).
cgccaggctaccccaatat

SEQ ID NO: 40112 - DNA, 19 bp, Homo sapiens
  siRNA target sequence for SMARCF1 (NM_006015.3,3107-3125).
ccaggctaccccaatatga

SEQ ID NO: 40113 - DNA, 19 bp, Homo sapiens
  siRNA target sequence for SMARCF1 (NM_006015.3,3112-3130).
ctaccccaatatgaatcaa

SEQ ID NO: 40114 - DNA, 19 bp, Homo sapiens
  siRNA target sequence for SMARCF1 (NM_006015.3,3142-3160).
gggaactggacctccttat

SEQ ID NO: 40115 - DNA, 19 bp, Homo sapiens
  siRNA target sequence for SMARCF1 (NM_006015.3,3200-3218).
cagggacccccatattcca

SEQ ID NO: 40116 - DNA, 19 bp, Homo sapiens
  siRNA target sequence for SMARCF1 (NM_006015.3,3474-3492).
ccatgggcatgacaaatct

SEQ ID NO: 40117 - DNA, 19 bp, Homo sapiens
  siRNA target sequence for SMARCF1 (NM_006015.3,3521-3539).
ctctatcgcctctatgtgt

SEQ ID NO: 40118 - DNA, 19 bp, Homo sapiens
  siRNA target sequence for SMARCF1 (NM_006015.3,3608-3626).
ctcaatgtgggcacatcaa

SEQ ID NO: 40119 - DNA, 19 bp, Homo sapiens
  siRNA target sequence for SMARCF1 (NM_006015.3,3632-3650).
gctgccagctccttgaaaa

SEQ ID NO: 40120 - DNA, 19 bp, Homo sapiens
  siRNA target sequence for SMARCF1 (NM_006015.3,3774-3792).
ctgcgggatcaggatctat

SEQ ID NO: 40121 - DNA, 19 bp, Homo sapiens
  siRNA target sequence for SMARCF1 (NM_006015.3,3902-3920).
ggcatgagcaggagcaatt

SEQ ID NO: 40122 - DNA, 19 bp, Homo sapiens
  siRNA target sequence for SMARCF1 (NM_006015.3,3904-3922).
catgagcaggagcaattca

SEQ ID NO: 40123 - DNA, 19 bp, Homo sapiens
  siRNA target sequence for SMARCF1 (NM_006015.3,3998-4016).
gggtatcagcccagtatga

SEQ ID NO: 40124 - DNA, 19 bp, Homo sapiens
  siRNA target sequence for SMARCF1 (NM_006015.3,3999-4017).
ggtatcagcccagtatgaa

SEQ ID NO: 40125 - DNA, 19 bp, Homo sapiens
  siRNA target sequence for SMARCF1 (NM_006015.3,4000-4018).
gtatcagcccagtatgaat

SEQ ID NO: 40126 - DNA, 19 bp, Homo sapiens
  siRNA target sequence for SMARCF1 (NM_006015.3,4051-4069).
gccaaataaggatccttat

SEQ ID NO: 40127 - DNA, 19 bp, Homo sapiens
  siRNA target sequence for SMARCF1 (NM_006015.3,4091-4109).
gggagtgatcccttcatgt

SEQ ID NO: 40128 - DNA, 19 bp, Homo sapiens
  siRNA target sequence for SMARCF1 (NM_006015.3,4234-4252).
gaggacggagcctggaata

SEQ ID NO: 40129 - DNA, 19 bp, Homo sapiens
  siRNA target sequence for SMARCF1 (NM_006015.3,4281-4299).
ccccacagccgaatctcat

SEQ ID NO: 40130 - DNA, 19 bp, Homo sapiens
  siRNA target sequence for SMARCF1 (NM_006015.3,4369-4387).
gcaacgacatgattcctat

SEQ ID NO: 40131 - DNA, 19 bp, Homo sapiens
  siRNA target sequence for SMARCF1 (NM_006015.3,4379-4397).
gattcctatggcaatcagt

SEQ ID NO: 40132 - DNA, 19 bp, Homo sapiens
  siRNA target sequence for SMARCF1 (NM_006015.3,4437-4455).
gccagcagactacaatgta

SEQ ID NO: 40133 - DNA, 19 bp, Homo sapiens
  siRNA target sequence for SMARCF1 (NM_006015.3,4438-4456).
ccagcagactacaatgtat

SEQ ID NO: 40134 - DNA, 19 bp, Homo sapiens
  siRNA target sequence for SMARCF1 (NM_006015.3,4441-4459).
gcagactacaatgtatcaa

SEQ ID NO: 40135 - DNA, 19 bp, Homo sapiens
  siRNA target sequence for SMARCF1 (NM_006015.3,4483-4501).
gccaatggatggcacatat

SEQ ID NO: 40136 - DNA, 19 bp, Homo sapiens
  siRNA target sequence for SMARCF1 (NM_006015.3,4518-4536).
ggcacgaaggggagatgta

SEQ ID NO: 40137 - DNA, 19 bp, Homo sapiens
  siRNA target sequence for SMARCF1 (NM_006015.3,4520-4538).
cacgaaggggagatgtaca

SEQ ID NO: 40138 - DNA, 19 bp, Homo sapiens
  siRNA target sequence for SMARCF1 (NM_006015.3,4721-4739).
ccccagaaccaatttccat

SEQ ID NO: 40139 - DNA, 19 bp, Homo sapiens
  siRNA target sequence for SMARCF1 (NM_006015.3,4776-4794).
gcaccaatgcccagcaaaa

SEQ ID NO: 40140 - DNA, 19 bp, Homo sapiens
  siRNA target sequence for SMARCF1 (NM_006015.3,4871-4889).
cgtaatgacatgacctata

SEQ ID NO: 40141 - DNA, 19 bp, Homo sapiens
  siRNA target sequence for SMARCF1 (NM_006015.3,4872-4890).
gtaatgacatgacctataa

SEQ ID NO: 40142 - DNA, 19 bp, Homo sapiens
  siRNA target sequence for SMARCF1 (NM_006015.3,5097-5115).
caagcatgcagaatcacat

SEQ ID NO: 40143 - DNA, 19 bp, Homo sapiens
  siRNA target sequence for SMARCF1 (NM_006015.3,5337-5355).
ggaggcggctcacaatgaa

SEQ ID NO: 40144 - DNA, 19 bp, Homo sapiens
  siRNA target sequence for SMARCF1 (NM_006015.3,5338-5356).
gaggcggctcacaatgaaa

SEQ ID NO: 40145 - DNA, 19 bp, Homo sapiens
  siRNA target sequence for SMARCF1 (NM_006015.3,5340-5358).
ggcggctcacaatgaaaga

SEQ ID NO: 40146 - DNA, 19 bp, Homo sapiens
  siRNA target sequence for SMARCF1 (NM_006015.3,5342-5360).
cggctcacaatgaaagaca

SEQ ID NO: 40147 - DNA, 19 bp, Homo sapiens
  siRNA target sequence for SMARCF1 (NM_006015.3,5343-5361).
ggctcacaatgaaagacat

SEQ ID NO: 40148 - DNA, 19 bp, Homo sapiens
  siRNA target sequence for SMARCF1 (NM_006015.3,5372-5390).
gaggcatggcgggtaatga

SEQ ID NO: 40149 - DNA, 19 bp, Homo sapiens
  siRNA target sequence for SMARCF1 (NM_006015.3,5375-5393).
gcatggcgggtaatgatgt

SEQ ID NO: 40150 - DNA, 19 bp, Homo sapiens
  siRNA target sequence for SMARCF1 (NM_006015.3,5419-5437).
gagcacatgggcattagat

SEQ ID NO: 40151 - DNA, 19 bp, Homo sapiens
  siRNA target sequence for SMARCF1 (NM_006015.3,5424-5442).
catgggcattagataccat

SEQ ID NO: 40152 - DNA, 19 bp, Homo sapiens
  siRNA target sequence for SMARCF1 (NM_006015.3,5430-5448).
cattagataccatcaacat

SEQ ID NO: 40153 - DNA, 19 bp, Homo sapiens
  siRNA target sequence for SMARCF1 (NM_006015.3,5507-5525).
ctagagctccttgtagaat

SEQ ID NO: 40154 - DNA, 19 bp, Homo sapiens
  siRNA target sequence for SMARCF1 (NM_006015.3,5783-5801).
ctgatcagtaagtttgaca

SEQ ID NO: 40155 - DNA, 19 bp, Homo sapiens
  siRNA target sequence for SMARCF1 (NM_006015.3,5840-5858).
gtggtggactgctcagata

SEQ ID NO: 40156 - DNA, 19 bp, Homo sapiens
  siRNA target sequence for SMARCF1 (NM_006015.3,5845-5863).
ggactgctcagataagctt

SEQ ID NO: 40157 - DNA, 19 bp, Homo sapiens
  siRNA target sequence for SMARCF1 (NM_006015.3,6175-6193).
gagcagcaagtttccattt

SEQ ID NO: 40158 - DNA, 19 bp, Homo sapiens
  siRNA target sequence for SMARCF1 (NM_006015.3,6241-6259).
cgaaccccacagtaaggat

SEQ ID NO: 40159 - DNA, 19 bp, Homo sapiens
  siRNA target sequence for SMARCF1 (NM_006015.3,6283-6301).
ggactggcaggattctctt

SEQ ID NO: 40160 - DNA, 19 bp, Homo sapiens
  siRNA target sequence for SMARCF1 (NM_006015.3,6314-6332).
gtctgtgtgtccaatacca

SEQ ID NO: 40161 - DNA, 19 bp, Homo sapiens
  siRNA target sequence for SMARCF1 (NM_006015.3,6316-6334).
ctgtgtgtccaataccatt

SEQ ID NO: 40162 - DNA, 19 bp, Homo sapiens
  siRNA target sequence for SMARCF1 (NM_006015.3,6320-6338).
gtgtccaataccattcgaa

SEQ ID NO: 40163 - DNA, 19 bp, Homo sapiens
  siRNA target sequence for SMARCF1 (NM_006015.3,6331-6349).
cattcgaagcctgtcattt

SEQ ID NO: 40164 - DNA, 19 bp, Homo sapiens
  siRNA target sequence for SMARCF1 (NM_006015.3,6353-6371).
ccaggcaatgactttgaga

SEQ ID NO: 40165 - DNA, 19 bp, Homo sapiens
  siRNA target sequence for SMARCF1 (NM_006015.3,6449-6467).
gcaccactaacttatgaaa

SEQ ID NO: 40166 - DNA, 19 bp, Homo sapiens
  siRNA target sequence for SMARCF1 (NM_006015.3,6450-6468).
caccactaacttatgaaaa

SEQ ID NO: 40167 - DNA, 19 bp, Homo sapiens
  siRNA target sequence for SMARCF1 (NM_006015.3,6453-6471).
cactaacttatgaaaagga

SEQ ID NO: 40168 - DNA, 19 bp, Homo sapiens
  siRNA target sequence for SMARCF1 (NM_006015.3,6539-6557).
cgggaaaacaccttggtta

SEQ ID NO: 40169 - DNA, 19 bp, Homo sapiens
  siRNA target sequence for SMARCF1 (NM_006015.3,6554-6572).
gttacactcgccaacatct

SEQ ID NO: 40170 - DNA, 19 bp, Homo sapiens
  siRNA target sequence for SMARCF1 (NM_006015.3,6728-6746).
gaaaccctcagcaaactca

SEQ ID NO: 40171 - DNA, 19 bp, Homo sapiens
  siRNA target sequence for SMARCF1 (NM_006015.3,6797-6815).
cgcctggagaagttgtata

SEQ ID NO: 40172 - DNA, 19 bp, Homo sapiens
  siRNA target sequence for SMARCF1 (NM_006015.3,7044-7062).
caactagtgtggacatgat

SEQ ID NO: 40173 - DNA, 19 bp, Homo sapiens
  siRNA target sequence for SMARCF1 (NM_006015.3,7105-7123).
cgagaaccactcagagttt

SEQ ID NO: 40174 - DNA, 19 bp, Homo sapiens
  siRNA target sequence for SMARCF1 (NM_006015.3,7106-7124).
gagaaccactcagagttta

SEQ ID NO: 40175 - DNA, 19 bp, Homo sapiens
  siRNA target sequence for SMARCF1 (NM_006015.3,7108-7126).
gaaccactcagagtttact

SEQ ID NO: 40176 - DNA, 19 bp, Homo sapiens
  siRNA target sequence for SMARCF1 (NM_006015.3,7118-7136).
gagtttactctgtacgaat

SEQ ID NO: 40177 - DNA, 19 bp, Homo sapiens
  siRNA target sequence for SMARCF1 (NM_006015.3,7155-7173).
cggtatcaccgttgatgaa

SEQ ID NO: 40178 - DNA, 19 bp, Homo sapiens
  siRNA target sequence for SMARCF1 (NM_006015.3,7157-7175).
gtatcaccgttgatgaact

SEQ ID NO: 40179 - DNA, 19 bp, Homo sapiens
  siRNA target sequence for SMARCF1 (NM_006015.3,7161-7179).
caccgttgatgaactcatt

SEQ ID NO: 40180 - DNA, 19 bp, Homo sapiens
  siRNA target sequence for SMARCF1 (NM_006015.3,7171-7189).
gaactcattggtttcacaa

SEQ ID NO: 40181 - DNA, 19 bp, Homo sapiens
  siRNA target sequence for SMARCF1 (NM_006015.3,7180-7198).
ggtttcacaagtcatttgt

SEQ ID NO: 40182 - DNA, 19 bp, Homo sapiens
  siRNA target sequence for SMCX (NM_004187.1,540-558).
ggggtccgacgatttccta

SEQ ID NO: 40183 - DNA, 19 bp, Homo sapiens
  siRNA target sequence for SMCX (NM_004187.1,996-1014).
ccactacgaacgcattgtt

SEQ ID NO: 40184 - DNA, 19 bp, Homo sapiens
  siRNA target sequence for SMCX (NM_004187.1,999-1017).
ctacgaacgcattgtttat

SEQ ID NO: 40185 - DNA, 19 bp, Homo sapiens
  siRNA target sequence for SMCX (NM_004187.1,1056-1074).
gtgtaacacacgtccattt

SEQ ID NO: 40186 - DNA, 19 bp, Homo sapiens
  siRNA target sequence for SMCX (NM_004187.1,1058-1076).
gtaacacacgtccatttga

SEQ ID NO: 40187 - DNA, 19 bp, Homo sapiens
  siRNA target sequence for SMCX (NM_004187.1,1062-1080).
cacacgtccatttgataat

SEQ ID NO: 40188 - DNA, 19 bp, Homo sapiens
  siRNA target sequence for SMCX (NM_004187.1,1230-1248).
gaaaaagctacagatctat

SEQ ID NO: 40189 - DNA, 19 bp, Homo sapiens
  siRNA target sequence for SMCX (NM_004187.1,1250-1268).
gggcaggccccaagatgat

SEQ ID NO: 40190 - DNA, 19 bp, Homo sapiens
  siRNA target sequence for SMCX (NM_004187.1,1277-1295).
gcctcatggccaaagacaa

SEQ ID NO: 40191 - DNA, 19 bp, Homo sapiens
  siRNA target sequence for SMCX (NM_004187.1,1372-1390).
gtgaaggtggagtcaacat

SEQ ID NO: 40192 - DNA, 19 bp, Homo sapiens
  siRNA target sequence for SMCX (NM_004187.1,1692-1710).
ggctacccgggaatacact

SEQ ID NO: 40193 - DNA, 19 bp, Homo sapiens
  siRNA target sequence for SMCX (NM_004187.1,1726-1744).
gagatggccgactccttta

SEQ ID NO: 40194 - DNA, 19 bp, Homo sapiens
  siRNA target sequence for SMCX (NM_004187.1,1731-1749).
ggccgactcctttaaagct

SEQ ID NO: 40195 - DNA, 19 bp, Homo sapiens
  siRNA target sequence for SMCX (NM_004187.1,1809-1827).
gaggctggtaaatagcatt

SEQ ID NO: 40196 - DNA, 19 bp, Homo sapiens
  siRNA target sequence for SMCX (NM_004187.1,1890-1908).
ccctgtcagtgacagtaaa

SEQ ID NO: 40197 - DNA, 19 bp, Homo sapiens
  siRNA target sequence for SMCX (NM_004187.1,1985-2003).
ctgtactgtgccacatcaa

SEQ ID NO: 40198 - DNA, 19 bp, Homo sapiens
  siRNA target sequence for SMCX (NM_004187.1,2181-2199).
gaagctgacacctgaacta

SEQ ID NO: 40199 - DNA, 19 bp, Homo sapiens
  siRNA target sequence for SMCX (NM_004187.1,3056-3074).
gggtggctggtctacagat

SEQ ID NO: 40200 - DNA, 19 bp, Homo sapiens
  siRNA target sequence for SMCX (NM_004187.1,3894-3912).
ggagctggggttgtacaaa

SEQ ID NO: 40201 - DNA, 19 bp, Homo sapiens
  siRNA target sequence for SMCX (NM_004187.1,3895-3913).
gagctggggttgtacaaat

SEQ ID NO: 40202 - DNA, 19 bp, Homo sapiens
  siRNA target sequence for SMCY (NM_004653.2,459-477).
gtagaagttgacaatttca

SEQ ID NO: 40203 - DNA, 19 bp, Homo sapiens
  siRNA target sequence for SMCY (NM_004653.2,462-480).
gaagttgacaatttcagat

SEQ ID NO: 40204 - DNA, 19 bp, Homo sapiens
  siRNA target sequence for SMCY (NM_004653.2,490-508).
gcgtccaaaggctaaatga

SEQ ID NO: 40205 - DNA, 19 bp, Homo sapiens
  siRNA target sequence for SMCY (NM_004653.2,491-509).
cgtccaaaggctaaatgaa

SEQ ID NO: 40206 - DNA, 19 bp, Homo sapiens
  siRNA target sequence for SMCY (NM_004653.2,618-636).
gacctctacagccttagta

SEQ ID NO: 40207 - DNA, 19 bp, Homo sapiens
  siRNA target sequence for SMCY (NM_004653.2,623-641).
ctacagccttagtaagatt

SEQ ID NO: 40208 - DNA, 19 bp, Homo sapiens
  siRNA target sequence for SMCY (NM_004653.2,737-755).
ctccctgctacgatcacat

SEQ ID NO: 40209 - DNA, 19 bp, Homo sapiens
  siRNA target sequence for SMCY (NM_004653.2,743-761).
gctacgatcacattacgaa

SEQ ID NO: 40210 - DNA, 19 bp, Homo sapiens
  siRNA target sequence for SMCY (NM_004653.2,983-1001).
gctaaagaagttacagata

SEQ ID NO: 40211 - DNA, 19 bp, Homo sapiens
  siRNA target sequence for SMCY (NM_004653.2,1006-1024).
ggccaggtcccaaaatgat

SEQ ID NO: 40212 - DNA, 19 bp, Homo sapiens
  siRNA target sequence for SMCY (NM_004653.2,1031-1049).
gggccttatggctaaggat

SEQ ID NO: 40213 - DNA, 19 bp, Homo sapiens
  siRNA target sequence for SMCY (NM_004653.2,1119-1137).
ggtgggaacgtgtcatcaa

SEQ ID NO: 40214 - DNA, 19 bp, Homo sapiens
  siRNA target sequence for SMCY (NM_004653.2,1122-1140).
gggaacgtgtcatcaacat

SEQ ID NO: 40215 - DNA, 19 bp, Homo sapiens
  siRNA target sequence for SMCY (NM_004653.2,1164-1182).
gagccctgcactaagacaa

SEQ ID NO: 40216 - DNA, 19 bp, Homo sapiens
  siRNA target sequence for SMCY (NM_004653.2,1180-1198).
caaccatgcaacttcgaaa

SEQ ID NO: 40217 - DNA, 19 bp, Homo sapiens
  siRNA target sequence for SMCY (NM_004653.2,1251-1269).
cgtggggatgaagatgata

SEQ ID NO: 40218 - DNA, 19 bp, Homo sapiens
  siRNA target sequence for SMCY (NM_004653.2,1419-1437).
gctacccaggagtacagtt

SEQ ID NO: 40219 - DNA, 19 bp, Homo sapiens
  siRNA target sequence for SMCY (NM_004653.2,1420-1438).
ctacccaggagtacagttt

SEQ ID NO: 40220 - DNA, 19 bp, Homo sapiens
  siRNA target sequence for SMCY (NM_004653.2,1557-1575).
gaagacgtgacagttgaat

SEQ ID NO: 40221 - DNA, 19 bp, Homo sapiens
  siRNA target sequence for SMCY (NM_004653.2,2225-2243).
gacgttggatctcaatcta

SEQ ID NO: 40222 - DNA, 19 bp, Homo sapiens
  siRNA target sequence for SMCY (NM_004653.2,2525-2543).
ccccaccatgctgcataaa

SEQ ID NO: 40223 - DNA, 19 bp, Homo sapiens
  siRNA target sequence for SMCY (NM_004653.2,2527-2545).
ccaccatgctgcataaact

SEQ ID NO: 40224 - DNA, 19 bp, Homo sapiens
  siRNA target sequence for SMCY (NM_004653.2,2615-2633).
ccgtaaacgcagctttgaa

SEQ ID NO: 40225 - DNA, 19 bp, Homo sapiens
  siRNA target sequence for SMCY (NM_004653.2,3029-3047).
ggcgcaatggctagatgaa

SEQ ID NO: 40226 - DNA, 19 bp, Homo sapiens
  siRNA target sequence for SMCY (NM_004653.2,3031-3049).
cgcaatggctagatgaagt

SEQ ID NO: 40227 - DNA, 19 bp, Homo sapiens
  siRNA target sequence for SMCY (NM_004653.2,3790-3808).
cctcttctccgacttctat

SEQ ID NO: 40228 - DNA, 19 bp, Homo sapiens
  siRNA target sequence for SMCY (NM_004653.2,4003-4021).
ggccacgcctagagacaat

SEQ ID NO: 40229 - DNA, 19 bp, Homo sapiens
  siRNA target sequence for SMCY (NM_004653.2,4260-4278).
gaaggcagtggcaacaata

SEQ ID NO: 40230 - DNA, 19 bp, Homo sapiens
  siRNA target sequence for SMCY (NM_004653.2,4637-4655).
gggtagaaacgttgagaat

SEQ ID NO: 40231 - DNA, 19 bp, Homo sapiens
  siRNA target sequence for SMCY (NM_004653.2,4639-4657).
gtagaaacgttgagaatct

SEQ ID NO: 40232 - DNA, 19 bp, Homo sapiens
  siRNA target sequence for SMCY (NM_004653.2,4646-4664).
cgttgagaatcttgttcaa

SEQ ID NO: 40233 - DNA, 19 bp, Homo sapiens
  siRNA target sequence for SMCY (NM_004653.2,4687-4705).
ctcggagctcagggattat

SEQ ID NO: 40234 - DNA, 19 bp, Homo sapiens
  siRNA target sequence for SMCY (NM_004653.2,4691-4709).
gagctcagggattatgtct

SEQ ID NO: 40235 - DNA, 19 bp, Homo sapiens
  siRNA target sequence for SMCY (NM_004653.2,4742-4760).
gaaagcagaccgtgaaaat

SEQ ID NO: 40236 - DNA, 19 bp, Homo sapiens
  siRNA target sequence for SMYD1 (NM_198274.1,248-266).
cttggctgaaccacaagaa

SEQ ID NO: 40237 - DNA, 19 bp, Homo sapiens
  siRNA target sequence for SMYD1 (NM_198274.1,272-290).
gttcggccatcaagagata

SEQ ID NO: 40238 - DNA, 19 bp, Homo sapiens
  siRNA target sequence for SMYD1 (NM_198274.1,293-311).
ggaaggtgcccaatgagaa

SEQ ID NO: 40239 - DNA, 19 bp, Homo sapiens
  siRNA target sequence for SMYD1 (NM_198274.1,448-466).
gtggacgtggacacattct

SEQ ID NO: 40240 - DNA, 19 bp, Homo sapiens
  siRNA target sequence for SMYD1 (NM_198274.1,516-534).
gcacatcttcggagtgatt

SEQ ID NO: 40241 - DNA, 19 bp, Homo sapiens
  siRNA target sequence for SMYD1 (NM_198274.1,517-535).
cacatcttcggagtgatta

SEQ ID NO: 40242 - DNA, 19 bp, Homo sapiens
  siRNA target sequence for SMYD1 (NM_198274.1,622-640).
gactgttggcccaactgta

SEQ ID NO: 40243 - DNA, 19 bp, Homo sapiens
  siRNA target sequence for SMYD1 (NM_198274.1,630-648).
gcccaactgtactgtcata

SEQ ID NO: 40244 - DNA, 19 bp, Homo sapiens
  siRNA target sequence for SMYD1 (NM_198274.1,631-649).
cccaactgtactgtcatat

SEQ ID NO: 40245 - DNA, 19 bp, Homo sapiens
  siRNA target sequence for SMYD1 (NM_198274.1,632-650).
ccaactgtactgtcatatt

SEQ ID NO: 40246 - DNA, 19 bp, Homo sapiens
  siRNA target sequence for SMYD1 (NM_198274.1,633-651).
caactgtactgtcatattt

SEQ ID NO: 40247 - DNA, 19 bp, Homo sapiens
  siRNA target sequence for SMYD1 (NM_198274.1,669-687).
ggcagtgaaatccatgttt

SEQ ID NO: 40248 - DNA, 19 bp, Homo sapiens
  siRNA target sequence for SMYD1 (NM_198274.1,765-783).
cttcctcaacgttagtgaa

SEQ ID NO: 40249 - DNA, 19 bp, Homo sapiens
  siRNA target sequence for SMYD1 (NM_198274.1,768-786).
cctcaacgttagtgaagaa

SEQ ID NO: 40250 - DNA, 19 bp, Homo sapiens
  siRNA target sequence for SMYD1 (NM_198274.1,959-977).
ctcgttccgagggtttgta

SEQ ID NO: 40251 - DNA, 19 bp, Homo sapiens
  siRNA target sequence for SMYD1 (NM_198274.1,962-980).
gttccgagggtttgtatca

SEQ ID NO: 40252 - DNA, 19 bp, Homo sapiens
  siRNA target sequence for SMYD1 (NM_198274.1,965-983).
ccgagggtttgtatcatga

SEQ ID NO: 40253 - DNA, 19 bp, Homo sapiens
  siRNA target sequence for SMYD1 (NM_198274.1,975-993).
gtatcatgaggttgtgaaa

SEQ ID NO: 40254 - DNA, 19 bp, Homo sapiens
  siRNA target sequence for SMYD1 (NM_198274.1,1056-1074).
gcggatgctgagcattgtt

SEQ ID NO: 40255 - DNA, 19 bp, Homo sapiens
  siRNA target sequence for SMYD1 (NM_198274.1,1057-1075).
cggatgctgagcattgttt

SEQ ID NO: 40256 - DNA, 19 bp, Homo sapiens
  siRNA target sequence for SMYD1 (NM_198274.1,1130-1148).
ggatggtggacggctatat

SEQ ID NO: 40257 - DNA, 19 bp, Homo sapiens
  siRNA target sequence for SMYD1 (NM_198274.1,1212-1230).
ctggcatgctggtaacatt

SEQ ID NO: 40258 - DNA, 19 bp, Homo sapiens
  siRNA target sequence for SMYD1 (NM_198274.1,1214-1232).
ggcatgctggtaacattga

SEQ ID NO: 40259 - DNA, 19 bp, Homo sapiens
  siRNA target sequence for SMYD1 (NM_198274.1,1357-1375).
cgccagaacgaattcatgt

SEQ ID NO: 40260 - DNA, 19 bp, Homo sapiens
  siRNA target sequence for SMYD1 (NM_198274.1,1358-1376).
gccagaacgaattcatgta

SEQ ID NO: 40261 - DNA, 19 bp, Homo sapiens
  siRNA target sequence for SMYD1 (NM_198274.1,1360-1378).
cagaacgaattcatgtact

SEQ ID NO: 40262 - DNA, 19 bp, Homo sapiens
  siRNA target sequence for SNAI1 (NM_005985.2,133-151).
gctgcaggactctaatcca

SEQ ID NO: 40263 - DNA, 19 bp, Homo sapiens
  siRNA target sequence for SNAI2 (NM_003068.3,192-210).
catttcaacgcctccaaaa

SEQ ID NO: 40264 - DNA, 19 bp, Homo sapiens
  siRNA target sequence for SNAI2 (NM_003068.3,224-242).
cgaactggacacacataca

SEQ ID NO: 40265 - DNA, 19 bp, Homo sapiens
  siRNA target sequence for SNAI2 (NM_003068.3,230-248).
ggacacacatacagtgatt

SEQ ID NO: 40266 - DNA, 19 bp, Homo sapiens
  siRNA target sequence for SNAI2 (NM_003068.3,475-493).
gccccattagtgatgaaga

SEQ ID NO: 40267 - DNA, 19 bp, Homo sapiens
  siRNA target sequence for SNAI2 (NM_003068.3,529-547).
ccattgaagctgaaaagtt

SEQ ID NO: 40268 - DNA, 19 bp, Homo sapiens
  siRNA target sequence for SNAI2 (NM_003068.3,540-558).
gaaaagtttcagtgcaatt

SEQ ID NO: 40269 - DNA, 19 bp, Homo sapiens
  siRNA target sequence for SNAI2 (NM_003068.3,586-604).
ctgggctggccaaacataa

SEQ ID NO: 40270 - DNA, 19 bp, Homo sapiens
  siRNA target sequence for SNAI2 (NM_003068.3,589-607).
ggctggccaaacataagca

SEQ ID NO: 40271 - DNA, 19 bp, Homo sapiens
  siRNA target sequence for SNAI2 (NM_003068.3,699-717).
cggacccacacattacctt

SEQ ID NO: 40272 - DNA, 19 bp, Homo sapiens
  siRNA target sequence for SNAI2 (NM_003068.3,860-878).
gcagacccattctgatgta

SEQ ID NO: 40273 - DNA, 19 bp, Homo sapiens
  siRNA target sequence for SNAPC3 (NM_003084.1,91-109).
gcaactttccagagtatga

SEQ ID NO: 40274 - DNA, 19 bp, Homo sapiens
  siRNA target sequence for SNAPC3 (NM_003084.1,315-333).
gcggtgtgcggccttgata

SEQ ID NO: 40275 - DNA, 19 bp, Homo sapiens
  siRNA target sequence for SNAPC3 (NM_003084.1,316-334).
cggtgtgcggccttgataa

SEQ ID NO: 40276 - DNA, 19 bp, Homo sapiens
  siRNA target sequence for SNAPC3 (NM_003084.1,317-335).
ggtgtgcggccttgataaa

SEQ ID NO: 40277 - DNA, 19 bp, Homo sapiens
  siRNA target sequence for SNAPC3 (NM_003084.1,323-341).
cggccttgataaactgaaa

SEQ ID NO: 40278 - DNA, 19 bp, Homo sapiens
  siRNA target sequence for SNAPC3 (NM_003084.1,393-411).
gtgactttgggggttagaa

SEQ ID NO: 40279 - DNA, 19 bp, Homo sapiens
  siRNA target sequence for SNAPC3 (NM_003084.1,426-444).
catcgggaagaaaccatta

SEQ ID NO: 40280 - DNA, 19 bp, Homo sapiens
  siRNA target sequence for SNAPC3 (NM_003084.1,429-447).
cgggaagaaaccattacaa

SEQ ID NO: 40281 - DNA, 19 bp, Homo sapiens
  siRNA target sequence for SNAPC3 (NM_003084.1,431-449).
ggaagaaaccattacaata

SEQ ID NO: 40282 - DNA, 19 bp, Homo sapiens
  siRNA target sequence for SNAPC3 (NM_003084.1,468-486).
gaaacattcgtttatgaga

SEQ ID NO: 40283 - DNA, 19 bp, Homo sapiens
  siRNA target sequence for SNAPC3 (NM_003084.1,493-511).
cacatgccataggaaaaaa

SEQ ID NO: 40284 - DNA, 19 bp, Homo sapiens
  siRNA target sequence for SNAPC3 (NM_003084.1,548-566).
gcttatcctatctgtgaat

SEQ ID NO: 40285 - DNA, 19 bp, Homo sapiens
  siRNA target sequence for SNAPC3 (NM_003084.1,740-758).
caaagacctatacaaatca

SEQ ID NO: 40286 - DNA, 19 bp, Homo sapiens
  siRNA target sequence for SNAPC3 (NM_003084.1,842-860).
gtcagagtcccatgataga

SEQ ID NO: 40287 - DNA, 19 bp, Homo sapiens
  siRNA target sequence for SNAPC3 (NM_003084.1,852-870).
catgatagaggctatggaa

SEQ ID NO: 40288 - DNA, 19 bp, Homo sapiens
  siRNA target sequence for SNAPC3 (NM_003084.1,880-898).
ctgctagaatggaagattt

SEQ ID NO: 40289 - DNA, 19 bp, Homo sapiens
  siRNA target sequence for SNAPC3 (NM_003084.1,882-900).
gctagaatggaagatttca

SEQ ID NO: 40290 - DNA, 19 bp, Homo sapiens
  siRNA target sequence for SNAPC3 (NM_003084.1,890-908).
ggaagatttcaccttcaat

SEQ ID NO: 40291 - DNA, 19 bp, Homo sapiens
  siRNA target sequence for SNAPC3 (NM_003084.1,901-919).
ccttcaatgacttgtgtat

SEQ ID NO: 40292 - DNA, 19 bp, Homo sapiens
  siRNA target sequence for SNAPC3 (NM_003084.1,902-920).
cttcaatgacttgtgtatt

SEQ ID NO: 40293 - DNA, 19 bp, Homo sapiens
  siRNA target sequence for SNAPC3 (NM_003084.1,1012-1030).
gcttggataggacattgta

SEQ ID NO: 40294 - DNA, 19 bp, Homo sapiens
  siRNA target sequence for SNAPC3 (NM_003084.1,1097-1115).
cagatgggtgacgaacaat

SEQ ID NO: 40295 - DNA, 19 bp, Homo sapiens
  siRNA target sequence for SNAPC3 (NM_003084.1,1099-1117).
gatgggtgacgaacaatga

SEQ ID NO: 40296 - DNA, 19 bp, Homo sapiens
  siRNA target sequence for SNAPC3 (NM_003084.1,1133-1151).
ggacccatgcttcttttgt

SEQ ID NO: 40297 - DNA, 19 bp, Homo sapiens
  siRNA target sequence for SNAPC3 (NM_003084.1,1163-1181).
ccgaatgctgcactatgat

SEQ ID NO: 40298 - DNA, 19 bp, Homo sapiens
  siRNA target sequence for SNAPC3 (NM_003084.1,1164-1182).
cgaatgctgcactatgatt

SEQ ID NO: 40299 - DNA, 19 bp, Homo sapiens
  siRNA target sequence for SNAPC3 (NM_003084.1,1224-1242).
gttgatcctggaaccttta

SEQ ID NO: 40300 - DNA, 19 bp, Homo sapiens
  siRNA target sequence for SNX7 (NM_015976.2,298-316).
ccaacatcccctttatcaa

SEQ ID NO: 40301 - DNA, 19 bp, Homo sapiens
  siRNA target sequence for SNX7 (NM_015976.2,302-320).
catcccctttatcaatgat

SEQ ID NO: 40302 - DNA, 19 bp, Homo sapiens
  siRNA target sequence for SNX7 (NM_015976.2,379-397).
gaacctgaaagtcatgtta

SEQ ID NO: 40303 - DNA, 19 bp, Homo sapiens
  siRNA target sequence for SNX7 (NM_015976.2,410-428).
ctttcattacgtataggat

SEQ ID NO: 40304 - DNA, 19 bp, Homo sapiens
  siRNA target sequence for SNX7 (NM_015976.2,438-456).
gacatctcgtggggaattt

SEQ ID NO: 40305 - DNA, 19 bp, Homo sapiens
  siRNA target sequence for SNX7 (NM_015976.2,440-458).
catctcgtggggaatttga

SEQ ID NO: 40306 - DNA, 19 bp, Homo sapiens
  siRNA target sequence for SNX7 (NM_015976.2,451-469).
gaatttgactccagtgaat

SEQ ID NO: 40307 - DNA, 19 bp, Homo sapiens
  siRNA target sequence for SNX7 (NM_015976.2,479-497).
ggagacgatatcaagattt

SEQ ID NO: 40308 - DNA, 19 bp, Homo sapiens
  siRNA target sequence for SNX7 (NM_015976.2,482-500).
gacgatatcaagatttcct

SEQ ID NO: 40309 - DNA, 19 bp, Homo sapiens
  siRNA target sequence for SNX7 (NM_015976.2,484-502).
cgatatcaagatttccttt

SEQ ID NO: 40310 - DNA, 19 bp, Homo sapiens
  siRNA target sequence for SNX7 (NM_015976.2,527-545).
cacaccccactctgattat

SEQ ID NO: 40311 - DNA, 19 bp, Homo sapiens
  siRNA target sequence for SNX7 (NM_015976.2,531-549).
ccccactctgattattcca

SEQ ID NO: 40312 - DNA, 19 bp, Homo sapiens
  siRNA target sequence for SNX7 (NM_015976.2,582-600).
ggtggaacgctttaacgat

SEQ ID NO: 40313 - DNA, 19 bp, Homo sapiens
  siRNA target sequence for SNX7 (NM_015976.2,614-632).
cacgcaggaaggctttaca

SEQ ID NO: 40314 - DNA, 19 bp, Homo sapiens
  siRNA target sequence for SNX7 (NM_015976.2,616-634).
cgcaggaaggctttacata

SEQ ID NO: 40315 - DNA, 19 bp, Homo sapiens
  siRNA target sequence for SNX7 (NM_015976.2,617-635).
gcaggaaggctttacataa

SEQ ID NO: 40316 - DNA, 19 bp, Homo sapiens
  siRNA target sequence for SNX7 (NM_015976.2,642-660).
gaaccgaattgctgatcat

SEQ ID NO: 40317 - DNA, 19 bp, Homo sapiens
  siRNA target sequence for SNX7 (NM_015976.2,652-670).
gctgatcatccaactttaa

SEQ ID NO: 40318 - DNA, 19 bp, Homo sapiens
  siRNA target sequence for SNX7 (NM_015976.2,791-809).
caatgagaggagttaaaaa

SEQ ID NO: 40319 - DNA, 19 bp, Homo sapiens
  siRNA target sequence for SNX7 (NM_015976.2,847-865).
gaactatttagccagaaaa

SEQ ID NO: 40320 - DNA, 19 bp, Homo sapiens
  siRNA target sequence for SNX7 (NM_015976.2,887-905).
ctcagagaatttataagga

SEQ ID NO: 40321 - DNA, 19 bp, Homo sapiens
  siRNA target sequence for SNX7 (NM_015976.2,934-952).
gaatatggcccaattcata

SEQ ID NO: 40322 - DNA, 19 bp, Homo sapiens
  siRNA target sequence for SNX7 (NM_015976.2,975-993).
ggatctggttgatactcta

SEQ ID NO: 40323 - DNA, 19 bp, Homo sapiens
  siRNA target sequence for SNX7 (NM_015976.2,976-994).
gatctggttgatactctaa

SEQ ID NO: 40324 - DNA, 19 bp, Homo sapiens
  siRNA target sequence for SNX7 (NM_015976.2,1000-1018).
gttgccagctgcattgaca

SEQ ID NO: 40325 - DNA, 19 bp, Homo sapiens
  siRNA target sequence for SNX7 (NM_015976.2,1081-1099).
catgagtacgtgctttata

SEQ ID NO: 40326 - DNA, 19 bp, Homo sapiens
  siRNA target sequence for SNX7 (NM_015976.2,1086-1104).
gtacgtgctttatagtgaa

SEQ ID NO: 40327 - DNA, 19 bp, Homo sapiens
  siRNA target sequence for SNX7 (NM_015976.2,1152-1170).
ggattccaaagttgaagtt

SEQ ID NO: 40328 - DNA, 19 bp, Homo sapiens
  siRNA target sequence for SNX7 (NM_015976.2,1153-1171).
gattccaaagttgaagttt

SEQ ID NO: 40329 - DNA, 19 bp, Homo sapiens
  siRNA target sequence for SNX7 (NM_015976.2,1162-1180).
gttgaagttttgacctata

SEQ ID NO: 40330 - DNA, 19 bp, Homo sapiens
  siRNA target sequence for SNX7 (NM_015976.2,1176-1194).
ctataaaaaggcagatact

SEQ ID NO: 40331 - DNA, 19 bp, Homo sapiens
  siRNA target sequence for SNX7 (NM_015976.2,1209-1227).
ggagattggaaaacttgaa

SEQ ID NO: 40332 - DNA, 19 bp, Homo sapiens
  siRNA target sequence for SNX7 (NM_015976.2,1302-1320).
caagttagcatttacagat

SEQ ID NO: 40333 - DNA, 19 bp, Homo sapiens
  siRNA target sequence for SNX7 (NM_015976.2,1332-1350).
gaatatccattattatgaa

SEQ ID NO: 40334 - DNA, 19 bp, Homo sapiens
  siRNA target sequence for SNX7 (NM_015976.2,1368-1386).
ggagtcattccttacatca

SEQ ID NO: 40335 - DNA, 19 bp, Homo sapiens
  siRNA target sequence for SNX7 (NM_015976.2,1385-1403).
cacagaccaaccttcactt

SEQ ID NO: 40336 - DNA, 19 bp, Homo sapiens
  siRNA target sequence for SON (NM_003103.5,57-75).
ccaacatcgagcagatttt

SEQ ID NO: 40337 - DNA, 19 bp, Homo sapiens
  siRNA target sequence for SON (NM_003103.5,78-96).
ggtctttcgtggtcagtaa

SEQ ID NO: 40338 - DNA, 19 bp, Homo sapiens
  siRNA target sequence for SON (NM_003103.5,79-97).
gtctttcgtggtcagtaaa

SEQ ID NO: 40339 - DNA, 19 bp, Homo sapiens
  siRNA target sequence for SON (NM_003103.5,81-99).
ctttcgtggtcagtaaatt

SEQ ID NO: 40340 - DNA, 19 bp, Homo sapiens
  siRNA target sequence for SON (NM_003103.5,142-160).
ccagctgaatggtgaaaca

SEQ ID NO: 40341 - DNA, 19 bp, Homo sapiens
  siRNA target sequence for SON (NM_003103.5,207-225).
ccaggagtctaccaaatga

SEQ ID NO: 40342 - DNA, 19 bp, Homo sapiens
  siRNA target sequence for SON (NM_003103.5,238-256).
gaagatagaggaagtactt

SEQ ID NO: 40343 - DNA, 19 bp, Homo sapiens
  siRNA target sequence for SON (NM_003103.5,305-323).
ggctccagaaaaagtagat

SEQ ID NO: 40344 - DNA, 19 bp, Homo sapiens
  siRNA target sequence for SON (NM_003103.5,325-343).
cgtatctgtacaaacagat

SEQ ID NO: 40345 - DNA, 19 bp, Homo sapiens
  siRNA target sequence for SON (NM_003103.5,339-357).
cagatcctactgatgaaat

SEQ ID NO: 40346 - DNA, 19 bp, Homo sapiens
  siRNA target sequence for SON (NM_003103.5,353-371).
gaaattcccactaaaaagt

SEQ ID NO: 40347 - DNA, 19 bp, Homo sapiens
  siRNA target sequence for SON (NM_003103.5,449-467).
gaagaatctgagtcaaaga

SEQ ID NO: 40348 - DNA, 19 bp, Homo sapiens
  siRNA target sequence for SON (NM_003103.5,460-478).
gtcaaagacgaaatctcat

SEQ ID NO: 40349 - DNA, 19 bp, Homo sapiens
  siRNA target sequence for SON (NM_003103.5,466-484).
gacgaaatctcatgatgat

SEQ ID NO: 40350 - DNA, 19 bp, Homo sapiens
  siRNA target sequence for SON (NM_003103.5,487-505).
gaacatagatttagaatct

SEQ ID NO: 40351 - DNA, 19 bp, Homo sapiens
  siRNA target sequence for SON (NM_003103.5,490-508).
catagatttagaatctgat

SEQ ID NO: 40352 - DNA, 19 bp, Homo sapiens
  siRNA target sequence for SON (NM_003103.5,574-592).
cccatctgagaccaatgaa

SEQ ID NO: 40353 - DNA, 19 bp, Homo sapiens
  siRNA target sequence for SON (NM_003103.5,607-625).
gctagaacctcctgtagta

SEQ ID NO: 40354 - DNA, 19 bp, Homo sapiens
  siRNA target sequence for SON (NM_003103.5,689-707).
ctgtcagttgtatctacat

SEQ ID NO: 40355 - DNA, 19 bp, Homo sapiens
  siRNA target sequence for SON (NM_003103.5,756-774).
catccatgacaaagattct

SEQ ID NO: 40356 - DNA, 19 bp, Homo sapiens
  siRNA target sequence for SON (NM_003103.5,804-822).
ctacaacactggtgttgaa

SEQ ID NO: 40357 - DNA, 19 bp, Homo sapiens
  siRNA target sequence for SON (NM_003103.5,823-841).
gtcatctgagccagttgta

SEQ ID NO: 40358 - DNA, 19 bp, Homo sapiens
  siRNA target sequence for SON (NM_003103.5,828-846).
ctgagccagttgtaacaat

SEQ ID NO: 40359 - DNA, 19 bp, Homo sapiens
  siRNA target sequence for SON (NM_003103.5,830-848).
gagccagttgtaacaatgt

SEQ ID NO: 40360 - DNA, 19 bp, Homo sapiens
  siRNA target sequence for SON (NM_003103.5,832-850).
gccagttgtaacaatgtca

SEQ ID NO: 40361 - DNA, 19 bp, Homo sapiens
  siRNA target sequence for SON (NM_003103.5,849-867).
cagtggagtatcagatgaa

SEQ ID NO: 40362 - DNA, 19 bp, Homo sapiens
  siRNA target sequence for SON (NM_003103.5,902-920).
gagccatcaaagatcatgt

SEQ ID NO: 40363 - DNA, 19 bp, Homo sapiens
  siRNA target sequence for SON (NM_003103.5,930-948).
ccccagtagcaaaagtgtt

SEQ ID NO: 40364 - DNA, 19 bp, Homo sapiens
  siRNA target sequence for SON (NM_003103.5,931-949).
cccagtagcaaaagtgtta

SEQ ID NO: 40365 - DNA, 19 bp, Homo sapiens
  siRNA target sequence for SON (NM_003103.5,959-977).
gaaacccttgtggtatcat

SEQ ID NO: 40366 - DNA, 19 bp, Homo sapiens
  siRNA target sequence for SON (NM_003103.5,1389-1407).
cacagttgtcgcaggaatt

SEQ ID NO: 40367 - DNA, 19 bp, Homo sapiens
  siRNA target sequence for SON (NM_003103.5,1528-1546).
gcagcctgcggtaacagta

SEQ ID NO: 40368 - DNA, 19 bp, Homo sapiens
  siRNA target sequence for SON (NM_003103.5,1533-1551).
ctgcggtaacagtagcaat

SEQ ID NO: 40369 - DNA, 19 bp, Homo sapiens
  siRNA target sequence for SON (NM_003103.5,2085-2103).
cagcgctggaatcctataa

SEQ ID NO: 40370 - DNA, 19 bp, Homo sapiens
  siRNA target sequence for SON (NM_003103.5,2135-2153).
gtgggggagacttctgtaa

SEQ ID NO: 40371 - DNA, 19 bp, Homo sapiens
  siRNA target sequence for SON (NM_003103.5,2137-2155).
gggggagacttctgtaaca

SEQ ID NO: 40372 - DNA, 19 bp, Homo sapiens
  siRNA target sequence for SON (NM_003103.5,2179-2197).
cccagaatcccatatatta

SEQ ID NO: 40373 - DNA, 19 bp, Homo sapiens
  siRNA target sequence for SON (NM_003103.5,2183-2201).
gaatcccatatattagctt

SEQ ID NO: 40374 - DNA, 19 bp, Homo sapiens
  siRNA target sequence for SON (NM_003103.5,2212-2230).
ggagacccatatattagca

SEQ ID NO: 40375 - DNA, 19 bp, Homo sapiens
  siRNA target sequence for SON (NM_003103.5,2498-2516).
gcaactagctcaatggatt

SEQ ID NO: 40376 - DNA, 19 bp, Homo sapiens
  siRNA target sequence for SON (NM_003103.5,2534-2552).
ggcactatggactctcaaa

SEQ ID NO: 40377 - DNA, 19 bp, Homo sapiens
  siRNA target sequence for SON (NM_003103.5,2618-2636).
gcgtctagtacccaagatt

SEQ ID NO: 40378 - DNA, 19 bp, Homo sapiens
  siRNA target sequence for SON (NM_003103.5,2637-2655).
ctgctatgttgggttcaaa

SEQ ID NO: 40379 - DNA, 19 bp, Homo sapiens
  siRNA target sequence for SON (NM_003103.5,2719-2737).
gggccatgacccctataga

SEQ ID NO: 40380 - DNA, 19 bp, Homo sapiens
  siRNA target sequence for SON (NM_003103.5,2720-2738).
ggccatgacccctatagat

SEQ ID NO: 40381 - DNA, 19 bp, Homo sapiens
  siRNA target sequence for SON (NM_003103.5,2721-2739).
gccatgacccctatagatt

SEQ ID NO: 40382 - DNA, 19 bp, Homo sapiens
  siRNA target sequence for SON (NM_003103.5,2736-2754).
gattaggtcatgatgctta

SEQ ID NO: 40383 - DNA, 19 bp, Homo sapiens
  siRNA target sequence for SON (NM_003103.5,2786-2804).
catgatccctacagactaa

SEQ ID NO: 40384 - DNA, 19 bp, Homo sapiens
  siRNA target sequence for SON (NM_003103.5,2846-2864).
gcacccaggtcctatagaa

SEQ ID NO: 40385 - DNA, 19 bp, Homo sapiens
  siRNA target sequence for SON (NM_003103.5,2868-2886).
cacccaggccatataggtt

SEQ ID NO: 40386 - DNA, 19 bp, Homo sapiens
  siRNA target sequence for SON (NM_003103.5,2889-2907).
cacctagacccctgatgtt

SEQ ID NO: 40387 - DNA, 19 bp, Homo sapiens
  siRNA target sequence for SON (NM_003103.5,2909-2927).
gcatctagacgttctatga

SEQ ID NO: 40388 - DNA, 19 bp, Homo sapiens
  siRNA target sequence for SON (NM_003103.5,2910-2928).
catctagacgttctatgat

SEQ ID NO: 40389 - DNA, 19 bp, Homo sapiens
  siRNA target sequence for SON (NM_003103.5,2913-2931).
ctagacgttctatgatgat

SEQ ID NO: 40390 - DNA, 19 bp, Homo sapiens
  siRNA target sequence for SON (NM_003103.5,2985-3003).
cttatgagcggtctatgat

SEQ ID NO: 40391 - DNA, 19 bp, Homo sapiens
  siRNA target sequence for SON (NM_003103.5,3285-3303).
ctgctgatcgttcaatgat

SEQ ID NO: 40392 - DNA, 19 bp, Homo sapiens
  siRNA target sequence for SON (NM_003103.5,3290-3308).
gatcgttcaatgatgtcta

SEQ ID NO: 40393 - DNA, 19 bp, Homo sapiens
  siRNA target sequence for SON (NM_003103.5,3306-3324).
ctatggctgctgattctta

SEQ ID NO: 40394 - DNA, 19 bp, Homo sapiens
  siRNA target sequence for SON (NM_003103.5,3317-3335).
gattcttacaccgattctt

SEQ ID NO: 40395 - DNA, 19 bp, Homo sapiens
  siRNA target sequence for SON (NM_003103.5,3478-3496).
cactgagcagtcagcatta

SEQ ID NO: 40396 - DNA, 19 bp, Homo sapiens
  siRNA target sequence for SON (NM_003103.5,3572-3590).
gtgagtcaaagtgagattt

SEQ ID NO: 40397 - DNA, 19 bp, Homo sapiens
  siRNA target sequence for SON (NM_003103.5,3600-3618).
cagcagtgcctactgatta

SEQ ID NO: 40398 - DNA, 19 bp, Homo sapiens
  siRNA target sequence for SON (NM_003103.5,3633-3651).
cagatccctcagttttagt

SEQ ID NO: 40399 - DNA, 19 bp, Homo sapiens
  siRNA target sequence for SON (NM_003103.5,3692-3710).
ccagaatcttcaattacgt

SEQ ID NO: 40400 - DNA, 19 bp, Homo sapiens
  siRNA target sequence for SON (NM_003103.5,3695-3713).
gaatcttcaattacgttaa

SEQ ID NO: 40401 - DNA, 19 bp, Homo sapiens
  siRNA target sequence for SON (NM_003103.5,3761-3779).
gagagaccagtgacttgta

SEQ ID NO: 40402 - DNA, 19 bp, Homo sapiens
  siRNA target sequence for SON (NM_003103.5,3767-3785).
ccagtgacttgtatggtat

SEQ ID NO: 40403 - DNA, 19 bp, Homo sapiens
  siRNA target sequence for SON (NM_003103.5,3809-3827).
gaaccaactgtgttagcat

SEQ ID NO: 40404 - DNA, 19 bp, Homo sapiens
  siRNA target sequence for SON (NM_003103.5,3887-3905).
catgttgcctcagaagtat

SEQ ID NO: 40405 - DNA, 19 bp, Homo sapiens
  siRNA target sequence for SON (NM_003103.5,3890-3908).
gttgcctcagaagtatcta

SEQ ID NO: 40406 - DNA, 19 bp, Homo sapiens
  siRNA target sequence for SON (NM_003103.5,3893-3911).
gcctcagaagtatctacat

SEQ ID NO: 40407 - DNA, 19 bp, Homo sapiens
  siRNA target sequence for SON (NM_003103.5,4205-4223).
gtccttcaaccttctatga

SEQ ID NO: 40408 - DNA, 19 bp, Homo sapiens
  siRNA target sequence for SON (NM_003103.5,4253-4271).
gaatcgactgtgacagttt

SEQ ID NO: 40409 - DNA, 19 bp, Homo sapiens
  siRNA target sequence for SON (NM_003103.5,4257-4275).
cgactgtgacagtttcaga

SEQ ID NO: 40410 - DNA, 19 bp, Homo sapiens
  siRNA target sequence for SON (NM_003103.5,4349-4367).
ctggaatctagtatcatgt

SEQ ID NO: 40411 - DNA, 19 bp, Homo sapiens
  siRNA target sequence for SON (NM_003103.5,4352-4370).
gaatctagtatcatgtcat

SEQ ID NO: 40412 - DNA, 19 bp, Homo sapiens
  siRNA target sequence for SON (NM_003103.5,4399-4417).
ctctggtgatcaaaatctt

SEQ ID NO: 40413 - DNA, 19 bp, Homo sapiens
  siRNA target sequence for SON (NM_003103.5,4430-4448).
ggcatgcaggagattgcat

SEQ ID NO: 40414 - DNA, 19 bp, Homo sapiens
  siRNA target sequence for SON (NM_003103.5,4431-4449).
gcatgcaggagattgcatt

SEQ ID NO: 40415 - DNA, 19 bp, Homo sapiens
  siRNA target sequence for SON (NM_003103.5,4481-4499).
cacctgaaaggtgactttt

SEQ ID NO: 40416 - DNA, 19 bp, Homo sapiens
  siRNA target sequence for SON (NM_003103.5,4486-4504).
gaaaggtgacttttacgaa

SEQ ID NO: 40417 - DNA, 19 bp, Homo sapiens
  siRNA target sequence for SON (NM_003103.5,4491-4509).
gtgacttttacgaaagtga

SEQ ID NO: 40418 - DNA, 19 bp, Homo sapiens
  siRNA target sequence for SON (NM_003103.5,4495-4513).
cttttacgaaagtgaacat

SEQ ID NO: 40419 - DNA, 19 bp, Homo sapiens
  siRNA target sequence for SON (NM_003103.5,4501-4519).
cgaaagtgaacatggtata

SEQ ID NO: 40420 - DNA, 19 bp, Homo sapiens
  siRNA target sequence for SON (NM_003103.5,4630-4648).
gcccaccagtgagactaaa

SEQ ID NO: 40421 - DNA, 19 bp, Homo sapiens
  siRNA target sequence for SON (NM_003103.5,4632-4650).
ccaccagtgagactaaaca

SEQ ID NO: 40422 - DNA, 19 bp, Homo sapiens
  siRNA target sequence for SON (NM_003103.5,4653-4671).
gcacagtattggataccta

SEQ ID NO: 40423 - DNA, 19 bp, Homo sapiens
  siRNA target sequence for SON (NM_003103.5,4669-4687).
ctaccctggtgttagtgaa

SEQ ID NO: 40424 - DNA, 19 bp, Homo sapiens
  siRNA target sequence for SON (NM_003103.5,4739-4757).
gatgcaacaggaactagta

SEQ ID NO: 40425 - DNA, 19 bp, Homo sapiens
  siRNA target sequence for SON (NM_003103.5,4749-4767).
gaactagtaagggtattga

SEQ ID NO: 40426 - DNA, 19 bp, Homo sapiens
  siRNA target sequence for SON (NM_003103.5,4752-4770).
ctagtaagggtattgaatt

SEQ ID NO: 40427 - DNA, 19 bp, Homo sapiens
  siRNA target sequence for SON (NM_003103.5,4779-4797).
catctactctcagtttagt

SEQ ID NO: 40428 - DNA, 19 bp, Homo sapiens
  siRNA target sequence for SON (NM_003103.5,4811-4829).
gttgatttatctttaacta

SEQ ID NO: 40429 - DNA, 19 bp, Homo sapiens
  siRNA target sequence for SON (NM_003103.5,4899-4917).
ggcctttgcctgctaaaga

SEQ ID NO: 40430 - DNA, 19 bp, Homo sapiens
  siRNA target sequence for SON (NM_003103.5,4906-4924).
gcctgctaaagatattcat

SEQ ID NO: 40431 - DNA, 19 bp, Homo sapiens
  siRNA target sequence for SON (NM_003103.5,5054-5072).
cctccccctcctaaagaga

SEQ ID NO: 40432 - DNA, 19 bp, Homo sapiens
  siRNA target sequence for SON (NM_003103.5,5077-5095).
gcctgattcaggattttct

SEQ ID NO: 40433 - DNA, 19 bp, Homo sapiens
  siRNA target sequence for SON (NM_003103.5,5085-5103).
caggattttctgccaatat

SEQ ID NO: 40434 - DNA, 19 bp, Homo sapiens
  siRNA target sequence for SON (NM_003103.5,5096-5114).
gccaatattgaggatatta

SEQ ID NO: 40435 - DNA, 19 bp, Homo sapiens
  siRNA target sequence for SON (NM_003103.5,5149-5167).
ggacatggaacgtcttaca

SEQ ID NO: 40436 - DNA, 19 bp, Homo sapiens
  siRNA target sequence for SON (NM_003103.5,5150-5168).
gacatggaacgtcttacaa

SEQ ID NO: 40437 - DNA, 19 bp, Homo sapiens
  siRNA target sequence for SON (NM_003103.5,5182-5200).
cattgaaggacctttactt

SEQ ID NO: 40438 - DNA, 19 bp, Homo sapiens
  siRNA target sequence for SON (NM_003103.5,5231-5249).
gccagcccggttgtaagta

SEQ ID NO: 40439 - DNA, 19 bp, Homo sapiens
  siRNA target sequence for SON (NM_003103.5,5233-5251).
cagcccggttgtaagtagt

SEQ ID NO: 40440 - DNA, 19 bp, Homo sapiens
  siRNA target sequence for SON (NM_003103.5,5235-5253).
gcccggttgtaagtagtat

SEQ ID NO: 40441 - DNA, 19 bp, Homo sapiens
  siRNA target sequence for SON (NM_003103.5,5321-5339).
gacactcacgaaaaaagca

SEQ ID NO: 40442 - DNA, 19 bp, Homo sapiens
  siRNA target sequence for SON (NM_003103.5,5391-5409).
cattaagatctcgaagtaa

SEQ ID NO: 40443 - DNA, 19 bp, Homo sapiens
  siRNA target sequence for SON (NM_003103.5,5402-5420).
cgaagtaagcgttccaaat

SEQ ID NO: 40444 - DNA, 19 bp, Homo sapiens
  siRNA target sequence for SON (NM_003103.5,5410-5428).
gcgttccaaatcttctgaa

SEQ ID NO: 40445 - DNA, 19 bp, Homo sapiens
  siRNA target sequence for SON (NM_003103.5,5415-5433).
ccaaatcttctgaacacaa

SEQ ID NO: 40446 - DNA, 19 bp, Homo sapiens
  siRNA target sequence for SON (NM_003103.5,5438-5456).
cgcaagcgtaccagtgaat

SEQ ID NO: 40447 - DNA, 19 bp, Homo sapiens
  siRNA target sequence for SON (NM_003103.5,5440-5458).
caagcgtaccagtgaatct

SEQ ID NO: 40448 - DNA, 19 bp, Homo sapiens
  siRNA target sequence for SON (NM_003103.5,5459-5477).
cgttctagggcaagaaaga

SEQ ID NO: 40449 - DNA, 19 bp, Homo sapiens
  siRNA target sequence for SON (NM_003103.5,5662-5680).
cagggataaccgaaagaca

SEQ ID NO: 40450 - DNA, 19 bp, Homo sapiens
  siRNA target sequence for SON (NM_003103.5,5666-5684).
gataaccgaaagacagtta

SEQ ID NO: 40451 - DNA, 19 bp, Homo sapiens
  siRNA target sequence for SON (NM_003103.5,5708-5726).
cgtcggagtcggagtcata

SEQ ID NO: 40452 - DNA, 19 bp, Homo sapiens
  siRNA target sequence for SON (NM_003103.5,5735-5753).
cgtcgacgaaggtctagat

SEQ ID NO: 40453 - DNA, 19 bp, Homo sapiens
  siRNA target sequence for SON (NM_003103.5,5946-5964).
gaagacgaagcttcagtat

SEQ ID NO: 40454 - DNA, 19 bp, Homo sapiens
  siRNA target sequence for SON (NM_003103.5,5961-5979).
gtatctcaccagtcagatt

SEQ ID NO: 40455 - DNA, 19 bp, Homo sapiens
  siRNA target sequence for SON (NM_003103.5,5996-6014).
cccttaagaagaaggttta

SEQ ID NO: 40456 - DNA, 19 bp, Homo sapiens
  siRNA target sequence for SON (NM_003103.5,6023-6041).
cccatccgtcgtaaaagat

SEQ ID NO: 40457 - DNA, 19 bp, Homo sapiens
  siRNA target sequence for SON (NM_003103.5,6068-6086).
cccaaacgtctgacagatt

SEQ ID NO: 40458 - DNA, 19 bp, Homo sapiens
  siRNA target sequence for SON (NM_003103.5,6069-6087).
ccaaacgtctgacagattt

SEQ ID NO: 40459 - DNA, 19 bp, Homo sapiens
  siRNA target sequence for SON (NM_003103.5,6074-6092).
cgtctgacagatttggata

SEQ ID NO: 40460 - DNA, 19 bp, Homo sapiens
  siRNA target sequence for SON (NM_003103.5,6088-6106).
ggataaggctcaattactt

SEQ ID NO: 40461 - DNA, 19 bp, Homo sapiens
  siRNA target sequence for SON (NM_003103.5,6156-6174).
ctttaccaccaaacctaaa

SEQ ID NO: 40462 - DNA, 19 bp, Homo sapiens
  siRNA target sequence for SON (NM_003103.5,6177-6195).
ctgcacctccacctactat

SEQ ID NO: 40463 - DNA, 19 bp, Homo sapiens
  siRNA target sequence for SON (NM_003103.5,6202-6220).
gaaagttgctaaaaagtca

SEQ ID NO: 40464 - DNA, 19 bp, Homo sapiens
  siRNA target sequence for SON (NM_003103.5,6217-6235).
gtcaggaggagctactata

SEQ ID NO: 40465 - DNA, 19 bp, Homo sapiens
  siRNA target sequence for SON (NM_003103.5,6225-6243).
gagctactatagaagaact

SEQ ID NO: 40466 - DNA, 19 bp, Homo sapiens
  siRNA target sequence for SON (NM_003103.5,6284-6302).
gatgatgtaatagtgaata

SEQ ID NO: 40467 - DNA, 19 bp, Homo sapiens
  siRNA target sequence for SON (NM_003103.5,6306-6324).
ctcatgtttcggatgaaga

SEQ ID NO: 40468 - DNA, 19 bp, Homo sapiens
  siRNA target sequence for SON (NM_003103.5,6347-6365).
catcatccctttaaactca

SEQ ID NO: 40469 - DNA, 19 bp, Homo sapiens
  siRNA target sequence for SON (NM_003103.5,6423-6441).
caaaaagccaggtaacatt

SEQ ID NO: 40470 - DNA, 19 bp, Homo sapiens
  siRNA target sequence for SON (NM_003103.5,6429-6447).
gccaggtaacattaacaaa

SEQ ID NO: 40471 - DNA, 19 bp, Homo sapiens
  siRNA target sequence for SON (NM_003103.5,6468-6486).
gatctcaacatcggaaaaa

SEQ ID NO: 40472 - DNA, 19 bp, Homo sapiens
  siRNA target sequence for SON (NM_003103.5,6471-6489).
ctcaacatcggaaaaaaga

SEQ ID NO: 40473 - DNA, 19 bp, Homo sapiens
  siRNA target sequence for SON (NM_003103.5,6791-6809).
ggtgcccaagcctggatta

SEQ ID NO: 40474 - DNA, 19 bp, Homo sapiens
  siRNA target sequence for SON (NM_003103.5,6792-6810).
gtgcccaagcctggattaa

SEQ ID NO: 40475 - DNA, 19 bp, Homo sapiens
  siRNA target sequence for SON (NM_032195.1,1046-1064).
gcaattgaagcgctaagat

SEQ ID NO: 40476 - DNA, 19 bp, Homo sapiens
  siRNA target sequence for SON (NM_032195.1,4764-4782).
ctaaacagcgcacagtatt

SEQ ID NO: 40477 - DNA, 19 bp, Homo sapiens
  siRNA target sequence for SON (NM_032195.1,4769-4787).
cagcgcacagtattggata

SEQ ID NO: 40478 - DNA, 19 bp, Homo sapiens
  siRNA target sequence for SON (NM_032195.1,6300-6318).
cacctccacctactataga

SEQ ID NO: 40479 - DNA, 19 bp, Homo sapiens
  siRNA target sequence for SON (NM_032195.1,6309-6327).
ctactatagaagagaaagt

SEQ ID NO: 40480 - DNA, 19 bp, Homo sapiens
  siRNA target sequence for SON (NM_032195.1,6729-6747).
gggttagacgacagatgaa

SEQ ID NO: 40481 - DNA, 19 bp, Homo sapiens
  siRNA target sequence for SON (NM_032195.1,6730-6748).
ggttagacgacagatgaaa

SEQ ID NO: 40482 - DNA, 19 bp, Homo sapiens
  siRNA target sequence for SON (NM_032195.1,6749-6767).
caacccgcagcttctcatt

SEQ ID NO: 40483 - DNA, 19 bp, Homo sapiens
  siRNA target sequence for SON (NM_032195.1,6752-6770).
cccgcagcttctcatttga

SEQ ID NO: 40484 - DNA, 19 bp, Homo sapiens
  siRNA target sequence for SON (NM_032195.1,6754-6772).
cgcagcttctcatttgaca

SEQ ID NO: 40485 - DNA, 19 bp, Homo sapiens
  siRNA target sequence for SON (NM_032195.1,6769-6787).
gacagtaactcgatgcaat

SEQ ID NO: 40486 - DNA, 19 bp, Homo sapiens
  siRNA target sequence for SON (NM_032195.1,6798-6816).
gaaccaagccacaaagtga

SEQ ID NO: 40487 - DNA, 19 bp, Homo sapiens
  siRNA target sequence for SON (NM_032195.1,6805-6823).
gccacaaagtgaaaagcat

SEQ ID NO: 40488 - DNA, 19 bp, Homo sapiens
  siRNA target sequence for SON (NM_138926.1,6971-6989).
gtgccagccgtactattca

SEQ ID NO: 40489 - DNA, 19 bp, Homo sapiens
  siRNA target sequence for SON (NM_138926.1,6974-6992).
ccagccgtactattcacaa

SEQ ID NO: 40490 - DNA, 19 bp, Homo sapiens
  siRNA target sequence for SON (NM_138927.1,7288-7306).
ccttaccagacccaattgt

SEQ ID NO: 40491 - DNA, 19 bp, Homo sapiens
  siRNA target sequence for SON (NM_138927.1,7289-7307).
cttaccagacccaattgta

SEQ ID NO: 40492 - DNA, 19 bp, Homo sapiens
  siRNA target sequence for SON (NM_138927.1,7293-7311).
ccagacccaattgtatgtt

SEQ ID NO: 40493 - DNA, 19 bp, Homo sapiens
  siRNA target sequence for SOS1 (NM_005633.2,13-31).
cagctgccctacgagtttt

SEQ ID NO: 40494 - DNA, 19 bp, Homo sapiens
  siRNA target sequence for SOS1 (NM_005633.2,16-34).
ctgccctacgagtttttca

SEQ ID NO: 40495 - DNA, 19 bp, Homo sapiens
  siRNA target sequence for SOS1 (NM_005633.2,87-105).
ggtccaggggcaagttcat

SEQ ID NO: 40496 - DNA, 19 bp, Homo sapiens
  siRNA target sequence for SOS1 (NM_005633.2,110-128).
ctctcgagtctaatgatga

SEQ ID NO: 40497 - DNA, 19 bp, Homo sapiens
  siRNA target sequence for SOS1 (NM_005633.2,189-207).
gccccgaagtgcttcagat

SEQ ID NO: 40498 - DNA, 19 bp, Homo sapiens
  siRNA target sequence for SOS1 (NM_005633.2,192-210).
ccgaagtgcttcagatgta

SEQ ID NO: 40499 - DNA, 19 bp, Homo sapiens
  siRNA target sequence for SOS1 (NM_005633.2,213-231).
ggaacgtgttcaaaaaagt

SEQ ID NO: 40500 - DNA, 19 bp, Homo sapiens
  siRNA target sequence for SOS1 (NM_005633.2,294-312).
gcgaagaaaccctttatct

SEQ ID NO: 40501 - DNA, 19 bp, Homo sapiens
  siRNA target sequence for SOS1 (NM_005633.2,640-658).
caatatataagggaactaa

SEQ ID NO: 40502 - DNA, 19 bp, Homo sapiens
  siRNA target sequence for SOS1 (NM_005633.2,977-995).
caataggcgaaggtttcaa

SEQ ID NO: 40503 - DNA, 19 bp, Homo sapiens
  siRNA target sequence for SOS1 (NM_005633.2,1049-1067).
gtctccattactttgaact

SEQ ID NO: 40504 - DNA, 19 bp, Homo sapiens
  siRNA target sequence for SOS1 (NM_005633.2,1051-1069).
ctccattactttgaacttt

SEQ ID NO: 40505 - DNA, 19 bp, Homo sapiens
  siRNA target sequence for SOS1 (NM_005633.2,1211-1229).
catgtcggttttatagtca

SEQ ID NO: 40506 - DNA, 19 bp, Homo sapiens
  siRNA target sequence for SOS1 (NM_005633.2,1398-1416).
cttaatgatttgctgtaaa

SEQ ID NO: 40507 - DNA, 19 bp, Homo sapiens
  siRNA target sequence for SOS1 (NM_005633.2,1404-1422).
gatttgctgtaaatcaaat

SEQ ID NO: 40508 - DNA, 19 bp, Homo sapiens
  siRNA target sequence for SOS1 (NM_005633.2,1445-1463).
gtgctagcaatgcagaata

SEQ ID NO: 40509 - DNA, 19 bp, Homo sapiens
  siRNA target sequence for SOS1 (NM_005633.2,1459-1477).
gaatatcgtcttaaagaaa

SEQ ID NO: 40510 - DNA, 19 bp, Homo sapiens
  siRNA target sequence for SOS1 (NM_005633.2,1488-1506).
gcgaaaggtacaaattaat

SEQ ID NO: 40511 - DNA, 19 bp, Homo sapiens
  siRNA target sequence for SOS1 (NM_005633.2,1651-1669).
gaaaggatgcttgatgtaa

SEQ ID NO: 40512 - DNA, 19 bp, Homo sapiens
  siRNA target sequence for SOS1 (NM_005633.2,1659-1677).
gcttgatgtaacaatgcta

SEQ ID NO: 40513 - DNA, 19 bp, Homo sapiens
  siRNA target sequence for SOS1 (NM_005633.2,1741-1759).
gactctgaagagaatatta

SEQ ID NO: 40514 - DNA, 19 bp, Homo sapiens
  siRNA target sequence for SOS1 (NM_005633.2,1779-1797).
gcccaaggctggaattcca

SEQ ID NO: 40515 - DNA, 19 bp, Homo sapiens
  siRNA target sequence for SOS1 (NM_005633.2,1780-1798).
cccaaggctggaattccaa

SEQ ID NO: 40516 - DNA, 19 bp, Homo sapiens
  siRNA target sequence for SOS1 (NM_005633.2,1781-1799).
ccaaggctggaattccaat

SEQ ID NO: 40517 - DNA, 19 bp, Homo sapiens
  siRNA target sequence for SOS1 (NM_005633.2,1814-1832).
ctgttattaaacttataga

SEQ ID NO: 40518 - DNA, 19 bp, Homo sapiens
  siRNA target sequence for SOS1 (NM_005633.2,1816-1834).
gttattaaacttatagaga

SEQ ID NO: 40519 - DNA, 19 bp, Homo sapiens
  siRNA target sequence for SOS1 (NM_005633.2,1831-1849).
gagaggcttacgtaccata

SEQ ID NO: 40520 - DNA, 19 bp, Homo sapiens
  siRNA target sequence for SOS1 (NM_005633.2,1835-1853).
ggcttacgtaccatatgta

SEQ ID NO: 40521 - DNA, 19 bp, Homo sapiens
  siRNA target sequence for SOS1 (NM_005633.2,1870-1888).
gttcggacatttcttacaa

SEQ ID NO: 40522 - DNA, 19 bp, Homo sapiens
  siRNA target sequence for SOS1 (NM_005633.2,1912-1930).
caagaactactgagtctta

SEQ ID NO: 40523 - DNA, 19 bp, Homo sapiens
  siRNA target sequence for SOS1 (NM_005633.2,1915-1933).
gaactactgagtcttataa

SEQ ID NO: 40524 - DNA, 19 bp, Homo sapiens
  siRNA target sequence for SOS1 (NM_005633.2,1925-1943).
gtcttataatagaaaggtt

SEQ ID NO: 40525 - DNA, 19 bp, Homo sapiens
  siRNA target sequence for SOS1 (NM_005633.2,1973-1991).
ctgatcgcatagctataga

SEQ ID NO: 40526 - DNA, 19 bp, Homo sapiens
  siRNA target sequence for SOS1 (NM_005633.2,2010-2028).
gagtgcagaactgaaaaga

SEQ ID NO: 40527 - DNA, 19 bp, Homo sapiens
  siRNA target sequence for SOS1 (NM_005633.2,2051-2069).
ctgtgcaactgcgagtatt

SEQ ID NO: 40528 - DNA, 19 bp, Homo sapiens
  siRNA target sequence for SOS1 (NM_005633.2,2053-2071).
gtgcaactgcgagtattaa

SEQ ID NO: 40529 - DNA, 19 bp, Homo sapiens
  siRNA target sequence for SOS1 (NM_005633.2,2061-2079).
gcgagtattaaatgtatgt

SEQ ID NO: 40530 - DNA, 19 bp, Homo sapiens
  siRNA target sequence for SOS1 (NM_005633.2,2088-2106).
ggtagagcaccacttctat

SEQ ID NO: 40531 - DNA, 19 bp, Homo sapiens
  siRNA target sequence for SOS1 (NM_005633.2,2092-2110).
gagcaccacttctatgatt

SEQ ID NO: 40532 - DNA, 19 bp, Homo sapiens
  siRNA target sequence for SOS1 (NM_005633.2,2146-2164).
gaatttattggaacagtaa

SEQ ID NO: 40533 - DNA, 19 bp, Homo sapiens
  siRNA target sequence for SOS1 (NM_005633.2,2239-2257).
ggaccaggtcataatatta

SEQ ID NO: 40534 - DNA, 19 bp, Homo sapiens
  siRNA target sequence for SOS1 (NM_005633.2,2306-2324).
ggcacatagagacttttga

SEQ ID NO: 40535 - DNA, 19 bp, Homo sapiens
  siRNA target sequence for SOS1 (NM_005633.2,2331-2349).
caccttacacccaatagaa

SEQ ID NO: 40536 - DNA, 19 bp, Homo sapiens
  siRNA target sequence for SOS1 (NM_005633.2,2333-2351).
ccttacacccaatagaaat

SEQ ID NO: 40537 - DNA, 19 bp, Homo sapiens
  siRNA target sequence for SOS1 (NM_005633.2,2334-2352).
cttacacccaatagaaatt

SEQ ID NO: 40538 - DNA, 19 bp, Homo sapiens
  siRNA target sequence for SOS1 (NM_005633.2,2354-2372).
ctcgacaactcactttact

SEQ ID NO: 40539 - DNA, 19 bp, Homo sapiens
  siRNA target sequence for SOS1 (NM_005633.2,2359-2377).
caactcactttacttgaat

SEQ ID NO: 40540 - DNA, 19 bp, Homo sapiens
  siRNA target sequence for SOS1 (NM_005633.2,2548-2566).
gctgtggtgagtcgaatta

SEQ ID NO: 40541 - DNA, 19 bp, Homo sapiens
  siRNA target sequence for SOS1 (NM_005633.2,2549-2567).
ctgtggtgagtcgaattat

SEQ ID NO: 40542 - DNA, 19 bp, Homo sapiens
  siRNA target sequence for SOS1 (NM_005633.2,2556-2574).
gagtcgaattattgagatt

SEQ ID NO: 40543 - DNA, 19 bp, Homo sapiens
  siRNA target sequence for SOS1 (NM_005633.2,2558-2576).
gtcgaattattgagattct

SEQ ID NO: 40544 - DNA, 19 bp, Homo sapiens
  siRNA target sequence for SOS1 (NM_005633.2,2723-2741).
gtgaagatcactataagaa

SEQ ID NO: 40545 - DNA, 19 bp, Homo sapiens
  siRNA target sequence for SOS1 (NM_005633.2,2748-2766).
ggcaaaactcaggtctatt

SEQ ID NO: 40546 - DNA, 19 bp, Homo sapiens
  siRNA target sequence for SOS1 (NM_005633.2,2750-2768).
caaaactcaggtctattaa

SEQ ID NO: 40547 - DNA, 19 bp, Homo sapiens
  siRNA target sequence for SOS1 (NM_005633.2,2800-2818).
ctcactaatatcttgaaaa

SEQ ID NO: 40548 - DNA, 19 bp, Homo sapiens
  siRNA target sequence for SOS1 (NM_005633.2,2804-2822).
ctaatatcttgaaaacaga

SEQ ID NO: 40549 - DNA, 19 bp, Homo sapiens
  siRNA target sequence for SOS1 (NM_005633.2,2851-2869).
catggaaaagagcttataa

SEQ ID NO: 40550 - DNA, 19 bp, Homo sapiens
  siRNA target sequence for SOS1 (NM_005633.2,2860-2878).
gagcttataaactttagca

SEQ ID NO: 40551 - DNA, 19 bp, Homo sapiens
  siRNA target sequence for SOS1 (NM_005633.2,2937-2955).
ctgtttacgagtagaatca

SEQ ID NO: 40552 - DNA, 19 bp, Homo sapiens
  siRNA target sequence for SOS1 (NM_005633.2,2939-2957).
gtttacgagtagaatcaga

SEQ ID NO: 40553 - DNA, 19 bp, Homo sapiens
  siRNA target sequence for SOS1 (NM_005633.2,2944-2962).
cgagtagaatcagatatca

SEQ ID NO: 40554 - DNA, 19 bp, Homo sapiens
  siRNA target sequence for SOS1 (NM_005633.2,2950-2968).
gaatcagatatcaaaaggt

SEQ ID NO: 40555 - DNA, 19 bp, Homo sapiens
  siRNA target sequence for SOS1 (NM_005633.2,3009-3027).
ggaatttacagattatctt

SEQ ID NO: 40556 - DNA, 19 bp, Homo sapiens
  siRNA target sequence for SOS1 (NM_005633.2,3066-3084).
gcctctcccaagatttcca

SEQ ID NO: 40557 - DNA, 19 bp, Homo sapiens
  siRNA target sequence for SOS1 (NM_005633.2,3067-3085).
cctctcccaagatttccaa

SEQ ID NO: 40558 - DNA, 19 bp, Homo sapiens
  siRNA target sequence for SOS1 (NM_005633.2,3113-3131).
ctggtgttcgtccatcaaa

SEQ ID NO: 40559 - DNA, 19 bp, Homo sapiens
  siRNA target sequence for SOS1 (NM_005633.2,3197-3215).
gtaggatccctgaaagtga

SEQ ID NO: 40560 - DNA, 19 bp, Homo sapiens
  siRNA target sequence for SOS1 (NM_005633.2,3310-3328).
gtatttgattccgatcatt

SEQ ID NO: 40561 - DNA, 19 bp, Homo sapiens
  siRNA target sequence for SOS1 (NM_005633.2,3325-3343).
cattcgagcccttttcact

SEQ ID NO: 40562 - DNA, 19 bp, Homo sapiens
  siRNA target sequence for SOS1 (NM_005633.2,3333-3351).
cccttttcactcaagcaat

SEQ ID NO: 40563 - DNA, 19 bp, Homo sapiens
  siRNA target sequence for SOS1 (NM_005633.2,3397-3415).
gcttctgtatcatctataa

SEQ ID NO: 40564 - DNA, 19 bp, Homo sapiens
  siRNA target sequence for SOS1 (NM_005633.2,3550-3568).
cctaggcaacccacatcaa

SEQ ID NO: 40565 - DNA, 19 bp, Homo sapiens
  siRNA target sequence for SOS1 (NM_005633.2,3561-3579).
cacatcaaaagcctattca

SEQ ID NO: 40566 - DNA, 19 bp, Homo sapiens
  siRNA target sequence for SOS1 (NM_005633.2,3571-3589).
gcctattcaccacgatatt

SEQ ID NO: 40567 - DNA, 19 bp, Homo sapiens
  siRNA target sequence for SOS1 (NM_005633.2,3573-3591).
ctattcaccacgatattca

SEQ ID NO: 40568 - DNA, 19 bp, Homo sapiens
  siRNA target sequence for SOS1 (NM_005633.2,3581-3599).
cacgatattcaatatcaga

SEQ ID NO: 40569 - DNA, 19 bp, Homo sapiens
  siRNA target sequence for SOS1 (NM_005633.2,3658-3676).
gtgaggacacctgatgttt

SEQ ID NO: 40570 - DNA, 19 bp, Homo sapiens
  siRNA target sequence for SOS1 (NM_005633.2,3663-3681).
gacacctgatgttttctca

SEQ ID NO: 40571 - DNA, 19 bp, Homo sapiens
  siRNA target sequence for SOS1 (NM_005633.2,3678-3696).
ctcaagctcaccactacat

SEQ ID NO: 40572 - DNA, 19 bp, Homo sapiens
  siRNA target sequence for SOX10 (NM_006941.3,1496-1514).
gccctcaggaccctattat

SEQ ID NO: 40573 - DNA, 19 bp, Homo sapiens
  siRNA target sequence for SOX10 (NM_006941.3,1644-1662).
gagcagccagtatatacga

SEQ ID NO: 40574 - DNA, 19 bp, Homo sapiens
  siRNA target sequence for SOX11 (NM_003108.3,117-135).
cggaggagggcgaattcat

SEQ ID NO: 40575 - DNA, 19 bp, Homo sapiens
  siRNA target sequence for SOX11 (NM_003108.3,186-204).
cggcgtcgggccacatcaa

SEQ ID NO: 40576 - DNA, 19 bp, Homo sapiens
  siRNA target sequence for SOX11 (NM_003108.3,702-720).
cggtcaagtgcgtgtttct

SEQ ID NO: 40577 - DNA, 19 bp, Homo sapiens
  siRNA target sequence for SOX11 (NM_003108.3,1231-1249).
gtcgctggtggataaggat

SEQ ID NO: 40578 - DNA, 19 bp, Homo sapiens
  siRNA target sequence for SOX11 (NM_003108.3,1233-1251).
cgctggtggataaggattt

SEQ ID NO: 40579 - DNA, 19 bp, Homo sapiens
  siRNA target sequence for SOX11 (NM_003108.3,1237-1255).
ggtggataaggatttggat

SEQ ID NO: 40580 - DNA, 19 bp, Homo sapiens
  siRNA target sequence for SOX15 (NM_006942.1,1135-1153).
gctctcccactccatacaa

SEQ ID NO: 40581 - DNA, 19 bp, Homo sapiens
  siRNA target sequence for SOX17 (NM_022454.2,1076-1094).
gcgcccttcacgtgtacta

SEQ ID NO: 40582 - DNA, 19 bp, Homo sapiens
  siRNA target sequence for SOX17 (NM_022454.2,1278-1296).
ggaccgcacggaatttgaa

SEQ ID NO: 40583 - DNA, 19 bp, Homo sapiens
  siRNA target sequence for SOX17 (NM_022454.2,1283-1301).
gcacggaatttgaacagta

SEQ ID NO: 40584 - DNA, 19 bp, Homo sapiens
  siRNA target sequence for SOX17 (NM_022454.2,1284-1302).
cacggaatttgaacagtat

SEQ ID NO: 40585 - DNA, 19 bp, Homo sapiens
  siRNA target sequence for SOX17 (NM_022454.2,1286-1304).
cggaatttgaacagtatct

SEQ ID NO: 40586 - DNA, 19 bp, Homo sapiens
  siRNA target sequence for SOX17 (NM_022454.2,1347-1365).
gcatgactccggtgtgaat

SEQ ID NO: 40587 - DNA, 19 bp, Homo sapiens
  siRNA target sequence for SOX17 (NM_022454.2,1407-1425).
cgccagctccgcggtatat

SEQ ID NO: 40588 - DNA, 19 bp, Homo sapiens
  siRNA target sequence for SOX17 (NM_022454.2,1419-1437).
ggtatattactgcaactat

SEQ ID NO: 40589 - DNA, 19 bp, Homo sapiens
  siRNA target sequence for SOX18 (NM_018419.2,943-961).
cgctcgctggcctgtacta

SEQ ID NO: 40590 - DNA, 19 bp, Homo sapiens
  siRNA target sequence for SOX18 (NM_018419.2,1224-1242).
gccagcagcgcggtctatt

SEQ ID NO: 40591 - DNA, 19 bp, Homo sapiens
  siRNA target sequence for SOX18 (NM_018419.2,1225-1243).
ccagcagcgcggtctatta

SEQ ID NO: 40592 - DNA, 19 bp, Homo sapiens
  siRNA target sequence for SOX21 (NM_007084.1,517-535).
ctcgacctgggctccaaaa

SEQ ID NO: 40593 - DNA, 19 bp, Homo sapiens
  siRNA target sequence for SOX3 (NM_005634.2,947-965).
gcgctcagagctacatgaa

SEQ ID NO: 40594 - DNA, 19 bp, Homo sapiens
  siRNA target sequence for SOX3 (NM_005634.2,1106-1124).
ccatgggctcggtagtgaa

SEQ ID NO: 40595 - DNA, 19 bp, Homo sapiens
  siRNA target sequence for SOX30 (NM_007017.2,412-430).
gtcgagggcacctcctttt

SEQ ID NO: 40596 - DNA, 19 bp, Homo sapiens
  siRNA target sequence for SOX30 (NM_007017.2,731-749).
ccctggcgctgcatgtcaa

SEQ ID NO: 40597 - DNA, 19 bp, Homo sapiens
  siRNA target sequence for SOX30 (NM_007017.2,963-981).
ccgagaaggtgtgatcaaa

SEQ ID NO: 40598 - DNA, 19 bp, Homo sapiens
  siRNA target sequence for SOX30 (NM_007017.2,1181-1199).
cttcagagctgataagatt

SEQ ID NO: 40599 - DNA, 19 bp, Homo sapiens
  siRNA target sequence for SOX30 (NM_007017.2,1242-1260).
cctactggagccttctgta

SEQ ID NO: 40600 - DNA, 19 bp, Homo sapiens
  siRNA target sequence for SOX30 (NM_007017.2,1243-1261).
ctactggagccttctgtaa

SEQ ID NO: 40601 - DNA, 19 bp, Homo sapiens
  siRNA target sequence for SOX30 (NM_007017.2,1246-1264).
ctggagccttctgtaaaaa

SEQ ID NO: 40602 - DNA, 19 bp, Homo sapiens
  siRNA target sequence for SOX30 (NM_007017.2,1325-1343).
ccttcagtaaggacagaaa

SEQ ID NO: 40603 - DNA, 19 bp, Homo sapiens
  siRNA target sequence for SOX30 (NM_007017.2,1329-1347).
cagtaaggacagaaatggt

SEQ ID NO: 40604 - DNA, 19 bp, Homo sapiens
  siRNA target sequence for SOX30 (NM_007017.2,1399-1417).
ccagcactagccaaagcta

SEQ ID NO: 40605 - DNA, 19 bp, Homo sapiens
  siRNA target sequence for SOX30 (NM_007017.2,1400-1418).
cagcactagccaaagctaa

SEQ ID NO: 40606 - DNA, 19 bp, Homo sapiens
  siRNA target sequence for SOX30 (NM_007017.2,1503-1521).
cgatgaagcacaaaagatt

SEQ ID NO: 40607 - DNA, 19 bp, Homo sapiens
  siRNA target sequence for SOX30 (NM_007017.2,1571-1589).
cagggaagcgaaaacgatt

SEQ ID NO: 40608 - DNA, 19 bp, Homo sapiens
  siRNA target sequence for SOX30 (NM_007017.2,1590-1608).
ccctctaagtgtttccaat

SEQ ID NO: 40609 - DNA, 19 bp, Homo sapiens
  siRNA target sequence for SOX30 (NM_007017.2,1616-1634).
ctggtaccacacagaatat

SEQ ID NO: 40610 - DNA, 19 bp, Homo sapiens
  siRNA target sequence for SOX30 (NM_007017.2,1618-1636).
ggtaccacacagaatatca

SEQ ID NO: 40611 - DNA, 19 bp, Homo sapiens
  siRNA target sequence for SOX30 (NM_007017.2,1619-1637).
gtaccacacagaatatcat

SEQ ID NO: 40612 - DNA, 19 bp, Homo sapiens
  siRNA target sequence for SOX30 (NM_007017.2,1629-1647).
gaatatcatctctacaaat

SEQ ID NO: 40613 - DNA, 19 bp, Homo sapiens
  siRNA target sequence for SOX30 (NM_007017.2,1716-1734).
cactcatccagttgtacat

SEQ ID NO: 40614 - DNA, 19 bp, Homo sapiens
  siRNA target sequence for SOX30 (NM_007017.2,1752-1770).
ccctttggctatggaaatt

SEQ ID NO: 40615 - DNA, 19 bp, Homo sapiens
  siRNA target sequence for SOX30 (NM_007017.2,1764-1782).
ggaaattttccgagttcaa

SEQ ID NO: 40616 - DNA, 19 bp, Homo sapiens
  siRNA target sequence for SOX30 (NM_007017.2,1765-1783).
gaaattttccgagttcaat

SEQ ID NO: 40617 - DNA, 19 bp, Homo sapiens
  siRNA target sequence for SOX30 (NM_007017.2,1784-1802).
gccagaatgccttagttat

SEQ ID NO: 40618 - DNA, 19 bp, Homo sapiens
  siRNA target sequence for SOX30 (NM_007017.2,1786-1804).
cagaatgccttagttatta

SEQ ID NO: 40619 - DNA, 19 bp, Homo sapiens
  siRNA target sequence for SOX30 (NM_007017.2,1819-1837).
caaaacatgagggtatctt

SEQ ID NO: 40620 - DNA, 19 bp, Homo sapiens
  siRNA target sequence for SOX30 (NM_007017.2,1827-1845).
gagggtatcttttcaactt

SEQ ID NO: 40621 - DNA, 19 bp, Homo sapiens
  siRNA target sequence for SOX30 (NM_178424.1,1883-1901).
ctgggccttcccaaacaga

SEQ ID NO: 40622 - DNA, 19 bp, Homo sapiens
  siRNA target sequence for SOX30 (NM_178424.1,1971-1989).
caacaggatttcaagtagt

SEQ ID NO: 40623 - DNA, 19 bp, Homo sapiens
  siRNA target sequence for SOX30 (NM_178424.1,2029-2047).
caacctcctagggagtatt

SEQ ID NO: 40624 - DNA, 19 bp, Homo sapiens
  siRNA target sequence for SOX30 (NM_178424.1,2174-2192).
cttttcatcacccttactt

SEQ ID NO: 40625 - DNA, 19 bp, Homo sapiens
  siRNA target sequence for SOX30 (NM_178424.1,2322-2340).
gggtatcttttcaacttta

SEQ ID NO: 40626 - DNA, 19 bp, Homo sapiens
  siRNA target sequence for SOX30 (NM_178424.1,2323-2341).
ggtatcttttcaactttaa

SEQ ID NO: 40627 - DNA, 19 bp, Homo sapiens
  siRNA target sequence for SOX30 (NM_178424.1,2396-2414).
ctcggagttgtgagaacat

SEQ ID NO: 40628 - DNA, 19 bp, Homo sapiens
  siRNA target sequence for SOX30 (NM_178424.1,2398-2416).
cggagttgtgagaacatga

SEQ ID NO: 40629 - DNA, 19 bp, Homo sapiens
  siRNA target sequence for SOX30 (NM_178424.1,2399-2417).
ggagttgtgagaacatgaa

SEQ ID NO: 40630 - DNA, 19 bp, Homo sapiens
  siRNA target sequence for SOX30 (NM_178424.1,2419-2437).
ggaacttcttactataaca

SEQ ID NO: 40631 - DNA, 19 bp, Homo sapiens
  siRNA target sequence for SOX30 (NM_178424.1,2534-2552).
ctagcatccagcaagtcaa

SEQ ID NO: 40632 - DNA, 19 bp, Homo sapiens
  siRNA target sequence for SOX7 (NM_031439.2,509-527).
gccctgccggagaagagaa

SEQ ID NO: 40633 - DNA, 19 bp, Homo sapiens
  siRNA target sequence for SOX7 (NM_031439.2,722-740).
ccggagcagaccttcttct

SEQ ID NO: 40634 - DNA, 19 bp, Homo sapiens
  siRNA target sequence for SOX7 (NM_031439.2,912-930).
ccccatctcctgcctatta

SEQ ID NO: 40635 - DNA, 19 bp, Homo sapiens
  siRNA target sequence for SOX7 (NM_031439.2,914-932).
ccatctcctgcctattact

SEQ ID NO: 40636 - DNA, 19 bp, Homo sapiens
  siRNA target sequence for SOX7 (NM_031439.2,1054-1072).
ggacatggatcgcaatgaa

SEQ ID NO: 40637 - DNA, 19 bp, Homo sapiens
  siRNA target sequence for SOX7 (NM_031439.2,1055-1073).
gacatggatcgcaatgaat

SEQ ID NO: 40638 - DNA, 19 bp, Homo sapiens
  siRNA target sequence for SOX7 (NM_031439.2,1070-1088).
gaattcgaccagtatttga

SEQ ID NO: 40639 - DNA, 19 bp, Homo sapiens
  siRNA target sequence for SOX7 (NM_031439.2,1208-1226).
gccacggccacgtactaca

SEQ ID NO: 40640 - DNA, 19 bp, Homo sapiens
  siRNA target sequence for SOX9 (NM_000346.2,539-557).
gcgagcccgatctgaagaa

SEQ ID NO: 40641 - DNA, 19 bp, Homo sapiens
  siRNA target sequence for SOX9 (NM_000346.2,905-923).
ggaggaagtcggtgaagaa

SEQ ID NO: 40642 - DNA, 19 bp, Homo sapiens
  siRNA target sequence for SOX9 (NM_000346.2,1547-1565).
cccagcgaacgcacatcaa

SEQ ID NO: 40643 - DNA, 19 bp, Homo sapiens
  siRNA target sequence for SOX9 (NM_000346.2,1549-1567).
cagcgaacgcacatcaaga

SEQ ID NO: 40644 - DNA, 19 bp, Homo sapiens
  siRNA target sequence for SP1 (NM_138473.2,379-397).
cctcacagccacacaactt

SEQ ID NO: 40645 - DNA, 19 bp, Homo sapiens
  siRNA target sequence for SP1 (NM_138473.2,380-398).
ctcacagccacacaacttt

SEQ ID NO: 40646 - DNA, 19 bp, Homo sapiens
  siRNA target sequence for SP1 (NM_138473.2,413-431).
ggctggcagatcatctctt

SEQ ID NO: 40647 - DNA, 19 bp, Homo sapiens
  siRNA target sequence for SP1 (NM_138473.2,544-562).
ggctgccgctcccaactta

SEQ ID NO: 40648 - DNA, 19 bp, Homo sapiens
  siRNA target sequence for SP1 (NM_138473.2,548-566).
gccgctcccaacttacaga

SEQ ID NO: 40649 - DNA, 19 bp, Homo sapiens
  siRNA target sequence for SP1 (NM_138473.2,594-612).
gagtgatgcctaatattca

SEQ ID NO: 40650 - DNA, 19 bp, Homo sapiens
  siRNA target sequence for SP1 (NM_138473.2,598-616).
gatgcctaatattcagtat

SEQ ID NO: 40651 - DNA, 19 bp, Homo sapiens
  siRNA target sequence for SP1 (NM_138473.2,691-709).
ggatggttctggtcaaata

SEQ ID NO: 40652 - DNA, 19 bp, Homo sapiens
  siRNA target sequence for SP1 (NM_138473.2,722-740).
ggtgcaaaccaacagatta

SEQ ID NO: 40653 - DNA, 19 bp, Homo sapiens
  siRNA target sequence for SP1 (NM_138473.2,809-827).
ctccaaggcctggctaata

SEQ ID NO: 40654 - DNA, 19 bp, Homo sapiens
  siRNA target sequence for SP1 (NM_138473.2,837-855).
caggacagactcagtatgt

SEQ ID NO: 40655 - DNA, 19 bp, Homo sapiens
  siRNA target sequence for SP1 (NM_138473.2,839-857).
ggacagactcagtatgtga

SEQ ID NO: 40656 - DNA, 19 bp, Homo sapiens
  siRNA target sequence for SP1 (NM_138473.2,1021-1039).
cagcttggtatcatcacaa

SEQ ID NO: 40657 - DNA, 19 bp, Homo sapiens
  siRNA target sequence for SP1 (NM_138473.2,1067-1085).
gccaatagctactcaacta

SEQ ID NO: 40658 - DNA, 19 bp, Homo sapiens
  siRNA target sequence for SP1 (NM_138473.2,1095-1113).
ccagcaacatgggaattat

SEQ ID NO: 40659 - DNA, 19 bp, Homo sapiens
  siRNA target sequence for SP1 (NM_138473.2,1102-1120).
catgggaattatgaacttt

SEQ ID NO: 40660 - DNA, 19 bp, Homo sapiens
  siRNA target sequence for SP1 (NM_138473.2,1106-1124).
ggaattatgaactttacta

SEQ ID NO: 40661 - DNA, 19 bp, Homo sapiens
  siRNA target sequence for SP1 (NM_138473.2,1237-1255).
gcaagcaggccagcaaaaa

SEQ ID NO: 40662 - DNA, 19 bp, Homo sapiens
  siRNA target sequence for SP1 (NM_138473.2,1300-1318).
ccagcctcagctagttcaa

SEQ ID NO: 40663 - DNA, 19 bp, Homo sapiens
  siRNA target sequence for SP1 (NM_138473.2,1342-1360).
ccaagcagcaccattgtca

SEQ ID NO: 40664 - DNA, 19 bp, Homo sapiens
  siRNA target sequence for SP1 (NM_138473.2,1363-1381).
gcagacctttacaactcaa

SEQ ID NO: 40665 - DNA, 19 bp, Homo sapiens
  siRNA target sequence for SP1 (NM_138473.2,1526-1544).
ccacaagcccaaacaatca

SEQ ID NO: 40666 - DNA, 19 bp, Homo sapiens
  siRNA target sequence for SP1 (NM_138473.2,1677-1695).
caggcctccagaccattaa

SEQ ID NO: 40667 - DNA, 19 bp, Homo sapiens
  siRNA target sequence for SP1 (NM_138473.2,1680-1698).
gcctccagaccattaacct

SEQ ID NO: 40668 - DNA, 19 bp, Homo sapiens
  siRNA target sequence for SP1 (NM_138473.2,1723-1741).
ccaggtgcacccaattcaa

SEQ ID NO: 40669 - DNA, 19 bp, Homo sapiens
  siRNA target sequence for SP1 (NM_138473.2,1744-1762).
cctgccgttggctatagca

SEQ ID NO: 40670 - DNA, 19 bp, Homo sapiens
  siRNA target sequence for SP1 (NM_138473.2,1745-1763).
ctgccgttggctatagcaa

SEQ ID NO: 40671 - DNA, 19 bp, Homo sapiens
  siRNA target sequence for SP1 (NM_138473.2,1747-1765).
gccgttggctatagcaaat

SEQ ID NO: 40672 - DNA, 19 bp, Homo sapiens
  siRNA target sequence for SP1 (NM_138473.2,1949-1967).
ggggatcctggcaaaaaga

SEQ ID NO: 40673 - DNA, 19 bp, Homo sapiens
  siRNA target sequence for SP1 (NM_138473.2,2053-2071).
cgagaggccatttatgtgt

SEQ ID NO: 40674 - DNA, 19 bp, Homo sapiens
  siRNA target sequence for SP1 (NM_138473.2,2192-2210).
gaccacctgtcaaaacata

SEQ ID NO: 40675 - DNA, 19 bp, Homo sapiens
  siRNA target sequence for SP1 (NM_138473.2,2414-2432).
gcagatctgcagtccatta

SEQ ID NO: 40676 - DNA, 19 bp, Homo sapiens
  siRNA target sequence for SP1 (NM_138473.2,2422-2440).
gcagtccattaatatcagt

SEQ ID NO: 40677 - DNA, 19 bp, Homo sapiens
  siRNA target sequence for SP100 (NM_003113.2,64-82).
gaggctgaatgaatgtatt

SEQ ID NO: 40678 - DNA, 19 bp, Homo sapiens
  siRNA target sequence for SP100 (NM_003113.2,78-96).
gtatttcaccagtagcaaa

SEQ ID NO: 40679 - DNA, 19 bp, Homo sapiens
  siRNA target sequence for SP100 (NM_003113.2,119-137).
cacagccacgatttgcaaa

SEQ ID NO: 40680 - DNA, 19 bp, Homo sapiens
  siRNA target sequence for SP100 (NM_003113.2,123-141).
gccacgatttgcaaaggat

SEQ ID NO: 40681 - DNA, 19 bp, Homo sapiens
  siRNA target sequence for SP100 (NM_003113.2,173-191).
ctgctctatgacattgtat

SEQ ID NO: 40682 - DNA, 19 bp, Homo sapiens
  siRNA target sequence for SP100 (NM_003113.2,526-544).
gtctggcctccaactaagt

SEQ ID NO: 40683 - DNA, 19 bp, Homo sapiens
  siRNA target sequence for SP100 (NM_003113.2,528-546).
ctggcctccaactaagtct

SEQ ID NO: 40684 - DNA, 19 bp, Homo sapiens
  siRNA target sequence for SP100 (NM_003113.2,618-636).
gtacaaccccacctgaaaa

SEQ ID NO: 40685 - DNA, 19 bp, Homo sapiens
  siRNA target sequence for SP100 (NM_003113.2,715-733).
gctaggaagccaacaaaca

SEQ ID NO: 40686 - DNA, 19 bp, Homo sapiens
  siRNA target sequence for SP100 (NM_003113.2,765-783).
cagagtcctgcgaacaaat

SEQ ID NO: 40687 - DNA, 19 bp, Homo sapiens
  siRNA target sequence for SP100 (NM_003113.2,829-847).
cccgttgccctgtgatgaa

SEQ ID NO: 40688 - DNA, 19 bp, Homo sapiens
  siRNA target sequence for SP100 (NM_003113.2,831-849).
cgttgccctgtgatgaaga

SEQ ID NO: 40689 - DNA, 19 bp, Homo sapiens
  siRNA target sequence for SP100 (NM_003113.2,832-850).
gttgccctgtgatgaagaa

SEQ ID NO: 40690 - DNA, 19 bp, Homo sapiens
  siRNA target sequence for SP100 (NM_003113.2,904-922).
gcgactggtggatataaaa

SEQ ID NO: 40691 - DNA, 19 bp, Homo sapiens
  siRNA target sequence for SP100 (NM_003113.2,905-923).
cgactggtggatataaaaa

SEQ ID NO: 40692 - DNA, 19 bp, Homo sapiens
  siRNA target sequence for SP100 (NM_003113.2,985-1003).
ccaggcatctgacataata

SEQ ID NO: 40693 - DNA, 19 bp, Homo sapiens
  siRNA target sequence for SP100 (NM_003113.2,989-1007).
gcatctgacataatagtca

SEQ ID NO: 40694 - DNA, 19 bp, Homo sapiens
  siRNA target sequence for SP100 (NM_003113.2,1029-1047).
gatccactgacgttgatga

SEQ ID NO: 40695 - DNA, 19 bp, Homo sapiens
  siRNA target sequence for SP100 (NM_003113.2,1077-1095).
gaagtgagcctgtgatcaa

SEQ ID NO: 40696 - DNA, 19 bp, Homo sapiens
  siRNA target sequence for SP100 (NM_003113.2,1105-1123).
ccctttagaatcaaatgat

SEQ ID NO: 40697 - DNA, 19 bp, Homo sapiens
  siRNA target sequence for SP100 (NM_003113.2,1149-1167).
gctcacgaccccagattgt

SEQ ID NO: 40698 - DNA, 19 bp, Homo sapiens
  siRNA target sequence for SP100 (NM_003113.2,1316-1334).
gagaaggctcctatgactt

SEQ ID NO: 40699 - DNA, 19 bp, Homo sapiens
  siRNA target sequence for SP100 (NM_003113.2,1321-1339).
ggctcctatgacttctaga

SEQ ID NO: 40700 - DNA, 19 bp, Homo sapiens
  siRNA target sequence for SP100 (NM_003113.2,1322-1340).
gctcctatgacttctagaa

SEQ ID NO: 40701 - DNA, 19 bp, Homo sapiens
  siRNA target sequence for SP100 (NM_003113.2,1381-1399).
cagcagtagtgacttttca

SEQ ID NO: 40702 - DNA, 19 bp, Homo sapiens
  siRNA target sequence for SP100 (NM_003113.2,1475-1493).
gaacctgaaaataagaagt

SEQ ID NO: 40703 - DNA, 19 bp, Homo sapiens
  siRNA target sequence for SP100 (NM_003113.2,1557-1575).
gtcaagcatctgacatgat

SEQ ID NO: 40704 - DNA, 19 bp, Homo sapiens
  siRNA target sequence for SP100 (NM_003113.2,1562-1580).
gcatctgacatgatggata

SEQ ID NO: 40705 - DNA, 19 bp, Homo sapiens
  siRNA target sequence for SP100 (NM_003113.2,1576-1594).
ggataccatggatgttgaa

SEQ ID NO: 40706 - DNA, 19 bp, Homo sapiens
  siRNA target sequence for SP100 (NM_003113.2,1644-1662).
ggcatagatctaaagtaaa

SEQ ID NO: 40707 - DNA, 19 bp, Homo sapiens
  siRNA target sequence for SP100 (NM_003113.2,1645-1663).
gcatagatctaaagtaaat

SEQ ID NO: 40708 - DNA, 19 bp, Homo sapiens
  siRNA target sequence for SP100 (NM_003113.2,1690-1708).
cagacctagaaaacattta

SEQ ID NO: 40709 - DNA, 19 bp, Homo sapiens
  siRNA target sequence for SP100 (NM_003113.2,1762-1780).
caacactagacctttgaaa

SEQ ID NO: 40710 - DNA, 19 bp, Homo sapiens
  siRNA target sequence for SP100 (NM_003113.2,1862-1880).
gaggtgaagggcactctat

SEQ ID NO: 40711 - DNA, 19 bp, Homo sapiens
  siRNA target sequence for SP100 (NM_003113.2,1864-1882).
ggtgaagggcactctatat

SEQ ID NO: 40712 - DNA, 19 bp, Homo sapiens
  siRNA target sequence for SP100 (NM_003113.2,1917-1935).
gtatacagagtgaggataa

SEQ ID NO: 40713 - DNA, 19 bp, Homo sapiens
  siRNA target sequence for SP100 (NM_003113.2,1976-1994).
cgcggagcatccaagaact

SEQ ID NO: 40714 - DNA, 19 bp, Homo sapiens
  siRNA target sequence for SP100 (NM_003113.2,2016-2034).
gtggatataccctgaaagt

SEQ ID NO: 40715 - DNA, 19 bp, Homo sapiens
  siRNA target sequence for SP100 (NM_003113.2,2035-2053).
cctgatggagaacaaattt

SEQ ID NO: 40716 - DNA, 19 bp, Homo sapiens
  siRNA target sequence for SP100 (NM_003113.2,2090-2108).
ctggaatctcacaacaata

SEQ ID NO: 40717 - DNA, 19 bp, Homo sapiens
  siRNA target sequence for SP100 (NM_003113.2,2466-2484).
cagctgacaagcagtttta

SEQ ID NO: 40718 - DNA, 19 bp, Homo sapiens
  siRNA target sequence for SP110 (NM_004509.2,289-307).
gagtggtgcacaacattct

SEQ ID NO: 40719 - DNA, 19 bp, Homo sapiens
  siRNA target sequence for SP110 (NM_004509.2,291-309).
gtggtgcacaacattctca

SEQ ID NO: 40720 - DNA, 19 bp, Homo sapiens
  siRNA target sequence for SP110 (NM_004509.2,349-367).
cattgttcagtcaaattaa

SEQ ID NO: 40721 - DNA, 19 bp, Homo sapiens
  siRNA target sequence for SP110 (NM_004509.2,381-399).
cccaatctggtgacgattt

SEQ ID NO: 40722 - DNA, 19 bp, Homo sapiens
  siRNA target sequence for SP110 (NM_004509.2,382-400).
ccaatctggtgacgattta

SEQ ID NO: 40723 - DNA, 19 bp, Homo sapiens
  siRNA target sequence for SP110 (NM_004509.2,449-467).
cacaccaatcctacttgaa

SEQ ID NO: 40724 - DNA, 19 bp, Homo sapiens
  siRNA target sequence for SP110 (NM_004509.2,779-797).
caacctgatcccccaaata

SEQ ID NO: 40725 - DNA, 19 bp, Homo sapiens
  siRNA target sequence for SP110 (NM_004509.2,839-857).
gggctctatgccagagata

SEQ ID NO: 40726 - DNA, 19 bp, Homo sapiens
  siRNA target sequence for SP110 (NM_004509.2,840-858).
ggctctatgccagagataa

SEQ ID NO: 40727 - DNA, 19 bp, Homo sapiens
  siRNA target sequence for SP110 (NM_004509.2,848-866).
gccagagataagagataat

SEQ ID NO: 40728 - DNA, 19 bp, Homo sapiens
  siRNA target sequence for SP110 (NM_004509.2,910-928).
gcacaccttcagacaagaa

SEQ ID NO: 40729 - DNA, 19 bp, Homo sapiens
  siRNA target sequence for SP110 (NM_004509.2,961-979).
ctccaaaaaggagacataa

SEQ ID NO: 40730 - DNA, 19 bp, Homo sapiens
  siRNA target sequence for SP110 (NM_004509.2,1012-1030).
ctagacacggaatccaaaa

SEQ ID NO: 40731 - DNA, 19 bp, Homo sapiens
  siRNA target sequence for SP110 (NM_004509.2,1064-1082).
gaaagatgactcaacttgt

SEQ ID NO: 40732 - DNA, 19 bp, Homo sapiens
  siRNA target sequence for SP110 (NM_004509.2,1068-1086).
gatgactcaacttgtaact

SEQ ID NO: 40733 - DNA, 19 bp, Homo sapiens
  siRNA target sequence for SP110 (NM_004509.2,1141-1159).
gatcagaggagatcattga

SEQ ID NO: 40734 - DNA, 19 bp, Homo sapiens
  siRNA target sequence for SP110 (NM_004509.2,1193-1211).
ccagaagacgcctagtaca

SEQ ID NO: 40735 - DNA, 19 bp, Homo sapiens
  siRNA target sequence for SP110 (NM_004509.2,1275-1293).
gtggataaggtgactcaaa

SEQ ID NO: 40736 - DNA, 19 bp, Homo sapiens
  siRNA target sequence for SP110 (NM_004509.2,1392-1410).
gagaaagatatctgttcaa

SEQ ID NO: 40737 - DNA, 19 bp, Homo sapiens
  siRNA target sequence for SP110 (NM_004509.2,1509-1527).
gaggcgaaagggattttat

SEQ ID NO: 40738 - DNA, 19 bp, Homo sapiens
  siRNA target sequence for SP110 (NM_004509.2,1512-1530).
gcgaaagggattttatata

SEQ ID NO: 40739 - DNA, 19 bp, Homo sapiens
  siRNA target sequence for SP110 (NM_004509.2,1575-1593).
gaggatggaacttggttaa

SEQ ID NO: 40740 - DNA, 19 bp, Homo sapiens
  siRNA target sequence for SP110 (NM_004509.2,1585-1603).
cttggttaacaccaaatga

SEQ ID NO: 40741 - DNA, 19 bp, Homo sapiens
  siRNA target sequence for SP110 (NM_004509.2,1637-1655).
gaactggaaacggaatata

SEQ ID NO: 40742 - DNA, 19 bp, Homo sapiens
  siRNA target sequence for SP110 (NM_004509.2,1640-1658).
ctggaaacggaatatacgt

SEQ ID NO: 40743 - DNA, 19 bp, Homo sapiens
  siRNA target sequence for SP110 (NM_004509.2,1723-1741).
gtcaagggggacaacttct

SEQ ID NO: 40744 - DNA, 19 bp, Homo sapiens
  siRNA target sequence for SP110 (NM_004509.2,1857-1875).
caacagtgccatcatgtat

SEQ ID NO: 40745 - DNA, 19 bp, Homo sapiens
  siRNA target sequence for SP110 (NM_004509.2,1860-1878).
cagtgccatcatgtatcta

SEQ ID NO: 40746 - DNA, 19 bp, Homo sapiens
  siRNA target sequence for SP110 (NM_004509.2,1977-1995).
ctgattacggaaatgtaca

SEQ ID NO: 40747 - DNA, 19 bp, Homo sapiens
  siRNA target sequence for SP110 (NM_004509.2,2034-2052).
cgcaaccataaaacatttt

SEQ ID NO: 40748 - DNA, 19 bp, Homo sapiens
  siRNA target sequence for SP110 (NM_004509.2,2120-2138).
cgtgctcggttttcatgaa

SEQ ID NO: 40749 - DNA, 19 bp, Homo sapiens
  siRNA target sequence for SP110 (NM_004510.2,1710-1728).
cctccaagaataaatctca

SEQ ID NO: 40750 - DNA, 19 bp, Homo sapiens
  siRNA target sequence for SP110 (NM_080424.1,1972-1990).
cgggcatcccatttaatat

SEQ ID NO: 40751 - DNA, 19 bp, Homo sapiens
  siRNA target sequence for SP2 (NM_003110.3,1026-1044).
ccccactgtctaagactaa

SEQ ID NO: 40752 - DNA, 19 bp, Homo sapiens
  siRNA target sequence for SP2 (NM_003110.3,1028-1046).
ccactgtctaagactaaca

SEQ ID NO: 40753 - DNA, 19 bp, Homo sapiens
  siRNA target sequence for SP2 (NM_003110.3,1029-1047).
cactgtctaagactaacaa

SEQ ID NO: 40754 - DNA, 19 bp, Homo sapiens
  siRNA target sequence for SP2 (NM_003110.3,1540-1558).
gcgtcccctgccaaagatt

SEQ ID NO: 40755 - DNA, 19 bp, Homo sapiens
  siRNA target sequence for SP2 (NM_003110.3,1616-1634).
gcaatgcagaccatcaaca

SEQ ID NO: 40756 - DNA, 19 bp, Homo sapiens
  siRNA target sequence for SP2 (NM_003110.3,1617-1635).
caatgcagaccatcaacat

SEQ ID NO: 40757 - DNA, 19 bp, Homo sapiens
  siRNA target sequence for SP2 (NM_003110.3,1621-1639).
gcagaccatcaacatcaat

SEQ ID NO: 40758 - DNA, 19 bp, Homo sapiens
  siRNA target sequence for SP2 (NM_003110.3,2132-2150).
cacctggtcacgaagaact

SEQ ID NO: 40759 - DNA, 19 bp, Homo sapiens
  siRNA target sequence for SP3 (NM_003111.1,175-193).
ccgaaaagcccgtgaaaca

SEQ ID NO: 40760 - DNA, 19 bp, Homo sapiens
  siRNA target sequence for SP3 (NM_003111.1,176-194).
cgaaaagcccgtgaaacaa

SEQ ID NO: 40761 - DNA, 19 bp, Homo sapiens
  siRNA target sequence for SP3 (NM_003111.1,655-673).
cagtgtccagtgttcaata

SEQ ID NO: 40762 - DNA, 19 bp, Homo sapiens
  siRNA target sequence for SP3 (NM_003111.1,661-679).
ccagtgttcaatatcaagt

SEQ ID NO: 40763 - DNA, 19 bp, Homo sapiens
  siRNA target sequence for SP3 (NM_003111.1,664-682).
gtgttcaatatcaagtgat

SEQ ID NO: 40764 - DNA, 19 bp, Homo sapiens
  siRNA target sequence for SP3 (NM_003111.1,817-835).
gaacaccttctgctaacat

SEQ ID NO: 40765 - DNA, 19 bp, Homo sapiens
  siRNA target sequence for SP3 (NM_003111.1,1003-1021).
cgggcagttctcagacaat

SEQ ID NO: 40766 - DNA, 19 bp, Homo sapiens
  siRNA target sequence for SP3 (NM_003111.1,1178-1196).
gttgcctgttacgatagat

SEQ ID NO: 40767 - DNA, 19 bp, Homo sapiens
  siRNA target sequence for SP3 (NM_003111.1,1181-1199).
gcctgttacgatagatagt

SEQ ID NO: 40768 - DNA, 19 bp, Homo sapiens
  siRNA target sequence for SP3 (NM_003111.1,1182-1200).
cctgttacgatagatagta

SEQ ID NO: 40769 - DNA, 19 bp, Homo sapiens
  siRNA target sequence for SP3 (NM_003111.1,1342-1360).
ctgttgtacagcatctaca

SEQ ID NO: 40770 - DNA, 19 bp, Homo sapiens
  siRNA target sequence for SP3 (NM_003111.1,1715-1733).
gttgccaaatctacaaaca

SEQ ID NO: 40771 - DNA, 19 bp, Homo sapiens
  siRNA target sequence for SP3 (NM_003111.1,1854-1872).
ggtgattctaccttgaata

SEQ ID NO: 40772 - DNA, 19 bp, Homo sapiens
  siRNA target sequence for SP3 (NM_003111.1,1857-1875).
gattctaccttgaatacca

SEQ ID NO: 40773 - DNA, 19 bp, Homo sapiens
  siRNA target sequence for SP3 (NM_003111.1,1880-1898).
cctaacacacttaagagta

SEQ ID NO: 40774 - DNA, 19 bp, Homo sapiens
  siRNA target sequence for SP3 (NM_003111.1,2101-2119).
ctggagaacgcccttttgt

SEQ ID NO: 40775 - DNA, 19 bp, Homo sapiens
  siRNA target sequence for SP3 (NM_003111.1,2249-2267).
ccttgccaaacatattaaa

SEQ ID NO: 40776 - DNA, 19 bp, Homo sapiens
  siRNA target sequence for SP3 (NM_003111.1,2322-2340).
gaagctgcgcgagatgata

SEQ ID NO: 40777 - DNA, 19 bp, Homo sapiens
  siRNA target sequence for SP3 (NM_003111.1,2326-2344).
ctgcgcgagatgatacttt

SEQ ID NO: 40778 - DNA, 19 bp, Homo sapiens
  siRNA target sequence for SP3 (NM_003111.1,2328-2346).
gcgcgagatgatactttga

SEQ ID NO: 40779 - DNA, 19 bp, Homo sapiens
  siRNA target sequence for SP3 (NM_003111.1,2405-2423).
gataggaactgttaatact

SEQ ID NO: 40780 - DNA, 19 bp, Homo sapiens
  siRNA target sequence for SP4 (NM_003112.2,260-278).
gagccagagaataacaata

SEQ ID NO: 40781 - DNA, 19 bp, Homo sapiens
  siRNA target sequence for SP4 (NM_003112.2,315-333).
cctctcctctggctttact

SEQ ID NO: 40782 - DNA, 19 bp, Homo sapiens
  siRNA target sequence for SP4 (NM_003112.2,357-375).
ggactcctggtgaaaatca

SEQ ID NO: 40783 - DNA, 19 bp, Homo sapiens
  siRNA target sequence for SP4 (NM_003112.2,417-435).
gattggtgcaacttcaaaa

SEQ ID NO: 40784 - DNA, 19 bp, Homo sapiens
  siRNA target sequence for SP4 (NM_003112.2,446-464).
cagctagaactggtaacaa

SEQ ID NO: 40785 - DNA, 19 bp, Homo sapiens
  siRNA target sequence for SP4 (NM_003112.2,477-495).
gaaacgcttggcaacttgt

SEQ ID NO: 40786 - DNA, 19 bp, Homo sapiens
  siRNA target sequence for SP4 (NM_003112.2,542-560).
gcctctagttcgtctagtt

SEQ ID NO: 40787 - DNA, 19 bp, Homo sapiens
  siRNA target sequence for SP4 (NM_003112.2,666-684).
gtgtacagtaccaagtaat

SEQ ID NO: 40788 - DNA, 19 bp, Homo sapiens
  siRNA target sequence for SP4 (NM_003112.2,697-715).
gacagtggaaggtcaacaa

SEQ ID NO: 40789 - DNA, 19 bp, Homo sapiens
  siRNA target sequence for SP4 (NM_003112.2,707-725).
ggtcaacaaattcaaatca

SEQ ID NO: 40790 - DNA, 19 bp, Homo sapiens
  siRNA target sequence for SP4 (NM_003112.2,719-737).
caaatcaatccaactagta

SEQ ID NO: 40791 - DNA, 19 bp, Homo sapiens
  siRNA target sequence for SP4 (NM_003112.2,741-759).
catctctacaggatttgca

SEQ ID NO: 40792 - DNA, 19 bp, Homo sapiens
  siRNA target sequence for SP4 (NM_003112.2,775-793).
catttctgcaggtaataat

SEQ ID NO: 40793 - DNA, 19 bp, Homo sapiens
  siRNA target sequence for SP4 (NM_003112.2,783-801).
caggtaataatcaagctat

SEQ ID NO: 40794 - DNA, 19 bp, Homo sapiens
  siRNA target sequence for SP4 (NM_003112.2,843-861).
ctcaaaacctggcaaatca

SEQ ID NO: 40795 - DNA, 19 bp, Homo sapiens
  siRNA target sequence for SP4 (NM_003112.2,862-880).
gacagttccggtccaaatt

SEQ ID NO: 40796 - DNA, 19 bp, Homo sapiens
  siRNA target sequence for SP4 (NM_003112.2,924-942).
gtactcaggctcaagttgt

SEQ ID NO: 40797 - DNA, 19 bp, Homo sapiens
  siRNA target sequence for SP4 (NM_003112.2,941-959).
gtaacaaccctaccaatta

SEQ ID NO: 40798 - DNA, 19 bp, Homo sapiens
  siRNA target sequence for SP4 (NM_003112.2,966-984).
gaggagtgactctagcttt

SEQ ID NO: 40799 - DNA, 19 bp, Homo sapiens
  siRNA target sequence for SP4 (NM_003112.2,1060-1078).
gacttccaatgggaatcaa

SEQ ID NO: 40800 - DNA, 19 bp, Homo sapiens
  siRNA target sequence for SP4 (NM_003112.2,1065-1083).
ccaatgggaatcaattagt

SEQ ID NO: 40801 - DNA, 19 bp, Homo sapiens
  siRNA target sequence for SP4 (NM_003112.2,1066-1084).
caatgggaatcaattagtt

SEQ ID NO: 40802 - DNA, 19 bp, Homo sapiens
  siRNA target sequence for SP4 (NM_003112.2,1245-1263).
ctgaacgcaccattgaaga

SEQ ID NO: 40803 - DNA, 19 bp, Homo sapiens
  siRNA target sequence for SP4 (NM_003112.2,1252-1270).
caccattgaagaatctcaa

SEQ ID NO: 40804 - DNA, 19 bp, Homo sapiens
  siRNA target sequence for SP4 (NM_003112.2,1426-1444).
gatcattcaggctattcca

SEQ ID NO: 40805 - DNA, 19 bp, Homo sapiens
  siRNA target sequence for SP4 (NM_003112.2,1500-1518).
ctttacagaatgttcaact

SEQ ID NO: 40806 - DNA, 19 bp, Homo sapiens
  siRNA target sequence for SP4 (NM_003112.2,1532-1550).
ccgactcaggtgcttatca

SEQ ID NO: 40807 - DNA, 19 bp, Homo sapiens
  siRNA target sequence for SP4 (NM_003112.2,1568-1586).
ccttcagggcaaatcagtt

SEQ ID NO: 40808 - DNA, 19 bp, Homo sapiens
  siRNA target sequence for SP4 (NM_003112.2,1644-1662).
ctgggttatcccaacaatt

SEQ ID NO: 40809 - DNA, 19 bp, Homo sapiens
  siRNA target sequence for SP4 (NM_003112.2,1646-1664).
gggttatcccaacaattaa

SEQ ID NO: 40810 - DNA, 19 bp, Homo sapiens
  siRNA target sequence for SP4 (NM_003112.2,1724-1742).
gttgctggtgccccaataa

SEQ ID NO: 40811 - DNA, 19 bp, Homo sapiens
  siRNA target sequence for SP4 (NM_003112.2,1731-1749).
gtgccccaataactttgaa

SEQ ID NO: 40812 - DNA, 19 bp, Homo sapiens
  siRNA target sequence for SP4 (NM_003112.2,1733-1751).
gccccaataactttgaata

SEQ ID NO: 40813 - DNA, 19 bp, Homo sapiens
  siRNA target sequence for SP4 (NM_003112.2,1829-1847).
ggagttcccgttacaatca

SEQ ID NO: 40814 - DNA, 19 bp, Homo sapiens
  siRNA target sequence for SP4 (NM_003112.2,1832-1850).
gttcccgttacaatcacta

SEQ ID NO: 40815 - DNA, 19 bp, Homo sapiens
  siRNA target sequence for SP4 (NM_003112.2,1945-1963).
cacgataggtgctgttagt

SEQ ID NO: 40816 - DNA, 19 bp, Homo sapiens
  siRNA target sequence for SP4 (NM_003112.2,2032-2050).
caagaggcttcgaagagtt

SEQ ID NO: 40817 - DNA, 19 bp, Homo sapiens
  siRNA target sequence for SP4 (NM_003112.2,2051-2069).
gcctgttcctgtcctaatt

SEQ ID NO: 40818 - DNA, 19 bp, Homo sapiens
  siRNA target sequence for SP4 (NM_003112.2,2053-2071).
ctgttcctgtcctaattgt

SEQ ID NO: 40819 - DNA, 19 bp, Homo sapiens
  siRNA target sequence for SP4 (NM_003112.2,2116-2134).
gcagcatatctgtcatatt

SEQ ID NO: 40820 - DNA, 19 bp, Homo sapiens
  siRNA target sequence for SP4 (NM_003112.2,2158-2176).
caaaacatctcatttacga

SEQ ID NO: 40821 - DNA, 19 bp, Homo sapiens
  siRNA target sequence for SP4 (NM_003112.2,2326-2344).
gtttatgcggagtgatcat

SEQ ID NO: 40822 - DNA, 19 bp, Homo sapiens
  siRNA target sequence for SP4 (NM_003112.2,2464-2482).
cacagttgcagccatttct

SEQ ID NO: 40823 - DNA, 19 bp, Homo sapiens
  siRNA target sequence for SP4 (NM_003112.2,2471-2489).
gcagccatttctcaagatt

SEQ ID NO: 40824 - DNA, 19 bp, Homo sapiens
  siRNA target sequence for SP4 (NM_003112.2,2475-2493).
ccatttctcaagattcgaa

SEQ ID NO: 40825 - DNA, 19 bp, Homo sapiens
  siRNA target sequence for SP7 (NM_152860.1,169-187).
cggcagcgtgcagcaaatt

SEQ ID NO: 40826 - DNA, 19 bp, Homo sapiens
  siRNA target sequence for SP7 (NM_152860.1,284-302).
catgggggatgcttatcca

SEQ ID NO: 40827 - DNA, 19 bp, Homo sapiens
  siRNA target sequence for SP7 (NM_152860.1,305-323).
cccctttacaagcactaat

SEQ ID NO: 40828 - DNA, 19 bp, Homo sapiens
  siRNA target sequence for SP7 (NM_152860.1,357-375).
cccacctcaggctatgcta

SEQ ID NO: 40829 - DNA, 19 bp, Homo sapiens
  siRNA target sequence for SP7 (NM_152860.1,361-379).
cctcaggctatgctaatga

SEQ ID NO: 40830 - DNA, 19 bp, Homo sapiens
  siRNA target sequence for SP7 (NM_152860.1,574-592).
ctccatggtgggatatgca

SEQ ID NO: 40831 - DNA, 19 bp, Homo sapiens
  siRNA target sequence for SP7 (NM_152860.1,710-728).
ctttgctccccttaatcca

SEQ ID NO: 40832 - DNA, 19 bp, Homo sapiens
  siRNA target sequence for SP7 (NM_152860.1,776-794).
cttgccccaagatgtctat

SEQ ID NO: 40833 - DNA, 19 bp, Homo sapiens
  siRNA target sequence for SP7 (NM_152860.1,779-797).
gccccaagatgtctataaa

SEQ ID NO: 40834 - DNA, 19 bp, Homo sapiens
  siRNA target sequence for SP7 (NM_152860.1,800-818).
caaggcagtgggaaatagt

SEQ ID NO: 40835 - DNA, 19 bp, Homo sapiens
  siRNA target sequence for SP8 (NM_182700.2,145-163).
gcttgccgctacctgtaat

SEQ ID NO: 40836 - DNA, 19 bp, Homo sapiens
  siRNA target sequence for SP8 (NM_182700.2,146-164).
cttgccgctacctgtaata

SEQ ID NO: 40837 - DNA, 19 bp, Homo sapiens
  siRNA target sequence for SP8 (NM_182700.2,149-167).
gccgctacctgtaataaga

SEQ ID NO: 40838 - DNA, 19 bp, Homo sapiens
  siRNA target sequence for SP8 (NM_182700.2,150-168).
ccgctacctgtaataagat

SEQ ID NO: 40839 - DNA, 19 bp, Homo sapiens
  siRNA target sequence for SP8 (NM_182700.2,151-169).
cgctacctgtaataagata

SEQ ID NO: 40840 - DNA, 19 bp, Homo sapiens
  siRNA target sequence for SP8 (NM_182700.2,197-215).
ctctcggacagctcttctt

SEQ ID NO: 40841 - DNA, 19 bp, Homo sapiens
  siRNA target sequence for SP8 (NM_182700.2,611-629).
caccagccggtgttcatct

SEQ ID NO: 40842 - DNA, 19 bp, Homo sapiens
  siRNA target sequence for SP8 (NM_182700.2,692-710).
ccgtacgagtcgtggttta

SEQ ID NO: 40843 - DNA, 19 bp, Homo sapiens
  siRNA target sequence for SP8 (NM_182700.2,693-711).
cgtacgagtcgtggtttaa

SEQ ID NO: 40844 - DNA, 19 bp, Homo sapiens
  siRNA target sequence for SP8 (NM_182700.2,881-899).
ccgctcggaggctacaact

SEQ ID NO: 40845 - DNA, 19 bp, Homo sapiens
  siRNA target sequence for SP8 (NM_182700.2,890-908).
ggctacaactcggattact

SEQ ID NO: 40846 - DNA, 19 bp, Homo sapiens
  siRNA target sequence for SPATA13 (NM_153023.1,752-770).
ggaggacttcagctatgaa

SEQ ID NO: 40847 - DNA, 19 bp, Homo sapiens
  siRNA target sequence for SPATA13 (NM_153023.1,1007-1025).
cgtcagattgcgagtgaat

SEQ ID NO: 40848 - DNA, 19 bp, Homo sapiens
  siRNA target sequence for SPATA13 (NM_153023.1,1245-1263).
gcgcagctagccactattt

SEQ ID NO: 40849 - DNA, 19 bp, Homo sapiens
  siRNA target sequence for SPATA13 (NM_153023.1,1246-1264).
cgcagctagccactatttt

SEQ ID NO: 40850 - DNA, 19 bp, Homo sapiens
  siRNA target sequence for SPATA13 (NM_153023.1,1247-1265).
gcagctagccactattttt

SEQ ID NO: 40851 - DNA, 19 bp, Homo sapiens
  siRNA target sequence for SPATA13 (NM_153023.1,1338-1356).
gaacctcacttaagtgaaa

SEQ ID NO: 40852 - DNA, 19 bp, Homo sapiens
  siRNA target sequence for SPATA13 (NM_153023.1,1602-1620).
caggaacacggtgattaca

SEQ ID NO: 40853 - DNA, 19 bp, Homo sapiens
  siRNA target sequence for SPATA13 (NM_153023.1,1622-1640).
caacataaaggcagcatat

SEQ ID NO: 40854 - DNA, 19 bp, Homo sapiens
  siRNA target sequence for SPATA13 (NM_153023.1,1711-1729).
ctcgctggcaggtgtctat

SEQ ID NO: 40855 - DNA, 19 bp, Homo sapiens
  siRNA target sequence for SPATA13 (NM_153023.1,1758-1776).
gaccgaagctcagaattga

SEQ ID NO: 40856 - DNA, 19 bp, Homo sapiens
  siRNA target sequence for SPATA13 (NM_153023.1,1760-1778).
ccgaagctcagaattgatt

SEQ ID NO: 40857 - DNA, 19 bp, Homo sapiens
  siRNA target sequence for SPATA13 (NM_153023.1,1828-1846).
ggacgttcttcctgtttga

SEQ ID NO: 40858 - DNA, 19 bp, Homo sapiens
  siRNA target sequence for SPATA13 (NM_153023.1,1882-1900).
gcagggacatgctgtacta

SEQ ID NO: 40859 - DNA, 19 bp, Homo sapiens
  siRNA target sequence for SPATA13 (NM_153023.1,1966-1984).
gcaacctcagcgtgaaaaa

SEQ ID NO: 40860 - DNA, 19 bp, Homo sapiens
  siRNA target sequence for SPATA13 (NM_153023.1,1967-1985).
caacctcagcgtgaaaaat

SEQ ID NO: 40861 - DNA, 19 bp, Homo sapiens
  siRNA target sequence for SPATA13 (NM_153023.1,2005-2023).
ggaccacagacgaggttta

SEQ ID NO: 40862 - DNA, 19 bp, Homo sapiens
  siRNA target sequence for SPATA13 (NM_153023.1,2006-2024).
gaccacagacgaggtttat

SEQ ID NO: 40863 - DNA, 19 bp, Homo sapiens
  siRNA target sequence for SPATA13 (NM_153023.1,2008-2026).
ccacagacgaggtttattt

SEQ ID NO: 40864 - DNA, 19 bp, Homo sapiens
  siRNA target sequence for SPATA13 (NM_153023.1,2149-2167).
ccatgttaaatgctcaaaa

SEQ ID NO: 40865 - DNA, 19 bp, Homo sapiens
  siRNA target sequence for SPG3A (NM_015915.2,277-295).
ccaagtcctcattgtcaaa

SEQ ID NO: 40866 - DNA, 19 bp, Homo sapiens
  siRNA target sequence for SPG3A (NM_015915.2,367-385).
ggaggttgttgctgtatct

SEQ ID NO: 40867 - DNA, 19 bp, Homo sapiens
  siRNA target sequence for SPG3A (NM_015915.2,386-404).
gttgctggagcatttagaa

SEQ ID NO: 40868 - DNA, 19 bp, Homo sapiens
  siRNA target sequence for SPG3A (NM_015915.2,445-463).
gtacaaccaggaatcagtt

SEQ ID NO: 40869 - DNA, 19 bp, Homo sapiens
  siRNA target sequence for SPG3A (NM_015915.2,448-466).
caaccaggaatcagttgat

SEQ ID NO: 40870 - DNA, 19 bp, Homo sapiens
  siRNA target sequence for SPG3A (NM_015915.2,474-492).
gagactacaatgaaccatt

SEQ ID NO: 40871 - DNA, 19 bp, Homo sapiens
  siRNA target sequence for SPG3A (NM_015915.2,478-496).
ctacaatgaaccattgact

SEQ ID NO: 40872 - DNA, 19 bp, Homo sapiens
  siRNA target sequence for SPG3A (NM_015915.2,485-503).
gaaccattgactggttttt

SEQ ID NO: 40873 - DNA, 19 bp, Homo sapiens
  siRNA target sequence for SPG3A (NM_015915.2,529-547).
gaccacaggaattcagata

SEQ ID NO: 40874 - DNA, 19 bp, Homo sapiens
  siRNA target sequence for SPG3A (NM_015915.2,552-570).
gtgaaatcttccttatcaa

SEQ ID NO: 40875 - DNA, 19 bp, Homo sapiens
  siRNA target sequence for SPG3A (NM_015915.2,554-572).
gaaatcttccttatcaata

SEQ ID NO: 40876 - DNA, 19 bp, Homo sapiens
  siRNA target sequence for SPG3A (NM_015915.2,607-625).
ggatactcagggaaccttt

SEQ ID NO: 40877 - DNA, 19 bp, Homo sapiens
  siRNA target sequence for SPG3A (NM_015915.2,626-644).
gatagtcagtcaactttga

SEQ ID NO: 40878 - DNA, 19 bp, Homo sapiens
  siRNA target sequence for SPG3A (NM_015915.2,645-663).
gagattcagccacagtatt

SEQ ID NO: 40879 - DNA, 19 bp, Homo sapiens
  siRNA target sequence for SPG3A (NM_015915.2,665-683).
gcccttagcacaatgatca

SEQ ID NO: 40880 - DNA, 19 bp, Homo sapiens
  siRNA target sequence for SPG3A (NM_015915.2,673-691).
cacaatgatcagctcaata

SEQ ID NO: 40881 - DNA, 19 bp, Homo sapiens
  siRNA target sequence for SPG3A (NM_015915.2,682-700).
cagctcaatacaggtatat

SEQ ID NO: 40882 - DNA, 19 bp, Homo sapiens
  siRNA target sequence for SPG3A (NM_015915.2,684-702).
gctcaatacaggtatataa

SEQ ID NO: 40883 - DNA, 19 bp, Homo sapiens
  siRNA target sequence for SPG3A (NM_015915.2,687-705).
caatacaggtatataactt

SEQ ID NO: 40884 - DNA, 19 bp, Homo sapiens
  siRNA target sequence for SPG3A (NM_015915.2,793-811).
gccatttcagagtctgata

SEQ ID NO: 40885 - DNA, 19 bp, Homo sapiens
  siRNA target sequence for SPG3A (NM_015915.2,795-813).
catttcagagtctgatatt

SEQ ID NO: 40886 - DNA, 19 bp, Homo sapiens
  siRNA target sequence for SPG3A (NM_015915.2,826-844).
ctggagtttcccatacgaa

SEQ ID NO: 40887 - DNA, 19 bp, Homo sapiens
  siRNA target sequence for SPG3A (NM_015915.2,860-878).
gatggtggtgccaaattct

SEQ ID NO: 40888 - DNA, 19 bp, Homo sapiens
  siRNA target sequence for SPG3A (NM_015915.2,1002-1020).
ctaccaatccaaactttga

SEQ ID NO: 40889 - DNA, 19 bp, Homo sapiens
  siRNA target sequence for SPG3A (NM_015915.2,1043-1061).
gatgaattcatcaaaaact

SEQ ID NO: 40890 - DNA, 19 bp, Homo sapiens
  siRNA target sequence for SPG3A (NM_015915.2,1072-1090).
gattccttggctacttagt

SEQ ID NO: 40891 - DNA, 19 bp, Homo sapiens
  siRNA target sequence for SPG3A (NM_015915.2,1089-1107).
gtcccgagagcctagatat

SEQ ID NO: 40892 - DNA, 19 bp, Homo sapiens
  siRNA target sequence for SPG3A (NM_015915.2,1091-1109).
cccgagagcctagatatta

SEQ ID NO: 40893 - DNA, 19 bp, Homo sapiens
  siRNA target sequence for SPG3A (NM_015915.2,1092-1110).
ccgagagcctagatattaa

SEQ ID NO: 40894 - DNA, 19 bp, Homo sapiens
  siRNA target sequence for SPG3A (NM_015915.2,1093-1111).
cgagagcctagatattaaa

SEQ ID NO: 40895 - DNA, 19 bp, Homo sapiens
  siRNA target sequence for SPG3A (NM_015915.2,1151-1169).
gagtacttcaaggcttata

SEQ ID NO: 40896 - DNA, 19 bp, Homo sapiens
  siRNA target sequence for SPG3A (NM_015915.2,1153-1171).
gtacttcaaggcttatata

SEQ ID NO: 40897 - DNA, 19 bp, Homo sapiens
  siRNA target sequence for SPG3A (NM_015915.2,1162-1180).
ggcttatataaagatctat

SEQ ID NO: 40898 - DNA, 19 bp, Homo sapiens
  siRNA target sequence for SPG3A (NM_015915.2,1254-1272).
caactgccaaggacacata

SEQ ID NO: 40899 - DNA, 19 bp, Homo sapiens
  siRNA target sequence for SPG3A (NM_015915.2,1338-1356).
ccaaacacctgcaacttaa

SEQ ID NO: 40900 - DNA, 19 bp, Homo sapiens
  siRNA target sequence for SPG3A (NM_015915.2,1346-1364).
ctgcaacttaaggaagaat

SEQ ID NO: 40901 - DNA, 19 bp, Homo sapiens
  siRNA target sequence for SPG3A (NM_015915.2,1427-1445).
cagcagttggagagtgaaa

SEQ ID NO: 40902 - DNA, 19 bp, Homo sapiens
  siRNA target sequence for SPG3A (NM_015915.2,1432-1450).
gttggagagtgaaatagat

SEQ ID NO: 40903 - DNA, 19 bp, Homo sapiens
  siRNA target sequence for SPG3A (NM_015915.2,1529-1547).
gtagtcatctttatcacat

SEQ ID NO: 40904 - DNA, 19 bp, Homo sapiens
  siRNA target sequence for SPG3A (NM_015915.2,1557-1575).
ctggtgtgactggattcat

SEQ ID NO: 40905 - DNA, 19 bp, Homo sapiens
  siRNA target sequence for SPG3A (NM_015915.2,1573-1591).
cattggtttggacatcata

SEQ ID NO: 40906 - DNA, 19 bp, Homo sapiens
  siRNA target sequence for SPG3A (NM_015915.2,1577-1595).
ggtttggacatcatagcta

SEQ ID NO: 40907 - DNA, 19 bp, Homo sapiens
  siRNA target sequence for SPG3A (NM_015915.2,1588-1606).
catagctagcctatgcaat

SEQ ID NO: 40908 - DNA, 19 bp, Homo sapiens
  siRNA target sequence for SPG3A (NM_015915.2,1592-1610).
gctagcctatgcaatatga

SEQ ID NO: 40909 - DNA, 19 bp, Homo sapiens
  siRNA target sequence for SPG3A (NM_015915.2,1739-1757).
gctttgtacaagctttaca

SEQ ID NO: 40910 - DNA, 19 bp, Homo sapiens
  siRNA target sequence for SPG3A (NM_015915.2,1770-1788).
cccacagacatctgtatca

SEQ ID NO: 40911 - DNA, 19 bp, Homo sapiens
  siRNA target sequence for SPG3A (NM_015915.2,1771-1789).
ccacagacatctgtatcat

SEQ ID NO: 40912 - DNA, 19 bp, Homo sapiens
  siRNA target sequence for SPG3A (NM_015915.2,1774-1792).
cagacatctgtatcatcaa

SEQ ID NO: 40913 - DNA, 19 bp, Homo sapiens
  siRNA target sequence for SPG3A (NM_015915.2,1810-1828).
gtcggaatctactgaacaa

SEQ ID NO: 40914 - DNA, 19 bp, Homo sapiens
  siRNA target sequence for SPG3A (NM_181598.1,571-589).
gcgagagaccacaggaatt

SEQ ID NO: 40915 - DNA, 19 bp, Homo sapiens
  siRNA target sequence for SPO11 (NM_012444.2,125-143).
cgttcttcgacgttttgga

SEQ ID NO: 40916 - DNA, 19 bp, Homo sapiens
  siRNA target sequence for SPO11 (NM_012444.2,227-245).
ctgaggttcttgcatctat

SEQ ID NO: 40917 - DNA, 19 bp, Homo sapiens
  siRNA target sequence for SPO11 (NM_012444.2,231-249).
ggttcttgcatctatagaa

SEQ ID NO: 40918 - DNA, 19 bp, Homo sapiens
  siRNA target sequence for SPO11 (NM_012444.2,296-314).
ctgcattcacgatagacaa

SEQ ID NO: 40919 - DNA, 19 bp, Homo sapiens
  siRNA target sequence for SPO11 (NM_012444.2,352-370).
gtgggtcttcagatggtat

SEQ ID NO: 40920 - DNA, 19 bp, Homo sapiens
  siRNA target sequence for SPO11 (NM_012444.2,373-391).
cattgcaccaccagaaaga

SEQ ID NO: 40921 - DNA, 19 bp, Homo sapiens
  siRNA target sequence for SPO11 (NM_012444.2,469-487).
cagagcaacacttatgcaa

SEQ ID NO: 40922 - DNA, 19 bp, Homo sapiens
  siRNA target sequence for SPO11 (NM_012444.2,484-502).
gcaaccaaaagggacatat

SEQ ID NO: 40923 - DNA, 19 bp, Homo sapiens
  siRNA target sequence for SPO11 (NM_012444.2,485-503).
caaccaaaagggacatata

SEQ ID NO: 40924 - DNA, 19 bp, Homo sapiens
  siRNA target sequence for SPO11 (NM_012444.2,507-525).
cactgacagtcaactcttt

SEQ ID NO: 40925 - DNA, 19 bp, Homo sapiens
  siRNA target sequence for SPO11 (NM_012444.2,511-529).
gacagtcaactctttggta

SEQ ID NO: 40926 - DNA, 19 bp, Homo sapiens
  siRNA target sequence for SPO11 (NM_012444.2,534-552).
gactgtcgtcgacaatatt

SEQ ID NO: 40927 - DNA, 19 bp, Homo sapiens
  siRNA target sequence for SPO11 (NM_012444.2,536-554).
ctgtcgtcgacaatattat

SEQ ID NO: 40928 - DNA, 19 bp, Homo sapiens
  siRNA target sequence for SPO11 (NM_012444.2,538-556).
gtcgtcgacaatattatca

SEQ ID NO: 40929 - DNA, 19 bp, Homo sapiens
  siRNA target sequence for SPO11 (NM_012444.2,540-558).
cgtcgacaatattatcaat

SEQ ID NO: 40930 - DNA, 19 bp, Homo sapiens
  siRNA target sequence for SPO11 (NM_012444.2,598-616).
catatattatctacatcaa

SEQ ID NO: 40931 - DNA, 19 bp, Homo sapiens
  siRNA target sequence for SPO11 (NM_012444.2,628-646).
gctggcaacttaagataca

SEQ ID NO: 40932 - DNA, 19 bp, Homo sapiens
  siRNA target sequence for SPO11 (NM_012444.2,629-647).
ctggcaacttaagatacat

SEQ ID NO: 40933 - DNA, 19 bp, Homo sapiens
  siRNA target sequence for SPO11 (NM_012444.2,655-673).
gatggcaccaaagtgaatt

SEQ ID NO: 40934 - DNA, 19 bp, Homo sapiens
  siRNA target sequence for SPO11 (NM_012444.2,658-676).
ggcaccaaagtgaattgta

SEQ ID NO: 40935 - DNA, 19 bp, Homo sapiens
  siRNA target sequence for SPO11 (NM_012444.2,698-716).
ctgtgccatcgaatattca

SEQ ID NO: 40936 - DNA, 19 bp, Homo sapiens
  siRNA target sequence for SPO11 (NM_012444.2,704-722).
catcgaatattcaaggaat

SEQ ID NO: 40937 - DNA, 19 bp, Homo sapiens
  siRNA target sequence for SPO11 (NM_012444.2,718-736).
ggaattcggaatttagtta

SEQ ID NO: 40938 - DNA, 19 bp, Homo sapiens
  siRNA target sequence for SPO11 (NM_012444.2,785-803).
ggctcctagatgacaactt

SEQ ID NO: 40939 - DNA, 19 bp, Homo sapiens
  siRNA target sequence for SPO11 (NM_012444.2,786-804).
gctcctagatgacaacttt

SEQ ID NO: 40940 - DNA, 19 bp, Homo sapiens
  siRNA target sequence for SPO11 (NM_012444.2,790-808).
ctagatgacaacttttgca

SEQ ID NO: 40941 - DNA, 19 bp, Homo sapiens
  siRNA target sequence for SPO11 (NM_012444.2,816-834).
gtctccttgcatcatgatt

SEQ ID NO: 40942 - DNA, 19 bp, Homo sapiens
  siRNA target sequence for SPO11 (NM_012444.2,844-862).
ggagttcctgatctaaaca

SEQ ID NO: 40943 - DNA, 19 bp, Homo sapiens
  siRNA target sequence for SPO11 (NM_012444.2,847-865).
gttcctgatctaaacacaa

SEQ ID NO: 40944 - DNA, 19 bp, Homo sapiens
  siRNA target sequence for SPO11 (NM_012444.2,866-884).
gacttttagtcaagaaact

SEQ ID NO: 40945 - DNA, 19 bp, Homo sapiens
  siRNA target sequence for SPO11 (NM_012444.2,868-886).
cttttagtcaagaaactgt

SEQ ID NO: 40946 - DNA, 19 bp, Homo sapiens
  siRNA target sequence for SPO11 (NM_012444.2,905-923).
ctgttttcactcttgtaga

SEQ ID NO: 40947 - DNA, 19 bp, Homo sapiens
  siRNA target sequence for SPO11 (NM_012444.2,928-946).
gatccacatggcatagaaa

SEQ ID NO: 40948 - DNA, 19 bp, Homo sapiens
  siRNA target sequence for SPO11 (NM_012444.2,981-999).
gtcttttgaagctcatcat

SEQ ID NO: 40949 - DNA, 19 bp, Homo sapiens
  siRNA target sequence for SPO11 (NM_012444.2,983-1001).
cttttgaagctcatcatct

SEQ ID NO: 40950 - DNA, 19 bp, Homo sapiens
  siRNA target sequence for SPO11 (NM_012444.2,1000-1018).
ctcacagttccagctatta

SEQ ID NO: 40951 - DNA, 19 bp, Homo sapiens
  siRNA target sequence for SPO11 (NM_012444.2,1002-1020).
cacagttccagctattaga

SEQ ID NO: 40952 - DNA, 19 bp, Homo sapiens
  siRNA target sequence for SPO11 (NM_012444.2,1033-1051).
ctcccttctgatcttaaaa

SEQ ID NO: 40953 - DNA, 19 bp, Homo sapiens
  siRNA target sequence for SPO11 (NM_012444.2,1035-1053).
cccttctgatcttaaaaga

SEQ ID NO: 40954 - DNA, 19 bp, Homo sapiens
  siRNA target sequence for SPO11 (NM_012444.2,1036-1054).
ccttctgatcttaaaagat

SEQ ID NO: 40955 - DNA, 19 bp, Homo sapiens
  siRNA target sequence for SPO11 (NM_012444.2,1052-1070).
gattaaatgtacctaaaga

SEQ ID NO: 40956 - DNA, 19 bp, Homo sapiens
  siRNA target sequence for SPO11 (NM_012444.2,1094-1112).
gggaccaaatgaaacttga

SEQ ID NO: 40957 - DNA, 19 bp, Homo sapiens
  siRNA target sequence for SPO11 (NM_012444.2,1119-1137).
cctgaggagaccttatgtt

SEQ ID NO: 40958 - DNA, 19 bp, Homo sapiens
  siRNA target sequence for SPO11 (NM_012444.2,1120-1138).
ctgaggagaccttatgtta

SEQ ID NO: 40959 - DNA, 19 bp, Homo sapiens
  siRNA target sequence for SPO11 (NM_012444.2,1214-1232).
ctttcctatcatcagatta

SEQ ID NO: 40960 - DNA, 19 bp, Homo sapiens
  siRNA target sequence for SPO11 (NM_012444.2,1238-1256).
ccagagtgtacttacctaa

SEQ ID NO: 40961 - DNA, 19 bp, Homo sapiens
  siRNA target sequence for SPO11 (NM_012444.2,1241-1259).
gagtgtacttacctaacaa

SEQ ID NO: 40962 - DNA, 19 bp, Homo sapiens
  siRNA target sequence for SRCAP (NM_006662.1,328-346).
gtggggcaaactgaaaagt

SEQ ID NO: 40963 - DNA, 19 bp, Homo sapiens
  siRNA target sequence for SRCAP (NM_006662.1,370-388).
ctcaaccagccattaacct

SEQ ID NO: 40964 - DNA, 19 bp, Homo sapiens
  siRNA target sequence for SRCAP (NM_006662.1,519-537).
ggaaacgattgaagttgaa

SEQ ID NO: 40965 - DNA, 19 bp, Homo sapiens
  siRNA target sequence for SRCAP (NM_006662.1,524-542).
cgattgaagttgaagaaca

SEQ ID NO: 40966 - DNA, 19 bp, Homo sapiens
  siRNA target sequence for SRCAP (NM_006662.1,564-582).
ggcccagaggcgtgagatt

SEQ ID NO: 40967 - DNA, 19 bp, Homo sapiens
  siRNA target sequence for SRCAP (NM_006662.1,658-676).
ccttccagcccctctcaaa

SEQ ID NO: 40968 - DNA, 19 bp, Homo sapiens
  siRNA target sequence for SRCAP (NM_006662.1,678-696).
cccctcatctcatgatagt

SEQ ID NO: 40969 - DNA, 19 bp, Homo sapiens
  siRNA target sequence for SRCAP (NM_006662.1,739-757).
cctcaggtgttggagataa

SEQ ID NO: 40970 - DNA, 19 bp, Homo sapiens
  siRNA target sequence for SRCAP (NM_006662.1,947-965).
ccatggaggagctattgca

SEQ ID NO: 40971 - DNA, 19 bp, Homo sapiens
  siRNA target sequence for SRCAP (NM_006662.1,1021-1039).
gatgaggttgatgctaata

SEQ ID NO: 40972 - DNA, 19 bp, Homo sapiens
  siRNA target sequence for SRCAP (NM_006662.1,1024-1042).
gaggttgatgctaatagct

SEQ ID NO: 40973 - DNA, 19 bp, Homo sapiens
  siRNA target sequence for SRCAP (NM_006662.1,1081-1099).
cctcctcaggaggatagta

SEQ ID NO: 40974 - DNA, 19 bp, Homo sapiens
  siRNA target sequence for SRCAP (NM_006662.1,1515-1533).
gtatgagaagaagcttaat

SEQ ID NO: 40975 - DNA, 19 bp, Homo sapiens
  siRNA target sequence for SRCAP (NM_006662.1,1524-1542).
gaagcttaatggcattctt

SEQ ID NO: 40976 - DNA, 19 bp, Homo sapiens
  siRNA target sequence for SRCAP (NM_006662.1,1619-1637).
ggggtccccatttaatcat

SEQ ID NO: 40977 - DNA, 19 bp, Homo sapiens
  siRNA target sequence for SRCAP (NM_006662.1,1620-1638).
gggtccccatttaatcatt

SEQ ID NO: 40978 - DNA, 19 bp, Homo sapiens
  siRNA target sequence for SRCAP (NM_006662.1,1622-1640).
gtccccatttaatcattgt

SEQ ID NO: 40979 - DNA, 19 bp, Homo sapiens
  siRNA target sequence for SRCAP (NM_006662.1,1642-1660).
cccaccagcgtgatgttga

SEQ ID NO: 40980 - DNA, 19 bp, Homo sapiens
  siRNA target sequence for SRCAP (NM_006662.1,1768-1786).
gcctttcatgtgtgtatca

SEQ ID NO: 40981 - DNA, 19 bp, Homo sapiens
  siRNA target sequence for SRCAP (NM_006662.1,1770-1788).
ctttcatgtgtgtatcaca

SEQ ID NO: 40982 - DNA, 19 bp, Homo sapiens
  siRNA target sequence for SRCAP (NM_006662.1,1777-1795).
gtgtgtatcacatcttaca

SEQ ID NO: 40983 - DNA, 19 bp, Homo sapiens
  siRNA target sequence for SRCAP (NM_006662.1,1861-1879).
gcgcagaacatcaagaact

SEQ ID NO: 40984 - DNA, 19 bp, Homo sapiens
  siRNA target sequence for SRCAP (NM_006662.1,1862-1880).
cgcagaacatcaagaactt

SEQ ID NO: 40985 - DNA, 19 bp, Homo sapiens
  siRNA target sequence for SRCAP (NM_006662.1,2028-2046).
caaggagtggttctctaat

SEQ ID NO: 40986 - DNA, 19 bp, Homo sapiens
  siRNA target sequence for SRCAP (NM_006662.1,2048-2066).
ccctaactggcatgattga

SEQ ID NO: 40987 - DNA, 19 bp, Homo sapiens
  siRNA target sequence for SRCAP (NM_006662.1,2070-2088).
cagccaagagtataatgaa

SEQ ID NO: 40988 - DNA, 19 bp, Homo sapiens
  siRNA target sequence for SRCAP (NM_006662.1,2208-2226).
gcgtcaacgctgtctctat

SEQ ID NO: 40989 - DNA, 19 bp, Homo sapiens
  siRNA target sequence for SRCAP (NM_006662.1,2216-2234).
gctgtctctatgatgactt

SEQ ID NO: 40990 - DNA, 19 bp, Homo sapiens
  siRNA target sequence for SRCAP (NM_006662.1,2219-2237).
gtctctatgatgacttcat

SEQ ID NO: 40991 - DNA, 19 bp, Homo sapiens
  siRNA target sequence for SRCAP (NM_006662.1,2280-2298).
catgagcgtcatcaacatt

SEQ ID NO: 40992 - DNA, 19 bp, Homo sapiens
  siRNA target sequence for SRCAP (NM_006662.1,2310-2328).
gagaaaagtttgcaatcat

SEQ ID NO: 40993 - DNA, 19 bp, Homo sapiens
  siRNA target sequence for SRCAP (NM_006662.1,2351-2369).
cggttacctcccctttcat

SEQ ID NO: 40994 - DNA, 19 bp, Homo sapiens
  siRNA target sequence for SRCAP (NM_006662.1,2353-2371).
gttacctcccctttcatca

SEQ ID NO: 40995 - DNA, 19 bp, Homo sapiens
  siRNA target sequence for SRCAP (NM_006662.1,2429-2447).
ccctccagcggatagacat

SEQ ID NO: 40996 - DNA, 19 bp, Homo sapiens
  siRNA target sequence for SRCAP (NM_006662.1,2448-2466).
gggtcgatttgaccttatt

SEQ ID NO: 40997 - DNA, 19 bp, Homo sapiens
  siRNA target sequence for SRCAP (NM_006662.1,2477-2495).
gtcgtgtctctcgatatga

SEQ ID NO: 40998 - DNA, 19 bp, Homo sapiens
  siRNA target sequence for SRCAP (NM_006662.1,2489-2507).
gatatgaggcagacacatt

SEQ ID NO: 40999 - DNA, 19 bp, Homo sapiens
  siRNA target sequence for SRCAP (NM_006662.1,2578-2596).
cccaagccagtcaagatga

SEQ ID NO: 41000 - DNA, 19 bp, Homo sapiens
  siRNA target sequence for SRCAP (NM_006662.1,3258-3276).
caacaagctgactttgact

SEQ ID NO: 41001 - DNA, 19 bp, Homo sapiens
  siRNA target sequence for SRCAP (NM_006662.1,3328-3346).
ccaccaaccatggtgaata

SEQ ID NO: 41002 - DNA, 19 bp, Homo sapiens
  siRNA target sequence for SRCAP (NM_006662.1,3329-3347).
caccaaccatggtgaataa

SEQ ID NO: 41003 - DNA, 19 bp, Homo sapiens
  siRNA target sequence for SRCAP (NM_006662.1,3353-3371).
gcgtggtgaagattgtagt

SEQ ID NO: 41004 - DNA, 19 bp, Homo sapiens
  siRNA target sequence for SRCAP (NM_006662.1,3724-3742).
gtctcagttccattgtcat

SEQ ID NO: 41005 - DNA, 19 bp, Homo sapiens
  siRNA target sequence for SRCAP (NM_006662.1,4033-4051).
gttccagggttgaactcaa

SEQ ID NO: 41006 - DNA, 19 bp, Homo sapiens
  siRNA target sequence for SRCAP (NM_006662.1,4402-4420).
ccatcatcaactcaaacta

SEQ ID NO: 41007 - DNA, 19 bp, Homo sapiens
  siRNA target sequence for SRCAP (NM_006662.1,4403-4421).
catcatcaactcaaactat

SEQ ID NO: 41008 - DNA, 19 bp, Homo sapiens
  siRNA target sequence for SRCAP (NM_006662.1,4562-4580).
cctttccaactcagacatt

SEQ ID NO: 41009 - DNA, 19 bp, Homo sapiens
  siRNA target sequence for SRCAP (NM_006662.1,4567-4585).
ccaactcagacattgtcat

SEQ ID NO: 41010 - DNA, 19 bp, Homo sapiens
  siRNA target sequence for SRCAP (NM_006662.1,4616-4634).
cagcccagacactgtcttt

SEQ ID NO: 41011 - DNA, 19 bp, Homo sapiens
  siRNA target sequence for SRCAP (NM_006662.1,4949-4967).
cccggctgcctgtttccaa

SEQ ID NO: 41012 - DNA, 19 bp, Homo sapiens
  siRNA target sequence for SRCAP (NM_006662.1,5132-5150).
gcctggaacggattttcca

SEQ ID NO: 41013 - DNA, 19 bp, Homo sapiens
  siRNA target sequence for SRCAP (NM_006662.1,5137-5155).
gaacggattttccaactta

SEQ ID NO: 41014 - DNA, 19 bp, Homo sapiens
  siRNA target sequence for SRCAP (NM_006662.1,5491-5509).
cctttgcaccgtattgtgt

SEQ ID NO: 41015 - DNA, 19 bp, Homo sapiens
  siRNA target sequence for SRCAP (NM_006662.1,5497-5515).
caccgtattgtgtgtaaca

SEQ ID NO: 41016 - DNA, 19 bp, Homo sapiens
  siRNA target sequence for SRCAP (NM_006662.1,5520-5538).
cacccagttccctgactta

SEQ ID NO: 41017 - DNA, 19 bp, Homo sapiens
  siRNA target sequence for SRCAP (NM_006662.1,5523-5541).
ccagttccctgacttaaga

SEQ ID NO: 41018 - DNA, 19 bp, Homo sapiens
  siRNA target sequence for SRCAP (NM_006662.1,5639-5657).
cccgaatgctggatgtatt

SEQ ID NO: 41019 - DNA, 19 bp, Homo sapiens
  siRNA target sequence for SRCAP (NM_006662.1,5672-5690).
cctaccatggccatctcta

SEQ ID NO: 41020 - DNA, 19 bp, Homo sapiens
  siRNA target sequence for SRCAP (NM_006662.1,5694-5712).
gcgcctggatggatctact

SEQ ID NO: 41021 - DNA, 19 bp, Homo sapiens
  siRNA target sequence for SRCAP (NM_006662.1,5695-5713).
cgcctggatggatctacta

SEQ ID NO: 41022 - DNA, 19 bp, Homo sapiens
  siRNA target sequence for SRCAP (NM_006662.1,5697-5715).
cctggatggatctactaga

SEQ ID NO: 41023 - DNA, 19 bp, Homo sapiens
  siRNA target sequence for SRCAP (NM_006662.1,5700-5718).
ggatggatctactagagtt

SEQ ID NO: 41024 - DNA, 19 bp, Homo sapiens
  siRNA target sequence for SRCAP (NM_006662.1,5705-5723).
gatctactagagttgaaca

SEQ ID NO: 41025 - DNA, 19 bp, Homo sapiens
  siRNA target sequence for SRCAP (NM_006662.1,5733-5751).
cttgatggaacggttcaat

SEQ ID NO: 41026 - DNA, 19 bp, Homo sapiens
  siRNA target sequence for SRCAP (NM_006662.1,5906-5924).
cccgggatgtccacatata

SEQ ID NO: 41027 - DNA, 19 bp, Homo sapiens
  siRNA target sequence for SRCAP (NM_006662.1,5907-5925).
ccgggatgtccacatatat

SEQ ID NO: 41028 - DNA, 19 bp, Homo sapiens
  siRNA target sequence for SRCAP (NM_006662.1,5908-5926).
cgggatgtccacatatata

SEQ ID NO: 41029 - DNA, 19 bp, Homo sapiens
  siRNA target sequence for SRCAP (NM_006662.1,5919-5937).
catatataggcttatcagt

SEQ ID NO: 41030 - DNA, 19 bp, Homo sapiens
  siRNA target sequence for SRCAP (NM_006662.1,6135-6153).
cagcaagcagactcatatt

SEQ ID NO: 41031 - DNA, 19 bp, Homo sapiens
  siRNA target sequence for SRCAP (NM_006662.1,6374-6392).
gctatgccatgaaattcct

SEQ ID NO: 41032 - DNA, 19 bp, Homo sapiens
  siRNA target sequence for SRCAP (NM_006662.1,6673-6691).
gtcatatccgcccatcaaa

SEQ ID NO: 41033 - DNA, 19 bp, Homo sapiens
  siRNA target sequence for SRCAP (NM_006662.1,6675-6693).
catatccgcccatcaaact

SEQ ID NO: 41034 - DNA, 19 bp, Homo sapiens
  siRNA target sequence for SRCAP (NM_006662.1,6841-6859).
gccccaaatccaataacca

SEQ ID NO: 41035 - DNA, 19 bp, Homo sapiens
  siRNA target sequence for SRCAP (NM_006662.1,6842-6860).
ccccaaatccaataaccat

SEQ ID NO: 41036 - DNA, 19 bp, Homo sapiens
  siRNA target sequence for SRCAP (NM_006662.1,6981-6999).
ccaaacctgtcttgtaact

SEQ ID NO: 41037 - DNA, 19 bp, Homo sapiens
  siRNA target sequence for SRCAP (NM_006662.1,7041-7059).
ctctgcctcagtcactaat

SEQ ID NO: 41038 - DNA, 19 bp, Homo sapiens
  siRNA target sequence for SRCAP (NM_006662.1,7043-7061).
ctgcctcagtcactaatct

SEQ ID NO: 41039 - DNA, 19 bp, Homo sapiens
  siRNA target sequence for SRCAP (NM_006662.1,7220-7238).
cagagaagaacctttctct

SEQ ID NO: 41040 - DNA, 19 bp, Homo sapiens
  siRNA target sequence for SRCAP (NM_006662.1,7685-7703).
caggacggctggtaactgt

SEQ ID NO: 41041 - DNA, 19 bp, Homo sapiens
  siRNA target sequence for SRCAP (NM_006662.1,8085-8103).
cttgaagggaaaaaccaat

SEQ ID NO: 41042 - DNA, 19 bp, Homo sapiens
  siRNA target sequence for SRCAP (NM_006662.1,8124-8142).
gcctgagaccctaattgtt

SEQ ID NO: 41043 - DNA, 19 bp, Homo sapiens
  siRNA target sequence for SRCAP (NM_006662.1,8157-8175).
ggaaccacagcttattcct

SEQ ID NO: 41044 - DNA, 19 bp, Homo sapiens
  siRNA target sequence for SRCAP (NM_006662.1,8258-8276).
cccctaaagcacgagattt

SEQ ID NO: 41045 - DNA, 19 bp, Homo sapiens
  siRNA target sequence for SRCAP (NM_006662.1,8511-8529).
ccgtgacagcacttctgtt

SEQ ID NO: 41046 - DNA, 19 bp, Homo sapiens
  siRNA target sequence for SRCAP (NM_006662.1,8732-8750).
ggccaggcgggttggaatt

SEQ ID NO: 41047 - DNA, 19 bp, Homo sapiens
  siRNA target sequence for SRCAP (NM_006662.1,8734-8752).
ccaggcgggttggaattga

SEQ ID NO: 41048 - DNA, 19 bp, Homo sapiens
  siRNA target sequence for SRCAP (NM_006662.1,8822-8840).
cactagagactgagaagtt

SEQ ID NO: 41049 - DNA, 19 bp, Homo sapiens
  siRNA target sequence for SRCAP (NM_006662.1,8922-8940).
ggggcctgagggttcagta

SEQ ID NO: 41050 - DNA, 19 bp, Homo sapiens
  siRNA target sequence for SREBF2 (NM_004599.2,253-271).
cgacgagatgctgcaattt

SEQ ID NO: 41051 - DNA, 19 bp, Homo sapiens
  siRNA target sequence for SREBF2 (NM_004599.2,257-275).
gagatgctgcaatttgtca

SEQ ID NO: 41052 - DNA, 19 bp, Homo sapiens
  siRNA target sequence for SREBF2 (NM_004599.2,288-306).
gagagttccctgacttgtt

SEQ ID NO: 41053 - DNA, 19 bp, Homo sapiens
  siRNA target sequence for SREBF2 (NM_004599.2,445-463).
cacccaggtcacattacct

SEQ ID NO: 41054 - DNA, 19 bp, Homo sapiens
  siRNA target sequence for SREBF2 (NM_004599.2,544-562).
cagggcaactcctattctt

SEQ ID NO: 41055 - DNA, 19 bp, Homo sapiens
  siRNA target sequence for SREBF2 (NM_004599.2,605-623).
caacaacagacggtaatga

SEQ ID NO: 41056 - DNA, 19 bp, Homo sapiens
  siRNA target sequence for SREBF2 (NM_004599.2,608-626).
caacagacggtaatgatca

SEQ ID NO: 41057 - DNA, 19 bp, Homo sapiens
  siRNA target sequence for SREBF2 (NM_004599.2,685-703).
gaatgcagctactagcttt

SEQ ID NO: 41058 - DNA, 19 bp, Homo sapiens
  siRNA target sequence for SREBF2 (NM_004599.2,948-966).
cagatggcagccctgttat

SEQ ID NO: 41059 - DNA, 19 bp, Homo sapiens
  siRNA target sequence for SREBF2 (NM_004599.2,1161-1179).
ggcggacaacccataatat

SEQ ID NO: 41060 - DNA, 19 bp, Homo sapiens
  siRNA target sequence for SREBF2 (NM_004599.2,1163-1181).
cggacaacccataatatca

SEQ ID NO: 41061 - DNA, 19 bp, Homo sapiens
  siRNA target sequence for SREBF2 (NM_004599.2,1164-1182).
ggacaacccataatatcat

SEQ ID NO: 41062 - DNA, 19 bp, Homo sapiens
  siRNA target sequence for SREBF2 (NM_004599.2,1165-1183).
gacaacccataatatcatt

SEQ ID NO: 41063 - DNA, 19 bp, Homo sapiens
  siRNA target sequence for SREBF2 (NM_004599.2,1211-1229).
gacaaaatcatcgaattga

SEQ ID NO: 41064 - DNA, 19 bp, Homo sapiens
  siRNA target sequence for SREBF2 (NM_004599.2,1277-1295).
ctgaggaaggccattgatt

SEQ ID NO: 41065 - DNA, 19 bp, Homo sapiens
  siRNA target sequence for SREBF2 (NM_004599.2,1281-1299).
ggaaggccattgattacat

SEQ ID NO: 41066 - DNA, 19 bp, Homo sapiens
  siRNA target sequence for SREBF2 (NM_004599.2,1306-1324).
cttgcagcaggtcaatcat

SEQ ID NO: 41067 - DNA, 19 bp, Homo sapiens
  siRNA target sequence for SREBF2 (NM_004599.2,1355-1373).
ctggcaaatcaaaagaaca

SEQ ID NO: 41068 - DNA, 19 bp, Homo sapiens
  siRNA target sequence for SREBF2 (NM_004599.2,1398-1416).
gcagtctggtggacaatga

SEQ ID NO: 41069 - DNA, 19 bp, Homo sapiens
  siRNA target sequence for SREBF2 (NM_004599.2,1527-1545).
caggaagccctctattgga

SEQ ID NO: 41070 - DNA, 19 bp, Homo sapiens
  siRNA target sequence for SREBF2 (NM_004599.2,1536-1554).
ctctattggatgatgcaaa

SEQ ID NO: 41071 - DNA, 19 bp, Homo sapiens
  siRNA target sequence for SREBF2 (NM_004599.2,1722-1740).
gccgcagtgtcctgtcatt

SEQ ID NO: 41072 - DNA, 19 bp, Homo sapiens
  siRNA target sequence for SREBF2 (NM_004599.2,1774-1792).
gatgcctactcttctctta

SEQ ID NO: 41073 - DNA, 19 bp, Homo sapiens
  siRNA target sequence for SREBF2 (NM_004599.2,1789-1807).
cttatggctggtaaatggt

SEQ ID NO: 41074 - DNA, 19 bp, Homo sapiens
  siRNA target sequence for SREBF2 (NM_004599.2,1795-1813).
gctggtaaatggtgtgatt

SEQ ID NO: 41075 - DNA, 19 bp, Homo sapiens
  siRNA target sequence for SREBF2 (NM_004599.2,1814-1832).
gtcctgagcgtctttgtga

SEQ ID NO: 41076 - DNA, 19 bp, Homo sapiens
  siRNA target sequence for SREBF2 (NM_004599.2,1946-1964).
gctgccggcaacctacaaa

SEQ ID NO: 41077 - DNA, 19 bp, Homo sapiens
  siRNA target sequence for SREBF2 (NM_004599.2,2071-2089).
gcgctggctgctcaagaaa

SEQ ID NO: 41078 - DNA, 19 bp, Homo sapiens
  siRNA target sequence for SREBF2 (NM_004599.2,2076-2094).
ggctgctcaagaaagtctt

SEQ ID NO: 41079 - DNA, 19 bp, Homo sapiens
  siRNA target sequence for SREBF2 (NM_004599.2,2130-2148).
gctttgaagacgaagctaa

SEQ ID NO: 41080 - DNA, 19 bp, Homo sapiens
  siRNA target sequence for SREBF2 (NM_004599.2,2226-2244).
ccgcctgttccgatgtaca

SEQ ID NO: 41081 - DNA, 19 bp, Homo sapiens
  siRNA target sequence for SREBF2 (NM_004599.2,2229-2247).
cctgttccgatgtacacat

SEQ ID NO: 41082 - DNA, 19 bp, Homo sapiens
  siRNA target sequence for SREBF2 (NM_004599.2,2298-2316).
cgagcacactggttgagat

SEQ ID NO: 41083 - DNA, 19 bp, Homo sapiens
  siRNA target sequence for SREBF2 (NM_004599.2,2510-2528).
gccaaggagagtctatact

SEQ ID NO: 41084 - DNA, 19 bp, Homo sapiens
  siRNA target sequence for SREBF2 (NM_004599.2,2512-2530).
caaggagagtctatactgt

SEQ ID NO: 41085 - DNA, 19 bp, Homo sapiens
  siRNA target sequence for SREBF2 (NM_004599.2,2587-2605).
cctgctggagcgagctata

SEQ ID NO: 41086 - DNA, 19 bp, Homo sapiens
  siRNA target sequence for SREBF2 (NM_004599.2,2797-2815).
gtggacgtctgcaatcact

SEQ ID NO: 41087 - DNA, 19 bp, Homo sapiens
  siRNA target sequence for SREBF2 (NM_004599.2,2847-2865).
cagctgtgcgctctcattt

SEQ ID NO: 41088 - DNA, 19 bp, Homo sapiens
  siRNA target sequence for SREBF2 (NM_004599.2,2849-2867).
gctgtgcgctctcatttta

SEQ ID NO: 41089 - DNA, 19 bp, Homo sapiens
  siRNA target sequence for SREBF2 (NM_004599.2,2852-2870).
gtgcgctctcattttacca

SEQ ID NO: 41090 - DNA, 19 bp, Homo sapiens
  siRNA target sequence for SREBF2 (NM_004599.2,2854-2872).
gcgctctcattttaccaaa

SEQ ID NO: 41091 - DNA, 19 bp, Homo sapiens
  siRNA target sequence for SREBF2 (NM_004599.2,3118-3136).
gacagcgctctggcaaaaa

SEQ ID NO: 41092 - DNA, 19 bp, Homo sapiens
  siRNA target sequence for SREBF2 (NM_004599.2,3120-3138).
cagcgctctggcaaaaaca

SEQ ID NO: 41093 - DNA, 19 bp, Homo sapiens
  siRNA target sequence for SREBF2 (NM_004599.2,3538-3556).
cgactgccagcagatgatt

SEQ ID NO: 41094 - DNA, 19 bp, Homo sapiens
  siRNA target sequence for SRISNF2L (NM_015106.1,59-77).
ctactccgggaggatcaat

SEQ ID NO: 41095 - DNA, 19 bp, Homo sapiens
  siRNA target sequence for SRISNF2L (NM_015106.1,187-205).
cctccctgaggaaattgct

SEQ ID NO: 41096 - DNA, 19 bp, Homo sapiens
  siRNA target sequence for SRISNF2L (NM_015106.1,188-206).
ctccctgaggaaattgctt

SEQ ID NO: 41097 - DNA, 19 bp, Homo sapiens
  siRNA target sequence for SRISNF2L (NM_015106.1,191-209).
cctgaggaaattgctttaa

SEQ ID NO: 41098 - DNA, 19 bp, Homo sapiens
  siRNA target sequence for SRISNF2L (NM_015106.1,249-267).
cccaggaagtcatttgttt

SEQ ID NO: 41099 - DNA, 19 bp, Homo sapiens
  siRNA target sequence for SRISNF2L (NM_015106.1,403-421).
gggtggcacccatgtcaat

SEQ ID NO: 41100 - DNA, 19 bp, Homo sapiens
  siRNA target sequence for SRISNF2L (NM_015106.1,408-426).
gcacccatgtcaatgatgt

SEQ ID NO: 41101 - DNA, 19 bp, Homo sapiens
  siRNA target sequence for SRISNF2L (NM_015106.1,411-429).
cccatgtcaatgatgtctt

SEQ ID NO: 41102 - DNA, 19 bp, Homo sapiens
  siRNA target sequence for SRISNF2L (NM_015106.1,511-529).
gttggcacgggctgtgaaa

SEQ ID NO: 41103 - DNA, 19 bp, Homo sapiens
  siRNA target sequence for SRISNF2L (NM_015106.1,543-561).
gcgggatccggttccttta

SEQ ID NO: 41104 - DNA, 19 bp, Homo sapiens
  siRNA target sequence for SRISNF2L (NM_015106.1,546-564).
ggatccggttcctttacga

SEQ ID NO: 41105 - DNA, 19 bp, Homo sapiens
  siRNA target sequence for SRISNF2L (NM_015106.1,547-565).
gatccggttcctttacgat

SEQ ID NO: 41106 - DNA, 19 bp, Homo sapiens
  siRNA target sequence for SRISNF2L (NM_015106.1,553-571).
gttcctttacgataaccta

SEQ ID NO: 41107 - DNA, 19 bp, Homo sapiens
  siRNA target sequence for SRISNF2L (NM_015106.1,575-593).
gagtctctggagaggttta

SEQ ID NO: 41108 - DNA, 19 bp, Homo sapiens
  siRNA target sequence for SRISNF2L (NM_015106.1,685-703).
ccacacgccagccaaaaca

SEQ ID NO: 41109 - DNA, 19 bp, Homo sapiens
  siRNA target sequence for SRISNF2L (NM_015106.1,710-728).
gccattgtgccggttaata

SEQ ID NO: 41110 - DNA, 19 bp, Homo sapiens
  siRNA target sequence for SRISNF2L (NM_015106.1,712-730).
cattgtgccggttaatact

SEQ ID NO: 41111 - DNA, 19 bp, Homo sapiens
  siRNA target sequence for SRISNF2L (NM_015106.1,720-738).
cggttaatactcttcagaa

SEQ ID NO: 41112 - DNA, 19 bp, Homo sapiens
  siRNA target sequence for SRISNF2L (NM_015106.1,741-759).
ggctggcagagttcaacat

SEQ ID NO: 41113 - DNA, 19 bp, Homo sapiens
  siRNA target sequence for SRISNF2L (NM_015106.1,809-827).
gtccagcctcggttcttta

SEQ ID NO: 41114 - DNA, 19 bp, Homo sapiens
  siRNA target sequence for SRISNF2L (NM_015106.1,811-829).
ccagcctcggttctttaaa

SEQ ID NO: 41115 - DNA, 19 bp, Homo sapiens
  siRNA target sequence for SRISNF2L (NM_015106.1,814-832).
gcctcggttctttaaagtt

SEQ ID NO: 41116 - DNA, 19 bp, Homo sapiens
  siRNA target sequence for SRISNF2L (NM_015106.1,859-877).
gatggcatctcgtgctaaa

SEQ ID NO: 41117 - DNA, 19 bp, Homo sapiens
  siRNA target sequence for SRISNF2L (NM_015106.1,864-882).
catctcgtgctaaagtgat

SEQ ID NO: 41118 - DNA, 19 bp, Homo sapiens
  siRNA target sequence for SRISNF2L (NM_015106.1,936-954).
gactcctcactctgaagaa

SEQ ID NO: 41119 - DNA, 19 bp, Homo sapiens
  siRNA target sequence for SRISNF2L (NM_015106.1,964-982).
cacaggtagaccgaagaaa

SEQ ID NO: 41120 - DNA, 19 bp, Homo sapiens
  siRNA target sequence for SRISNF2L (NM_015106.1,1075-1093).
ccctggccctgatgtagta

SEQ ID NO: 41121 - DNA, 19 bp, Homo sapiens
  siRNA target sequence for SRISNF2L (NM_015106.1,1076-1094).
cctggccctgatgtagtaa

SEQ ID NO: 41122 - DNA, 19 bp, Homo sapiens
  siRNA target sequence for SRISNF2L (NM_015106.1,1077-1095).
ctggccctgatgtagtaat

SEQ ID NO: 41123 - DNA, 19 bp, Homo sapiens
  siRNA target sequence for SRISNF2L (NM_015106.1,1079-1097).
ggccctgatgtagtaatct

SEQ ID NO: 41124 - DNA, 19 bp, Homo sapiens
  siRNA target sequence for SRISNF2L (NM_015106.1,1103-1121).
gagggacaccgcatcaaaa

SEQ ID NO: 41125 - DNA, 19 bp, Homo sapiens
  siRNA target sequence for SRISNF2L (NM_015106.1,1106-1124).
ggacaccgcatcaaaaact

SEQ ID NO: 41126 - DNA, 19 bp, Homo sapiens
  siRNA target sequence for SRISNF2L (NM_015106.1,1185-1203).
ctgggtaccctctgcaaaa

SEQ ID NO: 41127 - DNA, 19 bp, Homo sapiens
  siRNA target sequence for SRISNF2L (NM_015106.1,1187-1205).
gggtaccctctgcaaaaca

SEQ ID NO: 41128 - DNA, 19 bp, Homo sapiens
  siRNA target sequence for SRISNF2L (NM_015106.1,1188-1206).
ggtaccctctgcaaaacaa

SEQ ID NO: 41129 - DNA, 19 bp, Homo sapiens
  siRNA target sequence for SRISNF2L (NM_015106.1,1267-1285).
ggagttcagcaacatgttt

SEQ ID NO: 41130 - DNA, 19 bp, Homo sapiens
  siRNA target sequence for SRISNF2L (NM_015106.1,1468-1486).
gatccagcgagatttgtat

SEQ ID NO: 41131 - DNA, 19 bp, Homo sapiens
  siRNA target sequence for SRISNF2L (NM_015106.1,1471-1489).
ccagcgagatttgtataca

SEQ ID NO: 41132 - DNA, 19 bp, Homo sapiens
  siRNA target sequence for SRISNF2L (NM_015106.1,1543-1561).
cccccttaaggcattctgt

SEQ ID NO: 41133 - DNA, 19 bp, Homo sapiens
  siRNA target sequence for SRISNF2L (NM_015106.1,1639-1657).
cctagacgtggaagaactt

SEQ ID NO: 41134 - DNA, 19 bp, Homo sapiens
  siRNA target sequence for SRISNF2L (NM_015106.1,1740-1758).
gagaggcaaccaatagcaa

SEQ ID NO: 41135 - DNA, 19 bp, Homo sapiens
  siRNA target sequence for SRISNF2L (NM_015106.1,1792-1810).
ggagcgaggcaacaacatt

SEQ ID NO: 41136 - DNA, 19 bp, Homo sapiens
  siRNA target sequence for SRISNF2L (NM_015106.1,1796-1814).
cgaggcaacaacattgtca

SEQ ID NO: 41137 - DNA, 19 bp, Homo sapiens
  siRNA target sequence for SRISNF2L (NM_015106.1,1925-1943).
gacaagatccttgtgttta

SEQ ID NO: 41138 - DNA, 19 bp, Homo sapiens
  siRNA target sequence for SRISNF2L (NM_015106.1,1937-1955).
gtgtttagccagagtcttt

SEQ ID NO: 41139 - DNA, 19 bp, Homo sapiens
  siRNA target sequence for SRISNF2L (NM_015106.1,1965-1983).
ctctcatcgaggaattcct

SEQ ID NO: 41140 - DNA, 19 bp, Homo sapiens
  siRNA target sequence for SRISNF2L (NM_015106.1,1975-1993).
ggaattccttggaaaacga

SEQ ID NO: 41141 - DNA, 19 bp, Homo sapiens
  siRNA target sequence for SRISNF2L (NM_015106.1,2090-2108).
gagagggagcggcttatta

SEQ ID NO: 41142 - DNA, 19 bp, Homo sapiens
  siRNA target sequence for SRISNF2L (NM_015106.1,2094-2112).
gggagcggcttattaatca

SEQ ID NO: 41143 - DNA, 19 bp, Homo sapiens
  siRNA target sequence for SRISNF2L (NM_015106.1,2096-2114).
gagcggcttattaatcagt

SEQ ID NO: 41144 - DNA, 19 bp, Homo sapiens
  siRNA target sequence for SRISNF2L (NM_015106.1,2100-2118).
ggcttattaatcagttcaa

SEQ ID NO: 41145 - DNA, 19 bp, Homo sapiens
  siRNA target sequence for SRISNF2L (NM_015106.1,2167-2185).
cggatgcttgggtgtgaat

SEQ ID NO: 41146 - DNA, 19 bp, Homo sapiens
  siRNA target sequence for SRISNF2L (NM_015106.1,2169-2187).
gatgcttgggtgtgaatct

SEQ ID NO: 41147 - DNA, 19 bp, Homo sapiens
  siRNA target sequence for SRISNF2L (NM_015106.1,2300-2318).
cgccttgtggctgattaca

SEQ ID NO: 41148 - DNA, 19 bp, Homo sapiens
  siRNA target sequence for SRISNF2L (NM_015106.1,2302-2320).
ccttgtggctgattacact

SEQ ID NO: 41149 - DNA, 19 bp, Homo sapiens
  siRNA target sequence for SRISNF2L (NM_015106.1,2308-2326).
ggctgattacactctagaa

SEQ ID NO: 41150 - DNA, 19 bp, Homo sapiens
  siRNA target sequence for SRISNF2L (NM_015106.1,2309-2327).
gctgattacactctagaaa

SEQ ID NO: 41151 - DNA, 19 bp, Homo sapiens
  siRNA target sequence for SRISNF2L (NM_015106.1,2310-2328).
ctgattacactctagaaaa

SEQ ID NO: 41152 - DNA, 19 bp, Homo sapiens
  siRNA target sequence for SRISNF2L (NM_015106.1,2332-2350).
gatctatgaccgtcagatt

SEQ ID NO: 41153 - DNA, 19 bp, Homo sapiens
  siRNA target sequence for SRISNF2L (NM_015106.1,2377-2395).
ggtggatgatctaaatcca

SEQ ID NO: 41154 - DNA, 19 bp, Homo sapiens
  siRNA target sequence for SRISNF2L (NM_015106.1,2454-2472).
cagctccccaagtttcctt

SEQ ID NO: 41155 - DNA, 19 bp, Homo sapiens
  siRNA target sequence for SRISNF2L (NM_015106.1,2462-2480).
caagtttccttgaacgtaa

SEQ ID NO: 41156 - DNA, 19 bp, Homo sapiens
  siRNA target sequence for SRISNF2L (NM_015106.1,2547-2565).
ctttcgagcatgagtcatt

SEQ ID NO: 41157 - DNA, 19 bp, Homo sapiens
  siRNA target sequence for SRISNF2L (NM_015106.1,2566-2584).
gctcttgaaccgaaaggat

SEQ ID NO: 41158 - DNA, 19 bp, Homo sapiens
  siRNA target sequence for SRISNF2L (NM_015106.1,2666-2684).
ccatcgtatgcgcagtatt

SEQ ID NO: 41159 - DNA, 19 bp, Homo sapiens
  siRNA target sequence for SRISNF2L (NM_015106.1,2667-2685).
catcgtatgcgcagtatta

SEQ ID NO: 41160 - DNA, 19 bp, Homo sapiens
  siRNA target sequence for SRISNF2L (NM_015106.1,2827-2845).
cccattgggaggaagtgta

SEQ ID NO: 41161 - DNA, 19 bp, Homo sapiens
  siRNA target sequence for SRISNF2L (NM_015106.1,2828-2846).
ccattgggaggaagtgtaa

SEQ ID NO: 41162 - DNA, 19 bp, Homo sapiens
  siRNA target sequence for SRISNF2L (NM_015106.1,2852-2870).
gcctccagcacaaatccat

SEQ ID NO: 41163 - DNA, 19 bp, Homo sapiens
  siRNA target sequence for SRISNF2L (NM_015106.1,2926-2944).
ggtcaccacgacagatatt

SEQ ID NO: 41164 - DNA, 19 bp, Homo sapiens
  siRNA target sequence for SRISNF2L (NM_015106.1,2929-2947).
caccacgacagatattgtt

SEQ ID NO: 41165 - DNA, 19 bp, Homo sapiens
  siRNA target sequence for SRISNF2L (NM_015106.1,2931-2949).
ccacgacagatattgttat

SEQ ID NO: 41166 - DNA, 19 bp, Homo sapiens
  siRNA target sequence for SRISNF2L (NM_015106.1,2972-2990).
gatgtacaggcaagaatta

SEQ ID NO: 41167 - DNA, 19 bp, Homo sapiens
  siRNA target sequence for SRISNF2L (NM_015106.1,3071-3089).
cgggcaactggcaaaccaa

SEQ ID NO: 41168 - DNA, 19 bp, Homo sapiens
  siRNA target sequence for SRISNF2L (NM_015106.1,3072-3090).
gggcaactggcaaaccaaa

SEQ ID NO: 41169 - DNA, 19 bp, Homo sapiens
  siRNA target sequence for SRISNF2L (NM_015106.1,3468-3486).
ggggccacaagcgaaagtt

SEQ ID NO: 41170 - DNA, 19 bp, Homo sapiens
  siRNA target sequence for SRISNF2L (NM_015106.1,3552-3570).
ccgtgcagccgtatgaaca

SEQ ID NO: 41171 - DNA, 19 bp, Homo sapiens
  siRNA target sequence for SRISNF2L (NM_015106.1,3603-3621).
cacccgtctccttaaacca

SEQ ID NO: 41172 - DNA, 19 bp, Homo sapiens
  siRNA target sequence for SRISNF2L (NM_015106.1,3605-3623).
cccgtctccttaaaccata

SEQ ID NO: 41173 - DNA, 19 bp, Homo sapiens
  siRNA target sequence for SRISNF2L (NM_015106.1,3606-3624).
ccgtctccttaaaccataa

SEQ ID NO: 41174 - DNA, 19 bp, Homo sapiens
  siRNA target sequence for SRISNF2L (NM_015106.1,3886-3904).
gtccgagccgaggatgttt

SEQ ID NO: 41175 - DNA, 19 bp, Homo sapiens
  siRNA target sequence for SRISNF2L (NM_015106.1,4056-4074).
ggttcagctccaatgatga

SEQ ID NO: 41176 - DNA, 19 bp, Homo sapiens
  siRNA target sequence for SRISNF2L (NM_015106.1,4057-4075).
gttcagctccaatgatgat

SEQ ID NO: 41177 - DNA, 19 bp, Homo sapiens
  siRNA target sequence for SRY (NM_003140.1,167-185).
gctatgttaagcgtattca

SEQ ID NO: 41178 - DNA, 19 bp, Homo sapiens
  siRNA target sequence for SRY (NM_003140.1,168-186).
ctatgttaagcgtattcaa

SEQ ID NO: 41179 - DNA, 19 bp, Homo sapiens
  siRNA target sequence for SRY (NM_003140.1,179-197).
gtattcaacagcgatgatt

SEQ ID NO: 41180 - DNA, 19 bp, Homo sapiens
  siRNA target sequence for SRY (NM_003140.1,184-202).
caacagcgatgattacagt

SEQ ID NO: 41181 - DNA, 19 bp, Homo sapiens
  siRNA target sequence for SRY (NM_003140.1,258-276).
ctgaaagctgtaactctaa

SEQ ID NO: 41182 - DNA, 19 bp, Homo sapiens
  siRNA target sequence for SRY (NM_003140.1,260-278).
gaaagctgtaactctaagt

SEQ ID NO: 41183 - DNA, 19 bp, Homo sapiens
  siRNA target sequence for SRY (NM_003140.1,264-282).
gctgtaactctaagtatca

SEQ ID NO: 41184 - DNA, 19 bp, Homo sapiens
  siRNA target sequence for SRY (NM_003140.1,309-327).
gcaacgtccaggatagagt

SEQ ID NO: 41185 - DNA, 19 bp, Homo sapiens
  siRNA target sequence for SRY (NM_003140.1,375-393).
gcaagatggctctagagaa

SEQ ID NO: 41186 - DNA, 19 bp, Homo sapiens
  siRNA target sequence for SRY (NM_003140.1,448-466).
gcttactgaagccgaaaaa

SEQ ID NO: 41187 - DNA, 19 bp, Homo sapiens
  siRNA target sequence for SRY (NM_003140.1,449-467).
cttactgaagccgaaaaat

SEQ ID NO: 41188 - DNA, 19 bp, Homo sapiens
  siRNA target sequence for SRY (NM_003140.1,459-477).
ccgaaaaatggccattctt

SEQ ID NO: 41189 - DNA, 19 bp, Homo sapiens
  siRNA target sequence for SRY (NM_003140.1,512-530).
gagaaatacccgaattata

SEQ ID NO: 41190 - DNA, 19 bp, Homo sapiens
  siRNA target sequence for SRY (NM_003140.1,640-658).
cagggatgactgtacgaaa

SEQ ID NO: 41191 - DNA, 19 bp, Homo sapiens
  siRNA target sequence for SSA1 (NM_003141.2,112-130).
cagcagcacgcttgacaat

SEQ ID NO: 41192 - DNA, 19 bp, Homo sapiens
  siRNA target sequence for SSA1 (NM_003141.2,114-132).
gcagcacgcttgacaatga

SEQ ID NO: 41193 - DNA, 19 bp, Homo sapiens
  siRNA target sequence for SSA1 (NM_003141.2,115-133).
cagcacgcttgacaatgat

SEQ ID NO: 41194 - DNA, 19 bp, Homo sapiens
  siRNA target sequence for SSA1 (NM_003141.2,117-135).
gcacgcttgacaatgatgt

SEQ ID NO: 41195 - DNA, 19 bp, Homo sapiens
  siRNA target sequence for SSA1 (NM_003141.2,404-422).
cctgttctgtgagaaagat

SEQ ID NO: 41196 - DNA, 19 bp, Homo sapiens
  siRNA target sequence for SSA1 (NM_003141.2,566-584).
gaagttggaagtggaaatt

SEQ ID NO: 41197 - DNA, 19 bp, Homo sapiens
  siRNA target sequence for SSA1 (NM_003141.2,634-652).
ggattcacgcagagtttgt

SEQ ID NO: 41198 - DNA, 19 bp, Homo sapiens
  siRNA target sequence for SSA1 (NM_003141.2,833-851).
gctgcaggaggtgataatt

SEQ ID NO: 41199 - DNA, 19 bp, Homo sapiens
  siRNA target sequence for SSA1 (NM_003141.2,879-897).
ctgaaggacctggatatta

SEQ ID NO: 41200 - DNA, 19 bp, Homo sapiens
  siRNA target sequence for SSA1 (NM_003141.2,992-1010).
caatccgtggctgatactt

SEQ ID NO: 41201 - DNA, 19 bp, Homo sapiens
  siRNA target sequence for SSA1 (NM_003141.2,1001-1019).
gctgatactttcagaagat

SEQ ID NO: 41202 - DNA, 19 bp, Homo sapiens
  siRNA target sequence for SSA1 (NM_003141.2,1052-1070).
gagcatacctggaaatgaa

SEQ ID NO: 41203 - DNA, 19 bp, Homo sapiens
  siRNA target sequence for SSA1 (NM_003141.2,1116-1134).
cactctggaaaacattact

SEQ ID NO: 41204 - DNA, 19 bp, Homo sapiens
  siRNA target sequence for SSA1 (NM_003141.2,1194-1212).
cgcaggaaggggcactttt

SEQ ID NO: 41205 - DNA, 19 bp, Homo sapiens
  siRNA target sequence for SSA1 (NM_003141.2,1226-1244).
gagtggcttctggacaatt

SEQ ID NO: 41206 - DNA, 19 bp, Homo sapiens
  siRNA target sequence for SSA1 (NM_003141.2,1350-1368).
ggcatggtctccttctaca

SEQ ID NO: 41207 - DNA, 19 bp, Homo sapiens
  siRNA target sequence for SSA1 (NM_003141.2,1442-1460).
cagtcctggtttcaatgat

SEQ ID NO: 41208 - DNA, 19 bp, Homo sapiens
  siRNA target sequence for SSA1 (NM_003141.2,1490-1508).
ctgtccactgaatattgga

SEQ ID NO: 41209 - DNA, 19 bp, Homo sapiens
  siRNA target sequence for SSRP1 (NM_003146.2,309-327).
gaaaggttccatgaatgat

SEQ ID NO: 41210 - DNA, 19 bp, Homo sapiens
  siRNA target sequence for SSRP1 (NM_003146.2,344-362).
gccgtcagggcatcatctt

SEQ ID NO: 41211 - DNA, 19 bp, Homo sapiens
  siRNA target sequence for SSRP1 (NM_003146.2,347-365).
gtcagggcatcatcttcaa

SEQ ID NO: 41212 - DNA, 19 bp, Homo sapiens
  siRNA target sequence for SSRP1 (NM_003146.2,404-422).
gggagttaacagaaggtat

SEQ ID NO: 41213 - DNA, 19 bp, Homo sapiens
  siRNA target sequence for SSRP1 (NM_003146.2,473-491).
gccatgtctacaagtatga

SEQ ID NO: 41214 - DNA, 19 bp, Homo sapiens
  siRNA target sequence for SSRP1 (NM_003146.2,474-492).
ccatgtctacaagtatgat

SEQ ID NO: 41215 - DNA, 19 bp, Homo sapiens
  siRNA target sequence for SSRP1 (NM_003146.2,638-656).
gtgaccagccagtctttga

SEQ ID NO: 41216 - DNA, 19 bp, Homo sapiens
  siRNA target sequence for SSRP1 (NM_003146.2,891-909).
gactcctcgtggtcgttat

SEQ ID NO: 41217 - DNA, 19 bp, Homo sapiens
  siRNA target sequence for SSRP1 (NM_003146.2,893-911).
ctcctcgtggtcgttatga

SEQ ID NO: 41218 - DNA, 19 bp, Homo sapiens
  siRNA target sequence for SSRP1 (NM_003146.2,895-913).
cctcgtggtcgttatgaca

SEQ ID NO: 41219 - DNA, 19 bp, Homo sapiens
  siRNA target sequence for SSRP1 (NM_003146.2,943-961).
catggcaagacctttgact

SEQ ID NO: 41220 - DNA, 19 bp, Homo sapiens
  siRNA target sequence for SSRP1 (NM_003146.2,947-965).
gcaagacctttgactacaa

SEQ ID NO: 41221 - DNA, 19 bp, Homo sapiens
  siRNA target sequence for SSRP1 (NM_003146.2,980-998).
cagtactgcgtctgttttt

SEQ ID NO: 41222 - DNA, 19 bp, Homo sapiens
  siRNA target sequence for SSRP1 (NM_003146.2,1014-1032).
ccagcgccagatgttcttt

SEQ ID NO: 41223 - DNA, 19 bp, Homo sapiens
  siRNA target sequence for SSRP1 (NM_003146.2,1118-1136).
cgttgactctgaacatgaa

SEQ ID NO: 41224 - DNA, 19 bp, Homo sapiens
  siRNA target sequence for SSRP1 (NM_003146.2,1206-1224).
ggtcagccgggtcatgaaa

SEQ ID NO: 41225 - DNA, 19 bp, Homo sapiens
  siRNA target sequence for SSRP1 (NM_003146.2,1228-1246).
ctggtaaaccgcaagatca

SEQ ID NO: 41226 - DNA, 19 bp, Homo sapiens
  siRNA target sequence for SSRP1 (NM_003146.2,1405-1423).
gctcgtggtaccactacta

SEQ ID NO: 41227 - DNA, 19 bp, Homo sapiens
  siRNA target sequence for SSRP1 (NM_003146.2,1416-1434).
cactactactcgttccttt

SEQ ID NO: 41228 - DNA, 19 bp, Homo sapiens
  siRNA target sequence for SSRP1 (NM_003146.2,1452-1470).
caagcagggcactcagtat

SEQ ID NO: 41229 - DNA, 19 bp, Homo sapiens
  siRNA target sequence for SSRP1 (NM_003146.2,1456-1474).
cagggcactcagtatacct

SEQ ID NO: 41230 - DNA, 19 bp, Homo sapiens
  siRNA target sequence for SSRP1 (NM_003146.2,1492-1510).
gaggagtacgggaaactgt

SEQ ID NO: 41231 - DNA, 19 bp, Homo sapiens
  siRNA target sequence for SSRP1 (NM_003146.2,1494-1512).
ggagtacgggaaactgttt

SEQ ID NO: 41232 - DNA, 19 bp, Homo sapiens
  siRNA target sequence for SSRP1 (NM_003146.2,1497-1515).
gtacgggaaactgtttgat

SEQ ID NO: 41233 - DNA, 19 bp, Homo sapiens
  siRNA target sequence for SSRP1 (NM_003146.2,1500-1518).
cgggaaactgtttgatttt

SEQ ID NO: 41234 - DNA, 19 bp, Homo sapiens
  siRNA target sequence for SSRP1 (NM_003146.2,1572-1590).
cccaagctacgatgaatat

SEQ ID NO: 41235 - DNA, 19 bp, Homo sapiens
  siRNA target sequence for SSRP1 (NM_003146.2,1696-1714).
gaaaccgatgagtcattca

SEQ ID NO: 41236 - DNA, 19 bp, Homo sapiens
  siRNA target sequence for SSRP1 (NM_003146.2,1913-1931).
ggcccatgtctgcatacat

SEQ ID NO: 41237 - DNA, 19 bp, Homo sapiens
  siRNA target sequence for SSRP1 (NM_003146.2,1985-2003).
gcatcacggatctttccaa

SEQ ID NO: 41238 - DNA, 19 bp, Homo sapiens
  siRNA target sequence for SSRP1 (NM_003146.2,2117-2135).
gccgaggcgagtcttctaa

SEQ ID NO: 41239 - DNA, 19 bp, Homo sapiens
  siRNA target sequence for SSRP1 (NM_003146.2,2119-2137).
cgaggcgagtcttctaaga

SEQ ID NO: 41240 - DNA, 19 bp, Homo sapiens
  siRNA target sequence for SSRP1 (NM_003146.2,2132-2150).
ctaagagggacaagtcaaa

SEQ ID NO: 41241 - DNA, 19 bp, Homo sapiens
  siRNA target sequence for SSRP1 (NM_003146.2,2194-2212).
ccctctaggggctcatcat

SEQ ID NO: 41242 - DNA, 19 bp, Homo sapiens
  siRNA target sequence for SSRP1 (NM_003146.2,2233-2251).
ctaagcgagagcttcaaga

SEQ ID NO: 41243 - DNA, 19 bp, Homo sapiens
  siRNA target sequence for SSRP1 (NM_003146.2,2279-2297).
gctcttcgggagagaacaa

SEQ ID NO: 41244 - DNA, 19 bp, Homo sapiens
  siRNA target sequence for SUHW2 (NM_080764.2,998-1016).
gtatgatcaccttagaaaa

SEQ ID NO: 41245 - DNA, 19 bp, Homo sapiens
  siRNA target sequence for SUHW2 (NM_080764.2,1002-1020).
gatcaccttagaaaagata

SEQ ID NO: 41246 - DNA, 19 bp, Homo sapiens
  siRNA target sequence for SUHW2 (NM_080764.2,1026-1044).
cgcaaattgcagcctaaaa

SEQ ID NO: 41247 - DNA, 19 bp, Homo sapiens
  siRNA target sequence for SUHW2 (NM_080764.2,1028-1046).
caaattgcagcctaaaagt

SEQ ID NO: 41248 - DNA, 19 bp, Homo sapiens
  siRNA target sequence for SUHW2 (NM_080764.2,1092-1110).
caacttgaatcgagatcaa

SEQ ID NO: 41249 - DNA, 19 bp, Homo sapiens
  siRNA target sequence for SUHW2 (NM_080764.2,1108-1126).
caacagatagtcctattat

SEQ ID NO: 41250 - DNA, 19 bp, Homo sapiens
  siRNA target sequence for SUHW2 (NM_080764.2,1111-1129).
cagatagtcctattattat

SEQ ID NO: 41251 - DNA, 19 bp, Homo sapiens
  siRNA target sequence for SUHW2 (NM_080764.2,1146-1164).
cctgattatagaaatagtt

SEQ ID NO: 41252 - DNA, 19 bp, Homo sapiens
  siRNA target sequence for SUHW2 (NM_080764.2,1167-1185).
ccacaagttgtgcctaata

SEQ ID NO: 41253 - DNA, 19 bp, Homo sapiens
  siRNA target sequence for SUHW2 (NM_080764.2,1170-1188).
caagttgtgcctaataact

SEQ ID NO: 41254 - DNA, 19 bp, Homo sapiens
  siRNA target sequence for SUHW2 (NM_080764.2,1173-1191).
gttgtgcctaataactctt

SEQ ID NO: 41255 - DNA, 19 bp, Homo sapiens
  siRNA target sequence for SUHW2 (NM_080764.2,1200-1218).
ccttctcctttgattacat

SEQ ID NO: 41256 - DNA, 19 bp, Homo sapiens
  siRNA target sequence for SUHW2 (NM_080764.2,1232-1250).
gcatcatccagtaagtaca

SEQ ID NO: 41257 - DNA, 19 bp, Homo sapiens
  siRNA target sequence for SUHW2 (NM_080764.2,1275-1293).
gaaagtcctcgtgtatcaa

SEQ ID NO: 41258 - DNA, 19 bp, Homo sapiens
  siRNA target sequence for SUHW2 (NM_080764.2,1299-1317).
ctttccactttcgaagtaa

SEQ ID NO: 41259 - DNA, 19 bp, Homo sapiens
  siRNA target sequence for SUHW2 (NM_080764.2,1381-1399).
cgttcccttcagatacctt

SEQ ID NO: 41260 - DNA, 19 bp, Homo sapiens
  siRNA target sequence for SUHW2 (NM_080764.2,1390-1408).
cagatacctttcatacaat

SEQ ID NO: 41261 - DNA, 19 bp, Homo sapiens
  siRNA target sequence for SUHW2 (NM_080764.2,1488-1506).
gcttttccaaaggacaata

SEQ ID NO: 41262 - DNA, 19 bp, Homo sapiens
  siRNA target sequence for SUHW2 (NM_080764.2,1563-1581).
gacattttgagtctaacaa

SEQ ID NO: 41263 - DNA, 19 bp, Homo sapiens
  siRNA target sequence for SUHW2 (NM_080764.2,2216-2234).
ccagtgtcatcaaatgttt

SEQ ID NO: 41264 - DNA, 19 bp, Homo sapiens
  siRNA target sequence for SUHW2 (NM_080764.2,2237-2255).
gaagcctaagcaactagaa

SEQ ID NO: 41265 - DNA, 19 bp, Homo sapiens
  siRNA target sequence for SUHW2 (NM_080764.2,2372-2390).
caggtctaaaagcaaaatt

SEQ ID NO: 41266 - DNA, 19 bp, Homo sapiens
  siRNA target sequence for SYCP1 (NM_003176.2,294-312).
ggaggcgattccactttct

SEQ ID NO: 41267 - DNA, 19 bp, Homo sapiens
  siRNA target sequence for SYCP1 (NM_003176.2,295-313).
gaggcgattccactttctt

SEQ ID NO: 41268 - DNA, 19 bp, Homo sapiens
  siRNA target sequence for SYCP1 (NM_003176.2,297-315).
ggcgattccactttcttca

SEQ ID NO: 41269 - DNA, 19 bp, Homo sapiens
  siRNA target sequence for SYCP1 (NM_003176.2,314-332).
caagagtttcaacaaatgt

SEQ ID NO: 41270 - DNA, 19 bp, Homo sapiens
  siRNA target sequence for SYCP1 (NM_003176.2,317-335).
gagtttcaacaaatgtact

SEQ ID NO: 41271 - DNA, 19 bp, Homo sapiens
  siRNA target sequence for SYCP1 (NM_003176.2,438-456).
cttgagcaggttggtaatt

SEQ ID NO: 41272 - DNA, 19 bp, Homo sapiens
  siRNA target sequence for SYCP1 (NM_003176.2,467-485).
ctatcaggaaggactaaaa

SEQ ID NO: 41273 - DNA, 19 bp, Homo sapiens
  siRNA target sequence for SYCP1 (NM_003176.2,509-527).
gggattgagcagagtgtat

SEQ ID NO: 41274 - DNA, 19 bp, Homo sapiens
  siRNA target sequence for SYCP1 (NM_003176.2,675-693).
gaaaaagtaagtttgaaat

SEQ ID NO: 41275 - DNA, 19 bp, Homo sapiens
  siRNA target sequence for SYCP1 (NM_003176.2,741-759).
gccacaaggcatttatgta

SEQ ID NO: 41276 - DNA, 19 bp, Homo sapiens
  siRNA target sequence for SYCP1 (NM_003176.2,742-760).
ccacaaggcatttatgtaa

SEQ ID NO: 41277 - DNA, 19 bp, Homo sapiens
  siRNA target sequence for SYCP1 (NM_003176.2,745-763).
caaggcatttatgtaatct

SEQ ID NO: 41278 - DNA, 19 bp, Homo sapiens
  siRNA target sequence for SYCP1 (NM_003176.2,748-766).
ggcatttatgtaatctact

SEQ ID NO: 41279 - DNA, 19 bp, Homo sapiens
  siRNA target sequence for SYCP1 (NM_003176.2,834-852).
caagtttatatggatctaa

SEQ ID NO: 41280 - DNA, 19 bp, Homo sapiens
  siRNA target sequence for SYCP1 (NM_003176.2,894-912).
cgtgtgcaagctgagaatt

SEQ ID NO: 41281 - DNA, 19 bp, Homo sapiens
  siRNA target sequence for SYCP1 (NM_003176.2,1001-1019).
ggaaaagcaggtatcacta

SEQ ID NO: 41282 - DNA, 19 bp, Homo sapiens
  siRNA target sequence for SYCP1 (NM_003176.2,1015-1033).
cactactattgatccaaat

SEQ ID NO: 41283 - DNA, 19 bp, Homo sapiens
  siRNA target sequence for SYCP1 (NM_003176.2,1025-1043).
gatccaaatcactgagaaa

SEQ ID NO: 41284 - DNA, 19 bp, Homo sapiens
  siRNA target sequence for SYCP1 (NM_003176.2,1154-1172).
gaaacagcatcatttgact

SEQ ID NO: 41285 - DNA, 19 bp, Homo sapiens
  siRNA target sequence for SYCP1 (NM_003176.2,1160-1178).
gcatcatttgactaaagaa

SEQ ID NO: 41286 - DNA, 19 bp, Homo sapiens
  siRNA target sequence for SYCP1 (NM_003176.2,1207-1225).
gaagtgtgagtactcaaaa

SEQ ID NO: 41287 - DNA, 19 bp, Homo sapiens
  siRNA target sequence for SYCP1 (NM_003176.2,1226-1244).
ggctttagaggaagattta

SEQ ID NO: 41288 - DNA, 19 bp, Homo sapiens
  siRNA target sequence for SYCP1 (NM_003176.2,1261-1279).
caatttgtcagctaactga

SEQ ID NO: 41289 - DNA, 19 bp, Homo sapiens
  siRNA target sequence for SYCP1 (NM_003176.2,1330-1348).
cgtttgtggttactgaatt

SEQ ID NO: 41290 - DNA, 19 bp, Homo sapiens
  siRNA target sequence for SYCP1 (NM_003176.2,1361-1379).
ctgcagcttggaagaatta

SEQ ID NO: 41291 - DNA, 19 bp, Homo sapiens
  siRNA target sequence for SYCP1 (NM_003176.2,1456-1474).
caagtgagctggaagagat

SEQ ID NO: 41292 - DNA, 19 bp, Homo sapiens
  siRNA target sequence for SYCP1 (NM_003176.2,1466-1484).
ggaagagatgactaagctt

SEQ ID NO: 41293 - DNA, 19 bp, Homo sapiens
  siRNA target sequence for SYCP1 (NM_003176.2,1467-1485).
gaagagatgactaagctta

SEQ ID NO: 41294 - DNA, 19 bp, Homo sapiens
  siRNA target sequence for SYCP1 (NM_003176.2,1472-1490).
gatgactaagcttacaaat

SEQ ID NO: 41295 - DNA, 19 bp, Homo sapiens
  siRNA target sequence for SYCP1 (NM_003176.2,1659-1677).
cagttaactgccattacca

SEQ ID NO: 41296 - DNA, 19 bp, Homo sapiens
  siRNA target sequence for SYCP1 (NM_003176.2,1676-1694).
cacaagtgaacagtattat

SEQ ID NO: 41297 - DNA, 19 bp, Homo sapiens
  siRNA target sequence for SYCP1 (NM_003176.2,1725-1743).
cttgaaaacgagaagctta

SEQ ID NO: 41298 - DNA, 19 bp, Homo sapiens
  siRNA target sequence for SYCP1 (NM_003176.2,1745-1763).
gaatactgaattaacttca

SEQ ID NO: 41299 - DNA, 19 bp, Homo sapiens
  siRNA target sequence for SYCP1 (NM_003176.2,1766-1784).
ctgcaacaagctttcacta

SEQ ID NO: 41300 - DNA, 19 bp, Homo sapiens
  siRNA target sequence for SYCP1 (NM_003176.2,1912-1930).
cagaaacccaattaagaaa

SEQ ID NO: 41301 - DNA, 19 bp, Homo sapiens
  siRNA target sequence for SYCP1 (NM_003176.2,2069-2087).
ggagaataaggccttgaaa

SEQ ID NO: 41302 - DNA, 19 bp, Homo sapiens
  siRNA target sequence for SYCP1 (NM_003176.2,2070-2088).
gagaataaggccttgaaaa

SEQ ID NO: 41303 - DNA, 19 bp, Homo sapiens
  siRNA target sequence for SYCP1 (NM_003176.2,2107-2125).
gcaagcaactgaatgttta

SEQ ID NO: 41304 - DNA, 19 bp, Homo sapiens
  siRNA target sequence for SYCP1 (NM_003176.2,2108-2126).
caagcaactgaatgtttat

SEQ ID NO: 41305 - DNA, 19 bp, Homo sapiens
  siRNA target sequence for SYCP1 (NM_003176.2,2112-2130).
caactgaatgtttatgaga

SEQ ID NO: 41306 - DNA, 19 bp, Homo sapiens
  siRNA target sequence for SYCP1 (NM_003176.2,2135-2153).
ggtcaataaattagagtta

SEQ ID NO: 41307 - DNA, 19 bp, Homo sapiens
  siRNA target sequence for SYCP1 (NM_003176.2,2252-2270).
ggttgagaaagcaaaagta

SEQ ID NO: 41308 - DNA, 19 bp, Homo sapiens
  siRNA target sequence for SYCP1 (NM_003176.2,2307-2325).
gataagcgatgtcaacata

SEQ ID NO: 41309 - DNA, 19 bp, Homo sapiens
  siRNA target sequence for SYCP1 (NM_003176.2,2332-2350).
ctgaaatggtagcacttat

SEQ ID NO: 41310 - DNA, 19 bp, Homo sapiens
  siRNA target sequence for SYCP1 (NM_003176.2,2358-2376).
cataagcaccaatatgata

SEQ ID NO: 41311 - DNA, 19 bp, Homo sapiens
  siRNA target sequence for SYCP1 (NM_003176.2,2396-2414).
ctcagaattaggactttat

SEQ ID NO: 41312 - DNA, 19 bp, Homo sapiens
  siRNA target sequence for SYCP1 (NM_003176.2,2446-2464).
gagcatctttggagattga

SEQ ID NO: 41313 - DNA, 19 bp, Homo sapiens
  siRNA target sequence for SYCP1 (NM_003176.2,2475-2493).
ctcaaagctgaacttttgt

SEQ ID NO: 41314 - DNA, 19 bp, Homo sapiens
  siRNA target sequence for SYCP1 (NM_003176.2,2484-2502).
gaacttttgtctgttaaga

SEQ ID NO: 41315 - DNA, 19 bp, Homo sapiens
  siRNA target sequence for SYCP1 (NM_003176.2,2650-2668).
cagttccttcacaaactgt

SEQ ID NO: 41316 - DNA, 19 bp, Homo sapiens
  siRNA target sequence for SYCP1 (NM_003176.2,2688-2706).
gttgatcatggcatatcca

SEQ ID NO: 41317 - DNA, 19 bp, Homo sapiens
  siRNA target sequence for SYCP1 (NM_003176.2,2819-2837).
cttgaatatacccattgaa

SEQ ID NO: 41318 - DNA, 19 bp, Homo sapiens
  siRNA target sequence for SYCP1 (NM_003176.2,2944-2962).
cactgtataggaacaataa

SEQ ID NO: 41319 - DNA, 19 bp, Homo sapiens
  siRNA target sequence for SYCP1 (NM_003176.2,2948-2966).
gtataggaacaataatcca

SEQ ID NO: 41320 - DNA, 19 bp, Homo sapiens
  siRNA target sequence for SYCP1 (NM_003176.2,3038-3056).
gaagtttggagctataaga

SEQ ID NO: 41321 - DNA, 19 bp, Homo sapiens
  siRNA target sequence for SYCP1 (NM_003176.2,3041-3059).
gtttggagctataagaaaa

SEQ ID NO: 41322 - DNA, 19 bp, Homo sapiens
  siRNA target sequence for SYCP1 (NM_003176.2,3068-3086).
ggaccgttgggctgtaatt

SEQ ID NO: 41323 - DNA, 19 bp, Homo sapiens
  siRNA target sequence for SYCP1 (NM_003176.2,3072-3090).
cgttgggctgtaattgcta

SEQ ID NO: 41324 - DNA, 19 bp, Homo sapiens
  siRNA target sequence for SYCP1 (NM_003176.2,3073-3091).
gttgggctgtaattgctaa

SEQ ID NO: 41325 - DNA, 19 bp, Homo sapiens
  siRNA target sequence for SYCP2 (NM_014258.2,283-301).
caaggtggacaaccttata

SEQ ID NO: 41326 - DNA, 19 bp, Homo sapiens
  siRNA target sequence for SYCP2 (NM_014258.2,287-305).
gtggacaaccttatatgca

SEQ ID NO: 41327 - DNA, 19 bp, Homo sapiens
  siRNA target sequence for SYCP2 (NM_014258.2,320-338).
gaggatatccacaatgttt

SEQ ID NO: 41328 - DNA, 19 bp, Homo sapiens
  siRNA target sequence for SYCP2 (NM_014258.2,322-340).
ggatatccacaatgtttca

SEQ ID NO: 41329 - DNA, 19 bp, Homo sapiens
  siRNA target sequence for SYCP2 (NM_014258.2,368-386).
ggcaaaaatatcagtgtat

SEQ ID NO: 41330 - DNA, 19 bp, Homo sapiens
  siRNA target sequence for SYCP2 (NM_014258.2,398-416).
ggacttctaacgatgataa

SEQ ID NO: 41331 - DNA, 19 bp, Homo sapiens
  siRNA target sequence for SYCP2 (NM_014258.2,399-417).
gacttctaacgatgataaa

SEQ ID NO: 41332 - DNA, 19 bp, Homo sapiens
  siRNA target sequence for SYCP2 (NM_014258.2,419-437).
caaggactaatacaaaaga

SEQ ID NO: 41333 - DNA, 19 bp, Homo sapiens
  siRNA target sequence for SYCP2 (NM_014258.2,497-515).
gaagctgttctaaatatga

SEQ ID NO: 41334 - DNA, 19 bp, Homo sapiens
  siRNA target sequence for SYCP2 (NM_014258.2,554-572).
gtcagtgatgaaggtaaaa

SEQ ID NO: 41335 - DNA, 19 bp, Homo sapiens
  siRNA target sequence for SYCP2 (NM_014258.2,620-638).
gactcaagagtgaatattt

SEQ ID NO: 41336 - DNA, 19 bp, Homo sapiens
  siRNA target sequence for SYCP2 (NM_014258.2,639-657).
gtattcagcaagagattat

SEQ ID NO: 41337 - DNA, 19 bp, Homo sapiens
  siRNA target sequence for SYCP2 (NM_014258.2,646-664).
gcaagagattataaaaaaa

SEQ ID NO: 41338 - DNA, 19 bp, Homo sapiens
  siRNA target sequence for SYCP2 (NM_014258.2,695-713).
gatgcccggaaaatactct

SEQ ID NO: 41339 - DNA, 19 bp, Homo sapiens
  siRNA target sequence for SYCP2 (NM_014258.2,699-717).
cccggaaaatactctctaa

SEQ ID NO: 41340 - DNA, 19 bp, Homo sapiens
  siRNA target sequence for SYCP2 (NM_014258.2,781-799).
cttacaggtaggcattgta

SEQ ID NO: 41341 - DNA, 19 bp, Homo sapiens
  siRNA target sequence for SYCP2 (NM_014258.2,793-811).
cattgtagaagctttgtgt

SEQ ID NO: 41342 - DNA, 19 bp, Homo sapiens
  siRNA target sequence for SYCP2 (NM_014258.2,842-860).
ctggcacatcagtggtttt

SEQ ID NO: 41343 - DNA, 19 bp, Homo sapiens
  siRNA target sequence for SYCP2 (NM_014258.2,876-894).
ctaaggcatttaaaagaat

SEQ ID NO: 41344 - DNA, 19 bp, Homo sapiens
  siRNA target sequence for SYCP2 (NM_014258.2,915-933).
cagattgcaggatatttct

SEQ ID NO: 41345 - DNA, 19 bp, Homo sapiens
  siRNA target sequence for SYCP2 (NM_014258.2,949-967).
catgcttggagacaaaaga

SEQ ID NO: 41346 - DNA, 19 bp, Homo sapiens
  siRNA target sequence for SYCP2 (NM_014258.2,1019-1037).
caaataccatcagatgaaa

SEQ ID NO: 41347 - DNA, 19 bp, Homo sapiens
  siRNA target sequence for SYCP2 (NM_014258.2,1076-1094).
cagactctctcattctaca

SEQ ID NO: 41348 - DNA, 19 bp, Homo sapiens
  siRNA target sequence for SYCP2 (NM_014258.2,1078-1096).
gactctctcattctacatt

SEQ ID NO: 41349 - DNA, 19 bp, Homo sapiens
  siRNA target sequence for SYCP2 (NM_014258.2,1255-1273).
gtattttgacgcatcacta

SEQ ID NO: 41350 - DNA, 19 bp, Homo sapiens
  siRNA target sequence for SYCP2 (NM_014258.2,1262-1280).
gacgcatcactagaaatca

SEQ ID NO: 41351 - DNA, 19 bp, Homo sapiens
  siRNA target sequence for SYCP2 (NM_014258.2,1264-1282).
cgcatcactagaaatcact

SEQ ID NO: 41352 - DNA, 19 bp, Homo sapiens
  siRNA target sequence for SYCP2 (NM_014258.2,1265-1283).
gcatcactagaaatcacta

SEQ ID NO: 41353 - DNA, 19 bp, Homo sapiens
  siRNA target sequence for SYCP2 (NM_014258.2,1269-1287).
cactagaaatcactaatgt

SEQ ID NO: 41354 - DNA, 19 bp, Homo sapiens
  siRNA target sequence for SYCP2 (NM_014258.2,1316-1334).
catagggaatctatcagaa

SEQ ID NO: 41355 - DNA, 19 bp, Homo sapiens
  siRNA target sequence for SYCP2 (NM_014258.2,1353-1371).
ccaaaacgtcgctgcatat

SEQ ID NO: 41356 - DNA, 19 bp, Homo sapiens
  siRNA target sequence for SYCP2 (NM_014258.2,1354-1372).
caaaacgtcgctgcatata

SEQ ID NO: 41357 - DNA, 19 bp, Homo sapiens
  siRNA target sequence for SYCP2 (NM_014258.2,1359-1377).
cgtcgctgcatatactttt

SEQ ID NO: 41358 - DNA, 19 bp, Homo sapiens
  siRNA target sequence for SYCP2 (NM_014258.2,1360-1378).
gtcgctgcatatacttttt

SEQ ID NO: 41359 - DNA, 19 bp, Homo sapiens
  siRNA target sequence for SYCP2 (NM_014258.2,1362-1380).
cgctgcatatactttttga

SEQ ID NO: 41360 - DNA, 19 bp, Homo sapiens
  siRNA target sequence for SYCP2 (NM_014258.2,1381-1399).
cgcaagtggatcacagatt

SEQ ID NO: 41361 - DNA, 19 bp, Homo sapiens
  siRNA target sequence for SYCP2 (NM_014258.2,1386-1404).
gtggatcacagattctagt

SEQ ID NO: 41362 - DNA, 19 bp, Homo sapiens
  siRNA target sequence for SYCP2 (NM_014258.2,1396-1414).
gattctagtgccagaaagt

SEQ ID NO: 41363 - DNA, 19 bp, Homo sapiens
  siRNA target sequence for SYCP2 (NM_014258.2,1403-1421).
gtgccagaaagtcaaatct

SEQ ID NO: 41364 - DNA, 19 bp, Homo sapiens
  siRNA target sequence for SYCP2 (NM_014258.2,1433-1451).
gaagagctcgttagtttaa

SEQ ID NO: 41365 - DNA, 19 bp, Homo sapiens
  siRNA target sequence for SYCP2 (NM_014258.2,1438-1456).
gctcgttagtttaaaggaa

SEQ ID NO: 41366 - DNA, 19 bp, Homo sapiens
  siRNA target sequence for SYCP2 (NM_014258.2,1439-1457).
ctcgttagtttaaaggaaa

SEQ ID NO: 41367 - DNA, 19 bp, Homo sapiens
  siRNA target sequence for SYCP2 (NM_014258.2,1442-1460).
gttagtttaaaggaaaaat

SEQ ID NO: 41368 - DNA, 19 bp, Homo sapiens
  siRNA target sequence for SYCP2 (NM_014258.2,1461-1479).
caaagtccccaaaggaatt

SEQ ID NO: 41369 - DNA, 19 bp, Homo sapiens
  siRNA target sequence for SYCP2 (NM_014258.2,1507-1525).
cagtgacaaagggaataga

SEQ ID NO: 41370 - DNA, 19 bp, Homo sapiens
  siRNA target sequence for SYCP2 (NM_014258.2,1509-1527).
gtgacaaagggaatagaaa

SEQ ID NO: 41371 - DNA, 19 bp, Homo sapiens
  siRNA target sequence for SYCP2 (NM_014258.2,1595-1613).
ggtgcagatagatacacta

SEQ ID NO: 41372 - DNA, 19 bp, Homo sapiens
  siRNA target sequence for SYCP2 (NM_014258.2,1596-1614).
gtgcagatagatacactat

SEQ ID NO: 41373 - DNA, 19 bp, Homo sapiens
  siRNA target sequence for SYCP2 (NM_014258.2,1598-1616).
gcagatagatacactatga

SEQ ID NO: 41374 - DNA, 19 bp, Homo sapiens
  siRNA target sequence for SYCP2 (NM_014258.2,1628-1646).
cttttcagcaacacatcaa

SEQ ID NO: 41375 - DNA, 19 bp, Homo sapiens
  siRNA target sequence for SYCP2 (NM_014258.2,1687-1705).
gacgagctctgcagagaaa

SEQ ID NO: 41376 - DNA, 19 bp, Homo sapiens
  siRNA target sequence for SYCP2 (NM_014258.2,1702-1720).
gaaacctagtgtttctcaa

SEQ ID NO: 41377 - DNA, 19 bp, Homo sapiens
  siRNA target sequence for SYCP2 (NM_014258.2,1745-1763).
gctgcatcactgaaatcta

SEQ ID NO: 41378 - DNA, 19 bp, Homo sapiens
  siRNA target sequence for SYCP2 (NM_014258.2,1748-1766).
gcatcactgaaatctagat

SEQ ID NO: 41379 - DNA, 19 bp, Homo sapiens
  siRNA target sequence for SYCP2 (NM_014258.2,1775-1793).
ggaagacatagaagagata

SEQ ID NO: 41380 - DNA, 19 bp, Homo sapiens
  siRNA target sequence for SYCP2 (NM_014258.2,1875-1893).
gtgaactccaggatgttat

SEQ ID NO: 41381 - DNA, 19 bp, Homo sapiens
  siRNA target sequence for SYCP2 (NM_014258.2,1929-1947).
ctatattacctggtgtttt

SEQ ID NO: 41382 - DNA, 19 bp, Homo sapiens
  siRNA target sequence for SYCP2 (NM_014258.2,1938-1956).
ctggtgttttagacaacat

SEQ ID NO: 41383 - DNA, 19 bp, Homo sapiens
  siRNA target sequence for SYCP2 (NM_014258.2,1989-2007).
gttggacacctgtaacaaa

SEQ ID NO: 41384 - DNA, 19 bp, Homo sapiens
  siRNA target sequence for SYCP2 (NM_014258.2,2012-2030).
gaactatgtaataaccaaa

SEQ ID NO: 41385 - DNA, 19 bp, Homo sapiens
  siRNA target sequence for SYCP2 (NM_014258.2,2040-2058).
cttcgtcaggagacacatt

SEQ ID NO: 41386 - DNA, 19 bp, Homo sapiens
  siRNA target sequence for SYCP2 (NM_014258.2,2051-2069).
gacacattgaatcaagata

SEQ ID NO: 41387 - DNA, 19 bp, Homo sapiens
  siRNA target sequence for SYCP2 (NM_014258.2,2055-2073).
cattgaatcaagatattgt

SEQ ID NO: 41388 - DNA, 19 bp, Homo sapiens
  siRNA target sequence for SYCP2 (NM_014258.2,2107-2125).
ctcttcaatatctgatcat

SEQ ID NO: 41389 - DNA, 19 bp, Homo sapiens
  siRNA target sequence for SYCP2 (NM_014258.2,2162-2180).
gaacaaaccgaccatatca

SEQ ID NO: 41390 - DNA, 19 bp, Homo sapiens
  siRNA target sequence for SYCP2 (NM_014258.2,2165-2183).
caaaccgaccatatcaaaa

SEQ ID NO: 41391 - DNA, 19 bp, Homo sapiens
  siRNA target sequence for SYCP2 (NM_014258.2,2169-2187).
ccgaccatatcaaaataga

SEQ ID NO: 41392 - DNA, 19 bp, Homo sapiens
  siRNA target sequence for SYCP2 (NM_014258.2,2170-2188).
cgaccatatcaaaatagat

SEQ ID NO: 41393 - DNA, 19 bp, Homo sapiens
  siRNA target sequence for SYCP2 (NM_014258.2,2193-2211).
cagaagtagaagtttgcaa

SEQ ID NO: 41394 - DNA, 19 bp, Homo sapiens
  siRNA target sequence for SYCP2 (NM_014258.2,2291-2309).
gttgaatctgaaactactt

SEQ ID NO: 41395 - DNA, 19 bp, Homo sapiens
  siRNA target sequence for SYCP2 (NM_014258.2,2318-2336).
gttctcctaaataagacaa

SEQ ID NO: 41396 - DNA, 19 bp, Homo sapiens
  siRNA target sequence for SYCP2 (NM_014258.2,2323-2341).
cctaaataagacaattgaa

SEQ ID NO: 41397 - DNA, 19 bp, Homo sapiens
  siRNA target sequence for SYCP2 (NM_014258.2,2339-2357).
gaagaatcgctgatatata

SEQ ID NO: 41398 - DNA, 19 bp, Homo sapiens
  siRNA target sequence for SYCP2 (NM_014258.2,2342-2360).
gaatcgctgatatatagga

SEQ ID NO: 41399 - DNA, 19 bp, Homo sapiens
  siRNA target sequence for SYCP2 (NM_014258.2,2532-2550).
ccaatgtagcagaatcctt

SEQ ID NO: 41400 - DNA, 19 bp, Homo sapiens
  siRNA target sequence for SYCP2 (NM_014258.2,2556-2574).
gccaaatcaataaaagata

SEQ ID NO: 41401 - DNA, 19 bp, Homo sapiens
  siRNA target sequence for SYCP2 (NM_014258.2,2588-2606).
gacatcaagtctacaagaa

SEQ ID NO: 41402 - DNA, 19 bp, Homo sapiens
  siRNA target sequence for SYCP2 (NM_014258.2,2614-2632).
ggagtctttgattaacagt

SEQ ID NO: 41403 - DNA, 19 bp, Homo sapiens
  siRNA target sequence for SYCP2 (NM_014258.2,2654-2672).
gtacaactcagtaaggaaa

SEQ ID NO: 41404 - DNA, 19 bp, Homo sapiens
  siRNA target sequence for SYCP2 (NM_014258.2,2701-2719).
gaagactacctttgttaat

SEQ ID NO: 41405 - DNA, 19 bp, Homo sapiens
  siRNA target sequence for SYCP2 (NM_014258.2,2771-2789).
gctgatgaccctatcataa

SEQ ID NO: 41406 - DNA, 19 bp, Homo sapiens
  siRNA target sequence for SYCP2 (NM_014258.2,2781-2799).
ctatcataaaacttggaat

SEQ ID NO: 41407 - DNA, 19 bp, Homo sapiens
  siRNA target sequence for SYCP2 (NM_014258.2,2806-2824).
gtttcaagctacagctaaa

SEQ ID NO: 41408 - DNA, 19 bp, Homo sapiens
  siRNA target sequence for SYCP2 (NM_014258.2,2834-2852).
gcggataggtcaattagat

SEQ ID NO: 41409 - DNA, 19 bp, Homo sapiens
  siRNA target sequence for SYCP2 (NM_014258.2,2835-2853).
cggataggtcaattagatt

SEQ ID NO: 41410 - DNA, 19 bp, Homo sapiens
  siRNA target sequence for SYCP2 (NM_014258.2,2859-2877).
gtccaaggaatcatgatga

SEQ ID NO: 41411 - DNA, 19 bp, Homo sapiens
  siRNA target sequence for SYCP2 (NM_014258.2,2865-2883).
ggaatcatgatgaacttaa

SEQ ID NO: 41412 - DNA, 19 bp, Homo sapiens
  siRNA target sequence for SYCP2 (NM_014258.2,3020-3038).
ccacagctaatagactata

SEQ ID NO: 41413 - DNA, 19 bp, Homo sapiens
  siRNA target sequence for SYCP2 (NM_014258.2,3023-3041).
cagctaatagactatagca

SEQ ID NO: 41414 - DNA, 19 bp, Homo sapiens
  siRNA target sequence for SYCP2 (NM_014258.2,3098-3116).
ggacagccaagctctaaaa

SEQ ID NO: 41415 - DNA, 19 bp, Homo sapiens
  siRNA target sequence for SYCP2 (NM_014258.2,3156-3174).
caattccggaaggaagaat

SEQ ID NO: 41416 - DNA, 19 bp, Homo sapiens
  siRNA target sequence for SYCP2 (NM_014258.2,3182-3200).
ccacgaaaagcaaccaaaa

SEQ ID NO: 41417 - DNA, 19 bp, Homo sapiens
  siRNA target sequence for SYCP2 (NM_014258.2,3318-3336).
cggtaaagctaccaaagaa

SEQ ID NO: 41418 - DNA, 19 bp, Homo sapiens
  siRNA target sequence for SYCP2 (NM_014258.2,3319-3337).
ggtaaagctaccaaagaaa

SEQ ID NO: 41419 - DNA, 19 bp, Homo sapiens
  siRNA target sequence for SYCP2 (NM_014258.2,3410-3428).
gatgctatacgagataatt

SEQ ID NO: 41420 - DNA, 19 bp, Homo sapiens
  siRNA target sequence for SYCP2 (NM_014258.2,3422-3440).
gataattgccttgacttat

SEQ ID NO: 41421 - DNA, 19 bp, Homo sapiens
  siRNA target sequence for SYCP2 (NM_014258.2,3434-3452).
gacttatctcccagatctt

SEQ ID NO: 41422 - DNA, 19 bp, Homo sapiens
  siRNA target sequence for SYCP2 (NM_014258.2,3436-3454).
cttatctcccagatcttta

SEQ ID NO: 41423 - DNA, 19 bp, Homo sapiens
  siRNA target sequence for SYCP2 (NM_014258.2,3459-3477).
gcagtccatcatctataga

SEQ ID NO: 41424 - DNA, 19 bp, Homo sapiens
  siRNA target sequence for SYCP2 (NM_014258.2,3460-3478).
cagtccatcatctatagaa

SEQ ID NO: 41425 - DNA, 19 bp, Homo sapiens
  siRNA target sequence for SYCP2 (NM_014258.2,3462-3480).
gtccatcatctatagaagt

SEQ ID NO: 41426 - DNA, 19 bp, Homo sapiens
  siRNA target sequence for SYCP2 (NM_014258.2,3464-3482).
ccatcatctatagaagtaa

SEQ ID NO: 41427 - DNA, 19 bp, Homo sapiens
  siRNA target sequence for SYCP2 (NM_014258.2,3521-3539).
caggattatgactgcataa

SEQ ID NO: 41428 - DNA, 19 bp, Homo sapiens
  siRNA target sequence for SYCP2 (NM_014258.2,3523-3541).
ggattatgactgcataaca

SEQ ID NO: 41429 - DNA, 19 bp, Homo sapiens
  siRNA target sequence for SYCP2 (NM_014258.2,3524-3542).
gattatgactgcataacaa

SEQ ID NO: 41430 - DNA, 19 bp, Homo sapiens
  siRNA target sequence for SYCP2 (NM_014258.2,3532-3550).
ctgcataacaaaatctata

SEQ ID NO: 41431 - DNA, 19 bp, Homo sapiens
  siRNA target sequence for SYCP2 (NM_014258.2,3546-3564).
ctatatcaccttatccaaa

SEQ ID NO: 41432 - DNA, 19 bp, Homo sapiens
  siRNA target sequence for SYCP2 (NM_014258.2,3575-3593).
cttgaatccttaaatagta

SEQ ID NO: 41433 - DNA, 19 bp, Homo sapiens
  siRNA target sequence for SYCP2 (NM_014258.2,3597-3615).
gtggagttggaggtacaat

SEQ ID NO: 41434 - DNA, 19 bp, Homo sapiens
  siRNA target sequence for SYCP2 (NM_014258.2,3600-3618).
gagttggaggtacaataaa

SEQ ID NO: 41435 - DNA, 19 bp, Homo sapiens
  siRNA target sequence for SYCP2 (NM_014258.2,3602-3620).
gttggaggtacaataaagt

SEQ ID NO: 41436 - DNA, 19 bp, Homo sapiens
  siRNA target sequence for SYCP2 (NM_014258.2,3701-3719).
catactccaactaagagta

SEQ ID NO: 41437 - DNA, 19 bp, Homo sapiens
  siRNA target sequence for SYCP2 (NM_014258.2,3707-3725).
ccaactaagagtaatacta

SEQ ID NO: 41438 - DNA, 19 bp, Homo sapiens
  siRNA target sequence for SYCP2 (NM_014258.2,3708-3726).
caactaagagtaatactat

SEQ ID NO: 41439 - DNA, 19 bp, Homo sapiens
  siRNA target sequence for SYCP2 (NM_014258.2,3711-3729).
ctaagagtaatactattgt

SEQ ID NO: 41440 - DNA, 19 bp, Homo sapiens
  siRNA target sequence for SYCP2 (NM_014258.2,3752-3770).
ctggtacttacacaagaaa

SEQ ID NO: 41441 - DNA, 19 bp, Homo sapiens
  siRNA target sequence for SYCP2 (NM_014258.2,3794-3812).
gatgtaagcagttatagtt

SEQ ID NO: 41442 - DNA, 19 bp, Homo sapiens
  siRNA target sequence for SYCP2 (NM_014258.2,3802-3820).
cagttatagttcagaagaa

SEQ ID NO: 41443 - DNA, 19 bp, Homo sapiens
  siRNA target sequence for SYCP2 (NM_014258.2,3810-3828).
gttcagaagaacggtttat

SEQ ID NO: 41444 - DNA, 19 bp, Homo sapiens
  siRNA target sequence for SYCP2 (NM_014258.2,3813-3831).
cagaagaacggtttatgga

SEQ ID NO: 41445 - DNA, 19 bp, Homo sapiens
  siRNA target sequence for SYCP2 (NM_014258.2,3840-3858).
ctccacatatcaatgaaaa

SEQ ID NO: 41446 - DNA, 19 bp, Homo sapiens
  siRNA target sequence for SYCP2 (NM_014258.2,3842-3860).
ccacatatcaatgaaaatt

SEQ ID NO: 41447 - DNA, 19 bp, Homo sapiens
  siRNA target sequence for SYCP2 (NM_014258.2,3843-3861).
cacatatcaatgaaaatta

SEQ ID NO: 41448 - DNA, 19 bp, Homo sapiens
  siRNA target sequence for SYCP2 (NM_014258.2,3878-3896).
gaggaaagtcatttagcat

SEQ ID NO: 41449 - DNA, 19 bp, Homo sapiens
  siRNA target sequence for SYCP2 (NM_014258.2,3885-3903).
gtcatttagcatcttcatt

SEQ ID NO: 41450 - DNA, 19 bp, Homo sapiens
  siRNA target sequence for SYCP2 (NM_014258.2,3887-3905).
catttagcatcttcattat

SEQ ID NO: 41451 - DNA, 19 bp, Homo sapiens
  siRNA target sequence for SYCP2 (NM_014258.2,3946-3964).
gccctgtgatgctactcat

SEQ ID NO: 41452 - DNA, 19 bp, Homo sapiens
  siRNA target sequence for SYCP2 (NM_014258.2,3986-4004).
cttagtcgcaaaagaatat

SEQ ID NO: 41453 - DNA, 19 bp, Homo sapiens
  siRNA target sequence for SYCP2 (NM_014258.2,4013-4031).
gataatctaagtaattcca

SEQ ID NO: 41454 - DNA, 19 bp, Homo sapiens
  siRNA target sequence for SYCP2 (NM_014258.2,4109-4127).
gatcatcatatccacaaaa

SEQ ID NO: 41455 - DNA, 19 bp, Homo sapiens
  siRNA target sequence for SYCP2 (NM_014258.2,4120-4138).
ccacaaaatgtctgaaagt

SEQ ID NO: 41456 - DNA, 19 bp, Homo sapiens
  siRNA target sequence for SYCP2 (NM_014258.2,4146-4164).
cattatcaacaaatgactt

SEQ ID NO: 41457 - DNA, 19 bp, Homo sapiens
  siRNA target sequence for SYCP2 (NM_014258.2,4176-4194).
gggagacctggcaaaatga

SEQ ID NO: 41458 - DNA, 19 bp, Homo sapiens
  siRNA target sequence for SYCP2 (NM_014258.2,4177-4195).
ggagacctggcaaaatgaa

SEQ ID NO: 41459 - DNA, 19 bp, Homo sapiens
  siRNA target sequence for SYCP2 (NM_014258.2,4180-4198).
gacctggcaaaatgaattt

SEQ ID NO: 41460 - DNA, 19 bp, Homo sapiens
  siRNA target sequence for SYCP2 (NM_014258.2,4193-4211).
gaatttgcagggatagaga

SEQ ID NO: 41461 - DNA, 19 bp, Homo sapiens
  siRNA target sequence for SYCP2 (NM_014258.2,4199-4217).
gcagggatagagatgactt

SEQ ID NO: 41462 - DNA, 19 bp, Homo sapiens
  siRNA target sequence for SYCP2 (NM_014258.2,4200-4218).
cagggatagagatgactta

SEQ ID NO: 41463 - DNA, 19 bp, Homo sapiens
  siRNA target sequence for SYCP2 (NM_014258.2,4228-4246).
cgagaggctcaattcagaa

SEQ ID NO: 41464 - DNA, 19 bp, Homo sapiens
  siRNA target sequence for SYCP2 (NM_014258.2,4231-4249).
gaggctcaattcagaattt

SEQ ID NO: 41465 - DNA, 19 bp, Homo sapiens
  siRNA target sequence for SYCP2 (NM_014258.2,4257-4275).
ggaataatatccgacataa

SEQ ID NO: 41466 - DNA, 19 bp, Homo sapiens
  siRNA target sequence for SYCP2 (NM_014258.2,4268-4286).
cgacataaaatgttgagtt

SEQ ID NO: 41467 - DNA, 19 bp, Homo sapiens
  siRNA target sequence for SYCP2 (NM_014258.2,4347-4365).
gtcaggactctaggattaa

SEQ ID NO: 41468 - DNA, 19 bp, Homo sapiens
  siRNA target sequence for SYCP2 (NM_014258.2,4349-4367).
caggactctaggattaaaa

SEQ ID NO: 41469 - DNA, 19 bp, Homo sapiens
  siRNA target sequence for SYCP2 (NM_014258.2,4370-4388).
cttgataaattccaattca

SEQ ID NO: 41470 - DNA, 19 bp, Homo sapiens
  siRNA target sequence for SYCP2 (NM_014258.2,4373-4391).
gataaattccaattcatta

SEQ ID NO: 41471 - DNA, 19 bp, Homo sapiens
  siRNA target sequence for SYCP2 (NM_014258.2,4486-4504).
gttcagtgcatatcaaaaa

SEQ ID NO: 41472 - DNA, 19 bp, Homo sapiens
  siRNA target sequence for SYCP2 (NM_014258.2,4551-4569).
gtgtcttctgtaatactga

SEQ ID NO: 41473 - DNA, 19 bp, Homo sapiens
  siRNA target sequence for SYCP2 (NM_014258.2,4593-4611).
ccgagatgtgtttgatgaa

SEQ ID NO: 41474 - DNA, 19 bp, Homo sapiens
  siRNA target sequence for SYCP2 (NM_014258.2,4594-4612).
cgagatgtgtttgatgaaa

SEQ ID NO: 41475 - DNA, 19 bp, Homo sapiens
  siRNA target sequence for TAF1 (NM_004606.2,821-839).
gaaaggtgttacgttttct

SEQ ID NO: 41476 - DNA, 19 bp, Homo sapiens
  siRNA target sequence for TAF1 (NM_004606.2,2325-2343).
ccaattgctgcaagcattt

SEQ ID NO: 41477 - DNA, 19 bp, Homo sapiens
  siRNA target sequence for TAF1 (NM_004606.2,5576-5594).
gtgggtatgaggtatcaga

SEQ ID NO: 41478 - DNA, 19 bp, Homo sapiens
  siRNA target sequence for TAF1 (NM_138923.1,572-590).
ctattactggtgagaaagt

SEQ ID NO: 41479 - DNA, 19 bp, Homo sapiens
  siRNA target sequence for TAF11 (NM_005643.2,174-192).
ctaccgacaccgatggaat

SEQ ID NO: 41480 - DNA, 19 bp, Homo sapiens
  siRNA target sequence for TAF11 (NM_005643.2,266-284).
caggatgtctcagatttaa

SEQ ID NO: 41481 - DNA, 19 bp, Homo sapiens
  siRNA target sequence for TAF11 (NM_005643.2,297-315).
gggaagactcatcattact

SEQ ID NO: 41482 - DNA, 19 bp, Homo sapiens
  siRNA target sequence for TAF11 (NM_005643.2,298-316).
ggaagactcatcattactt

SEQ ID NO: 41483 - DNA, 19 bp, Homo sapiens
  siRNA target sequence for TAF11 (NM_005643.2,299-317).
gaagactcatcattactta

SEQ ID NO: 41484 - DNA, 19 bp, Homo sapiens
  siRNA target sequence for TAF11 (NM_005643.2,433-451).
gcagctgaaccgttatgaa

SEQ ID NO: 41485 - DNA, 19 bp, Homo sapiens
  siRNA target sequence for TAF11 (NM_005643.2,434-452).
cagctgaaccgttatgaaa

SEQ ID NO: 41486 - DNA, 19 bp, Homo sapiens
  siRNA target sequence for TAF11 (NM_005643.2,439-457).
gaaccgttatgaaatgtat

SEQ ID NO: 41487 - DNA, 19 bp, Homo sapiens
  siRNA target sequence for TAF11 (NM_005643.2,521-539).
gtgtctcagaatgttgtta

SEQ ID NO: 41488 - DNA, 19 bp, Homo sapiens
  siRNA target sequence for TAF11 (NM_005643.2,527-545).
cagaatgttgttattgcta

SEQ ID NO: 41489 - DNA, 19 bp, Homo sapiens
  siRNA target sequence for TAF11 (NM_005643.2,571-589).
cggggaggtggtagaagaa

SEQ ID NO: 41490 - DNA, 19 bp, Homo sapiens
  siRNA target sequence for TAF11 (NM_005643.2,626-644).
ccactacaacccaaacata

SEQ ID NO: 41491 - DNA, 19 bp, Homo sapiens
  siRNA target sequence for TAF11 (NM_005643.2,629-647).
ctacaacccaaacatatga

SEQ ID NO: 41492 - DNA, 19 bp, Homo sapiens
  siRNA target sequence for TAF11 (NM_005643.2,649-667).
ggaagccgttagaaggtta

SEQ ID NO: 41493 - DNA, 19 bp, Homo sapiens
  siRNA target sequence for TAF11 (NM_005643.2,650-668).
gaagccgttagaaggttaa

SEQ ID NO: 41494 - DNA, 19 bp, Homo sapiens
  siRNA target sequence for TAF11 (NM_005643.2,653-671).
gccgttagaaggttaaagt

SEQ ID NO: 41495 - DNA, 19 bp, Homo sapiens
  siRNA target sequence for TAF12 (NM_005644.2,179-197).
ggcccctcagccctaatca

SEQ ID NO: 41496 - DNA, 19 bp, Homo sapiens
  siRNA target sequence for TAF12 (NM_005644.2,180-198).
gcccctcagccctaatcaa

SEQ ID NO: 41497 - DNA, 19 bp, Homo sapiens
  siRNA target sequence for TAF12 (NM_005644.2,251-269).
ggctccatggccaatagta

SEQ ID NO: 41498 - DNA, 19 bp, Homo sapiens
  siRNA target sequence for TAF12 (NM_005644.2,253-271).
ctccatggccaatagtact

SEQ ID NO: 41499 - DNA, 19 bp, Homo sapiens
  siRNA target sequence for TAF12 (NM_005644.2,267-285).
gtactgcagtggtaaagat

SEQ ID NO: 41500 - DNA, 19 bp, Homo sapiens
  siRNA target sequence for TAF12 (NM_005644.2,309-327).
gtcgtcttagccctgaaaa

SEQ ID NO: 41501 - DNA, 19 bp, Homo sapiens
  siRNA target sequence for TAF12 (NM_005644.2,311-329).
cgtcttagccctgaaaaca

SEQ ID NO: 41502 - DNA, 19 bp, Homo sapiens
  siRNA target sequence for TAF12 (NM_005644.2,321-339).
ctgaaaacaatcaggtatt

SEQ ID NO: 41503 - DNA, 19 bp, Homo sapiens
  siRNA target sequence for TAF12 (NM_005644.2,335-353).
gtattgaccaagaagaaat

SEQ ID NO: 41504 - DNA, 19 bp, Homo sapiens
  siRNA target sequence for TAF12 (NM_005644.2,492-510).
gcaccctggaggtgaaaga

SEQ ID NO: 41505 - DNA, 19 bp, Homo sapiens
  siRNA target sequence for TAF12 (NM_005644.2,569-587).
gaaatccgaccctacaaaa

SEQ ID NO: 41506 - DNA, 19 bp, Homo sapiens
  siRNA target sequence for TAF12 (NM_005644.2,574-592).
ccgaccctacaaaaaagct

SEQ ID NO: 41507 - DNA, 19 bp, Homo sapiens
  siRNA target sequence for TAF12 (NM_005644.2,575-593).
cgaccctacaaaaaagctt

SEQ ID NO: 41508 - DNA, 19 bp, Homo sapiens
  siRNA target sequence for TAF12 (NM_005644.2,595-613).
caccacagaagctcacaaa

SEQ ID NO: 41509 - DNA, 19 bp, Homo sapiens
  siRNA target sequence for TAF12 (NM_005644.2,597-615).
ccacagaagctcacaaaca

SEQ ID NO: 41510 - DNA, 19 bp, Homo sapiens
  siRNA target sequence for TAF6 (NM_005641.2,662-680).
ggtcagctaccgcatcaaa

SEQ ID NO: 41511 - DNA, 19 bp, Homo sapiens
  siRNA target sequence for TAF6 (NM_005641.2,667-685).
gctaccgcatcaaagagat

SEQ ID NO: 41512 - DNA, 19 bp, Homo sapiens
  siRNA target sequence for TAF6 (NM_005641.2,687-705).
gcacaggatgccttgaagt

SEQ ID NO: 41513 - DNA, 19 bp, Homo sapiens
  siRNA target sequence for TAF6 (NM_005641.2,750-768).
gactacgccttgaagctaa

SEQ ID NO: 41514 - DNA, 19 bp, Homo sapiens
  siRNA target sequence for TAF6 (NM_005641.2,755-773).
cgccttgaagctaaagaat

SEQ ID NO: 41515 - DNA, 19 bp, Homo sapiens
  siRNA target sequence for TAF6 (NM_005641.2,770-788).
gaatgtcgagccactctat

SEQ ID NO: 41516 - DNA, 19 bp, Homo sapiens
  siRNA target sequence for TAF6 (NM_005641.2,794-812).
ccacgcccaggagttcatt

SEQ ID NO: 41517 - DNA, 19 bp, Homo sapiens
  siRNA target sequence for TAF6 (NM_005641.2,841-859).
gggagctttacttctatga

SEQ ID NO: 41518 - DNA, 19 bp, Homo sapiens
  siRNA target sequence for TAF6 (NM_005641.2,876-894).
ctgagcgacatcatcaata

SEQ ID NO: 41519 - DNA, 19 bp, Homo sapiens
  siRNA target sequence for TAF6 (NM_005641.2,1277-1295).
cacggaccctggactgtat

SEQ ID NO: 41520 - DNA, 19 bp, Homo sapiens
  siRNA target sequence for TAF6 (NM_005641.2,1279-1297).
cggaccctggactgtatca

SEQ ID NO: 41521 - DNA, 19 bp, Homo sapiens
  siRNA target sequence for TAF6 (NM_005641.2,1304-1322).
gccacggttcagtaccttt

SEQ ID NO: 41522 - DNA, 19 bp, Homo sapiens
  siRNA target sequence for TAF6 (NM_005641.2,1305-1323).
ccacggttcagtaccttta

SEQ ID NO: 41523 - DNA, 19 bp, Homo sapiens
  siRNA target sequence for TAF6 (NM_005641.2,1306-1324).
cacggttcagtacctttat

SEQ ID NO: 41524 - DNA, 19 bp, Homo sapiens
  siRNA target sequence for TAF6 (NM_005641.2,1308-1326).
cggttcagtacctttatct

SEQ ID NO: 41525 - DNA, 19 bp, Homo sapiens
  siRNA target sequence for TAF6 (NM_005641.2,1339-1357).
gtgtgaacgtggttcagaa

SEQ ID NO: 41526 - DNA, 19 bp, Homo sapiens
  siRNA target sequence for TAF6 (NM_005641.2,1409-1427).
caaccccacgctctatcta

SEQ ID NO: 41527 - DNA, 19 bp, Homo sapiens
  siRNA target sequence for TAF6 (NM_005641.2,1412-1430).
ccccacgctctatctagaa

SEQ ID NO: 41528 - DNA, 19 bp, Homo sapiens
  siRNA target sequence for TAF6 (NM_005641.2,1413-1431).
cccacgctctatctagaaa

SEQ ID NO: 41529 - DNA, 19 bp, Homo sapiens
  siRNA target sequence for TAF6 (NM_005641.2,1414-1432).
ccacgctctatctagaaaa

SEQ ID NO: 41530 - DNA, 19 bp, Homo sapiens
  siRNA target sequence for TAF6 (NM_005641.2,1415-1433).
cacgctctatctagaaaaa

SEQ ID NO: 41531 - DNA, 19 bp, Homo sapiens
  siRNA target sequence for TAF6 (NM_005641.2,1417-1435).
cgctctatctagaaaaata

SEQ ID NO: 41532 - DNA, 19 bp, Homo sapiens
  siRNA target sequence for TAF6 (NM_005641.2,1495-1513).
gaccagatgtggacaatca

SEQ ID NO: 41533 - DNA, 19 bp, Homo sapiens
  siRNA target sequence for TAF6 (NM_005641.2,1514-1532).
ctgggcactccgagacttt

SEQ ID NO: 41534 - DNA, 19 bp, Homo sapiens
  siRNA target sequence for TAF6 (NM_005641.2,1551-1569).
cagatctgcaagcatttta

SEQ ID NO: 41535 - DNA, 19 bp, Homo sapiens
  siRNA target sequence for TAF6 (NM_005641.2,1570-1588).
gcacaaccactaacaacat

SEQ ID NO: 41536 - DNA, 19 bp, Homo sapiens
  siRNA target sequence for TAF6 (NM_005641.2,1640-1658).
gccctggacgactcgttat

SEQ ID NO: 41537 - DNA, 19 bp, Homo sapiens
  siRNA target sequence for TAF6 (NM_005641.2,1680-1698).
gagctgggacacgatgtta

SEQ ID NO: 41538 - DNA, 19 bp, Homo sapiens
  siRNA target sequence for TAF6 (NM_005641.2,1683-1701).
ctgggacacgatgttatca

SEQ ID NO: 41539 - DNA, 19 bp, Homo sapiens
  siRNA target sequence for TAF6 (NM_005641.2,1686-1704).
ggacacgatgttatcaaga

SEQ ID NO: 41540 - DNA, 19 bp, Homo sapiens
  siRNA target sequence for TAF6 (NM_005641.2,1763-1781).
ccctgtgctgagcaacatt

SEQ ID NO: 41541 - DNA, 19 bp, Homo sapiens
  siRNA target sequence for TAF6 (NM_005641.2,2144-2162).
caagtttattgtaatgtca

SEQ ID NO: 41542 - DNA, 19 bp, Homo sapiens
  siRNA target sequence for TAF6 (NM_005641.2,2337-2355).
gggagtgtccagaagtaca

SEQ ID NO: 41543 - DNA, 19 bp, Homo sapiens
  siRNA target sequence for TAF6 (NM_005641.2,2338-2356).
ggagtgtccagaagtacat

SEQ ID NO: 41544 - DNA, 19 bp, Homo sapiens
  siRNA target sequence for TAF6L (NM_006473.2,237-255).
gaggccacgcagaatagct

SEQ ID NO: 41545 - DNA, 19 bp, Homo sapiens
  siRNA target sequence for TAF6L (NM_006473.2,382-400).
ccagggagggtgaactcta

SEQ ID NO: 41546 - DNA, 19 bp, Homo sapiens
  siRNA target sequence for TAF6L (NM_006473.2,385-403).
gggagggtgaactctactt

SEQ ID NO: 41547 - DNA, 19 bp, Homo sapiens
  siRNA target sequence for TAF6L (NM_006473.2,473-491).
gacagctgtcagagttcat

SEQ ID NO: 41548 - DNA, 19 bp, Homo sapiens
  siRNA target sequence for TAF6L (NM_006473.2,562-580).
cagatgaccttctcaagta

SEQ ID NO: 41549 - DNA, 19 bp, Homo sapiens
  siRNA target sequence for TAF6L (NM_006473.2,564-582).
gatgaccttctcaagtact

SEQ ID NO: 41550 - DNA, 19 bp, Homo sapiens
  siRNA target sequence for TAF6L (NM_006473.2,610-628).
gggatgatccgcaactgat

SEQ ID NO: 41551 - DNA, 19 bp, Homo sapiens
  siRNA target sequence for TAF6L (NM_006473.2,650-668).
gcagacgaactccaagatt

SEQ ID NO: 41552 - DNA, 19 bp, Homo sapiens
  siRNA target sequence for TAF6L (NM_006473.2,671-689).
ggcactcctgccttacttt

SEQ ID NO: 41553 - DNA, 19 bp, Homo sapiens
  siRNA target sequence for TAF6L (NM_006473.2,673-691).
cactcctgccttactttgt

SEQ ID NO: 41554 - DNA, 19 bp, Homo sapiens
  siRNA target sequence for TAF6L (NM_006473.2,701-719).
cagtggggtgaaatctgta

SEQ ID NO: 41555 - DNA, 19 bp, Homo sapiens
  siRNA target sequence for TAF6L (NM_006473.2,759-777).
gcacggagcctatttcgta

SEQ ID NO: 41556 - DNA, 19 bp, Homo sapiens
  siRNA target sequence for TAF6L (NM_006473.2,760-778).
cacggagcctatttcgtaa

SEQ ID NO: 41557 - DNA, 19 bp, Homo sapiens
  siRNA target sequence for TAF6L (NM_006473.2,949-967).
gtggcctctatcagcatat

SEQ ID NO: 41558 - DNA, 19 bp, Homo sapiens
  siRNA target sequence for TAF6L (NM_006473.2,1121-1139).
gctggatgattattcagta

SEQ ID NO: 41559 - DNA, 19 bp, Homo sapiens
  siRNA target sequence for TAF6L (NM_006473.2,1383-1401).
ccggaggacccttctcttt

SEQ ID NO: 41560 - DNA, 19 bp, Homo sapiens
  siRNA target sequence for TAF6L (NM_006473.2,1774-1792).
cgcactttcgtttcatcat

SEQ ID NO: 41561 - DNA, 19 bp, Homo sapiens
  siRNA target sequence for TAF6L (NM_006473.2,1876-1894).
cgcgctacgtgcagaaact

SEQ ID NO: 41562 - DNA, 19 bp, Homo sapiens
  siRNA target sequence for TAF6L (NM_006473.2,1942-1960).
cggactactcgctgtactt

SEQ ID NO: 41563 - DNA, 19 bp, Homo sapiens
  siRNA target sequence for TAF9 (NM_003187.3,214-232).
caagagcatgccgaaagat

SEQ ID NO: 41564 - DNA, 19 bp, Homo sapiens
  siRNA target sequence for TAF9 (NM_003187.3,586-604).
gaaaaaggcatcaacttct

SEQ ID NO: 41565 - DNA, 19 bp, Homo sapiens
  siRNA target sequence for TAF9 (NM_003187.3,597-615).
caacttctgcgggaagaat

SEQ ID NO: 41566 - DNA, 19 bp, Homo sapiens
  siRNA target sequence for TAF9 (NM_003187.3,844-862).
cgggtccaaaaacattctt

SEQ ID NO: 41567 - DNA, 19 bp, Homo sapiens
  siRNA target sequence for TAF9 (NM_016283.3,161-179).
gctcgagaagagcaattgt

SEQ ID NO: 41568 - DNA, 19 bp, Homo sapiens
  siRNA target sequence for TAF9 (NM_016283.3,162-180).
ctcgagaagagcaattgta

SEQ ID NO: 41569 - DNA, 19 bp, Homo sapiens
  siRNA target sequence for TAF9 (NM_016283.3,236-254).
gatgagttagataaccaaa

SEQ ID NO: 41570 - DNA, 19 bp, Homo sapiens
  siRNA target sequence for TAF9 (NM_016283.3,241-259).
gttagataaccaaatgaga

SEQ ID NO: 41571 - DNA, 19 bp, Homo sapiens
  siRNA target sequence for TAF9 (NM_016283.3,263-281).
ggtggagttattgttgatt

SEQ ID NO: 41572 - DNA, 19 bp, Homo sapiens
  siRNA target sequence for TAF9 (NM_016283.3,264-282).
gtggagttattgttgatta

SEQ ID NO: 41573 - DNA, 19 bp, Homo sapiens
  siRNA target sequence for TAF9 (NM_016283.3,301-319).
ccctgaacgctggtttcat

SEQ ID NO: 41574 - DNA, 19 bp, Homo sapiens
  siRNA target sequence for TAF9 (NM_016283.3,302-320).
cctgaacgctggtttcata

SEQ ID NO: 41575 - DNA, 19 bp, Homo sapiens
  siRNA target sequence for TAF9 (NM_016283.3,378-396).
gttataatgagaagaaact

SEQ ID NO: 41576 - DNA, 19 bp, Homo sapiens
  siRNA target sequence for TAF9 (NM_016283.3,391-409).
gaaactaacagacaatatt

SEQ ID NO: 41577 - DNA, 19 bp, Homo sapiens
  siRNA target sequence for TAF9 (NM_016283.3,395-413).
ctaacagacaatattcagt

SEQ ID NO: 41578 - DNA, 19 bp, Homo sapiens
  siRNA target sequence for TAF9 (NM_016283.3,414-432).
gtgagatttttcaagttct

SEQ ID NO: 41579 - DNA, 19 bp, Homo sapiens
  siRNA target sequence for TAF9 (NM_016283.3,453-471).
cctacaaggaagaaatcgt

SEQ ID NO: 41580 - DNA, 19 bp, Homo sapiens
  siRNA target sequence for TAF9 (NM_016283.3,472-490).
gcatcagctgcccagtaat

SEQ ID NO: 41581 - DNA, 19 bp, Homo sapiens
  siRNA target sequence for TAF9 (NM_016283.3,473-491).
catcagctgcccagtaata

SEQ ID NO: 41582 - DNA, 19 bp, Homo sapiens
  siRNA target sequence for TAF9 (NM_016283.3,535-553).
gattgagcagtggatcaaa

SEQ ID NO: 41583 - DNA, 19 bp, Homo sapiens
  siRNA target sequence for TAF9 (NM_016283.3,547-565).
gatcaaagatcataactct

SEQ ID NO: 41584 - DNA, 19 bp, Homo sapiens
  siRNA target sequence for TAF9L (NM_015975.3,473-491).
ggctgaagtccttaattaa

SEQ ID NO: 41585 - DNA, 19 bp, Homo sapiens
  siRNA target sequence for TAF9L (NM_015975.3,538-556).
gctgttagtagcaaaccta

SEQ ID NO: 41586 - DNA, 19 bp, Homo sapiens
  siRNA target sequence for TAL1 (NM_003189.1,1041-1059).
cggatgccttccctatgtt

SEQ ID NO: 41587 - DNA, 19 bp, Homo sapiens
  siRNA target sequence for TAL1 (NM_003189.1,1086-1104).
gaccttccccctatgagat

SEQ ID NO: 41588 - DNA, 19 bp, Homo sapiens
  siRNA target sequence for TAL1 (NM_003189.1,1094-1112).
ccctatgagatggagatta

SEQ ID NO: 41589 - DNA, 19 bp, Homo sapiens
  siRNA target sequence for TAL1 (NM_003189.1,1133-1151).
gttgtgcggcgtatcttca

SEQ ID NO: 41590 - DNA, 19 bp, Homo sapiens
  siRNA target sequence for TAL2 (NM_005421.1,269-287).
gaactctgcttgagaacta

SEQ ID NO: 41591 - DNA, 19 bp, Homo sapiens
  siRNA target sequence for TBP (NM_003194.2,301-319).
cggaatccctatctttagt

SEQ ID NO: 41592 - DNA, 19 bp, Homo sapiens
  siRNA target sequence for TBP (NM_003194.2,309-327).
ctatctttagtccaatgat

SEQ ID NO: 41593 - DNA, 19 bp, Homo sapiens
  siRNA target sequence for TBP (NM_003194.2,367-385).
caccaatagtctgtctatt

SEQ ID NO: 41594 - DNA, 19 bp, Homo sapiens
  siRNA target sequence for TBP (NM_003194.2,631-649).
gggcaccactccactgtat

SEQ ID NO: 41595 - DNA, 19 bp, Homo sapiens
  siRNA target sequence for TBP (NM_003194.2,716-734).
gtaccgcagctgcaaaata

SEQ ID NO: 41596 - DNA, 19 bp, Homo sapiens
  siRNA target sequence for TBP (NM_003194.2,720-738).
cgcagctgcaaaatattgt

SEQ ID NO: 41597 - DNA, 19 bp, Homo sapiens
  siRNA target sequence for TBP (NM_003194.2,756-774).
gttgtaaacttgacctaaa

SEQ ID NO: 41598 - DNA, 19 bp, Homo sapiens
  siRNA target sequence for TBP (NM_003194.2,791-809).
gcccgaaacgccgaatata

SEQ ID NO: 41599 - DNA, 19 bp, Homo sapiens
  siRNA target sequence for TBP (NM_003194.2,792-810).
cccgaaacgccgaatataa

SEQ ID NO: 41600 - DNA, 19 bp, Homo sapiens
  siRNA target sequence for TBP (NM_003194.2,793-811).
ccgaaacgccgaatataat

SEQ ID NO: 41601 - DNA, 19 bp, Homo sapiens
  siRNA target sequence for TBP (NM_003194.2,818-836).
cggtttgctgcggtaatca

SEQ ID NO: 41602 - DNA, 19 bp, Homo sapiens
  siRNA target sequence for TBP (NM_003194.2,819-837).
ggtttgctgcggtaatcat

SEQ ID NO: 41603 - DNA, 19 bp, Homo sapiens
  siRNA target sequence for TBP (NM_003194.2,827-845).
gcggtaatcatgaggataa

SEQ ID NO: 41604 - DNA, 19 bp, Homo sapiens
  siRNA target sequence for TBP (NM_003194.2,829-847).
ggtaatcatgaggataaga

SEQ ID NO: 41605 - DNA, 19 bp, Homo sapiens
  siRNA target sequence for TBP (NM_003194.2,854-872).
cgaaccacggcactgattt

SEQ ID NO: 41606 - DNA, 19 bp, Homo sapiens
  siRNA target sequence for TBP (NM_003194.2,855-873).
gaaccacggcactgatttt

SEQ ID NO: 41607 - DNA, 19 bp, Homo sapiens
  siRNA target sequence for TBP (NM_003194.2,859-877).
cacggcactgattttcagt

SEQ ID NO: 41608 - DNA, 19 bp, Homo sapiens
  siRNA target sequence for TBP (NM_003194.2,945-963).
ctagagttgtacagaagtt

SEQ ID NO: 41609 - DNA, 19 bp, Homo sapiens
  siRNA target sequence for TBP (NM_003194.2,975-993).
ctaagttcttggacttcaa

SEQ ID NO: 41610 - DNA, 19 bp, Homo sapiens
  siRNA target sequence for TBP (NM_003194.2,1017-1035).
gtgatgtgaagtttcctat

SEQ ID NO: 41611 - DNA, 19 bp, Homo sapiens
  siRNA target sequence for TBP (NM_003194.2,1022-1040).
gtgaagtttcctataaggt

SEQ ID NO: 41612 - DNA, 19 bp, Homo sapiens
  siRNA target sequence for TBP (NM_003194.2,1027-1045).
gtttcctataaggttagaa

SEQ ID NO: 41613 - DNA, 19 bp, Homo sapiens
  siRNA target sequence for TBP (NM_003194.2,1054-1072).
gctcacccaccaacaattt

SEQ ID NO: 41614 - DNA, 19 bp, Homo sapiens
  siRNA target sequence for TBP (NM_003194.2,1055-1073).
ctcacccaccaacaattta

SEQ ID NO: 41615 - DNA, 19 bp, Homo sapiens
  siRNA target sequence for TBP (NM_003194.2,1061-1079).
caccaacaatttagtagtt

SEQ ID NO: 41616 - DNA, 19 bp, Homo sapiens
  siRNA target sequence for TBP (NM_003194.2,1063-1081).
ccaacaatttagtagttat

SEQ ID NO: 41617 - DNA, 19 bp, Homo sapiens
  siRNA target sequence for TBPL1 (NM_004865.2,326-344).
gttgcattggacattctaa

SEQ ID NO: 41618 - DNA, 19 bp, Homo sapiens
  siRNA target sequence for TBPL1 (NM_004865.2,329-347).
gcattggacattctaatta

SEQ ID NO: 41619 - DNA, 19 bp, Homo sapiens
  siRNA target sequence for TBPL1 (NM_004865.2,490-508).
gtcctcaggaaaaattatt

SEQ ID NO: 41620 - DNA, 19 bp, Homo sapiens
  siRNA target sequence for TBPL1 (NM_004865.2,511-529).
cactggagcaacaagtgaa

SEQ ID NO: 41621 - DNA, 19 bp, Homo sapiens
  siRNA target sequence for TBPL1 (NM_004865.2,561-579).
cccgtagtctgcagaaact

SEQ ID NO: 41622 - DNA, 19 bp, Homo sapiens
  siRNA target sequence for TBPL1 (NM_004865.2,653-671).
cgtttgccagaattcacaa

SEQ ID NO: 41623 - DNA, 19 bp, Homo sapiens
  siRNA target sequence for TBPL1 (NM_004865.2,693-711).
gttacgaacctgaacttca

SEQ ID NO: 41624 - DNA, 19 bp, Homo sapiens
  siRNA target sequence for TBPL1 (NM_004865.2,717-735).
ctgtgtgctatcggataaa

SEQ ID NO: 41625 - DNA, 19 bp, Homo sapiens
  siRNA target sequence for TBPL1 (NM_004865.2,719-737).
gtgtgctatcggataaaat

SEQ ID NO: 41626 - DNA, 19 bp, Homo sapiens
  siRNA target sequence for TBPL1 (NM_004865.2,721-739).
gtgctatcggataaaatct

SEQ ID NO: 41627 - DNA, 19 bp, Homo sapiens
  siRNA target sequence for TBPL1 (NM_004865.2,723-741).
gctatcggataaaatctct

SEQ ID NO: 41628 - DNA, 19 bp, Homo sapiens
  siRNA target sequence for TBPL1 (NM_004865.2,724-742).
ctatcggataaaatctcta

SEQ ID NO: 41629 - DNA, 19 bp, Homo sapiens
  siRNA target sequence for TBPL1 (NM_004865.2,738-756).
ctctaagagctacattaca

SEQ ID NO: 41630 - DNA, 19 bp, Homo sapiens
  siRNA target sequence for TBRG1 (NM_032811.1,538-556).
gctctgtgggaactataca

SEQ ID NO: 41631 - DNA, 19 bp, Homo sapiens
  siRNA target sequence for TBRG1 (NM_032811.1,555-573).
cagggagctgggcctattt

SEQ ID NO: 41632 - DNA, 19 bp, Homo sapiens
  siRNA target sequence for TBRG1 (NM_032811.1,672-690).
cgaccgacctggctttcat

SEQ ID NO: 41633 - DNA, 19 bp, Homo sapiens
  siRNA target sequence for TBRG1 (NM_032811.1,717-735).
ctattgcagtactcgaata

SEQ ID NO: 41634 - DNA, 19 bp, Homo sapiens
  siRNA target sequence for TBRG1 (NM_032811.1,757-775).
gaccagaagtgtctatata

SEQ ID NO: 41635 - DNA, 19 bp, Homo sapiens
  siRNA target sequence for TBRG1 (NM_032811.1,760-778).
cagaagtgtctatatacct

SEQ ID NO: 41636 - DNA, 19 bp, Homo sapiens
  siRNA target sequence for TBRG1 (NM_032811.1,797-815).
gtgtgcagcctcagtttga

SEQ ID NO: 41637 - DNA, 19 bp, Homo sapiens
  siRNA target sequence for TBRG1 (NM_032811.1,835-853).
ccccagaatgccattgtca

SEQ ID NO: 41638 - DNA, 19 bp, Homo sapiens
  siRNA target sequence for TBRG1 (NM_032811.1,880-898).
gaactgctcaggactataa

SEQ ID NO: 41639 - DNA, 19 bp, Homo sapiens
  siRNA target sequence for TBRG1 (NM_032811.1,902-920).
ctactatggggaaactaat

SEQ ID NO: 41640 - DNA, 19 bp, Homo sapiens
  siRNA target sequence for TBRG1 (NM_032811.1,934-952).
ccagctggagctgactttt

SEQ ID NO: 41641 - DNA, 19 bp, Homo sapiens
  siRNA target sequence for TBRG1 (NM_032811.1,940-958).
ggagctgacttttttggat

SEQ ID NO: 41642 - DNA, 19 bp, Homo sapiens
  siRNA target sequence for TBRG1 (NM_032811.1,1003-1021).
gctcgaaaatgcatcaatt

SEQ ID NO: 41643 - DNA, 19 bp, Homo sapiens
  siRNA target sequence for TBRG1 (NM_032811.1,1007-1025).
gaaaatgcatcaattacca

SEQ ID NO: 41644 - DNA, 19 bp, Homo sapiens
  siRNA target sequence for TBRG1 (NM_032811.1,1023-1041).
ccagtgggtgaaatttgat

SEQ ID NO: 41645 - DNA, 19 bp, Homo sapiens
  siRNA target sequence for TBRG1 (NM_032811.1,1074-1092).
ggggctgccggagaatgat

SEQ ID NO: 41646 - DNA, 19 bp, Homo sapiens
  siRNA target sequence for TBRG1 (NM_032811.1,1112-1130).
cctttcagagacagatctt

SEQ ID NO: 41647 - DNA, 19 bp, Homo sapiens
  siRNA target sequence for TBRG1 (NM_032811.1,1113-1131).
ctttcagagacagatcttt

SEQ ID NO: 41648 - DNA, 19 bp, Homo sapiens
  siRNA target sequence for TBRG1 (NM_032811.1,1193-1211).
cagcctttgtgtcttctta

SEQ ID NO: 41649 - DNA, 19 bp, Homo sapiens
  siRNA target sequence for TBRG1 (NM_032811.1,1231-1249).
catgaacccttggtagata

SEQ ID NO: 41650 - DNA, 19 bp, Homo sapiens
  siRNA target sequence for TBRG1 (NM_032811.1,1277-1295).
cacagggtagcccaattca

SEQ ID NO: 41651 - DNA, 19 bp, Homo sapiens
  siRNA target sequence for TBRG1 (NM_032811.1,1279-1297).
cagggtagcccaattcagt

SEQ ID NO: 41652 - DNA, 19 bp, Homo sapiens
  siRNA target sequence for TCF12 (NM_003205.2,334-352).
ctgggaagcagtcaattca

SEQ ID NO: 41653 - DNA, 19 bp, Homo sapiens
  siRNA target sequence for TCF12 (NM_003205.2,351-369).
cagtggatcaggtattgat

SEQ ID NO: 41654 - DNA, 19 bp, Homo sapiens
  siRNA target sequence for TCF12 (NM_003205.2,415-433).
ccttcctatgattcatcta

SEQ ID NO: 41655 - DNA, 19 bp, Homo sapiens
  siRNA target sequence for TCF12 (NM_003205.2,424-442).
gattcatctagaggtttta

SEQ ID NO: 41656 - DNA, 19 bp, Homo sapiens
  siRNA target sequence for TCF12 (NM_003205.2,452-470).
ctcattacagtgatcactt

SEQ ID NO: 41657 - DNA, 19 bp, Homo sapiens
  siRNA target sequence for TCF12 (NM_003205.2,468-486).
cttgaatgacagtcgatta

SEQ ID NO: 41658 - DNA, 19 bp, Homo sapiens
  siRNA target sequence for TCF12 (NM_003205.2,471-489).
gaatgacagtcgattagga

SEQ ID NO: 41659 - DNA, 19 bp, Homo sapiens
  siRNA target sequence for TCF12 (NM_003205.2,508-526).
ccaacacctttcatgaact

SEQ ID NO: 41660 - DNA, 19 bp, Homo sapiens
  siRNA target sequence for TCF12 (NM_003205.2,586-604).
ggattaccaggctgtcaat

SEQ ID NO: 41661 - DNA, 19 bp, Homo sapiens
  siRNA target sequence for TCF12 (NM_003205.2,667-685).
cctgggacagcatactatt

SEQ ID NO: 41662 - DNA, 19 bp, Homo sapiens
  siRNA target sequence for TCF12 (NM_003205.2,783-801).
gccttcttctgtatatgca

SEQ ID NO: 41663 - DNA, 19 bp, Homo sapiens
  siRNA target sequence for TCF12 (NM_003205.2,806-824).
ccccaaattcagatgattt

SEQ ID NO: 41664 - DNA, 19 bp, Homo sapiens
  siRNA target sequence for TCF12 (NM_003205.2,828-846).
ccgtgaatctcctagttat

SEQ ID NO: 41665 - DNA, 19 bp, Homo sapiens
  siRNA target sequence for TCF12 (NM_003205.2,873-891).
gttcgctagcactttcttt

SEQ ID NO: 41666 - DNA, 19 bp, Homo sapiens
  siRNA target sequence for TCF12 (NM_003205.2,895-913).
caagatgggacccacaatt

SEQ ID NO: 41667 - DNA, 19 bp, Homo sapiens
  siRNA target sequence for TCF12 (NM_003205.2,993-1011).
gtctcaatccagtagttat

SEQ ID NO: 41668 - DNA, 19 bp, Homo sapiens
  siRNA target sequence for TCF12 (NM_003205.2,1025-1043).
cacatgaccgcttgagtta

SEQ ID NO: 41669 - DNA, 19 bp, Homo sapiens
  siRNA target sequence for TCF12 (NM_003205.2,1119-1137).
cagcagttcaccttacgtt

SEQ ID NO: 41670 - DNA, 19 bp, Homo sapiens
  siRNA target sequence for TCF12 (NM_003205.2,1217-1235).
caggtgatgcacttggaaa

SEQ ID NO: 41671 - DNA, 19 bp, Homo sapiens
  siRNA target sequence for TCF12 (NM_003205.2,1232-1250).
gaaaggctttggcatctat

SEQ ID NO: 41672 - DNA, 19 bp, Homo sapiens
  siRNA target sequence for TCF12 (NM_003205.2,1261-1279).
gaccataccagcagtagtt

SEQ ID NO: 41673 - DNA, 19 bp, Homo sapiens
  siRNA target sequence for TCF12 (NM_003205.2,1272-1290).
cagtagttttccgtcaaat

SEQ ID NO: 41674 - DNA, 19 bp, Homo sapiens
  siRNA target sequence for TCF12 (NM_003205.2,1406-1424).
ctcgaatggaggatcgttt

SEQ ID NO: 41675 - DNA, 19 bp, Homo sapiens
  siRNA target sequence for TCF12 (NM_003205.2,1495-1513).
ggtcacagtgatatacata

SEQ ID NO: 41676 - DNA, 19 bp, Homo sapiens
  siRNA target sequence for TCF12 (NM_003205.2,1540-1558).
ccaattggaagcctcaatt

SEQ ID NO: 41677 - DNA, 19 bp, Homo sapiens
  siRNA target sequence for TCF12 (NM_003205.2,1547-1565).
gaagcctcaattcaaacta

SEQ ID NO: 41678 - DNA, 19 bp, Homo sapiens
  siRNA target sequence for TCF12 (NM_003205.2,1635-1653).
cagtctcaatggcaatcat

SEQ ID NO: 41679 - DNA, 19 bp, Homo sapiens
  siRNA target sequence for TCF12 (NM_003205.2,1685-1703).
gcacagacctgaaccataa

SEQ ID NO: 41680 - DNA, 19 bp, Homo sapiens
  siRNA target sequence for TCF12 (NM_003205.2,1721-1739).
gaggtggcttgcaaagtca

SEQ ID NO: 41681 - DNA, 19 bp, Homo sapiens
  siRNA target sequence for TCF12 (NM_003205.2,1738-1756).
cagtctggaactgttgtta

SEQ ID NO: 41682 - DNA, 19 bp, Homo sapiens
  siRNA target sequence for TCF12 (NM_003205.2,1808-1826).
ctccttcatcagatgacat

SEQ ID NO: 41683 - DNA, 19 bp, Homo sapiens
  siRNA target sequence for TCF12 (NM_003205.2,1840-1858).
gaatcctcccaaaaagata

SEQ ID NO: 41684 - DNA, 19 bp, Homo sapiens
  siRNA target sequence for TCF12 (NM_003205.2,1855-1873).
gatatcaaggtttcatcta

SEQ ID NO: 41685 - DNA, 19 bp, Homo sapiens
  siRNA target sequence for TCF12 (NM_003205.2,1876-1894).
ggcagaacaagcagtacta

SEQ ID NO: 41686 - DNA, 19 bp, Homo sapiens
  siRNA target sequence for TCF12 (NM_003205.2,1915-1933).
cctgaacagaagatagaaa

SEQ ID NO: 41687 - DNA, 19 bp, Homo sapiens
  siRNA target sequence for TCF12 (NM_003205.2,1944-1962).
gaggcggatggctaacaat

SEQ ID NO: 41688 - DNA, 19 bp, Homo sapiens
  siRNA target sequence for TCF12 (NM_003205.2,1974-1992).
cttacgcgtgcgggatatt

SEQ ID NO: 41689 - DNA, 19 bp, Homo sapiens
  siRNA target sequence for TCF12 (NM_003205.2,1979-1997).
gcgtgcgggatattaatga

SEQ ID NO: 41690 - DNA, 19 bp, Homo sapiens
  siRNA target sequence for TCF12 (NM_003205.2,1980-1998).
cgtgcgggatattaatgaa

SEQ ID NO: 41691 - DNA, 19 bp, Homo sapiens
  siRNA target sequence for TCF12 (NM_003205.2,2057-2075).
caaaactccttattcttca

SEQ ID NO: 41692 - DNA, 19 bp, Homo sapiens
  siRNA target sequence for TCF12 (NM_003205.2,2085-2103).
ggcagtcatccttagtcta

SEQ ID NO: 41693 - DNA, 19 bp, Homo sapiens
  siRNA target sequence for TCF12 (NM_003205.2,2218-2236).
catcctgggcttagtgaaa

SEQ ID NO: 41694 - DNA, 19 bp, Homo sapiens
  siRNA target sequence for TCF12 (NM_003205.2,2221-2239).
cctgggcttagtgaaacta

SEQ ID NO: 41695 - DNA, 19 bp, Homo sapiens
  siRNA target sequence for TCF12 (NM_003205.2,2240-2258).
ccaaccctatgggtcatat

SEQ ID NO: 41696 - DNA, 19 bp, Homo sapiens
  siRNA target sequence for TCF20 (NM_005650.1,202-220).
gctcatcccggctagaaga

SEQ ID NO: 41697 - DNA, 19 bp, Homo sapiens
  siRNA target sequence for TCF20 (NM_005650.1,352-370).
cctctggccatcaaggtta

SEQ ID NO: 41698 - DNA, 19 bp, Homo sapiens
  siRNA target sequence for TCF20 (NM_005650.1,505-523).
gcagctttggcaatcagta

SEQ ID NO: 41699 - DNA, 19 bp, Homo sapiens
  siRNA target sequence for TCF20 (NM_005650.1,506-524).
cagctttggcaatcagtat

SEQ ID NO: 41700 - DNA, 19 bp, Homo sapiens
  siRNA target sequence for TCF20 (NM_005650.1,570-588).
cttggcggtgtgtcacatt

SEQ ID NO: 41701 - DNA, 19 bp, Homo sapiens
  siRNA target sequence for TCF20 (NM_005650.1,574-592).
gcggtgtgtcacattatca

SEQ ID NO: 41702 - DNA, 19 bp, Homo sapiens
  siRNA target sequence for TCF20 (NM_005650.1,585-603).
cattatcagcaggattaca

SEQ ID NO: 41703 - DNA, 19 bp, Homo sapiens
  siRNA target sequence for TCF20 (NM_005650.1,809-827).
gttaagagtgggtcagttt

SEQ ID NO: 41704 - DNA, 19 bp, Homo sapiens
  siRNA target sequence for TCF20 (NM_005650.1,876-894).
ccttcaccacagcgtttta

SEQ ID NO: 41705 - DNA, 19 bp, Homo sapiens
  siRNA target sequence for TCF20 (NM_005650.1,899-917).
gtctggacagagctatgat

SEQ ID NO: 41706 - DNA, 19 bp, Homo sapiens
  siRNA target sequence for TCF20 (NM_005650.1,910-928).
gctatgatggcagttacaa

SEQ ID NO: 41707 - DNA, 19 bp, Homo sapiens
  siRNA target sequence for TCF20 (NM_005650.1,915-933).
gatggcagttacaatgtga

SEQ ID NO: 41708 - DNA, 19 bp, Homo sapiens
  siRNA target sequence for TCF20 (NM_005650.1,959-977).
caatgtgggttctaatgca

SEQ ID NO: 41709 - DNA, 19 bp, Homo sapiens
  siRNA target sequence for TCF20 (NM_005650.1,987-1005).
ggaacacaatccaattaca

SEQ ID NO: 41710 - DNA, 19 bp, Homo sapiens
  siRNA target sequence for TCF20 (NM_005650.1,1006-1024).
gctatcagcctcaatctat

SEQ ID NO: 41711 - DNA, 19 bp, Homo sapiens
  siRNA target sequence for TCF20 (NM_005650.1,1011-1029).
cagcctcaatctatgaaga

SEQ ID NO: 41712 - DNA, 19 bp, Homo sapiens
  siRNA target sequence for TCF20 (NM_005650.1,1013-1031).
gcctcaatctatgaagaat

SEQ ID NO: 41713 - DNA, 19 bp, Homo sapiens
  siRNA target sequence for TCF20 (NM_005650.1,1014-1032).
cctcaatctatgaagaatt

SEQ ID NO: 41714 - DNA, 19 bp, Homo sapiens
  siRNA target sequence for TCF20 (NM_005650.1,1015-1033).
ctcaatctatgaagaattt

SEQ ID NO: 41715 - DNA, 19 bp, Homo sapiens
  siRNA target sequence for TCF20 (NM_005650.1,1112-1130).
gcatgtgatgcagtatact

SEQ ID NO: 41716 - DNA, 19 bp, Homo sapiens
  siRNA target sequence for TCF20 (NM_005650.1,1113-1131).
catgtgatgcagtatacta

SEQ ID NO: 41717 - DNA, 19 bp, Homo sapiens
  siRNA target sequence for TCF20 (NM_005650.1,1159-1177).
gccaagtggggcagtacaa

SEQ ID NO: 41718 - DNA, 19 bp, Homo sapiens
  siRNA target sequence for TCF20 (NM_005650.1,1266-1284).
cagtctccaagctgtagtt

SEQ ID NO: 41719 - DNA, 19 bp, Homo sapiens
  siRNA target sequence for TCF20 (NM_005650.1,1390-1408).
gtccaaccccatcaatgat

SEQ ID NO: 41720 - DNA, 19 bp, Homo sapiens
  siRNA target sequence for TCF20 (NM_005650.1,1406-1424).
gatgcccagtcctaattct

SEQ ID NO: 41721 - DNA, 19 bp, Homo sapiens
  siRNA target sequence for TCF20 (NM_005650.1,1482-1500).
gatcctgggttgagtagtt

SEQ ID NO: 41722 - DNA, 19 bp, Homo sapiens
  siRNA target sequence for TCF20 (NM_005650.1,1502-1520).
gagtgctctgagtactcaa

SEQ ID NO: 41723 - DNA, 19 bp, Homo sapiens
  siRNA target sequence for TCF20 (NM_005650.1,1523-1541).
ggccaatcttcctaacact

SEQ ID NO: 41724 - DNA, 19 bp, Homo sapiens
  siRNA target sequence for TCF20 (NM_005650.1,1547-1565).
gcacatgttactttctgat

SEQ ID NO: 41725 - DNA, 19 bp, Homo sapiens
  siRNA target sequence for TCF20 (NM_005650.1,1672-1690).
cccctatggcagagtcatt

SEQ ID NO: 41726 - DNA, 19 bp, Homo sapiens
  siRNA target sequence for TCF20 (NM_005650.1,1673-1691).
ccctatggcagagtcatta

SEQ ID NO: 41727 - DNA, 19 bp, Homo sapiens
  siRNA target sequence for TCF20 (NM_005650.1,1836-1854).
ccccccagactcaatgcta

SEQ ID NO: 41728 - DNA, 19 bp, Homo sapiens
  siRNA target sequence for TCF20 (NM_005650.1,1913-1931).
cgacgggaacccaaaggtt

SEQ ID NO: 41729 - DNA, 19 bp, Homo sapiens
  siRNA target sequence for TCF20 (NM_005650.1,1918-1936).
ggaacccaaaggttaatga

SEQ ID NO: 41730 - DNA, 19 bp, Homo sapiens
  siRNA target sequence for TCF20 (NM_005650.1,2241-2259).
ggaagtctgcgctatagtt

SEQ ID NO: 41731 - DNA, 19 bp, Homo sapiens
  siRNA target sequence for TCF20 (NM_005650.1,2242-2260).
gaagtctgcgctatagtta

SEQ ID NO: 41732 - DNA, 19 bp, Homo sapiens
  siRNA target sequence for TCF20 (NM_005650.1,2249-2267).
gcgctatagttacaaagat

SEQ ID NO: 41733 - DNA, 19 bp, Homo sapiens
  siRNA target sequence for TCF20 (NM_005650.1,2278-2296).
cagccgtgccacgaaatgt

SEQ ID NO: 41734 - DNA, 19 bp, Homo sapiens
  siRNA target sequence for TCF20 (NM_005650.1,2280-2298).
gccgtgccacgaaatgtca

SEQ ID NO: 41735 - DNA, 19 bp, Homo sapiens
  siRNA target sequence for TCF20 (NM_005650.1,2297-2315).
cagtggctttcctcagtat

SEQ ID NO: 41736 - DNA, 19 bp, Homo sapiens
  siRNA target sequence for TCF20 (NM_005650.1,2354-2372).
ggaacgaaagggtagaaat

SEQ ID NO: 41737 - DNA, 19 bp, Homo sapiens
  siRNA target sequence for TCF20 (NM_005650.1,2420-2438).
ccaccctgacaggagatat

SEQ ID NO: 41738 - DNA, 19 bp, Homo sapiens
  siRNA target sequence for TCF20 (NM_005650.1,2488-2506).
ccacaaggcccaatgtctt

SEQ ID NO: 41739 - DNA, 19 bp, Homo sapiens
  siRNA target sequence for TCF20 (NM_005650.1,2497-2515).
ccaatgtcttggttagtca

SEQ ID NO: 41740 - DNA, 19 bp, Homo sapiens
  siRNA target sequence for TCF20 (NM_005650.1,2504-2522).
cttggttagtcaaaccaat

SEQ ID NO: 41741 - DNA, 19 bp, Homo sapiens
  siRNA target sequence for TCF20 (NM_005650.1,2507-2525).
ggttagtcaaaccaatgaa

SEQ ID NO: 41742 - DNA, 19 bp, Homo sapiens
  siRNA target sequence for TCF20 (NM_005650.1,2554-2572).
gcattgggtctctattaga

SEQ ID NO: 41743 - DNA, 19 bp, Homo sapiens
  siRNA target sequence for TCF20 (NM_005650.1,2633-2651).
gatcaatttgactgactat

SEQ ID NO: 41744 - DNA, 19 bp, Homo sapiens
  siRNA target sequence for TCF20 (NM_005650.1,2748-2766).
ccactaagacagattgtca

SEQ ID NO: 41745 - DNA, 19 bp, Homo sapiens
  siRNA target sequence for TCF20 (NM_005650.1,2828-2846).
ccgtctcaatccaacttta

SEQ ID NO: 41746 - DNA, 19 bp, Homo sapiens
  siRNA target sequence for TCF20 (NM_005650.1,2928-2946).
gactttgaacagtctaaat

SEQ ID NO: 41747 - DNA, 19 bp, Homo sapiens
  siRNA target sequence for TCF20 (NM_005650.1,2930-2948).
ctttgaacagtctaaatct

SEQ ID NO: 41748 - DNA, 19 bp, Homo sapiens
  siRNA target sequence for TCF20 (NM_005650.1,2941-2959).
ctaaatctcaagctagttt

SEQ ID NO: 41749 - DNA, 19 bp, Homo sapiens
  siRNA target sequence for TCF20 (NM_005650.1,2949-2967).
caagctagtttcaacaaca

SEQ ID NO: 41750 - DNA, 19 bp, Homo sapiens
  siRNA target sequence for TCF20 (NM_005650.1,2952-2970).
gctagtttcaacaacaaga

SEQ ID NO: 41751 - DNA, 19 bp, Homo sapiens
  siRNA target sequence for TCF20 (NM_005650.1,2998-3016).
gcatcaagcatgagtctta

SEQ ID NO: 41752 - DNA, 19 bp, Homo sapiens
  siRNA target sequence for TCF20 (NM_005650.1,3046-3064).
cccatgattccctttcaga

SEQ ID NO: 41753 - DNA, 19 bp, Homo sapiens
  siRNA target sequence for TCF20 (NM_005650.1,3140-3158).
gggtcggtccccttctcaa

SEQ ID NO: 41754 - DNA, 19 bp, Homo sapiens
  siRNA target sequence for TCF20 (NM_005650.1,3141-3159).
ggtcggtccccttctcaat

SEQ ID NO: 41755 - DNA, 19 bp, Homo sapiens
  siRNA target sequence for TCF20 (NM_005650.1,3259-3277).
gggctaaccggagttcttt

SEQ ID NO: 41756 - DNA, 19 bp, Homo sapiens
  siRNA target sequence for TCF20 (NM_005650.1,3260-3278).
ggctaaccggagttcttta

SEQ ID NO: 41757 - DNA, 19 bp, Homo sapiens
  siRNA target sequence for TCF20 (NM_005650.1,3262-3280).
ctaaccggagttctttaca

SEQ ID NO: 41758 - DNA, 19 bp, Homo sapiens
  siRNA target sequence for TCF20 (NM_005650.1,3313-3331).
cctctgcttatcatgcaaa

SEQ ID NO: 41759 - DNA, 19 bp, Homo sapiens
  siRNA target sequence for TCF20 (NM_005650.1,3356-3374).
ccctaacgcaggtttgaat

SEQ ID NO: 41760 - DNA, 19 bp, Homo sapiens
  siRNA target sequence for TCF20 (NM_005650.1,3357-3375).
cctaacgcaggtttgaatt

SEQ ID NO: 41761 - DNA, 19 bp, Homo sapiens
  siRNA target sequence for TCF20 (NM_005650.1,3414-3432).
ccagaggagtataaagact

SEQ ID NO: 41762 - DNA, 19 bp, Homo sapiens
  siRNA target sequence for TCF20 (NM_005650.1,3528-3546).
gtacggagccctctgaaaa

SEQ ID NO: 41763 - DNA, 19 bp, Homo sapiens
  siRNA target sequence for TCF20 (NM_005650.1,3532-3550).
ggagccctctgaaaaatga

SEQ ID NO: 41764 - DNA, 19 bp, Homo sapiens
  siRNA target sequence for TCF20 (NM_005650.1,3535-3553).
gccctctgaaaaatgacaa

SEQ ID NO: 41765 - DNA, 19 bp, Homo sapiens
  siRNA target sequence for TCF20 (NM_005650.1,3549-3567).
gacaaagatggtatgatgt

SEQ ID NO: 41766 - DNA, 19 bp, Homo sapiens
  siRNA target sequence for TCF20 (NM_005650.1,3551-3569).
caaagatggtatgatgtat

SEQ ID NO: 41767 - DNA, 19 bp, Homo sapiens
  siRNA target sequence for TCF20 (NM_005650.1,3615-3633).
gggcgctgcctaatgtcta

SEQ ID NO: 41768 - DNA, 19 bp, Homo sapiens
  siRNA target sequence for TCF20 (NM_005650.1,3620-3638).
ctgcctaatgtctagtgat

SEQ ID NO: 41769 - DNA, 19 bp, Homo sapiens
  siRNA target sequence for TCF20 (NM_005650.1,3645-3663).
cctaacaagggcatggaat

SEQ ID NO: 41770 - DNA, 19 bp, Homo sapiens
  siRNA target sequence for TCF20 (NM_005650.1,3646-3664).
ctaacaagggcatggaatt

SEQ ID NO: 41771 - DNA, 19 bp, Homo sapiens
  siRNA target sequence for TCF20 (NM_005650.1,3752-3770).
gtccagtcaaaaaaggtat

SEQ ID NO: 41772 - DNA, 19 bp, Homo sapiens
  siRNA target sequence for TCF20 (NM_005650.1,3809-3827).
ggctacacagtcatccaaa

SEQ ID NO: 41773 - DNA, 19 bp, Homo sapiens
  siRNA target sequence for TCF20 (NM_005650.1,3823-3841).
ccaaacctggtagtgttat

SEQ ID NO: 41774 - DNA, 19 bp, Homo sapiens
  siRNA target sequence for TCF20 (NM_005650.1,3855-3873).
ggccaggaggatcattctt

SEQ ID NO: 41775 - DNA, 19 bp, Homo sapiens
  siRNA target sequence for TCF20 (NM_005650.1,3860-3878).
ggaggatcattcttctcaa

SEQ ID NO: 41776 - DNA, 19 bp, Homo sapiens
  siRNA target sequence for TCF20 (NM_005650.1,3861-3879).
gaggatcattcttctcaaa

SEQ ID NO: 41777 - DNA, 19 bp, Homo sapiens
  siRNA target sequence for TCF20 (NM_005650.1,3895-3913).
ggaggcgtgttcgttcttt

SEQ ID NO: 41778 - DNA, 19 bp, Homo sapiens
  siRNA target sequence for TCF20 (NM_005650.1,3896-3914).
gaggcgtgttcgttctttt

SEQ ID NO: 41779 - DNA, 19 bp, Homo sapiens
  siRNA target sequence for TCF20 (NM_005650.1,3900-3918).
cgtgttcgttcttttatct

SEQ ID NO: 41780 - DNA, 19 bp, Homo sapiens
  siRNA target sequence for TCF20 (NM_005650.1,3935-3953).
gagacagtcacaagatgta

SEQ ID NO: 41781 - DNA, 19 bp, Homo sapiens
  siRNA target sequence for TCF20 (NM_005650.1,3981-3999).
cgcctccttcactcatcaa

SEQ ID NO: 41782 - DNA, 19 bp, Homo sapiens
  siRNA target sequence for TCF20 (NM_005650.1,4002-4020).
gaaggcgctgataaagcat

SEQ ID NO: 41783 - DNA, 19 bp, Homo sapiens
  siRNA target sequence for TCF20 (NM_005650.1,4027-4045).
cctatgcccatctttctca

SEQ ID NO: 41784 - DNA, 19 bp, Homo sapiens
  siRNA target sequence for TCF20 (NM_005650.1,4095-4113).
ccaagtccagatagtagaa

SEQ ID NO: 41785 - DNA, 19 bp, Homo sapiens
  siRNA target sequence for TCF20 (NM_005650.1,4138-4156).
gccctgctaagaccaaaat

SEQ ID NO: 41786 - DNA, 19 bp, Homo sapiens
  siRNA target sequence for TCF20 (NM_005650.1,4208-4226).
gattacatccccaaatatt

SEQ ID NO: 41787 - DNA, 19 bp, Homo sapiens
  siRNA target sequence for TCF20 (NM_005650.1,4268-4286).
cacggttacgcttgatgat

SEQ ID NO: 41788 - DNA, 19 bp, Homo sapiens
  siRNA target sequence for TCF20 (NM_005650.1,4270-4288).
cggttacgcttgatgatat

SEQ ID NO: 41789 - DNA, 19 bp, Homo sapiens
  siRNA target sequence for TCF20 (NM_005650.1,4400-4418).
ggagttgcacgtagagaaa

SEQ ID NO: 41790 - DNA, 19 bp, Homo sapiens
  siRNA target sequence for TCF20 (NM_005650.1,4544-4562).
gaagcctggtagtaaccaa

SEQ ID NO: 41791 - DNA, 19 bp, Homo sapiens
  siRNA target sequence for TCF20 (NM_005650.1,4584-4602).
ggtggaacagcacctttaa

SEQ ID NO: 41792 - DNA, 19 bp, Homo sapiens
  siRNA target sequence for TCF20 (NM_005650.1,4682-4700).
cgatacagtgacgatttca

SEQ ID NO: 41793 - DNA, 19 bp, Homo sapiens
  siRNA target sequence for TCF20 (NM_005650.1,4913-4931).
gaggaagcgaaaaaccaaa

SEQ ID NO: 41794 - DNA, 19 bp, Homo sapiens
  siRNA target sequence for TCF20 (NM_005650.1,4962-4980).
cctgagatcaaactaaaat

SEQ ID NO: 41795 - DNA, 19 bp, Homo sapiens
  siRNA target sequence for TCF20 (NM_005650.1,4985-5003).
cacccagccactggataaa

SEQ ID NO: 41796 - DNA, 19 bp, Homo sapiens
  siRNA target sequence for TCF20 (NM_005650.1,5011-5029).
ccaagaacaagtcttttta

SEQ ID NO: 41797 - DNA, 19 bp, Homo sapiens
  siRNA target sequence for TCF20 (NM_005650.1,5030-5048).
cccttacatccatgtagta

SEQ ID NO: 41798 - DNA, 19 bp, Homo sapiens
  siRNA target sequence for TCF20 (NM_005650.1,5031-5049).
ccttacatccatgtagtaa

SEQ ID NO: 41799 - DNA, 19 bp, Homo sapiens
  siRNA target sequence for TCF20 (NM_005650.1,5061-5079).
cttggagccgtttgtacaa

SEQ ID NO: 41800 - DNA, 19 bp, Homo sapiens
  siRNA target sequence for TCF20 (NM_005650.1,5069-5087).
cgtttgtacaatcatcaat

SEQ ID NO: 41801 - DNA, 19 bp, Homo sapiens
  siRNA target sequence for TCF20 (NM_005650.1,5100-5118).
gaacagaccaaattagtga

SEQ ID NO: 41802 - DNA, 19 bp, Homo sapiens
  siRNA target sequence for TCF20 (NM_005650.1,5364-5382).
gaaatgcagagcaaagtta

SEQ ID NO: 41803 - DNA, 19 bp, Homo sapiens
  siRNA target sequence for TCF20 (NM_005650.1,5389-5407).
ggcacaaaagtgcttctaa

SEQ ID NO: 41804 - DNA, 19 bp, Homo sapiens
  siRNA target sequence for TCF20 (NM_005650.1,5475-5493).
gccgcacaccccaggttta

SEQ ID NO: 41805 - DNA, 19 bp, Homo sapiens
  siRNA target sequence for TCF20 (NM_005650.1,5549-5567).
gctcccttgtaaaaaagca

SEQ ID NO: 41806 - DNA, 19 bp, Homo sapiens
  siRNA target sequence for TCF20 (NM_005650.1,5576-5594).
gggcagcagtgaaaagact

SEQ ID NO: 41807 - DNA, 19 bp, Homo sapiens
  siRNA target sequence for TCF20 (NM_005650.1,5615-5633).
cgtgcccaccacttcagaa

SEQ ID NO: 41808 - DNA, 19 bp, Homo sapiens
  siRNA target sequence for TCF20 (NM_005650.1,5651-5669).
gttacaaatccctgaacta

SEQ ID NO: 41809 - DNA, 19 bp, Homo sapiens
  siRNA target sequence for TCF20 (NM_005650.1,5673-5691).
cttgacagcaatgaatttt

SEQ ID NO: 41810 - DNA, 19 bp, Homo sapiens
  siRNA target sequence for TCF20 (NM_005650.1,5692-5710).
gggtccatgagggttgtat

SEQ ID NO: 41811 - DNA, 19 bp, Homo sapiens
  siRNA target sequence for TCF20 (NM_005650.1,5693-5711).
ggtccatgagggttgtatt

SEQ ID NO: 41812 - DNA, 19 bp, Homo sapiens
  siRNA target sequence for TCF20 (NM_005650.1,5845-5863).
gctccttccgataccatta

SEQ ID NO: 41813 - DNA, 19 bp, Homo sapiens
  siRNA target sequence for TCF20 (NM_005650.1,5871-5889).
gccattgatgcagattgtt

SEQ ID NO: 41814 - DNA, 19 bp, Homo sapiens
  siRNA target sequence for TCF20 (NM_005650.1,5872-5890).
ccattgatgcagattgttt

SEQ ID NO: 41815 - DNA, 19 bp, Homo sapiens
  siRNA target sequence for TCF21 (NM_003206.2,318-336).
gtgacgggttgaaaatgga

SEQ ID NO: 41816 - DNA, 19 bp, Homo sapiens
  siRNA target sequence for TCF21 (NM_003206.2,320-338).
gacgggttgaaaatggatt

SEQ ID NO: 41817 - DNA, 19 bp, Homo sapiens
  siRNA target sequence for TCF21 (NM_003206.2,763-781).
gaccgcgagccgcttatgt

SEQ ID NO: 41818 - DNA, 19 bp, Homo sapiens
  siRNA target sequence for TCF4 (NM_003199.1,225-243).
ccttagggacggacaaaga

SEQ ID NO: 41819 - DNA, 19 bp, Homo sapiens
  siRNA target sequence for TCF4 (NM_003199.1,236-254).
gacaaagagctgagtgatt

SEQ ID NO: 41820 - DNA, 19 bp, Homo sapiens
  siRNA target sequence for TCF4 (NM_003199.1,455-473).
gggtcacatgacaatctct

SEQ ID NO: 41821 - DNA, 19 bp, Homo sapiens
  siRNA target sequence for TCF4 (NM_003199.1,472-490).
ctctccaccttttgtcaat

SEQ ID NO: 41822 - DNA, 19 bp, Homo sapiens
  siRNA target sequence for TCF4 (NM_003199.1,485-503).
gtcaattccagaatacaaa

SEQ ID NO: 41823 - DNA, 19 bp, Homo sapiens
  siRNA target sequence for TCF4 (NM_003199.1,516-534).
ggggctcatactcatctta

SEQ ID NO: 41824 - DNA, 19 bp, Homo sapiens
  siRNA target sequence for TCF4 (NM_003199.1,517-535).
gggctcatactcatcttat

SEQ ID NO: 41825 - DNA, 19 bp, Homo sapiens
  siRNA target sequence for TCF4 (NM_003199.1,537-555).
ggagagaatcaaacttaca

SEQ ID NO: 41826 - DNA, 19 bp, Homo sapiens
  siRNA target sequence for TCF4 (NM_003199.1,630-648).
ctggttcccagtactatca

SEQ ID NO: 41827 - DNA, 19 bp, Homo sapiens
  siRNA target sequence for TCF4 (NM_003199.1,700-718).
ggtacagacaaagaaagtt

SEQ ID NO: 41828 - DNA, 19 bp, Homo sapiens
  siRNA target sequence for TCF4 (NM_003199.1,765-783).
caagcactgccgactacaa

SEQ ID NO: 41829 - DNA, 19 bp, Homo sapiens
  siRNA target sequence for TCF4 (NM_003199.1,788-806).
gactcgccaggctatcctt

SEQ ID NO: 41830 - DNA, 19 bp, Homo sapiens
  siRNA target sequence for TCF4 (NM_003199.1,885-903).
cctccagtgggatgaatca

SEQ ID NO: 41831 - DNA, 19 bp, Homo sapiens
  siRNA target sequence for TCF4 (NM_003199.1,980-998).
gaacgtttgagctatccat

SEQ ID NO: 41832 - DNA, 19 bp, Homo sapiens
  siRNA target sequence for TCF4 (NM_003199.1,1053-1071).
gtagtggtacaaaccatta

SEQ ID NO: 41833 - DNA, 19 bp, Homo sapiens
  siRNA target sequence for TCF4 (NM_003199.1,1099-1117).
caacgggacagacagtata

SEQ ID NO: 41834 - DNA, 19 bp, Homo sapiens
  siRNA target sequence for TCF4 (NM_003199.1,1111-1129).
cagtataatggcaaataga

SEQ ID NO: 41835 - DNA, 19 bp, Homo sapiens
  siRNA target sequence for TCF4 (NM_003199.1,1178-1196).
gcacttgcttcgatctatt

SEQ ID NO: 41836 - DNA, 19 bp, Homo sapiens
  siRNA target sequence for TCF4 (NM_003199.1,1197-1215).
ctccagatcacactaacaa

SEQ ID NO: 41837 - DNA, 19 bp, Homo sapiens
  siRNA target sequence for TCF4 (NM_003199.1,1199-1217).
ccagatcacactaacaaca

SEQ ID NO: 41838 - DNA, 19 bp, Homo sapiens
  siRNA target sequence for TCF4 (NM_003199.1,1303-1321).
ggcctcatcgtctcctaat

SEQ ID NO: 41839 - DNA, 19 bp, Homo sapiens
  siRNA target sequence for TCF4 (NM_003199.1,1304-1322).
gcctcatcgtctcctaatt

SEQ ID NO: 41840 - DNA, 19 bp, Homo sapiens
  siRNA target sequence for TCF4 (NM_003199.1,1305-1323).
cctcatcgtctcctaatta

SEQ ID NO: 41841 - DNA, 19 bp, Homo sapiens
  siRNA target sequence for TCF4 (NM_003199.1,1306-1324).
ctcatcgtctcctaattat

SEQ ID NO: 41842 - DNA, 19 bp, Homo sapiens
  siRNA target sequence for TCF4 (NM_003199.1,1351-1369).
ccgaattgaagatcgttta

SEQ ID NO: 41843 - DNA, 19 bp, Homo sapiens
  siRNA target sequence for TCF4 (NM_003199.1,1552-1570).
ggggacccatcgtgaagat

SEQ ID NO: 41844 - DNA, 19 bp, Homo sapiens
  siRNA target sequence for TCF4 (NM_003199.1,1802-1820).
gatgacgacaagaaggata

SEQ ID NO: 41845 - DNA, 19 bp, Homo sapiens
  siRNA target sequence for TCF4 (NM_003199.1,1816-1834).
ggatatcaaatcaattact

SEQ ID NO: 41846 - DNA, 19 bp, Homo sapiens
  siRNA target sequence for TCF4 (NM_003199.1,1817-1835).
gatatcaaatcaattacta

SEQ ID NO: 41847 - DNA, 19 bp, Homo sapiens
  siRNA target sequence for TCF4 (NM_003199.1,1822-1840).
caaatcaattactagcaat

SEQ ID NO: 41848 - DNA, 19 bp, Homo sapiens
  siRNA target sequence for TCF4 (NM_003199.1,1891-1909).
gcggaggatggccaacaat

SEQ ID NO: 41849 - DNA, 19 bp, Homo sapiens
  siRNA target sequence for TCF4 (NM_003199.1,2060-2078).
gtccgagaaaggaatctga

SEQ ID NO: 41850 - DNA, 19 bp, Homo sapiens
  siRNA target sequence for TCF4 (NM_003199.1,2171-2189).
ggagacgcatcgaatcaca

SEQ ID NO: 41851 - DNA, 19 bp, Homo sapiens
  siRNA target sequence for TCF4 (NM_003199.1,2172-2190).
gagacgcatcgaatcacat

SEQ ID NO: 41852 - DNA, 19 bp, Homo sapiens
  siRNA target sequence for TCF7 (NM_003202.1,94-112).
cgtctactccgccttcaat

SEQ ID NO: 41853 - DNA, 19 bp, Homo sapiens
  siRNA target sequence for TCF7 (NM_003202.1,212-230).
ctctctctctacgaacatt

SEQ ID NO: 41854 - DNA, 19 bp, Homo sapiens
  siRNA target sequence for TCF7 (NM_003202.1,216-234).
ctctctacgaacatttcaa

SEQ ID NO: 41855 - DNA, 19 bp, Homo sapiens
  siRNA target sequence for TCF7 (NM_003202.1,305-323).
gacctctctggcttctact

SEQ ID NO: 41856 - DNA, 19 bp, Homo sapiens
  siRNA target sequence for TCF7 (NM_003202.1,812-830).
cctggctcgcctaagaaat

SEQ ID NO: 41857 - DNA, 19 bp, Homo sapiens
  siRNA target sequence for TCFL1 (NM_005997.1,314-332).
gaacctctcaagagcttaa

SEQ ID NO: 41858 - DNA, 19 bp, Homo sapiens
  siRNA target sequence for TCFL1 (NM_005997.1,388-406).
ggcactactgccattagaa

SEQ ID NO: 41859 - DNA, 19 bp, Homo sapiens
  siRNA target sequence for TCFL1 (NM_005997.1,390-408).
cactactgccattagaact

SEQ ID NO: 41860 - DNA, 19 bp, Homo sapiens
  siRNA target sequence for TCFL1 (NM_005997.1,397-415).
gccattagaactacaagat

SEQ ID NO: 41861 - DNA, 19 bp, Homo sapiens
  siRNA target sequence for TCFL1 (NM_005997.1,399-417).
cattagaactacaagatga

SEQ ID NO: 41862 - DNA, 19 bp, Homo sapiens
  siRNA target sequence for TCFL1 (NM_005997.1,423-441).
ctgacagtcggaagtctat

SEQ ID NO: 41863 - DNA, 19 bp, Homo sapiens
  siRNA target sequence for TCFL1 (NM_005997.1,577-595).
cacagaagagcttaattta

SEQ ID NO: 41864 - DNA, 19 bp, Homo sapiens
  siRNA target sequence for TCFL1 (NM_005997.1,620-638).
ctcgaggctgataaaaaga

SEQ ID NO: 41865 - DNA, 19 bp, Homo sapiens
  siRNA target sequence for TCFL1 (NM_005997.1,670-688).
gcccataatcacctatcat

SEQ ID NO: 41866 - DNA, 19 bp, Homo sapiens
  siRNA target sequence for TCFL1 (NM_005997.1,671-689).
cccataatcacctatcatt

SEQ ID NO: 41867 - DNA, 19 bp, Homo sapiens
  siRNA target sequence for TCFL1 (NM_005997.1,727-745).
ggaagagaacgttgacata

SEQ ID NO: 41868 - DNA, 19 bp, Homo sapiens
  siRNA target sequence for TCFL1 (NM_005997.1,766-784).
ctcggtgtctgcattgact

SEQ ID NO: 41869 - DNA, 19 bp, Homo sapiens
  siRNA target sequence for TCFL1 (NM_005997.1,830-848).
cgtaccttcatcactttta

SEQ ID NO: 41870 - DNA, 19 bp, Homo sapiens
  siRNA target sequence for TCFL1 (NM_005997.1,834-852).
ccttcatcacttttagtga

SEQ ID NO: 41871 - DNA, 19 bp, Homo sapiens
  siRNA target sequence for TCFL1 (NM_005997.1,835-853).
cttcatcacttttagtgat

SEQ ID NO: 41872 - DNA, 19 bp, Homo sapiens
  siRNA target sequence for TCFL1 (NM_005997.1,838-856).
catcacttttagtgatgat

SEQ ID NO: 41873 - DNA, 19 bp, Homo sapiens
  siRNA target sequence for TCFL1 (NM_005997.1,858-876).
caactttcgaggaatggtt

SEQ ID NO: 41874 - DNA, 19 bp, Homo sapiens
  siRNA target sequence for TCFL1 (NM_005997.1,949-967).
ggaccctgttacagacata

SEQ ID NO: 41875 - DNA, 19 bp, Homo sapiens
  siRNA target sequence for TCFL1 (NM_005997.1,978-996).
ctgctcgagccttcaagat

SEQ ID NO: 41876 - DNA, 19 bp, Homo sapiens
  siRNA target sequence for TCFL1 (NM_005997.1,980-998).
gctcgagccttcaagatca

SEQ ID NO: 41877 - DNA, 19 bp, Homo sapiens
  siRNA target sequence for TCFL1 (NM_005997.1,981-999).
ctcgagccttcaagatcat

SEQ ID NO: 41878 - DNA, 19 bp, Homo sapiens
  siRNA target sequence for TCFL1 (NM_005997.1,1106-1124).
cgagccttgcgccagaaaa

SEQ ID NO: 41879 - DNA, 19 bp, Homo sapiens
  siRNA target sequence for TCFL1 (NM_005997.1,1107-1125).
gagccttgcgccagaaaat

SEQ ID NO: 41880 - DNA, 19 bp, Homo sapiens
  siRNA target sequence for TCFL5 (NM_006602.2,730-748).
gcgctcaacaatttggtaa

SEQ ID NO: 41881 - DNA, 19 bp, Homo sapiens
  siRNA target sequence for TCFL5 (NM_006602.2,738-756).
caatttggtaactctcatt

SEQ ID NO: 41882 - DNA, 19 bp, Homo sapiens
  siRNA target sequence for TCFL5 (NM_006602.2,893-911).
ctagtggaaattctaatct

SEQ ID NO: 41883 - DNA, 19 bp, Homo sapiens
  siRNA target sequence for TCFL5 (NM_006602.2,936-954).
ctcatgttctgtacttgaa

SEQ ID NO: 41884 - DNA, 19 bp, Homo sapiens
  siRNA target sequence for TCFL5 (NM_006602.2,1030-1048).
cagacgttaggtagtagaa

SEQ ID NO: 41885 - DNA, 19 bp, Homo sapiens
  siRNA target sequence for TCFL5 (NM_006602.2,1034-1052).
cgttaggtagtagaaacaa

SEQ ID NO: 41886 - DNA, 19 bp, Homo sapiens
  siRNA target sequence for TCFL5 (NM_006602.2,1054-1072).
gttttgcctgagcaagttt

SEQ ID NO: 41887 - DNA, 19 bp, Homo sapiens
  siRNA target sequence for TCFL5 (NM_006602.2,1059-1077).
gcctgagcaagtttggatt

SEQ ID NO: 41888 - DNA, 19 bp, Homo sapiens
  siRNA target sequence for TCFL5 (NM_006602.2,1060-1078).
cctgagcaagtttggatta

SEQ ID NO: 41889 - DNA, 19 bp, Homo sapiens
  siRNA target sequence for TCFL5 (NM_006602.2,1061-1079).
ctgagcaagtttggattaa

SEQ ID NO: 41890 - DNA, 19 bp, Homo sapiens
  siRNA target sequence for TCFL5 (NM_006602.2,1085-1103).
gagaagcagcgctatgcaa

SEQ ID NO: 41891 - DNA, 19 bp, Homo sapiens
  siRNA target sequence for TCFL5 (NM_006602.2,1312-1330).
cgaatggaaagagatagaa

SEQ ID NO: 41892 - DNA, 19 bp, Homo sapiens
  siRNA target sequence for TCFL5 (NM_006602.2,1333-1351).
cgcagaatccgcatttgct

SEQ ID NO: 41893 - DNA, 19 bp, Homo sapiens
  siRNA target sequence for TCFL5 (NM_006602.2,1349-1367).
gctgtgatgagttgaatct

SEQ ID NO: 41894 - DNA, 19 bp, Homo sapiens
  siRNA target sequence for TCFL5 (NM_006602.2,1421-1439).
ccacagcattcctgaaata

SEQ ID NO: 41895 - DNA, 19 bp, Homo sapiens
  siRNA target sequence for TCFL5 (NM_006602.2,1473-1491).
ggaatttgagagcgtattt

SEQ ID NO: 41896 - DNA, 19 bp, Homo sapiens
  siRNA target sequence for TCFL5 (NM_006602.2,1474-1492).
gaatttgagagcgtatttt

SEQ ID NO: 41897 - DNA, 19 bp, Homo sapiens
  siRNA target sequence for TCFL5 (NM_006602.2,1485-1503).
cgtattttgcggtaaaact

SEQ ID NO: 41898 - DNA, 19 bp, Homo sapiens
  siRNA target sequence for TCFL5 (NM_006602.2,1550-1568).
ctgcacaggggagtttaca

SEQ ID NO: 41899 - DNA, 19 bp, Homo sapiens
  siRNA target sequence for TCFL5 (NM_006602.2,1574-1592).
gcccctcgatggagatcaa

SEQ ID NO: 41900 - DNA, 19 bp, Homo sapiens
  siRNA target sequence for TEF (NM_003216.2,338-356).
caagaccatcccatatgat

SEQ ID NO: 41901 - DNA, 19 bp, Homo sapiens
  siRNA target sequence for TEF (NM_003216.2,348-366).
ccatatgatggcgaatctt

SEQ ID NO: 41902 - DNA, 19 bp, Homo sapiens
  siRNA target sequence for TEF (NM_003216.2,349-367).
catatgatggcgaatcttt

SEQ ID NO: 41903 - DNA, 19 bp, Homo sapiens
  siRNA target sequence for TEF (NM_003216.2,598-616).
ccatcgaccccaattgtgt

SEQ ID NO: 41904 - DNA, 19 bp, Homo sapiens
  siRNA target sequence for TEF (NM_003216.2,728-746).
gccccagcctatgatcaaa

SEQ ID NO: 41905 - DNA, 19 bp, Homo sapiens
  siRNA target sequence for TEF (NM_003216.2,849-867).
cgcctgaaagagaatcaga

SEQ ID NO: 41906 - DNA, 19 bp, Homo sapiens
  siRNA target sequence for TERF1 (NM_017489.1,916-934).
cagtctgcggtaactgaat

SEQ ID NO: 41907 - DNA, 19 bp, Homo sapiens
  siRNA target sequence for TERF1 (NM_017489.1,938-956).
cagagggtacagtatcctt

SEQ ID NO: 41908 - DNA, 19 bp, Homo sapiens
  siRNA target sequence for TERF1 (NM_017489.1,940-958).
gagggtacagtatccttat

SEQ ID NO: 41909 - DNA, 19 bp, Homo sapiens
  siRNA target sequence for TERF1 (NM_017489.1,943-961).
ggtacagtatccttattga

SEQ ID NO: 41910 - DNA, 19 bp, Homo sapiens
  siRNA target sequence for THAP11 (NM_020457.2,267-285).
gtgccaggctgctacaaca

SEQ ID NO: 41911 - DNA, 19 bp, Homo sapiens
  siRNA target sequence for THAP11 (NM_020457.2,421-439).
gtctctgcagcgttcactt

SEQ ID NO: 41912 - DNA, 19 bp, Homo sapiens
  siRNA target sequence for THAP11 (NM_020457.2,964-982).
ctggctccgaccattcgta

SEQ ID NO: 41913 - DNA, 19 bp, Homo sapiens
  siRNA target sequence for THAP11 (NM_020457.2,1114-1132).
ccaagctgcgcgaagaact

SEQ ID NO: 41914 - DNA, 19 bp, Homo sapiens
  siRNA target sequence for THAP6 (NM_144721.2,59-77).
cgctgcttgccaaattcga

SEQ ID NO: 41915 - DNA, 19 bp, Homo sapiens
  siRNA target sequence for THAP6 (NM_144721.2,87-105).
gactgacatttcacgtatt

SEQ ID NO: 41916 - DNA, 19 bp, Homo sapiens
  siRNA target sequence for THAP6 (NM_144721.2,100-118).
cgtattccccacagatgaa

SEQ ID NO: 41917 - DNA, 19 bp, Homo sapiens
  siRNA target sequence for THAP6 (NM_144721.2,124-142).
caaaaggaaatgggtatta

SEQ ID NO: 41918 - DNA, 19 bp, Homo sapiens
  siRNA target sequence for THAP6 (NM_144721.2,207-225).
gttcgaggcactttaagaa

SEQ ID NO: 41919 - DNA, 19 bp, Homo sapiens
  siRNA target sequence for THAP6 (NM_144721.2,267-285).
ctggagtcataccttctat

SEQ ID NO: 41920 - DNA, 19 bp, Homo sapiens
  siRNA target sequence for THAP6 (NM_144721.2,274-292).
cataccttctatctttgat

SEQ ID NO: 41921 - DNA, 19 bp, Homo sapiens
  siRNA target sequence for THAP6 (NM_144721.2,357-375).
ccgttccagccactaacta

SEQ ID NO: 41922 - DNA, 19 bp, Homo sapiens
  siRNA target sequence for THAP6 (NM_144721.2,359-377).
gttccagccactaactaca

SEQ ID NO: 41923 - DNA, 19 bp, Homo sapiens
  siRNA target sequence for THAP6 (NM_144721.2,363-381).
cagccactaactacaatca

SEQ ID NO: 41924 - DNA, 19 bp, Homo sapiens
  siRNA target sequence for THAP6 (NM_144721.2,389-407).
gttggtgcttcctcatgta

SEQ ID NO: 41925 - DNA, 19 bp, Homo sapiens
  siRNA target sequence for THAP6 (NM_144721.2,393-411).
gtgcttcctcatgtattga

SEQ ID NO: 41926 - DNA, 19 bp, Homo sapiens
  siRNA target sequence for THAP6 (NM_144721.2,402-420).
catgtattgaagaattcca

SEQ ID NO: 41927 - DNA, 19 bp, Homo sapiens
  siRNA target sequence for THAP6 (NM_144721.2,437-455).
gaacatagctacagtgtaa

SEQ ID NO: 41928 - DNA, 19 bp, Homo sapiens
  siRNA target sequence for THAP6 (NM_144721.2,462-480).
gtccaaagaaacttaagca

SEQ ID NO: 41929 - DNA, 19 bp, Homo sapiens
  siRNA target sequence for THAP6 (NM_144721.2,500-518).
ggcgagctagaggatacaa

SEQ ID NO: 41930 - DNA, 19 bp, Homo sapiens
  siRNA target sequence for THAP6 (NM_144721.2,511-529).
ggatacaaaggaaagtcta

SEQ ID NO: 41931 - DNA, 19 bp, Homo sapiens
  siRNA target sequence for THAP6 (NM_144721.2,521-539).
gaaagtctacggaatgttt

SEQ ID NO: 41932 - DNA, 19 bp, Homo sapiens
  siRNA target sequence for THAP6 (NM_144721.2,525-543).
gtctacggaatgttttaga

SEQ ID NO: 41933 - DNA, 19 bp, Homo sapiens
  siRNA target sequence for THAP6 (NM_144721.2,545-563).
cgagaaaaacgttttcaga

SEQ ID NO: 41934 - DNA, 19 bp, Homo sapiens
  siRNA target sequence for THAP6 (NM_144721.2,671-689).
gaacaggactatatttcat

SEQ ID NO: 41935 - DNA, 19 bp, Homo sapiens
  siRNA target sequence for THAP7 (NM_030573.1,341-359).
ccggcatccgagtacatct

SEQ ID NO: 41936 - DNA, 19 bp, Homo sapiens
  siRNA target sequence for THAP7 (NM_030573.1,342-360).
cggcatccgagtacatcta

SEQ ID NO: 41937 - DNA, 19 bp, Homo sapiens
  siRNA target sequence for THAP7 (NM_030573.1,344-362).
gcatccgagtacatctact

SEQ ID NO: 41938 - DNA, 19 bp, Homo sapiens
  siRNA target sequence for THAP7 (NM_030573.1,400-418).
ggtgggaatcagtggatat

SEQ ID NO: 41939 - DNA, 19 bp, Homo sapiens
  siRNA target sequence for THAP7 (NM_030573.1,414-432).
gatatcacaggctaaagga

SEQ ID NO: 41940 - DNA, 19 bp, Homo sapiens
  siRNA target sequence for THAP7 (NM_030573.1,436-454).
ggcagtccccaccatattt

SEQ ID NO: 41941 - DNA, 19 bp, Homo sapiens
  siRNA target sequence for THAP7 (NM_030573.1,440-458).
gtccccaccatatttgagt

SEQ ID NO: 41942 - DNA, 19 bp, Homo sapiens
  siRNA target sequence for THAP7 (NM_030573.1,444-462).
ccaccatatttgagtcttt

SEQ ID NO: 41943 - DNA, 19 bp, Homo sapiens
  siRNA target sequence for THAP7 (NM_030573.1,569-587).
gggcccacaactccatttt

SEQ ID NO: 41944 - DNA, 19 bp, Homo sapiens
  siRNA target sequence for THAP7 (NM_030573.1,804-822).
ccccctcagcgtatatgct

SEQ ID NO: 41945 - DNA, 19 bp, Homo sapiens
  siRNA target sequence for THAP7 (NM_030573.1,843-861).
gagcctacatccagaatga

SEQ ID NO: 41946 - DNA, 19 bp, Homo sapiens
  siRNA target sequence for THAP8 (NM_152658.1,613-631).
cctgtgagcttctacaagt

SEQ ID NO: 41947 - DNA, 19 bp, Homo sapiens
  siRNA target sequence for THAP8 (NM_152658.1,614-632).
ctgtgagcttctacaagtt

SEQ ID NO: 41948 - DNA, 19 bp, Homo sapiens
  siRNA target sequence for THAP8 (NM_152658.1,866-884).
cgcctcccctacagaagaa

SEQ ID NO: 41949 - DNA, 19 bp, Homo sapiens
  siRNA target sequence for THAP8 (NM_152658.1,1241-1259).
ctgaggaatcccaaacctt

SEQ ID NO: 41950 - DNA, 19 bp, Homo sapiens
  siRNA target sequence for TIAL1 (NM_003252.2,145-163).
ccctgtaaaagctgtaaaa

SEQ ID NO: 41951 - DNA, 19 bp, Homo sapiens
  siRNA target sequence for TIAL1 (NM_003252.2,146-164).
cctgtaaaagctgtaaaat

SEQ ID NO: 41952 - DNA, 19 bp, Homo sapiens
  siRNA target sequence for TIAL1 (NM_003252.2,182-200).
gcaatgacccatattgctt

SEQ ID NO: 41953 - DNA, 19 bp, Homo sapiens
  siRNA target sequence for TIAL1 (NM_003252.2,326-344).
ccaatcacttccatgtgtt

SEQ ID NO: 41954 - DNA, 19 bp, Homo sapiens
  siRNA target sequence for TIAL1 (NM_003252.2,541-559).
cgtcaaatccgaaccaatt

SEQ ID NO: 41955 - DNA, 19 bp, Homo sapiens
  siRNA target sequence for TIAL1 (NM_003252.2,555-573).
caattgggccactcgtaaa

SEQ ID NO: 41956 - DNA, 19 bp, Homo sapiens
  siRNA target sequence for TIAL1 (NM_003252.2,574-592).
ccacctgcacctaaaagta

SEQ ID NO: 41957 - DNA, 19 bp, Homo sapiens
  siRNA target sequence for TIAL1 (NM_003252.2,608-626).
ctaagcagttgagatttga

SEQ ID NO: 41958 - DNA, 19 bp, Homo sapiens
  siRNA target sequence for TIAL1 (NM_003252.2,689-707).
ggttaacagatcagcttat

SEQ ID NO: 41959 - DNA, 19 bp, Homo sapiens
  siRNA target sequence for TIAL1 (NM_003252.2,703-721).
cttatgagacagacattct

SEQ ID NO: 41960 - DNA, 19 bp, Homo sapiens
  siRNA target sequence for TIAL1 (NM_003252.2,767-785).
gctattcatttgtcagatt

SEQ ID NO: 41961 - DNA, 19 bp, Homo sapiens
  siRNA target sequence for TIAL1 (NM_003252.2,822-840).
ggtgaacggtactacgatt

SEQ ID NO: 41962 - DNA, 19 bp, Homo sapiens
  siRNA target sequence for TIAL1 (NM_003252.2,825-843).
gaacggtactacgattgaa

SEQ ID NO: 41963 - DNA, 19 bp, Homo sapiens
  siRNA target sequence for TIAL1 (NM_003252.2,844-862).
ggacatgtggttaaatgct

SEQ ID NO: 41964 - DNA, 19 bp, Homo sapiens
  siRNA target sequence for TIAL1 (NM_003252.2,845-863).
gacatgtggttaaatgcta

SEQ ID NO: 41965 - DNA, 19 bp, Homo sapiens
  siRNA target sequence for TIAL1 (NM_003252.2,869-887).
gtaaagaatctcctgatat

SEQ ID NO: 41966 - DNA, 19 bp, Homo sapiens
  siRNA target sequence for TIAL1 (NM_003252.2,897-915).
cttccaacaggttgactat

SEQ ID NO: 41967 - DNA, 19 bp, Homo sapiens
  siRNA target sequence for TIAL1 (NM_003252.2,926-944).
gccaatggagccaagtgta

SEQ ID NO: 41968 - DNA, 19 bp, Homo sapiens
  siRNA target sequence for TIAL1 (NM_003252.2,927-945).
ccaatggagccaagtgtat

SEQ ID NO: 41969 - DNA, 19 bp, Homo sapiens
  siRNA target sequence for TIAL1 (NM_003252.2,987-1005).
gcaagtaccgccttatgga

SEQ ID NO: 41970 - DNA, 19 bp, Homo sapiens
  siRNA target sequence for TIAL1 (NM_003252.2,1011-1029).
cgggcaaccatggaatcaa

SEQ ID NO: 41971 - DNA, 19 bp, Homo sapiens
  siRNA target sequence for TIAL1 (NM_003252.2,1013-1031).
ggcaaccatggaatcaaca

SEQ ID NO: 41972 - DNA, 19 bp, Homo sapiens
  siRNA target sequence for TIF1 (NM_003852.2,470-488).
cacccaagttggagtcatt

SEQ ID NO: 41973 - DNA, 19 bp, Homo sapiens
  siRNA target sequence for TIF1 (NM_003852.2,474-492).
caagttggagtcattcgtt

SEQ ID NO: 41974 - DNA, 19 bp, Homo sapiens
  siRNA target sequence for TIF1 (NM_003852.2,514-532).
gtgcagagagacacatcat

SEQ ID NO: 41975 - DNA, 19 bp, Homo sapiens
  siRNA target sequence for TIF1 (NM_003852.2,587-605).
gtcaaatcaggtatgtaca

SEQ ID NO: 41976 - DNA, 19 bp, Homo sapiens
  siRNA target sequence for TIF1 (NM_003852.2,660-678).
ctctgcaagacgtgtatca

SEQ ID NO: 41977 - DNA, 19 bp, Homo sapiens
  siRNA target sequence for TIF1 (NM_003852.2,684-702).
catcagagggtaaagttca

SEQ ID NO: 41978 - DNA, 19 bp, Homo sapiens
  siRNA target sequence for TIF1 (NM_003852.2,841-859).
gtcgagactgtcagttgtt

SEQ ID NO: 41979 - DNA, 19 bp, Homo sapiens
  siRNA target sequence for TIF1 (NM_003852.2,870-888).
gagcatagataccaattta

SEQ ID NO: 41980 - DNA, 19 bp, Homo sapiens
  siRNA target sequence for TIF1 (NM_003852.2,872-890).
gcatagataccaatttata

SEQ ID NO: 41981 - DNA, 19 bp, Homo sapiens
  siRNA target sequence for TIF1 (NM_003852.2,905-923).
gaatcagaaagtgatcata

SEQ ID NO: 41982 - DNA, 19 bp, Homo sapiens
  siRNA target sequence for TIF1 (NM_003852.2,915-933).
gtgatcatagatacactaa

SEQ ID NO: 41983 - DNA, 19 bp, Homo sapiens
  siRNA target sequence for TIF1 (NM_003852.2,983-1001).
gatccaaaacagaattatt

SEQ ID NO: 41984 - DNA, 19 bp, Homo sapiens
  siRNA target sequence for TIF1 (NM_003852.2,1023-1041).
caggtggaacaggatatta

SEQ ID NO: 41985 - DNA, 19 bp, Homo sapiens
  siRNA target sequence for TIF1 (NM_003852.2,1090-1108).
ctctactgcatcagttaga

SEQ ID NO: 41986 - DNA, 19 bp, Homo sapiens
  siRNA target sequence for TIF1 (NM_003852.2,1092-1110).
ctactgcatcagttagaga

SEQ ID NO: 41987 - DNA, 19 bp, Homo sapiens
  siRNA target sequence for TIF1 (NM_003852.2,1121-1139).
ggaccatcgcatgaaactt

SEQ ID NO: 41988 - DNA, 19 bp, Homo sapiens
  siRNA target sequence for TIF1 (NM_003852.2,1122-1140).
gaccatcgcatgaaactta

SEQ ID NO: 41989 - DNA, 19 bp, Homo sapiens
  siRNA target sequence for TIF1 (NM_003852.2,1162-1180).
ctggactctctaaacaatt

SEQ ID NO: 41990 - DNA, 19 bp, Homo sapiens
  siRNA target sequence for TIF1 (NM_003852.2,1165-1183).
gactctctaaacaattgga

SEQ ID NO: 41991 - DNA, 19 bp, Homo sapiens
  siRNA target sequence for TIF1 (NM_003852.2,1184-1202).
gcatgtcatgcatttttct

SEQ ID NO: 41992 - DNA, 19 bp, Homo sapiens
  siRNA target sequence for TIF1 (NM_003852.2,1188-1206).
gtcatgcatttttctaaat

SEQ ID NO: 41993 - DNA, 19 bp, Homo sapiens
  siRNA target sequence for TIF1 (NM_003852.2,1223-1241).
cagcagtacagcattactt

SEQ ID NO: 41994 - DNA, 19 bp, Homo sapiens
  siRNA target sequence for TIF1 (NM_003852.2,1225-1243).
gcagtacagcattacttta

SEQ ID NO: 41995 - DNA, 19 bp, Homo sapiens
  siRNA target sequence for TIF1 (NM_003852.2,1313-1331).
caacaacaccatccaattt

SEQ ID NO: 41996 - DNA, 19 bp, Homo sapiens
  siRNA target sequence for TIF1 (NM_003852.2,1351-1369).
gggctcaaaatatcatcaa

SEQ ID NO: 41997 - DNA, 19 bp, Homo sapiens
  siRNA target sequence for TIF1 (NM_003852.2,1364-1382).
catcaacttaggttcttta

SEQ ID NO: 41998 - DNA, 19 bp, Homo sapiens
  siRNA target sequence for TIF1 (NM_003852.2,1499-1517).
gatcagcctagctcaatta

SEQ ID NO: 41999 - DNA, 19 bp, Homo sapiens
  siRNA target sequence for TIF1 (NM_003852.2,1545-1563).
ccgcctccacgtttgataa

SEQ ID NO: 42000 - DNA, 19 bp, Homo sapiens
  siRNA target sequence for TIF1 (NM_003852.2,1546-1564).
cgcctccacgtttgataaa

SEQ ID NO: 42001 - DNA, 19 bp, Homo sapiens
  siRNA target sequence for TIF1 (NM_003852.2,1552-1570).
cacgtttgataaactttca

SEQ ID NO: 42002 - DNA, 19 bp, Homo sapiens
  siRNA target sequence for TIF1 (NM_003852.2,1554-1572).
cgtttgataaactttcaga

SEQ ID NO: 42003 - DNA, 19 bp, Homo sapiens
  siRNA target sequence for TIF1 (NM_003852.2,1646-1664).
cataccacgacaagcaata

SEQ ID NO: 42004 - DNA, 19 bp, Homo sapiens
  siRNA target sequence for TIF1 (NM_003852.2,1694-1712).
ggctcaacaagccataaaa

SEQ ID NO: 42005 - DNA, 19 bp, Homo sapiens
  siRNA target sequence for TIF1 (NM_003852.2,1778-1796).
cagccccacgattactagt

SEQ ID NO: 42006 - DNA, 19 bp, Homo sapiens
  siRNA target sequence for TIF1 (NM_003852.2,1824-1842).
ggttcacctatgatcgatt

SEQ ID NO: 42007 - DNA, 19 bp, Homo sapiens
  siRNA target sequence for TIF1 (NM_003852.2,1825-1843).
gttcacctatgatcgattt

SEQ ID NO: 42008 - DNA, 19 bp, Homo sapiens
  siRNA target sequence for TIF1 (NM_003852.2,1852-1870).
cagtgggagggtcttataa

SEQ ID NO: 42009 - DNA, 19 bp, Homo sapiens
  siRNA target sequence for TIF1 (NM_003852.2,1856-1874).
gggagggtcttataatctt

SEQ ID NO: 42010 - DNA, 19 bp, Homo sapiens
  siRNA target sequence for TIF1 (NM_003852.2,1876-1894).
cctctcttccggatattga

SEQ ID NO: 42011 - DNA, 19 bp, Homo sapiens
  siRNA target sequence for TIF1 (NM_003852.2,1884-1902).
ccggatattgactgttcaa

SEQ ID NO: 42012 - DNA, 19 bp, Homo sapiens
  siRNA target sequence for TIF1 (NM_003852.2,1886-1904).
ggatattgactgttcaagt

SEQ ID NO: 42013 - DNA, 19 bp, Homo sapiens
  siRNA target sequence for TIF1 (NM_003852.2,1887-1905).
gatattgactgttcaagta

SEQ ID NO: 42014 - DNA, 19 bp, Homo sapiens
  siRNA target sequence for TIF1 (NM_003852.2,1893-1911).
gactgttcaagtactatta

SEQ ID NO: 42015 - DNA, 19 bp, Homo sapiens
  siRNA target sequence for TIF1 (NM_003852.2,1897-1915).
gttcaagtactattatgct

SEQ ID NO: 42016 - DNA, 19 bp, Homo sapiens
  siRNA target sequence for TIF1 (NM_003852.2,1919-1937).
caatattgtgaggaaagat

SEQ ID NO: 42017 - DNA, 19 bp, Homo sapiens
  siRNA target sequence for TIF1 (NM_003852.2,1959-1977).
ccaagaccaccctcaaaca

SEQ ID NO: 42018 - DNA, 19 bp, Homo sapiens
  siRNA target sequence for TIF1 (NM_003852.2,2018-2036).
ccttgcaggacctgttact

SEQ ID NO: 42019 - DNA, 19 bp, Homo sapiens
  siRNA target sequence for TIF1 (NM_003852.2,2019-2037).
cttgcaggacctgttacta

SEQ ID NO: 42020 - DNA, 19 bp, Homo sapiens
  siRNA target sequence for TIF1 (NM_003852.2,2025-2043).
ggacctgttactatgacta

SEQ ID NO: 42021 - DNA, 19 bp, Homo sapiens
  siRNA target sequence for TIF1 (NM_003852.2,2046-2064).
gtacaccccccaatacgtt

SEQ ID NO: 42022 - DNA, 19 bp, Homo sapiens
  siRNA target sequence for TIF1 (NM_003852.2,2128-2146).
ctgactctacacacaaagt

SEQ ID NO: 42023 - DNA, 19 bp, Homo sapiens
  siRNA target sequence for TIF1 (NM_003852.2,2156-2174).
catgctggagccaattcga

SEQ ID NO: 42024 - DNA, 19 bp, Homo sapiens
  siRNA target sequence for TIF1 (NM_003852.2,2159-2177).
gctggagccaattcgaata

SEQ ID NO: 42025 - DNA, 19 bp, Homo sapiens
  siRNA target sequence for TIF1 (NM_003852.2,2160-2178).
ctggagccaattcgaataa

SEQ ID NO: 42026 - DNA, 19 bp, Homo sapiens
  siRNA target sequence for TIF1 (NM_003852.2,2165-2183).
gccaattcgaataaaacaa

SEQ ID NO: 42027 - DNA, 19 bp, Homo sapiens
  siRNA target sequence for TIF1 (NM_003852.2,2167-2185).
caattcgaataaaacaaga

SEQ ID NO: 42028 - DNA, 19 bp, Homo sapiens
  siRNA target sequence for TIF1 (NM_003852.2,2194-2212).
gaccaccggaaaattatga

SEQ ID NO: 42029 - DNA, 19 bp, Homo sapiens
  siRNA target sequence for TIF1 (NM_003852.2,2196-2214).
ccaccggaaaattatgatt

SEQ ID NO: 42030 - DNA, 19 bp, Homo sapiens
  siRNA target sequence for TIF1 (NM_003852.2,2238-2256).
gaatcagatgaagaatcta

SEQ ID NO: 42031 - DNA, 19 bp, Homo sapiens
  siRNA target sequence for TIF1 (NM_003852.2,2291-2309).
cacctccctgctcttaaat

SEQ ID NO: 42032 - DNA, 19 bp, Homo sapiens
  siRNA target sequence for TIF1 (NM_003852.2,2331-2349).
gaggagactgtgctaagat

SEQ ID NO: 42033 - DNA, 19 bp, Homo sapiens
  siRNA target sequence for TIF1 (NM_003852.2,2336-2354).
gactgtgctaagatcagat

SEQ ID NO: 42034 - DNA, 19 bp, Homo sapiens
  siRNA target sequence for TIF1 (NM_003852.2,2438-2456).
gaagtcacctcttcatgtt

SEQ ID NO: 42035 - DNA, 19 bp, Homo sapiens
  siRNA target sequence for TIF1 (NM_003852.2,2492-2510).
ctggtgtgcagtttgtcaa

SEQ ID NO: 42036 - DNA, 19 bp, Homo sapiens
  siRNA target sequence for TIF1 (NM_003852.2,2494-2512).
ggtgtgcagtttgtcaaaa

SEQ ID NO: 42037 - DNA, 19 bp, Homo sapiens
  siRNA target sequence for TIF1 (NM_003852.2,2612-2630).
cactttctgccgagactta

SEQ ID NO: 42038 - DNA, 19 bp, Homo sapiens
  siRNA target sequence for TIF1 (NM_003852.2,2621-2639).
ccgagacttatctaaacca

SEQ ID NO: 42039 - DNA, 19 bp, Homo sapiens
  siRNA target sequence for TIF1 (NM_003852.2,2694-2712).
gaaggccttgttaagttaa

SEQ ID NO: 42040 - DNA, 19 bp, Homo sapiens
  siRNA target sequence for TIF1 (NM_003852.2,2732-2750).
gtgtgagcgcctactttta

SEQ ID NO: 42041 - DNA, 19 bp, Homo sapiens
  siRNA target sequence for TIF1 (NM_003852.2,2734-2752).
gtgagcgcctacttttatt

SEQ ID NO: 42042 - DNA, 19 bp, Homo sapiens
  siRNA target sequence for TIF1 (NM_003852.2,2799-2817).
ctaactgtgcctgattatt

SEQ ID NO: 42043 - DNA, 19 bp, Homo sapiens
  siRNA target sequence for TIF1 (NM_003852.2,2846-2864).
gtcaaccatcaagaaaaga

SEQ ID NO: 42044 - DNA, 19 bp, Homo sapiens
  siRNA target sequence for TIF1 (NM_003852.2,2848-2866).
caaccatcaagaaaagact

SEQ ID NO: 42045 - DNA, 19 bp, Homo sapiens
  siRNA target sequence for TIF1 (NM_003852.2,2865-2883).
ctacaagaagattattcca

SEQ ID NO: 42046 - DNA, 19 bp, Homo sapiens
  siRNA target sequence for TIF1 (NM_003852.2,2871-2889).
gaagattattccatgtact

SEQ ID NO: 42047 - DNA, 19 bp, Homo sapiens
  siRNA target sequence for TIF1 (NM_003852.2,2874-2892).
gattattccatgtactcaa

SEQ ID NO: 42048 - DNA, 19 bp, Homo sapiens
  siRNA target sequence for TIF1 (NM_003852.2,2967-2985).
gtagccaatgctggtataa

SEQ ID NO: 42049 - DNA, 19 bp, Homo sapiens
  siRNA target sequence for TIF1 (NM_003852.2,3023-3041).
ctatccagaaaaaaggttt

SEQ ID NO: 42050 - DNA, 19 bp, Homo sapiens
  siRNA target sequence for TIF1 (NM_003852.2,3117-3135).
cggaagaaacgcctcaaaa

SEQ ID NO: 42051 - DNA, 19 bp, Homo sapiens
  siRNA target sequence for TIF1 (NM_003852.2,3127-3145).
gcctcaaaagcattgaaga

SEQ ID NO: 42052 - DNA, 19 bp, Homo sapiens
  siRNA target sequence for TIF1 (NM_003852.2,3141-3159).
gaagaacgccagttgctta

SEQ ID NO: 42053 - DNA, 19 bp, Homo sapiens
  siRNA target sequence for TIF1 (NM_003852.2,3144-3162).
gaacgccagttgcttaaat

SEQ ID NO: 42054 - DNA, 19 bp, Homo sapiens
  siRNA target sequence for TIGD4 (NM_145720.2,841-859).
gcctatccattgaggaaaa

SEQ ID NO: 42055 - DNA, 19 bp, Homo sapiens
  siRNA target sequence for TIGD4 (NM_145720.2,843-861).
ctatccattgaggaaaaga

SEQ ID NO: 42056 - DNA, 19 bp, Homo sapiens
  siRNA target sequence for TIGD4 (NM_145720.2,854-872).
ggaaaagatcgacatcata

SEQ ID NO: 42057 - DNA, 19 bp, Homo sapiens
  siRNA target sequence for TIGD4 (NM_145720.2,1015-1033).
gactgagaactgcttttta

SEQ ID NO: 42058 - DNA, 19 bp, Homo sapiens
  siRNA target sequence for TIGD4 (NM_145720.2,1058-1076).
gagatggtatcgaattgct

SEQ ID NO: 42059 - DNA, 19 bp, Homo sapiens
  siRNA target sequence for TIGD4 (NM_145720.2,1068-1086).
cgaattgctcagtgtctaa

SEQ ID NO: 42060 - DNA, 19 bp, Homo sapiens
  siRNA target sequence for TIGD4 (NM_145720.2,1069-1087).
gaattgctcagtgtctaaa

SEQ ID NO: 42061 - DNA, 19 bp, Homo sapiens
  siRNA target sequence for TIGD4 (NM_145720.2,1102-1120).
gtccgatgttacgtctaaa

SEQ ID NO: 42062 - DNA, 19 bp, Homo sapiens
  siRNA target sequence for TIGD4 (NM_145720.2,1106-1124).
gatgttacgtctaaaagct

SEQ ID NO: 42063 - DNA, 19 bp, Homo sapiens
  siRNA target sequence for TIGD4 (NM_145720.2,1109-1127).
gttacgtctaaaagctaat

SEQ ID NO: 42064 - DNA, 19 bp, Homo sapiens
  siRNA target sequence for TIGD4 (NM_145720.2,1113-1131).
cgtctaaaagctaatgatt

SEQ ID NO: 42065 - DNA, 19 bp, Homo sapiens
  siRNA target sequence for TIGD4 (NM_145720.2,1114-1132).
gtctaaaagctaatgattt

SEQ ID NO: 42066 - DNA, 19 bp, Homo sapiens
  siRNA target sequence for TIGD4 (NM_145720.2,1143-1161).
ctgggccataatgatttta

SEQ ID NO: 42067 - DNA, 19 bp, Homo sapiens
  siRNA target sequence for TIGD4 (NM_145720.2,1146-1164).
ggccataatgattttaagt

SEQ ID NO: 42068 - DNA, 19 bp, Homo sapiens
  siRNA target sequence for TIGD4 (NM_145720.2,1173-1191).
ggttggctggatcgtttta

SEQ ID NO: 42069 - DNA, 19 bp, Homo sapiens
  siRNA target sequence for TIGD4 (NM_145720.2,1174-1192).
gttggctggatcgttttaa

SEQ ID NO: 42070 - DNA, 19 bp, Homo sapiens
  siRNA target sequence for TIGD4 (NM_145720.2,1199-1217).
gtatggtttagtattcaga

SEQ ID NO: 42071 - DNA, 19 bp, Homo sapiens
  siRNA target sequence for TIGD4 (NM_145720.2,1214-1232).
cagagctcaacctgtagaa

SEQ ID NO: 42072 - DNA, 19 bp, Homo sapiens
  siRNA target sequence for TIGD4 (NM_145720.2,1258-1276).
cgactgtctggtaccaaaa

SEQ ID NO: 42073 - DNA, 19 bp, Homo sapiens
  siRNA target sequence for TIGD4 (NM_145720.2,1261-1279).
ctgtctggtaccaaaatgt

SEQ ID NO: 42074 - DNA, 19 bp, Homo sapiens
  siRNA target sequence for TIGD4 (NM_145720.2,1265-1283).
ctggtaccaaaatgtactt

SEQ ID NO: 42075 - DNA, 19 bp, Homo sapiens
  siRNA target sequence for TIGD4 (NM_145720.2,1334-1352).
gactgggctgctttatcga

SEQ ID NO: 42076 - DNA, 19 bp, Homo sapiens
  siRNA target sequence for TIGD4 (NM_145720.2,1336-1354).
ctgggctgctttatcgaat

SEQ ID NO: 42077 - DNA, 19 bp, Homo sapiens
  siRNA target sequence for TIGD4 (NM_145720.2,1339-1357).
ggctgctttatcgaatgtt

SEQ ID NO: 42078 - DNA, 19 bp, Homo sapiens
  siRNA target sequence for TIGD4 (NM_145720.2,1340-1358).
gctgctttatcgaatgtta

SEQ ID NO: 42079 - DNA, 19 bp, Homo sapiens
  siRNA target sequence for TIGD4 (NM_145720.2,1344-1362).
ctttatcgaatgttaccta

SEQ ID NO: 42080 - DNA, 19 bp, Homo sapiens
  siRNA target sequence for TIGD4 (NM_145720.2,1359-1377).
cctaccaatacatttgcat

SEQ ID NO: 42081 - DNA, 19 bp, Homo sapiens
  siRNA target sequence for TIGD4 (NM_145720.2,1396-1414).
cagttggaaagttatgcaa

SEQ ID NO: 42082 - DNA, 19 bp, Homo sapiens
  siRNA target sequence for TIGD4 (NM_145720.2,1467-1485).
cctttgcttgtcattggaa

SEQ ID NO: 42083 - DNA, 19 bp, Homo sapiens
  siRNA target sequence for TIGD4 (NM_145720.2,1468-1486).
ctttgcttgtcattggaaa

SEQ ID NO: 42084 - DNA, 19 bp, Homo sapiens
  siRNA target sequence for TIGD4 (NM_145720.2,1558-1576).
ggatgacctccgatgtatt

SEQ ID NO: 42085 - DNA, 19 bp, Homo sapiens
  siRNA target sequence for TIGD4 (NM_145720.2,1559-1577).
gatgacctccgatgtattt

SEQ ID NO: 42086 - DNA, 19 bp, Homo sapiens
  siRNA target sequence for TIGD4 (NM_145720.2,1562-1580).
gacctccgatgtatttgaa

SEQ ID NO: 42087 - DNA, 19 bp, Homo sapiens
  siRNA target sequence for TIGD4 (NM_145720.2,1585-1603).
ggatgcgaaagcttgatga

SEQ ID NO: 42088 - DNA, 19 bp, Homo sapiens
  siRNA target sequence for TIGD4 (NM_145720.2,1620-1638).
caacgaagagtggtgattt

SEQ ID NO: 42089 - DNA, 19 bp, Homo sapiens
  siRNA target sequence for TIGD4 (NM_145720.2,1676-1694).
cctaaaatccattgagtta

SEQ ID NO: 42090 - DNA, 19 bp, Homo sapiens
  siRNA target sequence for TIGD4 (NM_145720.2,1684-1702).
ccattgagttagcattctt

SEQ ID NO: 42091 - DNA, 19 bp, Homo sapiens
  siRNA target sequence for TIGD4 (NM_145720.2,1689-1707).
gagttagcattctttccat

SEQ ID NO: 42092 - DNA, 19 bp, Homo sapiens
  siRNA target sequence for TIGD4 (NM_145720.2,1717-1735).
cttccaaatgtatagctat

SEQ ID NO: 42093 - DNA, 19 bp, Homo sapiens
  siRNA target sequence for TIGD4 (NM_145720.2,1776-1794).
cactgtcttatcaagaaat

SEQ ID NO: 42094 - DNA, 19 bp, Homo sapiens
  siRNA target sequence for TIGD4 (NM_145720.2,1836-1854).
ctactagatgcagttgata

SEQ ID NO: 42095 - DNA, 19 bp, Homo sapiens
  siRNA target sequence for TIGD4 (NM_145720.2,1876-1894).
ctgtaaccccagagactat

SEQ ID NO: 42096 - DNA, 19 bp, Homo sapiens
  siRNA target sequence for TIGD4 (NM_145720.2,1883-1901).
cccagagactattgttaaa

SEQ ID NO: 42097 - DNA, 19 bp, Homo sapiens
  siRNA target sequence for TIGD4 (NM_145720.2,2023-2041).
gtttatctatagaagaata

SEQ ID NO: 42098 - DNA, 19 bp, Homo sapiens
  siRNA target sequence for TIGD4 (NM_145720.2,2044-2062).
ctgccctggatgatgattt

SEQ ID NO: 42099 - DNA, 19 bp, Homo sapiens
  siRNA target sequence for TIGD4 (NM_145720.2,2080-2098).
caccaaatggtgattccat

SEQ ID NO: 42100 - DNA, 19 bp, Homo sapiens
  siRNA target sequence for TIGD4 (NM_145720.2,2082-2100).
ccaaatggtgattccatat

SEQ ID NO: 42101 - DNA, 19 bp, Homo sapiens
  siRNA target sequence for TIGD4 (NM_145720.2,2096-2114).
catatgcaccaaagaaagt

SEQ ID NO: 42102 - DNA, 19 bp, Homo sapiens
  siRNA target sequence for TIGD4 (NM_145720.2,2183-2201).
ccctttaccatcaaaatct

SEQ ID NO: 42103 - DNA, 19 bp, Homo sapiens
  siRNA target sequence for TIGD4 (NM_145720.2,2204-2222).
ggcaataactgctttagat

SEQ ID NO: 42104 - DNA, 19 bp, Homo sapiens
  siRNA target sequence for TIGD4 (NM_145720.2,2261-2279).
cggacttcaaaattcttta

SEQ ID NO: 42105 - DNA, 19 bp, Homo sapiens
  siRNA target sequence for TIGD5 (NM_032862.2,182-200).
gcactcagcgcaagaagat

SEQ ID NO: 42106 - DNA, 19 bp, Homo sapiens
  siRNA target sequence for TIGD5 (NM_032862.2,547-565).
ggggacgagcagatttaca

SEQ ID NO: 42107 - DNA, 19 bp, Homo sapiens
  siRNA target sequence for TIGD5 (NM_032862.2,842-860).
gctggttctttgaggaatt

SEQ ID NO: 42108 - DNA, 19 bp, Homo sapiens
  siRNA target sequence for TIGD5 (NM_032862.2,1124-1142).
ccttcaaacagctgtacaa

SEQ ID NO: 42109 - DNA, 19 bp, Homo sapiens
  siRNA target sequence for TIGD6 (NM_030953.2,374-392).
ggtatcactccctctactt

SEQ ID NO: 42110 - DNA, 19 bp, Homo sapiens
  siRNA target sequence for TIGD6 (NM_030953.2,375-393).
gtatcactccctctacttt

SEQ ID NO: 42111 - DNA, 19 bp, Homo sapiens
  siRNA target sequence for TIGD6 (NM_030953.2,383-401).
ccctctactttatctacat

SEQ ID NO: 42112 - DNA, 19 bp, Homo sapiens
  siRNA target sequence for TIGD6 (NM_030953.2,384-402).
cctctactttatctacatt

SEQ ID NO: 42113 - DNA, 19 bp, Homo sapiens
  siRNA target sequence for TIGD6 (NM_030953.2,452-470).
ggaccccagcggaaaagga

SEQ ID NO: 42114 - DNA, 19 bp, Homo sapiens
  siRNA target sequence for TIGD6 (NM_030953.2,468-486).
ggatgaggagcgctcttta

SEQ ID NO: 42115 - DNA, 19 bp, Homo sapiens
  siRNA target sequence for TIGD6 (NM_030953.2,472-490).
gaggagcgctctttatgat

SEQ ID NO: 42116 - DNA, 19 bp, Homo sapiens
  siRNA target sequence for TIGD6 (NM_030953.2,474-492).
ggagcgctctttatgatga

SEQ ID NO: 42117 - DNA, 19 bp, Homo sapiens
  siRNA target sequence for TIGD6 (NM_030953.2,529-547).
ccatgccaaaaacattctt

SEQ ID NO: 42118 - DNA, 19 bp, Homo sapiens
  siRNA target sequence for TIGD6 (NM_030953.2,555-573).
gttctgtcattcggaaaaa

SEQ ID NO: 42119 - DNA, 19 bp, Homo sapiens
  siRNA target sequence for TIGD6 (NM_030953.2,592-610).
catgcttggctatgacaat

SEQ ID NO: 42120 - DNA, 19 bp, Homo sapiens
  siRNA target sequence for TIGD6 (NM_030953.2,623-641).
gtgggctggctgaacagat

SEQ ID NO: 42121 - DNA, 19 bp, Homo sapiens
  siRNA target sequence for TIGD6 (NM_030953.2,625-643).
gggctggctgaacagattt

SEQ ID NO: 42122 - DNA, 19 bp, Homo sapiens
  siRNA target sequence for TIGD6 (NM_030953.2,630-648).
ggctgaacagatttagaga

SEQ ID NO: 42123 - DNA, 19 bp, Homo sapiens
  siRNA target sequence for TIGD6 (NM_030953.2,631-649).
gctgaacagatttagagat

SEQ ID NO: 42124 - DNA, 19 bp, Homo sapiens
  siRNA target sequence for TIGD6 (NM_030953.2,647-665).
gatcgccacggaattgctt

SEQ ID NO: 42125 - DNA, 19 bp, Homo sapiens
  siRNA target sequence for TIGD6 (NM_030953.2,651-669).
gccacggaattgctttgaa

SEQ ID NO: 42126 - DNA, 19 bp, Homo sapiens
  siRNA target sequence for TIGD6 (NM_030953.2,652-670).
ccacggaattgctttgaaa

SEQ ID NO: 42127 - DNA, 19 bp, Homo sapiens
  siRNA target sequence for TIGD6 (NM_030953.2,683-701).
gaagatagtgacaggttaa

SEQ ID NO: 42128 - DNA, 19 bp, Homo sapiens
  siRNA target sequence for TIGD6 (NM_030953.2,686-704).
gatagtgacaggttaatga

SEQ ID NO: 42129 - DNA, 19 bp, Homo sapiens
  siRNA target sequence for TIGD6 (NM_030953.2,703-721).
gaatggtctaggaatagat

SEQ ID NO: 42130 - DNA, 19 bp, Homo sapiens
  siRNA target sequence for TIGD6 (NM_030953.2,714-732).
gaatagataagattaatga

SEQ ID NO: 42131 - DNA, 19 bp, Homo sapiens
  siRNA target sequence for TIGD6 (NM_030953.2,772-790).
cagcccagatgatatcttt

SEQ ID NO: 42132 - DNA, 19 bp, Homo sapiens
  siRNA target sequence for TIGD6 (NM_030953.2,774-792).
gcccagatgatatctttaa

SEQ ID NO: 42133 - DNA, 19 bp, Homo sapiens
  siRNA target sequence for TIGD6 (NM_030953.2,835-853).
cacacttgctgctaaagga

SEQ ID NO: 42134 - DNA, 19 bp, Homo sapiens
  siRNA target sequence for TIGD6 (NM_030953.2,886-904).
gcggttgacagcactcttt

SEQ ID NO: 42135 - DNA, 19 bp, Homo sapiens
  siRNA target sequence for TIGD6 (NM_030953.2,887-905).
cggttgacagcactctttt

SEQ ID NO: 42136 - DNA, 19 bp, Homo sapiens
  siRNA target sequence for TIGD6 (NM_030953.2,889-907).
gttgacagcactcttttgt

SEQ ID NO: 42137 - DNA, 19 bp, Homo sapiens
  siRNA target sequence for TIGD6 (NM_030953.2,919-937).
ggggactgaaaaaatgaga

SEQ ID NO: 42138 - DNA, 19 bp, Homo sapiens
  siRNA target sequence for TIGD6 (NM_030953.2,966-984).
cacactgcctcaagaacat

SEQ ID NO: 42139 - DNA, 19 bp, Homo sapiens
  siRNA target sequence for TIGD6 (NM_030953.2,970-988).
ctgcctcaagaacattcat

SEQ ID NO: 42140 - DNA, 19 bp, Homo sapiens
  siRNA target sequence for TIGD6 (NM_030953.2,1027-1045).
gatgacaagggatctgttt

SEQ ID NO: 42141 - DNA, 19 bp, Homo sapiens
  siRNA target sequence for TIGD6 (NM_030953.2,1032-1050).
caagggatctgtttaatga

SEQ ID NO: 42142 - DNA, 19 bp, Homo sapiens
  siRNA target sequence for TIGD6 (NM_030953.2,1200-1218).
cactgaatcttggcataat

SEQ ID NO: 42143 - DNA, 19 bp, Homo sapiens
  siRNA target sequence for TIGD6 (NM_030953.2,1240-1258).
ccagagccaccttctaaaa

SEQ ID NO: 42144 - DNA, 19 bp, Homo sapiens
  siRNA target sequence for TIGD6 (NM_030953.2,1388-1406).
ggcatcgtccctatggaat

SEQ ID NO: 42145 - DNA, 19 bp, Homo sapiens
  siRNA target sequence for TIGD6 (NM_030953.2,1389-1407).
gcatcgtccctatggaatt

SEQ ID NO: 42146 - DNA, 19 bp, Homo sapiens
  siRNA target sequence for TIGD6 (NM_030953.2,1390-1408).
catcgtccctatggaattt

SEQ ID NO: 42147 - DNA, 19 bp, Homo sapiens
  siRNA target sequence for TIGD6 (NM_030953.2,1409-1427).
gcagaatgtgacacagaat

SEQ ID NO: 42148 - DNA, 19 bp, Homo sapiens
  siRNA target sequence for TIGD6 (NM_030953.2,1485-1503).
ccacctgtgtcccaaatga

SEQ ID NO: 42149 - DNA, 19 bp, Homo sapiens
  siRNA target sequence for TIGD6 (NM_030953.2,1486-1504).
cacctgtgtcccaaatgaa

SEQ ID NO: 42150 - DNA, 19 bp, Homo sapiens
  siRNA target sequence for TIGD6 (NM_030953.2,1576-1594).
catggtggctggcgaaaat

SEQ ID NO: 42151 - DNA, 19 bp, Homo sapiens
  siRNA target sequence for TIGD6 (NM_030953.2,1657-1675).
catcacagaagccatatca

SEQ ID NO: 42152 - DNA, 19 bp, Homo sapiens
  siRNA target sequence for TIGD6 (NM_030953.2,1660-1678).
cacagaagccatatcaagt

SEQ ID NO: 42153 - DNA, 19 bp, Homo sapiens
  siRNA target sequence for TIGD6 (NM_030953.2,1748-1766).
ggcatagatgaatatttaa

SEQ ID NO: 42154 - DNA, 19 bp, Homo sapiens
  siRNA target sequence for TIGD6 (NM_030953.2,1785-1803).
cccttattgattccaaaat

SEQ ID NO: 42155 - DNA, 19 bp, Homo sapiens
  siRNA target sequence for TIGD7 (NM_033208.2,795-813).
gagagggaaatatacaaca

SEQ ID NO: 42156 - DNA, 19 bp, Homo sapiens
  siRNA target sequence for TIGD7 (NM_033208.2,834-852).
gaaggttctaagtagaatt

SEQ ID NO: 42157 - DNA, 19 bp, Homo sapiens
  siRNA target sequence for TIGD7 (NM_033208.2,837-855).
ggttctaagtagaattgaa

SEQ ID NO: 42158 - DNA, 19 bp, Homo sapiens
  siRNA target sequence for TIGD7 (NM_033208.2,860-878).
gacgatcacttaaaagtgt

SEQ ID NO: 42159 - DNA, 19 bp, Homo sapiens
  siRNA target sequence for TIGD7 (NM_033208.2,862-880).
cgatcacttaaaagtgtaa

SEQ ID NO: 42160 - DNA, 19 bp, Homo sapiens
  siRNA target sequence for TIGD7 (NM_033208.2,899-917).
gtaagtcaacattttatga

SEQ ID NO: 42161 - DNA, 19 bp, Homo sapiens
  siRNA target sequence for TIGD7 (NM_033208.2,936-954).
gttaattctggactttgta

SEQ ID NO: 42162 - DNA, 19 bp, Homo sapiens
  siRNA target sequence for TIGD7 (NM_033208.2,960-978).
gcaggacatgccattagta

SEQ ID NO: 42163 - DNA, 19 bp, Homo sapiens
  siRNA target sequence for TIGD7 (NM_033208.2,998-1016).
ggacaacgggagccaaata

SEQ ID NO: 42164 - DNA, 19 bp, Homo sapiens
  siRNA target sequence for TIGD7 (NM_033208.2,999-1017).
gacaacgggagccaaatat

SEQ ID NO: 42165 - DNA, 19 bp, Homo sapiens
  siRNA target sequence for TIGD7 (NM_033208.2,1124-1142).
gttttgggcgaacagattt

SEQ ID NO: 42166 - DNA, 19 bp, Homo sapiens
  siRNA target sequence for TIGD7 (NM_033208.2,1132-1150).
cgaacagatttcaaagcta

SEQ ID NO: 42167 - DNA, 19 bp, Homo sapiens
  siRNA target sequence for TIGD7 (NM_033208.2,1152-1170).
cactggttggctttttaga

SEQ ID NO: 42168 - DNA, 19 bp, Homo sapiens
  siRNA target sequence for TIGD7 (NM_033208.2,1212-1230).
ggaacaagtcctaagttca

SEQ ID NO: 42169 - DNA, 19 bp, Homo sapiens
  siRNA target sequence for TIGD7 (NM_033208.2,1249-1267).
ccatttcgacaaaaactgt

SEQ ID NO: 42170 - DNA, 19 bp, Homo sapiens
  siRNA target sequence for TIGD7 (NM_033208.2,1258-1276).
caaaaactgtccatgataa

SEQ ID NO: 42171 - DNA, 19 bp, Homo sapiens
  siRNA target sequence for TIGD7 (NM_033208.2,1318-1336).
gatgaaacagacctctttt

SEQ ID NO: 42172 - DNA, 19 bp, Homo sapiens
  siRNA target sequence for TIGD7 (NM_033208.2,1343-1361).
caatgccagaaaattctca

SEQ ID NO: 42173 - DNA, 19 bp, Homo sapiens
  siRNA target sequence for TIGD7 (NM_033208.2,1439-1457).
cagacggaactcataaatt

SEQ ID NO: 42174 - DNA, 19 bp, Homo sapiens
  siRNA target sequence for TIGD7 (NM_033208.2,1441-1459).
gacggaactcataaattaa

SEQ ID NO: 42175 - DNA, 19 bp, Homo sapiens
  siRNA target sequence for TIGD7 (NM_033208.2,1448-1466).
ctcataaattaaagtcaat

SEQ ID NO: 42176 - DNA, 19 bp, Homo sapiens
  siRNA target sequence for TIGD7 (NM_033208.2,1514-1532).
gtacattgcctgtgatata

SEQ ID NO: 42177 - DNA, 19 bp, Homo sapiens
  siRNA target sequence for TIGD7 (NM_033208.2,1557-1575).
caccagagaattgttttca

SEQ ID NO: 42178 - DNA, 19 bp, Homo sapiens
  siRNA target sequence for TIGD7 (NM_033208.2,1605-1623).
ggtccgacattttcaactt

SEQ ID NO: 42179 - DNA, 19 bp, Homo sapiens
  siRNA target sequence for TIGD7 (NM_033208.2,1606-1624).
gtccgacattttcaactta

SEQ ID NO: 42180 - DNA, 19 bp, Homo sapiens
  siRNA target sequence for TIGD7 (NM_033208.2,1608-1626).
ccgacattttcaacttaat

SEQ ID NO: 42181 - DNA, 19 bp, Homo sapiens
  siRNA target sequence for TIGD7 (NM_033208.2,1610-1628).
gacattttcaacttaatgt

SEQ ID NO: 42182 - DNA, 19 bp, Homo sapiens
  siRNA target sequence for TIGD7 (NM_033208.2,1647-1665).
ggacgtcagggcattgtta

SEQ ID NO: 42183 - DNA, 19 bp, Homo sapiens
  siRNA target sequence for TIGD7 (NM_033208.2,1650-1668).
cgtcagggcattgttactt

SEQ ID NO: 42184 - DNA, 19 bp, Homo sapiens
  siRNA target sequence for TIGD7 (NM_033208.2,1710-1728).
cagtgaggatggtcgaata

SEQ ID NO: 42185 - DNA, 19 bp, Homo sapiens
  siRNA target sequence for TIGD7 (NM_033208.2,1716-1734).
ggatggtcgaataaaatgt

SEQ ID NO: 42186 - DNA, 19 bp, Homo sapiens
  siRNA target sequence for TIGD7 (NM_033208.2,1717-1735).
gatggtcgaataaaatgta

SEQ ID NO: 42187 - DNA, 19 bp, Homo sapiens
  siRNA target sequence for TIGD7 (NM_033208.2,1720-1738).
ggtcgaataaaatgtatgt

SEQ ID NO: 42188 - DNA, 19 bp, Homo sapiens
  siRNA target sequence for TIGD7 (NM_033208.2,1721-1739).
gtcgaataaaatgtatgtt

SEQ ID NO: 42189 - DNA, 19 bp, Homo sapiens
  siRNA target sequence for TIGD7 (NM_033208.2,1752-1770).
cacttcaaccttgattcaa

SEQ ID NO: 42190 - DNA, 19 bp, Homo sapiens
  siRNA target sequence for TIGD7 (NM_033208.2,1757-1775).
caaccttgattcaaccaat

SEQ ID NO: 42191 - DNA, 19 bp, Homo sapiens
  siRNA target sequence for TIGD7 (NM_033208.2,1760-1778).
ccttgattcaaccaatgaa

SEQ ID NO: 42192 - DNA, 19 bp, Homo sapiens
  siRNA target sequence for TIGD7 (NM_033208.2,1761-1779).
cttgattcaaccaatgaat

SEQ ID NO: 42193 - DNA, 19 bp, Homo sapiens
  siRNA target sequence for TIGD7 (NM_033208.2,1797-1815).
ctgcaaacggctgtataga

SEQ ID NO: 42194 - DNA, 19 bp, Homo sapiens
  siRNA target sequence for TIGD7 (NM_033208.2,1825-1843).
cttgaagagagtcttgtaa

SEQ ID NO: 42195 - DNA, 19 bp, Homo sapiens
  siRNA target sequence for TIGD7 (NM_033208.2,1828-1846).
gaagagagtcttgtaatat

SEQ ID NO: 42196 - DNA, 19 bp, Homo sapiens
  siRNA target sequence for TIGD7 (NM_033208.2,2028-2046).
cttagaacatggggattat

SEQ ID NO: 42197 - DNA, 19 bp, Homo sapiens
  siRNA target sequence for TIGD7 (NM_033208.2,2066-2084).
gtggggagttggaaactaa

SEQ ID NO: 42198 - DNA, 19 bp, Homo sapiens
  siRNA target sequence for TIGD7 (NM_033208.2,2069-2087).
gggagttggaaactaagtt

SEQ ID NO: 42199 - DNA, 19 bp, Homo sapiens
  siRNA target sequence for TIGD7 (NM_033208.2,2238-2256).
ggactaccttcttgacttt

SEQ ID NO: 42200 - DNA, 19 bp, Homo sapiens
  siRNA target sequence for TIGD7 (NM_033208.2,2244-2262).
ccttcttgactttgttgat

SEQ ID NO: 42201 - DNA, 19 bp, Homo sapiens
  siRNA target sequence for TIGD7 (NM_033208.2,2331-2349).
gttccagagtaaaatccat

SEQ ID NO: 42202 - DNA, 19 bp, Homo sapiens
  siRNA target sequence for TIGD7 (NM_033208.2,2337-2355).
gagtaaaatccattctaga

SEQ ID NO: 42203 - DNA, 19 bp, Homo sapiens
  siRNA target sequence for TIGD7 (NM_033208.2,2351-2369).
ctagaattggtagcttttt

SEQ ID NO: 42204 - DNA, 19 bp, Homo sapiens
  siRNA target sequence for TIGD7 (NM_033208.2,2359-2377).
ggtagctttttgaaaccta

SEQ ID NO: 42205 - DNA, 19 bp, Homo sapiens
  siRNA target sequence for TIGD7 (NM_033208.2,2374-2392).
cctaggcctcataatatta

SEQ ID NO: 42206 - DNA, 19 bp, Homo sapiens
  siRNA target sequence for TIGD7 (NM_033208.2,2375-2393).
ctaggcctcataatattaa

SEQ ID NO: 42207 - DNA, 19 bp, Homo sapiens
  siRNA target sequence for TIGD7 (NM_033208.2,2378-2396).
ggcctcataatattaagga

SEQ ID NO: 42208 - DNA, 19 bp, Homo sapiens
  siRNA target sequence for TIGD7 (NM_033208.2,2414-2432).
caacttctggttctaatca

SEQ ID NO: 42209 - DNA, 19 bp, Homo sapiens
  siRNA target sequence for TIMELESS (NM_003920.1,203-221).
gagggagacacttaccata

SEQ ID NO: 42210 - DNA, 19 bp, Homo sapiens
  siRNA target sequence for TIMELESS (NM_003920.1,361-379).
ccaggacaagcctctcttt

SEQ ID NO: 42211 - DNA, 19 bp, Homo sapiens
  siRNA target sequence for TIMELESS (NM_003920.1,364-382).
ggacaagcctctctttgat

SEQ ID NO: 42212 - DNA, 19 bp, Homo sapiens
  siRNA target sequence for TIMELESS (NM_003920.1,453-471).
ccagctttcggcaccattt

SEQ ID NO: 42213 - DNA, 19 bp, Homo sapiens
  siRNA target sequence for TIMELESS (NM_003920.1,454-472).
cagctttcggcaccatttt

SEQ ID NO: 42214 - DNA, 19 bp, Homo sapiens
  siRNA target sequence for TIMELESS (NM_003920.1,456-474).
gctttcggcaccatttttt

SEQ ID NO: 42215 - DNA, 19 bp, Homo sapiens
  siRNA target sequence for TIMELESS (NM_003920.1,534-552).
gagtcctcagtgaaacctt

SEQ ID NO: 42216 - DNA, 19 bp, Homo sapiens
  siRNA target sequence for TIMELESS (NM_003920.1,538-556).
cctcagtgaaaccttgtat

SEQ ID NO: 42217 - DNA, 19 bp, Homo sapiens
  siRNA target sequence for TIMELESS (NM_003920.1,619-637).
cctactgctggtcagaaat

SEQ ID NO: 42218 - DNA, 19 bp, Homo sapiens
  siRNA target sequence for TIMELESS (NM_003920.1,620-638).
ctactgctggtcagaaata

SEQ ID NO: 42219 - DNA, 19 bp, Homo sapiens
  siRNA target sequence for TIMELESS (NM_003920.1,800-818).
gagattgtctcccttatgt

SEQ ID NO: 42220 - DNA, 19 bp, Homo sapiens
  siRNA target sequence for TIMELESS (NM_003920.1,877-895).
gcggagtgcagattttgca

SEQ ID NO: 42221 - DNA, 19 bp, Homo sapiens
  siRNA target sequence for TIMELESS (NM_003920.1,958-976).
caacaggcattctcgattt

SEQ ID NO: 42222 - DNA, 19 bp, Homo sapiens
  siRNA target sequence for TIMELESS (NM_003920.1,1046-1064).
cacaacctacgaaactaca

SEQ ID NO: 42223 - DNA, 19 bp, Homo sapiens
  siRNA target sequence for TIMELESS (NM_003920.1,1087-1105).
gaaaaaggtgcctaaacgt

SEQ ID NO: 42224 - DNA, 19 bp, Homo sapiens
  siRNA target sequence for TIMELESS (NM_003920.1,1207-1225).
ccggctcatgggatcagta

SEQ ID NO: 42225 - DNA, 19 bp, Homo sapiens
  siRNA target sequence for TIMELESS (NM_003920.1,1208-1226).
cggctcatgggatcagtaa

SEQ ID NO: 42226 - DNA, 19 bp, Homo sapiens
  siRNA target sequence for TIMELESS (NM_003920.1,1209-1227).
ggctcatgggatcagtaaa

SEQ ID NO: 42227 - DNA, 19 bp, Homo sapiens
  siRNA target sequence for TIMELESS (NM_003920.1,1213-1231).
catgggatcagtaaaggat

SEQ ID NO: 42228 - DNA, 19 bp, Homo sapiens
  siRNA target sequence for TIMELESS (NM_003920.1,1256-1274).
cagcatgatgagacctatt

SEQ ID NO: 42229 - DNA, 19 bp, Homo sapiens
  siRNA target sequence for TIMELESS (NM_003920.1,1258-1276).
gcatgatgagacctattat

SEQ ID NO: 42230 - DNA, 19 bp, Homo sapiens
  siRNA target sequence for TIMELESS (NM_003920.1,1259-1277).
catgatgagacctattata

SEQ ID NO: 42231 - DNA, 19 bp, Homo sapiens
  siRNA target sequence for TIMELESS (NM_003920.1,1389-1407).
ccaactactatgagatgat

SEQ ID NO: 42232 - DNA, 19 bp, Homo sapiens
  siRNA target sequence for TIMELESS (NM_003920.1,1529-1547).
gagagcagccgcatcatca

SEQ ID NO: 42233 - DNA, 19 bp, Homo sapiens
  siRNA target sequence for TIMELESS (NM_003920.1,1538-1556).
cgcatcatcaagaacaata

SEQ ID NO: 42234 - DNA, 19 bp, Homo sapiens
  siRNA target sequence for TIMELESS (NM_003920.1,1540-1558).
catcatcaagaacaatatt

SEQ ID NO: 42235 - DNA, 19 bp, Homo sapiens
  siRNA target sequence for TIMELESS (NM_003920.1,1567-1585).
gatggagtaccgagaacta

SEQ ID NO: 42236 - DNA, 19 bp, Homo sapiens
  siRNA target sequence for TIMELESS (NM_003920.1,1768-1786).
ggccattgtttctggtaat

SEQ ID NO: 42237 - DNA, 19 bp, Homo sapiens
  siRNA target sequence for TIMELESS (NM_003920.1,1927-1945).
gcgggcagaagctatggta

SEQ ID NO: 42238 - DNA, 19 bp, Homo sapiens
  siRNA target sequence for TIMELESS (NM_003920.1,2189-2207).
caggtgtcggagaaagaat

SEQ ID NO: 42239 - DNA, 19 bp, Homo sapiens
  siRNA target sequence for TIMELESS (NM_003920.1,2191-2209).
ggtgtcggagaaagaattt

SEQ ID NO: 42240 - DNA, 19 bp, Homo sapiens
  siRNA target sequence for TIMELESS (NM_003920.1,2192-2210).
gtgtcggagaaagaattta

SEQ ID NO: 42241 - DNA, 19 bp, Homo sapiens
  siRNA target sequence for TIMELESS (NM_003920.1,2194-2212).
gtcggagaaagaatttaat

SEQ ID NO: 42242 - DNA, 19 bp, Homo sapiens
  siRNA target sequence for TIMELESS (NM_003920.1,2227-2245).
gaaacgctttgcatgttca

SEQ ID NO: 42243 - DNA, 19 bp, Homo sapiens
  siRNA target sequence for TIMELESS (NM_003920.1,2258-2276).
gcctatgtgctgctactaa

SEQ ID NO: 42244 - DNA, 19 bp, Homo sapiens
  siRNA target sequence for TIMELESS (NM_003920.1,2278-2296).
gagctaccagcagaatagt

SEQ ID NO: 42245 - DNA, 19 bp, Homo sapiens
  siRNA target sequence for TIMELESS (NM_003920.1,2298-2316).
cccacactaaccattgcat

SEQ ID NO: 42246 - DNA, 19 bp, Homo sapiens
  siRNA target sequence for TIMELESS (NM_003920.1,2299-2317).
ccacactaaccattgcatt

SEQ ID NO: 42247 - DNA, 19 bp, Homo sapiens
  siRNA target sequence for TIMELESS (NM_003920.1,2304-2322).
ctaaccattgcattgtgaa

SEQ ID NO: 42248 - DNA, 19 bp, Homo sapiens
  siRNA target sequence for TIMELESS (NM_003920.1,2418-2436).
ctgctggagcctacaaaga

SEQ ID NO: 42249 - DNA, 19 bp, Homo sapiens
  siRNA target sequence for TIMELESS (NM_003920.1,2480-2498).
ctggctgcagtcaaccaaa

SEQ ID NO: 42250 - DNA, 19 bp, Homo sapiens
  siRNA target sequence for TIMELESS (NM_003920.1,2604-2622).
catggagccccgaagaaga

SEQ ID NO: 42251 - DNA, 19 bp, Homo sapiens
  siRNA target sequence for TIMELESS (NM_003920.1,2614-2632).
cgaagaagaggctcatctt

SEQ ID NO: 42252 - DNA, 19 bp, Homo sapiens
  siRNA target sequence for TIMELESS (NM_003920.1,2689-2707).
cttggcccacctgaatact

SEQ ID NO: 42253 - DNA, 19 bp, Homo sapiens
  siRNA target sequence for TIMELESS (NM_003920.1,2692-2710).
ggcccacctgaatactgtt

SEQ ID NO: 42254 - DNA, 19 bp, Homo sapiens
  siRNA target sequence for TIMELESS (NM_003920.1,2715-2733).
gaacacgcaagcagatcat

SEQ ID NO: 42255 - DNA, 19 bp, Homo sapiens
  siRNA target sequence for TIMELESS (NM_003920.1,2827-2845).
ggagctgcagcggcttttt

SEQ ID NO: 42256 - DNA, 19 bp, Homo sapiens
  siRNA target sequence for TIMELESS (NM_003920.1,2867-2885).
gatgtcctgggtcatatca

SEQ ID NO: 42257 - DNA, 19 bp, Homo sapiens
  siRNA target sequence for TIMELESS (NM_003920.1,2916-2934).
cccgaatagtggataaact

SEQ ID NO: 42258 - DNA, 19 bp, Homo sapiens
  siRNA target sequence for TIMELESS (NM_003920.1,2918-2936).
cgaatagtggataaactct

SEQ ID NO: 42259 - DNA, 19 bp, Homo sapiens
  siRNA target sequence for TIMELESS (NM_003920.1,3018-3036).
gagcggagtccctgaaaga

SEQ ID NO: 42260 - DNA, 19 bp, Homo sapiens
  siRNA target sequence for TIMELESS (NM_003920.1,3131-3149).
ggtagcttagtcctttcaa

SEQ ID NO: 42261 - DNA, 19 bp, Homo sapiens
  siRNA target sequence for TIMELESS (NM_003920.1,3132-3150).
gtagcttagtcctttcaaa

SEQ ID NO: 42262 - DNA, 19 bp, Homo sapiens
  siRNA target sequence for TIMELESS (NM_003920.1,3255-3273).
gctcccaggccgttccatt

SEQ ID NO: 42263 - DNA, 19 bp, Homo sapiens
  siRNA target sequence for TIMELESS (NM_003920.1,3303-3321).
ccatggaaaacgaacagtt

SEQ ID NO: 42264 - DNA, 19 bp, Homo sapiens
  siRNA target sequence for TIMELESS (NM_003920.1,3468-3486).
cagagctgcagcctaaagt

SEQ ID NO: 42265 - DNA, 19 bp, Homo sapiens
  siRNA target sequence for TIMELESS (NM_003920.1,3556-3574).
gctagcccacaagaagaaa

SEQ ID NO: 42266 - DNA, 19 bp, Homo sapiens
  siRNA target sequence for TIMELESS (NM_003920.1,3636-3654).
ccaagaaacgacaattgct

SEQ ID NO: 42267 - DNA, 19 bp, Homo sapiens
  siRNA target sequence for TMF1 (NM_007114.1,133-151).
ggagagccgggaataagtt

SEQ ID NO: 42268 - DNA, 19 bp, Homo sapiens
  siRNA target sequence for TMF1 (NM_007114.1,261-279).
gactgtggtcgatgaatct

SEQ ID NO: 42269 - DNA, 19 bp, Homo sapiens
  siRNA target sequence for TMF1 (NM_007114.1,267-285).
ggtcgatgaatctgaaaat

SEQ ID NO: 42270 - DNA, 19 bp, Homo sapiens
  siRNA target sequence for TMF1 (NM_007114.1,392-410).
gcagcttacatgaatcctt

SEQ ID NO: 42271 - DNA, 19 bp, Homo sapiens
  siRNA target sequence for TMF1 (NM_007114.1,414-432).
cattggccagtcaagaact

SEQ ID NO: 42272 - DNA, 19 bp, Homo sapiens
  siRNA target sequence for TMF1 (NM_007114.1,423-441).
gtcaagaactcctgaaaca

SEQ ID NO: 42273 - DNA, 19 bp, Homo sapiens
  siRNA target sequence for TMF1 (NM_007114.1,492-510).
ggcagcaggtacttcatca

SEQ ID NO: 42274 - DNA, 19 bp, Homo sapiens
  siRNA target sequence for TMF1 (NM_007114.1,524-542).
gcaagcacgaagaaactgt

SEQ ID NO: 42275 - DNA, 19 bp, Homo sapiens
  siRNA target sequence for TMF1 (NM_007114.1,525-543).
caagcacgaagaaactgtt

SEQ ID NO: 42276 - DNA, 19 bp, Homo sapiens
  siRNA target sequence for TMF1 (NM_007114.1,561-579).
gaaggtgccaactgtaagt

SEQ ID NO: 42277 - DNA, 19 bp, Homo sapiens
  siRNA target sequence for TMF1 (NM_007114.1,565-583).
gtgccaactgtaagtttga

SEQ ID NO: 42278 - DNA, 19 bp, Homo sapiens
  siRNA target sequence for TMF1 (NM_007114.1,567-585).
gccaactgtaagtttgaaa

SEQ ID NO: 42279 - DNA, 19 bp, Homo sapiens
  siRNA target sequence for TMF1 (NM_007114.1,622-640).
gaaagtatatctaatacgt

SEQ ID NO: 42280 - DNA, 19 bp, Homo sapiens
  siRNA target sequence for TMF1 (NM_007114.1,648-666).
gtctctcacagcagaaaca

SEQ ID NO: 42281 - DNA, 19 bp, Homo sapiens
  siRNA target sequence for TMF1 (NM_007114.1,661-679).
gaaacaaaggacatagctt

SEQ ID NO: 42282 - DNA, 19 bp, Homo sapiens
  siRNA target sequence for TMF1 (NM_007114.1,730-748).
cctcctgttagtacctttt

SEQ ID NO: 42283 - DNA, 19 bp, Homo sapiens
  siRNA target sequence for TMF1 (NM_007114.1,733-751).
cctgttagtaccttttcat

SEQ ID NO: 42284 - DNA, 19 bp, Homo sapiens
  siRNA target sequence for TMF1 (NM_007114.1,764-782).
ccaccagtgatattgaagt

SEQ ID NO: 42285 - DNA, 19 bp, Homo sapiens
  siRNA target sequence for TMF1 (NM_007114.1,896-914).
ctgcttgtcctgaatataa

SEQ ID NO: 42286 - DNA, 19 bp, Homo sapiens
  siRNA target sequence for TMF1 (NM_007114.1,902-920).
gtcctgaatataatcgttt

SEQ ID NO: 42287 - DNA, 19 bp, Homo sapiens
  siRNA target sequence for TMF1 (NM_007114.1,974-992).
gaatagactcatttagtgt

SEQ ID NO: 42288 - DNA, 19 bp, Homo sapiens
  siRNA target sequence for TMF1 (NM_007114.1,1009-1027).
cggagtgtaagtgaaatca

SEQ ID NO: 42289 - DNA, 19 bp, Homo sapiens
  siRNA target sequence for TMF1 (NM_007114.1,1010-1028).
ggagtgtaagtgaaatcaa

SEQ ID NO: 42290 - DNA, 19 bp, Homo sapiens
  siRNA target sequence for TMF1 (NM_007114.1,1046-1064).
caggcaagggatatgcttt

SEQ ID NO: 42291 - DNA, 19 bp, Homo sapiens
  siRNA target sequence for TMF1 (NM_007114.1,1066-1084).
gtgcctattatagttaatt

SEQ ID NO: 42292 - DNA, 19 bp, Homo sapiens
  siRNA target sequence for TMF1 (NM_007114.1,1085-1103).
cttcaactccaaagtctaa

SEQ ID NO: 42293 - DNA, 19 bp, Homo sapiens
  siRNA target sequence for TMF1 (NM_007114.1,1098-1116).
gtctaaaacagttgaatct

SEQ ID NO: 42294 - DNA, 19 bp, Homo sapiens
  siRNA target sequence for TMF1 (NM_007114.1,1138-1156).
gtaaatgaaacattagtta

SEQ ID NO: 42295 - DNA, 19 bp, Homo sapiens
  siRNA target sequence for TMF1 (NM_007114.1,1214-1232).
gtgaacagcctgatatctt

SEQ ID NO: 42296 - DNA, 19 bp, Homo sapiens
  siRNA target sequence for TMF1 (NM_007114.1,1259-1277).
gacagactgtgttagacaa

SEQ ID NO: 42297 - DNA, 19 bp, Homo sapiens
  siRNA target sequence for TMF1 (NM_007114.1,1339-1357).
gtttgcaagacagttgaat

SEQ ID NO: 42298 - DNA, 19 bp, Homo sapiens
  siRNA target sequence for TMF1 (NM_007114.1,1347-1365).
gacagttgaatttctgaat

SEQ ID NO: 42299 - DNA, 19 bp, Homo sapiens
  siRNA target sequence for TMF1 (NM_007114.1,1383-1401).
ggaggctcagttattatct

SEQ ID NO: 42300 - DNA, 19 bp, Homo sapiens
  siRNA target sequence for TMF1 (NM_007114.1,1387-1405).
gctcagttattatctctta

SEQ ID NO: 42301 - DNA, 19 bp, Homo sapiens
  siRNA target sequence for TMF1 (NM_007114.1,1501-1519).
gatgagtttactcaaagaa

SEQ ID NO: 42302 - DNA, 19 bp, Homo sapiens
  siRNA target sequence for TMF1 (NM_007114.1,1597-1615).
gaagaacttgccactagat

SEQ ID NO: 42303 - DNA, 19 bp, Homo sapiens
  siRNA target sequence for TMF1 (NM_007114.1,1600-1618).
gaacttgccactagattaa

SEQ ID NO: 42304 - DNA, 19 bp, Homo sapiens
  siRNA target sequence for TMF1 (NM_007114.1,1608-1626).
cactagattaaatagtagt

SEQ ID NO: 42305 - DNA, 19 bp, Homo sapiens
  siRNA target sequence for TMF1 (NM_007114.1,1627-1645).
gaaactgcagaccttttga

SEQ ID NO: 42306 - DNA, 19 bp, Homo sapiens
  siRNA target sequence for TMF1 (NM_007114.1,1662-1680).
gatccgagggttaatggaa

SEQ ID NO: 42307 - DNA, 19 bp, Homo sapiens
  siRNA target sequence for TMF1 (NM_007114.1,1711-1729).
cacaattctaacatcatca

SEQ ID NO: 42308 - DNA, 19 bp, Homo sapiens
  siRNA target sequence for TMF1 (NM_007114.1,1806-1824).
ggagttgcagcatttgaaa

SEQ ID NO: 42309 - DNA, 19 bp, Homo sapiens
  siRNA target sequence for TMF1 (NM_007114.1,1846-1864).
gaggttgagaaacaacata

SEQ ID NO: 42310 - DNA, 19 bp, Homo sapiens
  siRNA target sequence for TMF1 (NM_007114.1,1919-1937).
gccgtcttcaggtagacat

SEQ ID NO: 42311 - DNA, 19 bp, Homo sapiens
  siRNA target sequence for TMF1 (NM_007114.1,1929-1947).
ggtagacatggatgaactt

SEQ ID NO: 42312 - DNA, 19 bp, Homo sapiens
  siRNA target sequence for TMF1 (NM_007114.1,1976-1994).
ccctggatagtgcatacaa

SEQ ID NO: 42313 - DNA, 19 bp, Homo sapiens
  siRNA target sequence for TMF1 (NM_007114.1,1977-1995).
cctggatagtgcatacaaa

SEQ ID NO: 42314 - DNA, 19 bp, Homo sapiens
  siRNA target sequence for TMF1 (NM_007114.1,1980-1998).
ggatagtgcatacaaagaa

SEQ ID NO: 42315 - DNA, 19 bp, Homo sapiens
  siRNA target sequence for TMF1 (NM_007114.1,1988-2006).
catacaaagaacttactga

SEQ ID NO: 42316 - DNA, 19 bp, Homo sapiens
  siRNA target sequence for TMF1 (NM_007114.1,2017-2035).
gccaatgctgcaaaggata

SEQ ID NO: 42317 - DNA, 19 bp, Homo sapiens
  siRNA target sequence for TMF1 (NM_007114.1,2051-2069).
ctgctctgagccgtgaaat

SEQ ID NO: 42318 - DNA, 19 bp, Homo sapiens
  siRNA target sequence for TMF1 (NM_007114.1,2053-2071).
gctctgagccgtgaaatga

SEQ ID NO: 42319 - DNA, 19 bp, Homo sapiens
  siRNA target sequence for TMF1 (NM_007114.1,2054-2072).
ctctgagccgtgaaatgaa

SEQ ID NO: 42320 - DNA, 19 bp, Homo sapiens
  siRNA target sequence for TMF1 (NM_007114.1,2060-2078).
gccgtgaaatgaaagctaa

SEQ ID NO: 42321 - DNA, 19 bp, Homo sapiens
  siRNA target sequence for TMF1 (NM_007114.1,2197-2215).
gccagaaaggaggattatt

SEQ ID NO: 42322 - DNA, 19 bp, Homo sapiens
  siRNA target sequence for TMF1 (NM_007114.1,2220-2238).
ccatgagatcggtgaactt

SEQ ID NO: 42323 - DNA, 19 bp, Homo sapiens
  siRNA target sequence for TMF1 (NM_007114.1,2271-2289).
ccaggaactgagtcaaagt

SEQ ID NO: 42324 - DNA, 19 bp, Homo sapiens
  siRNA target sequence for TMF1 (NM_007114.1,2274-2292).
ggaactgagtcaaagtgtt

SEQ ID NO: 42325 - DNA, 19 bp, Homo sapiens
  siRNA target sequence for TMF1 (NM_007114.1,2275-2293).
gaactgagtcaaagtgttt

SEQ ID NO: 42326 - DNA, 19 bp, Homo sapiens
  siRNA target sequence for TMF1 (NM_007114.1,2278-2296).
ctgagtcaaagtgtttcat

SEQ ID NO: 42327 - DNA, 19 bp, Homo sapiens
  siRNA target sequence for TMF1 (NM_007114.1,2306-2324).
gaccattgcttcgacaaat

SEQ ID NO: 42328 - DNA, 19 bp, Homo sapiens
  siRNA target sequence for TMF1 (NM_007114.1,2309-2327).
cattgcttcgacaaataga

SEQ ID NO: 42329 - DNA, 19 bp, Homo sapiens
  siRNA target sequence for TMF1 (NM_007114.1,2313-2331).
gcttcgacaaatagaaaat

SEQ ID NO: 42330 - DNA, 19 bp, Homo sapiens
  siRNA target sequence for TMF1 (NM_007114.1,2314-2332).
cttcgacaaatagaaaatt

SEQ ID NO: 42331 - DNA, 19 bp, Homo sapiens
  siRNA target sequence for TMF1 (NM_007114.1,2357-2375).
catcgtcgtgggagaaatt

SEQ ID NO: 42332 - DNA, 19 bp, Homo sapiens
  siRNA target sequence for TMF1 (NM_007114.1,2360-2378).
cgtcgtgggagaaattaga

SEQ ID NO: 42333 - DNA, 19 bp, Homo sapiens
  siRNA target sequence for TMF1 (NM_007114.1,2464-2482).
cttgctaacaaaattcaga

SEQ ID NO: 42334 - DNA, 19 bp, Homo sapiens
  siRNA target sequence for TMF1 (NM_007114.1,2556-2574).
gaaaaataggctgtgtaaa

SEQ ID NO: 42335 - DNA, 19 bp, Homo sapiens
  siRNA target sequence for TMF1 (NM_007114.1,2578-2596).
gaggatgagaacaataggt

SEQ ID NO: 42336 - DNA, 19 bp, Homo sapiens
  siRNA target sequence for TMF1 (NM_007114.1,2594-2612).
ggtaccaggttgaattgga

SEQ ID NO: 42337 - DNA, 19 bp, Homo sapiens
  siRNA target sequence for TMF1 (NM_007114.1,2757-2775).
ggaacgcaagccattttct

SEQ ID NO: 42338 - DNA, 19 bp, Homo sapiens
  siRNA target sequence for TMF1 (NM_007114.1,2810-2828).
caataagtggtgttgatat

SEQ ID NO: 42339 - DNA, 19 bp, Homo sapiens
  siRNA target sequence for TMF1 (NM_007114.1,2830-2848).
gcaggactacagacatctt

SEQ ID NO: 42340 - DNA, 19 bp, Homo sapiens
  siRNA target sequence for TMF1 (NM_007114.1,2834-2852).
gactacagacatcttttct

SEQ ID NO: 42341 - DNA, 19 bp, Homo sapiens
  siRNA target sequence for TMF1 (NM_007114.1,2938-2956).
gggagcaggatcaagcata

SEQ ID NO: 42342 - DNA, 19 bp, Homo sapiens
  siRNA target sequence for TMF1 (NM_007114.1,2968-2986).
cagtctcagctaaagctaa

SEQ ID NO: 42343 - DNA, 19 bp, Homo sapiens
  siRNA target sequence for TMF1 (NM_007114.1,3012-3030).
gctagaaattggcaatcta

SEQ ID NO: 42344 - DNA, 19 bp, Homo sapiens
  siRNA target sequence for TMF1 (NM_007114.1,3031-3049).
gaaaaaactcgatcaataa

SEQ ID NO: 42345 - DNA, 19 bp, Homo sapiens
  siRNA target sequence for TMF1 (NM_007114.1,3108-3126).
ggagatacccaaacttaga

SEQ ID NO: 42346 - DNA, 19 bp, Homo sapiens
  siRNA target sequence for TMF1 (NM_007114.1,3128-3146).
ctcagctaagagatttgga

SEQ ID NO: 42347 - DNA, 19 bp, Homo sapiens
  siRNA target sequence for TMF1 (NM_007114.1,3133-3151).
ctaagagatttggatcaaa

SEQ ID NO: 42348 - DNA, 19 bp, Homo sapiens
  siRNA target sequence for TMF1 (NM_007114.1,3145-3163).
gatcaaaggtacaacacta

SEQ ID NO: 42349 - DNA, 19 bp, Homo sapiens
  siRNA target sequence for TMF1 (NM_007114.1,3195-3213).
ggcagaagaacttcgatta

SEQ ID NO: 42350 - DNA, 19 bp, Homo sapiens
  siRNA target sequence for TMF1 (NM_007114.1,3209-3227).
gattagatctcgaagatgt

SEQ ID NO: 42351 - DNA, 19 bp, Homo sapiens
  siRNA target sequence for TMX2 (NM_015959.1,54-72).
cggtcttggcacctctaat

SEQ ID NO: 42352 - DNA, 19 bp, Homo sapiens
  siRNA target sequence for TMX2 (NM_015959.1,55-73).
ggtcttggcacctctaatt

SEQ ID NO: 42353 - DNA, 19 bp, Homo sapiens
  siRNA target sequence for TMX2 (NM_015959.1,108-126).
ggctcgcccaaccttacta

SEQ ID NO: 42354 - DNA, 19 bp, Homo sapiens
  siRNA target sequence for TMX2 (NM_015959.1,214-232).
cggtaacccgtgtgacttt

SEQ ID NO: 42355 - DNA, 19 bp, Homo sapiens
  siRNA target sequence for TMX2 (NM_015959.1,380-398).
cgcatgggcctactttaca

SEQ ID NO: 42356 - DNA, 19 bp, Homo sapiens
  siRNA target sequence for TMX2 (NM_015959.1,381-399).
gcatgggcctactttacat

SEQ ID NO: 42357 - DNA, 19 bp, Homo sapiens
  siRNA target sequence for TMX2 (NM_015959.1,449-467).
ggccctgagtatatcaagt

SEQ ID NO: 42358 - DNA, 19 bp, Homo sapiens
  siRNA target sequence for TMX2 (NM_015959.1,450-468).
gccctgagtatatcaagta

SEQ ID NO: 42359 - DNA, 19 bp, Homo sapiens
  siRNA target sequence for TMX2 (NM_015959.1,452-470).
cctgagtatatcaagtact

SEQ ID NO: 42360 - DNA, 19 bp, Homo sapiens
  siRNA target sequence for TMX2 (NM_015959.1,453-471).
ctgagtatatcaagtactt

SEQ ID NO: 42361 - DNA, 19 bp, Homo sapiens
  siRNA target sequence for TMX2 (NM_015959.1,457-475).
gtatatcaagtacttcaat

SEQ ID NO: 42362 - DNA, 19 bp, Homo sapiens
  siRNA target sequence for TMX2 (NM_015959.1,472-490).
caatgataaaaccattgat

SEQ ID NO: 42363 - DNA, 19 bp, Homo sapiens
  siRNA target sequence for TMX2 (NM_015959.1,539-557).
gccaattggtctaatgact

SEQ ID NO: 42364 - DNA, 19 bp, Homo sapiens
  siRNA target sequence for TMX2 (NM_015959.1,581-599).
gctgacctctcccttaaat

SEQ ID NO: 42365 - DNA, 19 bp, Homo sapiens
  siRNA target sequence for TMX2 (NM_015959.1,601-619).
caactgtacagggctaaat

SEQ ID NO: 42366 - DNA, 19 bp, Homo sapiens
  siRNA target sequence for TMX2 (NM_015959.1,631-649).
ggatgttggacgctatact

SEQ ID NO: 42367 - DNA, 19 bp, Homo sapiens
  siRNA target sequence for TMX2 (NM_015959.1,638-656).
ggacgctatactgatgtta

SEQ ID NO: 42368 - DNA, 19 bp, Homo sapiens
  siRNA target sequence for TMX2 (NM_015959.1,796-814).
gaatgtgatccgagaattt

SEQ ID NO: 42369 - DNA, 19 bp, Homo sapiens
  siRNA target sequence for TMX2 (NM_015959.1,800-818).
gtgatccgagaatttaact

SEQ ID NO: 42370 - DNA, 19 bp, Homo sapiens
  siRNA target sequence for TMX2 (NM_015959.1,852-870).
caaaggctggagacaatat

SEQ ID NO: 42371 - DNA, 19 bp, Homo sapiens
  siRNA target sequence for TNFAIP3 (NM_006290.2,145-163).
gaagacatttttaaaccta

SEQ ID NO: 42372 - DNA, 19 bp, Homo sapiens
  siRNA target sequence for TNFAIP3 (NM_006290.2,150-168).
catttttaaacctactaat

SEQ ID NO: 42373 - DNA, 19 bp, Homo sapiens
  siRNA target sequence for TNFAIP3 (NM_006290.2,161-179).
ctactaatgggatcattca

SEQ ID NO: 42374 - DNA, 19 bp, Homo sapiens
  siRNA target sequence for TNFAIP3 (NM_006290.2,199-217).
cgatacacactggaaatgt

SEQ ID NO: 42375 - DNA, 19 bp, Homo sapiens
  siRNA target sequence for TNFAIP3 (NM_006290.2,200-218).
gatacacactggaaatgtt

SEQ ID NO: 42376 - DNA, 19 bp, Homo sapiens
  siRNA target sequence for TNFAIP3 (NM_006290.2,265-283).
gccctcatcgacagaaaca

SEQ ID NO: 42377 - DNA, 19 bp, Homo sapiens
  siRNA target sequence for TNFAIP3 (NM_006290.2,340-358).
cttgtggcgctgaaaacga

SEQ ID NO: 42378 - DNA, 19 bp, Homo sapiens
  siRNA target sequence for TNFAIP3 (NM_006290.2,385-403).
gccacttctcagtacatgt

SEQ ID NO: 42379 - DNA, 19 bp, Homo sapiens
  siRNA target sequence for TNFAIP3 (NM_006290.2,531-549).
ggggctttgctatgatact

SEQ ID NO: 42380 - DNA, 19 bp, Homo sapiens
  siRNA target sequence for TNFAIP3 (NM_006290.2,548-566).
ctcggaactggaatgatga

SEQ ID NO: 42381 - DNA, 19 bp, Homo sapiens
  siRNA target sequence for TNFAIP3 (NM_006290.2,569-587).
gggacaatcttatcaaaat

SEQ ID NO: 42382 - DNA, 19 bp, Homo sapiens
  siRNA target sequence for TNFAIP3 (NM_006290.2,611-629).
cccgaagtggacttcagta

SEQ ID NO: 42383 - DNA, 19 bp, Homo sapiens
  siRNA target sequence for TNFAIP3 (NM_006290.2,614-632).
gaagtggacttcagtacaa

SEQ ID NO: 42384 - DNA, 19 bp, Homo sapiens
  siRNA target sequence for TNFAIP3 (NM_006290.2,635-653).
cactggaagaaatacacat

SEQ ID NO: 42385 - DNA, 19 bp, Homo sapiens
  siRNA target sequence for TNFAIP3 (NM_006290.2,637-655).
ctggaagaaatacacatat

SEQ ID NO: 42386 - DNA, 19 bp, Homo sapiens
  siRNA target sequence for TNFAIP3 (NM_006290.2,677-695).
gaaggccaatcattgtcat

SEQ ID NO: 42387 - DNA, 19 bp, Homo sapiens
  siRNA target sequence for TNFAIP3 (NM_006290.2,817-835).
ggctatgacagccatcatt

SEQ ID NO: 42388 - DNA, 19 bp, Homo sapiens
  siRNA target sequence for TNFAIP3 (NM_006290.2,818-836).
gctatgacagccatcattt

SEQ ID NO: 42389 - DNA, 19 bp, Homo sapiens
  siRNA target sequence for TNFAIP3 (NM_006290.2,819-837).
ctatgacagccatcatttt

SEQ ID NO: 42390 - DNA, 19 bp, Homo sapiens
  siRNA target sequence for TNFAIP3 (NM_006290.2,969-987).
gctcttaaaagagtactta

SEQ ID NO: 42391 - DNA, 19 bp, Homo sapiens
  siRNA target sequence for TNFAIP3 (NM_006290.2,1017-1035).
ggaccatggcacaactcat

SEQ ID NO: 42392 - DNA, 19 bp, Homo sapiens
  siRNA target sequence for TNFAIP3 (NM_006290.2,1026-1044).
cacaactcatctcatcaat

SEQ ID NO: 42393 - DNA, 19 bp, Homo sapiens
  siRNA target sequence for TNFAIP3 (NM_006290.2,1049-1067).
caaagttggatgaagctaa

SEQ ID NO: 42394 - DNA, 19 bp, Homo sapiens
  siRNA target sequence for TNFAIP3 (NM_006290.2,1063-1081).
gctaacttaccaaaagaaa

SEQ ID NO: 42395 - DNA, 19 bp, Homo sapiens
  siRNA target sequence for TNFAIP3 (NM_006290.2,1111-1129).
gttcagcatgagtacaaga

SEQ ID NO: 42396 - DNA, 19 bp, Homo sapiens
  siRNA target sequence for TNFAIP3 (NM_006290.2,1114-1132).
cagcatgagtacaagaaat

SEQ ID NO: 42397 - DNA, 19 bp, Homo sapiens
  siRNA target sequence for TNFAIP3 (NM_006290.2,1258-1276).
gtgaacacccagcctttat

SEQ ID NO: 42398 - DNA, 19 bp, Homo sapiens
  siRNA target sequence for TNFAIP3 (NM_006290.2,1293-1311).
gaggcggcaaaagaatcaa

SEQ ID NO: 42399 - DNA, 19 bp, Homo sapiens
  siRNA target sequence for TNFAIP3 (NM_006290.2,1295-1313).
ggcggcaaaagaatcaaaa

SEQ ID NO: 42400 - DNA, 19 bp, Homo sapiens
  siRNA target sequence for TNFAIP3 (NM_006290.2,2080-2098).
ggatactgccagaagtgtt

SEQ ID NO: 42401 - DNA, 19 bp, Homo sapiens
  siRNA target sequence for TNFAIP3 (NM_006290.2,2088-2106).
ccagaagtgtttcattgaa

SEQ ID NO: 42402 - DNA, 19 bp, Homo sapiens
  siRNA target sequence for TNP1 (NM_003284.2,32-50).
gtcgaccagccgcaaatta

SEQ ID NO: 42403 - DNA, 19 bp, Homo sapiens
  siRNA target sequence for TNP1 (NM_003284.2,34-52).
cgaccagccgcaaattaaa

SEQ ID NO: 42404 - DNA, 19 bp, Homo sapiens
  siRNA target sequence for TNP2 (NM_005425.2,348-366).
cccgccattgccaaacctt

SEQ ID NO: 42405 - DNA, 19 bp, Homo sapiens
  siRNA target sequence for TNP2 (NM_005425.2,500-518).
ccaccaaagcgccacaaaa

SEQ ID NO: 42406 - DNA, 19 bp, Homo sapiens
  siRNA target sequence for TNP2 (NM_005425.2,501-519).
caccaaagcgccacaaaaa

SEQ ID NO: 42407 - DNA, 19 bp, Homo sapiens
  siRNA target sequence for TNP2 (NM_005425.2,503-521).
ccaaagcgccacaaaaaga

SEQ ID NO: 42408 - DNA, 19 bp, Homo sapiens
  siRNA target sequence for TNP2 (NM_005425.2,512-530).
cacaaaaagactatgaact

SEQ ID NO: 42409 - DNA, 19 bp, Homo sapiens
  siRNA target sequence for TNXB (NM_019105.4,368-386).
cctcttctcagctttacga

SEQ ID NO: 42410 - DNA, 19 bp, Homo sapiens
  siRNA target sequence for TNXB (NM_019105.4,564-582).
gtgcactgggggatgttgt

SEQ ID NO: 42411 - DNA, 19 bp, Homo sapiens
  siRNA target sequence for TNXB (NM_019105.4,767-785).
cagatgactgcaatgatca

SEQ ID NO: 42412 - DNA, 19 bp, Homo sapiens
  siRNA target sequence for TNXB (NM_019105.4,1353-1371).
cgaggacggcgaatgcatt

SEQ ID NO: 42413 - DNA, 19 bp, Homo sapiens
  siRNA target sequence for TNXB (NM_019105.4,1354-1372).
gaggacggcgaatgcattt

SEQ ID NO: 42414 - DNA, 19 bp, Homo sapiens
  siRNA target sequence for TNXB (NM_019105.4,1417-1435).
cctggcgactgcaaccaaa

SEQ ID NO: 42415 - DNA, 19 bp, Homo sapiens
  siRNA target sequence for TNXB (NM_019105.4,2752-2770).
ctgatgccaggcgtagaat

SEQ ID NO: 42416 - DNA, 19 bp, Homo sapiens
  siRNA target sequence for TNXB (NM_019105.4,3016-3034).
cgccacatccatgaatact

SEQ ID NO: 42417 - DNA, 19 bp, Homo sapiens
  siRNA target sequence for TNXB (NM_019105.4,3833-3851).
gccgcaagtacaaatttgt

SEQ ID NO: 42418 - DNA, 19 bp, Homo sapiens
  siRNA target sequence for TNXB (NM_019105.4,4088-4106).
ccgagcgttcatttgttgt

SEQ ID NO: 42419 - DNA, 19 bp, Homo sapiens
  siRNA target sequence for TNXB (NM_019105.4,4125-4143).
ccacaagtacagattcact

SEQ ID NO: 42420 - DNA, 19 bp, Homo sapiens
  siRNA target sequence for TNXB (NM_019105.4,4131-4149).
gtacagattcactctgttt

SEQ ID NO: 42421 - DNA, 19 bp, Homo sapiens
  siRNA target sequence for TNXB (NM_019105.4,4422-4440).
ggatcccgaccggaagtat

SEQ ID NO: 42422 - DNA, 19 bp, Homo sapiens
  siRNA target sequence for TNXB (NM_019105.4,4423-4441).
gatcccgaccggaagtata

SEQ ID NO: 42423 - DNA, 19 bp, Homo sapiens
  siRNA target sequence for TNXB (NM_019105.4,4426-4444).
cccgaccggaagtataaga

SEQ ID NO: 42424 - DNA, 19 bp, Homo sapiens
  siRNA target sequence for TNXB (NM_019105.4,4427-4445).
ccgaccggaagtataagat

SEQ ID NO: 42425 - DNA, 19 bp, Homo sapiens
  siRNA target sequence for TNXB (NM_019105.4,4429-4447).
gaccggaagtataagatga

SEQ ID NO: 42426 - DNA, 19 bp, Homo sapiens
  siRNA target sequence for TNXB (NM_019105.4,5039-5057).
gagaggtcacagtctacaa

SEQ ID NO: 42427 - DNA, 19 bp, Homo sapiens
  siRNA target sequence for TNXB (NM_019105.4,5088-5106).
catgtatggactacatgat

SEQ ID NO: 42428 - DNA, 19 bp, Homo sapiens
  siRNA target sequence for TNXB (NM_019105.4,5197-5215).
ctgacagtgacggatataa

SEQ ID NO: 42429 - DNA, 19 bp, Homo sapiens
  siRNA target sequence for TNXB (NM_019105.4,5356-5374).
gaaccctcccgcaagtaca

SEQ ID NO: 42430 - DNA, 19 bp, Homo sapiens
  siRNA target sequence for TNXB (NM_019105.4,5734-5752).
cggagtgctatggatgata

SEQ ID NO: 42431 - DNA, 19 bp, Homo sapiens
  siRNA target sequence for TNXB (NM_019105.4,5736-5754).
gagtgctatggatgatact

SEQ ID NO: 42432 - DNA, 19 bp, Homo sapiens
  siRNA target sequence for TNXB (NM_019105.4,6018-6036).
ctcggccgtcgccattact

SEQ ID NO: 42433 - DNA, 19 bp, Homo sapiens
  siRNA target sequence for TNXB (NM_019105.4,6203-6221).
gagacgggcaactccaaat

SEQ ID NO: 42434 - DNA, 19 bp, Homo sapiens
  siRNA target sequence for TNXB (NM_019105.4,6291-6309).
gaccctgtatggtttcagt

SEQ ID NO: 42435 - DNA, 19 bp, Homo sapiens
  siRNA target sequence for TNXB (NM_019105.4,6983-7001).
ctgatgctcctcttgcaaa

SEQ ID NO: 42436 - DNA, 19 bp, Homo sapiens
  siRNA target sequence for TNXB (NM_019105.4,7092-7110).
cttggtccagtttaagaat

SEQ ID NO: 42437 - DNA, 19 bp, Homo sapiens
  siRNA target sequence for TNXB (NM_019105.4,7238-7256).
ccgtgtctgctgttggttt

SEQ ID NO: 42438 - DNA, 19 bp, Homo sapiens
  siRNA target sequence for TNXB (NM_019105.4,7239-7257).
cgtgtctgctgttggttta

SEQ ID NO: 42439 - DNA, 19 bp, Homo sapiens
  siRNA target sequence for TNXB (NM_019105.4,11616-11634).
ccgtgacctccaattcagt

SEQ ID NO: 42440 - DNA, 19 bp, Homo sapiens
  siRNA target sequence for TNXB (NM_019105.4,11686-11704).
gcggacagcttcaaagtct

SEQ ID NO: 42441 - DNA, 19 bp, Homo sapiens
  siRNA target sequence for TNXB (NM_019105.4,12600-12618).
ggactatgcccatggtttt

SEQ ID NO: 42442 - DNA, 19 bp, Homo sapiens
  siRNA target sequence for TNXB (NM_019105.4,13012-13030).
gtgcccttcacggaaatga

SEQ ID NO: 42443 - DNA, 19 bp, Homo sapiens
  siRNA target sequence for TOP1 (NM_003286.2,287-305).
cggatttccgattgaatga

SEQ ID NO: 42444 - DNA, 19 bp, Homo sapiens
  siRNA target sequence for TOP1 (NM_003286.2,288-306).
ggatttccgattgaatgat

SEQ ID NO: 42445 - DNA, 19 bp, Homo sapiens
  siRNA target sequence for TOP1 (NM_003286.2,294-312).
ccgattgaatgattctcat

SEQ ID NO: 42446 - DNA, 19 bp, Homo sapiens
  siRNA target sequence for TOP1 (NM_003286.2,295-313).
cgattgaatgattctcata

SEQ ID NO: 42447 - DNA, 19 bp, Homo sapiens
  siRNA target sequence for TOP1 (NM_003286.2,367-385).
gagaaggaccgggaaaagt

SEQ ID NO: 42448 - DNA, 19 bp, Homo sapiens
  siRNA target sequence for TOP1 (NM_003286.2,376-394).
cgggaaaagtccaagcata

SEQ ID NO: 42449 - DNA, 19 bp, Homo sapiens
  siRNA target sequence for TOP1 (NM_003286.2,390-408).
gcatagcaacagtgaacat

SEQ ID NO: 42450 - DNA, 19 bp, Homo sapiens
  siRNA target sequence for TOP1 (NM_003286.2,576-594).
ctctagtccaccacaaatt

SEQ ID NO: 42451 - DNA, 19 bp, Homo sapiens
  siRNA target sequence for TOP1 (NM_003286.2,578-596).
ctagtccaccacaaattaa

SEQ ID NO: 42452 - DNA, 19 bp, Homo sapiens
  siRNA target sequence for TOP1 (NM_003286.2,581-599).
gtccaccacaaattaaaga

SEQ ID NO: 42453 - DNA, 19 bp, Homo sapiens
  siRNA target sequence for TOP1 (NM_003286.2,672-690).
ggatgatgctgattataaa

SEQ ID NO: 42454 - DNA, 19 bp, Homo sapiens
  siRNA target sequence for TOP1 (NM_003286.2,676-694).
gatgctgattataaaccta

SEQ ID NO: 42455 - DNA, 19 bp, Homo sapiens
  siRNA target sequence for TOP1 (NM_003286.2,799-817).
gttcctgagccagataaca

SEQ ID NO: 42456 - DNA, 19 bp, Homo sapiens
  siRNA target sequence for TOP1 (NM_003286.2,950-968).
cagagaatgtcaagtttta

SEQ ID NO: 42457 - DNA, 19 bp, Homo sapiens
  siRNA target sequence for TOP1 (NM_003286.2,1008-1026).
ggaagtagctacgttcttt

SEQ ID NO: 42458 - DNA, 19 bp, Homo sapiens
  siRNA target sequence for TOP1 (NM_003286.2,1015-1033).
gctacgttctttgcaaaaa

SEQ ID NO: 42459 - DNA, 19 bp, Homo sapiens
  siRNA target sequence for TOP1 (NM_003286.2,1016-1034).
ctacgttctttgcaaaaat

SEQ ID NO: 42460 - DNA, 19 bp, Homo sapiens
  siRNA target sequence for TOP1 (NM_003286.2,1019-1037).
cgttctttgcaaaaatgct

SEQ ID NO: 42461 - DNA, 19 bp, Homo sapiens
  siRNA target sequence for TOP1 (NM_003286.2,1035-1053).
gctcgaccatgaatatact

SEQ ID NO: 42462 - DNA, 19 bp, Homo sapiens
  siRNA target sequence for TOP1 (NM_003286.2,1036-1054).
ctcgaccatgaatatacta

SEQ ID NO: 42463 - DNA, 19 bp, Homo sapiens
  siRNA target sequence for TOP1 (NM_003286.2,1184-1202).
cggaagctcggaaacagat

SEQ ID NO: 42464 - DNA, 19 bp, Homo sapiens
  siRNA target sequence for TOP1 (NM_003286.2,1255-1273).
gaatatggattctgtatta

SEQ ID NO: 42465 - DNA, 19 bp, Homo sapiens
  siRNA target sequence for TOP1 (NM_003286.2,1288-1306).
gagaggattgctaacttca

SEQ ID NO: 42466 - DNA, 19 bp, Homo sapiens
  siRNA target sequence for TOP1 (NM_003286.2,1293-1311).
gattgctaacttcaagata

SEQ ID NO: 42467 - DNA, 19 bp, Homo sapiens
  siRNA target sequence for TOP1 (NM_003286.2,1373-1391).
gaatcatgcccgaggatat

SEQ ID NO: 42468 - DNA, 19 bp, Homo sapiens
  siRNA target sequence for TOP1 (NM_003286.2,1381-1399).
cccgaggatataatcatca

SEQ ID NO: 42469 - DNA, 19 bp, Homo sapiens
  siRNA target sequence for TOP1 (NM_003286.2,1382-1400).
ccgaggatataatcatcaa

SEQ ID NO: 42470 - DNA, 19 bp, Homo sapiens
  siRNA target sequence for TOP1 (NM_003286.2,1384-1402).
gaggatataatcatcaact

SEQ ID NO: 42471 - DNA, 19 bp, Homo sapiens
  siRNA target sequence for TOP1 (NM_003286.2,1387-1405).
gatataatcatcaactgta

SEQ ID NO: 42472 - DNA, 19 bp, Homo sapiens
  siRNA target sequence for TOP1 (NM_003286.2,1395-1413).
catcaactgtagcaaagat

SEQ ID NO: 42473 - DNA, 19 bp, Homo sapiens
  siRNA target sequence for TOP1 (NM_003286.2,1507-1525).
caaggttccattaaataca

SEQ ID NO: 42474 - DNA, 19 bp, Homo sapiens
  siRNA target sequence for TOP1 (NM_003286.2,1527-1545).
catgcttaaccctagttca

SEQ ID NO: 42475 - DNA, 19 bp, Homo sapiens
  siRNA target sequence for TOP1 (NM_003286.2,1769-1787).
gtgtggagcacatcaatct

SEQ ID NO: 42476 - DNA, 19 bp, Homo sapiens
  siRNA target sequence for TOP1 (NM_003286.2,1842-1860).
ggactccatcagatactat

SEQ ID NO: 42477 - DNA, 19 bp, Homo sapiens
  siRNA target sequence for TOP1 (NM_003286.2,1871-1889).
ctgttgagaaacgagtttt

SEQ ID NO: 42478 - DNA, 19 bp, Homo sapiens
  siRNA target sequence for TOP1MT (NM_052963.1,231-249).
ccgacggagtgcgtttctt

SEQ ID NO: 42479 - DNA, 19 bp, Homo sapiens
  siRNA target sequence for TOP1MT (NM_052963.1,233-251).
gacggagtgcgtttcttct

SEQ ID NO: 42480 - DNA, 19 bp, Homo sapiens
  siRNA target sequence for TOP1MT (NM_052963.1,235-253).
cggagtgcgtttcttctat

SEQ ID NO: 42481 - DNA, 19 bp, Homo sapiens
  siRNA target sequence for TOP1MT (NM_052963.1,237-255).
gagtgcgtttcttctatga

SEQ ID NO: 42482 - DNA, 19 bp, Homo sapiens
  siRNA target sequence for TOP1MT (NM_052963.1,257-275).
ggaaggcctgtgagattga

SEQ ID NO: 42483 - DNA, 19 bp, Homo sapiens
  siRNA target sequence for TOP1MT (NM_052963.1,286-304).
ggaggaggtcgccactttt

SEQ ID NO: 42484 - DNA, 19 bp, Homo sapiens
  siRNA target sequence for TOP1MT (NM_052963.1,287-305).
gaggaggtcgccacttttt

SEQ ID NO: 42485 - DNA, 19 bp, Homo sapiens
  siRNA target sequence for TOP1MT (NM_052963.1,289-307).
ggaggtcgccactttttat

SEQ ID NO: 42486 - DNA, 19 bp, Homo sapiens
  siRNA target sequence for TOP1MT (NM_052963.1,320-338).
gatcatgaatacacaacaa

SEQ ID NO: 42487 - DNA, 19 bp, Homo sapiens
  siRNA target sequence for TOP1MT (NM_052963.1,344-362).
gttttccggaagaacttct

SEQ ID NO: 42488 - DNA, 19 bp, Homo sapiens
  siRNA target sequence for TOP1MT (NM_052963.1,349-367).
ccggaagaacttcttcaat

SEQ ID NO: 42489 - DNA, 19 bp, Homo sapiens
  siRNA target sequence for TOP1MT (NM_052963.1,435-453).
cggagatccacagatactt

SEQ ID NO: 42490 - DNA, 19 bp, Homo sapiens
  siRNA target sequence for TOP1MT (NM_052963.1,436-454).
ggagatccacagatacttt

SEQ ID NO: 42491 - DNA, 19 bp, Homo sapiens
  siRNA target sequence for TOP1MT (NM_052963.1,538-556).
gttcggctactgtatttta

SEQ ID NO: 42492 - DNA, 19 bp, Homo sapiens
  siRNA target sequence for TOP1MT (NM_052963.1,541-559).
cggctactgtattttagat

SEQ ID NO: 42493 - DNA, 19 bp, Homo sapiens
  siRNA target sequence for TOP1MT (NM_052963.1,660-678).
cgccagaggatgtggttat

SEQ ID NO: 42494 - DNA, 19 bp, Homo sapiens
  siRNA target sequence for TOP1MT (NM_052963.1,662-680).
ccagaggatgtggttatca

SEQ ID NO: 42495 - DNA, 19 bp, Homo sapiens
  siRNA target sequence for TOP1MT (NM_052963.1,734-752).
gaggtgcgctccgataaca

SEQ ID NO: 42496 - DNA, 19 bp, Homo sapiens
  siRNA target sequence for TOP1MT (NM_052963.1,774-792).
ggaccgagagcgttcagaa

SEQ ID NO: 42497 - DNA, 19 bp, Homo sapiens
  siRNA target sequence for TOP1MT (NM_052963.1,845-863).
gcttggcagaagtttgaaa

SEQ ID NO: 42498 - DNA, 19 bp, Homo sapiens
  siRNA target sequence for TOP1MT (NM_052963.1,1089-1107).
gccaacacgtggtggaatt

SEQ ID NO: 42499 - DNA, 19 bp, Homo sapiens
  siRNA target sequence for TOP1MT (NM_052963.1,1094-1112).
cacgtggtggaatttgact

SEQ ID NO: 42500 - DNA, 19 bp, Homo sapiens
  siRNA target sequence for TOP1MT (NM_052963.1,1124-1142).
gactgcatccgctactaca

SEQ ID NO: 42501 - DNA, 19 bp, Homo sapiens
  siRNA target sequence for TOP1MT (NM_052963.1,1162-1180).
gccggtgtacaagaactta

SEQ ID NO: 42502 - DNA, 19 bp, Homo sapiens
  siRNA target sequence for TOP1MT (NM_052963.1,1164-1182).
cggtgtacaagaacttaca

SEQ ID NO: 42503 - DNA, 19 bp, Homo sapiens
  siRNA target sequence for TOP1MT (NM_052963.1,1359-1377).
gcatagcagctaagatctt

SEQ ID NO: 42504 - DNA, 19 bp, Homo sapiens
  siRNA target sequence for TOP1MT (NM_052963.1,1364-1382).
gcagctaagatcttatcct

SEQ ID NO: 42505 - DNA, 19 bp, Homo sapiens
  siRNA target sequence for TOP1MT (NM_052963.1,1365-1383).
cagctaagatcttatccta

SEQ ID NO: 42506 - DNA, 19 bp, Homo sapiens
  siRNA target sequence for TOP1MT (NM_052963.1,1473-1491).
cgaagatccaggcaaagaa

SEQ ID NO: 42507 - DNA, 19 bp, Homo sapiens
  siRNA target sequence for TOP1MT (NM_052963.1,1677-1695).
gcacgtccaagctcaacta

SEQ ID NO: 42508 - DNA, 19 bp, Homo sapiens
  siRNA target sequence for TOP1MT (NM_052963.1,1798-1816).
catggcaggagaagacttt

SEQ ID NO: 42509 - DNA, 19 bp, Homo sapiens
  siRNA target sequence for TOP2A (NM_001067.2,137-155).
caccattgcagcctgtaaa

SEQ ID NO: 42510 - DNA, 19 bp, Homo sapiens
  siRNA target sequence for TOP2A (NM_001067.2,140-158).
cattgcagcctgtaaatga

SEQ ID NO: 42511 - DNA, 19 bp, Homo sapiens
  siRNA target sequence for TOP2A (NM_001067.2,212-230).
ctgttgaaagaatctatca

SEQ ID NO: 42512 - DNA, 19 bp, Homo sapiens
  siRNA target sequence for TOP2A (NM_001067.2,261-279).
ccgcccagacacctacatt

SEQ ID NO: 42513 - DNA, 19 bp, Homo sapiens
  siRNA target sequence for TOP2A (NM_001067.2,265-283).
ccagacacctacattggtt

SEQ ID NO: 42514 - DNA, 19 bp, Homo sapiens
  siRNA target sequence for TOP2A (NM_001067.2,322-340).
gaagatgttggcattaact

SEQ ID NO: 42515 - DNA, 19 bp, Homo sapiens
  siRNA target sequence for TOP2A (NM_001067.2,339-357).
ctatagggaagtcactttt

SEQ ID NO: 42516 - DNA, 19 bp, Homo sapiens
  siRNA target sequence for TOP2A (NM_001067.2,400-418).
gctgcggacaacaaacaaa

SEQ ID NO: 42517 - DNA, 19 bp, Homo sapiens
  siRNA target sequence for TOP2A (NM_001067.2,415-433).
caaagggacccaaaaatgt

SEQ ID NO: 42518 - DNA, 19 bp, Homo sapiens
  siRNA target sequence for TOP2A (NM_001067.2,503-521).
ctgttgttgaacacaaagt

SEQ ID NO: 42519 - DNA, 19 bp, Homo sapiens
  siRNA target sequence for TOP2A (NM_001067.2,531-549).
gtatgtcccagctctcata

SEQ ID NO: 42520 - DNA, 19 bp, Homo sapiens
  siRNA target sequence for TOP2A (NM_001067.2,553-571).
ggacagctcctaacttcta

SEQ ID NO: 42521 - DNA, 19 bp, Homo sapiens
  siRNA target sequence for TOP2A (NM_001067.2,556-574).
cagctcctaacttctagta

SEQ ID NO: 42522 - DNA, 19 bp, Homo sapiens
  siRNA target sequence for TOP2A (NM_001067.2,561-579).
cctaacttctagtaactat

SEQ ID NO: 42523 - DNA, 19 bp, Homo sapiens
  siRNA target sequence for TOP2A (NM_001067.2,616-634).
ggctatggagccaaattgt

SEQ ID NO: 42524 - DNA, 19 bp, Homo sapiens
  siRNA target sequence for TOP2A (NM_001067.2,618-636).
ctatggagccaaattgtgt

SEQ ID NO: 42525 - DNA, 19 bp, Homo sapiens
  siRNA target sequence for TOP2A (NM_001067.2,639-657).
catattcagtaccaaattt

SEQ ID NO: 42526 - DNA, 19 bp, Homo sapiens
  siRNA target sequence for TOP2A (NM_001067.2,728-746).
ctggtgagatggaactcaa

SEQ ID NO: 42527 - DNA, 19 bp, Homo sapiens
  siRNA target sequence for TOP2A (NM_001067.2,757-775).
ggagaagattatacatgta

SEQ ID NO: 42528 - DNA, 19 bp, Homo sapiens
  siRNA target sequence for TOP2A (NM_001067.2,760-778).
gaagattatacatgtatca

SEQ ID NO: 42529 - DNA, 19 bp, Homo sapiens
  siRNA target sequence for TOP2A (NM_001067.2,786-804).
gcctgatttgtctaagttt

SEQ ID NO: 42530 - DNA, 19 bp, Homo sapiens
  siRNA target sequence for TOP2A (NM_001067.2,810-828).
gcaaagcctggacaaagat

SEQ ID NO: 42531 - DNA, 19 bp, Homo sapiens
  siRNA target sequence for TOP2A (NM_001067.2,811-829).
caaagcctggacaaagata

SEQ ID NO: 42532 - DNA, 19 bp, Homo sapiens
  siRNA target sequence for TOP2A (NM_001067.2,843-861).
ggtcagaagagcatatgat

SEQ ID NO: 42533 - DNA, 19 bp, Homo sapiens
  siRNA target sequence for TOP2A (NM_001067.2,866-884).
ctggatccaccaaagatgt

SEQ ID NO: 42534 - DNA, 19 bp, Homo sapiens
  siRNA target sequence for TOP2A (NM_001067.2,912-930).
gccagtaaaaggatttcgt

SEQ ID NO: 42535 - DNA, 19 bp, Homo sapiens
  siRNA target sequence for TOP2A (NM_001067.2,913-931).
ccagtaaaaggatttcgta

SEQ ID NO: 42536 - DNA, 19 bp, Homo sapiens
  siRNA target sequence for TOP2A (NM_001067.2,988-1006).
gtaatacatgaacaagtaa

SEQ ID NO: 42537 - DNA, 19 bp, Homo sapiens
  siRNA target sequence for TOP2A (NM_001067.2,1011-1029).
caggtgggaagtgtgttta

SEQ ID NO: 42538 - DNA, 19 bp, Homo sapiens
  siRNA target sequence for TOP2A (NM_001067.2,1045-1063).
ggctttcagcaaattagct

SEQ ID NO: 42539 - DNA, 19 bp, Homo sapiens
  siRNA target sequence for TOP2A (NM_001067.2,1046-1064).
gctttcagcaaattagctt

SEQ ID NO: 42540 - DNA, 19 bp, Homo sapiens
  siRNA target sequence for TOP2A (NM_001067.2,1089-1107).
gggtggcagacatgttgat

SEQ ID NO: 42541 - DNA, 19 bp, Homo sapiens
  siRNA target sequence for TOP2A (NM_001067.2,1094-1112).
gcagacatgttgattatgt

SEQ ID NO: 42542 - DNA, 19 bp, Homo sapiens
  siRNA target sequence for TOP2A (NM_001067.2,1111-1129).
gtagctgatcagattgtga

SEQ ID NO: 42543 - DNA, 19 bp, Homo sapiens
  siRNA target sequence for TOP2A (NM_001067.2,1115-1133).
ctgatcagattgtgactaa

SEQ ID NO: 42544 - DNA, 19 bp, Homo sapiens
  siRNA target sequence for TOP2A (NM_001067.2,1164-1182).
gggtggtgttgcagtaaaa

SEQ ID NO: 42545 - DNA, 19 bp, Homo sapiens
  siRNA target sequence for TOP2A (NM_001067.2,1201-1219).
cacatgtggatttttgtaa

SEQ ID NO: 42546 - DNA, 19 bp, Homo sapiens
  siRNA target sequence for TOP2A (NM_001067.2,1281-1299).
caagagctttggatcaaca

SEQ ID NO: 42547 - DNA, 19 bp, Homo sapiens
  siRNA target sequence for TOP2A (NM_001067.2,1291-1309).
ggatcaacatgccaattga

SEQ ID NO: 42548 - DNA, 19 bp, Homo sapiens
  siRNA target sequence for TOP2A (NM_001067.2,1301-1319).
gccaattgagtgaaaaatt

SEQ ID NO: 42549 - DNA, 19 bp, Homo sapiens
  siRNA target sequence for TOP2A (NM_001067.2,1387-1405).
gtccagttaaacaagaagt

SEQ ID NO: 42550 - DNA, 19 bp, Homo sapiens
  siRNA target sequence for TOP2A (NM_001067.2,1404-1422).
gtgttcagctgtaaaacat

SEQ ID NO: 42551 - DNA, 19 bp, Homo sapiens
  siRNA target sequence for TOP2A (NM_001067.2,1484-1502).
ctgagtgtacgcttatcct

SEQ ID NO: 42552 - DNA, 19 bp, Homo sapiens
  siRNA target sequence for TOP2A (NM_001067.2,1580-1598).
ctcttagaggaaaaatact

SEQ ID NO: 42553 - DNA, 19 bp, Homo sapiens
  siRNA target sequence for TOP2A (NM_001067.2,1639-1657).
gctgagattaacaatatca

SEQ ID NO: 42554 - DNA, 19 bp, Homo sapiens
  siRNA target sequence for TOP2A (NM_001067.2,1642-1660).
gagattaacaatatcatca

SEQ ID NO: 42555 - DNA, 19 bp, Homo sapiens
  siRNA target sequence for TOP2A (NM_001067.2,1666-1684).
gtgggtcttcagtacaaga

SEQ ID NO: 42556 - DNA, 19 bp, Homo sapiens
  siRNA target sequence for TOP2A (NM_001067.2,1668-1686).
gggtcttcagtacaagaaa

SEQ ID NO: 42557 - DNA, 19 bp, Homo sapiens
  siRNA target sequence for TOP2A (NM_001067.2,1717-1735).
cttcgttatgggaagataa

SEQ ID NO: 42558 - DNA, 19 bp, Homo sapiens
  siRNA target sequence for TOP2A (NM_001067.2,1720-1738).
cgttatgggaagataatga

SEQ ID NO: 42559 - DNA, 19 bp, Homo sapiens
  siRNA target sequence for TOP2A (NM_001067.2,1721-1739).
gttatgggaagataatgat

SEQ ID NO: 42560 - DNA, 19 bp, Homo sapiens
  siRNA target sequence for TOP2A (NM_001067.2,1814-1832).
ctcttctgcgacatcgttt

SEQ ID NO: 42561 - DNA, 19 bp, Homo sapiens
  siRNA target sequence for TOP2A (NM_001067.2,1852-1870).
cccattgtaaaggtatcta

SEQ ID NO: 42562 - DNA, 19 bp, Homo sapiens
  siRNA target sequence for TOP2A (NM_001067.2,1923-1941).
gagttctactccaaatcat

SEQ ID NO: 42563 - DNA, 19 bp, Homo sapiens
  siRNA target sequence for TOP2A (NM_001067.2,1982-2000).
gcacatcaaaggaagctaa

SEQ ID NO: 42564 - DNA, 19 bp, Homo sapiens
  siRNA target sequence for TOP2A (NM_001067.2,2024-2042).
gacatcgtatccagttcaa

SEQ ID NO: 42565 - DNA, 19 bp, Homo sapiens
  siRNA target sequence for TOP2A (NM_001067.2,2026-2044).
catcgtatccagttcaaat

SEQ ID NO: 42566 - DNA, 19 bp, Homo sapiens
  siRNA target sequence for TOP2A (NM_001067.2,2029-2047).
cgtatccagttcaaatatt

SEQ ID NO: 42567 - DNA, 19 bp, Homo sapiens
  siRNA target sequence for TOP2A (NM_001067.2,2104-2122).
gatcgaaaggaatggttaa

SEQ ID NO: 42568 - DNA, 19 bp, Homo sapiens
  siRNA target sequence for TOP2A (NM_001067.2,2141-2159).
gaagacaacgaaagttact

SEQ ID NO: 42569 - DNA, 19 bp, Homo sapiens
  siRNA target sequence for TOP2A (NM_001067.2,2186-2204).
gacaaactaccacatatct

SEQ ID NO: 42570 - DNA, 19 bp, Homo sapiens
  siRNA target sequence for TOP2A (NM_001067.2,2188-2206).
caaactaccacatatctga

SEQ ID NO: 42571 - DNA, 19 bp, Homo sapiens
  siRNA target sequence for TOP2A (NM_001067.2,2238-2256).
cttgttctcaaattctgat

SEQ ID NO: 42572 - DNA, 19 bp, Homo sapiens
  siRNA target sequence for TOP2A (NM_001067.2,2252-2270).
ctgataacgagagatctat

SEQ ID NO: 42573 - DNA, 19 bp, Homo sapiens
  siRNA target sequence for TOP2A (NM_001067.2,2276-2294).
ctatggtggatggtttgaa

SEQ ID NO: 42574 - DNA, 19 bp, Homo sapiens
  siRNA target sequence for TOP2A (NM_001067.2,2377-2395).
gtggctgaaatgtcttctt

SEQ ID NO: 42575 - DNA, 19 bp, Homo sapiens
  siRNA target sequence for TOP2A (NM_001067.2,2401-2419).
catggtgagatgtcactaa

SEQ ID NO: 42576 - DNA, 19 bp, Homo sapiens
  siRNA target sequence for TOP2A (NM_001067.2,2404-2422).
ggtgagatgtcactaatga

SEQ ID NO: 42577 - DNA, 19 bp, Homo sapiens
  siRNA target sequence for TOP2A (NM_001067.2,2416-2434).
ctaatgatgaccattatca

SEQ ID NO: 42578 - DNA, 19 bp, Homo sapiens
  siRNA target sequence for TOP2A (NM_001067.2,2456-2474).
gtagcaataatctaaacct

SEQ ID NO: 42579 - DNA, 19 bp, Homo sapiens
  siRNA target sequence for TOP2A (NM_001067.2,2506-2524).
ctacatggtggcaaggatt

SEQ ID NO: 42580 - DNA, 19 bp, Homo sapiens
  siRNA target sequence for TOP2A (NM_001067.2,2525-2543).
ctgctagtccacgatacat

SEQ ID NO: 42581 - DNA, 19 bp, Homo sapiens
  siRNA target sequence for TOP2A (NM_001067.2,2527-2545).
gctagtccacgatacatct

SEQ ID NO: 42582 - DNA, 19 bp, Homo sapiens
  siRNA target sequence for TOP2A (NM_001067.2,2528-2546).
ctagtccacgatacatctt

SEQ ID NO: 42583 - DNA, 19 bp, Homo sapiens
  siRNA target sequence for TOP2A (NM_001067.2,2533-2551).
ccacgatacatctttacaa

SEQ ID NO: 42584 - DNA, 19 bp, Homo sapiens
  siRNA target sequence for TOP2A (NM_001067.2,2534-2552).
cacgatacatctttacaat

SEQ ID NO: 42585 - DNA, 19 bp, Homo sapiens
  siRNA target sequence for TOP2A (NM_001067.2,2558-2576).
gctctttggctcgattgtt

SEQ ID NO: 42586 - DNA, 19 bp, Homo sapiens
  siRNA target sequence for TOP2A (NM_001067.2,2559-2577).
ctctttggctcgattgtta

SEQ ID NO: 42587 - DNA, 19 bp, Homo sapiens
  siRNA target sequence for TOP2A (NM_001067.2,2561-2579).
ctttggctcgattgttatt

SEQ ID NO: 42588 - DNA, 19 bp, Homo sapiens
  siRNA target sequence for TOP2A (NM_001067.2,2565-2583).
ggctcgattgttatttcca

SEQ ID NO: 42589 - DNA, 19 bp, Homo sapiens
  siRNA target sequence for TOP2A (NM_001067.2,2590-2608).
gatgatcacacgttgaagt

SEQ ID NO: 42590 - DNA, 19 bp, Homo sapiens
  siRNA target sequence for TOP2A (NM_001067.2,2593-2611).
gatcacacgttgaagtttt

SEQ ID NO: 42591 - DNA, 19 bp, Homo sapiens
  siRNA target sequence for TOP2A (NM_001067.2,2600-2618).
cgttgaagtttttatatga

SEQ ID NO: 42592 - DNA, 19 bp, Homo sapiens
  siRNA target sequence for TOP2A (NM_001067.2,2712-2730).
caaaatccccaactttgat

SEQ ID NO: 42593 - DNA, 19 bp, Homo sapiens
  siRNA target sequence for TOP2A (NM_001067.2,2724-2742).
ctttgatgtgcgtgaaatt

SEQ ID NO: 42594 - DNA, 19 bp, Homo sapiens
  siRNA target sequence for TOP2A (NM_001067.2,2734-2752).
cgtgaaattgtaaataaca

SEQ ID NO: 42595 - DNA, 19 bp, Homo sapiens
  siRNA target sequence for TOP2A (NM_001067.2,2785-2803).
ccaatgcttccaagttaca

SEQ ID NO: 42596 - DNA, 19 bp, Homo sapiens
  siRNA target sequence for TOP2A (NM_001067.2,2805-2823).
gaacttcaagggtactatt

SEQ ID NO: 42597 - DNA, 19 bp, Homo sapiens
  siRNA target sequence for TOP2A (NM_001067.2,2808-2826).
cttcaagggtactattgaa

SEQ ID NO: 42598 - DNA, 19 bp, Homo sapiens
  siRNA target sequence for TOP2A (NM_001067.2,2811-2829).
caagggtactattgaagaa

SEQ ID NO: 42599 - DNA, 19 bp, Homo sapiens
  siRNA target sequence for TOP2A (NM_001067.2,2833-2851).
gctccaaatcaatatgtga

SEQ ID NO: 42600 - DNA, 19 bp, Homo sapiens
  siRNA target sequence for TOP2A (NM_001067.2,2834-2852).
ctccaaatcaatatgtgat

SEQ ID NO: 42601 - DNA, 19 bp, Homo sapiens
  siRNA target sequence for TOP2A (NM_001067.2,2836-2854).
ccaaatcaatatgtgatta

SEQ ID NO: 42602 - DNA, 19 bp, Homo sapiens
  siRNA target sequence for TOP2A (NM_001067.2,2855-2873).
gtggtgaagtagctattct

SEQ ID NO: 42603 - DNA, 19 bp, Homo sapiens
  siRNA target sequence for TOP2A (NM_001067.2,2857-2875).
ggtgaagtagctattctta

SEQ ID NO: 42604 - DNA, 19 bp, Homo sapiens
  siRNA target sequence for TOP2A (NM_001067.2,2858-2876).
gtgaagtagctattcttaa

SEQ ID NO: 42605 - DNA, 19 bp, Homo sapiens
  siRNA target sequence for TOP2A (NM_001067.2,2863-2881).
gtagctattcttaattcta

SEQ ID NO: 42606 - DNA, 19 bp, Homo sapiens
  siRNA target sequence for TOP2A (NM_001067.2,2866-2884).
gctattcttaattctacaa

SEQ ID NO: 42607 - DNA, 19 bp, Homo sapiens
  siRNA target sequence for TOP2A (NM_001067.2,2899-2917).
gagcttcccgtcagaacat

SEQ ID NO: 42608 - DNA, 19 bp, Homo sapiens
  siRNA target sequence for TOP2A (NM_001067.2,2925-2943).
gacatacaaagaacaagtt

SEQ ID NO: 42609 - DNA, 19 bp, Homo sapiens
  siRNA target sequence for TOP2A (NM_001067.2,2941-2959).
gttctagaacccatgttga

SEQ ID NO: 42610 - DNA, 19 bp, Homo sapiens
  siRNA target sequence for TOP2A (NM_001067.2,2973-2991).
gacacctcctctcataaca

SEQ ID NO: 42611 - DNA, 19 bp, Homo sapiens
  siRNA target sequence for TOP2A (NM_001067.2,3069-3087).
gagagttggactacacaaa

SEQ ID NO: 42612 - DNA, 19 bp, Homo sapiens
  siRNA target sequence for TOP2A (NM_001067.2,3088-3106).
gtcttcaaactccaaacta

SEQ ID NO: 42613 - DNA, 19 bp, Homo sapiens
  siRNA target sequence for TOP2A (NM_001067.2,3116-3134).
gcaactctatggtgctttt

SEQ ID NO: 42614 - DNA, 19 bp, Homo sapiens
  siRNA target sequence for TOP2A (NM_001067.2,3136-3154).
gaccacgtaggctgtttaa

SEQ ID NO: 42615 - DNA, 19 bp, Homo sapiens
  siRNA target sequence for TOP2A (NM_001067.2,3141-3159).
cgtaggctgtttaaagaaa

SEQ ID NO: 42616 - DNA, 19 bp, Homo sapiens
  siRNA target sequence for TOP2A (NM_001067.2,3165-3183).
cacggtgttggatattcta

SEQ ID NO: 42617 - DNA, 19 bp, Homo sapiens
  siRNA target sequence for TOP2A (NM_001067.2,3175-3193).
gatattctaagagactttt

SEQ ID NO: 42618 - DNA, 19 bp, Homo sapiens
  siRNA target sequence for TOP2A (NM_001067.2,3196-3214).
gaactcagacttaaatatt

SEQ ID NO: 42619 - DNA, 19 bp, Homo sapiens
  siRNA target sequence for TOP2A (NM_001067.2,3251-3269).
gtgctgaatctgctaaact

SEQ ID NO: 42620 - DNA, 19 bp, Homo sapiens
  siRNA target sequence for TOP2A (NM_001067.2,3260-3278).
ctgctaaactgaataatca

SEQ ID NO: 42621 - DNA, 19 bp, Homo sapiens
  siRNA target sequence for TOP2A (NM_001067.2,3468-3486).
gagtgactccgtaacagat

SEQ ID NO: 42622 - DNA, 19 bp, Homo sapiens
  siRNA target sequence for TOP2A (NM_001067.2,3553-3571).
gaactctgcaggctaagaa

SEQ ID NO: 42623 - DNA, 19 bp, Homo sapiens
  siRNA target sequence for TOP2A (NM_001067.2,3583-3601).
caagagctggacacattaa

SEQ ID NO: 42624 - DNA, 19 bp, Homo sapiens
  siRNA target sequence for TOP2A (NM_001067.2,3631-3649).
gaagacttggctacattta

SEQ ID NO: 42625 - DNA, 19 bp, Homo sapiens
  siRNA target sequence for TOP2A (NM_001067.2,3640-3658).
gctacatttattgaagaat

SEQ ID NO: 42626 - DNA, 19 bp, Homo sapiens
  siRNA target sequence for TOP2A (NM_001067.2,3768-3786).
gcgtggtcaaagagtcatt

SEQ ID NO: 42627 - DNA, 19 bp, Homo sapiens
  siRNA target sequence for TOP2A (NM_001067.2,3781-3799).
gtcattccacgaataacca

SEQ ID NO: 42628 - DNA, 19 bp, Homo sapiens
  siRNA target sequence for TOP2A (NM_001067.2,3783-3801).
cattccacgaataaccata

SEQ ID NO: 42629 - DNA, 19 bp, Homo sapiens
  siRNA target sequence for TOP2A (NM_001067.2,3787-3805).
ccacgaataaccatagaaa

SEQ ID NO: 42630 - DNA, 19 bp, Homo sapiens
  siRNA target sequence for TOP2A (NM_001067.2,3788-3806).
cacgaataaccatagaaat

SEQ ID NO: 42631 - DNA, 19 bp, Homo sapiens
  siRNA target sequence for TOP2A (NM_001067.2,3790-3808).
cgaataaccatagaaatga

SEQ ID NO: 42632 - DNA, 19 bp, Homo sapiens
  siRNA target sequence for TOP2A (NM_001067.2,3791-3809).
gaataaccatagaaatgaa

SEQ ID NO: 42633 - DNA, 19 bp, Homo sapiens
  siRNA target sequence for TOP2A (NM_001067.2,3889-3907).
ctagaaggcctaaaacaaa

SEQ ID NO: 42634 - DNA, 19 bp, Homo sapiens
  siRNA target sequence for TOP2A (NM_001067.2,3955-3973).
caaactacattggcattta

SEQ ID NO: 42635 - DNA, 19 bp, Homo sapiens
  siRNA target sequence for TOP2A (NM_001067.2,4028-4046).
ggagcagtgacgaaagtaa

SEQ ID NO: 42636 - DNA, 19 bp, Homo sapiens
  siRNA target sequence for TOP2A (NM_001067.2,4029-4047).
gagcagtgacgaaagtaat

SEQ ID NO: 42637 - DNA, 19 bp, Homo sapiens
  siRNA target sequence for TOP2A (NM_001067.2,4110-4128).
ggatttggattcagatgaa

SEQ ID NO: 42638 - DNA, 19 bp, Homo sapiens
  siRNA target sequence for TOP2A (NM_001067.2,4189-4207).
ccacctaagaccaaaactt

SEQ ID NO: 42639 - DNA, 19 bp, Homo sapiens
  siRNA target sequence for TOP2A (NM_001067.2,4211-4229).
caaaacttagtaacaaaga

SEQ ID NO: 42640 - DNA, 19 bp, Homo sapiens
  siRNA target sequence for TOP2A (NM_001067.2,4304-4322).
gccctcctgctacacattt

SEQ ID NO: 42641 - DNA, 19 bp, Homo sapiens
  siRNA target sequence for TOP2A (NM_001067.2,4409-4427).
ccactaccggtgccaaaaa

SEQ ID NO: 42642 - DNA, 19 bp, Homo sapiens
  siRNA target sequence for TOP2A (NM_001067.2,4410-4428).
cactaccggtgccaaaaaa

SEQ ID NO: 42643 - DNA, 19 bp, Homo sapiens
  siRNA target sequence for TOP2A (NM_001067.2,4455-4473).
ggatccagctttgaattct

SEQ ID NO: 42644 - DNA, 19 bp, Homo sapiens
  siRNA target sequence for TOP2A (NM_001067.2,4527-4545).
gccatccacttctgatgat

SEQ ID NO: 42645 - DNA, 19 bp, Homo sapiens
  siRNA target sequence for TOP2A (NM_001067.2,4528-4546).
ccatccacttctgatgatt

SEQ ID NO: 42646 - DNA, 19 bp, Homo sapiens
  siRNA target sequence for TOP2A (NM_001067.2,4579-4597).
gcagtcacaagcaagaaat

SEQ ID NO: 42647 - DNA, 19 bp, Homo sapiens
  siRNA target sequence for TOP2A (NM_001067.2,4582-4600).
gtcacaagcaagaaatcca

SEQ ID NO: 42648 - DNA, 19 bp, Homo sapiens
  siRNA target sequence for TOP2A (NM_001067.2,4606-4624).
gagagtgatgacttccata

SEQ ID NO: 42649 - DNA, 19 bp, Homo sapiens
  siRNA target sequence for TOP2A (NM_001067.2,4663-4681).
gtacgggcaaagaaaccta

SEQ ID NO: 42650 - DNA, 19 bp, Homo sapiens
  siRNA target sequence for TOP2A (NM_001067.2,4666-4684).
cgggcaaagaaacctataa

SEQ ID NO: 42651 - DNA, 19 bp, Homo sapiens
  siRNA target sequence for TOP2A (NM_001067.2,4669-4687).
gcaaagaaacctataaagt

SEQ ID NO: 42652 - DNA, 19 bp, Homo sapiens
  siRNA target sequence for TOP2B (NM_001068.2,93-111).
gtcagaaactgccaacaaa

SEQ ID NO: 42653 - DNA, 19 bp, Homo sapiens
  siRNA target sequence for TOP2B (NM_001068.2,178-196).
cttcttcgtcctgatacat

SEQ ID NO: 42654 - DNA, 19 bp, Homo sapiens
  siRNA target sequence for TOP2B (NM_001068.2,214-232).
ccattgacgcagttcatgt

SEQ ID NO: 42655 - DNA, 19 bp, Homo sapiens
  siRNA target sequence for TOP2B (NM_001068.2,225-243).
gttcatgtgggtgtatgat

SEQ ID NO: 42656 - DNA, 19 bp, Homo sapiens
  siRNA target sequence for TOP2B (NM_001068.2,275-293).
cctttgtgccaggtttata

SEQ ID NO: 42657 - DNA, 19 bp, Homo sapiens
  siRNA target sequence for TOP2B (NM_001068.2,280-298).
gtgccaggtttatacaaga

SEQ ID NO: 42658 - DNA, 19 bp, Homo sapiens
  siRNA target sequence for TOP2B (NM_001068.2,382-400).
gaatctaacattataagca

SEQ ID NO: 42659 - DNA, 19 bp, Homo sapiens
  siRNA target sequence for TOP2B (NM_001068.2,419-437).
gcattccagtagtagaaca

SEQ ID NO: 42660 - DNA, 19 bp, Homo sapiens
  siRNA target sequence for TOP2B (NM_001068.2,438-456).
caaggtagagaaagtttat

SEQ ID NO: 42661 - DNA, 19 bp, Homo sapiens
  siRNA target sequence for TOP2B (NM_001068.2,544-562).
ggtgcaaaactttgtaata

SEQ ID NO: 42662 - DNA, 19 bp, Homo sapiens
  siRNA target sequence for TOP2B (NM_001068.2,557-575).
gtaatattttcagtacaaa

SEQ ID NO: 42663 - DNA, 19 bp, Homo sapiens
  siRNA target sequence for TOP2B (NM_001068.2,567-585).
cagtacaaagtttacagta

SEQ ID NO: 42664 - DNA, 19 bp, Homo sapiens
  siRNA target sequence for TOP2B (NM_001068.2,682-700).
gaagattacacatgcataa

SEQ ID NO: 42665 - DNA, 19 bp, Homo sapiens
  siRNA target sequence for TOP2B (NM_001068.2,685-703).
gattacacatgcataacat

SEQ ID NO: 42666 - DNA, 19 bp, Homo sapiens
  siRNA target sequence for TOP2B (NM_001068.2,710-728).
cagatctgtccaaatttaa

SEQ ID NO: 42667 - DNA, 19 bp, Homo sapiens
  siRNA target sequence for TOP2B (NM_001068.2,754-772).
gtggccctcatgactagaa

SEQ ID NO: 42668 - DNA, 19 bp, Homo sapiens
  siRNA target sequence for TOP2B (NM_001068.2,767-785).
ctagaagggcatatgattt

SEQ ID NO: 42669 - DNA, 19 bp, Homo sapiens
  siRNA target sequence for TOP2B (NM_001068.2,803-821).
gggtcaaggtcatgtttaa

SEQ ID NO: 42670 - DNA, 19 bp, Homo sapiens
  siRNA target sequence for TOP2B (NM_001068.2,804-822).
ggtcaaggtcatgtttaat

SEQ ID NO: 42671 - DNA, 19 bp, Homo sapiens
  siRNA target sequence for TOP2B (NM_001068.2,850-868).
cgcagttatgtagatcttt

SEQ ID NO: 42672 - DNA, 19 bp, Homo sapiens
  siRNA target sequence for TOP2B (NM_001068.2,854-872).
gttatgtagatctttatgt

SEQ ID NO: 42673 - DNA, 19 bp, Homo sapiens
  siRNA target sequence for TOP2B (NM_001068.2,947-965).
gtctcacattgagtgaaaa

SEQ ID NO: 42674 - DNA, 19 bp, Homo sapiens
  siRNA target sequence for TOP2B (NM_001068.2,972-990).
ccagcaaatcagctttgta

SEQ ID NO: 42675 - DNA, 19 bp, Homo sapiens
  siRNA target sequence for TOP2B (NM_001068.2,1013-1031).
gtggacggcacgtggatta

SEQ ID NO: 42676 - DNA, 19 bp, Homo sapiens
  siRNA target sequence for TOP2B (NM_001068.2,1016-1034).
gacggcacgtggattatgt

SEQ ID NO: 42677 - DNA, 19 bp, Homo sapiens
  siRNA target sequence for TOP2B (NM_001068.2,1026-1044).
ggattatgtggtagatcaa

SEQ ID NO: 42678 - DNA, 19 bp, Homo sapiens
  siRNA target sequence for TOP2B (NM_001068.2,1042-1060).
caagttgttggtaaactga

SEQ ID NO: 42679 - DNA, 19 bp, Homo sapiens
  siRNA target sequence for TOP2B (NM_001068.2,1052-1070).
gtaaactgattgaagtagt

SEQ ID NO: 42680 - DNA, 19 bp, Homo sapiens
  siRNA target sequence for TOP2B (NM_001068.2,1057-1075).
ctgattgaagtagttaaga

SEQ ID NO: 42681 - DNA, 19 bp, Homo sapiens
  siRNA target sequence for TOP2B (NM_001068.2,1090-1108).
ggtgtatcagtgaaaccat

SEQ ID NO: 42682 - DNA, 19 bp, Homo sapiens
  siRNA target sequence for TOP2B (NM_001068.2,1168-1186).
gattctcagactaaggaaa

SEQ ID NO: 42683 - DNA, 19 bp, Homo sapiens
  siRNA target sequence for TOP2B (NM_001068.2,1191-1209).
gactctgcagcccaaaagt

SEQ ID NO: 42684 - DNA, 19 bp, Homo sapiens
  siRNA target sequence for TOP2B (NM_001068.2,1254-1272).
ctctaattgtggcattgta

SEQ ID NO: 42685 - DNA, 19 bp, Homo sapiens
  siRNA target sequence for TOP2B (NM_001068.2,1256-1274).
ctaattgtggcattgtaga

SEQ ID NO: 42686 - DNA, 19 bp, Homo sapiens
  siRNA target sequence for TOP2B (NM_001068.2,1317-1335).
gaataagaagtgttcatca

SEQ ID NO: 42687 - DNA, 19 bp, Homo sapiens
  siRNA target sequence for TOP2B (NM_001068.2,1331-1349).
catcagtaaaatacagtaa

SEQ ID NO: 42688 - DNA, 19 bp, Homo sapiens
  siRNA target sequence for TOP2B (NM_001068.2,1405-1423).
ctggagtgtacactgatat

SEQ ID NO: 42689 - DNA, 19 bp, Homo sapiens
  siRNA target sequence for TOP2B (NM_001068.2,1408-1426).
gagtgtacactgatattaa

SEQ ID NO: 42690 - DNA, 19 bp, Homo sapiens
  siRNA target sequence for TOP2B (NM_001068.2,1452-1470).
ggctgtgtctggattaggt

SEQ ID NO: 42691 - DNA, 19 bp, Homo sapiens
  siRNA target sequence for TOP2B (NM_001068.2,1485-1503).
cagatacggagtttttcca

SEQ ID NO: 42692 - DNA, 19 bp, Homo sapiens
  siRNA target sequence for TOP2B (NM_001068.2,1506-1524).
caggggcaaaattcttaat

SEQ ID NO: 42693 - DNA, 19 bp, Homo sapiens
  siRNA target sequence for TOP2B (NM_001068.2,1637-1655).
ccttacgctatggaaagat

SEQ ID NO: 42694 - DNA, 19 bp, Homo sapiens
  siRNA target sequence for TOP2B (NM_001068.2,1638-1656).
cttacgctatggaaagatt

SEQ ID NO: 42695 - DNA, 19 bp, Homo sapiens
  siRNA target sequence for TOP2B (NM_001068.2,1692-1710).
cataaaaggcctgcttatt

SEQ ID NO: 42696 - DNA, 19 bp, Homo sapiens
  siRNA target sequence for TOP2B (NM_001068.2,1764-1782).
gttcattactcctattgta

SEQ ID NO: 42697 - DNA, 19 bp, Homo sapiens
  siRNA target sequence for TOP2B (NM_001068.2,1804-1822).
gaactttccttctacagta

SEQ ID NO: 42698 - DNA, 19 bp, Homo sapiens
  siRNA target sequence for TOP2B (NM_001068.2,1836-1854).
cgaatggaaaaaacatata

SEQ ID NO: 42699 - DNA, 19 bp, Homo sapiens
  siRNA target sequence for TOP2B (NM_001068.2,1896-1914).
gggtactagtacagctaaa

SEQ ID NO: 42700 - DNA, 19 bp, Homo sapiens
  siRNA target sequence for TOP2B (NM_001068.2,1898-1916).
gtactagtacagctaaaga

SEQ ID NO: 42701 - DNA, 19 bp, Homo sapiens
  siRNA target sequence for TOP2B (NM_001068.2,1942-1960).
gaaaggcatcgcatcttgt

SEQ ID NO: 42702 - DNA, 19 bp, Homo sapiens
  siRNA target sequence for TOP2B (NM_001068.2,1981-1999).
gatgatgctgccattacct

SEQ ID NO: 42703 - DNA, 19 bp, Homo sapiens
  siRNA target sequence for TOP2B (NM_001068.2,1992-2010).
cattaccttggcatttagt

SEQ ID NO: 42704 - DNA, 19 bp, Homo sapiens
  siRNA target sequence for TOP2B (NM_001068.2,1997-2015).
ccttggcatttagtaagaa

SEQ ID NO: 42705 - DNA, 19 bp, Homo sapiens
  siRNA target sequence for TOP2B (NM_001068.2,2107-2125).
ggtactgcaacaaagcatt

SEQ ID NO: 42706 - DNA, 19 bp, Homo sapiens
  siRNA target sequence for TOP2B (NM_001068.2,2117-2135).
caaagcatttgacttataa

SEQ ID NO: 42707 - DNA, 19 bp, Homo sapiens
  siRNA target sequence for TOP2B (NM_001068.2,2189-2207).
ctataccatctcttgttga

SEQ ID NO: 42708 - DNA, 19 bp, Homo sapiens
  siRNA target sequence for TOP2B (NM_001068.2,2198-2216).
ctcttgttgatggctttaa

SEQ ID NO: 42709 - DNA, 19 bp, Homo sapiens
  siRNA target sequence for TOP2B (NM_001068.2,2221-2239).
ggccagcggaaagttttat

SEQ ID NO: 42710 - DNA, 19 bp, Homo sapiens
  siRNA target sequence for TOP2B (NM_001068.2,2244-2262).
ctgtttcaagaggaatgat

SEQ ID NO: 42711 - DNA, 19 bp, Homo sapiens
  siRNA target sequence for TOP2B (NM_001068.2,2246-2264).
gtttcaagaggaatgataa

SEQ ID NO: 42712 - DNA, 19 bp, Homo sapiens
  siRNA target sequence for TOP2B (NM_001068.2,2250-2268).
caagaggaatgataaacgt

SEQ ID NO: 42713 - DNA, 19 bp, Homo sapiens
  siRNA target sequence for TOP2B (NM_001068.2,2303-2321).
ctgagatgtcggcttatca

SEQ ID NO: 42714 - DNA, 19 bp, Homo sapiens
  siRNA target sequence for TOP2B (NM_001068.2,2307-2325).
gatgtcggcttatcatcat

SEQ ID NO: 42715 - DNA, 19 bp, Homo sapiens
  siRNA target sequence for TOP2B (NM_001068.2,2374-2392).
gtgggaagtaacaacatta

SEQ ID NO: 42716 - DNA, 19 bp, Homo sapiens
  siRNA target sequence for TOP2B (NM_001068.2,2394-2412).
cttgcttcagcctattggt

SEQ ID NO: 42717 - DNA, 19 bp, Homo sapiens
  siRNA target sequence for TOP2B (NM_001068.2,2446-2464).
gctgcaagccctcgttata

SEQ ID NO: 42718 - DNA, 19 bp, Homo sapiens
  siRNA target sequence for TOP2B (NM_001068.2,2449-2467).
gcaagccctcgttatattt

SEQ ID NO: 42719 - DNA, 19 bp, Homo sapiens
  siRNA target sequence for TOP2B (NM_001068.2,2450-2468).
caagccctcgttatatttt

SEQ ID NO: 42720 - DNA, 19 bp, Homo sapiens
  siRNA target sequence for TOP2B (NM_001068.2,2532-2550).
cctttatgatgataatcaa

SEQ ID NO: 42721 - DNA, 19 bp, Homo sapiens
  siRNA target sequence for TOP2B (NM_001068.2,2554-2572).
gtagagcctgagtggtata

SEQ ID NO: 42722 - DNA, 19 bp, Homo sapiens
  siRNA target sequence for TOP2B (NM_001068.2,2618-2636).
gtactggatgggcttgtaa

SEQ ID NO: 42723 - DNA, 19 bp, Homo sapiens
  siRNA target sequence for TOP2B (NM_001068.2,2633-2651).
gtaaactacccaactatga

SEQ ID NO: 42724 - DNA, 19 bp, Homo sapiens
  siRNA target sequence for TOP2B (NM_001068.2,2650-2668).
gatgctagggaaattgtga

SEQ ID NO: 42725 - DNA, 19 bp, Homo sapiens
  siRNA target sequence for TOP2B (NM_001068.2,2670-2688).
caatgtcagacgaatgcta

SEQ ID NO: 42726 - DNA, 19 bp, Homo sapiens
  siRNA target sequence for TOP2B (NM_001068.2,2730-2748).
ctttaaaggcacgattcaa

SEQ ID NO: 42727 - DNA, 19 bp, Homo sapiens
  siRNA target sequence for TOP2B (NM_001068.2,2821-2839).
gagcttccagttagaactt

SEQ ID NO: 42728 - DNA, 19 bp, Homo sapiens
  siRNA target sequence for TOP2B (NM_001068.2,2834-2852).
gaacttggacacaggtata

SEQ ID NO: 42729 - DNA, 19 bp, Homo sapiens
  siRNA target sequence for TOP2B (NM_001068.2,2862-2880).
ggttttagaacctatgcta

SEQ ID NO: 42730 - DNA, 19 bp, Homo sapiens
  siRNA target sequence for TOP2B (NM_001068.2,2897-2915).
caccagcattaatttctga

SEQ ID NO: 42731 - DNA, 19 bp, Homo sapiens
  siRNA target sequence for TOP2B (NM_001068.2,2998-3016).
ggactgcataaagttttta

SEQ ID NO: 42732 - DNA, 19 bp, Homo sapiens
  siRNA target sequence for TOP2B (NM_001068.2,2999-3017).
gactgcataaagtttttaa

SEQ ID NO: 42733 - DNA, 19 bp, Homo sapiens
  siRNA target sequence for TOP2B (NM_001068.2,3019-3037).
cttcaaactactcttactt

SEQ ID NO: 42734 - DNA, 19 bp, Homo sapiens
  siRNA target sequence for TOP2B (NM_001068.2,3029-3047).
ctcttacttgtaattccat

SEQ ID NO: 42735 - DNA, 19 bp, Homo sapiens
  siRNA target sequence for TOP2B (NM_001068.2,3044-3062).
ccatggtactttttgatca

SEQ ID NO: 42736 - DNA, 19 bp, Homo sapiens
  siRNA target sequence for TOP2B (NM_001068.2,3109-3127).
gaattctttgatttacgat

SEQ ID NO: 42737 - DNA, 19 bp, Homo sapiens
  siRNA target sequence for TOP2B (NM_001068.2,3118-3136).
gatttacgattaagttatt

SEQ ID NO: 42738 - DNA, 19 bp, Homo sapiens
  siRNA target sequence for TOP2B (NM_001068.2,3131-3149).
gttattacggtttacgtaa

SEQ ID NO: 42739 - DNA, 19 bp, Homo sapiens
  siRNA target sequence for TOP2B (NM_001068.2,3176-3194).
cagaatctacaaagcttaa

SEQ ID NO: 42740 - DNA, 19 bp, Homo sapiens
  siRNA target sequence for TOP2B (NM_001068.2,3182-3200).
ctacaaagcttaacaatca

SEQ ID NO: 42741 - DNA, 19 bp, Homo sapiens
  siRNA target sequence for TOP2B (NM_001068.2,3202-3220).
gcccgtttcattttagaga

SEQ ID NO: 42742 - DNA, 19 bp, Homo sapiens
  siRNA target sequence for TOP2B (NM_001068.2,3276-3294).
gttagtccagagaggttat

SEQ ID NO: 42743 - DNA, 19 bp, Homo sapiens
  siRNA target sequence for TOP2B (NM_001068.2,3397-3415).
ccttcaggcccagatttta

SEQ ID NO: 42744 - DNA, 19 bp, Homo sapiens
  siRNA target sequence for TOP2B (NM_001068.2,3403-3421).
ggcccagattttaattata

SEQ ID NO: 42745 - DNA, 19 bp, Homo sapiens
  siRNA target sequence for TOP2B (NM_001068.2,3434-3452).
ctctgtggtctcttactaa

SEQ ID NO: 42746 - DNA, 19 bp, Homo sapiens
  siRNA target sequence for TOP2B (NM_001068.2,3438-3456).
gtggtctcttactaaagaa

SEQ ID NO: 42747 - DNA, 19 bp, Homo sapiens
  siRNA target sequence for TOP2B (NM_001068.2,3494-3512).
ggcgagaggtcaatgatct

SEQ ID NO: 42748 - DNA, 19 bp, Homo sapiens
  siRNA target sequence for TOP2B (NM_001068.2,3495-3513).
gcgagaggtcaatgatctt

SEQ ID NO: 42749 - DNA, 19 bp, Homo sapiens
  siRNA target sequence for TOP2B (NM_001068.2,3496-3514).
cgagaggtcaatgatctta

SEQ ID NO: 42750 - DNA, 19 bp, Homo sapiens
  siRNA target sequence for TOP2B (NM_001068.2,3554-3572).
cggcatttgttgaagaact

SEQ ID NO: 42751 - DNA, 19 bp, Homo sapiens
  siRNA target sequence for TOP2B (NM_001068.2,3573-3591).
ggataaagtggaatctcaa

SEQ ID NO: 42752 - DNA, 19 bp, Homo sapiens
  siRNA target sequence for TOP2B (NM_001068.2,3613-3631).
ggaatgtctggaaaagcaa

SEQ ID NO: 42753 - DNA, 19 bp, Homo sapiens
  siRNA target sequence for TOP2B (NM_001068.2,3637-3655).
ggtaaagttggcaaaccta

SEQ ID NO: 42754 - DNA, 19 bp, Homo sapiens
  siRNA target sequence for TOP2B (NM_001068.2,3736-3754).
gcagatgccagcaaaaagt

SEQ ID NO: 42755 - DNA, 19 bp, Homo sapiens
  siRNA target sequence for TOP2B (NM_001068.2,3737-3755).
cagatgccagcaaaaagtt

SEQ ID NO: 42756 - DNA, 19 bp, Homo sapiens
  siRNA target sequence for TOP2B (NM_001068.2,3762-3780).
gaagaagaagggtgatctt

SEQ ID NO: 42757 - DNA, 19 bp, Homo sapiens
  siRNA target sequence for TOP2B (NM_001068.2,3765-3783).
gaagaagggtgatcttgat

SEQ ID NO: 42758 - DNA, 19 bp, Homo sapiens
  siRNA target sequence for TOP2B (NM_001068.2,3819-3837).
cagtggagcaccagtagaa

SEQ ID NO: 42759 - DNA, 19 bp, Homo sapiens
  siRNA target sequence for TOP2B (NM_001068.2,3852-3870).
ggcattgactccatcagtt

SEQ ID NO: 42760 - DNA, 19 bp, Homo sapiens
  siRNA target sequence for TOP2B (NM_001068.2,4039-4057).
gtggttattccaagagatt

SEQ ID NO: 42761 - DNA, 19 bp, Homo sapiens
  siRNA target sequence for TOP2B (NM_001068.2,4075-4093).
gcagccgaaagacctaaat

SEQ ID NO: 42762 - DNA, 19 bp, Homo sapiens
  siRNA target sequence for TOP2B (NM_001068.2,4076-4094).
cagccgaaagacctaaata

SEQ ID NO: 42763 - DNA, 19 bp, Homo sapiens
  siRNA target sequence for TOP2B (NM_001068.2,4080-4098).
cgaaagacctaaatacaca

SEQ ID NO: 42764 - DNA, 19 bp, Homo sapiens
  siRNA target sequence for TOP2B (NM_001068.2,4181-4199).
catctcccataacaaatga

SEQ ID NO: 42765 - DNA, 19 bp, Homo sapiens
  siRNA target sequence for TOP2B (NM_001068.2,4220-4238).
cttcagatgggttagataa

SEQ ID NO: 42766 - DNA, 19 bp, Homo sapiens
  siRNA target sequence for TOP2B (NM_001068.2,4307-4325).
gtcaggattttggaaatct

SEQ ID NO: 42767 - DNA, 19 bp, Homo sapiens
  siRNA target sequence for TOP2B (NM_001068.2,4363-4381).
gattcagctaaatttgaca

SEQ ID NO: 42768 - DNA, 19 bp, Homo sapiens
  siRNA target sequence for TOP2B (NM_001068.2,4423-4441).
ggtctgaaacagacagata

SEQ ID NO: 42769 - DNA, 19 bp, Homo sapiens
  siRNA target sequence for TOP2B (NM_001068.2,4606-4624).
ggccgaggggcaaagaaaa

SEQ ID NO: 42770 - DNA, 19 bp, Homo sapiens
  siRNA target sequence for TOP2B (NM_001068.2,4700-4718).
cgaagaagacatcttttga

SEQ ID NO: 42771 - DNA, 19 bp, Homo sapiens
  siRNA target sequence for TOP2B (NM_001068.2,4701-4719).
gaagaagacatcttttgat

SEQ ID NO: 42772 - DNA, 19 bp, Homo sapiens
  siRNA target sequence for TOP2B (NM_001068.2,4787-4805).
gtcgggctaggaaagaagt

SEQ ID NO: 42773 - DNA, 19 bp, Homo sapiens
  siRNA target sequence for TOP3A (NM_004618.2,342-360).
gtgtggccgaaaaaaacga

SEQ ID NO: 42774 - DNA, 19 bp, Homo sapiens
  siRNA target sequence for TOP3A (NM_004618.2,416-434).
ggactttcaaaattcaaca

SEQ ID NO: 42775 - DNA, 19 bp, Homo sapiens
  siRNA target sequence for TOP3A (NM_004618.2,439-457).
ctatgaatttgattatcat

SEQ ID NO: 42776 - DNA, 19 bp, Homo sapiens
  siRNA target sequence for TOP3A (NM_004618.2,458-476).
ctgtatggccagaatgtta

SEQ ID NO: 42777 - DNA, 19 bp, Homo sapiens
  siRNA target sequence for TOP3A (NM_004618.2,473-491).
gttaccatggtaatgactt

SEQ ID NO: 42778 - DNA, 19 bp, Homo sapiens
  siRNA target sequence for TOP3A (NM_004618.2,565-583).
cctctttgaagcagaaatt

SEQ ID NO: 42779 - DNA, 19 bp, Homo sapiens
  siRNA target sequence for TOP3A (NM_004618.2,689-707).
gaaaacatcgggtttgaga

SEQ ID NO: 42780 - DNA, 19 bp, Homo sapiens
  siRNA target sequence for TOP3A (NM_004618.2,748-766).
gttgcgagcccgattctct

SEQ ID NO: 42781 - DNA, 19 bp, Homo sapiens
  siRNA target sequence for TOP3A (NM_004618.2,932-950).
gcagagcagctcatcagtt

SEQ ID NO: 42782 - DNA, 19 bp, Homo sapiens
  siRNA target sequence for TOP3A (NM_004618.2,1054-1072).
ccacaaagatggtatcgta

SEQ ID NO: 42783 - DNA, 19 bp, Homo sapiens
  siRNA target sequence for TOP3A (NM_004618.2,1061-1079).
gatggtatcgtagaattca

SEQ ID NO: 42784 - DNA, 19 bp, Homo sapiens
  siRNA target sequence for TOP3A (NM_004618.2,1064-1082).
ggtatcgtagaattcaact

SEQ ID NO: 42785 - DNA, 19 bp, Homo sapiens
  siRNA target sequence for TOP3A (NM_004618.2,1070-1088).
gtagaattcaactggaaaa

SEQ ID NO: 42786 - DNA, 19 bp, Homo sapiens
  siRNA target sequence for TOP3A (NM_004618.2,1084-1102).
gaaaaggcatcgactcttt

SEQ ID NO: 42787 - DNA, 19 bp, Homo sapiens
  siRNA target sequence for TOP3A (NM_004618.2,1089-1107).
ggcatcgactctttaacca

SEQ ID NO: 42788 - DNA, 19 bp, Homo sapiens
  siRNA target sequence for TOP3A (NM_004618.2,1111-1129).
ggcttgcctagttctctat

SEQ ID NO: 42789 - DNA, 19 bp, Homo sapiens
  siRNA target sequence for TOP3A (NM_004618.2,1116-1134).
gcctagttctctatcagtt

SEQ ID NO: 42790 - DNA, 19 bp, Homo sapiens
  siRNA target sequence for TOP3A (NM_004618.2,1160-1178).
gtggtagaggtcagatcta

SEQ ID NO: 42791 - DNA, 19 bp, Homo sapiens
  siRNA target sequence for TOP3A (NM_004618.2,1232-1250).
ctggcttctcgaaagttga

SEQ ID NO: 42792 - DNA, 19 bp, Homo sapiens
  siRNA target sequence for TOP3A (NM_004618.2,1239-1257).
ctcgaaagttgagaataaa

SEQ ID NO: 42793 - DNA, 19 bp, Homo sapiens
  siRNA target sequence for TOP3A (NM_004618.2,1309-1327).
cagctatccccgaacagaa

SEQ ID NO: 42794 - DNA, 19 bp, Homo sapiens
  siRNA target sequence for TOP3A (NM_004618.2,1312-1330).
ctatccccgaacagaaaca

SEQ ID NO: 42795 - DNA, 19 bp, Homo sapiens
  siRNA target sequence for TOP3A (NM_004618.2,1439-1457).
ccacgcaatgggaacaagt

SEQ ID NO: 42796 - DNA, 19 bp, Homo sapiens
  siRNA target sequence for TOP3A (NM_004618.2,1475-1493).
cccattcaccccaccaaat

SEQ ID NO: 42797 - DNA, 19 bp, Homo sapiens
  siRNA target sequence for TOP3A (NM_004618.2,1476-1494).
ccattcaccccaccaaata

SEQ ID NO: 42798 - DNA, 19 bp, Homo sapiens
  siRNA target sequence for TOP3A (NM_004618.2,1520-1538).
cagcgactgtacgagttta

SEQ ID NO: 42799 - DNA, 19 bp, Homo sapiens
  siRNA target sequence for TOP3A (NM_004618.2,1522-1540).
gcgactgtacgagtttatt

SEQ ID NO: 42800 - DNA, 19 bp, Homo sapiens
  siRNA target sequence for TOP3A (NM_004618.2,1524-1542).
gactgtacgagtttattgt

SEQ ID NO: 42801 - DNA, 19 bp, Homo sapiens
  siRNA target sequence for TOP3A (NM_004618.2,1642-1660).
gattctggcccgaaactat

SEQ ID NO: 42802 - DNA, 19 bp, Homo sapiens
  siRNA target sequence for TOP3A (NM_004618.2,1663-1681).
ggatgtgtatccatatgat

SEQ ID NO: 42803 - DNA, 19 bp, Homo sapiens
  siRNA target sequence for TOP3A (NM_004618.2,1849-1867).
gcacatcgagaccatcaaa

SEQ ID NO: 42804 - DNA, 19 bp, Homo sapiens
  siRNA target sequence for TOP3A (NM_004618.2,1931-1949).
cttgtggaaggttatgatt

SEQ ID NO: 42805 - DNA, 19 bp, Homo sapiens
  siRNA target sequence for TOP3A (NM_004618.2,2030-2048).
gacaaatttgtggttctaa

SEQ ID NO: 42806 - DNA, 19 bp, Homo sapiens
  siRNA target sequence for TOP3A (NM_004618.2,2051-2069).
cagcaagtgcagaaataca

SEQ ID NO: 42807 - DNA, 19 bp, Homo sapiens
  siRNA target sequence for TOP3A (NM_004618.2,2084-2102).
gaagcggtggctaaagcaa

SEQ ID NO: 42808 - DNA, 19 bp, Homo sapiens
  siRNA target sequence for TOP3A (NM_004618.2,2089-2107).
ggtggctaaagcaaagaaa

SEQ ID NO: 42809 - DNA, 19 bp, Homo sapiens
  siRNA target sequence for TOP3A (NM_004618.2,2360-2378).
caccctgtgtacaggttaa

SEQ ID NO: 42810 - DNA, 19 bp, Homo sapiens
  siRNA target sequence for TOP3A (NM_004618.2,2366-2384).
gtgtacaggttaaagttaa

SEQ ID NO: 42811 - DNA, 19 bp, Homo sapiens
  siRNA target sequence for TOP3A (NM_004618.2,2470-2488).
cctggacctgagattttca

SEQ ID NO: 42812 - DNA, 19 bp, Homo sapiens
  siRNA target sequence for TOP3A (NM_004618.2,2643-2661).
ctggtgaaagcaattctgt

SEQ ID NO: 42813 - DNA, 19 bp, Homo sapiens
  siRNA target sequence for TOP3A (NM_004618.2,2747-2765).
ggaggtagctgcaacttct

SEQ ID NO: 42814 - DNA, 19 bp, Homo sapiens
  siRNA target sequence for TOP3A (NM_004618.2,2748-2766).
gaggtagctgcaacttctt

SEQ ID NO: 42815 - DNA, 19 bp, Homo sapiens
  siRNA target sequence for TOP3B (NM_003935.3,577-595).
cagccagtgcgcttcaaga

SEQ ID NO: 42816 - DNA, 19 bp, Homo sapiens
  siRNA target sequence for TOP3B (NM_003935.3,580-598).
ccagtgcgcttcaagatga

SEQ ID NO: 42817 - DNA, 19 bp, Homo sapiens
  siRNA target sequence for TOP3B (NM_003935.3,689-707).
ctcccacggagaagaaaga

SEQ ID NO: 42818 - DNA, 19 bp, Homo sapiens
  siRNA target sequence for TOP3B (NM_003935.3,710-728).
ctaaccccaagctgaacat

SEQ ID NO: 42819 - DNA, 19 bp, Homo sapiens
  siRNA target sequence for TOP3B (NM_003935.3,832-850).
gttctgcccgtcatgaaca

SEQ ID NO: 42820 - DNA, 19 bp, Homo sapiens
  siRNA target sequence for TOP3B (NM_003935.3,1011-1029).
caccaggtttcagactaaa

SEQ ID NO: 42821 - DNA, 19 bp, Homo sapiens
  siRNA target sequence for TOP3B (NM_003935.3,1014-1032).
caggtttcagactaaatat

SEQ ID NO: 42822 - DNA, 19 bp, Homo sapiens
  siRNA target sequence for TOP3B (NM_003935.3,1016-1034).
ggtttcagactaaatattt

SEQ ID NO: 42823 - DNA, 19 bp, Homo sapiens
  siRNA target sequence for TOP3B (NM_003935.3,1162-1180).
ctgcaggccaaggttaaca

SEQ ID NO: 42824 - DNA, 19 bp, Homo sapiens
  siRNA target sequence for TOP3B (NM_003935.3,1170-1188).
caaggttaacactgacaaa

SEQ ID NO: 42825 - DNA, 19 bp, Homo sapiens
  siRNA target sequence for TOP3B (NM_003935.3,1206-1224).
ggactgggaccgagtaaga

SEQ ID NO: 42826 - DNA, 19 bp, Homo sapiens
  siRNA target sequence for TOP3B (NM_003935.3,1212-1230).
ggaccgagtaagagtgttt

SEQ ID NO: 42827 - DNA, 19 bp, Homo sapiens
  siRNA target sequence for TOP3B (NM_003935.3,1237-1255).
gagatcgcacagatgtttt

SEQ ID NO: 42828 - DNA, 19 bp, Homo sapiens
  siRNA target sequence for TOP3B (NM_003935.3,1239-1257).
gatcgcacagatgttttta

SEQ ID NO: 42829 - DNA, 19 bp, Homo sapiens
  siRNA target sequence for TOP3B (NM_003935.3,1294-1312).
gccacaagcaggaaagaaa

SEQ ID NO: 42830 - DNA, 19 bp, Homo sapiens
  siRNA target sequence for TOP3B (NM_003935.3,1460-1478).
cccactaccctgagaactt

SEQ ID NO: 42831 - DNA, 19 bp, Homo sapiens
  siRNA target sequence for TOP3B (NM_003935.3,1461-1479).
ccactaccctgagaacttt

SEQ ID NO: 42832 - DNA, 19 bp, Homo sapiens
  siRNA target sequence for TOP3B (NM_003935.3,1530-1548).
cacggtgaagcggttgtta

SEQ ID NO: 42833 - DNA, 19 bp, Homo sapiens
  siRNA target sequence for TOP3B (NM_003935.3,1541-1559).
ggttgttagcagaaggtat

SEQ ID NO: 42834 - DNA, 19 bp, Homo sapiens
  siRNA target sequence for TOP3B (NM_003935.3,1648-1666).
gcgtggcggctctatgagt

SEQ ID NO: 42835 - DNA, 19 bp, Homo sapiens
  siRNA target sequence for TOP3B (NM_003935.3,1649-1667).
cgtggcggctctatgagta

SEQ ID NO: 42836 - DNA, 19 bp, Homo sapiens
  siRNA target sequence for TOP3B (NM_003935.3,1652-1670).
ggcggctctatgagtacat

SEQ ID NO: 42837 - DNA, 19 bp, Homo sapiens
  siRNA target sequence for TOP3B (NM_003935.3,1973-1991).
gcatccctgtgcatatcaa

SEQ ID NO: 42838 - DNA, 19 bp, Homo sapiens
  siRNA target sequence for TOP3B (NM_003935.3,1978-1996).
cctgtgcatatcaacaaca

SEQ ID NO: 42839 - DNA, 19 bp, Homo sapiens
  siRNA target sequence for TOP3B (NM_003935.3,1979-1997).
ctgtgcatatcaacaacat

SEQ ID NO: 42840 - DNA, 19 bp, Homo sapiens
  siRNA target sequence for TOP3B (NM_003935.3,1981-1999).
gtgcatatcaacaacatct

SEQ ID NO: 42841 - DNA, 19 bp, Homo sapiens
  siRNA target sequence for TOP3B (NM_003935.3,2064-2082).
cctggtgcacggctactat

SEQ ID NO: 42842 - DNA, 19 bp, Homo sapiens
  siRNA target sequence for TOP3B (NM_003935.3,2065-2083).
ctggtgcacggctactata

SEQ ID NO: 42843 - DNA, 19 bp, Homo sapiens
  siRNA target sequence for TOP3B (NM_003935.3,2068-2086).
gtgcacggctactataaga

SEQ ID NO: 42844 - DNA, 19 bp, Homo sapiens
  siRNA target sequence for TOP3B (NM_003935.3,2070-2088).
gcacggctactataagatt

SEQ ID NO: 42845 - DNA, 19 bp, Homo sapiens
  siRNA target sequence for TOP3B (NM_003935.3,2073-2091).
cggctactataagattgat

SEQ ID NO: 42846 - DNA, 19 bp, Homo sapiens
  siRNA target sequence for TOP3B (NM_003935.3,2315-2333).
gccaccgcttcatgaagta

SEQ ID NO: 42847 - DNA, 19 bp, Homo sapiens
  siRNA target sequence for TOP3B (NM_003935.3,2317-2335).
caccgcttcatgaagtaca

SEQ ID NO: 42848 - DNA, 19 bp, Homo sapiens
  siRNA target sequence for TOP3B (NM_003935.3,2519-2537).
cacccttccgagacatgaa

SEQ ID NO: 42849 - DNA, 19 bp, Homo sapiens
  siRNA target sequence for TOX (NM_014729.1,226-244).
ggacgtaagattttatcca

SEQ ID NO: 42850 - DNA, 19 bp, Homo sapiens
  siRNA target sequence for TOX (NM_014729.1,310-328).
ctactattgcaacaagttt

SEQ ID NO: 42851 - DNA, 19 bp, Homo sapiens
  siRNA target sequence for TOX (NM_014729.1,402-420).
gtccaagcctggaaagtga

SEQ ID NO: 42852 - DNA, 19 bp, Homo sapiens
  siRNA target sequence for TOX (NM_014729.1,472-490).
ggtgcacctgaatgaagtt

SEQ ID NO: 42853 - DNA, 19 bp, Homo sapiens
  siRNA target sequence for TOX (NM_014729.1,488-506).
gttgagtctggttaccatt

SEQ ID NO: 42854 - DNA, 19 bp, Homo sapiens
  siRNA target sequence for TOX (NM_014729.1,513-531).
gtcaccccatgaaccataa

SEQ ID NO: 42855 - DNA, 19 bp, Homo sapiens
  siRNA target sequence for TOX (NM_014729.1,562-580).
ggacctccctgaaatcaca

SEQ ID NO: 42856 - DNA, 19 bp, Homo sapiens
  siRNA target sequence for TOX (NM_014729.1,605-623).
ggaacactgctttctaatt

SEQ ID NO: 42857 - DNA, 19 bp, Homo sapiens
  siRNA target sequence for TOX (NM_014729.1,752-770).
ggccagctgactaccatta

SEQ ID NO: 42858 - DNA, 19 bp, Homo sapiens
  siRNA target sequence for TOX (NM_014729.1,786-804).
gtgctcaacttggtttgaa

SEQ ID NO: 42859 - DNA, 19 bp, Homo sapiens
  siRNA target sequence for TOX (NM_014729.1,788-806).
gctcaacttggtttgaata

SEQ ID NO: 42860 - DNA, 19 bp, Homo sapiens
  siRNA target sequence for TOX (NM_014729.1,789-807).
ctcaacttggtttgaatat

SEQ ID NO: 42861 - DNA, 19 bp, Homo sapiens
  siRNA target sequence for TOX (NM_014729.1,877-895).
cagttcagtgcatgaagat

SEQ ID NO: 42862 - DNA, 19 bp, Homo sapiens
  siRNA target sequence for TOX (NM_014729.1,879-897).
gttcagtgcatgaagatga

SEQ ID NO: 42863 - DNA, 19 bp, Homo sapiens
  siRNA target sequence for TOX (NM_014729.1,899-917).
ggcgatgatacctctaaga

SEQ ID NO: 42864 - DNA, 19 bp, Homo sapiens
  siRNA target sequence for TOX (NM_014729.1,900-918).
gcgatgatacctctaagat

SEQ ID NO: 42865 - DNA, 19 bp, Homo sapiens
  siRNA target sequence for TOX (NM_014729.1,942-960).
cctctgatatggggaaaaa

SEQ ID NO: 42866 - DNA, 19 bp, Homo sapiens
  siRNA target sequence for TOX (NM_014729.1,1054-1072).
cgccatcaagggccaaaat

SEQ ID NO: 42867 - DNA, 19 bp, Homo sapiens
  siRNA target sequence for TOX (NM_014729.1,1057-1075).
catcaagggccaaaatcca

SEQ ID NO: 42868 - DNA, 19 bp, Homo sapiens
  siRNA target sequence for TOX (NM_014729.1,1083-1101).
cctttggcgaagtctctaa

SEQ ID NO: 42869 - DNA, 19 bp, Homo sapiens
  siRNA target sequence for TOX (NM_014729.1,1084-1102).
ctttggcgaagtctctaaa

SEQ ID NO: 42870 - DNA, 19 bp, Homo sapiens
  siRNA target sequence for TOX (NM_014729.1,1089-1107).
gcgaagtctctaaaattgt

SEQ ID NO: 42871 - DNA, 19 bp, Homo sapiens
  siRNA target sequence for TOX (NM_014729.1,1192-1210).
gcaactcgcagcatacaga

SEQ ID NO: 42872 - DNA, 19 bp, Homo sapiens
  siRNA target sequence for TOX (NM_014729.1,1268-1286).
cctcagctgatcaattcga

SEQ ID NO: 42873 - DNA, 19 bp, Homo sapiens
  siRNA target sequence for TOX (NM_014729.1,1269-1287).
ctcagctgatcaattcgaa

SEQ ID NO: 42874 - DNA, 19 bp, Homo sapiens
  siRNA target sequence for TOX (NM_014729.1,1319-1337).
cactcggccctgtacctaa

SEQ ID NO: 42875 - DNA, 19 bp, Homo sapiens
  siRNA target sequence for TOX (NM_014729.1,1416-1434).
ccaagccgaataaccaaat

SEQ ID NO: 42876 - DNA, 19 bp, Homo sapiens
  siRNA target sequence for TOX (NM_014729.1,1603-1621).
caccatgcagcaaggattt

SEQ ID NO: 42877 - DNA, 19 bp, Homo sapiens
  siRNA target sequence for TOX (NM_014729.1,1623-1641).
ctcttcaacccgactatca

SEQ ID NO: 42878 - DNA, 19 bp, Homo sapiens
  siRNA target sequence for TOX (NM_014729.1,1625-1643).
cttcaacccgactatcaga

SEQ ID NO: 42879 - DNA, 19 bp, Homo sapiens
  siRNA target sequence for TOX (NM_014729.1,1631-1649).
cccgactatcagactatta

SEQ ID NO: 42880 - DNA, 19 bp, Homo sapiens
  siRNA target sequence for TOX (NM_014729.1,1632-1650).
ccgactatcagactattat

SEQ ID NO: 42881 - DNA, 19 bp, Homo sapiens
  siRNA target sequence for TOX (NM_014729.1,1702-1720).
gcgttcggggtgcagaaat

SEQ ID NO: 42882 - DNA, 19 bp, Homo sapiens
  siRNA target sequence for TOX (NM_014729.1,1730-1748).
caaccggtggactggaata

SEQ ID NO: 42883 - DNA, 19 bp, Homo sapiens
  siRNA target sequence for TOX (NM_014729.1,1734-1752).
cggtggactggaataacga

SEQ ID NO: 42884 - DNA, 19 bp, Homo sapiens
  siRNA target sequence for TOX (NM_014729.1,1781-1799).
gacaaagcactgtacctta

SEQ ID NO: 42885 - DNA, 19 bp, Homo sapiens
  siRNA target sequence for TRERF1 (NM_018415.1,1029-1047).
gggcacctgtattatgact

SEQ ID NO: 42886 - DNA, 19 bp, Homo sapiens
  siRNA target sequence for TRERF1 (NM_018415.1,1030-1048).
ggcacctgtattatgacta

SEQ ID NO: 42887 - DNA, 19 bp, Homo sapiens
  siRNA target sequence for TRERF1 (NM_018415.1,1304-1322).
gcagatacctcagtattat

SEQ ID NO: 42888 - DNA, 19 bp, Homo sapiens
  siRNA target sequence for TRERF1 (NM_018415.1,1380-1398).
cagcctccttcttatcaca

SEQ ID NO: 42889 - DNA, 19 bp, Homo sapiens
  siRNA target sequence for TRERF1 (NM_018415.1,1713-1731).
gggatccacctcaacaaca

SEQ ID NO: 42890 - DNA, 19 bp, Homo sapiens
  siRNA target sequence for TRERF1 (NM_018415.1,1714-1732).
ggatccacctcaacaacat

SEQ ID NO: 42891 - DNA, 19 bp, Homo sapiens
  siRNA target sequence for TRERF1 (NM_018415.1,1843-1861).
cgtttggggagcagtttga

SEQ ID NO: 42892 - DNA, 19 bp, Homo sapiens
  siRNA target sequence for TRERF1 (NM_018415.1,1844-1862).
gtttggggagcagtttgat

SEQ ID NO: 42893 - DNA, 19 bp, Homo sapiens
  siRNA target sequence for TRERF1 (NM_018415.1,2404-2422).
gagagcagactgtagatgt

SEQ ID NO: 42894 - DNA, 19 bp, Homo sapiens
  siRNA target sequence for TRERF1 (NM_018415.1,2408-2426).
gcagactgtagatgttgaa

SEQ ID NO: 42895 - DNA, 19 bp, Homo sapiens
  siRNA target sequence for TRERF1 (NM_018415.1,2421-2439).
gttgaaccacgcatcaaca

SEQ ID NO: 42896 - DNA, 19 bp, Homo sapiens
  siRNA target sequence for TRERF1 (NM_018415.1,2607-2625).
ccaggtggagggaccaatt

SEQ ID NO: 42897 - DNA, 19 bp, Homo sapiens
  siRNA target sequence for TRERF1 (NM_018415.1,2611-2629).
gtggagggaccaattctga

SEQ ID NO: 42898 - DNA, 19 bp, Homo sapiens
  siRNA target sequence for TRERF1 (NM_018415.1,2697-2715).
cggaagcctgtcaggttaa

SEQ ID NO: 42899 - DNA, 19 bp, Homo sapiens
  siRNA target sequence for TRERF1 (NM_018415.1,2698-2716).
ggaagcctgtcaggttaaa

SEQ ID NO: 42900 - DNA, 19 bp, Homo sapiens
  siRNA target sequence for TRERF1 (NM_018415.1,2719-2737).
gtcatcctttagcaaatta

SEQ ID NO: 42901 - DNA, 19 bp, Homo sapiens
  siRNA target sequence for TRERF1 (NM_018415.1,2759-2777).
gtggacctccctagaaaga

SEQ ID NO: 42902 - DNA, 19 bp, Homo sapiens
  siRNA target sequence for TRERF1 (NM_018415.1,2761-2779).
ggacctccctagaaagaaa

SEQ ID NO: 42903 - DNA, 19 bp, Homo sapiens
  siRNA target sequence for TRERF1 (NM_018415.1,2803-2821).
cttacagcaaagactttat

SEQ ID NO: 42904 - DNA, 19 bp, Homo sapiens
  siRNA target sequence for TRERF1 (NM_018415.1,2917-2935).
ggacacgcctggcagaaat

SEQ ID NO: 42905 - DNA, 19 bp, Homo sapiens
  siRNA target sequence for TRERF1 (NM_018415.1,2942-2960).
cgattgtgtgacaagtgaa

SEQ ID NO: 42906 - DNA, 19 bp, Homo sapiens
  siRNA target sequence for TRERF1 (NM_018415.1,3155-3173).
ggctgactgtagatgtcat

SEQ ID NO: 42907 - DNA, 19 bp, Homo sapiens
  siRNA target sequence for TRERF1 (NM_018415.1,3315-3333).
gggtactgttcggtaaaga

SEQ ID NO: 42908 - DNA, 19 bp, Homo sapiens
  siRNA target sequence for TRERF1 (NM_018415.1,3408-3426).
gtcttcttcaagatcaaaa

SEQ ID NO: 42909 - DNA, 19 bp, Homo sapiens
  siRNA target sequence for TRERF1 (NM_018415.1,3427-3445).
gccgaaatgcacacatgaa

SEQ ID NO: 42910 - DNA, 19 bp, Homo sapiens
  siRNA target sequence for TRERF1 (NM_018415.1,3428-3446).
ccgaaatgcacacatgaaa

SEQ ID NO: 42911 - DNA, 19 bp, Homo sapiens
  siRNA target sequence for TRERF1 (NM_018415.1,3429-3447).
cgaaatgcacacatgaaaa

SEQ ID NO: 42912 - DNA, 19 bp, Homo sapiens
  siRNA target sequence for TRERF1 (NM_018415.1,3681-3699).
ctcttggatgatcaagatt

SEQ ID NO: 42913 - DNA, 19 bp, Homo sapiens
  siRNA target sequence for TRERF1 (NM_018415.1,3711-3729).
cagggtgacgcagaactat

SEQ ID NO: 42914 - DNA, 19 bp, Homo sapiens
  siRNA target sequence for TRERF1 (NM_033502.1,570-588).
gaccagcaactgtacaaga

SEQ ID NO: 42915 - DNA, 19 bp, Homo sapiens
  siRNA target sequence for TRERF1 (NM_033502.1,965-983).
gcttaccagcggtgtctta

SEQ ID NO: 42916 - DNA, 19 bp, Homo sapiens
  siRNA target sequence for TRERF1 (NM_033502.1,1028-1046).
gcgaattcaggtcaacaat

SEQ ID NO: 42917 - DNA, 19 bp, Homo sapiens
  siRNA target sequence for TRERF1 (NM_033502.1,1029-1047).
cgaattcaggtcaacaata

SEQ ID NO: 42918 - DNA, 19 bp, Homo sapiens
  siRNA target sequence for TRERF1 (NM_033502.1,1030-1048).
gaattcaggtcaacaatat

SEQ ID NO: 42919 - DNA, 19 bp, Homo sapiens
  siRNA target sequence for TRIM26 (NM_003449.2,496-514).
cagcaggatgcaaagttgt

SEQ ID NO: 42920 - DNA, 19 bp, Homo sapiens
  siRNA target sequence for TRIM26 (NM_003449.2,976-994).
gacacgagagacttcctaa

SEQ ID NO: 42921 - DNA, 19 bp, Homo sapiens
  siRNA target sequence for TRIM26 (NM_003449.2,1031-1049).
ccattgctcgagtggttaa

SEQ ID NO: 42922 - DNA, 19 bp, Homo sapiens
  siRNA target sequence for TRIM26 (NM_003449.2,1032-1050).
cattgctcgagtggttaaa

SEQ ID NO: 42923 - DNA, 19 bp, Homo sapiens
  siRNA target sequence for TRIM26 (NM_003449.2,1036-1054).
gctcgagtggttaaaaaaa

SEQ ID NO: 42924 - DNA, 19 bp, Homo sapiens
  siRNA target sequence for TRIM26 (NM_003449.2,1039-1057).
cgagtggttaaaaaaaaga

SEQ ID NO: 42925 - DNA, 19 bp, Homo sapiens
  siRNA target sequence for TRIM26 (NM_003449.2,1058-1076).
ccggagaattctcagataa

SEQ ID NO: 42926 - DNA, 19 bp, Homo sapiens
  siRNA target sequence for TRIM26 (NM_003449.2,1094-1112).
gaggcctgagggaattcca

SEQ ID NO: 42927 - DNA, 19 bp, Homo sapiens
  siRNA target sequence for TRIM26 (NM_003449.2,1122-1140).
gctgagagacttggaatat

SEQ ID NO: 42928 - DNA, 19 bp, Homo sapiens
  siRNA target sequence for TRIM26 (NM_003449.2,1123-1141).
ctgagagacttggaatata

SEQ ID NO: 42929 - DNA, 19 bp, Homo sapiens
  siRNA target sequence for TRIM26 (NM_003449.2,1415-1433).
gctatggggatggatatga

SEQ ID NO: 42930 - DNA, 19 bp, Homo sapiens
  siRNA target sequence for TRIM26 (NM_003449.2,1677-1695).
gggcatcgccctggattat

SEQ ID NO: 42931 - DNA, 19 bp, Homo sapiens
  siRNA target sequence for TRIM26 (NM_003449.2,1679-1697).
gcatcgccctggattatga

SEQ ID NO: 42932 - DNA, 19 bp, Homo sapiens
  siRNA target sequence for TRIM26 (NM_003449.2,1680-1698).
catcgccctggattatgaa

SEQ ID NO: 42933 - DNA, 19 bp, Homo sapiens
  siRNA target sequence for TRIM26 (NM_003449.2,1724-1742).
cagagtcacaggaactcat

SEQ ID NO: 42934 - DNA, 19 bp, Homo sapiens
  siRNA target sequence for TRIM33 (NM_015906.2,603-621).
ccagcaagttggtgtaata

SEQ ID NO: 42935 - DNA, 19 bp, Homo sapiens
  siRNA target sequence for TRIM33 (NM_015906.2,654-672).
gatagaccttgtggataat

SEQ ID NO: 42936 - DNA, 19 bp, Homo sapiens
  siRNA target sequence for TRIM33 (NM_015906.2,729-747).
ggtatgtactagttgtgaa

SEQ ID NO: 42937 - DNA, 19 bp, Homo sapiens
  siRNA target sequence for TRIM33 (NM_015906.2,758-776).
gtgcagttggcttttgtgt

SEQ ID NO: 42938 - DNA, 19 bp, Homo sapiens
  siRNA target sequence for TRIM33 (NM_015906.2,782-800).
gtggagagtggctatgtaa

SEQ ID NO: 42939 - DNA, 19 bp, Homo sapiens
  siRNA target sequence for TRIM33 (NM_015906.2,787-805).
gagtggctatgtaagacat

SEQ ID NO: 42940 - DNA, 19 bp, Homo sapiens
  siRNA target sequence for TRIM33 (NM_015906.2,810-828).
cgaagcacatcaaagagta

SEQ ID NO: 42941 - DNA, 19 bp, Homo sapiens
  siRNA target sequence for TRIM33 (NM_015906.2,815-833).
cacatcaaagagtaaaatt

SEQ ID NO: 42942 - DNA, 19 bp, Homo sapiens
  siRNA target sequence for TRIM33 (NM_015906.2,890-908).
ctggtcaacgccctgtttt

SEQ ID NO: 42943 - DNA, 19 bp, Homo sapiens
  siRNA target sequence for TRIM33 (NM_015906.2,892-910).
ggtcaacgccctgttttct

SEQ ID NO: 42944 - DNA, 19 bp, Homo sapiens
  siRNA target sequence for TRIM33 (NM_015906.2,912-930).
ccctgtacacaaacaagaa

SEQ ID NO: 42945 - DNA, 19 bp, Homo sapiens
  siRNA target sequence for TRIM33 (NM_015906.2,947-965).
gtgaaacatgtgatagatt

SEQ ID NO: 42946 - DNA, 19 bp, Homo sapiens
  siRNA target sequence for TRIM33 (NM_015906.2,971-989).
gtagagactgtcagctatt

SEQ ID NO: 42947 - DNA, 19 bp, Homo sapiens
  siRNA target sequence for TRIM33 (NM_015906.2,1044-1062).
gggtgcaattgagaatcta

SEQ ID NO: 42948 - DNA, 19 bp, Homo sapiens
  siRNA target sequence for TRIM33 (NM_015906.2,1056-1074).
gaatctactggcgaaactt

SEQ ID NO: 42949 - DNA, 19 bp, Homo sapiens
  siRNA target sequence for TRIM33 (NM_015906.2,1067-1085).
cgaaacttcttgagaagaa

SEQ ID NO: 42950 - DNA, 19 bp, Homo sapiens
  siRNA target sequence for TRIM33 (NM_015906.2,1072-1090).
cttcttgagaagaagaatt

SEQ ID NO: 42951 - DNA, 19 bp, Homo sapiens
  siRNA target sequence for TRIM33 (NM_015906.2,1109-1127).
ctcaggtgcagaataggat

SEQ ID NO: 42952 - DNA, 19 bp, Homo sapiens
  siRNA target sequence for TRIM33 (NM_015906.2,1179-1197).
cattttcacccttatcaat

SEQ ID NO: 42953 - DNA, 19 bp, Homo sapiens
  siRNA target sequence for TRIM33 (NM_015906.2,1303-1321).
cggcaggtgaagcatgtta

SEQ ID NO: 42954 - DNA, 19 bp, Homo sapiens
  siRNA target sequence for TRIM33 (NM_015906.2,1304-1322).
ggcaggtgaagcatgttat

SEQ ID NO: 42955 - DNA, 19 bp, Homo sapiens
  siRNA target sequence for TRIM33 (NM_015906.2,1309-1327).
gtgaagcatgttatgaact

SEQ ID NO: 42956 - DNA, 19 bp, Homo sapiens
  siRNA target sequence for TRIM33 (NM_015906.2,1353-1371).
cagcagcacagcactacta

SEQ ID NO: 42957 - DNA, 19 bp, Homo sapiens
  siRNA target sequence for TRIM33 (NM_015906.2,1355-1373).
gcagcacagcactactata

SEQ ID NO: 42958 - DNA, 19 bp, Homo sapiens
  siRNA target sequence for TRIM33 (NM_015906.2,1374-1392).
cagcaagcgactgattact

SEQ ID NO: 42959 - DNA, 19 bp, Homo sapiens
  siRNA target sequence for TRIM33 (NM_015906.2,1376-1394).
gcaagcgactgattacttt

SEQ ID NO: 42960 - DNA, 19 bp, Homo sapiens
  siRNA target sequence for TRIM33 (NM_015906.2,1396-1414).
cagttgcgtcatattttga

SEQ ID NO: 42961 - DNA, 19 bp, Homo sapiens
  siRNA target sequence for TRIM33 (NM_015906.2,1442-1460).
ctaatggagcaatacgttt

SEQ ID NO: 42962 - DNA, 19 bp, Homo sapiens
  siRNA target sequence for TRIM33 (NM_015906.2,1451-1469).
caatacgtttccattgtga

SEQ ID NO: 42963 - DNA, 19 bp, Homo sapiens
  siRNA target sequence for TRIM33 (NM_015906.2,1481-1499).
gggcaaagaatgtagtcaa

SEQ ID NO: 42964 - DNA, 19 bp, Homo sapiens
  siRNA target sequence for TRIM33 (NM_015906.2,1483-1501).
gcaaagaatgtagtcaatt

SEQ ID NO: 42965 - DNA, 19 bp, Homo sapiens
  siRNA target sequence for TRIM33 (NM_015906.2,1488-1506).
gaatgtagtcaatttaggt

SEQ ID NO: 42966 - DNA, 19 bp, Homo sapiens
  siRNA target sequence for TRIM33 (NM_015906.2,1504-1522).
ggtaatctagtaatagaga

SEQ ID NO: 42967 - DNA, 19 bp, Homo sapiens
  siRNA target sequence for TRIM33 (NM_015906.2,1538-1556).
gttatactcctaatgttgt

SEQ ID NO: 42968 - DNA, 19 bp, Homo sapiens
  siRNA target sequence for TRIM33 (NM_015906.2,1578-1596).
gacaaaccacattagtaaa

SEQ ID NO: 42969 - DNA, 19 bp, Homo sapiens
  siRNA target sequence for TRIM33 (NM_015906.2,1638-1656).
catgcaacaacaagtatat

SEQ ID NO: 42970 - DNA, 19 bp, Homo sapiens
  siRNA target sequence for TRIM33 (NM_015906.2,1641-1659).
gcaacaacaagtatatgca

SEQ ID NO: 42971 - DNA, 19 bp, Homo sapiens
  siRNA target sequence for TRIM33 (NM_015906.2,1760-1778).
ctcagatgttacaacaaca

SEQ ID NO: 42972 - DNA, 19 bp, Homo sapiens
  siRNA target sequence for TRIM33 (NM_015906.2,1777-1795).
cagcctcctcgattgatca

SEQ ID NO: 42973 - DNA, 19 bp, Homo sapiens
  siRNA target sequence for TRIM33 (NM_015906.2,1824-1842).
gaactgtggagcttttcaa

SEQ ID NO: 42974 - DNA, 19 bp, Homo sapiens
  siRNA target sequence for TRIM33 (NM_015906.2,1926-1944).
gccacacctccaaagacaa

SEQ ID NO: 42975 - DNA, 19 bp, Homo sapiens
  siRNA target sequence for TRIM33 (NM_015906.2,1976-1994).
ccgtagtatcggtacacaa

SEQ ID NO: 42976 - DNA, 19 bp, Homo sapiens
  siRNA target sequence for TRIM33 (NM_015906.2,2015-2033).
gccctactacagcaactat

SEQ ID NO: 42977 - DNA, 19 bp, Homo sapiens
  siRNA target sequence for TRIM33 (NM_015906.2,2026-2044).
gcaactatggcaaatgcaa

SEQ ID NO: 42978 - DNA, 19 bp, Homo sapiens
  siRNA target sequence for TRIM33 (NM_015906.2,2061-2079).
cccatctgttacagcaata

SEQ ID NO: 42979 - DNA, 19 bp, Homo sapiens
  siRNA target sequence for TRIM33 (NM_015906.2,2080-2098).
gagctaatcccctcagtta

SEQ ID NO: 42980 - DNA, 19 bp, Homo sapiens
  siRNA target sequence for TRIM33 (NM_015906.2,2165-2183).
gtagtttagataatctact

SEQ ID NO: 42981 - DNA, 19 bp, Homo sapiens
  siRNA target sequence for TRIM33 (NM_015906.2,2173-2191).
gataatctactaagtagat

SEQ ID NO: 42982 - DNA, 19 bp, Homo sapiens
  siRNA target sequence for TRIM33 (NM_015906.2,2179-2197).
ctactaagtagatacatct

SEQ ID NO: 42983 - DNA, 19 bp, Homo sapiens
  siRNA target sequence for TRIM33 (NM_015906.2,2220-2238).
gcctacaagcaccatgaat

SEQ ID NO: 42984 - DNA, 19 bp, Homo sapiens
  siRNA target sequence for TRIM33 (NM_015906.2,2259-2277).
cctttctccgggatcatca

SEQ ID NO: 42985 - DNA, 19 bp, Homo sapiens
  siRNA target sequence for TRIM33 (NM_015906.2,2308-2326).
cccccaagtacttctagta

SEQ ID NO: 42986 - DNA, 19 bp, Homo sapiens
  siRNA target sequence for TRIM33 (NM_015906.2,2310-2328).
cccaagtacttctagtact

SEQ ID NO: 42987 - DNA, 19 bp, Homo sapiens
  siRNA target sequence for TRIM33 (NM_015906.2,2450-2468).
caggaggtgtaaaacaaga

SEQ ID NO: 42988 - DNA, 19 bp, Homo sapiens
  siRNA target sequence for TRIM33 (NM_015906.2,2641-2659).
gggctcagcagccttgtta

SEQ ID NO: 42989 - DNA, 19 bp, Homo sapiens
  siRNA target sequence for TRIM33 (NM_015906.2,2642-2660).
ggctcagcagccttgttaa

SEQ ID NO: 42990 - DNA, 19 bp, Homo sapiens
  siRNA target sequence for TRIM33 (NM_015906.2,2662-2680).
ggaaagtccccaattcgaa

SEQ ID NO: 42991 - DNA, 19 bp, Homo sapiens
  siRNA target sequence for TRIM33 (NM_015906.2,2688-2706).
gcacaggtcggcaaggatt

SEQ ID NO: 42992 - DNA, 19 bp, Homo sapiens
  siRNA target sequence for TRIM33 (NM_015906.2,2779-2797).
ctcttgtgctgcgaaaaat

SEQ ID NO: 42993 - DNA, 19 bp, Homo sapiens
  siRNA target sequence for TRIM33 (NM_015906.2,2808-2826).
ctttcatctaacttgtcat

SEQ ID NO: 42994 - DNA, 19 bp, Homo sapiens
  siRNA target sequence for TRIM33 (NM_015906.2,2862-2880).
gatatgcacattttgtaga

SEQ ID NO: 42995 - DNA, 19 bp, Homo sapiens
  siRNA target sequence for TRIM33 (NM_015906.2,2981-2999).
gtgaacgtcttctgcttta

SEQ ID NO: 42996 - DNA, 19 bp, Homo sapiens
  siRNA target sequence for TRIM33 (NM_015906.2,3036-3054).
gcctgttcctgcttcgata

SEQ ID NO: 42997 - DNA, 19 bp, Homo sapiens
  siRNA target sequence for TRIM33 (NM_015906.2,3040-3058).
gttcctgcttcgataccaa

SEQ ID NO: 42998 - DNA, 19 bp, Homo sapiens
  siRNA target sequence for TRIM33 (NM_015906.2,3046-3064).
gcttcgataccaaactact

SEQ ID NO: 42999 - DNA, 19 bp, Homo sapiens
  siRNA target sequence for TRIM33 (NM_015906.2,3047-3065).
cttcgataccaaactacta

SEQ ID NO: 43000 - DNA, 19 bp, Homo sapiens
  siRNA target sequence for TRIM33 (NM_015906.2,3050-3068).
cgataccaaactactataa

SEQ ID NO: 43001 - DNA, 19 bp, Homo sapiens
  siRNA target sequence for TRIM33 (NM_015906.2,3051-3069).
gataccaaactactataaa

SEQ ID NO: 43002 - DNA, 19 bp, Homo sapiens
  siRNA target sequence for TRIM33 (NM_015906.2,3088-3106).
gatttatccaccgtgaaaa

SEQ ID NO: 43003 - DNA, 19 bp, Homo sapiens
  siRNA target sequence for TRIM33 (NM_015906.2,3138-3156).
ccaaatcccggatgacttt

SEQ ID NO: 43004 - DNA, 19 bp, Homo sapiens
  siRNA target sequence for TRIM33 (NM_015906.2,3160-3178).
gccgatgtccgtttgatct

SEQ ID NO: 43005 - DNA, 19 bp, Homo sapiens
  siRNA target sequence for TRIM33 (NM_015906.2,3161-3179).
ccgatgtccgtttgatctt

SEQ ID NO: 43006 - DNA, 19 bp, Homo sapiens
  siRNA target sequence for TRIM33 (NM_015906.2,3163-3181).
gatgtccgtttgatcttca

SEQ ID NO: 43007 - DNA, 19 bp, Homo sapiens
  siRNA target sequence for TRIM33 (NM_015906.2,3230-3248).
cagacacacaagagattaa

SEQ ID NO: 43008 - DNA, 19 bp, Homo sapiens
  siRNA target sequence for TRIM33 (NM_015906.2,3232-3250).
gacacacaagagattaatt

SEQ ID NO: 43009 - DNA, 19 bp, Homo sapiens
  siRNA target sequence for TRIM33 (NM_015906.2,3236-3254).
cacaagagattaatttgaa

SEQ ID NO: 43010 - DNA, 19 bp, Homo sapiens
  siRNA target sequence for TRIM33 (NM_015906.2,3293-3311).
cattgtactttgaagataa

SEQ ID NO: 43011 - DNA, 19 bp, Homo sapiens
  siRNA target sequence for TRIM33 (NM_015906.2,3342-3360).
cgcacctttgccagagttt

SEQ ID NO: 43012 - DNA, 19 bp, Homo sapiens
  siRNA target sequence for TRIM33 (NM_015906.2,3423-3441).
cagaaaacgcctaaagtca

SEQ ID NO: 43013 - DNA, 19 bp, Homo sapiens
  siRNA target sequence for TRPV6 (NM_018646.2,363-381).
ccttctagctgccaaagat

SEQ ID NO: 43014 - DNA, 19 bp, Homo sapiens
  siRNA target sequence for TRPV6 (NM_018646.2,399-417).
gaacaagttgctcaagtat

SEQ ID NO: 43015 - DNA, 19 bp, Homo sapiens
  siRNA target sequence for TRPV6 (NM_018646.2,453-471).
ggaaacagcgctacacata

SEQ ID NO: 43016 - DNA, 19 bp, Homo sapiens
  siRNA target sequence for TRPV6 (NM_018646.2,1205-1223).
gcatgctgggtgccatata

SEQ ID NO: 43017 - DNA, 19 bp, Homo sapiens
  siRNA target sequence for TRPV6 (NM_018646.2,1206-1224).
catgctgggtgccatatat

SEQ ID NO: 43018 - DNA, 19 bp, Homo sapiens
  siRNA target sequence for TRPV6 (NM_018646.2,1393-1411).
gtcattggggctatcatca

SEQ ID NO: 43019 - DNA, 19 bp, Homo sapiens
  siRNA target sequence for TRPV6 (NM_018646.2,1446-1464).
gggggtcactcgcttcttt

SEQ ID NO: 43020 - DNA, 19 bp, Homo sapiens
  siRNA target sequence for TRPV6 (NM_018646.2,1601-1619).
ggtgcaacgtcatgtactt

SEQ ID NO: 43021 - DNA, 19 bp, Homo sapiens
  siRNA target sequence for TRPV6 (NM_018646.2,1733-1751).
cagccttctatatcatctt

SEQ ID NO: 43022 - DNA, 19 bp, Homo sapiens
  siRNA target sequence for TRPV6 (NM_018646.2,2330-2348).
gagacctgcgtgggataat

SEQ ID NO: 43023 - DNA, 19 bp, Homo sapiens
  siRNA target sequence for TRPV6 (NM_018646.2,2332-2350).
gacctgcgtgggataatca

SEQ ID NO: 43024 - DNA, 19 bp, Homo sapiens
  siRNA target sequence for TSG101 (NM_006292.2,160-178).
gtgtccaagtacaaataca

SEQ ID NO: 43025 - DNA, 19 bp, Homo sapiens
  siRNA target sequence for TSG101 (NM_006292.2,183-201).
cctaactgtacgtgaaact

SEQ ID NO: 43026 - DNA, 19 bp, Homo sapiens
  siRNA target sequence for TSG101 (NM_006292.2,202-220).
gtcaatgttattactctat

SEQ ID NO: 43027 - DNA, 19 bp, Homo sapiens
  siRNA target sequence for TSG101 (NM_006292.2,215-233).
ctctatacaaagatctcaa

SEQ ID NO: 43028 - DNA, 19 bp, Homo sapiens
  siRNA target sequence for TSG101 (NM_006292.2,307-325).
gtgccttatagaggtaata

SEQ ID NO: 43029 - DNA, 19 bp, Homo sapiens
  siRNA target sequence for TSG101 (NM_006292.2,309-327).
gccttatagaggtaataca

SEQ ID NO: 43030 - DNA, 19 bp, Homo sapiens
  siRNA target sequence for TSG101 (NM_006292.2,310-328).
ccttatagaggtaatacat

SEQ ID NO: 43031 - DNA, 19 bp, Homo sapiens
  siRNA target sequence for TSG101 (NM_006292.2,355-373).
ctggacacatacccatata

SEQ ID NO: 43032 - DNA, 19 bp, Homo sapiens
  siRNA target sequence for TSG101 (NM_006292.2,357-375).
ggacacatacccatataat

SEQ ID NO: 43033 - DNA, 19 bp, Homo sapiens
  siRNA target sequence for TSG101 (NM_006292.2,391-409).
gttaagcctactagttcaa

SEQ ID NO: 43034 - DNA, 19 bp, Homo sapiens
  siRNA target sequence for TSG101 (NM_006292.2,396-414).
gcctactagttcaatgact

SEQ ID NO: 43035 - DNA, 19 bp, Homo sapiens
  siRNA target sequence for TSG101 (NM_006292.2,397-415).
cctactagttcaatgacta

SEQ ID NO: 43036 - DNA, 19 bp, Homo sapiens
  siRNA target sequence for TSG101 (NM_006292.2,398-416).
ctactagttcaatgactat

SEQ ID NO: 43037 - DNA, 19 bp, Homo sapiens
  siRNA target sequence for TSG101 (NM_006292.2,401-419).
ctagttcaatgactattaa

SEQ ID NO: 43038 - DNA, 19 bp, Homo sapiens
  siRNA target sequence for TSG101 (NM_006292.2,425-443).
gaaagcatgttgatgcaaa

SEQ ID NO: 43039 - DNA, 19 bp, Homo sapiens
  siRNA target sequence for TSG101 (NM_006292.2,446-464).
ggaagatatatcttcctta

SEQ ID NO: 43040 - DNA, 19 bp, Homo sapiens
  siRNA target sequence for TSG101 (NM_006292.2,450-468).
gatatatcttccttatcta

SEQ ID NO: 43041 - DNA, 19 bp, Homo sapiens
  siRNA target sequence for TSG101 (NM_006292.2,503-521).
ggcttattcaggtcatgat

SEQ ID NO: 43042 - DNA, 19 bp, Homo sapiens
  siRNA target sequence for TSG101 (NM_006292.2,504-522).
gcttattcaggtcatgatt

SEQ ID NO: 43043 - DNA, 19 bp, Homo sapiens
  siRNA target sequence for TSG101 (NM_006292.2,513-531).
ggtcatgattgtggtattt

SEQ ID NO: 43044 - DNA, 19 bp, Homo sapiens
  siRNA target sequence for TSG101 (NM_006292.2,547-565).
gtcttctctcgtcctattt

SEQ ID NO: 43045 - DNA, 19 bp, Homo sapiens
  siRNA target sequence for TSG101 (NM_006292.2,819-837).
ctctgcggtcagtgacaaa

SEQ ID NO: 43046 - DNA, 19 bp, Homo sapiens
  siRNA target sequence for TSG101 (NM_006292.2,821-839).
ctgcggtcagtgacaaact

SEQ ID NO: 43047 - DNA, 19 bp, Homo sapiens
  siRNA target sequence for TSG101 (NM_006292.2,823-841).
gcggtcagtgacaaactga

SEQ ID NO: 43048 - DNA, 19 bp, Homo sapiens
  siRNA target sequence for TSG101 (NM_006292.2,942-960).
gatggttacccgtttagat

SEQ ID NO: 43049 - DNA, 19 bp, Homo sapiens
  siRNA target sequence for TSG101 (NM_006292.2,945-963).
ggttacccgtttagatcaa

SEQ ID NO: 43050 - DNA, 19 bp, Homo sapiens
  siRNA target sequence for TSG101 (NM_006292.2,964-982).
gaagtagccgaggttgata

SEQ ID NO: 43051 - DNA, 19 bp, Homo sapiens
  siRNA target sequence for TSG101 (NM_006292.2,967-985).
gtagccgaggttgataaaa

SEQ ID NO: 43052 - DNA, 19 bp, Homo sapiens
  siRNA target sequence for TSG101 (NM_006292.2,1052-1070).
ctgaaaacaatgatatcga

SEQ ID NO: 43053 - DNA, 19 bp, Homo sapiens
  siRNA target sequence for TSG101 (NM_006292.2,1063-1081).
gatatcgatgaagttatca

SEQ ID NO: 43054 - DNA, 19 bp, Homo sapiens
  siRNA target sequence for TSG101 (NM_006292.2,1085-1103).
ccacagctcccttatacaa

SEQ ID NO: 43055 - DNA, 19 bp, Homo sapiens
  siRNA target sequence for TSG101 (NM_006292.2,1086-1104).
cacagctcccttatacaaa

SEQ ID NO: 43056 - DNA, 19 bp, Homo sapiens
  siRNA target sequence for TSG101 (NM_006292.2,1088-1106).
cagctcccttatacaaaca

SEQ ID NO: 43057 - DNA, 19 bp, Homo sapiens
  siRNA target sequence for TSG101 (NM_006292.2,1090-1108).
gctcccttatacaaacaga

SEQ ID NO: 43058 - DNA, 19 bp, Homo sapiens
  siRNA target sequence for TSG101 (NM_006292.2,1091-1109).
ctcccttatacaaacagat

SEQ ID NO: 43059 - DNA, 19 bp, Homo sapiens
  siRNA target sequence for TSG101 (NM_006292.2,1217-1235).
gtcttctgtcccgtaaaca

SEQ ID NO: 43060 - DNA, 19 bp, Homo sapiens
  siRNA target sequence for TSG101 (NM_006292.2,1242-1260).
gctgagggcactaatgcaa

SEQ ID NO: 43061 - DNA, 19 bp, Homo sapiens
  siRNA target sequence for TSG101 (NM_006292.2,1243-1261).
ctgagggcactaatgcaaa

SEQ ID NO: 43062 - DNA, 19 bp, Homo sapiens
  siRNA target sequence for TSG101 (NM_006292.2,1245-1263).
gagggcactaatgcaaaaa

SEQ ID NO: 43063 - DNA, 19 bp, Homo sapiens
  siRNA target sequence for TSN (NM_004622.2,317-335).
gtacagagtttagaacaaa

SEQ ID NO: 43064 - DNA, 19 bp, Homo sapiens
  siRNA target sequence for TSN (NM_004622.2,412-430).
gaaagctcgagaacatttt

SEQ ID NO: 43065 - DNA, 19 bp, Homo sapiens
  siRNA target sequence for TSN (NM_004622.2,422-440).
gaacattttggtacagtaa

SEQ ID NO: 43066 - DNA, 19 bp, Homo sapiens
  siRNA target sequence for TSN (NM_004622.2,500-518).
gagcactggaggtttgtgt

SEQ ID NO: 43067 - DNA, 19 bp, Homo sapiens
  siRNA target sequence for TSN (NM_004622.2,543-561).
catttgttgtgtatttgga

SEQ ID NO: 43068 - DNA, 19 bp, Homo sapiens
  siRNA target sequence for TSN (NM_004622.2,577-595).
gactcgagaagcagttaca

SEQ ID NO: 43069 - DNA, 19 bp, Homo sapiens
  siRNA target sequence for TSN (NM_004622.2,630-648).
gatttcatctggatgtaga

SEQ ID NO: 43070 - DNA, 19 bp, Homo sapiens
  siRNA target sequence for TSN (NM_004622.2,635-653).
catctggatgtagaagatt

SEQ ID NO: 43071 - DNA, 19 bp, Homo sapiens
  siRNA target sequence for TSN (NM_004622.2,779-797).
cgccttctcaacctgaaaa

SEQ ID NO: 43072 - DNA, 19 bp, Homo sapiens
  siRNA target sequence for TSN (NM_004622.2,814-832).
gcgctacgacggattgaaa

SEQ ID NO: 43073 - DNA, 19 bp, Homo sapiens
  siRNA target sequence for TSN (NM_004622.2,815-833).
cgctacgacggattgaaat

SEQ ID NO: 43074 - DNA, 19 bp, Homo sapiens
  siRNA target sequence for TSN (NM_004622.2,816-834).
gctacgacggattgaaata

SEQ ID NO: 43075 - DNA, 19 bp, Homo sapiens
  siRNA target sequence for TSN (NM_004622.2,817-835).
ctacgacggattgaaatat

SEQ ID NO: 43076 - DNA, 19 bp, Homo sapiens
  siRNA target sequence for TSN (NM_004622.2,895-913).
gacggcagcagcttgtgtt

SEQ ID NO: 43077 - DNA, 19 bp, Homo sapiens
  siRNA target sequence for TSNAX (NM_005999.2,206-224).
caatttcccacataaccaa

SEQ ID NO: 43078 - DNA, 19 bp, Homo sapiens
  siRNA target sequence for TSNAX (NM_005999.2,212-230).
cccacataaccaaagaaga

SEQ ID NO: 43079 - DNA, 19 bp, Homo sapiens
  siRNA target sequence for TSNAX (NM_005999.2,229-247).
gagaagggaaggatgttaa

SEQ ID NO: 43080 - DNA, 19 bp, Homo sapiens
  siRNA target sequence for TSNAX (NM_005999.2,234-252).
gggaaggatgttaattcat

SEQ ID NO: 43081 - DNA, 19 bp, Homo sapiens
  siRNA target sequence for TSNAX (NM_005999.2,250-268).
catcttcacccgtgatgtt

SEQ ID NO: 43082 - DNA, 19 bp, Homo sapiens
  siRNA target sequence for TSNAX (NM_005999.2,260-278).
cgtgatgttggcctttaaa

SEQ ID NO: 43083 - DNA, 19 bp, Homo sapiens
  siRNA target sequence for TSNAX (NM_005999.2,261-279).
gtgatgttggcctttaaat

SEQ ID NO: 43084 - DNA, 19 bp, Homo sapiens
  siRNA target sequence for TSNAX (NM_005999.2,263-281).
gatgttggcctttaaatca

SEQ ID NO: 43085 - DNA, 19 bp, Homo sapiens
  siRNA target sequence for TSNAX (NM_005999.2,320-338).
gagacttgtgaaacttagt

SEQ ID NO: 43086 - DNA, 19 bp, Homo sapiens
  siRNA target sequence for TSNAX (NM_005999.2,329-347).
gaaacttagtcgggatata

SEQ ID NO: 43087 - DNA, 19 bp, Homo sapiens
  siRNA target sequence for TSNAX (NM_005999.2,487-505).
gggaagatatgcatcagtt

SEQ ID NO: 43088 - DNA, 19 bp, Homo sapiens
  siRNA target sequence for TSNAX (NM_005999.2,503-521).
gttccatcgagccattact

SEQ ID NO: 43089 - DNA, 19 bp, Homo sapiens
  siRNA target sequence for TSNAX (NM_005999.2,506-524).
ccatcgagccattactaca

SEQ ID NO: 43090 - DNA, 19 bp, Homo sapiens
  siRNA target sequence for TSNAX (NM_005999.2,523-541).
caggactacaggaatatgt

SEQ ID NO: 43091 - DNA, 19 bp, Homo sapiens
  siRNA target sequence for TSNAX (NM_005999.2,553-571).
cttttcaacacttcatcaa

SEQ ID NO: 43092 - DNA, 19 bp, Homo sapiens
  siRNA target sequence for TSNAX (NM_005999.2,566-584).
catcaaaacacgatcatta

SEQ ID NO: 43093 - DNA, 19 bp, Homo sapiens
  siRNA target sequence for TSNAX (NM_005999.2,569-587).
caaaacacgatcattaatt

SEQ ID NO: 43094 - DNA, 19 bp, Homo sapiens
  siRNA target sequence for TSNAX (NM_005999.2,574-592).
cacgatcattaattagtat

SEQ ID NO: 43095 - DNA, 19 bp, Homo sapiens
  siRNA target sequence for TSNAX (NM_005999.2,661-679).
ctgatgcacaggataagca

SEQ ID NO: 43096 - DNA, 19 bp, Homo sapiens
  siRNA target sequence for TSNAX (NM_005999.2,700-718).
gagtcacacctgtcgatta

SEQ ID NO: 43097 - DNA, 19 bp, Homo sapiens
  siRNA target sequence for TSNAX (NM_005999.2,704-722).
cacacctgtcgattacctt

SEQ ID NO: 43098 - DNA, 19 bp, Homo sapiens
  siRNA target sequence for TSNAX (NM_005999.2,723-741).
ctgggagtggctgacttaa

SEQ ID NO: 43099 - DNA, 19 bp, Homo sapiens
  siRNA target sequence for TSNAX (NM_005999.2,725-743).
gggagtggctgacttaact

SEQ ID NO: 43100 - DNA, 19 bp, Homo sapiens
  siRNA target sequence for TSNAX (NM_005999.2,755-773).
gcggatgtgtattaacagt

SEQ ID NO: 43101 - DNA, 19 bp, Homo sapiens
  siRNA target sequence for TSNAX (NM_005999.2,788-806).
cattgataccccctttgaa

SEQ ID NO: 43102 - DNA, 19 bp, Homo sapiens
  siRNA target sequence for TSNAX (NM_005999.2,815-833).
gtttttacgtcaggtttat

SEQ ID NO: 43103 - DNA, 19 bp, Homo sapiens
  siRNA target sequence for TSNAX (NM_005999.2,827-845).
ggtttatgatgggttttca

SEQ ID NO: 43104 - DNA, 19 bp, Homo sapiens
  siRNA target sequence for TSNAX (NM_005999.2,828-846).
gtttatgatgggttttcat

SEQ ID NO: 43105 - DNA, 19 bp, Homo sapiens
  siRNA target sequence for TSNAX (NM_005999.2,861-879).
ggaccttacgaggtttcta

SEQ ID NO: 43106 - DNA, 19 bp, Homo sapiens
  siRNA target sequence for TSNAX (NM_005999.2,864-882).
ccttacgaggtttctaaga

SEQ ID NO: 43107 - DNA, 19 bp, Homo sapiens
  siRNA target sequence for TSNAX (NM_005999.2,877-895).
ctaagaagctgtatacctt

SEQ ID NO: 43108 - DNA, 19 bp, Homo sapiens
  siRNA target sequence for TSNAX (NM_005999.2,884-902).
gctgtataccttgaaacaa

SEQ ID NO: 43109 - DNA, 19 bp, Homo sapiens
  siRNA target sequence for TSNAX (NM_005999.2,909-927).
gccaaagtggagaatgctt

SEQ ID NO: 43110 - DNA, 19 bp, Homo sapiens
  siRNA target sequence for TSNAX (NM_005999.2,975-993).
gcagatgtgttttcagtta

SEQ ID NO: 43111 - DNA, 19 bp, Homo sapiens
  siRNA target sequence for TSPYL3 (NM_178465.1,194-212).
ctactccgagcctggaaaa

SEQ ID NO: 43112 - DNA, 19 bp, Homo sapiens
  siRNA target sequence for TSPYL3 (NM_178465.1,417-435).
gaaccttggtgccctaatt

SEQ ID NO: 43113 - DNA, 19 bp, Homo sapiens
  siRNA target sequence for TSPYL3 (NM_178465.1,547-565).
gcccgtaggagcttcatca

SEQ ID NO: 43114 - DNA, 19 bp, Homo sapiens
  siRNA target sequence for TSPYL3 (NM_178465.1,548-566).
cccgtaggagcttcatcat

SEQ ID NO: 43115 - DNA, 19 bp, Homo sapiens
  siRNA target sequence for TSPYL3 (NM_178465.1,627-645).
gatcagccctcgagatgaa

SEQ ID NO: 43116 - DNA, 19 bp, Homo sapiens
  siRNA target sequence for TSPYL3 (NM_178465.1,632-650).
gccctcgagatgaagacat

SEQ ID NO: 43117 - DNA, 19 bp, Homo sapiens
  siRNA target sequence for TSPYL4 (NM_021648.3,179-197).
cacatgcagcgcagaagtt

SEQ ID NO: 43118 - DNA, 19 bp, Homo sapiens
  siRNA target sequence for TSPYL4 (NM_021648.3,184-202).
gcagcgcagaagtttcatt

SEQ ID NO: 43119 - DNA, 19 bp, Homo sapiens
  siRNA target sequence for TSPYL4 (NM_021648.3,185-203).
cagcgcagaagtttcatta

SEQ ID NO: 43120 - DNA, 19 bp, Homo sapiens
  siRNA target sequence for TSPYL4 (NM_021648.3,189-207).
gcagaagtttcattatcca

SEQ ID NO: 43121 - DNA, 19 bp, Homo sapiens
  siRNA target sequence for TSPYL4 (NM_021648.3,389-407).
gaggggcttgtcaaggaat

SEQ ID NO: 43122 - DNA, 19 bp, Homo sapiens
  siRNA target sequence for TTF2 (NM_003594.3,39-57).
ccagagcacgggactttct

SEQ ID NO: 43123 - DNA, 19 bp, Homo sapiens
  siRNA target sequence for TTF2 (NM_003594.3,48-66).
gggactttctgctttctta

SEQ ID NO: 43124 - DNA, 19 bp, Homo sapiens
  siRNA target sequence for TTF2 (NM_003594.3,49-67).
ggactttctgctttcttaa

SEQ ID NO: 43125 - DNA, 19 bp, Homo sapiens
  siRNA target sequence for TTF2 (NM_003594.3,77-95).
ccgcgatggcccgaataaa

SEQ ID NO: 43126 - DNA, 19 bp, Homo sapiens
  siRNA target sequence for TTF2 (NM_003594.3,80-98).
cgatggcccgaataaagga

SEQ ID NO: 43127 - DNA, 19 bp, Homo sapiens
  siRNA target sequence for TTF2 (NM_003594.3,81-99).
gatggcccgaataaaggaa

SEQ ID NO: 43128 - DNA, 19 bp, Homo sapiens
  siRNA target sequence for TTF2 (NM_003594.3,245-263).
cttccgatgcattagaagt

SEQ ID NO: 43129 - DNA, 19 bp, Homo sapiens
  siRNA target sequence for TTF2 (NM_003594.3,321-339).
gaacattctgtatccaata

SEQ ID NO: 43130 - DNA, 19 bp, Homo sapiens
  siRNA target sequence for TTF2 (NM_003594.3,352-370).
catctgagacatttcatca

SEQ ID NO: 43131 - DNA, 19 bp, Homo sapiens
  siRNA target sequence for TTF2 (NM_003594.3,612-630).
gagggagcagagattcagt

SEQ ID NO: 43132 - DNA, 19 bp, Homo sapiens
  siRNA target sequence for TTF2 (NM_003594.3,641-659).
gactggaggcacacacaaa

SEQ ID NO: 43133 - DNA, 19 bp, Homo sapiens
  siRNA target sequence for TTF2 (NM_003594.3,682-700).
ctcaacagtgccaaggtaa

SEQ ID NO: 43134 - DNA, 19 bp, Homo sapiens
  siRNA target sequence for TTF2 (NM_003594.3,816-834).
gttcacagtcacaactcaa

SEQ ID NO: 43135 - DNA, 19 bp, Homo sapiens
  siRNA target sequence for TTF2 (NM_003594.3,823-841).
gtcacaactcaataagcaa

SEQ ID NO: 43136 - DNA, 19 bp, Homo sapiens
  siRNA target sequence for TTF2 (NM_003594.3,877-895).
cgaactgggaggctaaaga

SEQ ID NO: 43137 - DNA, 19 bp, Homo sapiens
  siRNA target sequence for TTF2 (NM_003594.3,883-901).
gggaggctaaagaaacaaa

SEQ ID NO: 43138 - DNA, 19 bp, Homo sapiens
  siRNA target sequence for TTF2 (NM_003594.3,1149-1167).
gacttagagacgaaggaaa

SEQ ID NO: 43139 - DNA, 19 bp, Homo sapiens
  siRNA target sequence for TTF2 (NM_003594.3,1259-1277).
gcgtgtctaccttacaaca

SEQ ID NO: 43140 - DNA, 19 bp, Homo sapiens
  siRNA target sequence for TTF2 (NM_003594.3,1332-1350).
gacaagggtcagaagttga

SEQ ID NO: 43141 - DNA, 19 bp, Homo sapiens
  siRNA target sequence for TTF2 (NM_003594.3,1337-1355).
gggtcagaagttgatcaaa

SEQ ID NO: 43142 - DNA, 19 bp, Homo sapiens
  siRNA target sequence for TTF2 (NM_003594.3,1421-1439).
gaagagtaacagtcaagta

SEQ ID NO: 43143 - DNA, 19 bp, Homo sapiens
  siRNA target sequence for TTF2 (NM_003594.3,1448-1466).
gagtcacttcaccaaaact

SEQ ID NO: 43144 - DNA, 19 bp, Homo sapiens
  siRNA target sequence for TTF2 (NM_003594.3,1530-1548).
ggttctctagaactaaagt

SEQ ID NO: 43145 - DNA, 19 bp, Homo sapiens
  siRNA target sequence for TTF2 (NM_003594.3,1585-1603).
gctatcgaggccatacaaa

SEQ ID NO: 43146 - DNA, 19 bp, Homo sapiens
  siRNA target sequence for TTF2 (NM_003594.3,1594-1612).
gccatacaaaccaagatca

SEQ ID NO: 43147 - DNA, 19 bp, Homo sapiens
  siRNA target sequence for TTF2 (NM_003594.3,1617-1635).
catgcagtgtggaaaatca

SEQ ID NO: 43148 - DNA, 19 bp, Homo sapiens
  siRNA target sequence for TTF2 (NM_003594.3,1745-1763).
gcaggcattggcttggtta

SEQ ID NO: 43149 - DNA, 19 bp, Homo sapiens
  siRNA target sequence for TTF2 (NM_003594.3,1748-1766).
ggcattggcttggttacta

SEQ ID NO: 43150 - DNA, 19 bp, Homo sapiens
  siRNA target sequence for TTF2 (NM_003594.3,1760-1778).
gttactatggcgagaaagt

SEQ ID NO: 43151 - DNA, 19 bp, Homo sapiens
  siRNA target sequence for TTF2 (NM_003594.3,1904-1922).
gacgtggctctccaaagat

SEQ ID NO: 43152 - DNA, 19 bp, Homo sapiens
  siRNA target sequence for TTF2 (NM_003594.3,1923-1941).
gactcttgtgactttactt

SEQ ID NO: 43153 - DNA, 19 bp, Homo sapiens
  siRNA target sequence for TTF2 (NM_003594.3,1939-1957).
cttcccatggaacactaat

SEQ ID NO: 43154 - DNA, 19 bp, Homo sapiens
  siRNA target sequence for TTF2 (NM_003594.3,1942-1960).
cccatggaacactaatcat

SEQ ID NO: 43155 - DNA, 19 bp, Homo sapiens
  siRNA target sequence for TTF2 (NM_003594.3,1968-1986).
gcctccctgatccatcatt

SEQ ID NO: 43156 - DNA, 19 bp, Homo sapiens
  siRNA target sequence for TTF2 (NM_003594.3,1972-1990).
ccctgatccatcattggaa

SEQ ID NO: 43157 - DNA, 19 bp, Homo sapiens
  siRNA target sequence for TTF2 (NM_003594.3,1973-1991).
cctgatccatcattggaaa

SEQ ID NO: 43158 - DNA, 19 bp, Homo sapiens
  siRNA target sequence for TTF2 (NM_003594.3,1974-1992).
ctgatccatcattggaaaa

SEQ ID NO: 43159 - DNA, 19 bp, Homo sapiens
  siRNA target sequence for TTF2 (NM_003594.3,2018-2036).
caacaaactaagagtctat

SEQ ID NO: 43160 - DNA, 19 bp, Homo sapiens
  siRNA target sequence for TTF2 (NM_003594.3,2067-2085).
gccagagtcctctctacat

SEQ ID NO: 43161 - DNA, 19 bp, Homo sapiens
  siRNA target sequence for TTF2 (NM_003594.3,2073-2091).
gtcctctctacatatgaca

SEQ ID NO: 43162 - DNA, 19 bp, Homo sapiens
  siRNA target sequence for TTF2 (NM_003594.3,2090-2108).
catcgtgatcactacctat

SEQ ID NO: 43163 - DNA, 19 bp, Homo sapiens
  siRNA target sequence for TTF2 (NM_003594.3,2188-2206).
caacacctttgcttcgaat

SEQ ID NO: 43164 - DNA, 19 bp, Homo sapiens
  siRNA target sequence for TTF2 (NM_003594.3,2208-2226).
gcctgggctcgaatcatat

SEQ ID NO: 43165 - DNA, 19 bp, Homo sapiens
  siRNA target sequence for TTF2 (NM_003594.3,2209-2227).
cctgggctcgaatcatatt

SEQ ID NO: 43166 - DNA, 19 bp, Homo sapiens
  siRNA target sequence for TTF2 (NM_003594.3,2270-2288).
catagctgtgtgtaagcta

SEQ ID NO: 43167 - DNA, 19 bp, Homo sapiens
  siRNA target sequence for TTF2 (NM_003594.3,2312-2330).
cactggaacccccattcaa

SEQ ID NO: 43168 - DNA, 19 bp, Homo sapiens
  siRNA target sequence for TTF2 (NM_003594.3,2316-2334).
ggaacccccattcaaaaca

SEQ ID NO: 43169 - DNA, 19 bp, Homo sapiens
  siRNA target sequence for TTF2 (NM_003594.3,2317-2335).
gaacccccattcaaaacaa

SEQ ID NO: 43170 - DNA, 19 bp, Homo sapiens
  siRNA target sequence for TTF2 (NM_003594.3,2320-2338).
cccccattcaaaacaactt

SEQ ID NO: 43171 - DNA, 19 bp, Homo sapiens
  siRNA target sequence for TTF2 (NM_003594.3,2321-2339).
ccccattcaaaacaactta

SEQ ID NO: 43172 - DNA, 19 bp, Homo sapiens
  siRNA target sequence for TTF2 (NM_003594.3,2322-2340).
cccattcaaaacaacttat

SEQ ID NO: 43173 - DNA, 19 bp, Homo sapiens
  siRNA target sequence for TTF2 (NM_003594.3,2323-2341).
ccattcaaaacaacttatt

SEQ ID NO: 43174 - DNA, 19 bp, Homo sapiens
  siRNA target sequence for TTF2 (NM_003594.3,2348-2366).
gtattcgctgctgaagttt

SEQ ID NO: 43175 - DNA, 19 bp, Homo sapiens
  siRNA target sequence for TTF2 (NM_003594.3,2369-2387).
ccgttgctctccatttgat

SEQ ID NO: 43176 - DNA, 19 bp, Homo sapiens
  siRNA target sequence for TTF2 (NM_003594.3,2380-2398).
catttgatgagttcaatct

SEQ ID NO: 43177 - DNA, 19 bp, Homo sapiens
  siRNA target sequence for TTF2 (NM_003594.3,2402-2420).
gaggagtcaggttgacaat

SEQ ID NO: 43178 - DNA, 19 bp, Homo sapiens
  siRNA target sequence for TTF2 (NM_003594.3,2412-2430).
gttgacaatggctcaaaga

SEQ ID NO: 43179 - DNA, 19 bp, Homo sapiens
  siRNA target sequence for TTF2 (NM_003594.3,2442-2460).
cggttaagtattttaacca

SEQ ID NO: 43180 - DNA, 19 bp, Homo sapiens
  siRNA target sequence for TTF2 (NM_003594.3,2506-2524).
gcagacctttggtgatact

SEQ ID NO: 43181 - DNA, 19 bp, Homo sapiens
  siRNA target sequence for TTF2 (NM_003594.3,2526-2544).
ccccagcgtaaatttcagt

SEQ ID NO: 43182 - DNA, 19 bp, Homo sapiens
  siRNA target sequence for TTF2 (NM_003594.3,2543-2561).
gttgcaccatttaaagctt

SEQ ID NO: 43183 - DNA, 19 bp, Homo sapiens
  siRNA target sequence for TTF2 (NM_003594.3,2608-2626).
ggtcagctctgcaatccta

SEQ ID NO: 43184 - DNA, 19 bp, Homo sapiens
  siRNA target sequence for TTF2 (NM_003594.3,2609-2627).
gtcagctctgcaatcctat

SEQ ID NO: 43185 - DNA, 19 bp, Homo sapiens
  siRNA target sequence for TTF2 (NM_003594.3,2752-2770).
ccagcaccgtccacatact

SEQ ID NO: 43186 - DNA, 19 bp, Homo sapiens
  siRNA target sequence for TTF2 (NM_003594.3,2792-2810).
ccagtgttgctgtcatctt

SEQ ID NO: 43187 - DNA, 19 bp, Homo sapiens
  siRNA target sequence for TTF2 (NM_003594.3,2940-2958).
cttaacggcaccttcttca

SEQ ID NO: 43188 - DNA, 19 bp, Homo sapiens
  siRNA target sequence for TTF2 (NM_003594.3,2981-2999).
gcgagagagcaccaagatt

SEQ ID NO: 43189 - DNA, 19 bp, Homo sapiens
  siRNA target sequence for TTF2 (NM_003594.3,3013-3031).
cagaattggaggcaattca

SEQ ID NO: 43190 - DNA, 19 bp, Homo sapiens
  siRNA target sequence for TTF2 (NM_003594.3,3110-3128).
gaagcatggactgacttat

SEQ ID NO: 43191 - DNA, 19 bp, Homo sapiens
  siRNA target sequence for TTF2 (NM_003594.3,3134-3152).
catcgatggctctgtcaat

SEQ ID NO: 43192 - DNA, 19 bp, Homo sapiens
  siRNA target sequence for TTF2 (NM_003594.3,3193-3211).
ccagaggccctcaggtaat

SEQ ID NO: 43193 - DNA, 19 bp, Homo sapiens
  siRNA target sequence for TTF2 (NM_003594.3,3198-3216).
ggccctcaggtaatgctaa

SEQ ID NO: 43194 - DNA, 19 bp, Homo sapiens
  siRNA target sequence for TTF2 (NM_003594.3,3199-3217).
gccctcaggtaatgctaat

SEQ ID NO: 43195 - DNA, 19 bp, Homo sapiens
  siRNA target sequence for TTF2 (NM_003594.3,3201-3219).
cctcaggtaatgctaatct

SEQ ID NO: 43196 - DNA, 19 bp, Homo sapiens
  siRNA target sequence for TTF2 (NM_003594.3,3232-3250).
gaggtgttggtctaaacct

SEQ ID NO: 43197 - DNA, 19 bp, Homo sapiens
  siRNA target sequence for TTF2 (NM_003594.3,3279-3297).
gacatgcactggaatccat

SEQ ID NO: 43198 - DNA, 19 bp, Homo sapiens
  siRNA target sequence for TTF2 (NM_003594.3,3309-3327).
caagcttgtgaccgaattt

SEQ ID NO: 43199 - DNA, 19 bp, Homo sapiens
  siRNA target sequence for TTF2 (NM_003594.3,3419-3437).
gaaagatttggccaaacaa

SEQ ID NO: 43200 - DNA, 19 bp, Homo sapiens
  siRNA target sequence for TTF2 (NM_003594.3,3428-3446).
ggccaaacaagttctatca

SEQ ID NO: 43201 - DNA, 19 bp, Homo sapiens
  siRNA target sequence for TWIST2 (NM_057179.1,501-519).
gacgagatggacaataaga

SEQ ID NO: 43202 - DNA, 19 bp, Homo sapiens
  siRNA target sequence for TWIST2 (NM_057179.1,504-522).
gagatggacaataagatga

SEQ ID NO: 43203 - DNA, 19 bp, Homo sapiens
  siRNA target sequence for UBE2V1 (NM_021988.3,449-467).
gaacctagaaaatttcact

SEQ ID NO: 43204 - DNA, 19 bp, Homo sapiens
  siRNA target sequence for UBTF (NM_014233.1,387-405).
gaagttccgtacattgaca

SEQ ID NO: 43205 - DNA, 19 bp, Homo sapiens
  siRNA target sequence for UBTF (NM_014233.1,417-435).
cgatgctcaggaacatgtt

SEQ ID NO: 43206 - DNA, 19 bp, Homo sapiens
  siRNA target sequence for UBTF (NM_014233.1,418-436).
gatgctcaggaacatgtta

SEQ ID NO: 43207 - DNA, 19 bp, Homo sapiens
  siRNA target sequence for UBTF (NM_014233.1,421-439).
gctcaggaacatgttaaaa

SEQ ID NO: 43208 - DNA, 19 bp, Homo sapiens
  siRNA target sequence for UBTF (NM_014233.1,568-586).
gacctaaccaagattctgt

SEQ ID NO: 43209 - DNA, 19 bp, Homo sapiens
  siRNA target sequence for UBTF (NM_014233.1,636-654).
ggacttccagagagagaaa

SEQ ID NO: 43210 - DNA, 19 bp, Homo sapiens
  siRNA target sequence for UBTF (NM_014233.1,918-936).
ggagatcatgagagactat

SEQ ID NO: 43211 - DNA, 19 bp, Homo sapiens
  siRNA target sequence for UBTF (NM_014233.1,2064-2082).
ccaggaccgtgcagcatat

SEQ ID NO: 43212 - DNA, 19 bp, Homo sapiens
  siRNA target sequence for UBTF (NM_014233.1,2067-2085).
ggaccgtgcagcatataaa

SEQ ID NO: 43213 - DNA, 19 bp, Homo sapiens
  siRNA target sequence for UBTF (NM_014233.1,2071-2089).
cgtgcagcatataaagagt

SEQ ID NO: 43214 - DNA, 19 bp, Homo sapiens
  siRNA target sequence for UBTF (NM_014233.1,2075-2093).
cagcatataaagagtacat

SEQ ID NO: 43215 - DNA, 19 bp, Homo sapiens
  siRNA target sequence for UBTF (NM_014233.1,2088-2106).
gtacatctccaataaacgt

SEQ ID NO: 43216 - DNA, 19 bp, Homo sapiens
  siRNA target sequence for UPLC1 (NM_017707.2,216-234).
ggctgtgcgggcaatccat

SEQ ID NO: 43217 - DNA, 19 bp, Homo sapiens
  siRNA target sequence for UPLC1 (NM_017707.2,217-235).
gctgtgcgggcaatccata

SEQ ID NO: 43218 - DNA, 19 bp, Homo sapiens
  siRNA target sequence for UPLC1 (NM_017707.2,275-293).
gagaggccgtggaatcctt

SEQ ID NO: 43219 - DNA, 19 bp, Homo sapiens
  siRNA target sequence for UPLC1 (NM_017707.2,332-350).
ccacaggcttcctaaactt

SEQ ID NO: 43220 - DNA, 19 bp, Homo sapiens
  siRNA target sequence for UPLC1 (NM_017707.2,459-477).
cggtcgacaggattccaaa

SEQ ID NO: 43221 - DNA, 19 bp, Homo sapiens
  siRNA target sequence for UPLC1 (NM_017707.2,460-478).
ggtcgacaggattccaaaa

SEQ ID NO: 43222 - DNA, 19 bp, Homo sapiens
  siRNA target sequence for UPLC1 (NM_017707.2,707-725).
cccagcacaactttttcca

SEQ ID NO: 43223 - DNA, 19 bp, Homo sapiens
  siRNA target sequence for UPLC1 (NM_017707.2,883-901).
cacctgagccggaagaact

SEQ ID NO: 43224 - DNA, 19 bp, Homo sapiens
  siRNA target sequence for UPLC1 (NM_017707.2,963-981).
gggctttctatacaagaaa

SEQ ID NO: 43225 - DNA, 19 bp, Homo sapiens
  siRNA target sequence for UPLC1 (NM_017707.2,966-984).
ctttctatacaagaaaagt

SEQ ID NO: 43226 - DNA, 19 bp, Homo sapiens
  siRNA target sequence for UPLC1 (NM_017707.2,978-996).
gaaaagtgacggaattcga

SEQ ID NO: 43227 - DNA, 19 bp, Homo sapiens
  siRNA target sequence for UPLC1 (NM_017707.2,1013-1031).
ggaagtgtggagtcaagta

SEQ ID NO: 43228 - DNA, 19 bp, Homo sapiens
  siRNA target sequence for UPLC1 (NM_017707.2,1622-1640).
cccgcagggactacattat

SEQ ID NO: 43229 - DNA, 19 bp, Homo sapiens
  siRNA target sequence for UPLC1 (NM_017707.2,1852-1870).
cctctggtggatttcatca

SEQ ID NO: 43230 - DNA, 19 bp, Homo sapiens
  siRNA target sequence for UPLC1 (NM_017707.2,1986-2004).
ggttggcacagtaaatgaa

SEQ ID NO: 43231 - DNA, 19 bp, Homo sapiens
  siRNA target sequence for UPLC1 (NM_017707.2,2109-2127).
ggactactcctgggtaatt

SEQ ID NO: 43232 - DNA, 19 bp, Homo sapiens
  siRNA target sequence for UPLC1 (NM_017707.2,2361-2379).
cagtggagatcgttctgaa

SEQ ID NO: 43233 - DNA, 19 bp, Homo sapiens
  siRNA target sequence for UPLC1 (NM_017707.2,2555-2573).
ccaccccttcggagatgta

SEQ ID NO: 43234 - DNA, 19 bp, Homo sapiens
  siRNA target sequence for UPLC1 (NM_017707.2,2718-2736).
gagtctcccagcaagttct

SEQ ID NO: 43235 - DNA, 19 bp, Homo sapiens
  siRNA target sequence for USF1 (NM_007122.2,267-285).
cgtcttccgaactgagaat

SEQ ID NO: 43236 - DNA, 19 bp, Homo sapiens
  siRNA target sequence for USF1 (NM_007122.2,451-469).
gctgctgagacgcactata

SEQ ID NO: 43237 - DNA, 19 bp, Homo sapiens
  siRNA target sequence for USF1 (NM_007122.2,457-475).
gagacgcactatacttact

SEQ ID NO: 43238 - DNA, 19 bp, Homo sapiens
  siRNA target sequence for USF1 (NM_007122.2,584-602).
ctggcactggtcaattctt

SEQ ID NO: 43239 - DNA, 19 bp, Homo sapiens
  siRNA target sequence for USF1 (NM_007122.2,587-605).
gcactggtcaattctttgt

SEQ ID NO: 43240 - DNA, 19 bp, Homo sapiens
  siRNA target sequence for USF1 (NM_007122.2,590-608).
ctggtcaattctttgtgat

SEQ ID NO: 43241 - DNA, 19 bp, Homo sapiens
  siRNA target sequence for USF1 (NM_007122.2,593-611).
gtcaattctttgtgatgat

SEQ ID NO: 43242 - DNA, 19 bp, Homo sapiens
  siRNA target sequence for USF1 (NM_007122.2,699-717).
gacgactcgggatgagaaa

SEQ ID NO: 43243 - DNA, 19 bp, Homo sapiens
  siRNA target sequence for USF1 (NM_007122.2,752-770).
gccgagacaagatcaacaa

SEQ ID NO: 43244 - DNA, 19 bp, Homo sapiens
  siRNA target sequence for USF1 (NM_007122.2,778-796).
gtgcagctctccaagataa

SEQ ID NO: 43245 - DNA, 19 bp, Homo sapiens
  siRNA target sequence for USF1 (NM_007122.2,821-839).
ccaagtctggccagagtaa

SEQ ID NO: 43246 - DNA, 19 bp, Homo sapiens
  siRNA target sequence for USF1 (NM_007122.2,822-840).
caagtctggccagagtaaa

SEQ ID NO: 43247 - DNA, 19 bp, Homo sapiens
  siRNA target sequence for USF1 (NM_007122.2,825-843).
gtctggccagagtaaaggt

SEQ ID NO: 43248 - DNA, 19 bp, Homo sapiens
  siRNA target sequence for USF1 (NM_007122.2,834-852).
gagtaaaggtgggattcta

SEQ ID NO: 43249 - DNA, 19 bp, Homo sapiens
  siRNA target sequence for USF1 (NM_007122.2,844-862).
gggattctatccaaagctt

SEQ ID NO: 43250 - DNA, 19 bp, Homo sapiens
  siRNA target sequence for USF1 (NM_007122.2,854-872).
ccaaagcttgtgattatat

SEQ ID NO: 43251 - DNA, 19 bp, Homo sapiens
  siRNA target sequence for USF1 (NM_007122.2,1019-1037).
gattagaggtcgtcatcaa

SEQ ID NO: 43252 - DNA, 19 bp, Homo sapiens
  siRNA target sequence for VAT1 (NM_006373.2,555-573).
gctgccttgctcgtcaatt

SEQ ID NO: 43253 - DNA, 19 bp, Homo sapiens
  siRNA target sequence for VAT1 (NM_006373.2,556-574).
ctgccttgctcgtcaatta

SEQ ID NO: 43254 - DNA, 19 bp, Homo sapiens
  siRNA target sequence for VAT1 (NM_006373.2,558-576).
gccttgctcgtcaattaca

SEQ ID NO: 43255 - DNA, 19 bp, Homo sapiens
  siRNA target sequence for VAT1 (NM_006373.2,559-577).
ccttgctcgtcaattacat

SEQ ID NO: 43256 - DNA, 19 bp, Homo sapiens
  siRNA target sequence for VAT1 (NM_006373.2,560-578).
cttgctcgtcaattacatt

SEQ ID NO: 43257 - DNA, 19 bp, Homo sapiens
  siRNA target sequence for VAT1 (NM_006373.2,684-702).
cgtacagtggagaatgtga

SEQ ID NO: 43258 - DNA, 19 bp, Homo sapiens
  siRNA target sequence for VAT1 (NM_006373.2,762-780).
catcccatcgactatcaca

SEQ ID NO: 43259 - DNA, 19 bp, Homo sapiens
  siRNA target sequence for VAT1 (NM_006373.2,806-824).
gaagatttcccctaaagga

SEQ ID NO: 43260 - DNA, 19 bp, Homo sapiens
  siRNA target sequence for VAT1 (NM_006373.2,843-861).
cctctgggtgggtcagata

SEQ ID NO: 43261 - DNA, 19 bp, Homo sapiens
  siRNA target sequence for WBSCR14 (NM_032951.1,592-610).
cacaagtggcgcatctact

SEQ ID NO: 43262 - DNA, 19 bp, Homo sapiens
  siRNA target sequence for WBSCR14 (NM_032951.1,775-793).
ctggacctcaattgctttt

SEQ ID NO: 43263 - DNA, 19 bp, Homo sapiens
  siRNA target sequence for WBSCR14 (NM_032951.1,920-938).
caagcctggatgacttcat

SEQ ID NO: 43264 - DNA, 19 bp, Homo sapiens
  siRNA target sequence for WBSCR14 (NM_032951.1,940-958).
gacatctcagatttcttta

SEQ ID NO: 43265 - DNA, 19 bp, Homo sapiens
  siRNA target sequence for WBSCR14 (NM_032951.1,1155-1173).
cgccttcctgagttctgat

SEQ ID NO: 43266 - DNA, 19 bp, Homo sapiens
  siRNA target sequence for WBSCR14 (NM_032951.1,1156-1174).
gccttcctgagttctgatt

SEQ ID NO: 43267 - DNA, 19 bp, Homo sapiens
  siRNA target sequence for WBSCR14 (NM_032951.1,1669-1687).
ctggagccaccacttgtat

SEQ ID NO: 43268 - DNA, 19 bp, Homo sapiens
  siRNA target sequence for WBSCR14 (NM_032951.1,2101-2119).
ctcaaggtgagcaaagcta

SEQ ID NO: 43269 - DNA, 19 bp, Homo sapiens
  siRNA target sequence for WBSCR14 (NM_032951.1,2135-2153).
cagctgagtacatccttat

SEQ ID NO: 43270 - DNA, 19 bp, Homo sapiens
  siRNA target sequence for WBSCR14 (NM_032951.1,2138-2156).
ctgagtacatccttatgct

SEQ ID NO: 43271 - DNA, 19 bp, Homo sapiens
  siRNA target sequence for WBSCR14 (NM_032951.1,2300-2318).
gagacatgtttgatgacta

SEQ ID NO: 43272 - DNA, 19 bp, Homo sapiens
  siRNA target sequence for WBSCR14 (NM_032951.1,2584-2602).
ggcacccttggcaaacctt

SEQ ID NO: 43273 - DNA, 19 bp, Homo sapiens
  siRNA target sequence for WDHD1 (NM_007086.1,48-66).
cacacggaagccaatgaga

SEQ ID NO: 43274 - DNA, 19 bp, Homo sapiens
  siRNA target sequence for WDHD1 (NM_007086.1,50-68).
cacggaagccaatgagata

SEQ ID NO: 43275 - DNA, 19 bp, Homo sapiens
  siRNA target sequence for WDHD1 (NM_007086.1,83-101).
gacacacggaggtctgttt

SEQ ID NO: 43276 - DNA, 19 bp, Homo sapiens
  siRNA target sequence for WDHD1 (NM_007086.1,87-105).
cacggaggtctgttttgat

SEQ ID NO: 43277 - DNA, 19 bp, Homo sapiens
  siRNA target sequence for WDHD1 (NM_007086.1,103-121).
gatgattctgggagtttta

SEQ ID NO: 43278 - DNA, 19 bp, Homo sapiens
  siRNA target sequence for WDHD1 (NM_007086.1,139-157).
gatggtgatgtgaggattt

SEQ ID NO: 43279 - DNA, 19 bp, Homo sapiens
  siRNA target sequence for WDHD1 (NM_007086.1,172-190).
gatgatgatcctaagttca

SEQ ID NO: 43280 - DNA, 19 bp, Homo sapiens
  siRNA target sequence for WDHD1 (NM_007086.1,263-281).
ctattcaagtccacacatt

SEQ ID NO: 43281 - DNA, 19 bp, Homo sapiens
  siRNA target sequence for WDHD1 (NM_007086.1,309-327).
gactcgcttcactacaaat

SEQ ID NO: 43282 - DNA, 19 bp, Homo sapiens
  siRNA target sequence for WDHD1 (NM_007086.1,313-331).
cgcttcactacaaatgcaa

SEQ ID NO: 43283 - DNA, 19 bp, Homo sapiens
  siRNA target sequence for WDHD1 (NM_007086.1,314-332).
gcttcactacaaatgcaaa

SEQ ID NO: 43284 - DNA, 19 bp, Homo sapiens
  siRNA target sequence for WDHD1 (NM_007086.1,367-385).
gctgctggatctagtgatt

SEQ ID NO: 43285 - DNA, 19 bp, Homo sapiens
  siRNA target sequence for WDHD1 (NM_007086.1,371-389).
ctggatctagtgattttct

SEQ ID NO: 43286 - DNA, 19 bp, Homo sapiens
  siRNA target sequence for WDHD1 (NM_007086.1,377-395).
ctagtgattttctagtcaa

SEQ ID NO: 43287 - DNA, 19 bp, Homo sapiens
  siRNA target sequence for WDHD1 (NM_007086.1,440-458).
gacatgatgcccctgtttt

SEQ ID NO: 43288 - DNA, 19 bp, Homo sapiens
  siRNA target sequence for WDHD1 (NM_007086.1,538-556).
gatcagacatgtgctatta

SEQ ID NO: 43289 - DNA, 19 bp, Homo sapiens
  siRNA target sequence for WDHD1 (NM_007086.1,541-559).
cagacatgtgctattagtt

SEQ ID NO: 43290 - DNA, 19 bp, Homo sapiens
  siRNA target sequence for WDHD1 (NM_007086.1,586-604).
gtgataaatgcaaaatcaa

SEQ ID NO: 43291 - DNA, 19 bp, Homo sapiens
  siRNA target sequence for WDHD1 (NM_007086.1,685-703).
gaatcttggagtcatcaat

SEQ ID NO: 43292 - DNA, 19 bp, Homo sapiens
  siRNA target sequence for WDHD1 (NM_007086.1,689-707).
cttggagtcatcaatttga

SEQ ID NO: 43293 - DNA, 19 bp, Homo sapiens
  siRNA target sequence for WDHD1 (NM_007086.1,692-710).
ggagtcatcaatttgatct

SEQ ID NO: 43294 - DNA, 19 bp, Homo sapiens
  siRNA target sequence for WDHD1 (NM_007086.1,726-744).
ctctcagaccctcaatata

SEQ ID NO: 43295 - DNA, 19 bp, Homo sapiens
  siRNA target sequence for WDHD1 (NM_007086.1,730-748).
cagaccctcaatatagtaa

SEQ ID NO: 43296 - DNA, 19 bp, Homo sapiens
  siRNA target sequence for WDHD1 (NM_007086.1,753-771).
gtctccctgtgggcaatat

SEQ ID NO: 43297 - DNA, 19 bp, Homo sapiens
  siRNA target sequence for WDHD1 (NM_007086.1,759-777).
ctgtgggcaatatttagct

SEQ ID NO: 43298 - DNA, 19 bp, Homo sapiens
  siRNA target sequence for WDHD1 (NM_007086.1,782-800).
gtagtattaatggtctaat

SEQ ID NO: 43299 - DNA, 19 bp, Homo sapiens
  siRNA target sequence for WDHD1 (NM_007086.1,794-812).
gtctaatcatagtttggaa

SEQ ID NO: 43300 - DNA, 19 bp, Homo sapiens
  siRNA target sequence for WDHD1 (NM_007086.1,847-865).
catgagaaaggttatgcaa

SEQ ID NO: 43301 - DNA, 19 bp, Homo sapiens
  siRNA target sequence for WDHD1 (NM_007086.1,890-908).
cttgtggtcgaatatcgta

SEQ ID NO: 43302 - DNA, 19 bp, Homo sapiens
  siRNA target sequence for WDHD1 (NM_007086.1,896-914).
gtcgaatatcgtatactga

SEQ ID NO: 43303 - DNA, 19 bp, Homo sapiens
  siRNA target sequence for WDHD1 (NM_007086.1,923-941).
gaaatctagggcttctaga

SEQ ID NO: 43304 - DNA, 19 bp, Homo sapiens
  siRNA target sequence for WDHD1 (NM_007086.1,931-949).
gggcttctagagaatgttt

SEQ ID NO: 43305 - DNA, 19 bp, Homo sapiens
  siRNA target sequence for WDHD1 (NM_007086.1,966-984).
gacatcaagcagtaaggta

SEQ ID NO: 43306 - DNA, 19 bp, Homo sapiens
  siRNA target sequence for WDHD1 (NM_007086.1,1002-1020).
ggattataatgatcttttt

SEQ ID NO: 43307 - DNA, 19 bp, Homo sapiens
  siRNA target sequence for WDHD1 (NM_007086.1,1035-1053).
gagtaatgctggtgatttt

SEQ ID NO: 43308 - DNA, 19 bp, Homo sapiens
  siRNA target sequence for WDHD1 (NM_007086.1,1203-1221).
gctaaaaactggttctagt

SEQ ID NO: 43309 - DNA, 19 bp, Homo sapiens
  siRNA target sequence for WDHD1 (NM_007086.1,1266-1284).
caatctaccacttgtaaca

SEQ ID NO: 43310 - DNA, 19 bp, Homo sapiens
  siRNA target sequence for WDHD1 (NM_007086.1,1283-1301).
catcccaaaggccatttta

SEQ ID NO: 43311 - DNA, 19 bp, Homo sapiens
  siRNA target sequence for WDHD1 (NM_007086.1,1377-1395).
catggtgtggaactctatt

SEQ ID NO: 43312 - DNA, 19 bp, Homo sapiens
  siRNA target sequence for WDHD1 (NM_007086.1,1380-1398).
ggtgtggaactctattgga

SEQ ID NO: 43313 - DNA, 19 bp, Homo sapiens
  siRNA target sequence for WDHD1 (NM_007086.1,1383-1401).
gtggaactctattggaatt

SEQ ID NO: 43314 - DNA, 19 bp, Homo sapiens
  siRNA target sequence for WDHD1 (NM_007086.1,1385-1403).
ggaactctattggaattat

SEQ ID NO: 43315 - DNA, 19 bp, Homo sapiens
  siRNA target sequence for WDHD1 (NM_007086.1,1468-1486).
catgcaacacacttatcaa

SEQ ID NO: 43316 - DNA, 19 bp, Homo sapiens
  siRNA target sequence for WDHD1 (NM_007086.1,1471-1489).
gcaacacacttatcaaaca

SEQ ID NO: 43317 - DNA, 19 bp, Homo sapiens
  siRNA target sequence for WDHD1 (NM_007086.1,1475-1493).
cacacttatcaaacacttt

SEQ ID NO: 43318 - DNA, 19 bp, Homo sapiens
  siRNA target sequence for WDHD1 (NM_007086.1,1513-1531).
ctttcccacgaagctattt

SEQ ID NO: 43319 - DNA, 19 bp, Homo sapiens
  siRNA target sequence for WDHD1 (NM_007086.1,1570-1588).
cttcactgcctgcacttta

SEQ ID NO: 43320 - DNA, 19 bp, Homo sapiens
  siRNA target sequence for WDHD1 (NM_007086.1,1575-1593).
ctgcctgcactttagttct

SEQ ID NO: 43321 - DNA, 19 bp, Homo sapiens
  siRNA target sequence for WDHD1 (NM_007086.1,1692-1710).
cctgcttcttcgattgttt

SEQ ID NO: 43322 - DNA, 19 bp, Homo sapiens
  siRNA target sequence for WDHD1 (NM_007086.1,1693-1711).
ctgcttcttcgattgttta

SEQ ID NO: 43323 - DNA, 19 bp, Homo sapiens
  siRNA target sequence for WDHD1 (NM_007086.1,1695-1713).
gcttcttcgattgtttact

SEQ ID NO: 43324 - DNA, 19 bp, Homo sapiens
  siRNA target sequence for WDHD1 (NM_007086.1,1712-1730).
ctattggaggggttcaaaa

SEQ ID NO: 43325 - DNA, 19 bp, Homo sapiens
  siRNA target sequence for WDHD1 (NM_007086.1,1721-1739).
gggttcaaaaagaggtatt

SEQ ID NO: 43326 - DNA, 19 bp, Homo sapiens
  siRNA target sequence for WDHD1 (NM_007086.1,1723-1741).
gttcaaaaagaggtattca

SEQ ID NO: 43327 - DNA, 19 bp, Homo sapiens
  siRNA target sequence for WDHD1 (NM_007086.1,1803-1821).
cagaggtacaggatttgat

SEQ ID NO: 43328 - DNA, 19 bp, Homo sapiens
  siRNA target sequence for WDHD1 (NM_007086.1,1897-1915).
cctcttacaaggaaatcct

SEQ ID NO: 43329 - DNA, 19 bp, Homo sapiens
  siRNA target sequence for WDHD1 (NM_007086.1,1898-1916).
ctcttacaaggaaatccta

SEQ ID NO: 43330 - DNA, 19 bp, Homo sapiens
  siRNA target sequence for WDHD1 (NM_007086.1,1940-1958).
ctgaaggtaccccttgtta

SEQ ID NO: 43331 - DNA, 19 bp, Homo sapiens
  siRNA target sequence for WDHD1 (NM_007086.1,1952-1970).
cttgttacgtggattcaga

SEQ ID NO: 43332 - DNA, 19 bp, Homo sapiens
  siRNA target sequence for WDHD1 (NM_007086.1,1959-1977).
cgtggattcagaaggaatt

SEQ ID NO: 43333 - DNA, 19 bp, Homo sapiens
  siRNA target sequence for WDHD1 (NM_007086.1,1962-1980).
ggattcagaaggaattgtt

SEQ ID NO: 43334 - DNA, 19 bp, Homo sapiens
  siRNA target sequence for WDHD1 (NM_007086.1,1967-1985).
cagaaggaattgttcgaat

SEQ ID NO: 43335 - DNA, 19 bp, Homo sapiens
  siRNA target sequence for WDHD1 (NM_007086.1,1972-1990).
ggaattgttcgaatgctta

SEQ ID NO: 43336 - DNA, 19 bp, Homo sapiens
  siRNA target sequence for WDHD1 (NM_007086.1,2009-2027).
cgtggactcctatatgtaa

SEQ ID NO: 43337 - DNA, 19 bp, Homo sapiens
  siRNA target sequence for WDHD1 (NM_007086.1,2013-2031).
gactcctatatgtaataca

SEQ ID NO: 43338 - DNA, 19 bp, Homo sapiens
  siRNA target sequence for WDHD1 (NM_007086.1,2035-2053).
gagcactgcaaaggaaaat

SEQ ID NO: 43339 - DNA, 19 bp, Homo sapiens
  siRNA target sequence for WDHD1 (NM_007086.1,2037-2055).
gcactgcaaaggaaaatct

SEQ ID NO: 43340 - DNA, 19 bp, Homo sapiens
  siRNA target sequence for WDHD1 (NM_007086.1,2068-2086).
gtggttggtatccatgaaa

SEQ ID NO: 43341 - DNA, 19 bp, Homo sapiens
  siRNA target sequence for WDHD1 (NM_007086.1,2070-2088).
ggttggtatccatgaaaat

SEQ ID NO: 43342 - DNA, 19 bp, Homo sapiens
  siRNA target sequence for WDHD1 (NM_007086.1,2083-2101).
gaaaatccccagcaactaa

SEQ ID NO: 43343 - DNA, 19 bp, Homo sapiens
  siRNA target sequence for WDHD1 (NM_007086.1,2146-2164).
cgccctgctgttgctatat

SEQ ID NO: 43344 - DNA, 19 bp, Homo sapiens
  siRNA target sequence for WDHD1 (NM_007086.1,2148-2166).
ccctgctgttgctatatta

SEQ ID NO: 43345 - DNA, 19 bp, Homo sapiens
  siRNA target sequence for WDHD1 (NM_007086.1,2149-2167).
cctgctgttgctatattat

SEQ ID NO: 43346 - DNA, 19 bp, Homo sapiens
  siRNA target sequence for WDHD1 (NM_007086.1,2159-2177).
ctatattatcctttaagct

SEQ ID NO: 43347 - DNA, 19 bp, Homo sapiens
  siRNA target sequence for WDHD1 (NM_007086.1,2175-2193).
gcttccttactgtcagatt

SEQ ID NO: 43348 - DNA, 19 bp, Homo sapiens
  siRNA target sequence for WDHD1 (NM_007086.1,2221-2239).
caattttggcgttcagtta

SEQ ID NO: 43349 - DNA, 19 bp, Homo sapiens
  siRNA target sequence for WDHD1 (NM_007086.1,2228-2246).
ggcgttcagttatatttca

SEQ ID NO: 43350 - DNA, 19 bp, Homo sapiens
  siRNA target sequence for WDHD1 (NM_007086.1,2230-2248).
cgttcagttatatttcaca

SEQ ID NO: 43351 - DNA, 19 bp, Homo sapiens
  siRNA target sequence for WDHD1 (NM_007086.1,2251-2269).
caccttgattatttagcta

SEQ ID NO: 43352 - DNA, 19 bp, Homo sapiens
  siRNA target sequence for WDHD1 (NM_007086.1,2386-2404).
gaacttgctgatctaatga

SEQ ID NO: 43353 - DNA, 19 bp, Homo sapiens
  siRNA target sequence for WDHD1 (NM_007086.1,2392-2410).
gctgatctaatgactcaaa

SEQ ID NO: 43354 - DNA, 19 bp, Homo sapiens
  siRNA target sequence for WDHD1 (NM_007086.1,2403-2421).
gactcaaaatgctgtgaat

SEQ ID NO: 43355 - DNA, 19 bp, Homo sapiens
  siRNA target sequence for WDHD1 (NM_007086.1,2438-2456).
cttctcgctctcggaaatt

SEQ ID NO: 43356 - DNA, 19 bp, Homo sapiens
  siRNA target sequence for WDHD1 (NM_007086.1,2441-2459).
ctcgctctcggaaattaat

SEQ ID NO: 43357 - DNA, 19 bp, Homo sapiens
  siRNA target sequence for WDHD1 (NM_007086.1,2477-2495).
gtgaactggctgtagagaa

SEQ ID NO: 43358 - DNA, 19 bp, Homo sapiens
  siRNA target sequence for WDHD1 (NM_007086.1,2683-2701).
cctggacagaactcgtttt

SEQ ID NO: 43359 - DNA, 19 bp, Homo sapiens
  siRNA target sequence for WDHD1 (NM_007086.1,2687-2705).
gacagaactcgttttccaa

SEQ ID NO: 43360 - DNA, 19 bp, Homo sapiens
  siRNA target sequence for WDHD1 (NM_007086.1,2689-2707).
cagaactcgttttccaaaa

SEQ ID NO: 43361 - DNA, 19 bp, Homo sapiens
  siRNA target sequence for WDHD1 (NM_007086.1,2691-2709).
gaactcgttttccaaaagt

SEQ ID NO: 43362 - DNA, 19 bp, Homo sapiens
  siRNA target sequence for WDHD1 (NM_007086.1,2736-2754).
gtcaggtgcagttaccttt

SEQ ID NO: 43363 - DNA, 19 bp, Homo sapiens
  siRNA target sequence for WDHD1 (NM_007086.1,2740-2758).
ggtgcagttacctttagca

SEQ ID NO: 43364 - DNA, 19 bp, Homo sapiens
  siRNA target sequence for WDHD1 (NM_007086.1,2756-2774).
gcagccaaggacgagtaaa

SEQ ID NO: 43365 - DNA, 19 bp, Homo sapiens
  siRNA target sequence for WDHD1 (NM_007086.1,2757-2775).
cagccaaggacgagtaaat

SEQ ID NO: 43366 - DNA, 19 bp, Homo sapiens
  siRNA target sequence for WDHD1 (NM_007086.1,2765-2783).
gacgagtaaatccctttaa

SEQ ID NO: 43367 - DNA, 19 bp, Homo sapiens
  siRNA target sequence for WDHD1 (NM_007086.1,2768-2786).
gagtaaatccctttaaggt

SEQ ID NO: 43368 - DNA, 19 bp, Homo sapiens
  siRNA target sequence for WDHD1 (NM_007086.1,2770-2788).
gtaaatccctttaaggtat

SEQ ID NO: 43369 - DNA, 19 bp, Homo sapiens
  siRNA target sequence for WDHD1 (NM_007086.1,2784-2802).
ggtatcagccagttccaaa

SEQ ID NO: 43370 - DNA, 19 bp, Homo sapiens
  siRNA target sequence for WDHD1 (NM_007086.1,2825-2843).
cagcacgttcaactaatat

SEQ ID NO: 43371 - DNA, 19 bp, Homo sapiens
  siRNA target sequence for WDHD1 (NM_007086.1,2827-2845).
gcacgttcaactaatattt

SEQ ID NO: 43372 - DNA, 19 bp, Homo sapiens
  siRNA target sequence for WDHD1 (NM_007086.1,2871-2889).
gaaatccactgcacttagt

SEQ ID NO: 43373 - DNA, 19 bp, Homo sapiens
  siRNA target sequence for WDHD1 (NM_007086.1,2881-2899).
gcacttagtcgaactacaa

SEQ ID NO: 43374 - DNA, 19 bp, Homo sapiens
  siRNA target sequence for WDHD1 (NM_007086.1,2882-2900).
cacttagtcgaactacaaa

SEQ ID NO: 43375 - DNA, 19 bp, Homo sapiens
  siRNA target sequence for WDHD1 (NM_007086.1,2884-2902).
cttagtcgaactacaaata

SEQ ID NO: 43376 - DNA, 19 bp, Homo sapiens
  siRNA target sequence for WDHD1 (NM_007086.1,2957-2975).
catctgcagcatcctattt

SEQ ID NO: 43377 - DNA, 19 bp, Homo sapiens
  siRNA target sequence for WDHD1 (NM_007086.1,2990-3008).
ctcaaactaataaaactga

SEQ ID NO: 43378 - DNA, 19 bp, Homo sapiens
  siRNA target sequence for WDHD1 (NM_007086.1,3111-3129).
gtggttagaagaaaataga

SEQ ID NO: 43379 - DNA, 19 bp, Homo sapiens
  siRNA target sequence for WDHD1 (NM_007086.1,3184-3202).
gaaggaatgattcgattta

SEQ ID NO: 43380 - DNA, 19 bp, Homo sapiens
  siRNA target sequence for WDHD1 (NM_007086.1,3188-3206).
gaatgattcgatttagagt

SEQ ID NO: 43381 - DNA, 19 bp, Homo sapiens
  siRNA target sequence for WDHD1 (NM_007086.1,3196-3214).
cgatttagagtattgtcaa

SEQ ID NO: 43382 - DNA, 19 bp, Homo sapiens
  siRNA target sequence for WDHD1 (NM_007086.1,3224-3242).
gaaaggtgtgggctaacaa

SEQ ID NO: 43383 - DNA, 19 bp, Homo sapiens
  siRNA target sequence for WDHD1 (NM_007086.1,3287-3305).
gaaaacgtgtggttgatga

SEQ ID NO: 43384 - DNA, 19 bp, Homo sapiens
  siRNA target sequence for WDHD1 (NM_007086.1,3343-3361).
gagaacctgaatttgtcta

SEQ ID NO: 43385 - DNA, 19 bp, Homo sapiens
  siRNA target sequence for WDTC1 (NM_015023.2,401-419).
ggcgaaagtcaacataact

SEQ ID NO: 43386 - DNA, 19 bp, Homo sapiens
  siRNA target sequence for WDTC1 (NM_015023.2,402-420).
gcgaaagtcaacataacta

SEQ ID NO: 43387 - DNA, 19 bp, Homo sapiens
  siRNA target sequence for WDTC1 (NM_015023.2,600-618).
gaccagcacacgattgtgt

SEQ ID NO: 43388 - DNA, 19 bp, Homo sapiens
  siRNA target sequence for WDTC1 (NM_015023.2,658-676).
cgggacacaccgcaaatat

SEQ ID NO: 43389 - DNA, 19 bp, Homo sapiens
  siRNA target sequence for WDTC1 (NM_015023.2,663-681).
cacaccgcaaatatcttct

SEQ ID NO: 43390 - DNA, 19 bp, Homo sapiens
  siRNA target sequence for WDTC1 (NM_015023.2,703-721).
ctggggaccgcatcttgat

SEQ ID NO: 43391 - DNA, 19 bp, Homo sapiens
  siRNA target sequence for WDTC1 (NM_015023.2,705-723).
ggggaccgcatcttgatca

SEQ ID NO: 43392 - DNA, 19 bp, Homo sapiens
  siRNA target sequence for WDTC1 (NM_015023.2,750-768).
gtgcacgacctgacagtaa

SEQ ID NO: 43393 - DNA, 19 bp, Homo sapiens
  siRNA target sequence for WDTC1 (NM_015023.2,868-886).
ggcttatccgccagtatga

SEQ ID NO: 43394 - DNA, 19 bp, Homo sapiens
  siRNA target sequence for WDTC1 (NM_015023.2,1018-1036).
ccttcgtgaggctctatga

SEQ ID NO: 43395 - DNA, 19 bp, Homo sapiens
  siRNA target sequence for WDTC1 (NM_015023.2,1035-1053).
gacatccgcatgatccata

SEQ ID NO: 43396 - DNA, 19 bp, Homo sapiens
  siRNA target sequence for WDTC1 (NM_015023.2,1128-1146).
gacggtgcagcccagtatt

SEQ ID NO: 43397 - DNA, 19 bp, Homo sapiens
  siRNA target sequence for WDTC1 (NM_015023.2,1132-1150).
gtgcagcccagtattacgt

SEQ ID NO: 43398 - DNA, 19 bp, Homo sapiens
  siRNA target sequence for WDTC1 (NM_015023.2,1181-1199).
ctacaacaaccgtttgaga

SEQ ID NO: 43399 - DNA, 19 bp, Homo sapiens
  siRNA target sequence for WDTC1 (NM_015023.2,1237-1255).
gcacagagctactagtcaa

SEQ ID NO: 43400 - DNA, 19 bp, Homo sapiens
  siRNA target sequence for WDTC1 (NM_015023.2,1240-1258).
cagagctactagtcaacat

SEQ ID NO: 43401 - DNA, 19 bp, Homo sapiens
  siRNA target sequence for WDTC1 (NM_015023.2,1263-1281).
ggggaacaggtctatttgt

SEQ ID NO: 43402 - DNA, 19 bp, Homo sapiens
  siRNA target sequence for WDTC1 (NM_015023.2,1264-1282).
gggaacaggtctatttgtt

SEQ ID NO: 43403 - DNA, 19 bp, Homo sapiens
  siRNA target sequence for WDTC1 (NM_015023.2,1265-1283).
ggaacaggtctatttgttt

SEQ ID NO: 43404 - DNA, 19 bp, Homo sapiens
  siRNA target sequence for WDTC1 (NM_015023.2,1269-1287).
caggtctatttgtttgact

SEQ ID NO: 43405 - DNA, 19 bp, Homo sapiens
  siRNA target sequence for WDTC1 (NM_015023.2,1347-1365).
gtccagaatggcaagatgt

SEQ ID NO: 43406 - DNA, 19 bp, Homo sapiens
  siRNA target sequence for WDTC1 (NM_015023.2,1533-1551).
caagccattcagctttaca

SEQ ID NO: 43407 - DNA, 19 bp, Homo sapiens
  siRNA target sequence for WDTC1 (NM_015023.2,1757-1775).
gtgcctggacgacttcaaa

SEQ ID NO: 43408 - DNA, 19 bp, Homo sapiens
  siRNA target sequence for WDTC1 (NM_015023.2,1796-1814).
ccacagcagcgcttgtgat

SEQ ID NO: 43409 - DNA, 19 bp, Homo sapiens
  siRNA target sequence for WDTC1 (NM_015023.2,1801-1819).
gcagcgcttgtgatgcatt

SEQ ID NO: 43410 - DNA, 19 bp, Homo sapiens
  siRNA target sequence for WDTC1 (NM_015023.2,1959-1977).
cgaagctacgactatcagt

SEQ ID NO: 43411 - DNA, 19 bp, Homo sapiens
  siRNA target sequence for WDTC1 (NM_015023.2,1960-1978).
gaagctacgactatcagtt

SEQ ID NO: 43412 - DNA, 19 bp, Homo sapiens
  siRNA target sequence for WDTC1 (NM_015023.2,2002-2020).
ccaccacggatatcaaaga

SEQ ID NO: 43413 - DNA, 19 bp, Homo sapiens
  siRNA target sequence for WDTC1 (NM_015023.2,2128-2146).
gggatgagtccattgtcaa

SEQ ID NO: 43414 - DNA, 19 bp, Homo sapiens
  siRNA target sequence for WDTC1 (NM_015023.2,2247-2265).
ggccgagtcgtggaagata

SEQ ID NO: 43415 - DNA, 19 bp, Homo sapiens
  siRNA target sequence for WDTC1 (NM_015023.2,2248-2266).
gccgagtcgtggaagatat

SEQ ID NO: 43416 - DNA, 19 bp, Homo sapiens
  siRNA target sequence for WDTC1 (NM_015023.2,2251-2269).
gagtcgtggaagatatgga

SEQ ID NO: 43417 - DNA, 19 bp, Homo sapiens
  siRNA target sequence for WHSC1 (NM_007331.1,512-530).
gcagagtcccctttctgtt

SEQ ID NO: 43418 - DNA, 19 bp, Homo sapiens
  siRNA target sequence for WHSC1 (NM_007331.1,671-689).
gggggtcatgcagaagttt

SEQ ID NO: 43419 - DNA, 19 bp, Homo sapiens
  siRNA target sequence for WHSC1 (NM_007331.1,672-690).
ggggtcatgcagaagttta

SEQ ID NO: 43420 - DNA, 19 bp, Homo sapiens
  siRNA target sequence for WHSC1 (NM_007331.1,698-716).
cgacgccctgccctttatt

SEQ ID NO: 43421 - DNA, 19 bp, Homo sapiens
  siRNA target sequence for WHSC1 (NM_007331.1,701-719).
cgccctgccctttattcca

SEQ ID NO: 43422 - DNA, 19 bp, Homo sapiens
  siRNA target sequence for WHSC1 (NM_007331.1,721-739).
ccgacaagctgaaagatct

SEQ ID NO: 43423 - DNA, 19 bp, Homo sapiens
  siRNA target sequence for WHSC1 (NM_007331.1,722-740).
cgacaagctgaaagatctt

SEQ ID NO: 43424 - DNA, 19 bp, Homo sapiens
  siRNA target sequence for WHSC1 (NM_007331.1,723-741).
gacaagctgaaagatctta

SEQ ID NO: 43425 - DNA, 19 bp, Homo sapiens
  siRNA target sequence for WHSC1 (NM_007331.1,738-756).
cttacttcccgggtgttta

SEQ ID NO: 43426 - DNA, 19 bp, Homo sapiens
  siRNA target sequence for WHSC1 (NM_007331.1,780-798).
gccaaactgcgttttgagt

SEQ ID NO: 43427 - DNA, 19 bp, Homo sapiens
  siRNA target sequence for WHSC1 (NM_007331.1,829-847).
ctaacactacccctatcaa

SEQ ID NO: 43428 - DNA, 19 bp, Homo sapiens
  siRNA target sequence for WHSC1 (NM_007331.1,833-851).
cactacccctatcaaaaat

SEQ ID NO: 43429 - DNA, 19 bp, Homo sapiens
  siRNA target sequence for WHSC1 (NM_007331.1,878-896).
caccaaaacatacatgaat

SEQ ID NO: 43430 - DNA, 19 bp, Homo sapiens
  siRNA target sequence for WHSC1 (NM_007331.1,1051-1069).
cagctcttgtgtctaagat

SEQ ID NO: 43431 - DNA, 19 bp, Homo sapiens
  siRNA target sequence for WHSC1 (NM_007331.1,1053-1071).
gctcttgtgtctaagatct

SEQ ID NO: 43432 - DNA, 19 bp, Homo sapiens
  siRNA target sequence for WHSC1 (NM_007331.1,1056-1074).
cttgtgtctaagatctcaa

SEQ ID NO: 43433 - DNA, 19 bp, Homo sapiens
  siRNA target sequence for WHSC1 (NM_007331.1,1133-1151).
caaagaccacctgttgaaa

SEQ ID NO: 43434 - DNA, 19 bp, Homo sapiens
  siRNA target sequence for WHSC1 (NM_007331.1,1235-1253).
cagctataccaaacttaaa

SEQ ID NO: 43435 - DNA, 19 bp, Homo sapiens
  siRNA target sequence for WHSC1 (NM_007331.1,1238-1256).
ctataccaaacttaaaggt

SEQ ID NO: 43436 - DNA, 19 bp, Homo sapiens
  siRNA target sequence for WHSC1 (NM_007331.1,1273-1291).
gccagtatcacgtacagtt

SEQ ID NO: 43437 - DNA, 19 bp, Homo sapiens
  siRNA target sequence for WHSC1 (NM_007331.1,1328-1346).
gaagagcctcgtagctttt

SEQ ID NO: 43438 - DNA, 19 bp, Homo sapiens
  siRNA target sequence for WHSC1 (NM_007331.1,1457-1475).
gtgggaaatgggcattgtt

SEQ ID NO: 43439 - DNA, 19 bp, Homo sapiens
  siRNA target sequence for WHSC1 (NM_007331.1,1520-1538).
caagttcacctttctctat

SEQ ID NO: 43440 - DNA, 19 bp, Homo sapiens
  siRNA target sequence for WHSC1 (NM_007331.1,1543-1561).
gggaccagcttcatctcaa

SEQ ID NO: 43441 - DNA, 19 bp, Homo sapiens
  siRNA target sequence for WHSC1 (NM_007331.1,1585-1603).
gcattgctgcagagtcttt

SEQ ID NO: 43442 - DNA, 19 bp, Homo sapiens
  siRNA target sequence for WHSC1 (NM_007331.1,1740-1758).
cccgacatagggaagagta

SEQ ID NO: 43443 - DNA, 19 bp, Homo sapiens
  siRNA target sequence for WHSC1 (NM_007331.1,1857-1875).
gatgcagcatcccagtttt

SEQ ID NO: 43444 - DNA, 19 bp, Homo sapiens
  siRNA target sequence for WHSC1 (NM_007331.1,1861-1879).
cagcatcccagtttttggt

SEQ ID NO: 43445 - DNA, 19 bp, Homo sapiens
  siRNA target sequence for WHSC1 (NM_007331.1,1986-2004).
cagagagcacgctacaaca

SEQ ID NO: 43446 - DNA, 19 bp, Homo sapiens
  siRNA target sequence for WHSC1 (NM_007331.1,2087-2105).
gatacaggaccctacagaa

SEQ ID NO: 43447 - DNA, 19 bp, Homo sapiens
  siRNA target sequence for WHSC1 (NM_007331.1,2243-2261).
ccaggcagcaacgaaaaat

SEQ ID NO: 43448 - DNA, 19 bp, Homo sapiens
  siRNA target sequence for WHSC1 (NM_007331.1,2264-2282).
gtctgatgcatgtaaacca

SEQ ID NO: 43449 - DNA, 19 bp, Homo sapiens
  siRNA target sequence for WHSC1 (NM_007331.1,2320-2338).
cagctcttgggtttagcaa

SEQ ID NO: 43450 - DNA, 19 bp, Homo sapiens
  siRNA target sequence for WHSC1 (NM_007331.1,2325-2343).
cttgggtttagcaaaagtt

SEQ ID NO: 43451 - DNA, 19 bp, Homo sapiens
  siRNA target sequence for WHSC1 (NM_014919.1,2402-2420).
ctcggagtccccatacgaa

SEQ ID NO: 43452 - DNA, 19 bp, Homo sapiens
  siRNA target sequence for WHSC1 (NM_014919.1,2425-2443).
cagacgaaacacaaactga

SEQ ID NO: 43453 - DNA, 19 bp, Homo sapiens
  siRNA target sequence for WHSC1 (NM_014919.1,2429-2447).
cgaaacacaaactgaagta

SEQ ID NO: 43454 - DNA, 19 bp, Homo sapiens
  siRNA target sequence for WHSC1 (NM_014919.1,2430-2448).
gaaacacaaactgaagtat

SEQ ID NO: 43455 - DNA, 19 bp, Homo sapiens
  siRNA target sequence for WHSC1 (NM_014919.1,2717-2735).
caaggagtctcctatctca

SEQ ID NO: 43456 - DNA, 19 bp, Homo sapiens
  siRNA target sequence for WHSC1 (NM_133330.1,2715-2733).
gaggcttgtgtgaaaaaat

SEQ ID NO: 43457 - DNA, 19 bp, Homo sapiens
  siRNA target sequence for WHSC1 (NM_133330.1,2818-2836).
caaggccgtcaaaaggtaa

SEQ ID NO: 43458 - DNA, 19 bp, Homo sapiens
  siRNA target sequence for WHSC1 (NM_133330.1,2824-2842).
cgtcaaaaggtaaaatgat

SEQ ID NO: 43459 - DNA, 19 bp, Homo sapiens
  siRNA target sequence for WHSC1 (NM_133330.1,3150-3168).
gtgaaacttgggaactaca

SEQ ID NO: 43460 - DNA, 19 bp, Homo sapiens
  siRNA target sequence for WHSC1 (NM_133330.1,3264-3282).
gggtctaaagattattact

SEQ ID NO: 43461 - DNA, 19 bp, Homo sapiens
  siRNA target sequence for WHSC1 (NM_133330.1,3352-3370).
ggatcggaagagtcttcaa

SEQ ID NO: 43462 - DNA, 19 bp, Homo sapiens
  siRNA target sequence for WHSC1 (NM_133330.1,3393-3411).
gctcgttttcgtgaaatta

SEQ ID NO: 43463 - DNA, 19 bp, Homo sapiens
  siRNA target sequence for WHSC1 (NM_133330.1,3397-3415).
gttttcgtgaaattaagct

SEQ ID NO: 43464 - DNA, 19 bp, Homo sapiens
  siRNA target sequence for WHSC1 (NM_133330.1,3419-3437).
gagggaagcccgagaaaca

SEQ ID NO: 43465 - DNA, 19 bp, Homo sapiens
  siRNA target sequence for WHSC1 (NM_133330.1,3451-3469).
gcaagcccccaccatacaa

SEQ ID NO: 43466 - DNA, 19 bp, Homo sapiens
  siRNA target sequence for WHSC1 (NM_133330.1,3460-3478).
caccatacaagcacatcaa

SEQ ID NO: 43467 - DNA, 19 bp, Homo sapiens
  siRNA target sequence for WHSC1 (NM_133330.1,3506-3524).
gatctacacagcggatatt

SEQ ID NO: 43468 - DNA, 19 bp, Homo sapiens
  siRNA target sequence for WHSC1 (NM_133330.1,3795-3813).
gagtgcatggcgagaatca

SEQ ID NO: 43469 - DNA, 19 bp, Homo sapiens
  siRNA target sequence for WHSC1 (NM_133330.1,3894-3912).
ggaaactactctcgattta

SEQ ID NO: 43470 - DNA, 19 bp, Homo sapiens
  siRNA target sequence for WHSC1 (NM_133330.1,3895-3913).
gaaactactctcgatttat

SEQ ID NO: 43471 - DNA, 19 bp, Homo sapiens
  siRNA target sequence for WHSC1 (NM_133330.1,3944-3962).
cctcaagtggacagtgaat

SEQ ID NO: 43472 - DNA, 19 bp, Homo sapiens
  siRNA target sequence for WHSC1 (NM_133330.1,3983-4001).
gtttgccgtctgtgacatt

SEQ ID NO: 43473 - DNA, 19 bp, Homo sapiens
  siRNA target sequence for WHSC1 (NM_133330.1,4006-4024).
cagggacggagctgacttt

SEQ ID NO: 43474 - DNA, 19 bp, Homo sapiens
  siRNA target sequence for WHSC1 (NM_133330.1,4009-4027).
ggacggagctgacttttaa

SEQ ID NO: 43475 - DNA, 19 bp, Homo sapiens
  siRNA target sequence for WHSC1 (NM_133330.1,4012-4030).
cggagctgacttttaacta

SEQ ID NO: 43476 - DNA, 19 bp, Homo sapiens
  siRNA target sequence for WHSC1 (NM_133330.1,4037-4055).
cgattgtctgggcaatgaa

SEQ ID NO: 43477 - DNA, 19 bp, Homo sapiens
  siRNA target sequence for WHSC1 (NM_133330.1,4038-4056).
gattgtctgggcaatgaaa

SEQ ID NO: 43478 - DNA, 19 bp, Homo sapiens
  siRNA target sequence for WHSC1 (NM_133330.1,4068-4086).
cggtgtggagcctccaatt

SEQ ID NO: 43479 - DNA, 19 bp, Homo sapiens
  siRNA target sequence for WHSC1 (NM_133330.1,4251-4269).
ctgtgtgaccgcaagttct

SEQ ID NO: 43480 - DNA, 19 bp, Homo sapiens
  siRNA target sequence for WHSC1 (NM_133330.1,4350-4368).
gacgtgtgtggcaaacctt

SEQ ID NO: 43481 - DNA, 19 bp, Homo sapiens
  siRNA target sequence for WHSC1 (NM_133330.1,4359-4377).
ggcaaaccttcgacttcat

SEQ ID NO: 43482 - DNA, 19 bp, Homo sapiens
  siRNA target sequence for WHSC1 (NM_133330.1,4360-4378).
gcaaaccttcgacttcatt

SEQ ID NO: 43483 - DNA, 19 bp, Homo sapiens
  siRNA target sequence for WHSC1 (NM_133330.1,4361-4379).
caaaccttcgacttcattt

SEQ ID NO: 43484 - DNA, 19 bp, Homo sapiens
  siRNA target sequence for WHSC1 (NM_133330.1,4383-4401).
cacctctgccccaattcgt

SEQ ID NO: 43485 - DNA, 19 bp, Homo sapiens
  siRNA target sequence for WHSC1 (NM_133330.1,4390-4408).
gccccaattcgttctgtaa

SEQ ID NO: 43486 - DNA, 19 bp, Homo sapiens
  siRNA target sequence for WHSC1 (NM_133330.1,4460-4478).
ctgctgtgagcatgactta

SEQ ID NO: 43487 - DNA, 19 bp, Homo sapiens
  siRNA target sequence for WHSC1L1 (NM_017778.2,569-587).
gcaaccacctcaactcatt

SEQ ID NO: 43488 - DNA, 19 bp, Homo sapiens
  siRNA target sequence for WHSC1L1 (NM_017778.2,723-741).
ctcacaaatgggtatccat

SEQ ID NO: 43489 - DNA, 19 bp, Homo sapiens
  siRNA target sequence for WHSC1L1 (NM_017778.2,732-750).
gggtatccatcatcaatca

SEQ ID NO: 43490 - DNA, 19 bp, Homo sapiens
  siRNA target sequence for WHSC1L1 (NM_017778.2,734-752).
gtatccatcatcaatcagt

SEQ ID NO: 43491 - DNA, 19 bp, Homo sapiens
  siRNA target sequence for WHSC1L1 (NM_017778.2,742-760).
catcaatcagtgtgtatga

SEQ ID NO: 43492 - DNA, 19 bp, Homo sapiens
  siRNA target sequence for WHSC1L1 (NM_017778.2,769-787).
ccaaataccagtcatataa

SEQ ID NO: 43493 - DNA, 19 bp, Homo sapiens
  siRNA target sequence for WHSC1L1 (NM_017778.2,813-831).
ggctttggtgcagttagaa

SEQ ID NO: 43494 - DNA, 19 bp, Homo sapiens
  siRNA target sequence for WHSC1L1 (NM_017778.2,819-837).
ggtgcagttagaaacttta

SEQ ID NO: 43495 - DNA, 19 bp, Homo sapiens
  siRNA target sequence for WHSC1L1 (NM_017778.2,833-851).
ctttagccccactgactat

SEQ ID NO: 43496 - DNA, 19 bp, Homo sapiens
  siRNA target sequence for WHSC1L1 (NM_017778.2,838-856).
gccccactgactattatca

SEQ ID NO: 43497 - DNA, 19 bp, Homo sapiens
  siRNA target sequence for WHSC1L1 (NM_017778.2,932-950).
ggtaccacaaactgtgatt

SEQ ID NO: 43498 - DNA, 19 bp, Homo sapiens
  siRNA target sequence for WHSC1L1 (NM_017778.2,964-982).
gctcacctgaaattaaact

SEQ ID NO: 43499 - DNA, 19 bp, Homo sapiens
  siRNA target sequence for WHSC1L1 (NM_017778.2,1002-1020).
cagaatggcagggaattgt

SEQ ID NO: 43500 - DNA, 19 bp, Homo sapiens
  siRNA target sequence for WHSC1L1 (NM_017778.2,1008-1026).
ggcagggaattgtttgagt

SEQ ID NO: 43501 - DNA, 19 bp, Homo sapiens
  siRNA target sequence for WHSC1L1 (NM_017778.2,1032-1050).
ctttgtggagaccttttaa

SEQ ID NO: 43502 - DNA, 19 bp, Homo sapiens
  siRNA target sequence for WHSC1L1 (NM_017778.2,1066-1084).
gtgagcacacgaaatcaaa

SEQ ID NO: 43503 - DNA, 19 bp, Homo sapiens
  siRNA target sequence for WHSC1L1 (NM_017778.2,1146-1164).
gagcgcaagtcacacaaaa

SEQ ID NO: 43504 - DNA, 19 bp, Homo sapiens
  siRNA target sequence for WHSC1L1 (NM_017778.2,1207-1225).
gggttgacactgtatcaga

SEQ ID NO: 43505 - DNA, 19 bp, Homo sapiens
  siRNA target sequence for WHSC1L1 (NM_017778.2,1208-1226).
ggttgacactgtatcagaa

SEQ ID NO: 43506 - DNA, 19 bp, Homo sapiens
  siRNA target sequence for WHSC1L1 (NM_017778.2,1234-1252).
gggaagaaccagtactaaa

SEQ ID NO: 43507 - DNA, 19 bp, Homo sapiens
  siRNA target sequence for WHSC1L1 (NM_017778.2,1271-1289).
gccaatactatcttctgtt

SEQ ID NO: 43508 - DNA, 19 bp, Homo sapiens
  siRNA target sequence for WHSC1L1 (NM_017778.2,1304-1322).
gtccactggtgttaagttt

SEQ ID NO: 43509 - DNA, 19 bp, Homo sapiens
  siRNA target sequence for WHSC1L1 (NM_017778.2,1370-1388).
gccttgtatggtttcaagt

SEQ ID NO: 43510 - DNA, 19 bp, Homo sapiens
  siRNA target sequence for WHSC1L1 (NM_017778.2,1392-1410).
ccccagcttgaggttcata

SEQ ID NO: 43511 - DNA, 19 bp, Homo sapiens
  siRNA target sequence for WHSC1L1 (NM_017778.2,1395-1413).
cagcttgaggttcatacta

SEQ ID NO: 43512 - DNA, 19 bp, Homo sapiens
  siRNA target sequence for WHSC1L1 (NM_017778.2,1397-1415).
gcttgaggttcatactaaa

SEQ ID NO: 43513 - DNA, 19 bp, Homo sapiens
  siRNA target sequence for WHSC1L1 (NM_017778.2,1398-1416).
cttgaggttcatactaaaa

SEQ ID NO: 43514 - DNA, 19 bp, Homo sapiens
  siRNA target sequence for WHSC1L1 (NM_017778.2,1423-1441).
caagaggtgcccgagaata

SEQ ID NO: 43515 - DNA, 19 bp, Homo sapiens
  siRNA target sequence for WHSC1L1 (NM_017778.2,1437-1455).
gaatatcatgtccagtttt

SEQ ID NO: 43516 - DNA, 19 bp, Homo sapiens
  siRNA target sequence for WHSC1L1 (NM_017778.2,1472-1490).
gagggcgtgggttcatgaa

SEQ ID NO: 43517 - DNA, 19 bp, Homo sapiens
  siRNA target sequence for WHSC1L1 (NM_017778.2,1474-1492).
gggcgtgggttcatgaaaa

SEQ ID NO: 43518 - DNA, 19 bp, Homo sapiens
  siRNA target sequence for WHSC1L1 (NM_017778.2,1475-1493).
ggcgtgggttcatgaaaaa

SEQ ID NO: 43519 - DNA, 19 bp, Homo sapiens
  siRNA target sequence for WHSC1L1 (NM_017778.2,1496-1514).
ggtacgagagtataaaggt

SEQ ID NO: 43520 - DNA, 19 bp, Homo sapiens
  siRNA target sequence for WHSC1L1 (NM_017778.2,1501-1519).
gagagtataaaggtcataa

SEQ ID NO: 43521 - DNA, 19 bp, Homo sapiens
  siRNA target sequence for WHSC1L1 (NM_017778.2,1559-1577).
cagcaatcactctgagaaa

SEQ ID NO: 43522 - DNA, 19 bp, Homo sapiens
  siRNA target sequence for WHSC1L1 (NM_017778.2,1749-1767).
gcctccaaaaccgaagtta

SEQ ID NO: 43523 - DNA, 19 bp, Homo sapiens
  siRNA target sequence for WHSC1L1 (NM_017778.2,1750-1768).
cctccaaaaccgaagttaa

SEQ ID NO: 43524 - DNA, 19 bp, Homo sapiens
  siRNA target sequence for WHSC1L1 (NM_017778.2,1751-1769).
ctccaaaaccgaagttaaa

SEQ ID NO: 43525 - DNA, 19 bp, Homo sapiens
  siRNA target sequence for WHSC1L1 (NM_017778.2,1833-1851).
gcctcctcactctcaagta

SEQ ID NO: 43526 - DNA, 19 bp, Homo sapiens
  siRNA target sequence for WHSC1L1 (NM_017778.2,1838-1856).
ctcactctcaagtactgaa

SEQ ID NO: 43527 - DNA, 19 bp, Homo sapiens
  siRNA target sequence for WHSC1L1 (NM_017778.2,1902-1920).
gagccaccgcctgttaaaa

SEQ ID NO: 43528 - DNA, 19 bp, Homo sapiens
  siRNA target sequence for WHSC1L1 (NM_017778.2,1904-1922).
gccaccgcctgttaaaata

SEQ ID NO: 43529 - DNA, 19 bp, Homo sapiens
  siRNA target sequence for WHSC1L1 (NM_017778.2,1937-1955).
ggcagcaaggaaatcctta

SEQ ID NO: 43530 - DNA, 19 bp, Homo sapiens
  siRNA target sequence for WHSC1L1 (NM_017778.2,2006-2024).
catgtctccagttgtgaaa

SEQ ID NO: 43531 - DNA, 19 bp, Homo sapiens
  siRNA target sequence for WHSC1L1 (NM_017778.2,2059-2077).
gggatgggaaatttatcga

SEQ ID NO: 43532 - DNA, 19 bp, Homo sapiens
  siRNA target sequence for WHSC1L1 (NM_017778.2,2060-2078).
ggatgggaaatttatcgat

SEQ ID NO: 43533 - DNA, 19 bp, Homo sapiens
  siRNA target sequence for WHSC1L1 (NM_017778.2,2064-2082).
gggaaatttatcgatcaat

SEQ ID NO: 43534 - DNA, 19 bp, Homo sapiens
  siRNA target sequence for WHSC1L1 (NM_017778.2,2075-2093).
cgatcaatttgtttattca

SEQ ID NO: 43535 - DNA, 19 bp, Homo sapiens
  siRNA target sequence for WHSC1L1 (NM_017778.2,2132-2150).
ggggcaagacaggcttata

SEQ ID NO: 43536 - DNA, 19 bp, Homo sapiens
  siRNA target sequence for WHSC1L1 (NM_017778.2,2133-2151).
gggcaagacaggcttataa

SEQ ID NO: 43537 - DNA, 19 bp, Homo sapiens
  siRNA target sequence for WHSC1L1 (NM_017778.2,2181-2199).
ccaacgcagagtgtatcat

SEQ ID NO: 43538 - DNA, 19 bp, Homo sapiens
  siRNA target sequence for WHSC1L1 (NM_017778.2,2244-2262).
caacagagaagatcaatta

SEQ ID NO: 43539 - DNA, 19 bp, Homo sapiens
  siRNA target sequence for WHSC1L1 (NM_017778.2,2263-2281).
gaactcgttctgaatcaga

SEQ ID NO: 43540 - DNA, 19 bp, Homo sapiens
  siRNA target sequence for WHSC1L1 (NM_017778.2,2268-2286).
cgttctgaatcagagaaat

SEQ ID NO: 43541 - DNA, 19 bp, Homo sapiens
  siRNA target sequence for WHSC1L1 (NM_017778.2,2292-2310).
gaggttgtgccaaagaaga

SEQ ID NO: 43542 - DNA, 19 bp, Homo sapiens
  siRNA target sequence for WHSC1L1 (NM_017778.2,2396-2414).
gggctctgtcagattcagt

SEQ ID NO: 43543 - DNA, 19 bp, Homo sapiens
  siRNA target sequence for WHSC1L1 (NM_023034.1,2376-2394).
gccagcgagatttcagatt

SEQ ID NO: 43544 - DNA, 19 bp, Homo sapiens
  siRNA target sequence for WHSC1L1 (NM_023034.1,2395-2413).
cctgtaaacctctaaagaa

SEQ ID NO: 43545 - DNA, 19 bp, Homo sapiens
  siRNA target sequence for WHSC1L1 (NM_023034.1,2417-2435).
gagtcgcgcctcaactgat

SEQ ID NO: 43546 - DNA, 19 bp, Homo sapiens
  siRNA target sequence for WHSC1L1 (NM_023034.1,2422-2440).
gcgcctcaactgatgtaga

SEQ ID NO: 43547 - DNA, 19 bp, Homo sapiens
  siRNA target sequence for WHSC1L1 (NM_023034.1,2423-2441).
cgcctcaactgatgtagaa

SEQ ID NO: 43548 - DNA, 19 bp, Homo sapiens
  siRNA target sequence for WHSC1L1 (NM_023034.1,2424-2442).
gcctcaactgatgtagaaa

SEQ ID NO: 43549 - DNA, 19 bp, Homo sapiens
  siRNA target sequence for WHSC1L1 (NM_023034.1,2433-2451).
gatgtagaaatgactagtt

SEQ ID NO: 43550 - DNA, 19 bp, Homo sapiens
  siRNA target sequence for WHSC1L1 (NM_023034.1,2504-2522).
ggtaggctttggaaagcaa

SEQ ID NO: 43551 - DNA, 19 bp, Homo sapiens
  siRNA target sequence for WHSC1L1 (NM_023034.1,2509-2527).
gctttggaaagcaagtaga

SEQ ID NO: 43552 - DNA, 19 bp, Homo sapiens
  siRNA target sequence for WHSC1L1 (NM_023034.1,2567-2585).
gcagtccatggattcaagt

SEQ ID NO: 43553 - DNA, 19 bp, Homo sapiens
  siRNA target sequence for WHSC1L1 (NM_023034.1,2619-2637).
gacactgtatgtcagattt

SEQ ID NO: 43554 - DNA, 19 bp, Homo sapiens
  siRNA target sequence for WHSC1L1 (NM_023034.1,2673-2691).
ggagagtgctgcaaacact

SEQ ID NO: 43555 - DNA, 19 bp, Homo sapiens
  siRNA target sequence for WHSC1L1 (NM_023034.1,2674-2692).
gagagtgctgcaaacactt

SEQ ID NO: 43556 - DNA, 19 bp, Homo sapiens
  siRNA target sequence for WHSC1L1 (NM_023034.1,2760-2778).
gggcagcacccatgttttt

SEQ ID NO: 43557 - DNA, 19 bp, Homo sapiens
  siRNA target sequence for WHSC1L1 (NM_023034.1,2763-2781).
cagcacccatgtttttcgt

SEQ ID NO: 43558 - DNA, 19 bp, Homo sapiens
  siRNA target sequence for WHSC1L1 (NM_023034.1,2768-2786).
cccatgtttttcgtgtaaa

SEQ ID NO: 43559 - DNA, 19 bp, Homo sapiens
  siRNA target sequence for WHSC1L1 (NM_023034.1,2770-2788).
catgtttttcgtgtaaagt

SEQ ID NO: 43560 - DNA, 19 bp, Homo sapiens
  siRNA target sequence for WHSC1L1 (NM_023034.1,2869-2887).
ctgccatctttgaatcaaa

SEQ ID NO: 43561 - DNA, 19 bp, Homo sapiens
  siRNA target sequence for WHSC1L1 (NM_023034.1,2958-2976).
ggccgcatgatgagatgtt

SEQ ID NO: 43562 - DNA, 19 bp, Homo sapiens
  siRNA target sequence for WHSC1L1 (NM_023034.1,2959-2977).
gccgcatgatgagatgttt

SEQ ID NO: 43563 - DNA, 19 bp, Homo sapiens
  siRNA target sequence for WHSC1L1 (NM_023034.1,2999-3017).
ctctggagatgcttgcatt

SEQ ID NO: 43564 - DNA, 19 bp, Homo sapiens
  siRNA target sequence for WHSC1L1 (NM_023034.1,3032-3050).
gttagtatcctcctacatt

SEQ ID NO: 43565 - DNA, 19 bp, Homo sapiens
  siRNA target sequence for WHSC1L1 (NM_023034.1,3036-3054).
gtatcctcctacattctca

SEQ ID NO: 43566 - DNA, 19 bp, Homo sapiens
  siRNA target sequence for WHSC1L1 (NM_023034.1,3051-3069).
ctcatctgtagtaatcatt

SEQ ID NO: 43567 - DNA, 19 bp, Homo sapiens
  siRNA target sequence for WHSC1L1 (NM_023034.1,3121-3139).
gtgccagagggctgatagt

SEQ ID NO: 43568 - DNA, 19 bp, Homo sapiens
  siRNA target sequence for WHSC1L1 (NM_023034.1,3124-3142).
ccagagggctgatagttca

SEQ ID NO: 43569 - DNA, 19 bp, Homo sapiens
  siRNA target sequence for WHSC1L1 (NM_023034.1,3147-3165).
cattcagaccccatgttca

SEQ ID NO: 43570 - DNA, 19 bp, Homo sapiens
  siRNA target sequence for WHSC1L1 (NM_023034.1,3155-3173).
ccccatgttcagttcatat

SEQ ID NO: 43571 - DNA, 19 bp, Homo sapiens
  siRNA target sequence for WHSC1L1 (NM_023034.1,3186-3204).
cactacctactgaatgaat

SEQ ID NO: 43572 - DNA, 19 bp, Homo sapiens
  siRNA target sequence for WHSC1L1 (NM_023034.1,3205-3223).
caaatcgtgctgagttgat

SEQ ID NO: 43573 - DNA, 19 bp, Homo sapiens
  siRNA target sequence for WHSC1L1 (NM_023034.1,3210-3228).
cgtgctgagttgatgaaat

SEQ ID NO: 43574 - DNA, 19 bp, Homo sapiens
  siRNA target sequence for WHSC1L1 (NM_023034.1,3211-3229).
gtgctgagttgatgaaatt

SEQ ID NO: 43575 - DNA, 19 bp, Homo sapiens
  siRNA target sequence for WHSC1L1 (NM_023034.1,3216-3234).
gagttgatgaaattaccta

SEQ ID NO: 43576 - DNA, 19 bp, Homo sapiens
  siRNA target sequence for WHSC1L1 (NM_023034.1,3320-3338).
cccggaatgcctaagcata

SEQ ID NO: 43577 - DNA, 19 bp, Homo sapiens
  siRNA target sequence for WHSC1L1 (NM_023034.1,3371-3389).
ctgtaaagctggcaagaaa

SEQ ID NO: 43578 - DNA, 19 bp, Homo sapiens
  siRNA target sequence for WHSC1L1 (NM_023034.1,3378-3396).
gctggcaagaaactacatt

SEQ ID NO: 43579 - DNA, 19 bp, Homo sapiens
  siRNA target sequence for WHSC1L1 (NM_023034.1,3379-3397).
ctggcaagaaactacatta

SEQ ID NO: 43580 - DNA, 19 bp, Homo sapiens
  siRNA target sequence for WHSC1L1 (NM_023034.1,3463-3481).
ggtctgtgccactgaacat

SEQ ID NO: 43581 - DNA, 19 bp, Homo sapiens
  siRNA target sequence for WHSC1L1 (NM_023034.1,3479-3497).
catccagggccttaaacat

SEQ ID NO: 43582 - DNA, 19 bp, Homo sapiens
  siRNA target sequence for WHSC1L1 (NM_023034.1,3505-3523).
gggacttccctgtattctt

SEQ ID NO: 43583 - DNA, 19 bp, Homo sapiens
  siRNA target sequence for WHSC1L1 (NM_023034.1,3560-3578).
cagagtgttcccttatgtt

SEQ ID NO: 43584 - DNA, 19 bp, Homo sapiens
  siRNA target sequence for WHSC1L1 (NM_023034.1,3562-3580).
gagtgttcccttatgttga

SEQ ID NO: 43585 - DNA, 19 bp, Homo sapiens
  siRNA target sequence for WHSC1L1 (NM_023034.1,3576-3594).
gttgaaggagacaaaagct

SEQ ID NO: 43586 - DNA, 19 bp, Homo sapiens
  siRNA target sequence for WHSC1L1 (NM_023034.1,3598-3616).
ctgaagggcagactagtat

SEQ ID NO: 43587 - DNA, 19 bp, Homo sapiens
  siRNA target sequence for WHSC1L1 (NM_023034.1,3600-3618).
gaagggcagactagtatta

SEQ ID NO: 43588 - DNA, 19 bp, Homo sapiens
  siRNA target sequence for WHSC1L1 (NM_023034.1,3603-3621).
gggcagactagtattaaca

SEQ ID NO: 43589 - DNA, 19 bp, Homo sapiens
  siRNA target sequence for WHSC1L1 (NM_023034.1,3604-3622).
ggcagactagtattaacaa

SEQ ID NO: 43590 - DNA, 19 bp, Homo sapiens
  siRNA target sequence for WHSC1L1 (NM_023034.1,3606-3624).
cagactagtattaacaaga

SEQ ID NO: 43591 - DNA, 19 bp, Homo sapiens
  siRNA target sequence for WHSC1L1 (NM_023034.1,3642-3660).
gaagaagctgcaaaacgtt

SEQ ID NO: 43592 - DNA, 19 bp, Homo sapiens
  siRNA target sequence for WHSC1L1 (NM_023034.1,3693-3711).
gaagccctagagattgaaa

SEQ ID NO: 43593 - DNA, 19 bp, Homo sapiens
  siRNA target sequence for WHSC1L1 (NM_023034.1,3746-3764).
caaagctaacaaagtaata

SEQ ID NO: 43594 - DNA, 19 bp, Homo sapiens
  siRNA target sequence for WHSC1L1 (NM_023034.1,3750-3768).
gctaacaaagtaataggaa

SEQ ID NO: 43595 - DNA, 19 bp, Homo sapiens
  siRNA target sequence for WHSC1L1 (NM_023034.1,3798-3816).
gagattccccgctgtaact

SEQ ID NO: 43596 - DNA, 19 bp, Homo sapiens
  siRNA target sequence for WHSC1L1 (NM_023034.1,3997-4015).
ggaccaaaaggagcattaa

SEQ ID NO: 43597 - DNA, 19 bp, Homo sapiens
  siRNA target sequence for WHSC1L1 (NM_023034.1,4035-4053).
gaatacgtcggtgaattaa

SEQ ID NO: 43598 - DNA, 19 bp, Homo sapiens
  siRNA target sequence for WHSC1L1 (NM_023034.1,4040-4058).
cgtcggtgaattaattgat

SEQ ID NO: 43599 - DNA, 19 bp, Homo sapiens
  siRNA target sequence for WHSC1L1 (NM_023034.1,4043-4061).
cggtgaattaattgatgaa

SEQ ID NO: 43600 - DNA, 19 bp, Homo sapiens
  siRNA target sequence for WHSC1L1 (NM_023034.1,4094-4112).
cgagaacagtgtaactaat

SEQ ID NO: 43601 - DNA, 19 bp, Homo sapiens
  siRNA target sequence for WHSC1L1 (NM_023034.1,4095-4113).
gagaacagtgtaactaatt

SEQ ID NO: 43602 - DNA, 19 bp, Homo sapiens
  siRNA target sequence for WHSC1L1 (NM_023034.1,4128-4146).
gttaccaaggaccgtataa

SEQ ID NO: 43603 - DNA, 19 bp, Homo sapiens
  siRNA target sequence for WHSC1L1 (NM_023034.1,4251-4269).
ctatttgctctctgtgata

SEQ ID NO: 43604 - DNA, 19 bp, Homo sapiens
  siRNA target sequence for WHSC1L1 (NM_023034.1,4275-4293).
gcagggatggagttaacat

SEQ ID NO: 43605 - DNA, 19 bp, Homo sapiens
  siRNA target sequence for WHSC1L1 (NM_023034.1,4276-4294).
cagggatggagttaacatt

SEQ ID NO: 43606 - DNA, 19 bp, Homo sapiens
  siRNA target sequence for WHSC1L1 (NM_023034.1,4387-4405).
cggcatgtgcgtcaacaaa

SEQ ID NO: 43607 - DNA, 19 bp, Homo sapiens
  siRNA target sequence for WHSC1L1 (NM_023034.1,4388-4406).
ggcatgtgcgtcaacaaat

SEQ ID NO: 43608 - DNA, 19 bp, Homo sapiens
  siRNA target sequence for WHSC1L1 (NM_023034.1,4442-4460).
gagacgaaagatcaaaaca

SEQ ID NO: 43609 - DNA, 19 bp, Homo sapiens
  siRNA target sequence for WHSC1L1 (NM_023034.1,4767-4785).
gaatactggagcaagataa

SEQ ID NO: 43610 - DNA, 19 bp, Homo sapiens
  siRNA target sequence for WRN (NM_000553.2,935-953).
cactggatccattgtgtat

SEQ ID NO: 43611 - DNA, 19 bp, Homo sapiens
  siRNA target sequence for WRN (NM_000553.2,944-962).
cattgtgtatagttacgat

SEQ ID NO: 43612 - DNA, 19 bp, Homo sapiens
  siRNA target sequence for WRN (NM_000553.2,981-999).
ctgtcagaagatattagca

SEQ ID NO: 43613 - DNA, 19 bp, Homo sapiens
  siRNA target sequence for WRN (NM_000553.2,1043-1061).
gccaccattatacaataga

SEQ ID NO: 43614 - DNA, 19 bp, Homo sapiens
  siRNA target sequence for WRN (NM_000553.2,1083-1101).
ctaattcagttgtgtgttt

SEQ ID NO: 43615 - DNA, 19 bp, Homo sapiens
  siRNA target sequence for WRN (NM_000553.2,1143-1161).
gtttttccccagggattaa

SEQ ID NO: 43616 - DNA, 19 bp, Homo sapiens
  siRNA target sequence for WRN (NM_000553.2,1213-1231).
gagatcagtggaaacttct

SEQ ID NO: 43617 - DNA, 19 bp, Homo sapiens
  siRNA target sequence for WRN (NM_000553.2,1223-1241).
gaaacttctacgtgacttt

SEQ ID NO: 43618 - DNA, 19 bp, Homo sapiens
  siRNA target sequence for WRN (NM_000553.2,1227-1245).
cttctacgtgactttgata

SEQ ID NO: 43619 - DNA, 19 bp, Homo sapiens
  siRNA target sequence for WRN (NM_000553.2,1230-1248).
ctacgtgactttgatatca

SEQ ID NO: 43620 - DNA, 19 bp, Homo sapiens
  siRNA target sequence for WRN (NM_000553.2,1233-1251).
cgtgactttgatatcaaat

SEQ ID NO: 43621 - DNA, 19 bp, Homo sapiens
  siRNA target sequence for WRN (NM_000553.2,1234-1252).
gtgactttgatatcaaatt

SEQ ID NO: 43622 - DNA, 19 bp, Homo sapiens
  siRNA target sequence for WRN (NM_000553.2,1305-1323).
gagacctggagccttaaca

SEQ ID NO: 43623 - DNA, 19 bp, Homo sapiens
  siRNA target sequence for WRN (NM_000553.2,1307-1325).
gacctggagccttaacagt

SEQ ID NO: 43624 - DNA, 19 bp, Homo sapiens
  siRNA target sequence for WRN (NM_000553.2,1316-1334).
ccttaacagtctggttaaa

SEQ ID NO: 43625 - DNA, 19 bp, Homo sapiens
  siRNA target sequence for WRN (NM_000553.2,1329-1347).
gttaaacacctcttaggta

SEQ ID NO: 43626 - DNA, 19 bp, Homo sapiens
  siRNA target sequence for WRN (NM_000553.2,1367-1385).
gtctatccgctgtagcaat

SEQ ID NO: 43627 - DNA, 19 bp, Homo sapiens
  siRNA target sequence for WRN (NM_000553.2,1434-1452).
gatgcttatgctggtttta

SEQ ID NO: 43628 - DNA, 19 bp, Homo sapiens
  siRNA target sequence for WRN (NM_000553.2,1491-1509).
caaaggtttgctataaata

SEQ ID NO: 43629 - DNA, 19 bp, Homo sapiens
  siRNA target sequence for WRN (NM_000553.2,1531-1549).
gcgacatgaacaaacagtt

SEQ ID NO: 43630 - DNA, 19 bp, Homo sapiens
  siRNA target sequence for WRN (NM_000553.2,1620-1638).
ccacggagggtttctatct

SEQ ID NO: 43631 - DNA, 19 bp, Homo sapiens
  siRNA target sequence for WRN (NM_000553.2,1621-1639).
cacggagggtttctatctt

SEQ ID NO: 43632 - DNA, 19 bp, Homo sapiens
  siRNA target sequence for WRN (NM_000553.2,1624-1642).
ggagggtttctatcttact

SEQ ID NO: 43633 - DNA, 19 bp, Homo sapiens
  siRNA target sequence for WRN (NM_000553.2,1625-1643).
gagggtttctatcttacta

SEQ ID NO: 43634 - DNA, 19 bp, Homo sapiens
  siRNA target sequence for WRN (NM_000553.2,1633-1651).
ctatcttactaaaggatat

SEQ ID NO: 43635 - DNA, 19 bp, Homo sapiens
  siRNA target sequence for WRN (NM_000553.2,1689-1707).
gggtctactaacattgaga

SEQ ID NO: 43636 - DNA, 19 bp, Homo sapiens
  siRNA target sequence for WRN (NM_000553.2,1717-1735).
ggcccagcaataatttaaa

SEQ ID NO: 43637 - DNA, 19 bp, Homo sapiens
  siRNA target sequence for WRN (NM_000553.2,1719-1737).
cccagcaataatttaaact

SEQ ID NO: 43638 - DNA, 19 bp, Homo sapiens
  siRNA target sequence for WRN (NM_000553.2,1720-1738).
ccagcaataatttaaactt

SEQ ID NO: 43639 - DNA, 19 bp, Homo sapiens
  siRNA target sequence for WRN (NM_000553.2,1736-1754).
cttattatcctttgaagat

SEQ ID NO: 43640 - DNA, 19 bp, Homo sapiens
  siRNA target sequence for WRN (NM_000553.2,1745-1763).
ctttgaagattcaactact

SEQ ID NO: 43641 - DNA, 19 bp, Homo sapiens
  siRNA target sequence for WRN (NM_000553.2,1759-1777).
ctactgggggagtacaaca

SEQ ID NO: 43642 - DNA, 19 bp, Homo sapiens
  siRNA target sequence for WRN (NM_000553.2,1766-1784).
gggagtacaacagaaacaa

SEQ ID NO: 43643 - DNA, 19 bp, Homo sapiens
  siRNA target sequence for WRN (NM_000553.2,1770-1788).
gtacaacagaaacaaatta

SEQ ID NO: 43644 - DNA, 19 bp, Homo sapiens
  siRNA target sequence for WRN (NM_000553.2,1789-1807).
gagaacatgaagttttaat

SEQ ID NO: 43645 - DNA, 19 bp, Homo sapiens
  siRNA target sequence for WRN (NM_000553.2,1809-1827).
cacgttgaagatgaaacat

SEQ ID NO: 43646 - DNA, 19 bp, Homo sapiens
  siRNA target sequence for WRN (NM_000553.2,1828-1846).
gggacccaacacttgatca

SEQ ID NO: 43647 - DNA, 19 bp, Homo sapiens
  siRNA target sequence for WRN (NM_000553.2,1830-1848).
gacccaacacttgatcatt

SEQ ID NO: 43648 - DNA, 19 bp, Homo sapiens
  siRNA target sequence for WRN (NM_000553.2,1960-1978).
gtttgatgtcgttagatat

SEQ ID NO: 43649 - DNA, 19 bp, Homo sapiens
  siRNA target sequence for WRN (NM_000553.2,1964-1982).
gatgtcgttagatattaca

SEQ ID NO: 43650 - DNA, 19 bp, Homo sapiens
  siRNA target sequence for WRN (NM_000553.2,1967-1985).
gtcgttagatattacagaa

SEQ ID NO: 43651 - DNA, 19 bp, Homo sapiens
  siRNA target sequence for WRN (NM_000553.2,2243-2261).
cacggtagaaccaactcat

SEQ ID NO: 43652 - DNA, 19 bp, Homo sapiens
  siRNA target sequence for WRN (NM_000553.2,2246-2264).
ggtagaaccaactcattct

SEQ ID NO: 43653 - DNA, 19 bp, Homo sapiens
  siRNA target sequence for WRN (NM_000553.2,2291-2309).
gggtcttcctactaaagaa

SEQ ID NO: 43654 - DNA, 19 bp, Homo sapiens
  siRNA target sequence for WRN (NM_000553.2,2401-2419).
cttgcctcaagatgtactt

SEQ ID NO: 43655 - DNA, 19 bp, Homo sapiens
  siRNA target sequence for WRN (NM_000553.2,2423-2441).
ccattccagttttaaacca

SEQ ID NO: 43656 - DNA, 19 bp, Homo sapiens
  siRNA target sequence for WRN (NM_000553.2,2450-2468).
gaaagtgattcattcagta

SEQ ID NO: 43657 - DNA, 19 bp, Homo sapiens
  siRNA target sequence for WRN (NM_000553.2,2498-2516).
catggcaactggatatgga

SEQ ID NO: 43658 - DNA, 19 bp, Homo sapiens
  siRNA target sequence for WRN (NM_000553.2,2534-2552).
gtatccacctgtttatgta

SEQ ID NO: 43659 - DNA, 19 bp, Homo sapiens
  siRNA target sequence for WRN (NM_000553.2,2604-2622).
gtgctacagcttaaaatgt

SEQ ID NO: 43660 - DNA, 19 bp, Homo sapiens
  siRNA target sequence for WRN (NM_000553.2,2646-2664).
ggatcagcacagtcagaaa

SEQ ID NO: 43661 - DNA, 19 bp, Homo sapiens
  siRNA target sequence for WRN (NM_000553.2,2647-2665).
gatcagcacagtcagaaaa

SEQ ID NO: 43662 - DNA, 19 bp, Homo sapiens
  siRNA target sequence for WRN (NM_000553.2,2689-2707).
gtaaataccggattgtata

SEQ ID NO: 43663 - DNA, 19 bp, Homo sapiens
  siRNA target sequence for WRN (NM_000553.2,2708-2726).
cgtaactccagaatactgt

SEQ ID NO: 43664 - DNA, 19 bp, Homo sapiens
  siRNA target sequence for WRN (NM_000553.2,2709-2727).
gtaactccagaatactgtt

SEQ ID NO: 43665 - DNA, 19 bp, Homo sapiens
  siRNA target sequence for WRN (NM_000553.2,2754-2772).
cttgaggctgatattggta

SEQ ID NO: 43666 - DNA, 19 bp, Homo sapiens
  siRNA target sequence for WRN (NM_000553.2,2846-2864).
gttgggctccctaaagaca

SEQ ID NO: 43667 - DNA, 19 bp, Homo sapiens
  siRNA target sequence for WRN (NM_000553.2,2870-2888).
gccaatggttccaatcgtt

SEQ ID NO: 43668 - DNA, 19 bp, Homo sapiens
  siRNA target sequence for WRN (NM_000553.2,2911-2929).
cttcaatccgggaagacat

SEQ ID NO: 43669 - DNA, 19 bp, Homo sapiens
  siRNA target sequence for WRN (NM_000553.2,2914-2932).
caatccgggaagacattgt

SEQ ID NO: 43670 - DNA, 19 bp, Homo sapiens
  siRNA target sequence for WRN (NM_000553.2,2925-2943).
gacattgtacgttgcttaa

SEQ ID NO: 43671 - DNA, 19 bp, Homo sapiens
  siRNA target sequence for WRN (NM_000553.2,2960-2978).
gatcacctgtactggtttt

SEQ ID NO: 43672 - DNA, 19 bp, Homo sapiens
  siRNA target sequence for WRN (NM_000553.2,2963-2981).
cacctgtactggttttgat

SEQ ID NO: 43673 - DNA, 19 bp, Homo sapiens
  siRNA target sequence for WRN (NM_000553.2,2979-2997).
gatcgaccaaacctgtatt

SEQ ID NO: 43674 - DNA, 19 bp, Homo sapiens
  siRNA target sequence for WRN (NM_000553.2,3007-3025).
ggcgaaaaacagggaatat

SEQ ID NO: 43675 - DNA, 19 bp, Homo sapiens
  siRNA target sequence for WRN (NM_000553.2,3081-3099).
ggtccaacaatcatctact

SEQ ID NO: 43676 - DNA, 19 bp, Homo sapiens
  siRNA target sequence for WRN (NM_000553.2,3170-3188).
ccatgcgggcatgagtttt

SEQ ID NO: 43677 - DNA, 19 bp, Homo sapiens
  siRNA target sequence for WRN (NM_000553.2,3171-3189).
catgcgggcatgagtttta

SEQ ID NO: 43678 - DNA, 19 bp, Homo sapiens
  siRNA target sequence for WRN (NM_000553.2,3174-3192).
gcgggcatgagttttagca

SEQ ID NO: 43679 - DNA, 19 bp, Homo sapiens
  siRNA target sequence for WRN (NM_000553.2,3214-3232).
ggtttgtaagagatgaaat

SEQ ID NO: 43680 - DNA, 19 bp, Homo sapiens
  siRNA target sequence for WRN (NM_000553.2,3215-3233).
gtttgtaagagatgaaatt

SEQ ID NO: 43681 - DNA, 19 bp, Homo sapiens
  siRNA target sequence for WRN (NM_000553.2,3236-3254).
gtgtgtcatagctaccata

SEQ ID NO: 43682 - DNA, 19 bp, Homo sapiens
  siRNA target sequence for WRN (NM_000553.2,3240-3258).
gtcatagctaccatagctt

SEQ ID NO: 43683 - DNA, 19 bp, Homo sapiens
  siRNA target sequence for WRN (NM_000553.2,3242-3260).
catagctaccatagctttt

SEQ ID NO: 43684 - DNA, 19 bp, Homo sapiens
  siRNA target sequence for WRN (NM_000553.2,3246-3264).
gctaccatagcttttggaa

SEQ ID NO: 43685 - DNA, 19 bp, Homo sapiens
  siRNA target sequence for WRN (NM_000553.2,3256-3274).
cttttggaatgggcattaa

SEQ ID NO: 43686 - DNA, 19 bp, Homo sapiens
  siRNA target sequence for WRN (NM_000553.2,3280-3298).
ctgacattcgccaagtcat

SEQ ID NO: 43687 - DNA, 19 bp, Homo sapiens
  siRNA target sequence for WRN (NM_000553.2,3284-3302).
cattcgccaagtcattcat

SEQ ID NO: 43688 - DNA, 19 bp, Homo sapiens
  siRNA target sequence for WRN (NM_000553.2,3309-3327).
gctcctaaggacatggaat

SEQ ID NO: 43689 - DNA, 19 bp, Homo sapiens
  siRNA target sequence for WRN (NM_000553.2,3312-3330).
cctaaggacatggaatcat

SEQ ID NO: 43690 - DNA, 19 bp, Homo sapiens
  siRNA target sequence for WRN (NM_000553.2,3393-3411).
gctcctgcagacattaact

SEQ ID NO: 43691 - DNA, 19 bp, Homo sapiens
  siRNA target sequence for WRN (NM_000553.2,3419-3437).
gcaccttcttactgagata

SEQ ID NO: 43692 - DNA, 19 bp, Homo sapiens
  siRNA target sequence for WRN (NM_000553.2,3430-3448).
ctgagatacgtaatgagaa

SEQ ID NO: 43693 - DNA, 19 bp, Homo sapiens
  siRNA target sequence for WRN (NM_000553.2,3438-3456).
cgtaatgagaagtttcgat

SEQ ID NO: 43694 - DNA, 19 bp, Homo sapiens
  siRNA target sequence for WRN (NM_000553.2,3439-3457).
gtaatgagaagtttcgatt

SEQ ID NO: 43695 - DNA, 19 bp, Homo sapiens
  siRNA target sequence for WRN (NM_000553.2,3449-3467).
gtttcgattatacaaatta

SEQ ID NO: 43696 - DNA, 19 bp, Homo sapiens
  siRNA target sequence for WRN (NM_000553.2,3511-3529).
gtaggagacaaatcatctt

SEQ ID NO: 43697 - DNA, 19 bp, Homo sapiens
  siRNA target sequence for WRN (NM_000553.2,3610-3628).
ccagattggatcattgcta

SEQ ID NO: 43698 - DNA, 19 bp, Homo sapiens
  siRNA target sequence for WRN (NM_000553.2,3636-3654).
gatgactcagaggatacat

SEQ ID NO: 43699 - DNA, 19 bp, Homo sapiens
  siRNA target sequence for WRN (NM_000553.2,3672-3690).
caagcatttaagcttttgt

SEQ ID NO: 43700 - DNA, 19 bp, Homo sapiens
  siRNA target sequence for WRN (NM_000553.2,3689-3707).
gtctgctgtggacatctta

SEQ ID NO: 43701 - DNA, 19 bp, Homo sapiens
  siRNA target sequence for WRN (NM_000553.2,3698-3716).
ggacatcttaggcgaaaaa

SEQ ID NO: 43702 - DNA, 19 bp, Homo sapiens
  siRNA target sequence for WRN (NM_000553.2,3699-3717).
gacatcttaggcgaaaaat

SEQ ID NO: 43703 - DNA, 19 bp, Homo sapiens
  siRNA target sequence for WRN (NM_000553.2,3701-3719).
catcttaggcgaaaaattt

SEQ ID NO: 43704 - DNA, 19 bp, Homo sapiens
  siRNA target sequence for WRN (NM_000553.2,3704-3722).
cttaggcgaaaaatttgga

SEQ ID NO: 43705 - DNA, 19 bp, Homo sapiens
  siRNA target sequence for WRN (NM_000553.2,3727-3745).
ggcttccaattttatttct

SEQ ID NO: 43706 - DNA, 19 bp, Homo sapiens
  siRNA target sequence for WRN (NM_000553.2,3762-3780).
cagcgtcttgccgatcaat

SEQ ID NO: 43707 - DNA, 19 bp, Homo sapiens
  siRNA target sequence for WRN (NM_000553.2,3764-3782).
gcgtcttgccgatcaatat

SEQ ID NO: 43708 - DNA, 19 bp, Homo sapiens
  siRNA target sequence for WRN (NM_000553.2,3863-3881).
gggattcttggtagaagtt

SEQ ID NO: 43709 - DNA, 19 bp, Homo sapiens
  siRNA target sequence for WRN (NM_000553.2,3879-3897).
gtttctcggtataacaaat

SEQ ID NO: 43710 - DNA, 19 bp, Homo sapiens
  siRNA target sequence for WRN (NM_000553.2,3883-3901).
ctcggtataacaaatttat

SEQ ID NO: 43711 - DNA, 19 bp, Homo sapiens
  siRNA target sequence for WRN (NM_000553.2,3885-3903).
cggtataacaaatttatga

SEQ ID NO: 43712 - DNA, 19 bp, Homo sapiens
  siRNA target sequence for WRN (NM_000553.2,3928-3946).
gtagaaattggcttcataa

SEQ ID NO: 43713 - DNA, 19 bp, Homo sapiens
  siRNA target sequence for WRN (NM_000553.2,3938-3956).
gcttcataaagctaataca

SEQ ID NO: 43714 - DNA, 19 bp, Homo sapiens
  siRNA target sequence for WRN (NM_000553.2,3942-3960).
cataaagctaatacagaat

SEQ ID NO: 43715 - DNA, 19 bp, Homo sapiens
  siRNA target sequence for WRN (NM_000553.2,3967-3985).
gcctcatccttcaagctaa

SEQ ID NO: 43716 - DNA, 19 bp, Homo sapiens
  siRNA target sequence for WRN (NM_000553.2,3990-4008).
gaattgtgtccaaagaagt

SEQ ID NO: 43717 - DNA, 19 bp, Homo sapiens
  siRNA target sequence for WRN (NM_000553.2,4011-4029).
cttctgcctagttcgaaaa

SEQ ID NO: 43718 - DNA, 19 bp, Homo sapiens
  siRNA target sequence for WRN (NM_000553.2,4016-4034).
gcctagttcgaaaactgta

SEQ ID NO: 43719 - DNA, 19 bp, Homo sapiens
  siRNA target sequence for WRN (NM_000553.2,4017-4035).
cctagttcgaaaactgtat

SEQ ID NO: 43720 - DNA, 19 bp, Homo sapiens
  siRNA target sequence for WRN (NM_000553.2,4041-4059).
ggcaccaaagagcattgtt

SEQ ID NO: 43721 - DNA, 19 bp, Homo sapiens
  siRNA target sequence for WRN (NM_000553.2,4120-4138).
cttataaaccatgtgataa

SEQ ID NO: 43722 - DNA, 19 bp, Homo sapiens
  siRNA target sequence for WRN (NM_000553.2,4178-4196).
ggtacagtcaccagaaaaa

SEQ ID NO: 43723 - DNA, 19 bp, Homo sapiens
  siRNA target sequence for WRN (NM_000553.2,4204-4222).
gttcctcacagcctgttat

SEQ ID NO: 43724 - DNA, 19 bp, Homo sapiens
  siRNA target sequence for WRN (NM_000553.2,4238-4256).
ggagactcagattgtgtta

SEQ ID NO: 43725 - DNA, 19 bp, Homo sapiens
  siRNA target sequence for WRN (NM_000553.2,4360-4378).
gaccaactacggttgaaaa

SEQ ID NO: 43726 - DNA, 19 bp, Homo sapiens
  siRNA target sequence for WRN (NM_000553.2,4363-4381).
caactacggttgaaaacgt

SEQ ID NO: 43727 - DNA, 19 bp, Homo sapiens
  siRNA target sequence for WRN (NM_000553.2,4366-4384).
ctacggttgaaaacgtaaa

SEQ ID NO: 43728 - DNA, 19 bp, Homo sapiens
  siRNA target sequence for WRN (NM_000553.2,4387-4405).
ggattgatggtgtttctga

SEQ ID NO: 43729 - DNA, 19 bp, Homo sapiens
  siRNA target sequence for WRN (NM_000553.2,4470-4488).
gttcagacagacctctttt

SEQ ID NO: 43730 - DNA, 19 bp, Homo sapiens
  siRNA target sequence for WRN (NM_000553.2,4479-4497).
gacctcttttcaagtacaa

SEQ ID NO: 43731 - DNA, 19 bp, Homo sapiens
  siRNA target sequence for WRN (NM_000553.2,4557-4575).
cagtctatggccatcacat

SEQ ID NO: 43732 - DNA, 19 bp, Homo sapiens
  siRNA target sequence for WRN (NM_000553.2,4565-4583).
ggccatcacatactcttta

SEQ ID NO: 43733 - DNA, 19 bp, Homo sapiens
  siRNA target sequence for WRN (NM_000553.2,4566-4584).
gccatcacatactctttat

SEQ ID NO: 43734 - DNA, 19 bp, Homo sapiens
  siRNA target sequence for WRN (NM_000553.2,4567-4585).
ccatcacatactctttatt

SEQ ID NO: 43735 - DNA, 19 bp, Homo sapiens
  siRNA target sequence for WRN (NM_000553.2,4678-4696).
ctggctgcccccttgattt

SEQ ID NO: 43736 - DNA, 19 bp, Homo sapiens
  siRNA target sequence for WRN (NM_000553.2,4721-4739).
ggttcagaagattattgct

SEQ ID NO: 43737 - DNA, 19 bp, Homo sapiens
  siRNA target sequence for WRN (NM_000553.2,4756-4774).
ctcccgtcaactcagatat

SEQ ID NO: 43738 - DNA, 19 bp, Homo sapiens
  siRNA target sequence for WRN (NM_000553.2,4760-4778).
cgtcaactcagatatgagt

SEQ ID NO: 43739 - DNA, 19 bp, Homo sapiens
  siRNA target sequence for WRN (NM_000553.2,4761-4779).
gtcaactcagatatgagta

SEQ ID NO: 43740 - DNA, 19 bp, Homo sapiens
  siRNA target sequence for WRN (NM_000553.2,4786-4804).
gcctaatcagaatgttagt

SEQ ID NO: 43741 - DNA, 19 bp, Homo sapiens
  siRNA target sequence for WRN (NM_000553.2,4926-4944).
gagatctgttcaagttcta

SEQ ID NO: 43742 - DNA, 19 bp, Homo sapiens
  siRNA target sequence for WRN (NM_000553.2,4994-5012).
gagaaagagacgattacct

SEQ ID NO: 43743 - DNA, 19 bp, Homo sapiens
  siRNA target sequence for WRN (NM_000553.2,5032-5050).
gtgataccagcaagaaatt

SEQ ID NO: 43744 - DNA, 19 bp, Homo sapiens
  siRNA target sequence for WRN (NM_000553.2,5062-5080).
cgaaaaggggaggtctttt

SEQ ID NO: 43745 - DNA, 19 bp, Homo sapiens
  siRNA target sequence for WRNIP1 (NM_020135.2,253-271).
ccgtgtgccagcagatgat

SEQ ID NO: 43746 - DNA, 19 bp, Homo sapiens
  siRNA target sequence for WRNIP1 (NM_020135.2,889-907).
ctgacacgctgcaggatta

SEQ ID NO: 43747 - DNA, 19 bp, Homo sapiens
  siRNA target sequence for WRNIP1 (NM_020135.2,891-909).
gacacgctgcaggattact

SEQ ID NO: 43748 - DNA, 19 bp, Homo sapiens
  siRNA target sequence for WRNIP1 (NM_020135.2,1043-1061).
cagcaagaaacatagcata

SEQ ID NO: 43749 - DNA, 19 bp, Homo sapiens
  siRNA target sequence for WRNIP1 (NM_020135.2,1049-1067).
gaaacatagcataaggttt

SEQ ID NO: 43750 - DNA, 19 bp, Homo sapiens
  siRNA target sequence for WRNIP1 (NM_020135.2,1053-1071).
catagcataaggtttgtga

SEQ ID NO: 43751 - DNA, 19 bp, Homo sapiens
  siRNA target sequence for WRNIP1 (NM_020135.2,1176-1194).
gagattcatcggttcaata

SEQ ID NO: 43752 - DNA, 19 bp, Homo sapiens
  siRNA target sequence for WRNIP1 (NM_020135.2,1178-1196).
gattcatcggttcaataaa

SEQ ID NO: 43753 - DNA, 19 bp, Homo sapiens
  siRNA target sequence for WRNIP1 (NM_020135.2,1298-1316).
gagccgctgtcgagtgatt

SEQ ID NO: 43754 - DNA, 19 bp, Homo sapiens
  siRNA target sequence for WRNIP1 (NM_020135.2,1300-1318).
gccgctgtcgagtgattgt

SEQ ID NO: 43755 - DNA, 19 bp, Homo sapiens
  siRNA target sequence for WRNIP1 (NM_020135.2,1301-1319).
ccgctgtcgagtgattgtt

SEQ ID NO: 43756 - DNA, 19 bp, Homo sapiens
  siRNA target sequence for WRNIP1 (NM_020135.2,1303-1321).
gctgtcgagtgattgttct

SEQ ID NO: 43757 - DNA, 19 bp, Homo sapiens
  siRNA target sequence for WRNIP1 (NM_020135.2,1304-1322).
ctgtcgagtgattgttctt

SEQ ID NO: 43758 - DNA, 19 bp, Homo sapiens
  siRNA target sequence for WRNIP1 (NM_020135.2,1306-1324).
gtcgagtgattgttcttga

SEQ ID NO: 43759 - DNA, 19 bp, Homo sapiens
  siRNA target sequence for WRNIP1 (NM_020135.2,1338-1356).
gaggcaatggtgactattt

SEQ ID NO: 43760 - DNA, 19 bp, Homo sapiens
  siRNA target sequence for WRNIP1 (NM_020135.2,1342-1360).
caatggtgactattttaat

SEQ ID NO: 43761 - DNA, 19 bp, Homo sapiens
  siRNA target sequence for WRNIP1 (NM_020135.2,1538-1556).
ggcggtgctggctaggtta

SEQ ID NO: 43762 - DNA, 19 bp, Homo sapiens
  siRNA target sequence for WRNIP1 (NM_020135.2,1539-1557).
gcggtgctggctaggttaa

SEQ ID NO: 43763 - DNA, 19 bp, Homo sapiens
  siRNA target sequence for WRNIP1 (NM_020135.2,1583-1601).
gagtgggcaatcctattct

SEQ ID NO: 43764 - DNA, 19 bp, Homo sapiens
  siRNA target sequence for WRNIP1 (NM_020135.2,1647-1665).
cagcgatcccacattttat

SEQ ID NO: 43765 - DNA, 19 bp, Homo sapiens
  siRNA target sequence for WRNIP1 (NM_020135.2,1649-1667).
gcgatcccacattttatat

SEQ ID NO: 43766 - DNA, 19 bp, Homo sapiens
  siRNA target sequence for WRNIP1 (NM_020135.2,1672-1690).
gggcaggtgaggagcatta

SEQ ID NO: 43767 - DNA, 19 bp, Homo sapiens
  siRNA target sequence for WRNIP1 (NM_020135.2,1675-1693).
caggtgaggagcattacaa

SEQ ID NO: 43768 - DNA, 19 bp, Homo sapiens
  siRNA target sequence for WRNIP1 (NM_020135.2,1677-1695).
ggtgaggagcattacaact

SEQ ID NO: 43769 - DNA, 19 bp, Homo sapiens
  siRNA target sequence for WRNIP1 (NM_020135.2,1844-1862).
cccgtctgcgttaacacaa

SEQ ID NO: 43770 - DNA, 19 bp, Homo sapiens
  siRNA target sequence for WRNIP1 (NM_020135.2,1924-1942).
cccagtgtgtggtctactt

SEQ ID NO: 43771 - DNA, 19 bp, Homo sapiens
  siRNA target sequence for WRNIP1 (NM_020135.2,1968-1986).
gtgtacagcgcctacaaca

SEQ ID NO: 43772 - DNA, 19 bp, Homo sapiens
  siRNA target sequence for WRNIP1 (NM_020135.2,2148-2166).
gagttgaggggggtagatt

SEQ ID NO: 43773 - DNA, 19 bp, Homo sapiens
  siRNA target sequence for WRNIP1 (NM_020135.2,2155-2173).
ggggggtagatttcttcaa

SEQ ID NO: 43774 - DNA, 19 bp, Homo sapiens
  siRNA target sequence for YBX2 (NM_015982.1,371-389).
ggttacggattcatcaaca

SEQ ID NO: 43775 - DNA, 19 bp, Homo sapiens
  siRNA target sequence for YBX2 (NM_015982.1,517-535).
cgcagaagccactaatgta

SEQ ID NO: 43776 - DNA, 19 bp, Homo sapiens
  siRNA target sequence for ZBED2 (NM_024508.1,217-235).
ctccaatgccccacaacaa

SEQ ID NO: 43777 - DNA, 19 bp, Homo sapiens
  siRNA target sequence for ZBED2 (NM_024508.1,248-266).
ctctgaggcatgggaatat

SEQ ID NO: 43778 - DNA, 19 bp, Homo sapiens
  siRNA target sequence for ZBED3 (NM_032367.1,920-938).
gacggctgcgtcatcacaa

SEQ ID NO: 43779 - DNA, 19 bp, Homo sapiens
  siRNA target sequence for ZBED4 (NM_014838.1,464-482).
ccaaagaggacggtgattt

SEQ ID NO: 43780 - DNA, 19 bp, Homo sapiens
  siRNA target sequence for ZBED4 (NM_014838.1,469-487).
gaggacggtgatttcgttt

SEQ ID NO: 43781 - DNA, 19 bp, Homo sapiens
  siRNA target sequence for ZBED4 (NM_014838.1,474-492).
cggtgatttcgtttctgat

SEQ ID NO: 43782 - DNA, 19 bp, Homo sapiens
  siRNA target sequence for ZBED4 (NM_014838.1,529-547).
ggaattcctcctgatagtt

SEQ ID NO: 43783 - DNA, 19 bp, Homo sapiens
  siRNA target sequence for ZBED4 (NM_014838.1,530-548).
gaattcctcctgatagttt

SEQ ID NO: 43784 - DNA, 19 bp, Homo sapiens
  siRNA target sequence for ZBED4 (NM_014838.1,535-553).
cctcctgatagtttggaaa

SEQ ID NO: 43785 - DNA, 19 bp, Homo sapiens
  siRNA target sequence for ZBED4 (NM_014838.1,757-775).
ctttccagccggaacatga

SEQ ID NO: 43786 - DNA, 19 bp, Homo sapiens
  siRNA target sequence for ZBED4 (NM_014838.1,823-841).
cgagacagcactaaagcaa

SEQ ID NO: 43787 - DNA, 19 bp, Homo sapiens
  siRNA target sequence for ZBED4 (NM_014838.1,938-956).
ccgtgctcattcaggaaaa

SEQ ID NO: 43788 - DNA, 19 bp, Homo sapiens
  siRNA target sequence for ZBED4 (NM_014838.1,939-957).
cgtgctcattcaggaaaat

SEQ ID NO: 43789 - DNA, 19 bp, Homo sapiens
  siRNA target sequence for ZBED4 (NM_014838.1,1044-1062).
cctctcacccatcaaactt

SEQ ID NO: 43790 - DNA, 19 bp, Homo sapiens
  siRNA target sequence for ZBED4 (NM_014838.1,1066-1084).
cagaaagtggcgtctaaga

SEQ ID NO: 43791 - DNA, 19 bp, Homo sapiens
  siRNA target sequence for ZBED4 (NM_014838.1,1086-1104).
cccgtcccccgatcgaata

SEQ ID NO: 43792 - DNA, 19 bp, Homo sapiens
  siRNA target sequence for ZBED4 (NM_014838.1,1087-1105).
ccgtcccccgatcgaataa

SEQ ID NO: 43793 - DNA, 19 bp, Homo sapiens
  siRNA target sequence for ZBED4 (NM_014838.1,1089-1107).
gtcccccgatcgaataaca

SEQ ID NO: 43794 - DNA, 19 bp, Homo sapiens
  siRNA target sequence for ZBED4 (NM_014838.1,1091-1109).
cccccgatcgaataacaga

SEQ ID NO: 43795 - DNA, 19 bp, Homo sapiens
  siRNA target sequence for ZBED4 (NM_014838.1,1212-1230).
ccctgctctccattacgat

SEQ ID NO: 43796 - DNA, 19 bp, Homo sapiens
  siRNA target sequence for ZBED4 (NM_014838.1,1741-1759).
gggctgagtcctagattgt

SEQ ID NO: 43797 - DNA, 19 bp, Homo sapiens
  siRNA target sequence for ZBED4 (NM_014838.1,1742-1760).
ggctgagtcctagattgtt

SEQ ID NO: 43798 - DNA, 19 bp, Homo sapiens
  siRNA target sequence for ZBED4 (NM_014838.1,1743-1761).
gctgagtcctagattgttt

SEQ ID NO: 43799 - DNA, 19 bp, Homo sapiens
  siRNA target sequence for ZBED4 (NM_014838.1,1814-1832).
cggaggtctggcatcactt

SEQ ID NO: 43800 - DNA, 19 bp, Homo sapiens
  siRNA target sequence for ZBED4 (NM_014838.1,2063-2081).
caacagtggtcacaaaaaa

SEQ ID NO: 43801 - DNA, 19 bp, Homo sapiens
  siRNA target sequence for ZBED4 (NM_014838.1,2098-2116).
cctgttaatagcaaaaaga

SEQ ID NO: 43802 - DNA, 19 bp, Homo sapiens
  siRNA target sequence for ZBED4 (NM_014838.1,2120-2138).
cgaagctgtggaatcattt

SEQ ID NO: 43803 - DNA, 19 bp, Homo sapiens
  siRNA target sequence for ZBED4 (NM_014838.1,2204-2222).
ggaagaagccgactaactt

SEQ ID NO: 43804 - DNA, 19 bp, Homo sapiens
  siRNA target sequence for ZBED4 (NM_014838.1,2245-2263).
catttacagcggttccata

SEQ ID NO: 43805 - DNA, 19 bp, Homo sapiens
  siRNA target sequence for ZBED4 (NM_014838.1,2260-2278).
catagcaacgtgctgaaaa

SEQ ID NO: 43806 - DNA, 19 bp, Homo sapiens
  siRNA target sequence for ZBED4 (NM_014838.1,2348-2366).
gcgcttcctcttttgatga

SEQ ID NO: 43807 - DNA, 19 bp, Homo sapiens
  siRNA target sequence for ZBED4 (NM_014838.1,2370-2388).
caatgagaagttttacgat

SEQ ID NO: 43808 - DNA, 19 bp, Homo sapiens
  siRNA target sequence for ZBED4 (NM_014838.1,2414-2432).
caagtctcatagctgaaat

SEQ ID NO: 43809 - DNA, 19 bp, Homo sapiens
  siRNA target sequence for ZBED4 (NM_014838.1,2417-2435).
gtctcatagctgaaatgat

SEQ ID NO: 43810 - DNA, 19 bp, Homo sapiens
  siRNA target sequence for ZBED4 (NM_014838.1,2467-2485).
gacaacgttggctttaaca

SEQ ID NO: 43811 - DNA, 19 bp, Homo sapiens
  siRNA target sequence for ZBED4 (NM_014838.1,2546-2564).
cagctatcccaggtatgta

SEQ ID NO: 43812 - DNA, 19 bp, Homo sapiens
  siRNA target sequence for ZBED4 (NM_014838.1,2549-2567).
ctatcccaggtatgtatga

SEQ ID NO: 43813 - DNA, 19 bp, Homo sapiens
  siRNA target sequence for ZBED4 (NM_014838.1,2555-2573).
caggtatgtatgataatgt

SEQ ID NO: 43814 - DNA, 19 bp, Homo sapiens
  siRNA target sequence for ZBED4 (NM_014838.1,2557-2575).
ggtatgtatgataatgtga

SEQ ID NO: 43815 - DNA, 19 bp, Homo sapiens
  siRNA target sequence for ZBED4 (NM_014838.1,2622-2640).
ccacttcacgtctggaata

SEQ ID NO: 43816 - DNA, 19 bp, Homo sapiens
  siRNA target sequence for ZBED4 (NM_014838.1,2623-2641).
cacttcacgtctggaatat

SEQ ID NO: 43817 - DNA, 19 bp, Homo sapiens
  siRNA target sequence for ZBED4 (NM_014838.1,2678-2696).
cggcccactgggtttcctt

SEQ ID NO: 43818 - DNA, 19 bp, Homo sapiens
  siRNA target sequence for ZBED4 (NM_014838.1,2944-2962).
gtcagcgaggccattaaga

SEQ ID NO: 43819 - DNA, 19 bp, Homo sapiens
  siRNA target sequence for ZBED4 (NM_014838.1,3139-3157).
cggctcattgagcagaaaa

SEQ ID NO: 43820 - DNA, 19 bp, Homo sapiens
  siRNA target sequence for ZBED4 (NM_014838.1,3507-3525).
gcagtacaaacaggattta

SEQ ID NO: 43821 - DNA, 19 bp, Homo sapiens
  siRNA target sequence for ZBED4 (NM_014838.1,3530-3548).
gggaactcgaactcatgaa

SEQ ID NO: 43822 - DNA, 19 bp, Homo sapiens
  siRNA target sequence for ZBED4 (NM_014838.1,3531-3549).
ggaactcgaactcatgaat

SEQ ID NO: 43823 - DNA, 19 bp, Homo sapiens
  siRNA target sequence for ZBED4 (NM_014838.1,3532-3550).
gaactcgaactcatgaatt

SEQ ID NO: 43824 - DNA, 19 bp, Homo sapiens
  siRNA target sequence for ZBED4 (NM_014838.1,3592-3610).
ggctccccgtcgaaagact

SEQ ID NO: 43825 - DNA, 19 bp, Homo sapiens
  siRNA target sequence for ZBED4 (NM_014838.1,3783-3801).
cgcgctggccgtcagattt

SEQ ID NO: 43826 - DNA, 19 bp, Homo sapiens
  siRNA target sequence for ZBED4 (NM_014838.1,3784-3802).
gcgctggccgtcagatttt

SEQ ID NO: 43827 - DNA, 19 bp, Homo sapiens
  siRNA target sequence for ZBED4 (NM_014838.1,3785-3803).
cgctggccgtcagattttt

SEQ ID NO: 43828 - DNA, 19 bp, Homo sapiens
  siRNA target sequence for ZBED4 (NM_014838.1,3881-3899).
ggctcatgatggaacattt

SEQ ID NO: 43829 - DNA, 19 bp, Homo sapiens
  siRNA target sequence for ZBTB2 (NM_020861.1,147-165).
caaccatggacttattcta

SEQ ID NO: 43830 - DNA, 19 bp, Homo sapiens
  siRNA target sequence for ZBTB2 (NM_020861.1,182-200).
ctcagcgagagtttggttt

SEQ ID NO: 43831 - DNA, 19 bp, Homo sapiens
  siRNA target sequence for ZBTB2 (NM_020861.1,217-235).
gttgcaatcggcgatgtat

SEQ ID NO: 43832 - DNA, 19 bp, Homo sapiens
  siRNA target sequence for ZBTB2 (NM_020861.1,220-238).
gcaatcggcgatgtatact

SEQ ID NO: 43833 - DNA, 19 bp, Homo sapiens
  siRNA target sequence for ZBTB2 (NM_020861.1,221-239).
caatcggcgatgtatactt

SEQ ID NO: 43834 - DNA, 19 bp, Homo sapiens
  siRNA target sequence for ZBTB2 (NM_020861.1,240-258).
caaggcacacaaatcagtt

SEQ ID NO: 43835 - DNA, 19 bp, Homo sapiens
  siRNA target sequence for ZBTB2 (NM_020861.1,262-280).
gcttcattctccaattact

SEQ ID NO: 43836 - DNA, 19 bp, Homo sapiens
  siRNA target sequence for ZBTB2 (NM_020861.1,272-290).
ccaattactttaagatgtt

SEQ ID NO: 43837 - DNA, 19 bp, Homo sapiens
  siRNA target sequence for ZBTB2 (NM_020861.1,321-339).
cttgaaaccaactgacata

SEQ ID NO: 43838 - DNA, 19 bp, Homo sapiens
  siRNA target sequence for ZBTB2 (NM_020861.1,356-374).
gctatctcttacacttgat

SEQ ID NO: 43839 - DNA, 19 bp, Homo sapiens
  siRNA target sequence for ZBTB2 (NM_020861.1,402-420).
catcgacccggttcgatta

SEQ ID NO: 43840 - DNA, 19 bp, Homo sapiens
  siRNA target sequence for ZBTB2 (NM_020861.1,405-423).
cgacccggttcgattagaa

SEQ ID NO: 43841 - DNA, 19 bp, Homo sapiens
  siRNA target sequence for ZBTB2 (NM_020861.1,494-512).
ctcaccctgaccaagtttt

SEQ ID NO: 43842 - DNA, 19 bp, Homo sapiens
  siRNA target sequence for ZBTB2 (NM_020861.1,527-545).
cattgtatggcattcagat

SEQ ID NO: 43843 - DNA, 19 bp, Homo sapiens
  siRNA target sequence for ZBTB2 (NM_020861.1,565-583).
caagccaccaagattgctt

SEQ ID NO: 43844 - DNA, 19 bp, Homo sapiens
  siRNA target sequence for ZBTB2 (NM_020861.1,690-708).
ccaggtgaatcggacaaat

SEQ ID NO: 43845 - DNA, 19 bp, Homo sapiens
  siRNA target sequence for ZBTB2 (NM_020861.1,691-709).
caggtgaatcggacaaata

SEQ ID NO: 43846 - DNA, 19 bp, Homo sapiens
  siRNA target sequence for ZBTB2 (NM_020861.1,696-714).
gaatcggacaaatatgact

SEQ ID NO: 43847 - DNA, 19 bp, Homo sapiens
  siRNA target sequence for ZBTB2 (NM_020861.1,737-755).
cgctgtctccagaacttgt

SEQ ID NO: 43848 - DNA, 19 bp, Homo sapiens
  siRNA target sequence for ZBTB2 (NM_020861.1,738-756).
gctgtctccagaacttgtt

SEQ ID NO: 43849 - DNA, 19 bp, Homo sapiens
  siRNA target sequence for ZBTB2 (NM_020861.1,825-843).
gcctgcgtccctcacaata

SEQ ID NO: 43850 - DNA, 19 bp, Homo sapiens
  siRNA target sequence for ZBTB2 (NM_020861.1,850-868).
gtcaagccaagcatcatga

SEQ ID NO: 43851 - DNA, 19 bp, Homo sapiens
  siRNA target sequence for ZBTB2 (NM_020861.1,872-890).
ggaatgggagctttccaaa

SEQ ID NO: 43852 - DNA, 19 bp, Homo sapiens
  siRNA target sequence for ZBTB2 (NM_020861.1,878-896).
ggagctttccaaagtacta

SEQ ID NO: 43853 - DNA, 19 bp, Homo sapiens
  siRNA target sequence for ZBTB2 (NM_020861.1,879-897).
gagctttccaaagtactat

SEQ ID NO: 43854 - DNA, 19 bp, Homo sapiens
  siRNA target sequence for ZBTB2 (NM_020861.1,963-981).
cacaggagtacctttcaca

SEQ ID NO: 43855 - DNA, 19 bp, Homo sapiens
  siRNA target sequence for ZBTB2 (NM_020861.1,967-985).
ggagtacctttcacatcta

SEQ ID NO: 43856 - DNA, 19 bp, Homo sapiens
  siRNA target sequence for ZBTB2 (NM_020861.1,1218-1236).
gaagtacgagtgcacaata

SEQ ID NO: 43857 - DNA, 19 bp, Homo sapiens
  siRNA target sequence for ZBTB2 (NM_020861.1,1238-1256).
gtggacgcaaatttatcca

SEQ ID NO: 43858 - DNA, 19 bp, Homo sapiens
  siRNA target sequence for ZBTB2 (NM_020861.1,1372-1390).
cagagcatcgacacttaca

SEQ ID NO: 43859 - DNA, 19 bp, Homo sapiens
  siRNA target sequence for ZBTB2 (NM_020861.1,1485-1503).
caacttgtgtgacaaaaca

SEQ ID NO: 43860 - DNA, 19 bp, Homo sapiens
  siRNA target sequence for ZBTB2 (NM_020861.1,1545-1563).
ccagaactcggatgttttt

SEQ ID NO: 43861 - DNA, 19 bp, Homo sapiens
  siRNA target sequence for ZBTB2 (NM_020861.1,1620-1638).
gcctgaccacccagtgtta

SEQ ID NO: 43862 - DNA, 19 bp, Homo sapiens
  siRNA target sequence for ZBTB2 (NM_020861.1,1624-1642).
gaccacccagtgttagctt

SEQ ID NO: 43863 - DNA, 19 bp, Homo sapiens
  siRNA target sequence for ZBTB3 (NM_024784.2,128-146).
ggcctgggagcgaaaaaga

SEQ ID NO: 43864 - DNA, 19 bp, Homo sapiens
  siRNA target sequence for ZBTB3 (NM_024784.2,131-149).
ctgggagcgaaaaagatct

SEQ ID NO: 43865 - DNA, 19 bp, Homo sapiens
  siRNA target sequence for ZBTB3 (NM_024784.2,134-152).
ggagcgaaaaagatctcta

SEQ ID NO: 43866 - DNA, 19 bp, Homo sapiens
  siRNA target sequence for ZBTB3 (NM_024784.2,137-155).
gcgaaaaagatctctactt

SEQ ID NO: 43867 - DNA, 19 bp, Homo sapiens
  siRNA target sequence for ZBTB3 (NM_024784.2,184-202).
ccactggtggggacctttt

SEQ ID NO: 43868 - DNA, 19 bp, Homo sapiens
  siRNA target sequence for ZBTB3 (NM_024784.2,281-299).
gcggtcccagggtttcctt

SEQ ID NO: 43869 - DNA, 19 bp, Homo sapiens
  siRNA target sequence for ZBTB3 (NM_024784.2,412-430).
gggatctggtgtgtattca

SEQ ID NO: 43870 - DNA, 19 bp, Homo sapiens
  siRNA target sequence for ZBTB3 (NM_024784.2,414-432).
gatctggtgtgtattcaca

SEQ ID NO: 43871 - DNA, 19 bp, Homo sapiens
  siRNA target sequence for ZBTB3 (NM_024784.2,420-438).
gtgtgtattcacaatgaaa

SEQ ID NO: 43872 - DNA, 19 bp, Homo sapiens
  siRNA target sequence for ZBTB3 (NM_024784.2,459-477).
gggctgcttctggacttta

SEQ ID NO: 43873 - DNA, 19 bp, Homo sapiens
  siRNA target sequence for ZBTB3 (NM_024784.2,783-801).
gatgagccaccaatgtcta

SEQ ID NO: 43874 - DNA, 19 bp, Homo sapiens
  siRNA target sequence for ZBTB3 (NM_024784.2,909-927).
gagaccattcctacaaact

SEQ ID NO: 43875 - DNA, 19 bp, Homo sapiens
  siRNA target sequence for ZBTB3 (NM_024784.2,1130-1148).
gctggtccaggtgaaagtt

SEQ ID NO: 43876 - DNA, 19 bp, Homo sapiens
  siRNA target sequence for ZBTB3 (NM_024784.2,1133-1151).
ggtccaggtgaaagttgaa

SEQ ID NO: 43877 - DNA, 19 bp, Homo sapiens
  siRNA target sequence for ZBTB3 (NM_024784.2,1417-1435).
ccctgcatgagccacttta

SEQ ID NO: 43878 - DNA, 19 bp, Homo sapiens
  siRNA target sequence for ZBTB3 (NM_024784.2,1634-1652).
catccgcaaggctcacaat

SEQ ID NO: 43879 - DNA, 19 bp, Homo sapiens
  siRNA target sequence for ZBTB3 (NM_024784.2,1758-1776).
ggagggccacctaaagatt

SEQ ID NO: 43880 - DNA, 19 bp, Homo sapiens
  siRNA target sequence for ZBTB3 (NM_024784.2,1759-1777).
gagggccacctaaagattt

SEQ ID NO: 43881 - DNA, 19 bp, Homo sapiens
  siRNA target sequence for ZBTB3 (NM_024784.2,1764-1782).
ccacctaaagattttgtat

SEQ ID NO: 43882 - DNA, 19 bp, Homo sapiens
  siRNA target sequence for ZBTB3 (NM_024784.2,1765-1783).
cacctaaagattttgtatt

SEQ ID NO: 43883 - DNA, 19 bp, Homo sapiens
  siRNA target sequence for ZF (NM_021212.1,498-516).
cggaggatatggactttct

SEQ ID NO: 43884 - DNA, 19 bp, Homo sapiens
  siRNA target sequence for ZF (NM_021212.1,500-518).
gaggatatggactttctgt

SEQ ID NO: 43885 - DNA, 19 bp, Homo sapiens
  siRNA target sequence for ZF (NM_021212.1,695-713).
ctgctgcaaaggctgttaa

SEQ ID NO: 43886 - DNA, 19 bp, Homo sapiens
  siRNA target sequence for ZF (NM_021212.1,1006-1024).
ctacctacgggcagtctta

SEQ ID NO: 43887 - DNA, 19 bp, Homo sapiens
  siRNA target sequence for ZF (NM_021212.1,1252-1270).
ggcgtcgtcttctcttaaa

SEQ ID NO: 43888 - DNA, 19 bp, Homo sapiens
  siRNA target sequence for ZF (NM_021212.1,1253-1271).
gcgtcgtcttctcttaaaa

SEQ ID NO: 43889 - DNA, 19 bp, Homo sapiens
  siRNA target sequence for ZF (NM_021212.1,1254-1272).
cgtcgtcttctcttaaaat

SEQ ID NO: 43890 - DNA, 19 bp, Homo sapiens
  siRNA target sequence for ZFD25 (NM_016220.2,1387-1405).
caacactcaaacctaatta

SEQ ID NO: 43891 - DNA, 19 bp, Homo sapiens
  siRNA target sequence for ZFD25 (NM_016220.2,2397-2415).
gttctcatctcttaatata

SEQ ID NO: 43892 - DNA, 19 bp, Homo sapiens
  siRNA target sequence for ZFP161 (NM_003409.2,86-104).
gtatgtctgaaaccattaa

SEQ ID NO: 43893 - DNA, 19 bp, Homo sapiens
  siRNA target sequence for ZFP161 (NM_003409.2,90-108).
gtctgaaaccattaaatat

SEQ ID NO: 43894 - DNA, 19 bp, Homo sapiens
  siRNA target sequence for ZFP161 (NM_003409.2,121-139).
cataaaactctgtttctga

SEQ ID NO: 43895 - DNA, 19 bp, Homo sapiens
  siRNA target sequence for ZFP161 (NM_003409.2,190-208).
gtggttgaggatgtgaaat

SEQ ID NO: 43896 - DNA, 19 bp, Homo sapiens
  siRNA target sequence for ZFP161 (NM_003409.2,193-211).
gttgaggatgtgaaattca

SEQ ID NO: 43897 - DNA, 19 bp, Homo sapiens
  siRNA target sequence for ZFP161 (NM_003409.2,271-289).
cttgaggttgatagttctt

SEQ ID NO: 43898 - DNA, 19 bp, Homo sapiens
  siRNA target sequence for ZFP161 (NM_003409.2,287-305).
cttcggtcatagaaataga

SEQ ID NO: 43899 - DNA, 19 bp, Homo sapiens
  siRNA target sequence for ZFP161 (NM_003409.2,290-308).
cggtcatagaaatagattt

SEQ ID NO: 43900 - DNA, 19 bp, Homo sapiens
  siRNA target sequence for ZFP161 (NM_003409.2,331-349).
gaggtcctgaactacatgt

SEQ ID NO: 43901 - DNA, 19 bp, Homo sapiens
  siRNA target sequence for ZFP161 (NM_003409.2,334-352).
gtcctgaactacatgtaca

SEQ ID NO: 43902 - DNA, 19 bp, Homo sapiens
  siRNA target sequence for ZFP161 (NM_003409.2,345-363).
catgtacacagcaaagatt

SEQ ID NO: 43903 - DNA, 19 bp, Homo sapiens
  siRNA target sequence for ZFP161 (NM_003409.2,356-374).
caaagatttccgtgaaaaa

SEQ ID NO: 43904 - DNA, 19 bp, Homo sapiens
  siRNA target sequence for ZFP161 (NM_003409.2,393-411).
gatgtcatcgggtcagatt

SEQ ID NO: 43905 - DNA, 19 bp, Homo sapiens
  siRNA target sequence for ZFP161 (NM_003409.2,396-414).
gtcatcgggtcagattctt

SEQ ID NO: 43906 - DNA, 19 bp, Homo sapiens
  siRNA target sequence for ZFP161 (NM_003409.2,457-475).
gtgtccagtcccgatgaaa

SEQ ID NO: 43907 - DNA, 19 bp, Homo sapiens
  siRNA target sequence for ZFP161 (NM_003409.2,462-480).
cagtcccgatgaaaacaat

SEQ ID NO: 43908 - DNA, 19 bp, Homo sapiens
  siRNA target sequence for ZFP161 (NM_003409.2,477-495).
caatggtcagtccaaaagt

SEQ ID NO: 43909 - DNA, 19 bp, Homo sapiens
  siRNA target sequence for ZFP161 (NM_003409.2,481-499).
ggtcagtccaaaagtaagt

SEQ ID NO: 43910 - DNA, 19 bp, Homo sapiens
  siRNA target sequence for ZFP161 (NM_003409.2,484-502).
cagtccaaaagtaagtatt

SEQ ID NO: 43911 - DNA, 19 bp, Homo sapiens
  siRNA target sequence for ZFP161 (NM_003409.2,694-712).
gaagttcggaaggtcaatt

SEQ ID NO: 43912 - DNA, 19 bp, Homo sapiens
  siRNA target sequence for ZFP161 (NM_003409.2,697-715).
gttcggaaggtcaattgct

SEQ ID NO: 43913 - DNA, 19 bp, Homo sapiens
  siRNA target sequence for ZFP161 (NM_003409.2,743-761).
ccccagaatcaaaagactt

SEQ ID NO: 43914 - DNA, 19 bp, Homo sapiens
  siRNA target sequence for ZFP161 (NM_003409.2,771-789).
gacccctcaagccttaaca

SEQ ID NO: 43915 - DNA, 19 bp, Homo sapiens
  siRNA target sequence for ZFP161 (NM_003409.2,774-792).
ccctcaagccttaacattt

SEQ ID NO: 43916 - DNA, 19 bp, Homo sapiens
  siRNA target sequence for ZFP161 (NM_003409.2,844-862).
gccgccagtgacatgaagt

SEQ ID NO: 43917 - DNA, 19 bp, Homo sapiens
  siRNA target sequence for ZFP161 (NM_003409.2,968-986).
cggcggacaggccatttgt

SEQ ID NO: 43918 - DNA, 19 bp, Homo sapiens
  siRNA target sequence for ZFP161 (NM_003409.2,969-987).
ggcggacaggccatttgtt

SEQ ID NO: 43919 - DNA, 19 bp, Homo sapiens
  siRNA target sequence for ZFP161 (NM_003409.2,1016-1034).
cacaggcccacctgaaaga

SEQ ID NO: 43920 - DNA, 19 bp, Homo sapiens
  siRNA target sequence for ZFP161 (NM_003409.2,1054-1072).
ggatataagccctatagct

SEQ ID NO: 43921 - DNA, 19 bp, Homo sapiens
  siRNA target sequence for ZFP161 (NM_003409.2,1281-1299).
gaaaaggcacgagaacaat

SEQ ID NO: 43922 - DNA, 19 bp, Homo sapiens
  siRNA target sequence for ZFP28 (NM_020828.1,221-239).
gaatggcctcgcatccaaa

SEQ ID NO: 43923 - DNA, 19 bp, Homo sapiens
  siRNA target sequence for ZFP28 (NM_020828.1,436-454).
ccattcagaggaacttgta

SEQ ID NO: 43924 - DNA, 19 bp, Homo sapiens
  siRNA target sequence for ZFP28 (NM_020828.1,488-506).
ggcatcgctgggactttgt

SEQ ID NO: 43925 - DNA, 19 bp, Homo sapiens
  siRNA target sequence for ZFP28 (NM_020828.1,490-508).
catcgctgggactttgtgt

SEQ ID NO: 43926 - DNA, 19 bp, Homo sapiens
  siRNA target sequence for ZFP28 (NM_020828.1,561-579).
gtgaagcgaaagatgacaa

SEQ ID NO: 43927 - DNA, 19 bp, Homo sapiens
  siRNA target sequence for ZFP28 (NM_020828.1,678-696).
gagagactcacaagctata

SEQ ID NO: 43928 - DNA, 19 bp, Homo sapiens
  siRNA target sequence for ZFP28 (NM_020828.1,680-698).
gagactcacaagctataat

SEQ ID NO: 43929 - DNA, 19 bp, Homo sapiens
  siRNA target sequence for ZFP28 (NM_020828.1,682-700).
gactcacaagctataatct

SEQ ID NO: 43930 - DNA, 19 bp, Homo sapiens
  siRNA target sequence for ZFP28 (NM_020828.1,718-736).
gggaacactgggattatga

SEQ ID NO: 43931 - DNA, 19 bp, Homo sapiens
  siRNA target sequence for ZFP28 (NM_020828.1,728-746).
ggattatgatgctctgttt

SEQ ID NO: 43932 - DNA, 19 bp, Homo sapiens
  siRNA target sequence for ZFP28 (NM_020828.1,880-898).
gtgtggctaagccagattt

SEQ ID NO: 43933 - DNA, 19 bp, Homo sapiens
  siRNA target sequence for ZFP28 (NM_020828.1,885-903).
gctaagccagatttagtct

SEQ ID NO: 43934 - DNA, 19 bp, Homo sapiens
  siRNA target sequence for ZFP28 (NM_020828.1,965-983).
ctcaggccagcgatctgta

SEQ ID NO: 43935 - DNA, 19 bp, Homo sapiens
  siRNA target sequence for ZFP28 (NM_020828.1,970-988).
gccagcgatctgtacatga

SEQ ID NO: 43936 - DNA, 19 bp, Homo sapiens
  siRNA target sequence for ZFP28 (NM_020828.1,984-1002).
catgagacccaggaattat

SEQ ID NO: 43937 - DNA, 19 bp, Homo sapiens
  siRNA target sequence for ZFP28 (NM_020828.1,1038-1056).
gacagaacctcaaacacta

SEQ ID NO: 43938 - DNA, 19 bp, Homo sapiens
  siRNA target sequence for ZFP28 (NM_020828.1,1144-1162).
ggcaagagccaattactca

SEQ ID NO: 43939 - DNA, 19 bp, Homo sapiens
  siRNA target sequence for ZFP28 (NM_020828.1,1145-1163).
gcaagagccaattactcat

SEQ ID NO: 43940 - DNA, 19 bp, Homo sapiens
  siRNA target sequence for ZFP28 (NM_020828.1,1146-1164).
caagagccaattactcata

SEQ ID NO: 43941 - DNA, 19 bp, Homo sapiens
  siRNA target sequence for ZFP28 (NM_020828.1,1186-1204).
gagaacgtacatataacaa

SEQ ID NO: 43942 - DNA, 19 bp, Homo sapiens
  siRNA target sequence for ZFP28 (NM_020828.1,1188-1206).
gaacgtacatataacaaat

SEQ ID NO: 43943 - DNA, 19 bp, Homo sapiens
  siRNA target sequence for ZFP28 (NM_020828.1,1220-1238).
ctatttggacgattcagaa

SEQ ID NO: 43944 - DNA, 19 bp, Homo sapiens
  siRNA target sequence for ZFP28 (NM_020828.1,1229-1247).
cgattcagaagagaaagtt

SEQ ID NO: 43945 - DNA, 19 bp, Homo sapiens
  siRNA target sequence for ZFP28 (NM_020828.1,1248-1266).
cataatcgtgattcaatta

SEQ ID NO: 43946 - DNA, 19 bp, Homo sapiens
  siRNA target sequence for ZFP28 (NM_020828.1,1553-1571).
ctggagatactatcatact

SEQ ID NO: 43947 - DNA, 19 bp, Homo sapiens
  siRNA target sequence for ZFP28 (NM_020828.1,1619-1637).
ccacatagggcttaatcaa

SEQ ID NO: 43948 - DNA, 19 bp, Homo sapiens
  siRNA target sequence for ZFP28 (NM_020828.1,1878-1896).
caccttgccagtcatttaa

SEQ ID NO: 43949 - DNA, 19 bp, Homo sapiens
  siRNA target sequence for ZFP28 (NM_020828.1,2123-2141).
gaccacacacctcattcaa

SEQ ID NO: 43950 - DNA, 19 bp, Homo sapiens
  siRNA target sequence for ZFP28 (NM_020828.1,2288-2306).
gacaaaatcctcccttatt

SEQ ID NO: 43951 - DNA, 19 bp, Homo sapiens
  siRNA target sequence for ZFP28 (NM_020828.1,2456-2474).
ccaaattggacaccttaat

SEQ ID NO: 43952 - DNA, 19 bp, Homo sapiens
  siRNA target sequence for ZFP36 (NM_003407.1,466-484).
ccaatcgccaccccaaata

SEQ ID NO: 43953 - DNA, 19 bp, Homo sapiens
  siRNA target sequence for ZFP36 (NM_003407.1,490-508).
cggaactctgtcacaagtt

SEQ ID NO: 43954 - DNA, 19 bp, Homo sapiens
  siRNA target sequence for ZFP36 (NM_003407.1,1001-1019).
gcgactccccatcttcaat

SEQ ID NO: 43955 - DNA, 19 bp, Homo sapiens
  siRNA target sequence for ZFP36 (NM_003407.1,1016-1034).
caatcgcatctctgtttct

SEQ ID NO: 43956 - DNA, 19 bp, Homo sapiens
  siRNA target sequence for ZFP64 (NM_018197.2,540-558).
ccagcacggtccagtttgt

SEQ ID NO: 43957 - DNA, 19 bp, Homo sapiens
  siRNA target sequence for ZFP64 (NM_018197.2,541-559).
cagcacggtccagtttgta

SEQ ID NO: 43958 - DNA, 19 bp, Homo sapiens
  siRNA target sequence for ZFP64 (NM_018197.2,622-640).
ccagacaatcacagtttca

SEQ ID NO: 43959 - DNA, 19 bp, Homo sapiens
  siRNA target sequence for ZFP64 (NM_018197.2,679-697).
cctgcccacggaaagtaat

SEQ ID NO: 43960 - DNA, 19 bp, Homo sapiens
  siRNA target sequence for ZFP64 (NM_018197.2,683-701).
cccacggaaagtaatgaaa

SEQ ID NO: 43961 - DNA, 19 bp, Homo sapiens
  siRNA target sequence for ZFP64 (NM_018197.2,731-749).
gccaagtcacgcaccaaaa

SEQ ID NO: 43962 - DNA, 19 bp, Homo sapiens
  siRNA target sequence for ZFP64 (NM_018197.2,732-750).
ccaagtcacgcaccaaaaa

SEQ ID NO: 43963 - DNA, 19 bp, Homo sapiens
  siRNA target sequence for ZFP64 (NM_018197.2,802-820).
ccaattcaagactgcttat

SEQ ID NO: 43964 - DNA, 19 bp, Homo sapiens
  siRNA target sequence for ZFP64 (NM_018197.2,829-847).
ggacatggagcggcattta

SEQ ID NO: 43965 - DNA, 19 bp, Homo sapiens
  siRNA target sequence for ZFP64 (NM_018197.2,830-848).
gacatggagcggcatttaa

SEQ ID NO: 43966 - DNA, 19 bp, Homo sapiens
  siRNA target sequence for ZFP64 (NM_018197.2,832-850).
catggagcggcatttaaaa

SEQ ID NO: 43967 - DNA, 19 bp, Homo sapiens
  siRNA target sequence for ZFP64 (NM_018197.2,839-857).
cggcatttaaaaattcaca

SEQ ID NO: 43968 - DNA, 19 bp, Homo sapiens
  siRNA target sequence for ZFP64 (NM_018197.2,1277-1295).
cacagcgggaataacttca

SEQ ID NO: 43969 - DNA, 19 bp, Homo sapiens
  siRNA target sequence for ZFP64 (NM_018197.2,1618-1636).
gagtttccactgcgatata

SEQ ID NO: 43970 - DNA, 19 bp, Homo sapiens
  siRNA target sequence for ZFP64 (NM_018197.2,1692-1710).
gtgagtacagtgagagtaa

SEQ ID NO: 43971 - DNA, 19 bp, Homo sapiens
  siRNA target sequence for ZFP64 (NM_018197.2,1694-1712).
gagtacagtgagagtaaga

SEQ ID NO: 43972 - DNA, 19 bp, Homo sapiens
  siRNA target sequence for ZFP64 (NM_018197.2,1827-1845).
gcgagggaagagtcaaaat

SEQ ID NO: 43973 - DNA, 19 bp, Homo sapiens
  siRNA target sequence for ZFP64 (NM_018197.2,2135-2153).
gaaggctctggcaatcaaa

SEQ ID NO: 43974 - DNA, 19 bp, Homo sapiens
  siRNA target sequence for ZFP64 (NM_018197.2,2138-2156).
ggctctggcaatcaaactt

SEQ ID NO: 43975 - DNA, 19 bp, Homo sapiens
  siRNA target sequence for ZFP64 (NM_018197.2,2142-2160).
ctggcaatcaaactttcat

SEQ ID NO: 43976 - DNA, 19 bp, Homo sapiens
  siRNA target sequence for ZFP64 (NM_018197.2,2244-2262).
gcgatggaggccagaacat

SEQ ID NO: 43977 - DNA, 19 bp, Homo sapiens
  siRNA target sequence for ZFP64 (NM_018197.2,2299-2317).
ctcttcccagcaagaacta

SEQ ID NO: 43978 - DNA, 19 bp, Homo sapiens
  siRNA target sequence for ZFP64 (NM_018197.2,2323-2341).
gcagacctactccatcatt

SEQ ID NO: 43979 - DNA, 19 bp, Homo sapiens
  siRNA target sequence for ZFP64 (NM_018197.2,2326-2344).
gacctactccatcattcaa

SEQ ID NO: 43980 - DNA, 19 bp, Homo sapiens
  siRNA target sequence for ZFX (NM_003410.1,465-483).
ggacgttgttatagaagat

SEQ ID NO: 43981 - DNA, 19 bp, Homo sapiens
  siRNA target sequence for ZFX (NM_003410.1,519-537).
gtctgaaacggtcatcatt

SEQ ID NO: 43982 - DNA, 19 bp, Homo sapiens
  siRNA target sequence for ZFX (NM_003410.1,654-672).
cgtcttgacgggtgattct

SEQ ID NO: 43983 - DNA, 19 bp, Homo sapiens
  siRNA target sequence for ZFX (NM_003410.1,657-675).
cttgacgggtgattctata

SEQ ID NO: 43984 - DNA, 19 bp, Homo sapiens
  siRNA target sequence for ZFX (NM_003410.1,660-678).
gacgggtgattctatacat

SEQ ID NO: 43985 - DNA, 19 bp, Homo sapiens
  siRNA target sequence for ZFX (NM_003410.1,662-680).
cgggtgattctatacatgt

SEQ ID NO: 43986 - DNA, 19 bp, Homo sapiens
  siRNA target sequence for ZFX (NM_003410.1,769-787).
ctgactaccgacgtagttt

SEQ ID NO: 43987 - DNA, 19 bp, Homo sapiens
  siRNA target sequence for ZFX (NM_003410.1,771-789).
gactaccgacgtagtttca

SEQ ID NO: 43988 - DNA, 19 bp, Homo sapiens
  siRNA target sequence for ZFX (NM_003410.1,773-791).
ctaccgacgtagtttcaga

SEQ ID NO: 43989 - DNA, 19 bp, Homo sapiens
  siRNA target sequence for ZFX (NM_003410.1,1290-1308).
gcagcaaatggatgacaat

SEQ ID NO: 43990 - DNA, 19 bp, Homo sapiens
  siRNA target sequence for ZFX (NM_003410.1,1933-1951).
cacccgtcagagctcaaaa

SEQ ID NO: 43991 - DNA, 19 bp, Homo sapiens
  siRNA target sequence for ZFX (NM_003410.1,2037-2055).
gcatgtcaaaactaagcat

SEQ ID NO: 43992 - DNA, 19 bp, Homo sapiens
  siRNA target sequence for ZFY (NM_003411.2,542-560).
cttagaagaggcagatgta

SEQ ID NO: 43993 - DNA, 19 bp, Homo sapiens
  siRNA target sequence for ZFY (NM_003411.2,687-705).
ccagaacatgttttaacga

SEQ ID NO: 43994 - DNA, 19 bp, Homo sapiens
  siRNA target sequence for ZFY (NM_003411.2,790-808).
ctctgacgagtgacatagt

SEQ ID NO: 43995 - DNA, 19 bp, Homo sapiens
  siRNA target sequence for ZFY (NM_003411.2,792-810).
ctgacgagtgacatagttt

SEQ ID NO: 43996 - DNA, 19 bp, Homo sapiens
  siRNA target sequence for ZFY (NM_003411.2,794-812).
gacgagtgacatagtttca

SEQ ID NO: 43997 - DNA, 19 bp, Homo sapiens
  siRNA target sequence for ZFY (NM_003411.2,971-989).
gaccatcgatgcagaatca

SEQ ID NO: 43998 - DNA, 19 bp, Homo sapiens
  siRNA target sequence for ZFY (NM_003411.2,1337-1355).
gaaaaccttcgtaccaatt

SEQ ID NO: 43999 - DNA, 19 bp, Homo sapiens
  siRNA target sequence for ZFY (NM_003411.2,2322-2340).
gtggctgtccacaaaggta

SEQ ID NO: 44000 - DNA, 19 bp, Homo sapiens
  siRNA target sequence for ZFY (NM_003411.2,2325-2343).
gctgtccacaaaggtaaaa

SEQ ID NO: 44001 - DNA, 19 bp, Homo sapiens
  siRNA target sequence for ZIC2 (NM_007129.2,503-521).
cgcacggctcgcagaatgt

SEQ ID NO: 44002 - DNA, 19 bp, Homo sapiens
  siRNA target sequence for ZIC2 (NM_007129.2,722-740).
gtgcctttttccgctatat

SEQ ID NO: 44003 - DNA, 19 bp, Homo sapiens
  siRNA target sequence for ZIC2 (NM_007129.2,1282-1300).
gccagctccggctatgagt

SEQ ID NO: 44004 - DNA, 19 bp, Homo sapiens
  siRNA target sequence for ZIC3 (NM_003413.2,1143-1161).
gcgctcagtttcctaacta

SEQ ID NO: 44005 - DNA, 19 bp, Homo sapiens
  siRNA target sequence for ZIC3 (NM_003413.2,1415-1433).
cgggagggcaagtctttca

SEQ ID NO: 44006 - DNA, 19 bp, Homo sapiens
  siRNA target sequence for ZIC3 (NM_003413.2,1416-1434).
gggagggcaagtctttcaa

SEQ ID NO: 44007 - DNA, 19 bp, Homo sapiens
  siRNA target sequence for ZIC3 (NM_003413.2,1766-1784).
gccagttcaggctatgaat

SEQ ID NO: 44008 - DNA, 19 bp, Homo sapiens
  siRNA target sequence for ZIC3 (NM_003413.2,1768-1786).
cagttcaggctatgaatct

SEQ ID NO: 44009 - DNA, 19 bp, Homo sapiens
  siRNA target sequence for ZIC3 (NM_003413.2,1789-1807).
cactccacccgctatagct

SEQ ID NO: 44010 - DNA, 19 bp, Homo sapiens
  siRNA target sequence for ZIC3 (NM_003413.2,1837-1855).
cccttctgcagttcaaact

SEQ ID NO: 44011 - DNA, 19 bp, Homo sapiens
  siRNA target sequence for ZIC3 (NM_003413.2,1838-1856).
ccttctgcagttcaaacta

SEQ ID NO: 44012 - DNA, 19 bp, Homo sapiens
  siRNA target sequence for ZIC4 (NM_032153.2,316-334).
ctttaccgaaacactctta

SEQ ID NO: 44013 - DNA, 19 bp, Homo sapiens
  siRNA target sequence for ZIC4 (NM_032153.2,435-453).
ccccagccgtcctttgaat

SEQ ID NO: 44014 - DNA, 19 bp, Homo sapiens
  siRNA target sequence for ZIC4 (NM_032153.2,470-488).
ggctccctggagacatgta

SEQ ID NO: 44015 - DNA, 19 bp, Homo sapiens
  siRNA target sequence for ZIC4 (NM_032153.2,694-712).
ccgagcctctgctccaaaa

SEQ ID NO: 44016 - DNA, 19 bp, Homo sapiens
  siRNA target sequence for ZIC4 (NM_032153.2,772-790).
gaacaggccaaccacattt

SEQ ID NO: 44017 - DNA, 19 bp, Homo sapiens
  siRNA target sequence for ZIC4 (NM_032153.2,775-793).
caggccaaccacatttgct

SEQ ID NO: 44018 - DNA, 19 bp, Homo sapiens
  siRNA target sequence for ZIC4 (NM_032153.2,909-927).
gaaggtctttgctagatca

SEQ ID NO: 44019 - DNA, 19 bp, Homo sapiens
  siRNA target sequence for ZIC4 (NM_032153.2,912-930).
ggtctttgctagatcagaa

SEQ ID NO: 44020 - DNA, 19 bp, Homo sapiens
  siRNA target sequence for ZIC4 (NM_032153.2,913-931).
gtctttgctagatcagaaa

SEQ ID NO: 44021 - DNA, 19 bp, Homo sapiens
  siRNA target sequence for ZIC5 (NM_033132.2,348-366).
cccgccagcgctgagatta

SEQ ID NO: 44022 - DNA, 19 bp, Homo sapiens
  siRNA target sequence for ZIC5 (NM_033132.2,388-406).
gtccagccgcttcagaata

SEQ ID NO: 44023 - DNA, 19 bp, Homo sapiens
  siRNA target sequence for ZIC5 (NM_033132.2,393-411).
gccgcttcagaatatgaca

SEQ ID NO: 44024 - DNA, 19 bp, Homo sapiens
  siRNA target sequence for ZIC5 (NM_033132.2,1226-1244).
gctacggagccgtgaactt

SEQ ID NO: 44025 - DNA, 19 bp, Homo sapiens
  siRNA target sequence for ZIC5 (NM_033132.2,1232-1250).
gagccgtgaacttaaacct

SEQ ID NO: 44026 - DNA, 19 bp, Homo sapiens
  siRNA target sequence for ZIC5 (NM_033132.2,1531-1549).
gccaagccctgctccaaaa

SEQ ID NO: 44027 - DNA, 19 bp, Homo sapiens
  siRNA target sequence for ZIC5 (NM_033132.2,1670-1688).
ccaaatacaagctcatcaa

SEQ ID NO: 44028 - DNA, 19 bp, Homo sapiens
  siRNA target sequence for ZIC5 (NM_033132.2,1776-1794).
gatccacaagcgtactcat

SEQ ID NO: 44029 - DNA, 19 bp, Homo sapiens
  siRNA target sequence for ZIC5 (NM_033132.2,1779-1797).
ccacaagcgtactcataca

SEQ ID NO: 44030 - DNA, 19 bp, Homo sapiens
  siRNA target sequence for ZIC5 (NM_033132.2,1911-1929).
gattcgaggctgtgacaaa

SEQ ID NO: 44031 - DNA, 19 bp, Homo sapiens
  siRNA target sequence for ZIC5 (NM_033132.2,1916-1934).
gaggctgtgacaaatccta

SEQ ID NO: 44032 - DNA, 19 bp, Homo sapiens
  siRNA target sequence for ZIC5 (NM_033132.2,2098-2116).
gtgaccaacctcaatgagt

SEQ ID NO: 44033 - DNA, 19 bp, Homo sapiens
  siRNA target sequence for ZIC5 (NM_033132.2,2107-2125).
ctcaatgagtggtacgttt

SEQ ID NO: 44034 - DNA, 19 bp, Homo sapiens
  siRNA target sequence for ZIC5 (NM_033132.2,2221-2239).
gttgtgcggacgatacatt

SEQ ID NO: 44035 - DNA, 19 bp, Homo sapiens
  siRNA target sequence for ZIM3 (NM_052882.1,688-706).
caagagaagtcccatcaat

SEQ ID NO: 44036 - DNA, 19 bp, Homo sapiens
  siRNA target sequence for ZIM3 (NM_052882.1,693-711).
gaagtcccatcaatcaata

SEQ ID NO: 44037 - DNA, 19 bp, Homo sapiens
  siRNA target sequence for ZIM3 (NM_052882.1,741-759).
gaatgtgacggatctaaga

SEQ ID NO: 44038 - DNA, 19 bp, Homo sapiens
  siRNA target sequence for ZIM3 (NM_052882.1,745-763).
gtgacggatctaagaaaat

SEQ ID NO: 44039 - DNA, 19 bp, Homo sapiens
  siRNA target sequence for ZIM3 (NM_052882.1,749-767).
cggatctaagaaaatactt

SEQ ID NO: 44040 - DNA, 19 bp, Homo sapiens
  siRNA target sequence for ZIM3 (NM_052882.1,773-791).
gggcatagatgatgtatct

SEQ ID NO: 44041 - DNA, 19 bp, Homo sapiens
  siRNA target sequence for ZIM3 (NM_052882.1,774-792).
ggcatagatgatgtatctt

SEQ ID NO: 44042 - DNA, 19 bp, Homo sapiens
  siRNA target sequence for ZIM3 (NM_052882.1,793-811).
ccttgcaacactatgtaca

SEQ ID NO: 44043 - DNA, 19 bp, Homo sapiens
  siRNA target sequence for ZIM3 (NM_052882.1,820-838).
ctcacgatgataatggata

SEQ ID NO: 44044 - DNA, 19 bp, Homo sapiens
  siRNA target sequence for ZIM3 (NM_052882.1,824-842).
cgatgataatggatacaga

SEQ ID NO: 44045 - DNA, 19 bp, Homo sapiens
  siRNA target sequence for ZIM3 (NM_052882.1,853-871).
gcaataatccatccaaatt

SEQ ID NO: 44046 - DNA, 19 bp, Homo sapiens
  siRNA target sequence for ZIM3 (NM_052882.1,866-884).
caaatttgtaggacaacaa

SEQ ID NO: 44047 - DNA, 19 bp, Homo sapiens
  siRNA target sequence for ZIM3 (NM_052882.1,1002-1020).
gagaagtggaagcttgata

SEQ ID NO: 44048 - DNA, 19 bp, Homo sapiens
  siRNA target sequence for ZIM3 (NM_052882.1,1004-1022).
gaagtggaagcttgataaa

SEQ ID NO: 44049 - DNA, 19 bp, Homo sapiens
  siRNA target sequence for ZIM3 (NM_052882.1,1007-1025).
gtggaagcttgataaacat

SEQ ID NO: 44050 - DNA, 19 bp, Homo sapiens
  siRNA target sequence for ZIM3 (NM_052882.1,1161-1179).
gccttttcctggaaatcat

SEQ ID NO: 44051 - DNA, 19 bp, Homo sapiens
  siRNA target sequence for ZIM3 (NM_052882.1,1177-1195).
catcctgcattaatcatga

SEQ ID NO: 44052 - DNA, 19 bp, Homo sapiens
  siRNA target sequence for ZIM3 (NM_052882.1,1434-1452).
gtcatcgatcatgagaaaa

SEQ ID NO: 44053 - DNA, 19 bp, Homo sapiens
  siRNA target sequence for ZIM3 (NM_052882.1,1478-1496).
gtgtgatctatgtggaaat

SEQ ID NO: 44054 - DNA, 19 bp, Homo sapiens
  siRNA target sequence for ZIM3 (NM_052882.1,1482-1500).
gatctatgtggaaatacct

SEQ ID NO: 44055 - DNA, 19 bp, Homo sapiens
  siRNA target sequence for ZIM3 (NM_052882.1,1628-1646).
cggagagaggacctataga

SEQ ID NO: 44056 - DNA, 19 bp, Homo sapiens
  siRNA target sequence for ZIM3 (NM_052882.1,1674-1692).
cggaaattaaaccttagtt

SEQ ID NO: 44057 - DNA, 19 bp, Homo sapiens
  siRNA target sequence for ZIM3 (NM_052882.1,1758-1776).
gacaggtcataccttgtta

SEQ ID NO: 44058 - DNA, 19 bp, Homo sapiens
  siRNA target sequence for ZNF10 (NM_015394.4,189-207).
ggatgctaagtcactaact

SEQ ID NO: 44059 - DNA, 19 bp, Homo sapiens
  siRNA target sequence for ZNF10 (NM_015394.4,291-309).
gcagatcgtgtacagaaat

SEQ ID NO: 44060 - DNA, 19 bp, Homo sapiens
  siRNA target sequence for ZNF10 (NM_015394.4,454-472).
gcatttgaaatcaaatcat

SEQ ID NO: 44061 - DNA, 19 bp, Homo sapiens
  siRNA target sequence for ZNF10 (NM_015394.4,549-567).
ctggtatttgtcattagaa

SEQ ID NO: 44062 - DNA, 19 bp, Homo sapiens
  siRNA target sequence for ZNF10 (NM_015394.4,551-569).
ggtatttgtcattagaaga

SEQ ID NO: 44063 - DNA, 19 bp, Homo sapiens
  siRNA target sequence for ZNF10 (NM_015394.4,581-599).
gtagagaccagttagacaa

SEQ ID NO: 44064 - DNA, 19 bp, Homo sapiens
  siRNA target sequence for ZNF10 (NM_015394.4,642-660).
cacccaaaagaaagtactt

SEQ ID NO: 44065 - DNA, 19 bp, Homo sapiens
  siRNA target sequence for ZNF10 (NM_015394.4,645-663).
ccaaaagaaagtacttact

SEQ ID NO: 44066 - DNA, 19 bp, Homo sapiens
  siRNA target sequence for ZNF10 (NM_015394.4,675-693).
ctctgaaagtggtaaatat

SEQ ID NO: 44067 - DNA, 19 bp, Homo sapiens
  siRNA target sequence for ZNF10 (NM_015394.4,742-760).
cataaacgtgactcacata

SEQ ID NO: 44068 - DNA, 19 bp, Homo sapiens
  siRNA target sequence for ZNF10 (NM_015394.4,804-822).
cagttgtgcaagtaacagt

SEQ ID NO: 44069 - DNA, 19 bp, Homo sapiens
  siRNA target sequence for ZNF10 (NM_015394.4,806-824).
gttgtgcaagtaacagtaa

SEQ ID NO: 44070 - DNA, 19 bp, Homo sapiens
  siRNA target sequence for ZNF10 (NM_015394.4,832-850).
ggtcaaactttctgtcaaa

SEQ ID NO: 44071 - DNA, 19 bp, Homo sapiens
  siRNA target sequence for ZNF10 (NM_015394.4,845-863).
gtcaaaacattcaccttat

SEQ ID NO: 44072 - DNA, 19 bp, Homo sapiens
  siRNA target sequence for ZNF10 (NM_015394.4,896-914).
cctacaaatgccctgataa

SEQ ID NO: 44073 - DNA, 19 bp, Homo sapiens
  siRNA target sequence for ZNF10 (NM_015394.4,910-928).
gataatgacaactctctta

SEQ ID NO: 44074 - DNA, 19 bp, Homo sapiens
  siRNA target sequence for ZNF10 (NM_015394.4,934-952).
ggttcatctcttggtatat

SEQ ID NO: 44075 - DNA, 19 bp, Homo sapiens
  siRNA target sequence for ZNF10 (NM_015394.4,938-956).
catctcttggtatatcaaa

SEQ ID NO: 44076 - DNA, 19 bp, Homo sapiens
  siRNA target sequence for ZNF10 (NM_015394.4,1005-1023).
cttcagctggcgctctaat

SEQ ID NO: 44077 - DNA, 19 bp, Homo sapiens
  siRNA target sequence for ZNF10 (NM_015394.4,1011-1029).
ctggcgctctaatcttact

SEQ ID NO: 44078 - DNA, 19 bp, Homo sapiens
  siRNA target sequence for ZNF10 (NM_015394.4,1386-1404).
gagagtgaggccctatgaa

SEQ ID NO: 44079 - DNA, 19 bp, Homo sapiens
  siRNA target sequence for ZNF10 (NM_015394.4,1514-1532).
gtcgaagctctcaccttta

SEQ ID NO: 44080 - DNA, 19 bp, Homo sapiens
  siRNA target sequence for ZNF10 (NM_015394.4,1516-1534).
cgaagctctcacctttatt

SEQ ID NO: 44081 - DNA, 19 bp, Homo sapiens
  siRNA target sequence for ZNF10 (NM_015394.4,1676-1694).
ccttcatccggaagaatga

SEQ ID NO: 44082 - DNA, 19 bp, Homo sapiens
  siRNA target sequence for ZNF10 (NM_015394.4,1684-1702).
cggaagaatgacctcatta

SEQ ID NO: 44083 - DNA, 19 bp, Homo sapiens
  siRNA target sequence for ZNF10 (NM_015394.4,1766-1784).
gccagaactctccatttat

SEQ ID NO: 44084 - DNA, 19 bp, Homo sapiens
  siRNA target sequence for ZNF10 (NM_015394.4,1767-1785).
ccagaactctccatttata

SEQ ID NO: 44085 - DNA, 19 bp, Homo sapiens
  siRNA target sequence for ZNF10 (NM_015394.4,1770-1788).
gaactctccatttatagtt

SEQ ID NO: 44086 - DNA, 19 bp, Homo sapiens
  siRNA target sequence for ZNF10 (NM_015394.4,1773-1791).
ctctccatttatagttcat

SEQ ID NO: 44087 - DNA, 19 bp, Homo sapiens
  siRNA target sequence for ZNF10 (NM_015394.4,1775-1793).
ctccatttatagttcatca

SEQ ID NO: 44088 - DNA, 19 bp, Homo sapiens
  siRNA target sequence for ZNF10 (NM_015394.4,1803-1821).
cactggagagcagttctta

SEQ ID NO: 44089 - DNA, 19 bp, Homo sapiens
  siRNA target sequence for ZNF10 (NM_015394.4,1812-1830).
gcagttcttaacatgcaat

SEQ ID NO: 44090 - DNA, 19 bp, Homo sapiens
  siRNA target sequence for ZNF10 (NM_015394.4,1835-1853).
gtgggacagcgcttgttaa

SEQ ID NO: 44091 - DNA, 19 bp, Homo sapiens
  siRNA target sequence for ZNF10 (NM_015394.4,1837-1855).
gggacagcgcttgttaata

SEQ ID NO: 44092 - DNA, 19 bp, Homo sapiens
  siRNA target sequence for ZNF10 (NM_015394.4,1849-1867).
gttaatacctctaacctta

SEQ ID NO: 44093 - DNA, 19 bp, Homo sapiens
  siRNA target sequence for ZNF10 (NM_015394.4,1856-1874).
cctctaaccttattggata

SEQ ID NO: 44094 - DNA, 19 bp, Homo sapiens
  siRNA target sequence for ZNF10 (NM_015394.4,1871-1889).
gataccagacaaatcatat

SEQ ID NO: 44095 - DNA, 19 bp, Homo sapiens
  siRNA target sequence for ZNF124 (NM_003431.1,564-582).
gcacatcatatctcattct

SEQ ID NO: 44096 - DNA, 19 bp, Homo sapiens
  siRNA target sequence for ZNF124 (NM_003431.1,612-630).
cggaaagaagccatgtaca

SEQ ID NO: 44097 - DNA, 19 bp, Homo sapiens
  siRNA target sequence for ZNF124 (NM_003431.1,703-721).
ggacattatggttgtacaa

SEQ ID NO: 44098 - DNA, 19 bp, Homo sapiens
  siRNA target sequence for ZNF124 (NM_003431.1,704-722).
gacattatggttgtacaat

SEQ ID NO: 44099 - DNA, 19 bp, Homo sapiens
  siRNA target sequence for ZNF124 (NM_003431.1,830-848).
cccgttctcttaatagaca

SEQ ID NO: 44100 - DNA, 19 bp, Homo sapiens
  siRNA target sequence for ZNF124 (NM_003431.1,831-849).
ccgttctcttaatagacat

SEQ ID NO: 44101 - DNA, 19 bp, Homo sapiens
  siRNA target sequence for ZNF124 (NM_003431.1,832-850).
cgttctcttaatagacata

SEQ ID NO: 44102 - DNA, 19 bp, Homo sapiens
  siRNA target sequence for ZNF124 (NM_003431.1,833-851).
gttctcttaatagacataa

SEQ ID NO: 44103 - DNA, 19 bp, Homo sapiens
  siRNA target sequence for ZNF124 (NM_003431.1,998-1016).
ccaattgccttcattacca

SEQ ID NO: 44104 - DNA, 19 bp, Homo sapiens
  siRNA target sequence for ZNF124 (NM_003431.1,1085-1103).
gttccttgcaaggacatat

SEQ ID NO: 44105 - DNA, 19 bp, Homo sapiens
  siRNA target sequence for ZNF124 (NM_003431.1,1088-1106).
ccttgcaaggacatataaa

SEQ ID NO: 44106 - DNA, 19 bp, Homo sapiens
  siRNA target sequence for ZNF124 (NM_003431.1,1164-1182).
cgccagttcccttcagaaa

SEQ ID NO: 44107 - DNA, 19 bp, Homo sapiens
  siRNA target sequence for ZNF124 (NM_003431.1,1185-1203).
cgagaaaactcatattgca

SEQ ID NO: 44108 - DNA, 19 bp, Homo sapiens
  siRNA target sequence for ZNF124 (NM_003431.1,1331-1349).
gtgctagtaccctttggaa

SEQ ID NO: 44109 - DNA, 19 bp, Homo sapiens
  siRNA target sequence for ZNF136 (NM_003437.2,268-286).
caaacaccgagggagaaat

SEQ ID NO: 44110 - DNA, 19 bp, Homo sapiens
  siRNA target sequence for ZNF136 (NM_003437.2,274-292).
ccgagggagaaatctaaga

SEQ ID NO: 44111 - DNA, 19 bp, Homo sapiens
  siRNA target sequence for ZNF136 (NM_003437.2,301-319).
gttagaaagactctatcaa

SEQ ID NO: 44112 - DNA, 19 bp, Homo sapiens
  siRNA target sequence for ZNF136 (NM_003437.2,305-323).
gaaagactctatcaaacta

SEQ ID NO: 44113 - DNA, 19 bp, Homo sapiens
  siRNA target sequence for ZNF136 (NM_003437.2,333-351).
gtcagcgtggaggaatttt

SEQ ID NO: 44114 - DNA, 19 bp, Homo sapiens
  siRNA target sequence for ZNF136 (NM_003437.2,335-353).
cagcgtggaggaattttta

SEQ ID NO: 44115 - DNA, 19 bp, Homo sapiens
  siRNA target sequence for ZNF136 (NM_003437.2,354-372).
gccagtttgcaaatcagaa

SEQ ID NO: 44116 - DNA, 19 bp, Homo sapiens
  siRNA target sequence for ZNF136 (NM_003437.2,670-688).
cagtggatatacaccatat

SEQ ID NO: 44117 - DNA, 19 bp, Homo sapiens
  siRNA target sequence for ZNF136 (NM_003437.2,672-690).
gtggatatacaccatataa

SEQ ID NO: 44118 - DNA, 19 bp, Homo sapiens
  siRNA target sequence for ZNF136 (NM_003437.2,888-906).
ctctgagttcatttcaagt

SEQ ID NO: 44119 - DNA, 19 bp, Homo sapiens
  siRNA target sequence for ZNF136 (NM_003437.2,967-985).
cagttgttccccaacctta

SEQ ID NO: 44120 - DNA, 19 bp, Homo sapiens
  siRNA target sequence for ZNF136 (NM_003437.2,972-990).
gttccccaaccttacgaat

SEQ ID NO: 44121 - DNA, 19 bp, Homo sapiens
  siRNA target sequence for ZNF136 (NM_003437.2,976-994).
cccaaccttacgaatacat

SEQ ID NO: 44122 - DNA, 19 bp, Homo sapiens
  siRNA target sequence for ZNF136 (NM_003437.2,978-996).
caaccttacgaatacatga

SEQ ID NO: 44123 - DNA, 19 bp, Homo sapiens
  siRNA target sequence for ZNF136 (NM_003437.2,1060-1078).
cccctcccttcgactacat

SEQ ID NO: 44124 - DNA, 19 bp, Homo sapiens
  siRNA target sequence for ZNF136 (NM_003437.2,1062-1080).
cctcccttcgactacatga

SEQ ID NO: 44125 - DNA, 19 bp, Homo sapiens
  siRNA target sequence for ZNF136 (NM_003437.2,1140-1158).
ctgccagtacctttcaaat

SEQ ID NO: 44126 - DNA, 19 bp, Homo sapiens
  siRNA target sequence for ZNF136 (NM_003437.2,1392-1410).
cttcaacatcaattcgaat

SEQ ID NO: 44127 - DNA, 19 bp, Homo sapiens
  siRNA target sequence for ZNF136 (NM_003437.2,1669-1687).
gttaacacatgctgaagat

SEQ ID NO: 44128 - DNA, 19 bp, Homo sapiens
  siRNA target sequence for ZNF136 (NM_003437.2,1682-1700).
gaagatggaccaccttata

SEQ ID NO: 44129 - DNA, 19 bp, Homo sapiens
  siRNA target sequence for ZNF136 (NM_003437.2,1685-1703).
gatggaccaccttataaat

SEQ ID NO: 44130 - DNA, 19 bp, Homo sapiens
  siRNA target sequence for ZNF136 (NM_003437.2,1688-1706).
ggaccaccttataaatgca

SEQ ID NO: 44131 - DNA, 19 bp, Homo sapiens
  siRNA target sequence for ZNF14 (NM_021030.2,271-289).
cctggtttgtctaggaaaa

SEQ ID NO: 44132 - DNA, 19 bp, Homo sapiens
  siRNA target sequence for ZNF14 (NM_021030.2,272-290).
ctggtttgtctaggaaaaa

SEQ ID NO: 44133 - DNA, 19 bp, Homo sapiens
  siRNA target sequence for ZNF14 (NM_021030.2,331-349).
ggggaaaaatcgaagatgt

SEQ ID NO: 44134 - DNA, 19 bp, Homo sapiens
  siRNA target sequence for ZNF14 (NM_021030.2,405-423).
ctagccagatgccaaatgt

SEQ ID NO: 44135 - DNA, 19 bp, Homo sapiens
  siRNA target sequence for ZNF14 (NM_021030.2,480-498).
gaagagacttcattcatca

SEQ ID NO: 44136 - DNA, 19 bp, Homo sapiens
  siRNA target sequence for ZNF14 (NM_021030.2,1116-1134).
gctttcgagcacatgtaat

SEQ ID NO: 44137 - DNA, 19 bp, Homo sapiens
  siRNA target sequence for ZNF14 (NM_021030.2,1117-1135).
ctttcgagcacatgtaata

SEQ ID NO: 44138 - DNA, 19 bp, Homo sapiens
  siRNA target sequence for ZNF14 (NM_021030.2,1527-1545).
gttcaagttattttcgaat

SEQ ID NO: 44139 - DNA, 19 bp, Homo sapiens
  siRNA target sequence for ZNF14 (NM_021030.2,1774-1792).
ccttcgttccagtcaaatt

SEQ ID NO: 44140 - DNA, 19 bp, Homo sapiens
  siRNA target sequence for ZNF14 (NM_021030.2,1778-1796).
cgttccagtcaaattcgat

SEQ ID NO: 44141 - DNA, 19 bp, Homo sapiens
  siRNA target sequence for ZNF14 (NM_021030.2,1787-1805).
caaattcgattgcatgaaa

SEQ ID NO: 44142 - DNA, 19 bp, Homo sapiens
  siRNA target sequence for ZNF14 (NM_021030.2,1863-1881).
cttccagtaaatttcgaat

SEQ ID NO: 44143 - DNA, 19 bp, Homo sapiens
  siRNA target sequence for ZNF141 (NM_003441.1,686-704).
gcaaatcatttcagaagtt

SEQ ID NO: 44144 - DNA, 19 bp, Homo sapiens
  siRNA target sequence for ZNF141 (NM_003441.1,1379-1397).
cagatcggagtcaacataa

SEQ ID NO: 44145 - DNA, 19 bp, Homo sapiens
  siRNA target sequence for ZNF141 (NM_003441.1,1381-1399).
gatcggagtcaacataaga

SEQ ID NO: 44146 - DNA, 19 bp, Homo sapiens
  siRNA target sequence for ZNF141 (NM_003441.1,1465-1483).
ctcctgagtcaacataaga

SEQ ID NO: 44147 - DNA, 19 bp, Homo sapiens
  siRNA target sequence for ZNF143 (NM_003442.3,177-195).
ggatggaggcgcaacatgt

SEQ ID NO: 44148 - DNA, 19 bp, Homo sapiens
  siRNA target sequence for ZNF143 (NM_003442.3,178-196).
gatggaggcgcaacatgtt

SEQ ID NO: 44149 - DNA, 19 bp, Homo sapiens
  siRNA target sequence for ZNF143 (NM_003442.3,228-246).
cagatggtgacaacttaga

SEQ ID NO: 44150 - DNA, 19 bp, Homo sapiens
  siRNA target sequence for ZNF143 (NM_003442.3,233-251).
ggtgacaacttagaaaata

SEQ ID NO: 44151 - DNA, 19 bp, Homo sapiens
  siRNA target sequence for ZNF143 (NM_003442.3,234-252).
gtgacaacttagaaaatat

SEQ ID NO: 44152 - DNA, 19 bp, Homo sapiens
  siRNA target sequence for ZNF143 (NM_003442.3,264-282).
gcttgcaagcagtaacact

SEQ ID NO: 44153 - DNA, 19 bp, Homo sapiens
  siRNA target sequence for ZNF143 (NM_003442.3,291-309).
gttctactgcttacataca

SEQ ID NO: 44154 - DNA, 19 bp, Homo sapiens
  siRNA target sequence for ZNF143 (NM_003442.3,294-312).
ctactgcttacatacaaca

SEQ ID NO: 44155 - DNA, 19 bp, Homo sapiens
  siRNA target sequence for ZNF143 (NM_003442.3,297-315).
ctgcttacatacaacacaa

SEQ ID NO: 44156 - DNA, 19 bp, Homo sapiens
  siRNA target sequence for ZNF143 (NM_003442.3,299-317).
gcttacatacaacacaatt

SEQ ID NO: 44157 - DNA, 19 bp, Homo sapiens
  siRNA target sequence for ZNF143 (NM_003442.3,366-384).
gttctgcggcctatgttca

SEQ ID NO: 44158 - DNA, 19 bp, Homo sapiens
  siRNA target sequence for ZNF143 (NM_003442.3,372-390).
cggcctatgttcaacatgt

SEQ ID NO: 44159 - DNA, 19 bp, Homo sapiens
  siRNA target sequence for ZNF143 (NM_003442.3,383-401).
caacatgtacccataccta

SEQ ID NO: 44160 - DNA, 19 bp, Homo sapiens
  siRNA target sequence for ZNF143 (NM_003442.3,386-404).
catgtacccatacctaaaa

SEQ ID NO: 44161 - DNA, 19 bp, Homo sapiens
  siRNA target sequence for ZNF143 (NM_003442.3,435-453).
gtcaagcagtacagttaga

SEQ ID NO: 44162 - DNA, 19 bp, Homo sapiens
  siRNA target sequence for ZNF143 (NM_003442.3,478-496).
ccacacctccaaagatagt

SEQ ID NO: 44163 - DNA, 19 bp, Homo sapiens
  siRNA target sequence for ZNF143 (NM_003442.3,481-499).
cacctccaaagatagttat

SEQ ID NO: 44164 - DNA, 19 bp, Homo sapiens
  siRNA target sequence for ZNF143 (NM_003442.3,628-646).
cactggggatgctacaatt

SEQ ID NO: 44165 - DNA, 19 bp, Homo sapiens
  siRNA target sequence for ZNF143 (NM_003442.3,691-709).
gtccattgatggaagtgaa

SEQ ID NO: 44166 - DNA, 19 bp, Homo sapiens
  siRNA target sequence for ZNF143 (NM_003442.3,776-794).
ggacatgctacaagagtaa

SEQ ID NO: 44167 - DNA, 19 bp, Homo sapiens
  siRNA target sequence for ZNF143 (NM_003442.3,823-841).
ggcatttcgatgtgaatat

SEQ ID NO: 44168 - DNA, 19 bp, Homo sapiens
  siRNA target sequence for ZNF143 (NM_003442.3,825-843).
catttcgatgtgaatatga

SEQ ID NO: 44169 - DNA, 19 bp, Homo sapiens
  siRNA target sequence for ZNF143 (NM_003442.3,903-921).
caggagatcggccttatca

SEQ ID NO: 44170 - DNA, 19 bp, Homo sapiens
  siRNA target sequence for ZNF143 (NM_003442.3,946-964).
ggcatttgcaacaggttat

SEQ ID NO: 44171 - DNA, 19 bp, Homo sapiens
  siRNA target sequence for ZNF143 (NM_003442.3,960-978).
gttatggattaaaaagtca

SEQ ID NO: 44172 - DNA, 19 bp, Homo sapiens
  siRNA target sequence for ZNF143 (NM_003442.3,1010-1028).
cggtgttcggaagataatt

SEQ ID NO: 44173 - DNA, 19 bp, Homo sapiens
  siRNA target sequence for ZNF143 (NM_003442.3,1012-1030).
gtgttcggaagataattgt

SEQ ID NO: 44174 - DNA, 19 bp, Homo sapiens
  siRNA target sequence for ZNF143 (NM_003442.3,1052-1070).
ggagatctacagaaacaca

SEQ ID NO: 44175 - DNA, 19 bp, Homo sapiens
  siRNA target sequence for ZNF143 (NM_003442.3,1117-1135).
ctgcggtcggtcctttaca

SEQ ID NO: 44176 - DNA, 19 bp, Homo sapiens
  siRNA target sequence for ZNF143 (NM_003442.3,1120-1138).
cggtcggtcctttacaaca

SEQ ID NO: 44177 - DNA, 19 bp, Homo sapiens
  siRNA target sequence for ZNF143 (NM_003442.3,1121-1139).
ggtcggtcctttacaacat

SEQ ID NO: 44178 - DNA, 19 bp, Homo sapiens
  siRNA target sequence for ZNF143 (NM_003442.3,1124-1142).
cggtcctttacaacatcaa

SEQ ID NO: 44179 - DNA, 19 bp, Homo sapiens
  siRNA target sequence for ZNF143 (NM_003442.3,1125-1143).
ggtcctttacaacatcaaa

SEQ ID NO: 44180 - DNA, 19 bp, Homo sapiens
  siRNA target sequence for ZNF143 (NM_003442.3,1126-1144).
gtcctttacaacatcaaat

SEQ ID NO: 44181 - DNA, 19 bp, Homo sapiens
  siRNA target sequence for ZNF143 (NM_003442.3,1223-1241).
gccagtgcaacaaattata

SEQ ID NO: 44182 - DNA, 19 bp, Homo sapiens
  siRNA target sequence for ZNF143 (NM_003442.3,1224-1242).
ccagtgcaacaaattataa

SEQ ID NO: 44183 - DNA, 19 bp, Homo sapiens
  siRNA target sequence for ZNF143 (NM_003442.3,1225-1243).
cagtgcaacaaattataaa

SEQ ID NO: 44184 - DNA, 19 bp, Homo sapiens
  siRNA target sequence for ZNF143 (NM_003442.3,1289-1307).
gttcctgggtgtgacaaaa

SEQ ID NO: 44185 - DNA, 19 bp, Homo sapiens
  siRNA target sequence for ZNF143 (NM_003442.3,1295-1313).
gggtgtgacaaaaggttta

SEQ ID NO: 44186 - DNA, 19 bp, Homo sapiens
  siRNA target sequence for ZNF143 (NM_003442.3,1297-1315).
gtgtgacaaaaggtttaca

SEQ ID NO: 44187 - DNA, 19 bp, Homo sapiens
  siRNA target sequence for ZNF143 (NM_003442.3,1324-1342).
cagtttgtacaaacatcat

SEQ ID NO: 44188 - DNA, 19 bp, Homo sapiens
  siRNA target sequence for ZNF143 (NM_003442.3,1349-1367).
cacactcattccaaacctt

SEQ ID NO: 44189 - DNA, 19 bp, Homo sapiens
  siRNA target sequence for ZNF143 (NM_003442.3,1355-1373).
cattccaaaccttacaact

SEQ ID NO: 44190 - DNA, 19 bp, Homo sapiens
  siRNA target sequence for ZNF143 (NM_003442.3,1519-1537).
gtcccagattacgtatgtt

SEQ ID NO: 44191 - DNA, 19 bp, Homo sapiens
  siRNA target sequence for ZNF143 (NM_003442.3,1522-1540).
ccagattacgtatgttaca

SEQ ID NO: 44192 - DNA, 19 bp, Homo sapiens
  siRNA target sequence for ZNF143 (NM_003442.3,1550-1568).
ggggacgacgttgtttcta

SEQ ID NO: 44193 - DNA, 19 bp, Homo sapiens
  siRNA target sequence for ZNF143 (NM_003442.3,1552-1570).
ggacgacgttgtttctaca

SEQ ID NO: 44194 - DNA, 19 bp, Homo sapiens
  siRNA target sequence for ZNF143 (NM_003442.3,1555-1573).
cgacgttgtttctacacaa

SEQ ID NO: 44195 - DNA, 19 bp, Homo sapiens
  siRNA target sequence for ZNF143 (NM_003442.3,1593-1611).
ctggactgagtcaacaagt

SEQ ID NO: 44196 - DNA, 19 bp, Homo sapiens
  siRNA target sequence for ZNF143 (NM_003442.3,1639-1657).
gcatgtcaacatatctcaa

SEQ ID NO: 44197 - DNA, 19 bp, Homo sapiens
  siRNA target sequence for ZNF143 (NM_003442.3,1755-1773).
gaacgcactctgttgctat

SEQ ID NO: 44198 - DNA, 19 bp, Homo sapiens
  siRNA target sequence for ZNF143 (NM_003442.3,1759-1777).
gcactctgttgctatggtt

SEQ ID NO: 44199 - DNA, 19 bp, Homo sapiens
  siRNA target sequence for ZNF143 (NM_003442.3,1823-1841).
gacttggcagcattccata

SEQ ID NO: 44200 - DNA, 19 bp, Homo sapiens
  siRNA target sequence for ZNF143 (NM_003442.3,1867-1885).
gcagcatagccatcactta

SEQ ID NO: 44201 - DNA, 19 bp, Homo sapiens
  siRNA target sequence for ZNF143 (NM_003442.3,1900-1918).
cagacctctgaccttagta

SEQ ID NO: 44202 - DNA, 19 bp, Homo sapiens
  siRNA target sequence for ZNF143 (NM_003442.3,1912-1930).
cttagtagcaacatccaat

SEQ ID NO: 44203 - DNA, 19 bp, Homo sapiens
  siRNA target sequence for ZNF146 (NM_007145.1,1017-1035).
gccaaaagcagtatgtcat

SEQ ID NO: 44204 - DNA, 19 bp, Homo sapiens
  siRNA target sequence for ZNF146 (NM_007145.1,1018-1036).
ccaaaagcagtatgtcatt

SEQ ID NO: 44205 - DNA, 19 bp, Homo sapiens
  siRNA target sequence for ZNF146 (NM_007145.1,1019-1037).
caaaagcagtatgtcatta

SEQ ID NO: 44206 - DNA, 19 bp, Homo sapiens
  siRNA target sequence for ZNF146 (NM_007145.1,1056-1074).
ctggcgagaagcttttcga

SEQ ID NO: 44207 - DNA, 19 bp, Homo sapiens
  siRNA target sequence for ZNF146 (NM_007145.1,1058-1076).
ggcgagaagcttttcgaat

SEQ ID NO: 44208 - DNA, 19 bp, Homo sapiens
  siRNA target sequence for ZNF146 (NM_007145.1,1437-1455).
ctcagcgaacatcacttat

SEQ ID NO: 44209 - DNA, 19 bp, Homo sapiens
  siRNA target sequence for ZNF146 (NM_007145.1,1441-1459).
gcgaacatcacttattgta

SEQ ID NO: 44210 - DNA, 19 bp, Homo sapiens
  siRNA target sequence for ZNF148 (NM_021964.1,435-453).
gcggcatagacgaaatgca

SEQ ID NO: 44211 - DNA, 19 bp, Homo sapiens
  siRNA target sequence for ZNF148 (NM_021964.1,510-528).
gagagctacaggattcagt

SEQ ID NO: 44212 - DNA, 19 bp, Homo sapiens
  siRNA target sequence for ZNF148 (NM_021964.1,520-538).
ggattcagtacttcaagat

SEQ ID NO: 44213 - DNA, 19 bp, Homo sapiens
  siRNA target sequence for ZNF148 (NM_021964.1,730-748).
cgtaaagcaggaaattact

SEQ ID NO: 44214 - DNA, 19 bp, Homo sapiens
  siRNA target sequence for ZNF148 (NM_021964.1,766-784).
gcaactgatgagagacaaa

SEQ ID NO: 44215 - DNA, 19 bp, Homo sapiens
  siRNA target sequence for ZNF148 (NM_021964.1,795-813).
gagagccagtagacttaca

SEQ ID NO: 44216 - DNA, 19 bp, Homo sapiens
  siRNA target sequence for ZNF148 (NM_021964.1,797-815).
gagccagtagacttacaga

SEQ ID NO: 44217 - DNA, 19 bp, Homo sapiens
  siRNA target sequence for ZNF148 (NM_021964.1,799-817).
gccagtagacttacagaaa

SEQ ID NO: 44218 - DNA, 19 bp, Homo sapiens
  siRNA target sequence for ZNF148 (NM_021964.1,800-818).
ccagtagacttacagaaaa

SEQ ID NO: 44219 - DNA, 19 bp, Homo sapiens
  siRNA target sequence for ZNF148 (NM_021964.1,803-821).
gtagacttacagaaaaaga

SEQ ID NO: 44220 - DNA, 19 bp, Homo sapiens
  siRNA target sequence for ZNF148 (NM_021964.1,833-851).
caacgttctcccgcaaaaa

SEQ ID NO: 44221 - DNA, 19 bp, Homo sapiens
  siRNA target sequence for ZNF148 (NM_021964.1,837-855).
gttctcccgcaaaaatcct

SEQ ID NO: 44222 - DNA, 19 bp, Homo sapiens
  siRNA target sequence for ZNF148 (NM_021964.1,842-860).
cccgcaaaaatccttacaa

SEQ ID NO: 44223 - DNA, 19 bp, Homo sapiens
  siRNA target sequence for ZNF148 (NM_021964.1,894-912).
ctaaatctcacgtttgtga

SEQ ID NO: 44224 - DNA, 19 bp, Homo sapiens
  siRNA target sequence for ZNF148 (NM_021964.1,927-945).
cctttagaacgaactatca

SEQ ID NO: 44225 - DNA, 19 bp, Homo sapiens
  siRNA target sequence for ZNF148 (NM_021964.1,933-951).
gaacgaactatcacttaca

SEQ ID NO: 44226 - DNA, 19 bp, Homo sapiens
  siRNA target sequence for ZNF148 (NM_021964.1,1067-1085).
ccatttcgctgtgatgaat

SEQ ID NO: 44227 - DNA, 19 bp, Homo sapiens
  siRNA target sequence for ZNF148 (NM_021964.1,1086-1104).
gtggtatgagattcataca

SEQ ID NO: 44228 - DNA, 19 bp, Homo sapiens
  siRNA target sequence for ZNF148 (NM_021964.1,1095-1113).
gattcatacaaaaatatca

SEQ ID NO: 44229 - DNA, 19 bp, Homo sapiens
  siRNA target sequence for ZNF148 (NM_021964.1,1112-1130).
catatggaaaggcataaga

SEQ ID NO: 44230 - DNA, 19 bp, Homo sapiens
  siRNA target sequence for ZNF148 (NM_021964.1,1151-1169).
ccttaccagtgtgaatact

SEQ ID NO: 44231 - DNA, 19 bp, Homo sapiens
  siRNA target sequence for ZNF148 (NM_021964.1,1163-1181).
gaatactgtttacagtatt

SEQ ID NO: 44232 - DNA, 19 bp, Homo sapiens
  siRNA target sequence for ZNF148 (NM_021964.1,1188-1206).
gaacagatcgtgtattgaa

SEQ ID NO: 44233 - DNA, 19 bp, Homo sapiens
  siRNA target sequence for ZNF148 (NM_021964.1,1191-1209).
cagatcgtgtattgaaaca

SEQ ID NO: 44234 - DNA, 19 bp, Homo sapiens
  siRNA target sequence for ZNF148 (NM_021964.1,1193-1211).
gatcgtgtattgaaacata

SEQ ID NO: 44235 - DNA, 19 bp, Homo sapiens
  siRNA target sequence for ZNF148 (NM_021964.1,1316-1334).
gacaactcactgccaaaaa

SEQ ID NO: 44236 - DNA, 19 bp, Homo sapiens
  siRNA target sequence for ZNF148 (NM_021964.1,1379-1397).
gagagtgctttggacaaat

SEQ ID NO: 44237 - DNA, 19 bp, Homo sapiens
  siRNA target sequence for ZNF148 (NM_021964.1,1381-1399).
gagtgctttggacaaatct

SEQ ID NO: 44238 - DNA, 19 bp, Homo sapiens
  siRNA target sequence for ZNF148 (NM_021964.1,1465-1483).
gtatatggttgcagaatat

SEQ ID NO: 44239 - DNA, 19 bp, Homo sapiens
  siRNA target sequence for ZNF148 (NM_021964.1,1513-1531).
gggctcgcatttagaagat

SEQ ID NO: 44240 - DNA, 19 bp, Homo sapiens
  siRNA target sequence for ZNF148 (NM_021964.1,1551-1569).
cacctaagttagttctcaa

SEQ ID NO: 44241 - DNA, 19 bp, Homo sapiens
  siRNA target sequence for ZNF148 (NM_021964.1,1553-1571).
cctaagttagttctcaaaa

SEQ ID NO: 44242 - DNA, 19 bp, Homo sapiens
  siRNA target sequence for ZNF148 (NM_021964.1,1558-1576).
gttagttctcaaaaaaatt

SEQ ID NO: 44243 - DNA, 19 bp, Homo sapiens
  siRNA target sequence for ZNF148 (NM_021964.1,1581-1599).
gtaagagaagtctgaaaca

SEQ ID NO: 44244 - DNA, 19 bp, Homo sapiens
  siRNA target sequence for ZNF148 (NM_021964.1,1646-1664).
gagagcaaagtttcaaagt

SEQ ID NO: 44245 - DNA, 19 bp, Homo sapiens
  siRNA target sequence for ZNF148 (NM_021964.1,1718-1736).
gacattgatcaggttgata

SEQ ID NO: 44246 - DNA, 19 bp, Homo sapiens
  siRNA target sequence for ZNF148 (NM_021964.1,1720-1738).
cattgatcaggttgataat

SEQ ID NO: 44247 - DNA, 19 bp, Homo sapiens
  siRNA target sequence for ZNF148 (NM_021964.1,1760-1778).
cctgtgcatagtagtacta

SEQ ID NO: 44248 - DNA, 19 bp, Homo sapiens
  siRNA target sequence for ZNF148 (NM_021964.1,1761-1779).
ctgtgcatagtagtactaa

SEQ ID NO: 44249 - DNA, 19 bp, Homo sapiens
  siRNA target sequence for ZNF148 (NM_021964.1,1763-1781).
gtgcatagtagtactaatt

SEQ ID NO: 44250 - DNA, 19 bp, Homo sapiens
  siRNA target sequence for ZNF148 (NM_021964.1,1765-1783).
gcatagtagtactaattat

SEQ ID NO: 44251 - DNA, 19 bp, Homo sapiens
  siRNA target sequence for ZNF148 (NM_021964.1,1804-1822).
gaagaagaagcggtatctt

SEQ ID NO: 44252 - DNA, 19 bp, Homo sapiens
  siRNA target sequence for ZNF148 (NM_021964.1,1807-1825).
gaagaagcggtatcttcaa

SEQ ID NO: 44253 - DNA, 19 bp, Homo sapiens
  siRNA target sequence for ZNF148 (NM_021964.1,1845-1863).
gggaatatgcgctgaatgt

SEQ ID NO: 44254 - DNA, 19 bp, Homo sapiens
  siRNA target sequence for ZNF148 (NM_021964.1,1855-1873).
gctgaatgtgggtaccata

SEQ ID NO: 44255 - DNA, 19 bp, Homo sapiens
  siRNA target sequence for ZNF148 (NM_021964.1,1907-1925).
gcaagtgtcattgatgaaa

SEQ ID NO: 44256 - DNA, 19 bp, Homo sapiens
  siRNA target sequence for ZNF148 (NM_021964.1,1926-1944).
gtaccacggcatccatatt

SEQ ID NO: 44257 - DNA, 19 bp, Homo sapiens
  siRNA target sequence for ZNF148 (NM_021964.1,1929-1947).
ccacggcatccatattaga

SEQ ID NO: 44258 - DNA, 19 bp, Homo sapiens
  siRNA target sequence for ZNF148 (NM_021964.1,1955-1973).
gcactgaatgtggagatta

SEQ ID NO: 44259 - DNA, 19 bp, Homo sapiens
  siRNA target sequence for ZNF148 (NM_021964.1,1960-1978).
gaatgtggagattaagagt

SEQ ID NO: 44260 - DNA, 19 bp, Homo sapiens
  siRNA target sequence for ZNF148 (NM_021964.1,1966-1984).
ggagattaagagtaatcat

SEQ ID NO: 44261 - DNA, 19 bp, Homo sapiens
  siRNA target sequence for ZNF148 (NM_021964.1,1975-1993).
gagtaatcatgacaaaaat

SEQ ID NO: 44262 - DNA, 19 bp, Homo sapiens
  siRNA target sequence for ZNF148 (NM_021964.1,2017-2035).
gactctgttggatcattat

SEQ ID NO: 44263 - DNA, 19 bp, Homo sapiens
  siRNA target sequence for ZNF148 (NM_021964.1,2187-2205).
ccaacatgttgcaggaata

SEQ ID NO: 44264 - DNA, 19 bp, Homo sapiens
  siRNA target sequence for ZNF148 (NM_021964.1,2230-2248).
ggacagaactagccaaaat

SEQ ID NO: 44265 - DNA, 19 bp, Homo sapiens
  siRNA target sequence for ZNF148 (NM_021964.1,2233-2251).
cagaactagccaaaatgat

SEQ ID NO: 44266 - DNA, 19 bp, Homo sapiens
  siRNA target sequence for ZNF148 (NM_021964.1,2267-2285).
ccgagccttaactttgtga

SEQ ID NO: 44267 - DNA, 19 bp, Homo sapiens
  siRNA target sequence for ZNF148 (NM_021964.1,2365-2383).
ctttcgatcaggaatgaat

SEQ ID NO: 44268 - DNA, 19 bp, Homo sapiens
  siRNA target sequence for ZNF148 (NM_021964.1,2380-2398).
gaattctccactaagaaca

SEQ ID NO: 44269 - DNA, 19 bp, Homo sapiens
  siRNA target sequence for ZNF148 (NM_021964.1,2412-2430).
cccactttggactaatagt

SEQ ID NO: 44270 - DNA, 19 bp, Homo sapiens
  siRNA target sequence for ZNF148 (NM_021964.1,2413-2431).
ccactttggactaatagtt

SEQ ID NO: 44271 - DNA, 19 bp, Homo sapiens
  siRNA target sequence for ZNF148 (NM_021964.1,2433-2451).
gtgattcacagcactcatt

SEQ ID NO: 44272 - DNA, 19 bp, Homo sapiens
  siRNA target sequence for ZNF148 (NM_021964.1,2549-2567).
gtccaccaagcttaccaaa

SEQ ID NO: 44273 - DNA, 19 bp, Homo sapiens
  siRNA target sequence for ZNF148 (NM_021964.1,2552-2570).
caccaagcttaccaaatga

SEQ ID NO: 44274 - DNA, 19 bp, Homo sapiens
  siRNA target sequence for ZNF148 (NM_021964.1,2563-2581).
ccaaatgagctcctttgaa

SEQ ID NO: 44275 - DNA, 19 bp, Homo sapiens
  siRNA target sequence for ZNF148 (NM_021964.1,2587-2605).
cttccgtgctccctatcat

SEQ ID NO: 44276 - DNA, 19 bp, Homo sapiens
  siRNA target sequence for ZNF148 (NM_021964.1,2674-2692).
gacaagtgctgaattttca

SEQ ID NO: 44277 - DNA, 19 bp, Homo sapiens
  siRNA target sequence for ZNF148 (NM_021964.1,2701-2719).
cttggtgaatgtaaatgat

SEQ ID NO: 44278 - DNA, 19 bp, Homo sapiens
  siRNA target sequence for ZNF148 (NM_021964.1,2751-2769).
ccacaactggccagacttt

SEQ ID NO: 44279 - DNA, 19 bp, Homo sapiens
  siRNA target sequence for ZNF148 (NM_021964.1,2752-2770).
cacaactggccagactttt

SEQ ID NO: 44280 - DNA, 19 bp, Homo sapiens
  siRNA target sequence for ZNF151 (NM_003443.1,213-231).
ggtggacggtgttcacttt

SEQ ID NO: 44281 - DNA, 19 bp, Homo sapiens
  siRNA target sequence for ZNF151 (NM_003443.1,304-322).
gtgcacctggacatcagta

SEQ ID NO: 44282 - DNA, 19 bp, Homo sapiens
  siRNA target sequence for ZNF151 (NM_003443.1,1073-1091).
cgcacacggggaacttcaa

SEQ ID NO: 44283 - DNA, 19 bp, Homo sapiens
  siRNA target sequence for ZNF151 (NM_003443.1,1472-1490).
cacactgcgacaagaagtt

SEQ ID NO: 44284 - DNA, 19 bp, Homo sapiens
  siRNA target sequence for ZNF151 (NM_003443.1,1929-1947).
gtccaagcacatcatcatt

SEQ ID NO: 44285 - DNA, 19 bp, Homo sapiens
  siRNA target sequence for ZNF151 (NM_003443.1,1991-2009).
gcttcaaccgggtagacaa

SEQ ID NO: 44286 - DNA, 19 bp, Homo sapiens
  siRNA target sequence for ZNF151 (NM_003443.1,2370-2388).
gacagacgcggacttctat

SEQ ID NO: 44287 - DNA, 19 bp, Homo sapiens
  siRNA target sequence for ZNF151 (NM_003443.1,2372-2390).
cagacgcggacttctatca

SEQ ID NO: 44288 - DNA, 19 bp, Homo sapiens
  siRNA target sequence for ZNF16 (NM_006958.2,242-260).
cccctgctgtagtgatact

SEQ ID NO: 44289 - DNA, 19 bp, Homo sapiens
  siRNA target sequence for ZNF16 (NM_006958.2,423-441).
gatctgtgtgatgatgtat

SEQ ID NO: 44290 - DNA, 19 bp, Homo sapiens
  siRNA target sequence for ZNF16 (NM_006958.2,539-557).
ccccttaggggagaaagat

SEQ ID NO: 44291 - DNA, 19 bp, Homo sapiens
  siRNA target sequence for ZNF16 (NM_006958.2,541-559).
ccttaggggagaaagatct

SEQ ID NO: 44292 - DNA, 19 bp, Homo sapiens
  siRNA target sequence for ZNF16 (NM_006958.2,637-655).
ggccacatccatatgacat

SEQ ID NO: 44293 - DNA, 19 bp, Homo sapiens
  siRNA target sequence for ZNF16 (NM_006958.2,714-732).
gctgaaagtccactcatat

SEQ ID NO: 44294 - DNA, 19 bp, Homo sapiens
  siRNA target sequence for ZNF16 (NM_006958.2,721-739).
gtccactcatatgtaatga

SEQ ID NO: 44295 - DNA, 19 bp, Homo sapiens
  siRNA target sequence for ZNF16 (NM_006958.2,798-816).
ggggaggcttcctttatgt

SEQ ID NO: 44296 - DNA, 19 bp, Homo sapiens
  siRNA target sequence for ZNF16 (NM_006958.2,864-882).
cgtcatcgatctcatatga

SEQ ID NO: 44297 - DNA, 19 bp, Homo sapiens
  siRNA target sequence for ZNF16 (NM_006958.2,1010-1028).
ccagaactcgagccttaaa

SEQ ID NO: 44298 - DNA, 19 bp, Homo sapiens
  siRNA target sequence for ZNF16 (NM_006958.2,1011-1029).
cagaactcgagccttaaaa

SEQ ID NO: 44299 - DNA, 19 bp, Homo sapiens
  siRNA target sequence for ZNF16 (NM_006958.2,1347-1365).
cgggtctccaacctcatta

SEQ ID NO: 44300 - DNA, 19 bp, Homo sapiens
  siRNA target sequence for ZNF16 (NM_006958.2,1478-1496).
gcctcacgtgtgtaatgta

SEQ ID NO: 44301 - DNA, 19 bp, Homo sapiens
  siRNA target sequence for ZNF16 (NM_006958.2,2103-2121).
cagcgatcaaagttgatca

SEQ ID NO: 44302 - DNA, 19 bp, Homo sapiens
  siRNA target sequence for ZNF16 (NM_006958.2,2117-2135).
gatcaaacaccagttgatt

SEQ ID NO: 44303 - DNA, 19 bp, Homo sapiens
  siRNA target sequence for ZNF160 (NM_033288.2,408-426).
ctactggaaccttgtttct

SEQ ID NO: 44304 - DNA, 19 bp, Homo sapiens
  siRNA target sequence for ZNF160 (NM_033288.2,498-516).
gagctgtgtgaaaatagca

SEQ ID NO: 44305 - DNA, 19 bp, Homo sapiens
  siRNA target sequence for ZNF160 (NM_033288.2,524-542).
caagaacgccggaatgtgt

SEQ ID NO: 44306 - DNA, 19 bp, Homo sapiens
  siRNA target sequence for ZNF160 (NM_033288.2,565-583).
cctcctaaatgtacaatca

SEQ ID NO: 44307 - DNA, 19 bp, Homo sapiens
  siRNA target sequence for ZNF160 (NM_033288.2,566-584).
ctcctaaatgtacaatcaa

SEQ ID NO: 44308 - DNA, 19 bp, Homo sapiens
  siRNA target sequence for ZNF160 (NM_033288.2,575-593).
gtacaatcaaggatttgct

SEQ ID NO: 44309 - DNA, 19 bp, Homo sapiens
  siRNA target sequence for ZNF160 (NM_033288.2,608-626).
gcagtacagaagcagtatt

SEQ ID NO: 44310 - DNA, 19 bp, Homo sapiens
  siRNA target sequence for ZNF160 (NM_033288.2,656-674).
gccctgacattgaagactt

SEQ ID NO: 44311 - DNA, 19 bp, Homo sapiens
  siRNA target sequence for ZNF160 (NM_033288.2,725-743).
gagatgacacaggaaatta

SEQ ID NO: 44312 - DNA, 19 bp, Homo sapiens
  siRNA target sequence for ZNF160 (NM_033288.2,788-806).
gcgacagaagagacataga

SEQ ID NO: 44313 - DNA, 19 bp, Homo sapiens
  siRNA target sequence for ZNF160 (NM_033288.2,975-993).
ccacaggtctaaaaaatat

SEQ ID NO: 44314 - DNA, 19 bp, Homo sapiens
  siRNA target sequence for ZNF160 (NM_033288.2,1090-1108).
cagaattcgaaccttacaa

SEQ ID NO: 44315 - DNA, 19 bp, Homo sapiens
  siRNA target sequence for ZNF160 (NM_033288.2,1092-1110).
gaattcgaaccttacaagt

SEQ ID NO: 44316 - DNA, 19 bp, Homo sapiens
  siRNA target sequence for ZNF160 (NM_033288.2,1178-1196).
gttcaaatctaactattca

SEQ ID NO: 44317 - DNA, 19 bp, Homo sapiens
  siRNA target sequence for ZNF160 (NM_033288.2,2098-2116).
gatcgttcaagcctaactt

SEQ ID NO: 44318 - DNA, 19 bp, Homo sapiens
  siRNA target sequence for ZNF160 (NM_033288.2,2114-2132).
cttttcatcaggcaataca

SEQ ID NO: 44319 - DNA, 19 bp, Homo sapiens
  siRNA target sequence for ZNF160 (NM_033288.2,2601-2619).
ggtaagatcaagtctaact

SEQ ID NO: 44320 - DNA, 19 bp, Homo sapiens
  siRNA target sequence for ZNF160 (NM_033288.2,2602-2620).
gtaagatcaagtctaacta

SEQ ID NO: 44321 - DNA, 19 bp, Homo sapiens
  siRNA target sequence for ZNF177 (NM_003451.1,553-571).
cctgctcaaaaaaatctat

SEQ ID NO: 44322 - DNA, 19 bp, Homo sapiens
  siRNA target sequence for ZNF177 (NM_003451.1,556-574).
gctcaaaaaaatctataca

SEQ ID NO: 44323 - DNA, 19 bp, Homo sapiens
  siRNA target sequence for ZNF177 (NM_003451.1,957-975).
gaatgtgcacaaaagaact

SEQ ID NO: 44324 - DNA, 19 bp, Homo sapiens
  siRNA target sequence for ZNF177 (NM_003451.1,1191-1209).
cagcacaggctcttacctt

SEQ ID NO: 44325 - DNA, 19 bp, Homo sapiens
  siRNA target sequence for ZNF177 (NM_003451.1,1193-1211).
gcacaggctcttaccttat

SEQ ID NO: 44326 - DNA, 19 bp, Homo sapiens
  siRNA target sequence for ZNF177 (NM_003451.1,1194-1212).
cacaggctcttaccttatt

SEQ ID NO: 44327 - DNA, 19 bp, Homo sapiens
  siRNA target sequence for ZNF177 (NM_003451.1,1196-1214).
caggctcttaccttattgt

SEQ ID NO: 44328 - DNA, 19 bp, Homo sapiens
  siRNA target sequence for ZNF177 (NM_003451.1,1361-1379).
gcacaagcactaaccttat

SEQ ID NO: 44329 - DNA, 19 bp, Homo sapiens
  siRNA target sequence for ZNF177 (NM_003451.1,1362-1380).
cacaagcactaaccttata

SEQ ID NO: 44330 - DNA, 19 bp, Homo sapiens
  siRNA target sequence for ZNF177 (NM_003451.1,1367-1385).
gcactaaccttataatgca

SEQ ID NO: 44331 - DNA, 19 bp, Homo sapiens
  siRNA target sequence for ZNF180 (NM_013256.1,479-497).
gtgaacttcaaaattgtga

SEQ ID NO: 44332 - DNA, 19 bp, Homo sapiens
  siRNA target sequence for ZNF180 (NM_013256.1,701-719).
gatccttggttatcttcat

SEQ ID NO: 44333 - DNA, 19 bp, Homo sapiens
  siRNA target sequence for ZNF180 (NM_013256.1,826-844).
gagagtctgcaaaagtgat

SEQ ID NO: 44334 - DNA, 19 bp, Homo sapiens
  siRNA target sequence for ZNF180 (NM_013256.1,832-850).
ctgcaaaagtgatgaaact

SEQ ID NO: 44335 - DNA, 19 bp, Homo sapiens
  siRNA target sequence for ZNF180 (NM_013256.1,853-871).
ggagaagagtggtctgaat

SEQ ID NO: 44336 - DNA, 19 bp, Homo sapiens
  siRNA target sequence for ZNF180 (NM_013256.1,890-908).
ccagttatacccataagaa

SEQ ID NO: 44337 - DNA, 19 bp, Homo sapiens
  siRNA target sequence for ZNF180 (NM_013256.1,910-928).
ccattttcataaacatgta

SEQ ID NO: 44338 - DNA, 19 bp, Homo sapiens
  siRNA target sequence for ZNF180 (NM_013256.1,950-968).
cttaatgctgctgtaaaca

SEQ ID NO: 44339 - DNA, 19 bp, Homo sapiens
  siRNA target sequence for ZNF180 (NM_013256.1,1086-1104).
gatttagtgaccgtattca

SEQ ID NO: 44340 - DNA, 19 bp, Homo sapiens
  siRNA target sequence for ZNF180 (NM_013256.1,1092-1110).
gtgaccgtattcaatcttt

SEQ ID NO: 44341 - DNA, 19 bp, Homo sapiens
  siRNA target sequence for ZNF180 (NM_013256.1,1094-1112).
gaccgtattcaatcttttt

SEQ ID NO: 44342 - DNA, 19 bp, Homo sapiens
  siRNA target sequence for ZNF180 (NM_013256.1,1115-1133).
catggtacacccctacata

SEQ ID NO: 44343 - DNA, 19 bp, Homo sapiens
  siRNA target sequence for ZNF180 (NM_013256.1,1125-1143).
ccctacatatacatgaaaa

SEQ ID NO: 44344 - DNA, 19 bp, Homo sapiens
  siRNA target sequence for ZNF180 (NM_013256.1,1232-1250).
ccttttgaagagagtcaat

SEQ ID NO: 44345 - DNA, 19 bp, Homo sapiens
  siRNA target sequence for ZNF180 (NM_013256.1,1233-1251).
cttttgaagagagtcaata

SEQ ID NO: 44346 - DNA, 19 bp, Homo sapiens
  siRNA target sequence for ZNF180 (NM_013256.1,1278-1296).
cctcccttactcaaaacat

SEQ ID NO: 44347 - DNA, 19 bp, Homo sapiens
  siRNA target sequence for ZNF180 (NM_013256.1,1439-1457).
cggagctcgcaccttgttt

SEQ ID NO: 44348 - DNA, 19 bp, Homo sapiens
  siRNA target sequence for ZNF180 (NM_013256.1,1532-1550).
gtccttgttgtgcatcaaa

SEQ ID NO: 44349 - DNA, 19 bp, Homo sapiens
  siRNA target sequence for ZNF180 (NM_013256.1,1603-1621).
caggcagagctataaactt

SEQ ID NO: 44350 - DNA, 19 bp, Homo sapiens
  siRNA target sequence for ZNF180 (NM_013256.1,1943-1961).
cgcagttctcaccttgtta

SEQ ID NO: 44351 - DNA, 19 bp, Homo sapiens
  siRNA target sequence for ZNF180 (NM_013256.1,2194-2212).
cttgagtgctcgacttatt

SEQ ID NO: 44352 - DNA, 19 bp, Homo sapiens
  siRNA target sequence for ZNF180 (NM_013256.1,2243-2261).
ccctttacatgtattcagt

SEQ ID NO: 44353 - DNA, 19 bp, Homo sapiens
  siRNA target sequence for ZNF184 (NM_007149.1,303-321).
ccaagggggacataatcta

SEQ ID NO: 44354 - DNA, 19 bp, Homo sapiens
  siRNA target sequence for ZNF184 (NM_007149.1,351-369).
gactttcaaggatgtgata

SEQ ID NO: 44355 - DNA, 19 bp, Homo sapiens
  siRNA target sequence for ZNF184 (NM_007149.1,687-705).
gctagaaagttgggaatat

SEQ ID NO: 44356 - DNA, 19 bp, Homo sapiens
  siRNA target sequence for ZNF184 (NM_007149.1,762-780).
ggtaaccgaaaagacaata

SEQ ID NO: 44357 - DNA, 19 bp, Homo sapiens
  siRNA target sequence for ZNF184 (NM_007149.1,824-842).
gtgtcaatgtgagttcaaa

SEQ ID NO: 44358 - DNA, 19 bp, Homo sapiens
  siRNA target sequence for ZNF184 (NM_007149.1,832-850).
gtgagttcaaaccttgtaa

SEQ ID NO: 44359 - DNA, 19 bp, Homo sapiens
  siRNA target sequence for ZNF184 (NM_007149.1,865-883).
ccagaagagacctctacta

SEQ ID NO: 44360 - DNA, 19 bp, Homo sapiens
  siRNA target sequence for ZNF184 (NM_007149.1,866-884).
cagaagagacctctactaa

SEQ ID NO: 44361 - DNA, 19 bp, Homo sapiens
  siRNA target sequence for ZNF184 (NM_007149.1,962-980).
gttattgttcagctcttat

SEQ ID NO: 44362 - DNA, 19 bp, Homo sapiens
  siRNA target sequence for ZNF184 (NM_007149.1,1052-1070).
gtgaaaaccttataaacca

SEQ ID NO: 44363 - DNA, 19 bp, Homo sapiens
  siRNA target sequence for ZNF184 (NM_007149.1,1128-1146).
cattgagggtccatctctt

SEQ ID NO: 44364 - DNA, 19 bp, Homo sapiens
  siRNA target sequence for ZNF184 (NM_007149.1,1302-1320).
gagaggccactttatggaa

SEQ ID NO: 44365 - DNA, 19 bp, Homo sapiens
  siRNA target sequence for ZNF184 (NM_007149.1,1478-1496).
cttttatccgtcatcatat

SEQ ID NO: 44366 - DNA, 19 bp, Homo sapiens
  siRNA target sequence for ZNF184 (NM_007149.1,1485-1503).
ccgtcatcatatgattcat

SEQ ID NO: 44367 - DNA, 19 bp, Homo sapiens
  siRNA target sequence for ZNF184 (NM_007149.1,2048-2066).
cattcaaccagaacataca

SEQ ID NO: 44368 - DNA, 19 bp, Homo sapiens
  siRNA target sequence for ZNF184 (NM_007149.1,2133-2151).
ctttcgacattgttcatct

SEQ ID NO: 44369 - DNA, 19 bp, Homo sapiens
  siRNA target sequence for ZNF184 (NM_007149.1,2322-2340).
gactgaacatcagaatact

SEQ ID NO: 44370 - DNA, 19 bp, Homo sapiens
  siRNA target sequence for ZNF195 (NM_007152.1,381-399).
ccagccaggcctcaatgtt

SEQ ID NO: 44371 - DNA, 19 bp, Homo sapiens
  siRNA target sequence for ZNF195 (NM_007152.1,382-400).
cagccaggcctcaatgttt

SEQ ID NO: 44372 - DNA, 19 bp, Homo sapiens
  siRNA target sequence for ZNF195 (NM_007152.1,435-453).
ggtgctgcaaactgtgaaa

SEQ ID NO: 44373 - DNA, 19 bp, Homo sapiens
  siRNA target sequence for ZNF195 (NM_007152.1,436-454).
gtgctgcaaactgtgaaat

SEQ ID NO: 44374 - DNA, 19 bp, Homo sapiens
  siRNA target sequence for ZNF195 (NM_007152.1,439-457).
ctgcaaactgtgaaatggt

SEQ ID NO: 44375 - DNA, 19 bp, Homo sapiens
  siRNA target sequence for ZNF195 (NM_007152.1,473-491).
gcatcttctcactagctat

SEQ ID NO: 44376 - DNA, 19 bp, Homo sapiens
  siRNA target sequence for ZNF195 (NM_007152.1,578-596).
gtggccttgataatttata

SEQ ID NO: 44377 - DNA, 19 bp, Homo sapiens
  siRNA target sequence for ZNF195 (NM_007152.1,627-645).
gtgtaagttgcaaaaagat

SEQ ID NO: 44378 - DNA, 19 bp, Homo sapiens
  siRNA target sequence for ZNF195 (NM_007152.1,629-647).
gtaagttgcaaaaagatta

SEQ ID NO: 44379 - DNA, 19 bp, Homo sapiens
  siRNA target sequence for ZNF195 (NM_007152.1,791-809).
gtggcaaatcctttcaaat

SEQ ID NO: 44380 - DNA, 19 bp, Homo sapiens
  siRNA target sequence for ZNF195 (NM_007152.1,810-828).
gctctcattcctaactgaa

SEQ ID NO: 44381 - DNA, 19 bp, Homo sapiens
  siRNA target sequence for ZNF195 (NM_007152.1,1009-1027).
gccggaggggaacattaca

SEQ ID NO: 44382 - DNA, 19 bp, Homo sapiens
  siRNA target sequence for ZNF195 (NM_007152.1,1083-1101).
gcatggtactgaggaaaaa

SEQ ID NO: 44383 - DNA, 19 bp, Homo sapiens
  siRNA target sequence for ZNF195 (NM_007152.1,1202-1220).
catggtacaaaggttttaa

SEQ ID NO: 44384 - DNA, 19 bp, Homo sapiens
  siRNA target sequence for ZNF195 (NM_007152.1,1548-1566).
catctttaagcagttatca

SEQ ID NO: 44385 - DNA, 19 bp, Homo sapiens
  siRNA target sequence for ZNF20 (NM_021143.1,420-438).
ggaataacaccatgtgaaa

SEQ ID NO: 44386 - DNA, 19 bp, Homo sapiens
  siRNA target sequence for ZNF20 (NM_021143.1,543-561).
ccatatagaaataaggaat

SEQ ID NO: 44387 - DNA, 19 bp, Homo sapiens
  siRNA target sequence for ZNF20 (NM_021143.1,589-607).
cctttcaatcacatgataa

SEQ ID NO: 44388 - DNA, 19 bp, Homo sapiens
  siRNA target sequence for ZNF20 (NM_021143.1,610-628).
cttgcactaaagagaaact

SEQ ID NO: 44389 - DNA, 19 bp, Homo sapiens
  siRNA target sequence for ZNF20 (NM_021143.1,922-940).
gtgaaatccgtagacataa

SEQ ID NO: 44390 - DNA, 19 bp, Homo sapiens
  siRNA target sequence for ZNF20 (NM_021143.1,1573-1591).
gtaaggcctttatttccaa

SEQ ID NO: 44391 - DNA, 19 bp, Homo sapiens
  siRNA target sequence for ZNF208 (NM_007153.1,645-663).
ccttacttattataagagt

SEQ ID NO: 44392 - DNA, 19 bp, Homo sapiens
  siRNA target sequence for ZNF212 (NM_012256.2,954-972).
ctgcccgaagcagaaatct

SEQ ID NO: 44393 - DNA, 19 bp, Homo sapiens
  siRNA target sequence for ZNF212 (NM_012256.2,958-976).
ccgaagcagaaatctcata

SEQ ID NO: 44394 - DNA, 19 bp, Homo sapiens
  siRNA target sequence for ZNF214 (NM_013249.1,261-279).
ggcagtaacatttgaagat

SEQ ID NO: 44395 - DNA, 19 bp, Homo sapiens
  siRNA target sequence for ZNF214 (NM_013249.1,356-374).
gggagaactacacaaatgt

SEQ ID NO: 44396 - DNA, 19 bp, Homo sapiens
  siRNA target sequence for ZNF214 (NM_013249.1,390-408).
ctggaatgagagctacaaa

SEQ ID NO: 44397 - DNA, 19 bp, Homo sapiens
  siRNA target sequence for ZNF214 (NM_013249.1,489-507).
gtatgagaatcagaactat

SEQ ID NO: 44398 - DNA, 19 bp, Homo sapiens
  siRNA target sequence for ZNF214 (NM_013249.1,504-522).
ctatggggaaactgttcaa

SEQ ID NO: 44399 - DNA, 19 bp, Homo sapiens
  siRNA target sequence for ZNF214 (NM_013249.1,562-580).
cagtgtcaggaatggttaa

SEQ ID NO: 44400 - DNA, 19 bp, Homo sapiens
  siRNA target sequence for ZNF214 (NM_013249.1,609-627).
gaactatgaactgactttt

SEQ ID NO: 44401 - DNA, 19 bp, Homo sapiens
  siRNA target sequence for ZNF214 (NM_013249.1,633-651).
caaaagtctcaggaactta

SEQ ID NO: 44402 - DNA, 19 bp, Homo sapiens
  siRNA target sequence for ZNF214 (NM_013249.1,669-687).
gccttggcagtccttagaa

SEQ ID NO: 44403 - DNA, 19 bp, Homo sapiens
  siRNA target sequence for ZNF214 (NM_013249.1,670-688).
ccttggcagtccttagaaa

SEQ ID NO: 44404 - DNA, 19 bp, Homo sapiens
  siRNA target sequence for ZNF214 (NM_013249.1,674-692).
ggcagtccttagaaacaaa

SEQ ID NO: 44405 - DNA, 19 bp, Homo sapiens
  siRNA target sequence for ZNF214 (NM_013249.1,703-721).
gactatggtagagaaatct

SEQ ID NO: 44406 - DNA, 19 bp, Homo sapiens
  siRNA target sequence for ZNF214 (NM_013249.1,720-738).
ctacatgagtggttcacat

SEQ ID NO: 44407 - DNA, 19 bp, Homo sapiens
  siRNA target sequence for ZNF214 (NM_013249.1,855-873).
gtatgttggggtgatatgt

SEQ ID NO: 44408 - DNA, 19 bp, Homo sapiens
  siRNA target sequence for ZNF214 (NM_013249.1,880-898).
gacctactgagagattcaa

SEQ ID NO: 44409 - DNA, 19 bp, Homo sapiens
  siRNA target sequence for ZNF214 (NM_013249.1,914-932).
gtggatgtaataaatgtaa

SEQ ID NO: 44410 - DNA, 19 bp, Homo sapiens
  siRNA target sequence for ZNF214 (NM_013249.1,947-965).
ggaactcacggtgtgtttt

SEQ ID NO: 44411 - DNA, 19 bp, Homo sapiens
  siRNA target sequence for ZNF214 (NM_013249.1,1028-1046).
ctcagagatcagacttgta

SEQ ID NO: 44412 - DNA, 19 bp, Homo sapiens
  siRNA target sequence for ZNF214 (NM_013249.1,1030-1048).
cagagatcagacttgtata

SEQ ID NO: 44413 - DNA, 19 bp, Homo sapiens
  siRNA target sequence for ZNF214 (NM_013249.1,1034-1052).
gatcagacttgtatagaca

SEQ ID NO: 44414 - DNA, 19 bp, Homo sapiens
  siRNA target sequence for ZNF214 (NM_013249.1,1077-1095).
gctgtacggatgtgatgaa

SEQ ID NO: 44415 - DNA, 19 bp, Homo sapiens
  siRNA target sequence for ZNF214 (NM_013249.1,1116-1134).
gagctccggagttcacttt

SEQ ID NO: 44416 - DNA, 19 bp, Homo sapiens
  siRNA target sequence for ZNF214 (NM_013249.1,1118-1136).
gctccggagttcactttca

SEQ ID NO: 44417 - DNA, 19 bp, Homo sapiens
  siRNA target sequence for ZNF214 (NM_013249.1,1119-1137).
ctccggagttcactttcat

SEQ ID NO: 44418 - DNA, 19 bp, Homo sapiens
  siRNA target sequence for ZNF214 (NM_013249.1,1149-1167).
cataggggaggtaccttat

SEQ ID NO: 44419 - DNA, 19 bp, Homo sapiens
  siRNA target sequence for ZNF214 (NM_013249.1,1153-1171).
ggggaggtaccttatagct

SEQ ID NO: 44420 - DNA, 19 bp, Homo sapiens
  siRNA target sequence for ZNF214 (NM_013249.1,1158-1176).
ggtaccttatagctgtaat

SEQ ID NO: 44421 - DNA, 19 bp, Homo sapiens
  siRNA target sequence for ZNF214 (NM_013249.1,1194-1212).
cagccagatctctagtctt

SEQ ID NO: 44422 - DNA, 19 bp, Homo sapiens
  siRNA target sequence for ZNF214 (NM_013249.1,1203-1221).
ctctagtcttcacaatcat

SEQ ID NO: 44423 - DNA, 19 bp, Homo sapiens
  siRNA target sequence for ZNF214 (NM_013249.1,1275-1293).
cagtagaaattcattactt

SEQ ID NO: 44424 - DNA, 19 bp, Homo sapiens
  siRNA target sequence for ZNF214 (NM_013249.1,1277-1295).
gtagaaattcattacttca

SEQ ID NO: 44425 - DNA, 19 bp, Homo sapiens
  siRNA target sequence for ZNF214 (NM_013249.1,1364-1382).
ggagttcagtacttcatgt

SEQ ID NO: 44426 - DNA, 19 bp, Homo sapiens
  siRNA target sequence for ZNF214 (NM_013249.1,1529-1547).
cccagcgctcaaatcttca

SEQ ID NO: 44427 - DNA, 19 bp, Homo sapiens
  siRNA target sequence for ZNF214 (NM_013249.1,1858-1876).
ggttttagtcacagttcta

SEQ ID NO: 44428 - DNA, 19 bp, Homo sapiens
  siRNA target sequence for ZNF214 (NM_013249.1,1865-1883).
gtcacagttctaatcttca

SEQ ID NO: 44429 - DNA, 19 bp, Homo sapiens
  siRNA target sequence for ZNF214 (NM_013249.1,1927-1945).
gctaagtgtggtaaaggtt

SEQ ID NO: 44430 - DNA, 19 bp, Homo sapiens
  siRNA target sequence for ZNF214 (NM_013249.1,2047-2065).
cttcacaataatcatagaa

SEQ ID NO: 44431 - DNA, 19 bp, Homo sapiens
  siRNA target sequence for ZNF216 (NM_006007.1,574-592).
cctgtaactcagcaaatga

SEQ ID NO: 44432 - DNA, 19 bp, Homo sapiens
  siRNA target sequence for ZNF216 (NM_006007.1,772-790).
ggtcttacagggtttgact

SEQ ID NO: 44433 - DNA, 19 bp, Homo sapiens
  siRNA target sequence for ZNF22 (NM_006963.1,104-122).
gcctaaagcgggtatttct

SEQ ID NO: 44434 - DNA, 19 bp, Homo sapiens
  siRNA target sequence for ZNF22 (NM_006963.1,185-203).
gtggggcatgactattcga

SEQ ID NO: 44435 - DNA, 19 bp, Homo sapiens
  siRNA target sequence for ZNF22 (NM_006963.1,187-205).
ggggcatgactattcgatt

SEQ ID NO: 44436 - DNA, 19 bp, Homo sapiens
  siRNA target sequence for ZNF22 (NM_006963.1,188-206).
gggcatgactattcgattt

SEQ ID NO: 44437 - DNA, 19 bp, Homo sapiens
  siRNA target sequence for ZNF22 (NM_006963.1,190-208).
gcatgactattcgatttga

SEQ ID NO: 44438 - DNA, 19 bp, Homo sapiens
  siRNA target sequence for ZNF22 (NM_006963.1,287-305).
gagttcaactctttttcaa

SEQ ID NO: 44439 - DNA, 19 bp, Homo sapiens
  siRNA target sequence for ZNF22 (NM_006963.1,695-713).
cagggtgaagactcactta

SEQ ID NO: 44440 - DNA, 19 bp, Homo sapiens
  siRNA target sequence for ZNF22 (NM_006963.1,748-766).
ggctggtctccgttaagta

SEQ ID NO: 44441 - DNA, 19 bp, Homo sapiens
  siRNA target sequence for ZNF221 (NM_013359.1,818-836).
cacgtgcaacagaaacctt

SEQ ID NO: 44442 - DNA, 19 bp, Homo sapiens
  siRNA target sequence for ZNF221 (NM_013359.1,1106-1124).
gggaaaggcttccatagta

SEQ ID NO: 44443 - DNA, 19 bp, Homo sapiens
  siRNA target sequence for ZNF221 (NM_013359.1,1108-1126).
gaaaggcttccatagtaga

SEQ ID NO: 44444 - DNA, 19 bp, Homo sapiens
  siRNA target sequence for ZNF221 (NM_013359.1,1398-1416).
ccatggtccacatagaaga

SEQ ID NO: 44445 - DNA, 19 bp, Homo sapiens
  siRNA target sequence for ZNF222 (NM_013360.1,415-433).
gataccaccataagtaact

SEQ ID NO: 44446 - DNA, 19 bp, Homo sapiens
  siRNA target sequence for ZNF222 (NM_013360.1,454-472).
gacaacccctcccagatta

SEQ ID NO: 44447 - DNA, 19 bp, Homo sapiens
  siRNA target sequence for ZNF222 (NM_013360.1,456-474).
caacccctcccagattaaa

SEQ ID NO: 44448 - DNA, 19 bp, Homo sapiens
  siRNA target sequence for ZNF222 (NM_013360.1,513-531).
ccagggtgaaaattgtaaa

SEQ ID NO: 44449 - DNA, 19 bp, Homo sapiens
  siRNA target sequence for ZNF222 (NM_013360.1,1029-1047).
gtatggaagaggtttcatt

SEQ ID NO: 44450 - DNA, 19 bp, Homo sapiens
  siRNA target sequence for ZNF222 (NM_013360.1,1033-1051).
ggaagaggtttcattgata

SEQ ID NO: 44451 - DNA, 19 bp, Homo sapiens
  siRNA target sequence for ZNF222 (NM_013360.1,1298-1316).
gacatgcttctagtatttt

SEQ ID NO: 44452 - DNA, 19 bp, Homo sapiens
  siRNA target sequence for ZNF223 (NM_013361.2,592-610).
gcctcaagactctaccata

SEQ ID NO: 44453 - DNA, 19 bp, Homo sapiens
  siRNA target sequence for ZNF223 (NM_013361.2,593-611).
cctcaagactctaccataa

SEQ ID NO: 44454 - DNA, 19 bp, Homo sapiens
  siRNA target sequence for ZNF223 (NM_013361.2,716-734).
caatccttcagtgatatgt

SEQ ID NO: 44455 - DNA, 19 bp, Homo sapiens
  siRNA target sequence for ZNF223 (NM_013361.2,724-742).
cagtgatatgtccatcttt

SEQ ID NO: 44456 - DNA, 19 bp, Homo sapiens
  siRNA target sequence for ZNF223 (NM_013361.2,1232-1250).
cgtaggctggatttgtgta

SEQ ID NO: 44457 - DNA, 19 bp, Homo sapiens
  siRNA target sequence for ZNF223 (NM_013361.2,1233-1251).
gtaggctggatttgtgtaa

SEQ ID NO: 44458 - DNA, 19 bp, Homo sapiens
  siRNA target sequence for ZNF223 (NM_013361.2,1516-1534).
ccattgccgaaaaaaacca

SEQ ID NO: 44459 - DNA, 19 bp, Homo sapiens
  siRNA target sequence for ZNF223 (NM_013361.2,1517-1535).
cattgccgaaaaaaaccat

SEQ ID NO: 44460 - DNA, 19 bp, Homo sapiens
  siRNA target sequence for ZNF224 (NM_013398.1,453-471).
gcattccacagggatactt

SEQ ID NO: 44461 - DNA, 19 bp, Homo sapiens
  siRNA target sequence for ZNF224 (NM_013398.1,749-767).
gggcaatggatataaacca

SEQ ID NO: 44462 - DNA, 19 bp, Homo sapiens
  siRNA target sequence for ZNF224 (NM_013398.1,1532-1550).
cacaaattcacaatgctat

SEQ ID NO: 44463 - DNA, 19 bp, Homo sapiens
  siRNA target sequence for ZNF224 (NM_013398.1,2202-2220).
gtacagaattcattctcta

SEQ ID NO: 44464 - DNA, 19 bp, Homo sapiens
  siRNA target sequence for ZNF225 (NM_013362.1,398-416).
caatcactccacagagata

SEQ ID NO: 44465 - DNA, 19 bp, Homo sapiens
  siRNA target sequence for ZNF225 (NM_013362.1,539-557).
ggcttgttcagtcatcaaa

SEQ ID NO: 44466 - DNA, 19 bp, Homo sapiens
  siRNA target sequence for ZNF225 (NM_013362.1,698-716).
ggtaggacgtgtaaaaagt

SEQ ID NO: 44467 - DNA, 19 bp, Homo sapiens
  siRNA target sequence for ZNF225 (NM_013362.1,730-748).
ctccgtccttgatcttcat

SEQ ID NO: 44468 - DNA, 19 bp, Homo sapiens
  siRNA target sequence for ZNF225 (NM_013362.1,1138-1156).
cttccgtagtagagcaaat

SEQ ID NO: 44469 - DNA, 19 bp, Homo sapiens
  siRNA target sequence for ZNF225 (NM_013362.1,1142-1160).
cgtagtagagcaaatctta

SEQ ID NO: 44470 - DNA, 19 bp, Homo sapiens
  siRNA target sequence for ZNF225 (NM_013362.1,1219-1237).
gagctttggtctgaaatca

SEQ ID NO: 44471 - DNA, 19 bp, Homo sapiens
  siRNA target sequence for ZNF225 (NM_013362.1,1309-1327).
catttataggcaagatctt

SEQ ID NO: 44472 - DNA, 19 bp, Homo sapiens
  siRNA target sequence for ZNF225 (NM_013362.1,2188-2206).
cagtagagaaaaactactt

SEQ ID NO: 44473 - DNA, 19 bp, Homo sapiens
  siRNA target sequence for ZNF225 (NM_013362.1,2333-2351).
cttgatacgcttttgtcat

SEQ ID NO: 44474 - DNA, 19 bp, Homo sapiens
  siRNA target sequence for ZNF225 (NM_013362.1,2336-2354).
gatacgcttttgtcattat

SEQ ID NO: 44475 - DNA, 19 bp, Homo sapiens
  siRNA target sequence for ZNF226 (NM_015919.2,299-317).
gatgtatcacctatagaaa

SEQ ID NO: 44476 - DNA, 19 bp, Homo sapiens
  siRNA target sequence for ZNF226 (NM_015919.2,351-369).
cccgaagacagggaaattt

SEQ ID NO: 44477 - DNA, 19 bp, Homo sapiens
  siRNA target sequence for ZNF226 (NM_015919.2,352-370).
ccgaagacagggaaattta

SEQ ID NO: 44478 - DNA, 19 bp, Homo sapiens
  siRNA target sequence for ZNF226 (NM_015919.2,361-379).
gggaaatttagatacctta

SEQ ID NO: 44479 - DNA, 19 bp, Homo sapiens
  siRNA target sequence for ZNF226 (NM_016444.1,975-993).
gatcccatcggttggattt

SEQ ID NO: 44480 - DNA, 19 bp, Homo sapiens
  siRNA target sequence for ZNF226 (NM_016444.1,979-997).
ccatcggttggatttcaca

SEQ ID NO: 44481 - DNA, 19 bp, Homo sapiens
  siRNA target sequence for ZNF226 (NM_016444.1,980-998).
catcggttggatttcacat

SEQ ID NO: 44482 - DNA, 19 bp, Homo sapiens
  siRNA target sequence for ZNF226 (NM_016444.1,983-1001).
cggttggatttcacatcat

SEQ ID NO: 44483 - DNA, 19 bp, Homo sapiens
  siRNA target sequence for ZNF226 (NM_016444.1,1313-1331).
cagtcagggcgctcatcta

SEQ ID NO: 44484 - DNA, 19 bp, Homo sapiens
  siRNA target sequence for ZNF226 (NM_016444.1,1315-1333).
gtcagggcgctcatctaca

SEQ ID NO: 44485 - DNA, 19 bp, Homo sapiens
  siRNA target sequence for ZNF226 (NM_016444.1,1350-1368).
cacgtgatagagaaaccat

SEQ ID NO: 44486 - DNA, 19 bp, Homo sapiens
  siRNA target sequence for ZNF226 (NM_016444.1,1569-1587).
cggaattcacatcttcaat

SEQ ID NO: 44487 - DNA, 19 bp, Homo sapiens
  siRNA target sequence for ZNF226 (NM_016444.1,1781-1799).
gaagtcatacatatgtact

SEQ ID NO: 44488 - DNA, 19 bp, Homo sapiens
  siRNA target sequence for ZNF226 (NM_016444.1,1901-1919).
caggaggaattcccattat

SEQ ID NO: 44489 - DNA, 19 bp, Homo sapiens
  siRNA target sequence for ZNF226 (NM_016444.1,1903-1921).
ggaggaattcccattatca

SEQ ID NO: 44490 - DNA, 19 bp, Homo sapiens
  siRNA target sequence for ZNF226 (NM_016444.1,1904-1922).
gaggaattcccattatcaa

SEQ ID NO: 44491 - DNA, 19 bp, Homo sapiens
  siRNA target sequence for ZNF226 (NM_016444.1,1906-1924).
ggaattcccattatcaagt

SEQ ID NO: 44492 - DNA, 19 bp, Homo sapiens
  siRNA target sequence for ZNF226 (NM_016444.1,1907-1925).
gaattcccattatcaagtt

SEQ ID NO: 44493 - DNA, 19 bp, Homo sapiens
  siRNA target sequence for ZNF226 (NM_016444.1,1985-2003).
cagtcaaagttcgtatctt

SEQ ID NO: 44494 - DNA, 19 bp, Homo sapiens
  siRNA target sequence for ZNF226 (NM_016444.1,2662-2680).
ggcgatcaaatcttacagt

SEQ ID NO: 44495 - DNA, 19 bp, Homo sapiens
  siRNA target sequence for ZNF226 (NM_016444.1,2663-2681).
gcgatcaaatcttacagtt

SEQ ID NO: 44496 - DNA, 19 bp, Homo sapiens
  siRNA target sequence for ZNF226 (NM_016444.1,2719-2737).
gtaataggggtggtaagaa

SEQ ID NO: 44497 - DNA, 19 bp, Homo sapiens
  siRNA target sequence for ZNF228 (NM_013380.2,187-205).
cttcaagccagacctaata

SEQ ID NO: 44498 - DNA, 19 bp, Homo sapiens
  siRNA target sequence for ZNF228 (NM_013380.2,311-329).
gtaacagtaagctactttt

SEQ ID NO: 44499 - DNA, 19 bp, Homo sapiens
  siRNA target sequence for ZNF228 (NM_013380.2,468-486).
caggaataccagttcagat

SEQ ID NO: 44500 - DNA, 19 bp, Homo sapiens
  siRNA target sequence for ZNF228 (NM_013380.2,470-488).
ggaataccagttcagattt

SEQ ID NO: 44501 - DNA, 19 bp, Homo sapiens
  siRNA target sequence for ZNF228 (NM_013380.2,494-512).
gataagaactatatattca

SEQ ID NO: 44502 - DNA, 19 bp, Homo sapiens
  siRNA target sequence for ZNF228 (NM_013380.2,522-540).
ggaatggctccaattatat

SEQ ID NO: 44503 - DNA, 19 bp, Homo sapiens
  siRNA target sequence for ZNF228 (NM_013380.2,523-541).
gaatggctccaattatata

SEQ ID NO: 44504 - DNA, 19 bp, Homo sapiens
  siRNA target sequence for ZNF228 (NM_013380.2,527-545).
ggctccaattatataaaaa

SEQ ID NO: 44505 - DNA, 19 bp, Homo sapiens
  siRNA target sequence for ZNF228 (NM_013380.2,596-614).
ctgaaagagtcacataatt

SEQ ID NO: 44506 - DNA, 19 bp, Homo sapiens
  siRNA target sequence for ZNF228 (NM_013380.2,678-696).
ggctctcacatcacaatga

SEQ ID NO: 44507 - DNA, 19 bp, Homo sapiens
  siRNA target sequence for ZNF228 (NM_013380.2,679-697).
gctctcacatcacaatgat

SEQ ID NO: 44508 - DNA, 19 bp, Homo sapiens
  siRNA target sequence for ZNF228 (NM_013380.2,680-698).
ctctcacatcacaatgata

SEQ ID NO: 44509 - DNA, 19 bp, Homo sapiens
  siRNA target sequence for ZNF228 (NM_013380.2,741-759).
gtggagaagatatcatgaa

SEQ ID NO: 44510 - DNA, 19 bp, Homo sapiens
  siRNA target sequence for ZNF228 (NM_013380.2,757-775).
gaaggtatcattacttaat

SEQ ID NO: 44511 - DNA, 19 bp, Homo sapiens
  siRNA target sequence for ZNF228 (NM_013380.2,809-827).
ccatgtactgggtatagaa

SEQ ID NO: 44512 - DNA, 19 bp, Homo sapiens
  siRNA target sequence for ZNF228 (NM_013380.2,877-895).
ggaagggaagccctataca

SEQ ID NO: 44513 - DNA, 19 bp, Homo sapiens
  siRNA target sequence for ZNF228 (NM_013380.2,887-905).
ccctatacatacagttcat

SEQ ID NO: 44514 - DNA, 19 bp, Homo sapiens
  siRNA target sequence for ZNF228 (NM_013380.2,908-926).
ggaaagggctgtaattata

SEQ ID NO: 44515 - DNA, 19 bp, Homo sapiens
  siRNA target sequence for ZNF228 (NM_013380.2,974-992).
gagaattcacatctgaaat

SEQ ID NO: 44516 - DNA, 19 bp, Homo sapiens
  siRNA target sequence for ZNF228 (NM_013380.2,983-1001).
catctgaaatcctatcaga

SEQ ID NO: 44517 - DNA, 19 bp, Homo sapiens
  siRNA target sequence for ZNF228 (NM_013380.2,1058-1076).
cactgttcccctcttaaca

SEQ ID NO: 44518 - DNA, 19 bp, Homo sapiens
  siRNA target sequence for ZNF228 (NM_013380.2,1068-1086).
ctcttaacacttatgaact

SEQ ID NO: 44519 - DNA, 19 bp, Homo sapiens
  siRNA target sequence for ZNF228 (NM_013380.2,1105-1123).
gtcctataggcacaacatt

SEQ ID NO: 44520 - DNA, 19 bp, Homo sapiens
  siRNA target sequence for ZNF228 (NM_013380.2,1108-1126).
ctataggcacaacatttat

SEQ ID NO: 44521 - DNA, 19 bp, Homo sapiens
  siRNA target sequence for ZNF228 (NM_013380.2,1146-1164).
gcttagaccttaatagtat

SEQ ID NO: 44522 - DNA, 19 bp, Homo sapiens
  siRNA target sequence for ZNF228 (NM_013380.2,1270-1288).
gaaactatacacagatata

SEQ ID NO: 44523 - DNA, 19 bp, Homo sapiens
  siRNA target sequence for ZNF228 (NM_013380.2,1420-1438).
gatagtccacactaaggaa

SEQ ID NO: 44524 - DNA, 19 bp, Homo sapiens
  siRNA target sequence for ZNF228 (NM_013380.2,1431-1449).
ctaaggaacaaccatataa

SEQ ID NO: 44525 - DNA, 19 bp, Homo sapiens
  siRNA target sequence for ZNF228 (NM_013380.2,1442-1460).
ccatataaacgctatgtgt

SEQ ID NO: 44526 - DNA, 19 bp, Homo sapiens
  siRNA target sequence for ZNF228 (NM_013380.2,1451-1469).
cgctatgtgtgtagtaaca

SEQ ID NO: 44527 - DNA, 19 bp, Homo sapiens
  siRNA target sequence for ZNF228 (NM_013380.2,1470-1488).
gcttcagccataatttata

SEQ ID NO: 44528 - DNA, 19 bp, Homo sapiens
  siRNA target sequence for ZNF228 (NM_013380.2,1474-1492).
cagccataatttatatctt

SEQ ID NO: 44529 - DNA, 19 bp, Homo sapiens
  siRNA target sequence for ZNF228 (NM_013380.2,1496-1514).
ggtcatccaaaaattcaca

SEQ ID NO: 44530 - DNA, 19 bp, Homo sapiens
  siRNA target sequence for ZNF228 (NM_013380.2,1555-1573).
ctggagctcaaaacttaaa

SEQ ID NO: 44531 - DNA, 19 bp, Homo sapiens
  siRNA target sequence for ZNF228 (NM_013380.2,1557-1575).
ggagctcaaaacttaaaga

SEQ ID NO: 44532 - DNA, 19 bp, Homo sapiens
  siRNA target sequence for ZNF228 (NM_013380.2,1558-1576).
gagctcaaaacttaaagat

SEQ ID NO: 44533 - DNA, 19 bp, Homo sapiens
  siRNA target sequence for ZNF228 (NM_013380.2,1624-1642).
cggcaaaggtttcaatcat

SEQ ID NO: 44534 - DNA, 19 bp, Homo sapiens
  siRNA target sequence for ZNF228 (NM_013380.2,1627-1645).
caaaggtttcaatcataga

SEQ ID NO: 44535 - DNA, 19 bp, Homo sapiens
  siRNA target sequence for ZNF228 (NM_013380.2,1647-1665).
cagttctgaatgttcatca

SEQ ID NO: 44536 - DNA, 19 bp, Homo sapiens
  siRNA target sequence for ZNF228 (NM_013380.2,2058-2076).
gtaaggcctcaacactttt

SEQ ID NO: 44537 - DNA, 19 bp, Homo sapiens
  siRNA target sequence for ZNF228 (NM_013380.2,2415-2433).
cacaccaaagggttcatgt

SEQ ID NO: 44538 - DNA, 19 bp, Homo sapiens
  siRNA target sequence for ZNF228 (NM_013380.2,2470-2488).
gggtttcagtgggtattca

SEQ ID NO: 44539 - DNA, 19 bp, Homo sapiens
  siRNA target sequence for ZNF228 (NM_013380.2,2471-2489).
ggtttcagtgggtattcaa

SEQ ID NO: 44540 - DNA, 19 bp, Homo sapiens
  siRNA target sequence for ZNF228 (NM_013380.2,2676-2694).
gagtccatagtagtgataa

SEQ ID NO: 44541 - DNA, 19 bp, Homo sapiens
  siRNA target sequence for ZNF228 (NM_013380.2,2678-2696).
gtccatagtagtgataaat

SEQ ID NO: 44542 - DNA, 19 bp, Homo sapiens
  siRNA target sequence for ZNF23 (NM_145911.1,847-865).
gggatttccacttctcaaa

SEQ ID NO: 44543 - DNA, 19 bp, Homo sapiens
  siRNA target sequence for ZNF23 (NM_145911.1,945-963).
gcctccagactgatattca

SEQ ID NO: 44544 - DNA, 19 bp, Homo sapiens
  siRNA target sequence for ZNF23 (NM_145911.1,1019-1037).
gaacttcaaagagactttt

SEQ ID NO: 44545 - DNA, 19 bp, Homo sapiens
  siRNA target sequence for ZNF23 (NM_145911.1,1158-1176).
gccccgtggaggagtgttt

SEQ ID NO: 44546 - DNA, 19 bp, Homo sapiens
  siRNA target sequence for ZNF23 (NM_145911.1,1252-1270).
gaaatccatcagctttgat

SEQ ID NO: 44547 - DNA, 19 bp, Homo sapiens
  siRNA target sequence for ZNF23 (NM_145911.1,1257-1275).
ccatcagctttgatacaaa

SEQ ID NO: 44548 - DNA, 19 bp, Homo sapiens
  siRNA target sequence for ZNF23 (NM_145911.1,1277-1295).
ctcgtgaagcatgaaataa

SEQ ID NO: 44549 - DNA, 19 bp, Homo sapiens
  siRNA target sequence for ZNF23 (NM_145911.1,1347-1365).
ggtgtgactctcaacttat

SEQ ID NO: 44550 - DNA, 19 bp, Homo sapiens
  siRNA target sequence for ZNF23 (NM_145911.1,1350-1368).
gtgactctcaacttattca

SEQ ID NO: 44551 - DNA, 19 bp, Homo sapiens
  siRNA target sequence for ZNF23 (NM_145911.1,1424-1442).
gctttcagcattaatgaga

SEQ ID NO: 44552 - DNA, 19 bp, Homo sapiens
  siRNA target sequence for ZNF23 (NM_145911.1,1684-1702).
ctgtagttctgcatatatt

SEQ ID NO: 44553 - DNA, 19 bp, Homo sapiens
  siRNA target sequence for ZNF23 (NM_145911.1,1760-1778).
gcgttcaatgttaatgcaa

SEQ ID NO: 44554 - DNA, 19 bp, Homo sapiens
  siRNA target sequence for ZNF23 (NM_145911.1,1761-1779).
cgttcaatgttaatgcaaa

SEQ ID NO: 44555 - DNA, 19 bp, Homo sapiens
  siRNA target sequence for ZNF23 (NM_145911.1,1762-1780).
gttcaatgttaatgcaaaa

SEQ ID NO: 44556 - DNA, 19 bp, Homo sapiens
  siRNA target sequence for ZNF23 (NM_145911.1,1928-1946).
ggcttcaataataatacaa

SEQ ID NO: 44557 - DNA, 19 bp, Homo sapiens
  siRNA target sequence for ZNF23 (NM_145911.1,2187-2205).
gcgttaatgggaaactaat

SEQ ID NO: 44558 - DNA, 19 bp, Homo sapiens
  siRNA target sequence for ZNF23 (NM_145911.1,2274-2292).
ctaaaagaaacctacttga

SEQ ID NO: 44559 - DNA, 19 bp, Homo sapiens
  siRNA target sequence for ZNF23 (NM_145911.1,2353-2371).
cagtatcaatgccaaacta

SEQ ID NO: 44560 - DNA, 19 bp, Homo sapiens
  siRNA target sequence for ZNF23 (NM_145911.1,2439-2457).
gctgtagttctaactatat

SEQ ID NO: 44561 - DNA, 19 bp, Homo sapiens
  siRNA target sequence for ZNF23 (NM_145911.1,2616-2634).
ctgactacattatacatca

SEQ ID NO: 44562 - DNA, 19 bp, Homo sapiens
  siRNA target sequence for ZNF23 (NM_145911.1,2721-2739).
gtgtccatagtgaaggaaa

SEQ ID NO: 44563 - DNA, 19 bp, Homo sapiens
  siRNA target sequence for ZNF23 (NM_145911.1,2726-2744).
catagtgaaggaaaatcct

SEQ ID NO: 44564 - DNA, 19 bp, Homo sapiens
  siRNA target sequence for ZNF230 (NM_006300.1,639-657).
cacagaatgggaagtgtaa

SEQ ID NO: 44565 - DNA, 19 bp, Homo sapiens
  siRNA target sequence for ZNF230 (NM_006300.1,919-937).
cagatgtagagcgatactt

SEQ ID NO: 44566 - DNA, 19 bp, Homo sapiens
  siRNA target sequence for ZNF230 (NM_006300.1,924-942).
gtagagcgatacttcaagt

SEQ ID NO: 44567 - DNA, 19 bp, Homo sapiens
  siRNA target sequence for ZNF230 (NM_006300.1,1505-1523).
cttgtacaccggtctttct

SEQ ID NO: 44568 - DNA, 19 bp, Homo sapiens
  siRNA target sequence for ZNF230 (NM_006300.1,1508-1526).
gtacaccggtctttctgta

SEQ ID NO: 44569 - DNA, 19 bp, Homo sapiens
  siRNA target sequence for ZNF234 (NM_006630.1,383-401).
gcatcaccccttcaaacat

SEQ ID NO: 44570 - DNA, 19 bp, Homo sapiens
  siRNA target sequence for ZNF234 (NM_006630.1,519-537).
cgacatgaagagctttact

SEQ ID NO: 44571 - DNA, 19 bp, Homo sapiens
  siRNA target sequence for ZNF234 (NM_006630.1,565-583).
gtgatttaatcaagtatga

SEQ ID NO: 44572 - DNA, 19 bp, Homo sapiens
  siRNA target sequence for ZNF234 (NM_006630.1,582-600).
gaagactctatgataagta

SEQ ID NO: 44573 - DNA, 19 bp, Homo sapiens
  siRNA target sequence for ZNF234 (NM_006630.1,585-603).
gactctatgataagtattt

SEQ ID NO: 44574 - DNA, 19 bp, Homo sapiens
  siRNA target sequence for ZNF234 (NM_006630.1,612-630).
cccagacaaggtgatttgt

SEQ ID NO: 44575 - DNA, 19 bp, Homo sapiens
  siRNA target sequence for ZNF234 (NM_006630.1,638-656).
ggttagggcaggactatat

SEQ ID NO: 44576 - DNA, 19 bp, Homo sapiens
  siRNA target sequence for ZNF234 (NM_006630.1,644-662).
ggcaggactatatacaact

SEQ ID NO: 44577 - DNA, 19 bp, Homo sapiens
  siRNA target sequence for ZNF234 (NM_006630.1,690-708).
gatgagtacaaaaaatcct

SEQ ID NO: 44578 - DNA, 19 bp, Homo sapiens
  siRNA target sequence for ZNF234 (NM_006630.1,1124-1142).
gaacttccgtcgtagatca

SEQ ID NO: 44579 - DNA, 19 bp, Homo sapiens
  siRNA target sequence for ZNF234 (NM_006630.1,1203-1221).
ggtaagtgtttcacttgta

SEQ ID NO: 44580 - DNA, 19 bp, Homo sapiens
  siRNA target sequence for ZNF234 (NM_006630.1,1219-1237).
gtagctcaaaccttcgtat

SEQ ID NO: 44581 - DNA, 19 bp, Homo sapiens
  siRNA target sequence for ZNF234 (NM_006630.1,1223-1241).
ctcaaaccttcgtatccat

SEQ ID NO: 44582 - DNA, 19 bp, Homo sapiens
  siRNA target sequence for ZNF234 (NM_006630.1,2224-2242).
gctggcgatcaaatcttgt

SEQ ID NO: 44583 - DNA, 19 bp, Homo sapiens
  siRNA target sequence for ZNF234 (NM_006630.1,2225-2243).
ctggcgatcaaatcttgta

SEQ ID NO: 44584 - DNA, 19 bp, Homo sapiens
  siRNA target sequence for ZNF234 (NM_006630.1,2228-2246).
gcgatcaaatcttgtaagt

SEQ ID NO: 44585 - DNA, 19 bp, Homo sapiens
  siRNA target sequence for ZNF234 (NM_006630.1,2286-2304).
gatgagaatagtaagaaca

SEQ ID NO: 44586 - DNA, 19 bp, Homo sapiens
  siRNA target sequence for ZNF234 (NM_006630.1,2289-2307).
gagaatagtaagaacatca

SEQ ID NO: 44587 - DNA, 19 bp, Homo sapiens
  siRNA target sequence for ZNF235 (NM_004234.3,236-254).
gggacatcagtccttcaaa

SEQ ID NO: 44588 - DNA, 19 bp, Homo sapiens
  siRNA target sequence for ZNF235 (NM_004234.3,372-390).
gcaggattaaggtgctttt

SEQ ID NO: 44589 - DNA, 19 bp, Homo sapiens
  siRNA target sequence for ZNF235 (NM_004234.3,376-394).
gattaaggtgcttttcact

SEQ ID NO: 44590 - DNA, 19 bp, Homo sapiens
  siRNA target sequence for ZNF235 (NM_004234.3,437-455).
caaattagccagaagtcaa

SEQ ID NO: 44591 - DNA, 19 bp, Homo sapiens
  siRNA target sequence for ZNF235 (NM_004234.3,563-581).
ctgtctagtgaatcacata

SEQ ID NO: 44592 - DNA, 19 bp, Homo sapiens
  siRNA target sequence for ZNF235 (NM_004234.3,592-610).
ccagtatcattgaaaatca

SEQ ID NO: 44593 - DNA, 19 bp, Homo sapiens
  siRNA target sequence for ZNF235 (NM_004234.3,633-651).
ccgaattcttggagtaaaa

SEQ ID NO: 44594 - DNA, 19 bp, Homo sapiens
  siRNA target sequence for ZNF235 (NM_004234.3,657-675).
ctgaatgagacacagaatt

SEQ ID NO: 44595 - DNA, 19 bp, Homo sapiens
  siRNA target sequence for ZNF235 (NM_004234.3,757-775).
cacaccaccatgatgataa

SEQ ID NO: 44596 - DNA, 19 bp, Homo sapiens
  siRNA target sequence for ZNF235 (NM_004234.3,771-789).
gataatatagtgcacaaaa

SEQ ID NO: 44597 - DNA, 19 bp, Homo sapiens
  siRNA target sequence for ZNF235 (NM_004234.3,798-816).
gttcatagcaatagtgatt

SEQ ID NO: 44598 - DNA, 19 bp, Homo sapiens
  siRNA target sequence for ZNF235 (NM_004234.3,844-862).
ctcttacccagcgtagtat

SEQ ID NO: 44599 - DNA, 19 bp, Homo sapiens
  siRNA target sequence for ZNF235 (NM_004234.3,923-941).
cagtcttgaacttcataaa

SEQ ID NO: 44600 - DNA, 19 bp, Homo sapiens
  siRNA target sequence for ZNF235 (NM_004234.3,945-963).
gtacacttgggaaagaagt

SEQ ID NO: 44601 - DNA, 19 bp, Homo sapiens
  siRNA target sequence for ZNF235 (NM_004234.3,970-988).
cgtgtagtacacatgagaa

SEQ ID NO: 44602 - DNA, 19 bp, Homo sapiens
  siRNA target sequence for ZNF235 (NM_004234.3,1006-1024).
caggtattcctgttcaaca

SEQ ID NO: 44603 - DNA, 19 bp, Homo sapiens
  siRNA target sequence for ZNF235 (NM_004234.3,1008-1026).
ggtattcctgttcaacaaa

SEQ ID NO: 44604 - DNA, 19 bp, Homo sapiens
  siRNA target sequence for ZNF235 (NM_004234.3,1027-1045).
gtgttcgtactgggaaaaa

SEQ ID NO: 44605 - DNA, 19 bp, Homo sapiens
  siRNA target sequence for ZNF235 (NM_004234.3,1047-1065).
cgctattggtgtcatgaat

SEQ ID NO: 44606 - DNA, 19 bp, Homo sapiens
  siRNA target sequence for ZNF235 (NM_004234.3,1174-1192).
cacatctttatgctcattt

SEQ ID NO: 44607 - DNA, 19 bp, Homo sapiens
  siRNA target sequence for ZNF235 (NM_004234.3,1185-1203).
gctcatttgcctattcaca

SEQ ID NO: 44608 - DNA, 19 bp, Homo sapiens
  siRNA target sequence for ZNF238 (NM_006352.2,534-552).
cagaccatagtagacattt

SEQ ID NO: 44609 - DNA, 19 bp, Homo sapiens
  siRNA target sequence for ZNF238 (NM_006352.2,716-734).
ctgaacagcgacattgtta

SEQ ID NO: 44610 - DNA, 19 bp, Homo sapiens
  siRNA target sequence for ZNF238 (NM_006352.2,718-736).
gaacagcgacattgttaca

SEQ ID NO: 44611 - DNA, 19 bp, Homo sapiens
  siRNA target sequence for ZNF238 (NM_006352.2,749-767).
gctctcctgcttgaattca

SEQ ID NO: 44612 - DNA, 19 bp, Homo sapiens
  siRNA target sequence for ZNF238 (NM_006352.2,757-775).
gcttgaattcatgtatgaa

SEQ ID NO: 44613 - DNA, 19 bp, Homo sapiens
  siRNA target sequence for ZNF238 (NM_006352.2,927-945).
caagttgttcggacaaagt

SEQ ID NO: 44614 - DNA, 19 bp, Homo sapiens
  siRNA target sequence for ZNF238 (NM_006352.2,1055-1073).
gccgagcctgggaacatgt

SEQ ID NO: 44615 - DNA, 19 bp, Homo sapiens
  siRNA target sequence for ZNF238 (NM_006352.2,1213-1231).
gagggattcggcagatgtt

SEQ ID NO: 44616 - DNA, 19 bp, Homo sapiens
  siRNA target sequence for ZNF238 (NM_006352.2,1261-1279).
cagcctttcaggagttgaa

SEQ ID NO: 44617 - DNA, 19 bp, Homo sapiens
  siRNA target sequence for ZNF238 (NM_006352.2,1369-1387).
gagtgatgttggcactaat

SEQ ID NO: 44618 - DNA, 19 bp, Homo sapiens
  siRNA target sequence for ZNF238 (NM_006352.2,1371-1389).
gtgatgttggcactaatga

SEQ ID NO: 44619 - DNA, 19 bp, Homo sapiens
  siRNA target sequence for ZNF238 (NM_006352.2,1379-1397).
ggcactaatgactatgaca

SEQ ID NO: 44620 - DNA, 19 bp, Homo sapiens
  siRNA target sequence for ZNF238 (NM_006352.2,1380-1398).
gcactaatgactatgacat

SEQ ID NO: 44621 - DNA, 19 bp, Homo sapiens
  siRNA target sequence for ZNF238 (NM_006352.2,1418-1436).
gaaagtgtgagcactaata

SEQ ID NO: 44622 - DNA, 19 bp, Homo sapiens
  siRNA target sequence for ZNF238 (NM_006352.2,1431-1449).
ctaataacagggtacagta

SEQ ID NO: 44623 - DNA, 19 bp, Homo sapiens
  siRNA target sequence for ZNF238 (NM_006352.2,2051-2069).
gactggaccttagaagata

SEQ ID NO: 44624 - DNA, 19 bp, Homo sapiens
  siRNA target sequence for ZNF239 (NM_005674.1,673-691).
gaagtcaggattgtattgt

SEQ ID NO: 44625 - DNA, 19 bp, Homo sapiens
  siRNA target sequence for ZNF239 (NM_005674.1,714-732).
ggggagcctgaactagata

SEQ ID NO: 44626 - DNA, 19 bp, Homo sapiens
  siRNA target sequence for ZNF239 (NM_005674.1,788-806).
cagtgtgatgactcttcaa

SEQ ID NO: 44627 - DNA, 19 bp, Homo sapiens
  siRNA target sequence for ZNF239 (NM_005674.1,804-822).
caaagtggttgtttcgaaa

SEQ ID NO: 44628 - DNA, 19 bp, Homo sapiens
  siRNA target sequence for ZNF239 (NM_005674.1,808-826).
gtggttgtttcgaaaacat

SEQ ID NO: 44629 - DNA, 19 bp, Homo sapiens
  siRNA target sequence for ZNF239 (NM_005674.1,855-873).
gtctcaagccaaatagaca

SEQ ID NO: 44630 - DNA, 19 bp, Homo sapiens
  siRNA target sequence for ZNF239 (NM_005674.1,879-897).
gactcttcagtgaagttct

SEQ ID NO: 44631 - DNA, 19 bp, Homo sapiens
  siRNA target sequence for ZNF239 (NM_005674.1,928-946).
gcagacgtctctttgtaat

SEQ ID NO: 44632 - DNA, 19 bp, Homo sapiens
  siRNA target sequence for ZNF239 (NM_005674.1,931-949).
gacgtctctttgtaatgga

SEQ ID NO: 44633 - DNA, 19 bp, Homo sapiens
  siRNA target sequence for ZNF239 (NM_005674.1,988-1006).
gttcagagaaccttcaagt

SEQ ID NO: 44634 - DNA, 19 bp, Homo sapiens
  siRNA target sequence for ZNF239 (NM_005674.1,1013-1031).
ggtgtctgatggacaagaa

SEQ ID NO: 44635 - DNA, 19 bp, Homo sapiens
  siRNA target sequence for ZNF239 (NM_005674.1,1032-1050).
ctggcctcgccattgttaa

SEQ ID NO: 44636 - DNA, 19 bp, Homo sapiens
  siRNA target sequence for ZNF239 (NM_005674.1,1034-1052).
ggcctcgccattgttaaat

SEQ ID NO: 44637 - DNA, 19 bp, Homo sapiens
  siRNA target sequence for ZNF239 (NM_005674.1,1074-1092).
ggccagttaaaagaatctt

SEQ ID NO: 44638 - DNA, 19 bp, Homo sapiens
  siRNA target sequence for ZNF239 (NM_005674.1,1106-1124).
ctgtaactgcaaagacatt

SEQ ID NO: 44639 - DNA, 19 bp, Homo sapiens
  siRNA target sequence for ZNF239 (NM_005674.1,1187-1205).
ctgtgaccataataactgt

SEQ ID NO: 44640 - DNA, 19 bp, Homo sapiens
  siRNA target sequence for ZNF239 (NM_005674.1,1230-1248).
gatggtcatccatatgaga

SEQ ID NO: 44641 - DNA, 19 bp, Homo sapiens
  siRNA target sequence for ZNF239 (NM_005674.1,2003-2021).
gcgggttcacaagaaagat

SEQ ID NO: 44642 - DNA, 19 bp, Homo sapiens
  siRNA target sequence for ZNF25 (NM_145011.2,117-135).
ccagggacccgtgacatta

SEQ ID NO: 44643 - DNA, 19 bp, Homo sapiens
  siRNA target sequence for ZNF25 (NM_145011.2,122-140).
gacccgtgacattaaagga

SEQ ID NO: 44644 - DNA, 19 bp, Homo sapiens
  siRNA target sequence for ZNF25 (NM_145011.2,188-206).
ctcagaggactctgtataa

SEQ ID NO: 44645 - DNA, 19 bp, Homo sapiens
  siRNA target sequence for ZNF25 (NM_145011.2,192-210).
gaggactctgtataaggat

SEQ ID NO: 44646 - DNA, 19 bp, Homo sapiens
  siRNA target sequence for ZNF25 (NM_145011.2,242-260).
cagtgggttaccatgtgaa

SEQ ID NO: 44647 - DNA, 19 bp, Homo sapiens
  siRNA target sequence for ZNF25 (NM_145011.2,244-262).
gtgggttaccatgtgaata

SEQ ID NO: 44648 - DNA, 19 bp, Homo sapiens
  siRNA target sequence for ZNF25 (NM_145011.2,348-366).
cctatggagcattcatgat

SEQ ID NO: 44649 - DNA, 19 bp, Homo sapiens
  siRNA target sequence for ZNF25 (NM_145011.2,353-371).
ggagcattcatgatctaga

SEQ ID NO: 44650 - DNA, 19 bp, Homo sapiens
  siRNA target sequence for ZNF25 (NM_145011.2,354-372).
gagcattcatgatctagaa

SEQ ID NO: 44651 - DNA, 19 bp, Homo sapiens
  siRNA target sequence for ZNF25 (NM_145011.2,408-426).
gaatggagaactcacaaaa

SEQ ID NO: 44652 - DNA, 19 bp, Homo sapiens
  siRNA target sequence for ZNF25 (NM_145011.2,523-541).
cactcaaagggcaaatcct

SEQ ID NO: 44653 - DNA, 19 bp, Homo sapiens
  siRNA target sequence for ZNF258 (NM_007167.1,145-163).
gagcttctggacaaaatta

SEQ ID NO: 44654 - DNA, 19 bp, Homo sapiens
  siRNA target sequence for ZNF258 (NM_007167.1,349-367).
gttgctattaaggtttttt

SEQ ID NO: 44655 - DNA, 19 bp, Homo sapiens
  siRNA target sequence for ZNF258 (NM_007167.1,396-414).
gggccaaactgcatatcat

SEQ ID NO: 44656 - DNA, 19 bp, Homo sapiens
  siRNA target sequence for ZNF258 (NM_007167.1,397-415).
ggccaaactgcatatcata

SEQ ID NO: 44657 - DNA, 19 bp, Homo sapiens
  siRNA target sequence for ZNF258 (NM_007167.1,398-416).
gccaaactgcatatcataa

SEQ ID NO: 44658 - DNA, 19 bp, Homo sapiens
  siRNA target sequence for ZNF258 (NM_007167.1,608-626).
catcttatgagctaaagaa

SEQ ID NO: 44659 - DNA, 19 bp, Homo sapiens
  siRNA target sequence for ZNF258 (NM_007167.1,637-655).
gttaccatatataccaaaa

SEQ ID NO: 44660 - DNA, 19 bp, Homo sapiens
  siRNA target sequence for ZNF258 (NM_007167.1,692-710).
ctgatactcgatttgaagt

SEQ ID NO: 44661 - DNA, 19 bp, Homo sapiens
  siRNA target sequence for ZNF258 (NM_007167.1,698-716).
ctcgatttgaagttaaata

SEQ ID NO: 44662 - DNA, 19 bp, Homo sapiens
  siRNA target sequence for ZNF258 (NM_007167.1,804-822).
ctgtgggagctattgctat

SEQ ID NO: 44663 - DNA, 19 bp, Homo sapiens
  siRNA target sequence for ZNF258 (NM_007167.1,808-826).
gggagctattgctatagta

SEQ ID NO: 44664 - DNA, 19 bp, Homo sapiens
  siRNA target sequence for ZNF258 (NM_007167.1,839-857).
gccaatcccagaaggtttt

SEQ ID NO: 44665 - DNA, 19 bp, Homo sapiens
  siRNA target sequence for ZNF258 (NM_007167.1,849-867).
gaaggtttttagttcaaca

SEQ ID NO: 44666 - DNA, 19 bp, Homo sapiens
  siRNA target sequence for ZNF258 (NM_007167.1,852-870).
ggtttttagttcaacaagt

SEQ ID NO: 44667 - DNA, 19 bp, Homo sapiens
  siRNA target sequence for ZNF258 (NM_007167.1,866-884).
caagtgtcacggcatacaa

SEQ ID NO: 44668 - DNA, 19 bp, Homo sapiens
  siRNA target sequence for ZNF258 (NM_007167.1,885-903).
gcagaattctgcccaaatt

SEQ ID NO: 44669 - DNA, 19 bp, Homo sapiens
  siRNA target sequence for ZNF258 (NM_007167.1,1014-1032).
cagagttaagactgttact

SEQ ID NO: 44670 - DNA, 19 bp, Homo sapiens
  siRNA target sequence for ZNF258 (NM_007167.1,1018-1036).
gttaagactgttacttctt

SEQ ID NO: 44671 - DNA, 19 bp, Homo sapiens
  siRNA target sequence for ZNF258 (NM_007167.1,1042-1060).
gtccaggtttcatgtcata

SEQ ID NO: 44672 - DNA, 19 bp, Homo sapiens
  siRNA target sequence for ZNF258 (NM_007167.1,1045-1063).
caggtttcatgtcatagtt

SEQ ID NO: 44673 - DNA, 19 bp, Homo sapiens
  siRNA target sequence for ZNF258 (NM_007167.1,1047-1065).
ggtttcatgtcatagttgt

SEQ ID NO: 44674 - DNA, 19 bp, Homo sapiens
  siRNA target sequence for ZNF258 (NM_007167.1,1048-1066).
gtttcatgtcatagttgta

SEQ ID NO: 44675 - DNA, 19 bp, Homo sapiens
  siRNA target sequence for ZNF258 (NM_007167.1,1380-1398).
gtgtcagcactgtaaccat

SEQ ID NO: 44676 - DNA, 19 bp, Homo sapiens
  siRNA target sequence for ZNF258 (NM_007167.1,1560-1578).
ggttgataagccattctgt

SEQ ID NO: 44677 - DNA, 19 bp, Homo sapiens
  siRNA target sequence for ZNF258 (NM_007167.1,1561-1579).
gttgataagccattctgta

SEQ ID NO: 44678 - DNA, 19 bp, Homo sapiens
  siRNA target sequence for ZNF258 (NM_007167.1,1618-1636).
gaacgatggggaaactact

SEQ ID NO: 44679 - DNA, 19 bp, Homo sapiens
  siRNA target sequence for ZNF258 (NM_007167.1,1658-1676).
cacagacatccccaaattt

SEQ ID NO: 44680 - DNA, 19 bp, Homo sapiens
  siRNA target sequence for ZNF258 (NM_007167.1,1662-1680).
gacatccccaaatttggta

SEQ ID NO: 44681 - DNA, 19 bp, Homo sapiens
  siRNA target sequence for ZNF258 (NM_007167.1,1695-1713).
gggcaagttagaagagttt

SEQ ID NO: 44682 - DNA, 19 bp, Homo sapiens
  siRNA target sequence for ZNF258 (NM_007167.1,1696-1714).
ggcaagttagaagagtttt

SEQ ID NO: 44683 - DNA, 19 bp, Homo sapiens
  siRNA target sequence for ZNF258 (NM_007167.1,1698-1716).
caagttagaagagttttgt

SEQ ID NO: 44684 - DNA, 19 bp, Homo sapiens
  siRNA target sequence for ZNF258 (NM_007167.1,1701-1719).
gttagaagagttttgttgt

SEQ ID NO: 44685 - DNA, 19 bp, Homo sapiens
  siRNA target sequence for ZNF258 (NM_007167.1,1723-1741).
gattgtatgtccaaattta

SEQ ID NO: 44686 - DNA, 19 bp, Homo sapiens
  siRNA target sequence for ZNF258 (NM_007167.1,1764-1782).
caagtgtgatggttgtaaa

SEQ ID NO: 44687 - DNA, 19 bp, Homo sapiens
  siRNA target sequence for ZNF258 (NM_007167.1,1812-1830).
gtggcgaggcaacattaaa

SEQ ID NO: 44688 - DNA, 19 bp, Homo sapiens
  siRNA target sequence for ZNF258 (NM_007167.1,1814-1832).
ggcgaggcaacattaaaca

SEQ ID NO: 44689 - DNA, 19 bp, Homo sapiens
  siRNA target sequence for ZNF258 (NM_007167.1,2023-2041).
gggaacactaacagtgttt

SEQ ID NO: 44690 - DNA, 19 bp, Homo sapiens
  siRNA target sequence for ZNF258 (NM_007167.1,2090-2108).
gtacacaggaagatgctat

SEQ ID NO: 44691 - DNA, 19 bp, Homo sapiens
  siRNA target sequence for ZNF258 (NM_007167.1,2216-2234).
cacagcacaaagaatgtca

SEQ ID NO: 44692 - DNA, 19 bp, Homo sapiens
  siRNA target sequence for ZNF258 (NM_145310.1,620-638).
cacaaactgctcgaagtat

SEQ ID NO: 44693 - DNA, 19 bp, Homo sapiens
  siRNA target sequence for ZNF258 (NM_145310.1,622-640).
caaactgctcgaagtataa

SEQ ID NO: 44694 - DNA, 19 bp, Homo sapiens
  siRNA target sequence for ZNF26 (NM_019591.2,394-412).
cttcgtgctggggattatt

SEQ ID NO: 44695 - DNA, 19 bp, Homo sapiens
  siRNA target sequence for ZNF26 (NM_019591.2,497-515).
gatattggaaaactatcat

SEQ ID NO: 44696 - DNA, 19 bp, Homo sapiens
  siRNA target sequence for ZNF26 (NM_019591.2,521-539).
gatatcagtggggtatcat

SEQ ID NO: 44697 - DNA, 19 bp, Homo sapiens
  siRNA target sequence for ZNF26 (NM_019591.2,540-558).
ggtaccaagcctgacttaa

SEQ ID NO: 44698 - DNA, 19 bp, Homo sapiens
  siRNA target sequence for ZNF26 (NM_019591.2,549-567).
cctgacttaatcttcaagt

SEQ ID NO: 44699 - DNA, 19 bp, Homo sapiens
  siRNA target sequence for ZNF26 (NM_019591.2,589-607).
ggataataaatgccaaaat

SEQ ID NO: 44700 - DNA, 19 bp, Homo sapiens
  siRNA target sequence for ZNF26 (NM_019591.2,643-661).
ggtaccagaacaatcaaga

SEQ ID NO: 44701 - DNA, 19 bp, Homo sapiens
  siRNA target sequence for ZNF26 (NM_019591.2,644-662).
gtaccagaacaatcaagat

SEQ ID NO: 44702 - DNA, 19 bp, Homo sapiens
  siRNA target sequence for ZNF26 (NM_019591.2,671-689).
gagtattgaaagaagctat

SEQ ID NO: 44703 - DNA, 19 bp, Homo sapiens
  siRNA target sequence for ZNF26 (NM_019591.2,739-757).
caagacagagactctataa

SEQ ID NO: 44704 - DNA, 19 bp, Homo sapiens
  siRNA target sequence for ZNF26 (NM_019591.2,752-770).
ctataacacacgtggaaaa

SEQ ID NO: 44705 - DNA, 19 bp, Homo sapiens
  siRNA target sequence for ZNF26 (NM_019591.2,815-833).
gaatcctgataagtttcat

SEQ ID NO: 44706 - DNA, 19 bp, Homo sapiens
  siRNA target sequence for ZNF26 (NM_019591.2,1075-1093).
gcgagaaggtcttctcttt

SEQ ID NO: 44707 - DNA, 19 bp, Homo sapiens
  siRNA target sequence for ZNF26 (NM_019591.2,1077-1095).
gagaaggtcttctctttca

SEQ ID NO: 44708 - DNA, 19 bp, Homo sapiens
  siRNA target sequence for ZNF26 (NM_019591.2,1362-1380).
gttcacatccgaatgcata

SEQ ID NO: 44709 - DNA, 19 bp, Homo sapiens
  siRNA target sequence for ZNF26 (NM_019591.2,1465-1483).
caggaaataatccttatca

SEQ ID NO: 44710 - DNA, 19 bp, Homo sapiens
  siRNA target sequence for ZNF26 (NM_019591.2,1766-1784).
gaaggcatcacttcagata

SEQ ID NO: 44711 - DNA, 19 bp, Homo sapiens
  siRNA target sequence for ZNF26 (NM_019591.2,1934-1952).
gaattcagggcttcgtata

SEQ ID NO: 44712 - DNA, 19 bp, Homo sapiens
  siRNA target sequence for ZNF261 (NM_005096.1,152-170).
gagacctaccagtagacat

SEQ ID NO: 44713 - DNA, 19 bp, Homo sapiens
  siRNA target sequence for ZNF261 (NM_005096.1,494-512).
cacctgaggggctactaga

SEQ ID NO: 44714 - DNA, 19 bp, Homo sapiens
  siRNA target sequence for ZNF261 (NM_005096.1,519-537).
ggctccagattctccaata

SEQ ID NO: 44715 - DNA, 19 bp, Homo sapiens
  siRNA target sequence for ZNF261 (NM_005096.1,520-538).
gctccagattctccaataa

SEQ ID NO: 44716 - DNA, 19 bp, Homo sapiens
  siRNA target sequence for ZNF261 (NM_005096.1,524-542).
cagattctccaataacact

SEQ ID NO: 44717 - DNA, 19 bp, Homo sapiens
  siRNA target sequence for ZNF261 (NM_005096.1,543-561).
gcagtccccacatattgaa

SEQ ID NO: 44718 - DNA, 19 bp, Homo sapiens
  siRNA target sequence for ZNF261 (NM_005096.1,887-905).
ctgatgccatggtagatga

SEQ ID NO: 44719 - DNA, 19 bp, Homo sapiens
  siRNA target sequence for ZNF261 (NM_005096.1,897-915).
ggtagatgaccccaatgat

SEQ ID NO: 44720 - DNA, 19 bp, Homo sapiens
  siRNA target sequence for ZNF261 (NM_005096.1,964-982).
cgctcaagtgtgtcacaaa

SEQ ID NO: 44721 - DNA, 19 bp, Homo sapiens
  siRNA target sequence for ZNF261 (NM_005096.1,1303-1321).
gctactcgctgcagcatat

SEQ ID NO: 44722 - DNA, 19 bp, Homo sapiens
  siRNA target sequence for ZNF261 (NM_005096.1,1375-1393).
cggctctgcagcgattctt

SEQ ID NO: 44723 - DNA, 19 bp, Homo sapiens
  siRNA target sequence for ZNF261 (NM_005096.1,1411-1429).
gccaacaagggactgaaaa

SEQ ID NO: 44724 - DNA, 19 bp, Homo sapiens
  siRNA target sequence for ZNF261 (NM_005096.1,1420-1438).
ggactgaaaaccaactgtt

SEQ ID NO: 44725 - DNA, 19 bp, Homo sapiens
  siRNA target sequence for ZNF261 (NM_005096.1,1444-1462).
cagtgtggggcttacatct

SEQ ID NO: 44726 - DNA, 19 bp, Homo sapiens
  siRNA target sequence for ZNF261 (NM_005096.1,1586-1604).
ggtgcaagaccctgtgtaa

SEQ ID NO: 44727 - DNA, 19 bp, Homo sapiens
  siRNA target sequence for ZNF261 (NM_005096.1,1593-1611).
gaccctgtgtaagaacttt

SEQ ID NO: 44728 - DNA, 19 bp, Homo sapiens
  siRNA target sequence for ZNF261 (NM_005096.1,1608-1626).
ctttgagatgctatcacat

SEQ ID NO: 44729 - DNA, 19 bp, Homo sapiens
  siRNA target sequence for ZNF261 (NM_005096.1,1667-1685).
gctgtaccacttcttacaa

SEQ ID NO: 44730 - DNA, 19 bp, Homo sapiens
  siRNA target sequence for ZNF261 (NM_005096.1,1668-1686).
ctgtaccacttcttacaaa

SEQ ID NO: 44731 - DNA, 19 bp, Homo sapiens
  siRNA target sequence for ZNF261 (NM_005096.1,1748-1766).
ctgacccctgttactacaa

SEQ ID NO: 44732 - DNA, 19 bp, Homo sapiens
  siRNA target sequence for ZNF261 (NM_005096.1,2101-2119).
ctgggcttgtgctgtatca

SEQ ID NO: 44733 - DNA, 19 bp, Homo sapiens
  siRNA target sequence for ZNF261 (NM_005096.1,2103-2121).
gggcttgtgctgtatcact

SEQ ID NO: 44734 - DNA, 19 bp, Homo sapiens
  siRNA target sequence for ZNF261 (NM_005096.1,2109-2127).
gtgctgtatcacttgtact

SEQ ID NO: 44735 - DNA, 19 bp, Homo sapiens
  siRNA target sequence for ZNF261 (NM_005096.1,2111-2129).
gctgtatcacttgtactta

SEQ ID NO: 44736 - DNA, 19 bp, Homo sapiens
  siRNA target sequence for ZNF261 (NM_005096.1,2294-2312).
gtgggcagatccgtcattt

SEQ ID NO: 44737 - DNA, 19 bp, Homo sapiens
  siRNA target sequence for ZNF261 (NM_005096.1,2296-2314).
gggcagatccgtcatttct

SEQ ID NO: 44738 - DNA, 19 bp, Homo sapiens
  siRNA target sequence for ZNF261 (NM_005096.1,2325-2343).
gtgtcttctgcgtttctat

SEQ ID NO: 44739 - DNA, 19 bp, Homo sapiens
  siRNA target sequence for ZNF261 (NM_005096.1,2560-2578).
gcaacaccccgcaaaaaca

SEQ ID NO: 44740 - DNA, 19 bp, Homo sapiens
  siRNA target sequence for ZNF261 (NM_005096.1,2640-2658).
gtccaaaggaagtcaaaca

SEQ ID NO: 44741 - DNA, 19 bp, Homo sapiens
  siRNA target sequence for ZNF261 (NM_005096.1,2643-2661).
caaaggaagtcaaacagaa

SEQ ID NO: 44742 - DNA, 19 bp, Homo sapiens
  siRNA target sequence for ZNF261 (NM_005096.1,2709-2727).
cgtgccagtgcctatgcat

SEQ ID NO: 44743 - DNA, 19 bp, Homo sapiens
  siRNA target sequence for ZNF261 (NM_005096.1,2805-2823).
ggagagcacagacaagatt

SEQ ID NO: 44744 - DNA, 19 bp, Homo sapiens
  siRNA target sequence for ZNF261 (NM_005096.1,2930-2948).
cctcatctgacctttgtga

SEQ ID NO: 44745 - DNA, 19 bp, Homo sapiens
  siRNA target sequence for ZNF261 (NM_005096.1,2931-2949).
ctcatctgacctttgtgat

SEQ ID NO: 44746 - DNA, 19 bp, Homo sapiens
  siRNA target sequence for ZNF261 (NM_005096.1,3002-3020).
ggcctgctcgagatgatgt

SEQ ID NO: 44747 - DNA, 19 bp, Homo sapiens
  siRNA target sequence for ZNF261 (NM_005096.1,3093-3111).
gaatcctctggacattaat

SEQ ID NO: 44748 - DNA, 19 bp, Homo sapiens
  siRNA target sequence for ZNF261 (NM_005096.1,3156-3174).
ggatgtgtctactgaacaa

SEQ ID NO: 44749 - DNA, 19 bp, Homo sapiens
  siRNA target sequence for ZNF261 (NM_005096.1,3188-3206).
ccatgaggaagggtcaaaa

SEQ ID NO: 44750 - DNA, 19 bp, Homo sapiens
  siRNA target sequence for ZNF261 (NM_005096.1,3246-3264).
gagcagtcagcctagttgt

SEQ ID NO: 44751 - DNA, 19 bp, Homo sapiens
  siRNA target sequence for ZNF261 (NM_005096.1,3260-3278).
gttgtaccgggctcaacta

SEQ ID NO: 44752 - DNA, 19 bp, Homo sapiens
  siRNA target sequence for ZNF261 (NM_005096.1,3266-3284).
ccgggctcaactattcata

SEQ ID NO: 44753 - DNA, 19 bp, Homo sapiens
  siRNA target sequence for ZNF261 (NM_005096.1,3267-3285).
cgggctcaactattcatat

SEQ ID NO: 44754 - DNA, 19 bp, Homo sapiens
  siRNA target sequence for ZNF261 (NM_005096.1,3270-3288).
gctcaactattcatatggt

SEQ ID NO: 44755 - DNA, 19 bp, Homo sapiens
  siRNA target sequence for ZNF261 (NM_005096.1,3303-3321).
gtgctgggtgcagtcaaaa

SEQ ID NO: 44756 - DNA, 19 bp, Homo sapiens
  siRNA target sequence for ZNF261 (NM_005096.1,3306-3324).
ctgggtgcagtcaaaatat

SEQ ID NO: 44757 - DNA, 19 bp, Homo sapiens
  siRNA target sequence for ZNF261 (NM_005096.1,3368-3386).
ccaaacccatgcgtatcaa

SEQ ID NO: 44758 - DNA, 19 bp, Homo sapiens
  siRNA target sequence for ZNF261 (NM_005096.1,3369-3387).
caaacccatgcgtatcaaa

SEQ ID NO: 44759 - DNA, 19 bp, Homo sapiens
  siRNA target sequence for ZNF261 (NM_005096.1,3378-3396).
gcgtatcaaagaggatatt

SEQ ID NO: 44760 - DNA, 19 bp, Homo sapiens
  siRNA target sequence for ZNF261 (NM_005096.1,3434-3452).
cccagtttgtgagagaaat

SEQ ID NO: 44761 - DNA, 19 bp, Homo sapiens
  siRNA target sequence for ZNF261 (NM_005096.1,3438-3456).
gtttgtgagagaaatcact

SEQ ID NO: 44762 - DNA, 19 bp, Homo sapiens
  siRNA target sequence for ZNF261 (NM_005096.1,3458-3476).
ggcccaatggtgaacgata

SEQ ID NO: 44763 - DNA, 19 bp, Homo sapiens
  siRNA target sequence for ZNF261 (NM_005096.1,3459-3477).
gcccaatggtgaacgatat

SEQ ID NO: 44764 - DNA, 19 bp, Homo sapiens
  siRNA target sequence for ZNF261 (NM_005096.1,3473-3491).
gatatgaacctgacagtat

SEQ ID NO: 44765 - DNA, 19 bp, Homo sapiens
  siRNA target sequence for ZNF261 (NM_005096.1,3481-3499).
cctgacagtatctactatt

SEQ ID NO: 44766 - DNA, 19 bp, Homo sapiens
  siRNA target sequence for ZNF261 (NM_005096.1,3482-3500).
ctgacagtatctactattt

SEQ ID NO: 44767 - DNA, 19 bp, Homo sapiens
  siRNA target sequence for ZNF261 (NM_005096.1,3575-3593).
cttttgttcaagaactcaa

SEQ ID NO: 44768 - DNA, 19 bp, Homo sapiens
  siRNA target sequence for ZNF261 (NM_005096.1,3580-3598).
gttcaagaactcaacaagt

SEQ ID NO: 44769 - DNA, 19 bp, Homo sapiens
  siRNA target sequence for ZNF261 (NM_005096.1,3726-3744).
gttcttcaacactaagttt

SEQ ID NO: 44770 - DNA, 19 bp, Homo sapiens
  siRNA target sequence for ZNF261 (NM_005096.1,3799-3817).
cggcagtcccgcaagtgta

SEQ ID NO: 44771 - DNA, 19 bp, Homo sapiens
  siRNA target sequence for ZNF261 (NM_005096.1,3843-3861).
ggtgagcatccgctactat

SEQ ID NO: 44772 - DNA, 19 bp, Homo sapiens
  siRNA target sequence for ZNF261 (NM_005096.1,3942-3960).
gcgtgagaaccgcatgaat

SEQ ID NO: 44773 - DNA, 19 bp, Homo sapiens
  siRNA target sequence for ZNF261 (NM_005096.1,3967-3985).
cgctgccctgtcaagttct

SEQ ID NO: 44774 - DNA, 19 bp, Homo sapiens
  siRNA target sequence for ZNF261 (NM_005096.1,3969-3987).
ctgccctgtcaagttctat

SEQ ID NO: 44775 - DNA, 19 bp, Homo sapiens
  siRNA target sequence for ZNF261 (NM_005096.1,3972-3990).
ccctgtcaagttctatgaa

SEQ ID NO: 44776 - DNA, 19 bp, Homo sapiens
  siRNA target sequence for ZNF261 (NM_005096.1,3973-3991).
cctgtcaagttctatgaat

SEQ ID NO: 44777 - DNA, 19 bp, Homo sapiens
  siRNA target sequence for ZNF261 (NM_005096.1,3974-3992).
ctgtcaagttctatgaatt

SEQ ID NO: 44778 - DNA, 19 bp, Homo sapiens
  siRNA target sequence for ZNF261 (NM_005096.1,3976-3994).
gtcaagttctatgaattct

SEQ ID NO: 44779 - DNA, 19 bp, Homo sapiens
  siRNA target sequence for ZNF261 (NM_005096.1,3978-3996).
caagttctatgaattctat

SEQ ID NO: 44780 - DNA, 19 bp, Homo sapiens
  siRNA target sequence for ZNF261 (NM_005096.1,4022-4040).
ggactcgcaacgatgtgtt

SEQ ID NO: 44781 - DNA, 19 bp, Homo sapiens
  siRNA target sequence for ZNF261 (NM_005096.1,4025-4043).
ctcgcaacgatgtgttcta

SEQ ID NO: 44782 - DNA, 19 bp, Homo sapiens
  siRNA target sequence for ZNF261 (NM_005096.1,4072-4090).
gagtcacctctctggtatt

SEQ ID NO: 44783 - DNA, 19 bp, Homo sapiens
  siRNA target sequence for ZNF261 (NM_005096.1,4141-4159).
ctggctgtgcgcgagattt

SEQ ID NO: 44784 - DNA, 19 bp, Homo sapiens
  siRNA target sequence for ZNF261 (NM_005096.1,4143-4161).
ggctgtgcgcgagatttat

SEQ ID NO: 44785 - DNA, 19 bp, Homo sapiens
  siRNA target sequence for ZNF262 (NM_005095.1,304-322).
gtgcctcactggatataca

SEQ ID NO: 44786 - DNA, 19 bp, Homo sapiens
  siRNA target sequence for ZNF262 (NM_005095.1,347-365).
cctctcaccaagaaaactt

SEQ ID NO: 44787 - DNA, 19 bp, Homo sapiens
  siRNA target sequence for ZNF262 (NM_005095.1,429-447).
ccaccactagtaaagattt

SEQ ID NO: 44788 - DNA, 19 bp, Homo sapiens
  siRNA target sequence for ZNF262 (NM_005095.1,430-448).
caccactagtaaagatttt

SEQ ID NO: 44789 - DNA, 19 bp, Homo sapiens
  siRNA target sequence for ZNF262 (NM_005095.1,554-572).
gttattcgacatgaagtta

SEQ ID NO: 44790 - DNA, 19 bp, Homo sapiens
  siRNA target sequence for ZNF262 (NM_005095.1,561-579).
gacatgaagttaattacca

SEQ ID NO: 44791 - DNA, 19 bp, Homo sapiens
  siRNA target sequence for ZNF262 (NM_005095.1,603-621).
gtgatgcctgcttctctaa

SEQ ID NO: 44792 - DNA, 19 bp, Homo sapiens
  siRNA target sequence for ZNF262 (NM_005095.1,699-717).
gccacatgcttcagataga

SEQ ID NO: 44793 - DNA, 19 bp, Homo sapiens
  siRNA target sequence for ZNF262 (NM_005095.1,747-765).
cgtgtatcacggcatacaa

SEQ ID NO: 44794 - DNA, 19 bp, Homo sapiens
  siRNA target sequence for ZNF262 (NM_005095.1,786-804).
caccgtgtgcgctttgcaa

SEQ ID NO: 44795 - DNA, 19 bp, Homo sapiens
  siRNA target sequence for ZNF262 (NM_005095.1,788-806).
ccgtgtgcgctttgcaaat

SEQ ID NO: 44796 - DNA, 19 bp, Homo sapiens
  siRNA target sequence for ZNF262 (NM_005095.1,790-808).
gtgtgcgctttgcaaatca

SEQ ID NO: 44797 - DNA, 19 bp, Homo sapiens
  siRNA target sequence for ZNF262 (NM_005095.1,813-831).
gatcctcagcagaaatgat

SEQ ID NO: 44798 - DNA, 19 bp, Homo sapiens
  siRNA target sequence for ZNF262 (NM_005095.1,921-939).
gtgtacaagttcagtgtaa

SEQ ID NO: 44799 - DNA, 19 bp, Homo sapiens
  siRNA target sequence for ZNF262 (NM_005095.1,923-941).
gtacaagttcagtgtaaca

SEQ ID NO: 44800 - DNA, 19 bp, Homo sapiens
  siRNA target sequence for ZNF262 (NM_005095.1,926-944).
caagttcagtgtaacagtt

SEQ ID NO: 44801 - DNA, 19 bp, Homo sapiens
  siRNA target sequence for ZNF262 (NM_005095.1,989-1007).
ggaagtatacgcaacttct

SEQ ID NO: 44802 - DNA, 19 bp, Homo sapiens
  siRNA target sequence for ZNF262 (NM_005095.1,1238-1256).
cgaagtgttgtgaaactca

SEQ ID NO: 44803 - DNA, 19 bp, Homo sapiens
  siRNA target sequence for ZNF262 (NM_005095.1,1292-1310).
ccagaacttcttgactata

SEQ ID NO: 44804 - DNA, 19 bp, Homo sapiens
  siRNA target sequence for ZNF262 (NM_005095.1,1293-1311).
cagaacttcttgactataa

SEQ ID NO: 44805 - DNA, 19 bp, Homo sapiens
  siRNA target sequence for ZNF262 (NM_005095.1,1304-1322).
gactataagggcaaaatgt

SEQ ID NO: 44806 - DNA, 19 bp, Homo sapiens
  siRNA target sequence for ZNF262 (NM_005095.1,1306-1324).
ctataagggcaaaatgttt

SEQ ID NO: 44807 - DNA, 19 bp, Homo sapiens
  siRNA target sequence for ZNF262 (NM_005095.1,1500-1518).
gctggggaaatcactgtaa

SEQ ID NO: 44808 - DNA, 19 bp, Homo sapiens
  siRNA target sequence for ZNF262 (NM_005095.1,1513-1531).
ctgtaaaatgtgcagttat

SEQ ID NO: 44809 - DNA, 19 bp, Homo sapiens
  siRNA target sequence for ZNF262 (NM_005095.1,1555-1573).
ggtacagaataatttagga

SEQ ID NO: 44810 - DNA, 19 bp, Homo sapiens
  siRNA target sequence for ZNF262 (NM_005095.1,1761-1779).
gtgacccgccttcacaaaa

SEQ ID NO: 44811 - DNA, 19 bp, Homo sapiens
  siRNA target sequence for ZNF262 (NM_005095.1,1765-1783).
cccgccttcacaaaataat

SEQ ID NO: 44812 - DNA, 19 bp, Homo sapiens
  siRNA target sequence for ZNF262 (NM_005095.1,1898-1916).
cctacagtgaattctaaca

SEQ ID NO: 44813 - DNA, 19 bp, Homo sapiens
  siRNA target sequence for ZNF262 (NM_005095.1,1928-1946).
ggtgcagttccaacagtaa

SEQ ID NO: 44814 - DNA, 19 bp, Homo sapiens
  siRNA target sequence for ZNF262 (NM_005095.1,1957-1975).
catcggtgatgcaagtact

SEQ ID NO: 44815 - DNA, 19 bp, Homo sapiens
  siRNA target sequence for ZNF262 (NM_005095.1,2121-2139).
caagtcagccccagattat

SEQ ID NO: 44816 - DNA, 19 bp, Homo sapiens
  siRNA target sequence for ZNF262 (NM_005095.1,2178-2196).
ctcttcacctttatactca

SEQ ID NO: 44817 - DNA, 19 bp, Homo sapiens
  siRNA target sequence for ZNF262 (NM_005095.1,2180-2198).
cttcacctttatactcaat

SEQ ID NO: 44818 - DNA, 19 bp, Homo sapiens
  siRNA target sequence for ZNF262 (NM_005095.1,2185-2203).
cctttatactcaatatgct

SEQ ID NO: 44819 - DNA, 19 bp, Homo sapiens
  siRNA target sequence for ZNF262 (NM_005095.1,2237-2255).
gtccctatgcttattccat

SEQ ID NO: 44820 - DNA, 19 bp, Homo sapiens
  siRNA target sequence for ZNF262 (NM_005095.1,2393-2411).
cagggagagtcccaaactt

SEQ ID NO: 44821 - DNA, 19 bp, Homo sapiens
  siRNA target sequence for ZNF262 (NM_005095.1,2395-2413).
gggagagtcccaaacttct

SEQ ID NO: 44822 - DNA, 19 bp, Homo sapiens
  siRNA target sequence for ZNF262 (NM_005095.1,2409-2427).
cttctgaacacgaactctt

SEQ ID NO: 44823 - DNA, 19 bp, Homo sapiens
  siRNA target sequence for ZNF262 (NM_005095.1,2412-2430).
ctgaacacgaactctttct

SEQ ID NO: 44824 - DNA, 19 bp, Homo sapiens
  siRNA target sequence for ZNF262 (NM_005095.1,2455-2473).
ccaaggaagtacatacagt

SEQ ID NO: 44825 - DNA, 19 bp, Homo sapiens
  siRNA target sequence for ZNF262 (NM_005095.1,2470-2488).
cagtggtgatcttgaatca

SEQ ID NO: 44826 - DNA, 19 bp, Homo sapiens
  siRNA target sequence for ZNF262 (NM_005095.1,2472-2490).
gtggtgatcttgaatcaga

SEQ ID NO: 44827 - DNA, 19 bp, Homo sapiens
  siRNA target sequence for ZNF262 (NM_005095.1,2531-2549).
cactatgccttaaagtcaa

SEQ ID NO: 44828 - DNA, 19 bp, Homo sapiens
  siRNA target sequence for ZNF262 (NM_005095.1,2671-2689).
ggcacgttcccgaacaaga

SEQ ID NO: 44829 - DNA, 19 bp, Homo sapiens
  siRNA target sequence for ZNF262 (NM_005095.1,2727-2745).
gaggacggaagaagtctat

SEQ ID NO: 44830 - DNA, 19 bp, Homo sapiens
  siRNA target sequence for ZNF262 (NM_005095.1,2730-2748).
gacggaagaagtctatagt

SEQ ID NO: 44831 - DNA, 19 bp, Homo sapiens
  siRNA target sequence for ZNF262 (NM_005095.1,2800-2818).
gtccgggatgacactgaaa

SEQ ID NO: 44832 - DNA, 19 bp, Homo sapiens
  siRNA target sequence for ZNF262 (NM_005095.1,2804-2822).
gggatgacactgaaataca

SEQ ID NO: 44833 - DNA, 19 bp, Homo sapiens
  siRNA target sequence for ZNF262 (NM_005095.1,2831-2849).
gtaaatgcttggaagaact

SEQ ID NO: 44834 - DNA, 19 bp, Homo sapiens
  siRNA target sequence for ZNF262 (NM_005095.1,2876-2894).
gagcagggggatctaaaat

SEQ ID NO: 44835 - DNA, 19 bp, Homo sapiens
  siRNA target sequence for ZNF262 (NM_005095.1,2878-2896).
gcagggggatctaaaatgt

SEQ ID NO: 44836 - DNA, 19 bp, Homo sapiens
  siRNA target sequence for ZNF262 (NM_005095.1,2903-2921).
gttgaacaggcctcatcta

SEQ ID NO: 44837 - DNA, 19 bp, Homo sapiens
  siRNA target sequence for ZNF262 (NM_005095.1,2927-2945).
cgttctgaccccttaggaa

SEQ ID NO: 44838 - DNA, 19 bp, Homo sapiens
  siRNA target sequence for ZNF262 (NM_005095.1,2935-2953).
ccccttaggaagtactcaa

SEQ ID NO: 44839 - DNA, 19 bp, Homo sapiens
  siRNA target sequence for ZNF262 (NM_005095.1,3079-3097).
ggtgcggagaccaaatggt

SEQ ID NO: 44840 - DNA, 19 bp, Homo sapiens
  siRNA target sequence for ZNF262 (NM_005095.1,3084-3102).
ggagaccaaatggtgaaaa

SEQ ID NO: 44841 - DNA, 19 bp, Homo sapiens
  siRNA target sequence for ZNF262 (NM_005095.1,3107-3125).
gatccagacagtatcttat

SEQ ID NO: 44842 - DNA, 19 bp, Homo sapiens
  siRNA target sequence for ZNF262 (NM_005095.1,3110-3128).
ccagacagtatcttatact

SEQ ID NO: 44843 - DNA, 19 bp, Homo sapiens
  siRNA target sequence for ZNF262 (NM_005095.1,3111-3129).
cagacagtatcttatactt

SEQ ID NO: 44844 - DNA, 19 bp, Homo sapiens
  siRNA target sequence for ZNF262 (NM_005095.1,3113-3131).
gacagtatcttatacttgt

SEQ ID NO: 44845 - DNA, 19 bp, Homo sapiens
  siRNA target sequence for ZNF262 (NM_005095.1,3188-3206).
gagccctattccagattta

SEQ ID NO: 44846 - DNA, 19 bp, Homo sapiens
  siRNA target sequence for ZNF262 (NM_005095.1,3198-3216).
ccagatttatgattgaact

SEQ ID NO: 44847 - DNA, 19 bp, Homo sapiens
  siRNA target sequence for ZNF262 (NM_005095.1,3199-3217).
cagatttatgattgaactt

SEQ ID NO: 44848 - DNA, 19 bp, Homo sapiens
  siRNA target sequence for ZNF262 (NM_005095.1,3215-3233).
cttaccaaactcttgaaaa

SEQ ID NO: 44849 - DNA, 19 bp, Homo sapiens
  siRNA target sequence for ZNF262 (NM_005095.1,3246-3264).
caatacttcctaatggtta

SEQ ID NO: 44850 - DNA, 19 bp, Homo sapiens
  siRNA target sequence for ZNF262 (NM_005095.1,3254-3272).
cctaatggttacatgttct

SEQ ID NO: 44851 - DNA, 19 bp, Homo sapiens
  siRNA target sequence for ZNF262 (NM_005095.1,3326-3344).
ccaatcgtccttttaaaca

SEQ ID NO: 44852 - DNA, 19 bp, Homo sapiens
  siRNA target sequence for ZNF262 (NM_005095.1,3448-3466).
cagtaccaagatgacatat

SEQ ID NO: 44853 - DNA, 19 bp, Homo sapiens
  siRNA target sequence for ZNF262 (NM_005095.1,3521-3539).
gttggcaagaggaaacgaa

SEQ ID NO: 44854 - DNA, 19 bp, Homo sapiens
  siRNA target sequence for ZNF262 (NM_005095.1,3600-3618).
gatgcccagtccgacttta

SEQ ID NO: 44855 - DNA, 19 bp, Homo sapiens
  siRNA target sequence for ZNF262 (NM_005095.1,3603-3621).
gcccagtccgactttatga

SEQ ID NO: 44856 - DNA, 19 bp, Homo sapiens
  siRNA target sequence for ZNF262 (NM_005095.1,3605-3623).
ccagtccgactttatgagt

SEQ ID NO: 44857 - DNA, 19 bp, Homo sapiens
  siRNA target sequence for ZNF262 (NM_005095.1,3606-3624).
cagtccgactttatgagtt

SEQ ID NO: 44858 - DNA, 19 bp, Homo sapiens
  siRNA target sequence for ZNF262 (NM_005095.1,3608-3626).
gtccgactttatgagtttt

SEQ ID NO: 44859 - DNA, 19 bp, Homo sapiens
  siRNA target sequence for ZNF262 (NM_005095.1,3783-3801).
gggaggtacatgaagaact

SEQ ID NO: 44860 - DNA, 19 bp, Homo sapiens
  siRNA target sequence for ZNF262 (NM_005095.1,3825-3843).
ctgatgttgaattatcaga

SEQ ID NO: 44861 - DNA, 19 bp, Homo sapiens
  siRNA target sequence for ZNF264 (NM_003417.1,669-687).
cttgtcagagggaatctca

SEQ ID NO: 44862 - DNA, 19 bp, Homo sapiens
  siRNA target sequence for ZNF264 (NM_003417.1,780-798).
cttcagaccaggaatagat

SEQ ID NO: 44863 - DNA, 19 bp, Homo sapiens
  siRNA target sequence for ZNF264 (NM_003417.1,819-837).
gaagatgagccctgaatgt

SEQ ID NO: 44864 - DNA, 19 bp, Homo sapiens
  siRNA target sequence for ZNF264 (NM_003417.1,907-925).
gtccgtagccataactcat

SEQ ID NO: 44865 - DNA, 19 bp, Homo sapiens
  siRNA target sequence for ZNF264 (NM_003417.1,935-953).
gtaaagatcccatgattca

SEQ ID NO: 44866 - DNA, 19 bp, Homo sapiens
  siRNA target sequence for ZNF264 (NM_003417.1,1349-1367).
gctttctccggcactatgt

SEQ ID NO: 44867 - DNA, 19 bp, Homo sapiens
  siRNA target sequence for ZNF264 (NM_003417.1,1350-1368).
ctttctccggcactatgtt

SEQ ID NO: 44868 - DNA, 19 bp, Homo sapiens
  siRNA target sequence for ZNF264 (NM_003417.1,2195-2213).
ctgcatctgatcaaccata

SEQ ID NO: 44869 - DNA, 19 bp, Homo sapiens
  siRNA target sequence for ZNF266 (NM_006631.2,1392-1410).
gaatggaaagtgcaactta

SEQ ID NO: 44870 - DNA, 19 bp, Homo sapiens
  siRNA target sequence for ZNF266 (NM_006631.2,1426-1444).
cccttcagcaggatgtttt

SEQ ID NO: 44871 - DNA, 19 bp, Homo sapiens
  siRNA target sequence for ZNF266 (NM_006631.2,1464-1482).
gggattcaaatgataggaa

SEQ ID NO: 44872 - DNA, 19 bp, Homo sapiens
  siRNA target sequence for ZNF266 (NM_006631.2,1495-1513).
gggaggtcagtgatgttaa

SEQ ID NO: 44873 - DNA, 19 bp, Homo sapiens
  siRNA target sequence for ZNF266 (NM_006631.2,1606-1624).
gagtagacttccttactct

SEQ ID NO: 44874 - DNA, 19 bp, Homo sapiens
  siRNA target sequence for ZNF266 (NM_006631.2,1645-1663).
gagagcaacgttctgtatt

SEQ ID NO: 44875 - DNA, 19 bp, Homo sapiens
  siRNA target sequence for ZNF266 (NM_006631.2,1647-1665).
gagcaacgttctgtattta

SEQ ID NO: 44876 - DNA, 19 bp, Homo sapiens
  siRNA target sequence for ZNF266 (NM_006631.2,1649-1667).
gcaacgttctgtatttagt

SEQ ID NO: 44877 - DNA, 19 bp, Homo sapiens
  siRNA target sequence for ZNF266 (NM_006631.2,1757-1775).
gaaatccttcattaatcat

SEQ ID NO: 44878 - DNA, 19 bp, Homo sapiens
  siRNA target sequence for ZNF266 (NM_006631.2,1865-1883).
ccttgctgtgcgtatacaa

SEQ ID NO: 44879 - DNA, 19 bp, Homo sapiens
  siRNA target sequence for ZNF266 (NM_006631.2,1866-1884).
cttgctgtgcgtatacaaa

SEQ ID NO: 44880 - DNA, 19 bp, Homo sapiens
  siRNA target sequence for ZNF266 (NM_006631.2,1870-1888).
ctgtgcgtatacaaactca

SEQ ID NO: 44881 - DNA, 19 bp, Homo sapiens
  siRNA target sequence for ZNF266 (NM_006631.2,2021-2039).
caggtcttgtcaacttact

SEQ ID NO: 44882 - DNA, 19 bp, Homo sapiens
  siRNA target sequence for ZNF266 (NM_006631.2,2023-2041).
ggtcttgtcaacttactca

SEQ ID NO: 44883 - DNA, 19 bp, Homo sapiens
  siRNA target sequence for ZNF266 (NM_006631.2,2117-2135).
cttaagtcaacatatgaaa

SEQ ID NO: 44884 - DNA, 19 bp, Homo sapiens
  siRNA target sequence for ZNF266 (NM_006631.2,2288-2306).
cagtgatcactttcgaatt

SEQ ID NO: 44885 - DNA, 19 bp, Homo sapiens
  siRNA target sequence for ZNF266 (NM_006631.2,2443-2461).
gatcctctcgccttagtga

SEQ ID NO: 44886 - DNA, 19 bp, Homo sapiens
  siRNA target sequence for ZNF266 (NM_006631.2,2447-2465).
ctctcgccttagtgaacat

SEQ ID NO: 44887 - DNA, 19 bp, Homo sapiens
  siRNA target sequence for ZNF266 (NM_006631.2,2608-2626).
cgcattcctccagtcttaa

SEQ ID NO: 44888 - DNA, 19 bp, Homo sapiens
  siRNA target sequence for ZNF266 (NM_006631.2,2610-2628).
cattcctccagtcttaata

SEQ ID NO: 44889 - DNA, 19 bp, Homo sapiens
  siRNA target sequence for ZNF266 (NM_006631.2,2642-2660).
ccacagcgccaaaaaacca

SEQ ID NO: 44890 - DNA, 19 bp, Homo sapiens
  siRNA target sequence for ZNF266 (NM_006631.2,2643-2661).
cacagcgccaaaaaaccat

SEQ ID NO: 44891 - DNA, 19 bp, Homo sapiens
  siRNA target sequence for ZNF266 (NM_006631.2,2701-2719).
cgtgtgttaaccttcacat

SEQ ID NO: 44892 - DNA, 19 bp, Homo sapiens
  siRNA target sequence for ZNF266 (NM_006631.2,2774-2792).
cagttactccaattcgttt

SEQ ID NO: 44893 - DNA, 19 bp, Homo sapiens
  siRNA target sequence for ZNF267 (NM_003414.3,403-421).
cacagaagcttcattccaa

SEQ ID NO: 44894 - DNA, 19 bp, Homo sapiens
  siRNA target sequence for ZNF267 (NM_003414.3,504-522).
ggcacaatggatgttatga

SEQ ID NO: 44895 - DNA, 19 bp, Homo sapiens
  siRNA target sequence for ZNF267 (NM_003414.3,574-592).
gtttcaccagcaaatactt

SEQ ID NO: 44896 - DNA, 19 bp, Homo sapiens
  siRNA target sequence for ZNF267 (NM_003414.3,634-652).
ggtctttactcattcatca

SEQ ID NO: 44897 - DNA, 19 bp, Homo sapiens
  siRNA target sequence for ZNF267 (NM_003414.3,635-653).
gtctttactcattcatcat

SEQ ID NO: 44898 - DNA, 19 bp, Homo sapiens
  siRNA target sequence for ZNF267 (NM_003414.3,726-744).
ggcaggtctctactctaaa

SEQ ID NO: 44899 - DNA, 19 bp, Homo sapiens
  siRNA target sequence for ZNF267 (NM_003414.3,731-749).
gtctctactctaaatagtt

SEQ ID NO: 44900 - DNA, 19 bp, Homo sapiens
  siRNA target sequence for ZNF267 (NM_003414.3,747-765).
gttaccgaaatgtttttat

SEQ ID NO: 44901 - DNA, 19 bp, Homo sapiens
  siRNA target sequence for ZNF267 (NM_003414.3,751-769).
ccgaaatgtttttattgga

SEQ ID NO: 44902 - DNA, 19 bp, Homo sapiens
  siRNA target sequence for ZNF267 (NM_003414.3,986-1004).
catcagaccatccatatca

SEQ ID NO: 44903 - DNA, 19 bp, Homo sapiens
  siRNA target sequence for ZNF267 (NM_003414.3,1005-1023).
gagaaaactcatatagcta

SEQ ID NO: 44904 - DNA, 19 bp, Homo sapiens
  siRNA target sequence for ZNF267 (NM_003414.3,1007-1025).
gaaaactcatatagctata

SEQ ID NO: 44905 - DNA, 19 bp, Homo sapiens
  siRNA target sequence for ZNF267 (NM_003414.3,1040-1058).
gatcttagtcagtcatcaa

SEQ ID NO: 44906 - DNA, 19 bp, Homo sapiens
  siRNA target sequence for ZNF267 (NM_003414.3,1113-1131).
gtggggatagcttaaacca

SEQ ID NO: 44907 - DNA, 19 bp, Homo sapiens
  siRNA target sequence for ZNF267 (NM_003414.3,1115-1133).
ggggatagcttaaaccata

SEQ ID NO: 44908 - DNA, 19 bp, Homo sapiens
  siRNA target sequence for ZNF267 (NM_003414.3,1118-1136).
gatagcttaaaccatagtt

SEQ ID NO: 44909 - DNA, 19 bp, Homo sapiens
  siRNA target sequence for ZNF267 (NM_003414.3,1199-1217).
ggcaaggtctttaacctta

SEQ ID NO: 44910 - DNA, 19 bp, Homo sapiens
  siRNA target sequence for ZNF267 (NM_003414.3,1200-1218).
gcaaggtctttaaccttaa

SEQ ID NO: 44911 - DNA, 19 bp, Homo sapiens
  siRNA target sequence for ZNF267 (NM_003414.3,1205-1223).
gtctttaaccttaactgta

SEQ ID NO: 44912 - DNA, 19 bp, Homo sapiens
  siRNA target sequence for ZNF267 (NM_003414.3,1380-1398).
cctttcgctgtagttcata

SEQ ID NO: 44913 - DNA, 19 bp, Homo sapiens
  siRNA target sequence for ZNF267 (NM_003414.3,1548-1566).
cttatgctcgttcttcaaa

SEQ ID NO: 44914 - DNA, 19 bp, Homo sapiens
  siRNA target sequence for ZNF267 (NM_003414.3,1631-1649).
gtctttagccgtagttctt

SEQ ID NO: 44915 - DNA, 19 bp, Homo sapiens
  siRNA target sequence for ZNF267 (NM_003414.3,1703-1721).
gtatgtgctaaacctttta

SEQ ID NO: 44916 - DNA, 19 bp, Homo sapiens
  siRNA target sequence for ZNF267 (NM_003414.3,1806-1824).
cttatagttcacaccttat

SEQ ID NO: 44917 - DNA, 19 bp, Homo sapiens
  siRNA target sequence for ZNF271 (NM_006629.3,949-967).
ccctatccctgtgatcaat

SEQ ID NO: 44918 - DNA, 19 bp, Homo sapiens
  siRNA target sequence for ZNF271 (NM_006629.3,951-969).
ctatccctgtgatcaatgt

SEQ ID NO: 44919 - DNA, 19 bp, Homo sapiens
  siRNA target sequence for ZNF271 (NM_006629.3,977-995).
ccttcagtaggctttcaga

SEQ ID NO: 44920 - DNA, 19 bp, Homo sapiens
  siRNA target sequence for ZNF271 (NM_006629.3,983-1001).
gtaggctttcagatcttat

SEQ ID NO: 44921 - DNA, 19 bp, Homo sapiens
  siRNA target sequence for ZNF271 (NM_006629.3,1062-1080).
gtttagtcgaagatgagat

SEQ ID NO: 44922 - DNA, 19 bp, Homo sapiens
  siRNA target sequence for ZNF271 (NM_006629.3,1155-1173).
gagctccaaccttattctt

SEQ ID NO: 44923 - DNA, 19 bp, Homo sapiens
  siRNA target sequence for ZNF271 (NM_006629.3,1207-1225).
gcatgtagtgattgtacta

SEQ ID NO: 44924 - DNA, 19 bp, Homo sapiens
  siRNA target sequence for ZNF271 (NM_006629.3,1208-1226).
catgtagtgattgtactaa

SEQ ID NO: 44925 - DNA, 19 bp, Homo sapiens
  siRNA target sequence for ZNF271 (NM_006629.3,1216-1234).
gattgtactaaaagcttta

SEQ ID NO: 44926 - DNA, 19 bp, Homo sapiens
  siRNA target sequence for ZNF271 (NM_006629.3,1235-1253).
gtcgccgttcagatcttgt

SEQ ID NO: 44927 - DNA, 19 bp, Homo sapiens
  siRNA target sequence for ZNF271 (NM_006629.3,1237-1255).
cgccgttcagatcttgtta

SEQ ID NO: 44928 - DNA, 19 bp, Homo sapiens
  siRNA target sequence for ZNF271 (NM_006629.3,1238-1256).
gccgttcagatcttgttaa

SEQ ID NO: 44929 - DNA, 19 bp, Homo sapiens
  siRNA target sequence for ZNF271 (NM_006629.3,1368-1386).
gccttatcattgcaatagt

SEQ ID NO: 44930 - DNA, 19 bp, Homo sapiens
  siRNA target sequence for ZNF271 (NM_006629.3,1656-1674).
gtcggcgttctgatctcat

SEQ ID NO: 44931 - DNA, 19 bp, Homo sapiens
  siRNA target sequence for ZNF271 (NM_006629.3,1658-1676).
cggcgttctgatctcatta

SEQ ID NO: 44932 - DNA, 19 bp, Homo sapiens
  siRNA target sequence for ZNF271 (NM_006629.3,1659-1677).
ggcgttctgatctcattaa

SEQ ID NO: 44933 - DNA, 19 bp, Homo sapiens
  siRNA target sequence for ZNF271 (NM_006629.3,1662-1680).
gttctgatctcattaacca

SEQ ID NO: 44934 - DNA, 19 bp, Homo sapiens
  siRNA target sequence for ZNF271 (NM_006629.3,1735-1753).
cttcagcacatgtactgat

SEQ ID NO: 44935 - DNA, 19 bp, Homo sapiens
  siRNA target sequence for ZNF271 (NM_006629.3,1738-1756).
cagcacatgtactgatctt

SEQ ID NO: 44936 - DNA, 19 bp, Homo sapiens
  siRNA target sequence for ZNF271 (NM_006629.3,1740-1758).
gcacatgtactgatcttat

SEQ ID NO: 44937 - DNA, 19 bp, Homo sapiens
  siRNA target sequence for ZNF271 (NM_006629.3,1741-1759).
cacatgtactgatcttatt

SEQ ID NO: 44938 - DNA, 19 bp, Homo sapiens
  siRNA target sequence for ZNF271 (NM_006629.3,1743-1761).
catgtactgatcttattga

SEQ ID NO: 44939 - DNA, 19 bp, Homo sapiens
  siRNA target sequence for ZNF271 (NM_006629.3,1746-1764).
gtactgatcttattgaaca

SEQ ID NO: 44940 - DNA, 19 bp, Homo sapiens
  siRNA target sequence for ZNF271 (NM_006629.3,1805-1823).
cagtgcagcagaagttgta

SEQ ID NO: 44941 - DNA, 19 bp, Homo sapiens
  siRNA target sequence for ZNF271 (NM_006629.3,1825-1843).
ccaactctctgaacttact

SEQ ID NO: 44942 - DNA, 19 bp, Homo sapiens
  siRNA target sequence for ZNF271 (NM_006629.3,1907-1925).
gtgtgtacaccaactctat

SEQ ID NO: 44943 - DNA, 19 bp, Homo sapiens
  siRNA target sequence for ZNF278 (NM_014323.2,904-922).
cgggggtccggctgatgta

SEQ ID NO: 44944 - DNA, 19 bp, Homo sapiens
  siRNA target sequence for ZNF278 (NM_014323.2,984-1002).
ctatcagctccaaggtatt

SEQ ID NO: 44945 - DNA, 19 bp, Homo sapiens
  siRNA target sequence for ZNF278 (NM_014323.2,1116-1134).
gccaggaagtcatcaaaca

SEQ ID NO: 44946 - DNA, 19 bp, Homo sapiens
  siRNA target sequence for ZNF278 (NM_014323.2,1534-1552).
ccttccatgcggtctatgt

SEQ ID NO: 44947 - DNA, 19 bp, Homo sapiens
  siRNA target sequence for ZNF278 (NM_014323.2,1747-1765).
gatcttccgtgatgtgtat

SEQ ID NO: 44948 - DNA, 19 bp, Homo sapiens
  siRNA target sequence for ZNF278 (NM_014323.2,1753-1771).
ccgtgatgtgtatcatctt

SEQ ID NO: 44949 - DNA, 19 bp, Homo sapiens
  siRNA target sequence for ZNF278 (NM_014323.2,1826-1844).
gggttgcggttcaagagaa

SEQ ID NO: 44950 - DNA, 19 bp, Homo sapiens
  siRNA target sequence for ZNF278 (NM_014323.2,1827-1845).
ggttgcggttcaagagaaa

SEQ ID NO: 44951 - DNA, 19 bp, Homo sapiens
  siRNA target sequence for ZNF278 (NM_014323.2,1940-1958).
cacttgaacggacatatca

SEQ ID NO: 44952 - DNA, 19 bp, Homo sapiens
  siRNA target sequence for ZNF278 (NM_014323.2,2188-2206).
cttaaaggtccatgttaaa

SEQ ID NO: 44953 - DNA, 19 bp, Homo sapiens
  siRNA target sequence for ZNF278 (NM_014323.2,2473-2491).
gtacccatgccctgaatgt

SEQ ID NO: 44954 - DNA, 19 bp, Homo sapiens
  siRNA target sequence for ZNF278 (NM_014323.2,2504-2522).
cgctctaagtcctacttga

SEQ ID NO: 44955 - DNA, 19 bp, Homo sapiens
  siRNA target sequence for ZNF278 (NM_014323.2,2630-2648).
gagtcctttgggtttcaga

SEQ ID NO: 44956 - DNA, 19 bp, Homo sapiens
  siRNA target sequence for ZNF278 (NM_014323.2,2634-2652).
cctttgggtttcagattgt

SEQ ID NO: 44957 - DNA, 19 bp, Homo sapiens
  siRNA target sequence for ZNF278 (NM_014323.2,2658-2676).
cggcatttgcgtcatcttt

SEQ ID NO: 44958 - DNA, 19 bp, Homo sapiens
  siRNA target sequence for ZNF278 (NM_014323.2,2659-2677).
ggcatttgcgtcatcttta

SEQ ID NO: 44959 - DNA, 19 bp, Homo sapiens
  siRNA target sequence for ZNF282 (NM_003575.1,284-302).
gcccatgcaggctcaagaa

SEQ ID NO: 44960 - DNA, 19 bp, Homo sapiens
  siRNA target sequence for ZNF282 (NM_003575.1,285-303).
cccatgcaggctcaagaat

SEQ ID NO: 44961 - DNA, 19 bp, Homo sapiens
  siRNA target sequence for ZNF282 (NM_003575.1,932-950).
gagagaaatcccaatggat

SEQ ID NO: 44962 - DNA, 19 bp, Homo sapiens
  siRNA target sequence for ZNF282 (NM_003575.1,1057-1075).
ccatccctacggaatccat

SEQ ID NO: 44963 - DNA, 19 bp, Homo sapiens
  siRNA target sequence for ZNF282 (NM_003575.1,1058-1076).
catccctacggaatccatt

SEQ ID NO: 44964 - DNA, 19 bp, Homo sapiens
  siRNA target sequence for ZNF282 (NM_003575.1,1103-1121).
cctcttgtcccggattaaa

SEQ ID NO: 44965 - DNA, 19 bp, Homo sapiens
  siRNA target sequence for ZNF282 (NM_003575.1,1258-1276).
ggggaccacgcgactcaat

SEQ ID NO: 44966 - DNA, 19 bp, Homo sapiens
  siRNA target sequence for ZNF282 (NM_003575.1,1277-1295).
ggacggagagcttggatta

SEQ ID NO: 44967 - DNA, 19 bp, Homo sapiens
  siRNA target sequence for ZNF282 (NM_003575.1,1919-1937).
gggcgagcggcctttccaa

SEQ ID NO: 44968 - DNA, 19 bp, Homo sapiens
  siRNA target sequence for ZNF286 (NM_020652.1,628-646).
gcccccaaaagcagctatt

SEQ ID NO: 44969 - DNA, 19 bp, Homo sapiens
  siRNA target sequence for ZNF286 (NM_020652.1,630-648).
ccccaaaagcagctattca

SEQ ID NO: 44970 - DNA, 19 bp, Homo sapiens
  siRNA target sequence for ZNF286 (NM_020652.1,716-734).
gcaaagttgcaataataga

SEQ ID NO: 44971 - DNA, 19 bp, Homo sapiens
  siRNA target sequence for ZNF286 (NM_020652.1,737-755).
gactgacacggaatagtgt

SEQ ID NO: 44972 - DNA, 19 bp, Homo sapiens
  siRNA target sequence for ZNF286 (NM_020652.1,741-759).
gacacggaatagtgtctat

SEQ ID NO: 44973 - DNA, 19 bp, Homo sapiens
  siRNA target sequence for ZNF286 (NM_020652.1,743-761).
cacggaatagtgtctatga

SEQ ID NO: 44974 - DNA, 19 bp, Homo sapiens
  siRNA target sequence for ZNF286 (NM_020652.1,745-763).
cggaatagtgtctatgact

SEQ ID NO: 44975 - DNA, 19 bp, Homo sapiens
  siRNA target sequence for ZNF286 (NM_020652.1,752-770).
gtgtctatgactctaactt

SEQ ID NO: 44976 - DNA, 19 bp, Homo sapiens
  siRNA target sequence for ZNF286 (NM_020652.1,866-884).
ctgaggaaacagaccataa

SEQ ID NO: 44977 - DNA, 19 bp, Homo sapiens
  siRNA target sequence for ZNF286 (NM_020652.1,870-888).
ggaaacagaccataagcat

SEQ ID NO: 44978 - DNA, 19 bp, Homo sapiens
  siRNA target sequence for ZNF286 (NM_020652.1,877-895).
gaccataagcatgatgtat

SEQ ID NO: 44979 - DNA, 19 bp, Homo sapiens
  siRNA target sequence for ZNF286 (NM_020652.1,952-970).
ggatcttatgccttccata

SEQ ID NO: 44980 - DNA, 19 bp, Homo sapiens
  siRNA target sequence for ZNF286 (NM_020652.1,956-974).
cttatgccttccatacact

SEQ ID NO: 44981 - DNA, 19 bp, Homo sapiens
  siRNA target sequence for ZNF286 (NM_020652.1,1063-1081).
gaactcttcacctaccatt

SEQ ID NO: 44982 - DNA, 19 bp, Homo sapiens
  siRNA target sequence for ZNF286 (NM_020652.1,1077-1095).
ccattcagtgcttattcga

SEQ ID NO: 44983 - DNA, 19 bp, Homo sapiens
  siRNA target sequence for ZNF286 (NM_020652.1,1158-1176).
ccacagagctaatttaact

SEQ ID NO: 44984 - DNA, 19 bp, Homo sapiens
  siRNA target sequence for ZNF286 (NM_020652.1,1159-1177).
cacagagctaatttaacta

SEQ ID NO: 44985 - DNA, 19 bp, Homo sapiens
  siRNA target sequence for ZNF286 (NM_020652.1,1161-1179).
cagagctaatttaactaaa

SEQ ID NO: 44986 - DNA, 19 bp, Homo sapiens
  siRNA target sequence for ZNF286 (NM_020652.1,1163-1181).
gagctaatttaactaaaca

SEQ ID NO: 44987 - DNA, 19 bp, Homo sapiens
  siRNA target sequence for ZNF286 (NM_020652.1,1185-1203).
gagaactcatactagaatt

SEQ ID NO: 44988 - DNA, 19 bp, Homo sapiens
  siRNA target sequence for ZNF286 (NM_020652.1,1309-1327).
gggaaaggttttaatcgaa

SEQ ID NO: 44989 - DNA, 19 bp, Homo sapiens
  siRNA target sequence for ZNF286 (NM_020652.1,1656-1674).
cagccggagctccaatttt

SEQ ID NO: 44990 - DNA, 19 bp, Homo sapiens
  siRNA target sequence for ZNF286 (NM_020652.1,1659-1677).
ccggagctccaattttgct

SEQ ID NO: 44991 - DNA, 19 bp, Homo sapiens
  siRNA target sequence for ZNF286 (NM_020652.1,1660-1678).
cggagctccaattttgcta

SEQ ID NO: 44992 - DNA, 19 bp, Homo sapiens
  siRNA target sequence for ZNF286 (NM_020652.1,1664-1682).
gctccaattttgctaaaca

SEQ ID NO: 44993 - DNA, 19 bp, Homo sapiens
  siRNA target sequence for ZNF286 (NM_020652.1,1667-1685).
ccaattttgctaaacatca

SEQ ID NO: 44994 - DNA, 19 bp, Homo sapiens
  siRNA target sequence for ZNF286 (NM_020652.1,1821-1839).
ctttaagtgcagttcatct

SEQ ID NO: 44995 - DNA, 19 bp, Homo sapiens
  siRNA target sequence for ZNF288 (NM_015642.1,508-526).
gcatcaaccttcacaactt

SEQ ID NO: 44996 - DNA, 19 bp, Homo sapiens
  siRNA target sequence for ZNF288 (NM_015642.1,516-534).
cttcacaacttcagcaatt

SEQ ID NO: 44997 - DNA, 19 bp, Homo sapiens
  siRNA target sequence for ZNF288 (NM_015642.1,1034-1052).
cagcggcgagcgctctttt

SEQ ID NO: 44998 - DNA, 19 bp, Homo sapiens
  siRNA target sequence for ZNF288 (NM_015642.1,1036-1054).
gcggcgagcgctcttttta

SEQ ID NO: 44999 - DNA, 19 bp, Homo sapiens
  siRNA target sequence for ZNF288 (NM_015642.1,1038-1056).
ggcgagcgctctttttaca

SEQ ID NO: 45000 - DNA, 19 bp, Homo sapiens
  siRNA target sequence for ZNF288 (NM_015642.1,1535-1553).
gacaaaccagctagaaaca

SEQ ID NO: 45001 - DNA, 19 bp, Homo sapiens
  siRNA target sequence for ZNF288 (NM_015642.1,1562-1580).
ctctccggagagaagcaat

SEQ ID NO: 45002 - DNA, 19 bp, Homo sapiens
  siRNA target sequence for ZNF288 (NM_015642.1,1592-1610).
ggacagcactgttatcact

SEQ ID NO: 45003 - DNA, 19 bp, Homo sapiens
  siRNA target sequence for ZNF288 (NM_015642.1,1902-1920).
cccggtctgtcgaccttta

SEQ ID NO: 45004 - DNA, 19 bp, Homo sapiens
  siRNA target sequence for ZNF288 (NM_015642.1,1904-1922).
cggtctgtcgacctttact

SEQ ID NO: 45005 - DNA, 19 bp, Homo sapiens
  siRNA target sequence for ZNF288 (NM_015642.1,1976-1994).
cagtgggcaaggcgaaaaa

SEQ ID NO: 45006 - DNA, 19 bp, Homo sapiens
  siRNA target sequence for ZNF288 (NM_015642.1,1987-2005).
gcgaaaaaaagccttatga

SEQ ID NO: 45007 - DNA, 19 bp, Homo sapiens
  siRNA target sequence for ZNF288 (NM_015642.1,2104-2122).
ggcgctccttctccttaaa

SEQ ID NO: 45008 - DNA, 19 bp, Homo sapiens
  siRNA target sequence for ZNF288 (NM_015642.1,2108-2126).
ctccttctccttaaaggat

SEQ ID NO: 45009 - DNA, 19 bp, Homo sapiens
  siRNA target sequence for ZNF288 (NM_015642.1,2116-2134).
ccttaaaggattaccttat

SEQ ID NO: 45010 - DNA, 19 bp, Homo sapiens
  siRNA target sequence for ZNF288 (NM_015642.1,2164-2182).
gggcataccagtgtagtat

SEQ ID NO: 45011 - DNA, 19 bp, Homo sapiens
  siRNA target sequence for ZNF288 (NM_015642.1,2422-2440).
ccgtctgcccagcaaagtt

SEQ ID NO: 45012 - DNA, 19 bp, Homo sapiens
  siRNA target sequence for ZNF288 (NM_015642.1,2423-2441).
cgtctgcccagcaaagttt

SEQ ID NO: 45013 - DNA, 19 bp, Homo sapiens
  siRNA target sequence for ZNF289 (NM_032389.2,38-56).
cgaacaagaccgaaatcca

SEQ ID NO: 45014 - DNA, 19 bp, Homo sapiens
  siRNA target sequence for ZNF289 (NM_032389.2,137-155).
gcatcacgtacggtgtttt

SEQ ID NO: 45015 - DNA, 19 bp, Homo sapiens
  siRNA target sequence for ZNF289 (NM_032389.2,151-169).
gttttcttgtgcattgact

SEQ ID NO: 45016 - DNA, 19 bp, Homo sapiens
  siRNA target sequence for ZNF289 (NM_032389.2,280-298).
gccaatgcgacggcttttt

SEQ ID NO: 45017 - DNA, 19 bp, Homo sapiens
  siRNA target sequence for ZNF289 (NM_032389.2,281-299).
ccaatgcgacggctttttt

SEQ ID NO: 45018 - DNA, 19 bp, Homo sapiens
  siRNA target sequence for ZNF289 (NM_032389.2,282-300).
caatgcgacggcttttttt

SEQ ID NO: 45019 - DNA, 19 bp, Homo sapiens
  siRNA target sequence for ZNF289 (NM_032389.2,328-346).
gccaacaccaaatataata

SEQ ID NO: 45020 - DNA, 19 bp, Homo sapiens
  siRNA target sequence for ZNF289 (NM_032389.2,347-365).
gccgagctgcccagatgta

SEQ ID NO: 45021 - DNA, 19 bp, Homo sapiens
  siRNA target sequence for ZNF289 (NM_032389.2,416-434).
ctgatctttggatagacaa

SEQ ID NO: 45022 - DNA, 19 bp, Homo sapiens
  siRNA target sequence for ZNF289 (NM_032389.2,421-439).
ctttggatagacaacatga

SEQ ID NO: 45023 - DNA, 19 bp, Homo sapiens
  siRNA target sequence for ZNF289 (NM_032389.2,438-456).
gagtagtgccgttcctaat

SEQ ID NO: 45024 - DNA, 19 bp, Homo sapiens
  siRNA target sequence for ZNF289 (NM_032389.2,440-458).
gtagtgccgttcctaatca

SEQ ID NO: 45025 - DNA, 19 bp, Homo sapiens
  siRNA target sequence for ZNF289 (NM_032389.2,867-885).
ccagattgatcgtaagaaa

SEQ ID NO: 45026 - DNA, 19 bp, Homo sapiens
  siRNA target sequence for ZNF289 (NM_032389.2,1040-1058).
gctcgcagctggacttgtt

SEQ ID NO: 45027 - DNA, 19 bp, Homo sapiens
  siRNA target sequence for ZNF289 (NM_032389.2,1041-1059).
ctcgcagctggacttgttt

SEQ ID NO: 45028 - DNA, 19 bp, Homo sapiens
  siRNA target sequence for ZNF289 (NM_032389.2,1079-1097).
cctctggacccccaaagta

SEQ ID NO: 45029 - DNA, 19 bp, Homo sapiens
  siRNA target sequence for ZNF289 (NM_032389.2,1133-1151).
gctcccgctgggatacaga

SEQ ID NO: 45030 - DNA, 19 bp, Homo sapiens
  siRNA target sequence for ZNF289 (NM_032389.2,1134-1152).
ctcccgctgggatacagat

SEQ ID NO: 45031 - DNA, 19 bp, Homo sapiens
  siRNA target sequence for ZNF289 (NM_032389.2,1208-1226).
gcatccggcctatttcaga

SEQ ID NO: 45032 - DNA, 19 bp, Homo sapiens
  siRNA target sequence for ZNF289 (NM_032389.2,1209-1227).
catccggcctatttcagaa

SEQ ID NO: 45033 - DNA, 19 bp, Homo sapiens
  siRNA target sequence for ZNF289 (NM_032389.2,1280-1298).
gtgaggcgcgtcagaaatt

SEQ ID NO: 45034 - DNA, 19 bp, Homo sapiens
  siRNA target sequence for ZNF289 (NM_032389.2,1303-1321).
ggagccaaagccatctcat

SEQ ID NO: 45035 - DNA, 19 bp, Homo sapiens
  siRNA target sequence for ZNF289 (NM_032389.2,1313-1331).
ccatctcatctgacatgtt

SEQ ID NO: 45036 - DNA, 19 bp, Homo sapiens
  siRNA target sequence for ZNF289 (NM_032389.2,1317-1335).
ctcatctgacatgttcttt

SEQ ID NO: 45037 - DNA, 19 bp, Homo sapiens
  siRNA target sequence for ZNF289 (NM_032389.2,1441-1459).
cacggagcaggaagtgtat

SEQ ID NO: 45038 - DNA, 19 bp, Homo sapiens
  siRNA target sequence for ZNF289 (NM_032389.2,1443-1461).
cggagcaggaagtgtatct

SEQ ID NO: 45039 - DNA, 19 bp, Homo sapiens
  siRNA target sequence for ZNF297 (NM_005453.3,294-312).
ggccagctctgcgatgtat

SEQ ID NO: 45040 - DNA, 19 bp, Homo sapiens
  siRNA target sequence for ZNF297 (NM_005453.3,296-314).
ccagctctgcgatgtatct

SEQ ID NO: 45041 - DNA, 19 bp, Homo sapiens
  siRNA target sequence for ZNF297 (NM_005453.3,297-315).
cagctctgcgatgtatcta

SEQ ID NO: 45042 - DNA, 19 bp, Homo sapiens
  siRNA target sequence for ZNF297 (NM_005453.3,300-318).
ctctgcgatgtatctatca

SEQ ID NO: 45043 - DNA, 19 bp, Homo sapiens
  siRNA target sequence for ZNF297 (NM_005453.3,302-320).
ctgcgatgtatctatcaga

SEQ ID NO: 45044 - DNA, 19 bp, Homo sapiens
  siRNA target sequence for ZNF297 (NM_005453.3,458-476).
cctagcctccgcttacact

SEQ ID NO: 45045 - DNA, 19 bp, Homo sapiens
  siRNA target sequence for ZNF297 (NM_005453.3,771-789).
gagtccactgatttctcat

SEQ ID NO: 45046 - DNA, 19 bp, Homo sapiens
  siRNA target sequence for ZNF297 (NM_005453.3,1031-1049).
cgtgaagcgaggtggtaat

SEQ ID NO: 45047 - DNA, 19 bp, Homo sapiens
  siRNA target sequence for ZNF297 (NM_005453.3,1191-1209).
gaggctaccctcagcataa

SEQ ID NO: 45048 - DNA, 19 bp, Homo sapiens
  siRNA target sequence for ZNF297 (NM_005453.3,1193-1211).
ggctaccctcagcataagt

SEQ ID NO: 45049 - DNA, 19 bp, Homo sapiens
  siRNA target sequence for ZNF297 (NM_005453.3,1195-1213).
ctaccctcagcataagtga

SEQ ID NO: 45050 - DNA, 19 bp, Homo sapiens
  siRNA target sequence for ZNF297 (NM_005453.3,1567-1585).
gcagtggggacgggaataa

SEQ ID NO: 45051 - DNA, 19 bp, Homo sapiens
  siRNA target sequence for ZNF297 (NM_005453.3,1572-1590).
ggggacgggaataagatct

SEQ ID NO: 45052 - DNA, 19 bp, Homo sapiens
  siRNA target sequence for ZNF297 (NM_005453.3,1573-1591).
gggacgggaataagatctt

SEQ ID NO: 45053 - DNA, 19 bp, Homo sapiens
  siRNA target sequence for ZNF297 (NM_005453.3,1574-1592).
ggacgggaataagatcttt

SEQ ID NO: 45054 - DNA, 19 bp, Homo sapiens
  siRNA target sequence for ZNF297 (NM_005453.3,1633-1651).
gggaccggcacgtgaacat

SEQ ID NO: 45055 - DNA, 19 bp, Homo sapiens
  siRNA target sequence for ZNF297 (NM_005453.3,1678-1696).
gccccgtgtgcaacaaaaa

SEQ ID NO: 45056 - DNA, 19 bp, Homo sapiens
  siRNA target sequence for ZNF297 (NM_005453.3,1680-1698).
cccgtgtgcaacaaaaagt

SEQ ID NO: 45057 - DNA, 19 bp, Homo sapiens
  siRNA target sequence for ZNF297 (NM_005453.3,1681-1699).
ccgtgtgcaacaaaaagtt

SEQ ID NO: 45058 - DNA, 19 bp, Homo sapiens
  siRNA target sequence for ZNF297 (NM_005453.3,1687-1705).
gcaacaaaaagttcaagat

SEQ ID NO: 45059 - DNA, 19 bp, Homo sapiens
  siRNA target sequence for ZNF297 (NM_005453.3,1764-1782).
ggagtctgcgccaagaagt

SEQ ID NO: 45060 - DNA, 19 bp, Homo sapiens
  siRNA target sequence for ZNF297 (NM_005453.3,1765-1783).
gagtctgcgccaagaagtt

SEQ ID NO: 45061 - DNA, 19 bp, Homo sapiens
  siRNA target sequence for ZNF297B (NM_014007.1,1210-1228).
gcgccagcaaggacaatta

SEQ ID NO: 45062 - DNA, 19 bp, Homo sapiens
  siRNA target sequence for ZNF297B (NM_014007.1,1211-1229).
cgccagcaaggacaattat

SEQ ID NO: 45063 - DNA, 19 bp, Homo sapiens
  siRNA target sequence for ZNF297B (NM_014007.1,1230-1248).
gtgacgtctccattgttgt

SEQ ID NO: 45064 - DNA, 19 bp, Homo sapiens
  siRNA target sequence for ZNF297B (NM_014007.1,1258-1276).
cattttccgggcacacaaa

SEQ ID NO: 45065 - DNA, 19 bp, Homo sapiens
  siRNA target sequence for ZNF297B (NM_014007.1,1289-1307).
gccagttcaccctactttt

SEQ ID NO: 45066 - DNA, 19 bp, Homo sapiens
  siRNA target sequence for ZNF297B (NM_014007.1,1291-1309).
cagttcaccctacttttgt

SEQ ID NO: 45067 - DNA, 19 bp, Homo sapiens
  siRNA target sequence for ZNF297B (NM_014007.1,1293-1311).
gttcaccctacttttgtga

SEQ ID NO: 45068 - DNA, 19 bp, Homo sapiens
  siRNA target sequence for ZNF297B (NM_014007.1,1310-1328).
gaccaggtactcctgaaaa

SEQ ID NO: 45069 - DNA, 19 bp, Homo sapiens
  siRNA target sequence for ZNF297B (NM_014007.1,1357-1375).
gatgaacccaagagtgttt

SEQ ID NO: 45070 - DNA, 19 bp, Homo sapiens
  siRNA target sequence for ZNF297B (NM_014007.1,1417-1435).
gcccgctccagaaattgtt

SEQ ID NO: 45071 - DNA, 19 bp, Homo sapiens
  siRNA target sequence for ZNF297B (NM_014007.1,1420-1438).
cgctccagaaattgttagt

SEQ ID NO: 45072 - DNA, 19 bp, Homo sapiens
  siRNA target sequence for ZNF297B (NM_014007.1,1427-1445).
gaaattgttagttacttga

SEQ ID NO: 45073 - DNA, 19 bp, Homo sapiens
  siRNA target sequence for ZNF297B (NM_014007.1,1519-1537).
cctttgtcagaagctaaat

SEQ ID NO: 45074 - DNA, 19 bp, Homo sapiens
  siRNA target sequence for ZNF297B (NM_014007.1,1605-1623).
gctctgggggtcatactga

SEQ ID NO: 45075 - DNA, 19 bp, Homo sapiens
  siRNA target sequence for ZNF297B (NM_014007.1,1606-1624).
ctctgggggtcatactgat

SEQ ID NO: 45076 - DNA, 19 bp, Homo sapiens
  siRNA target sequence for ZNF297B (NM_014007.1,1608-1626).
ctgggggtcatactgattt

SEQ ID NO: 45077 - DNA, 19 bp, Homo sapiens
  siRNA target sequence for ZNF297B (NM_014007.1,1837-1855).
cagcatcatggctcacaaa

SEQ ID NO: 45078 - DNA, 19 bp, Homo sapiens
  siRNA target sequence for ZNF297B (NM_014007.1,2047-2065).
ggctgatgaaagcaattat

SEQ ID NO: 45079 - DNA, 19 bp, Homo sapiens
  siRNA target sequence for ZNF297B (NM_014007.1,2158-2176).
cctcgcagcaggttacagt

SEQ ID NO: 45080 - DNA, 19 bp, Homo sapiens
  siRNA target sequence for ZNF297B (NM_014007.1,2169-2187).
gttacagtgagaatattga

SEQ ID NO: 45081 - DNA, 19 bp, Homo sapiens
  siRNA target sequence for ZNF297B (NM_014007.1,2337-2355).
gtggggtctgcggtaagaa

SEQ ID NO: 45082 - DNA, 19 bp, Homo sapiens
  siRNA target sequence for ZNF297B (NM_014007.1,2340-2358).
gggtctgcggtaagaaatt

SEQ ID NO: 45083 - DNA, 19 bp, Homo sapiens
  siRNA target sequence for ZNF297B (NM_014007.1,2342-2360).
gtctgcggtaagaaattca

SEQ ID NO: 45084 - DNA, 19 bp, Homo sapiens
  siRNA target sequence for ZNF297B (NM_014007.1,2344-2362).
ctgcggtaagaaattcaaa

SEQ ID NO: 45085 - DNA, 19 bp, Homo sapiens
  siRNA target sequence for ZNF297B (NM_014007.1,2375-2393).
ctcgtgggccacatgaaaa

SEQ ID NO: 45086 - DNA, 19 bp, Homo sapiens
  siRNA target sequence for ZNF297B (NM_014007.1,2377-2395).
cgtgggccacatgaaaatt

SEQ ID NO: 45087 - DNA, 19 bp, Homo sapiens
  siRNA target sequence for ZNF297B (NM_014007.1,2402-2420).
ggcataaagccgtatgagt

SEQ ID NO: 45088 - DNA, 19 bp, Homo sapiens
  siRNA target sequence for ZNF297B (NM_014007.1,2462-2480).
caccggcatgtgacttctt

SEQ ID NO: 45089 - DNA, 19 bp, Homo sapiens
  siRNA target sequence for ZNF297B (NM_014007.1,2465-2483).
cggcatgtgacttcttgta

SEQ ID NO: 45090 - DNA, 19 bp, Homo sapiens
  siRNA target sequence for ZNF297B (NM_014007.1,2467-2485).
gcatgtgacttcttgtact

SEQ ID NO: 45091 - DNA, 19 bp, Homo sapiens
  siRNA target sequence for ZNF297B (NM_014007.1,2468-2486).
catgtgacttcttgtacta

SEQ ID NO: 45092 - DNA, 19 bp, Homo sapiens
  siRNA target sequence for ZNF297B (NM_014007.1,2506-2524).
ggctgagcagaatacaact

SEQ ID NO: 45093 - DNA, 19 bp, Homo sapiens
  siRNA target sequence for ZNF300 (NM_052860.1,494-512).
ggatctatccagatgaata

SEQ ID NO: 45094 - DNA, 19 bp, Homo sapiens
  siRNA target sequence for ZNF300 (NM_052860.1,550-568).
cacaactcccagtcatgta

SEQ ID NO: 45095 - DNA, 19 bp, Homo sapiens
  siRNA target sequence for ZNF300 (NM_052860.1,552-570).
caactcccagtcatgtatt

SEQ ID NO: 45096 - DNA, 19 bp, Homo sapiens
  siRNA target sequence for ZNF300 (NM_052860.1,578-596).
cagtttccttccatcataa

SEQ ID NO: 45097 - DNA, 19 bp, Homo sapiens
  siRNA target sequence for ZNF300 (NM_052860.1,699-717).
cttcaggcaggtcacattt

SEQ ID NO: 45098 - DNA, 19 bp, Homo sapiens
  siRNA target sequence for ZNF300 (NM_052860.1,704-722).
ggcaggtcacatttgttaa

SEQ ID NO: 45099 - DNA, 19 bp, Homo sapiens
  siRNA target sequence for ZNF300 (NM_052860.1,784-802).
gagtgcatagaaacagata

SEQ ID NO: 45100 - DNA, 19 bp, Homo sapiens
  siRNA target sequence for ZNF300 (NM_052860.1,786-804).
gtgcatagaaacagatata

SEQ ID NO: 45101 - DNA, 19 bp, Homo sapiens
  siRNA target sequence for ZNF300 (NM_052860.1,862-880).
gacctaccgagttgttata

SEQ ID NO: 45102 - DNA, 19 bp, Homo sapiens
  siRNA target sequence for ZNF300 (NM_052860.1,865-883).
ctaccgagttgttataaga

SEQ ID NO: 45103 - DNA, 19 bp, Homo sapiens
  siRNA target sequence for ZNF300 (NM_052860.1,936-954).
ccagagtgagcccaattct

SEQ ID NO: 45104 - DNA, 19 bp, Homo sapiens
  siRNA target sequence for ZNF300 (NM_052860.1,939-957).
gagtgagcccaattctaat

SEQ ID NO: 45105 - DNA, 19 bp, Homo sapiens
  siRNA target sequence for ZNF300 (NM_052860.1,972-990).
caatggagtaatacctttt

SEQ ID NO: 45106 - DNA, 19 bp, Homo sapiens
  siRNA target sequence for ZNF300 (NM_052860.1,977-995).
gagtaataccttttgatga

SEQ ID NO: 45107 - DNA, 19 bp, Homo sapiens
  siRNA target sequence for ZNF300 (NM_052860.1,979-997).
gtaataccttttgatgata

SEQ ID NO: 45108 - DNA, 19 bp, Homo sapiens
  siRNA target sequence for ZNF300 (NM_052860.1,985-1003).
ccttttgatgataatcagt

SEQ ID NO: 45109 - DNA, 19 bp, Homo sapiens
  siRNA target sequence for ZNF300 (NM_052860.1,1182-1200).
cttcagtgagaagtttcat

SEQ ID NO: 45110 - DNA, 19 bp, Homo sapiens
  siRNA target sequence for ZNF300 (NM_052860.1,1877-1895).
cgggacaccagcgaattca

SEQ ID NO: 45111 - DNA, 19 bp, Homo sapiens
  siRNA target sequence for ZNF300 (NM_052860.1,2062-2080).
cacacagtggtaaaatcat

SEQ ID NO: 45112 - DNA, 19 bp, Homo sapiens
  siRNA target sequence for ZNF302 (NM_018443.1,520-538).
ccaaccagtaacaatggaa

SEQ ID NO: 45113 - DNA, 19 bp, Homo sapiens
  siRNA target sequence for ZNF302 (NM_018443.1,596-614).
gaatgcgacacatttagaa

SEQ ID NO: 45114 - DNA, 19 bp, Homo sapiens
  siRNA target sequence for ZNF302 (NM_018443.1,1432-1450).
gtttagaaatgcaggaaat

SEQ ID NO: 45115 - DNA, 19 bp, Homo sapiens
  siRNA target sequence for ZNF302 (NM_018675.1,664-682).
gttttctgggtgcttcatt

SEQ ID NO: 45116 - DNA, 19 bp, Homo sapiens
  siRNA target sequence for ZNF302 (NM_018675.1,669-687).
ctgggtgcttcatttctta

SEQ ID NO: 45117 - DNA, 19 bp, Homo sapiens
  siRNA target sequence for ZNF304 (NM_020657.1,434-452).
gtggctacactaggttttt

SEQ ID NO: 45118 - DNA, 19 bp, Homo sapiens
  siRNA target sequence for ZNF304 (NM_020657.1,525-543).
ctgagtcaggtcttttcca

SEQ ID NO: 45119 - DNA, 19 bp, Homo sapiens
  siRNA target sequence for ZNF304 (NM_020657.1,615-633).
cacaccttacacagaaact

SEQ ID NO: 45120 - DNA, 19 bp, Homo sapiens
  siRNA target sequence for ZNF304 (NM_020657.1,617-635).
caccttacacagaaactgt

SEQ ID NO: 45121 - DNA, 19 bp, Homo sapiens
  siRNA target sequence for ZNF304 (NM_020657.1,697-715).
gcaacataatggagagaat

SEQ ID NO: 45122 - DNA, 19 bp, Homo sapiens
  siRNA target sequence for ZNF304 (NM_020657.1,698-716).
caacataatggagagaatt

SEQ ID NO: 45123 - DNA, 19 bp, Homo sapiens
  siRNA target sequence for ZNF304 (NM_020657.1,734-752).
ggaggggcctcatttgtga

SEQ ID NO: 45124 - DNA, 19 bp, Homo sapiens
  siRNA target sequence for ZNF304 (NM_020657.1,735-753).
gaggggcctcatttgtgaa

SEQ ID NO: 45125 - DNA, 19 bp, Homo sapiens
  siRNA target sequence for ZNF304 (NM_020657.1,757-775).
ctgtacagtccacatgtta

SEQ ID NO: 45126 - DNA, 19 bp, Homo sapiens
  siRNA target sequence for ZNF304 (NM_020657.1,769-787).
catgttagggagatccttt

SEQ ID NO: 45127 - DNA, 19 bp, Homo sapiens
  siRNA target sequence for ZNF304 (NM_020657.1,836-854).
cagcaccagaccacttaca

SEQ ID NO: 45128 - DNA, 19 bp, Homo sapiens
  siRNA target sequence for ZNF304 (NM_020657.1,838-856).
gcaccagaccacttacaat

SEQ ID NO: 45129 - DNA, 19 bp, Homo sapiens
  siRNA target sequence for ZNF304 (NM_020657.1,839-857).
caccagaccacttacaata

SEQ ID NO: 45130 - DNA, 19 bp, Homo sapiens
  siRNA target sequence for ZNF304 (NM_020657.1,985-1003).
ggacacctttactcttctt

SEQ ID NO: 45131 - DNA, 19 bp, Homo sapiens
  siRNA target sequence for ZNF304 (NM_020657.1,1080-1098).
ctcttattaatcacagaaa

SEQ ID NO: 45132 - DNA, 19 bp, Homo sapiens
  siRNA target sequence for ZNF304 (NM_020657.1,1193-1211).
ggaaaaagacactatacat

SEQ ID NO: 45133 - DNA, 19 bp, Homo sapiens
  siRNA target sequence for ZNF304 (NM_020657.1,2210-2228).
gctcacgagtgcaacagtt

SEQ ID NO: 45134 - DNA, 19 bp, Homo sapiens
  siRNA target sequence for ZNF304 (NM_020657.1,2215-2233).
cgagtgcaacagttttggt

SEQ ID NO: 45135 - DNA, 19 bp, Homo sapiens
  siRNA target sequence for ZNF317 (NM_020933.2,376-394).
cattcctgtccccagaatt

SEQ ID NO: 45136 - DNA, 19 bp, Homo sapiens
  siRNA target sequence for ZNF317 (NM_020933.2,695-713).
ccaagtggtcacttcttat

SEQ ID NO: 45137 - DNA, 19 bp, Homo sapiens
  siRNA target sequence for ZNF317 (NM_020933.2,704-722).
cacttcttatggaagatat

SEQ ID NO: 45138 - DNA, 19 bp, Homo sapiens
  siRNA target sequence for ZNF317 (NM_020933.2,773-791).
gagagaagtccactgaata

SEQ ID NO: 45139 - DNA, 19 bp, Homo sapiens
  siRNA target sequence for ZNF317 (NM_020933.2,785-803).
ctgaatacgctcacttgtt

SEQ ID NO: 45140 - DNA, 19 bp, Homo sapiens
  siRNA target sequence for ZNF317 (NM_020933.2,794-812).
ctcacttgttcgaagtctt

SEQ ID NO: 45141 - DNA, 19 bp, Homo sapiens
  siRNA target sequence for ZNF317 (NM_020933.2,930-948).
catgtacgacgggagaaaa

SEQ ID NO: 45142 - DNA, 19 bp, Homo sapiens
  siRNA target sequence for ZNF317 (NM_020933.2,936-954).
cgacgggagaaaaatgcat

SEQ ID NO: 45143 - DNA, 19 bp, Homo sapiens
  siRNA target sequence for ZNF317 (NM_020933.2,1339-1357).
gagcacgtgaggaatcaca

SEQ ID NO: 45144 - DNA, 19 bp, Homo sapiens
  siRNA target sequence for ZNF317 (NM_020933.2,1401-1419).
ccgctggaagtccaacttt

SEQ ID NO: 45145 - DNA, 19 bp, Homo sapiens
  siRNA target sequence for ZNF317 (NM_020933.2,1402-1420).
cgctggaagtccaacttta

SEQ ID NO: 45146 - DNA, 19 bp, Homo sapiens
  siRNA target sequence for ZNF317 (NM_020933.2,1404-1422).
ctggaagtccaactttaat

SEQ ID NO: 45147 - DNA, 19 bp, Homo sapiens
  siRNA target sequence for ZNF317 (NM_020933.2,1517-1535).
ggattcacatcgtcaagaa

SEQ ID NO: 45148 - DNA, 19 bp, Homo sapiens
  siRNA target sequence for ZNF317 (NM_020933.2,1570-1588).
cgaaaccagtccatcctta

SEQ ID NO: 45149 - DNA, 19 bp, Homo sapiens
  siRNA target sequence for ZNF317 (NM_020933.2,1575-1593).
ccagtccatccttaagact

SEQ ID NO: 45150 - DNA, 19 bp, Homo sapiens
  siRNA target sequence for ZNF317 (NM_020933.2,1585-1603).
cttaagactcacatgaact

SEQ ID NO: 45151 - DNA, 19 bp, Homo sapiens
  siRNA target sequence for ZNF317 (NM_020933.2,1648-1666).
gctttcagcgcgagttcaa

SEQ ID NO: 45152 - DNA, 19 bp, Homo sapiens
  siRNA target sequence for ZNF317 (NM_020933.2,1649-1667).
ctttcagcgcgagttcaaa

SEQ ID NO: 45153 - DNA, 19 bp, Homo sapiens
  siRNA target sequence for ZNF317 (NM_020933.2,1673-1691).
ccgcacacaggaagataca

SEQ ID NO: 45154 - DNA, 19 bp, Homo sapiens
  siRNA target sequence for ZNF317 (NM_020933.2,1728-1746).
gaaagtcttcggtgactat

SEQ ID NO: 45155 - DNA, 19 bp, Homo sapiens
  siRNA target sequence for ZNF317 (NM_020933.2,1769-1787).
gcgttcaccttgtaaagaa

SEQ ID NO: 45156 - DNA, 19 bp, Homo sapiens
  siRNA target sequence for ZNF317 (NM_020933.2,1770-1788).
cgttcaccttgtaaagaaa

SEQ ID NO: 45157 - DNA, 19 bp, Homo sapiens
  siRNA target sequence for ZNF32 (NM_006973.1,176-194).
gaatgtagcgttcttcaat

SEQ ID NO: 45158 - DNA, 19 bp, Homo sapiens
  siRNA target sequence for ZNF32 (NM_006973.1,180-198).
gtagcgttcttcaatgtga

SEQ ID NO: 45159 - DNA, 19 bp, Homo sapiens
  siRNA target sequence for ZNF32 (NM_006973.1,244-262).
cctcaagctgggatatcca

SEQ ID NO: 45160 - DNA, 19 bp, Homo sapiens
  siRNA target sequence for ZNF32 (NM_006973.1,247-265).
caagctgggatatccaaaa

SEQ ID NO: 45161 - DNA, 19 bp, Homo sapiens
  siRNA target sequence for ZNF32 (NM_006973.1,255-273).
gatatccaaaattctttca

SEQ ID NO: 45162 - DNA, 19 bp, Homo sapiens
  siRNA target sequence for ZNF32 (NM_006973.1,391-409).
gtagtctaacgttacatga

SEQ ID NO: 45163 - DNA, 19 bp, Homo sapiens
  siRNA target sequence for ZNF32 (NM_006973.1,464-482).
cagggccaaaggcaatctt

SEQ ID NO: 45164 - DNA, 19 bp, Homo sapiens
  siRNA target sequence for ZNF32 (NM_006973.1,632-650).
caggaatcagagtaacctt

SEQ ID NO: 45165 - DNA, 19 bp, Homo sapiens
  siRNA target sequence for ZNF325 (NM_016265.1,629-647).
ggatcctgagcagaagata

SEQ ID NO: 45166 - DNA, 19 bp, Homo sapiens
  siRNA target sequence for ZNF325 (NM_016265.1,630-648).
gatcctgagcagaagataa

SEQ ID NO: 45167 - DNA, 19 bp, Homo sapiens
  siRNA target sequence for ZNF325 (NM_016265.1,691-709).
ctgtggggtatcacattat

SEQ ID NO: 45168 - DNA, 19 bp, Homo sapiens
  siRNA target sequence for ZNF325 (NM_016265.1,802-820).
ggcaaactgatgacctaat

SEQ ID NO: 45169 - DNA, 19 bp, Homo sapiens
  siRNA target sequence for ZNF325 (NM_016265.1,803-821).
gcaaactgatgacctaata

SEQ ID NO: 45170 - DNA, 19 bp, Homo sapiens
  siRNA target sequence for ZNF325 (NM_016265.1,977-995).
ctcatgtgaaaagtgttta

SEQ ID NO: 45171 - DNA, 19 bp, Homo sapiens
  siRNA target sequence for ZNF325 (NM_016265.1,997-1015).
cgtctgtttcagaatatat

SEQ ID NO: 45172 - DNA, 19 bp, Homo sapiens
  siRNA target sequence for ZNF325 (NM_016265.1,1075-1093).
cactcctccatattaagct

SEQ ID NO: 45173 - DNA, 19 bp, Homo sapiens
  siRNA target sequence for ZNF325 (NM_016265.1,1111-1129).
gagatcaagcttatgaatt

SEQ ID NO: 45174 - DNA, 19 bp, Homo sapiens
  siRNA target sequence for ZNF325 (NM_016265.1,1134-1152).
caaaatggggaaccttata

SEQ ID NO: 45175 - DNA, 19 bp, Homo sapiens
  siRNA target sequence for ZNF325 (NM_016265.1,1140-1158).
ggggaaccttatactctaa

SEQ ID NO: 45176 - DNA, 19 bp, Homo sapiens
  siRNA target sequence for ZNF325 (NM_016265.1,1280-1298).
gtggaatggatctgaaata

SEQ ID NO: 45177 - DNA, 19 bp, Homo sapiens
  siRNA target sequence for ZNF325 (NM_016265.1,1889-1907).
cttctctcggttgtcatat

SEQ ID NO: 45178 - DNA, 19 bp, Homo sapiens
  siRNA target sequence for ZNF331 (NM_018555.3,684-702).
gccgacgtagccatagact

SEQ ID NO: 45179 - DNA, 19 bp, Homo sapiens
  siRNA target sequence for ZNF331 (NM_018555.3,685-703).
ccgacgtagccatagactt

SEQ ID NO: 45180 - DNA, 19 bp, Homo sapiens
  siRNA target sequence for ZNF331 (NM_018555.3,686-704).
cgacgtagccatagacttt

SEQ ID NO: 45181 - DNA, 19 bp, Homo sapiens
  siRNA target sequence for ZNF331 (NM_018555.3,689-707).
cgtagccatagacttttct

SEQ ID NO: 45182 - DNA, 19 bp, Homo sapiens
  siRNA target sequence for ZNF331 (NM_018555.3,813-831).
gaaaataagagtttaccta

SEQ ID NO: 45183 - DNA, 19 bp, Homo sapiens
  siRNA target sequence for ZNF331 (NM_018555.3,869-887).
gaattcagatagaagaagt

SEQ ID NO: 45184 - DNA, 19 bp, Homo sapiens
  siRNA target sequence for ZNF331 (NM_018555.3,894-912).
cttggccgtaactggatat

SEQ ID NO: 45185 - DNA, 19 bp, Homo sapiens
  siRNA target sequence for ZNF331 (NM_018555.3,898-916).
gccgtaactggatatgtga

SEQ ID NO: 45186 - DNA, 19 bp, Homo sapiens
  siRNA target sequence for ZNF331 (NM_018555.3,899-917).
ccgtaactggatatgtgaa

SEQ ID NO: 45187 - DNA, 19 bp, Homo sapiens
  siRNA target sequence for ZNF331 (NM_018555.3,943-961).
ccagagggaggtatgtcaa

SEQ ID NO: 45188 - DNA, 19 bp, Homo sapiens
  siRNA target sequence for ZNF331 (NM_018555.3,946-964).
gagggaggtatgtcaatca

SEQ ID NO: 45189 - DNA, 19 bp, Homo sapiens
  siRNA target sequence for ZNF331 (NM_018555.3,1007-1025).
cacccctcctagaacacat

SEQ ID NO: 45190 - DNA, 19 bp, Homo sapiens
  siRNA target sequence for ZNF331 (NM_018555.3,1169-1187).
gggcaatcagcttactcaa

SEQ ID NO: 45191 - DNA, 19 bp, Homo sapiens
  siRNA target sequence for ZNF331 (NM_018555.3,1252-1270).
ggggctcaagcctcgttat

SEQ ID NO: 45192 - DNA, 19 bp, Homo sapiens
  siRNA target sequence for ZNF331 (NM_018555.3,1253-1271).
gggctcaagcctcgttatt

SEQ ID NO: 45193 - DNA, 19 bp, Homo sapiens
  siRNA target sequence for ZNF331 (NM_018555.3,1411-1429).
cctttagccgtgtgtataa

SEQ ID NO: 45194 - DNA, 19 bp, Homo sapiens
  siRNA target sequence for ZNF331 (NM_018555.3,1412-1430).
ctttagccgtgtgtataaa

SEQ ID NO: 45195 - DNA, 19 bp, Homo sapiens
  siRNA target sequence for ZNF331 (NM_018555.3,1418-1436).
ccgtgtgtataaacttatt

SEQ ID NO: 45196 - DNA, 19 bp, Homo sapiens
  siRNA target sequence for ZNF331 (NM_018555.3,1504-1522).
gtggttcaagcctcattca

SEQ ID NO: 45197 - DNA, 19 bp, Homo sapiens
  siRNA target sequence for ZNF331 (NM_018555.3,1577-1595).
ggcctttactcgagtcaat

SEQ ID NO: 45198 - DNA, 19 bp, Homo sapiens
  siRNA target sequence for ZNF331 (NM_018555.3,1578-1596).
gcctttactcgagtcaatt

SEQ ID NO: 45199 - DNA, 19 bp, Homo sapiens
  siRNA target sequence for ZNF331 (NM_018555.3,1579-1597).
cctttactcgagtcaatta

SEQ ID NO: 45200 - DNA, 19 bp, Homo sapiens
  siRNA target sequence for ZNF331 (NM_018555.3,1588-1606).
gagtcaattaccttactca

SEQ ID NO: 45201 - DNA, 19 bp, Homo sapiens
  siRNA target sequence for ZNF331 (NM_018555.3,1792-1810).
caggcgaaaccccgtataa

SEQ ID NO: 45202 - DNA, 19 bp, Homo sapiens
  siRNA target sequence for ZNF331 (NM_018555.3,1843-1861).
gatcgagcctcgtgaaaca

SEQ ID NO: 45203 - DNA, 19 bp, Homo sapiens
  siRNA target sequence for ZNF331 (NM_018555.3,1846-1864).
cgagcctcgtgaaacatga

SEQ ID NO: 45204 - DNA, 19 bp, Homo sapiens
  siRNA target sequence for ZNF333 (NM_032433.1,162-180).
ggaggagcctgtgcaaata

SEQ ID NO: 45205 - DNA, 19 bp, Homo sapiens
  siRNA target sequence for ZNF333 (NM_032433.1,217-235).
gggaactccaccatgcaaa

SEQ ID NO: 45206 - DNA, 19 bp, Homo sapiens
  siRNA target sequence for ZNF333 (NM_032433.1,336-354).
ccgaagagttgccttctat

SEQ ID NO: 45207 - DNA, 19 bp, Homo sapiens
  siRNA target sequence for ZNF333 (NM_032433.1,524-542).
gccgctatgcagattcaga

SEQ ID NO: 45208 - DNA, 19 bp, Homo sapiens
  siRNA target sequence for ZNF333 (NM_032433.1,836-854).
cccaatgcgttgtcttatt

SEQ ID NO: 45209 - DNA, 19 bp, Homo sapiens
  siRNA target sequence for ZNF333 (NM_032433.1,944-962).
cctagccaagatactttta

SEQ ID NO: 45210 - DNA, 19 bp, Homo sapiens
  siRNA target sequence for ZNF333 (NM_032433.1,1102-1120).
ctgtgaatgtcaagagatt

SEQ ID NO: 45211 - DNA, 19 bp, Homo sapiens
  siRNA target sequence for ZNF333 (NM_032433.1,1148-1166).
ctaattgtgcccgagaaaa

SEQ ID NO: 45212 - DNA, 19 bp, Homo sapiens
  siRNA target sequence for ZNF333 (NM_032433.1,1169-1187).
cgtagtggggataaatcct

SEQ ID NO: 45213 - DNA, 19 bp, Homo sapiens
  siRNA target sequence for ZNF333 (NM_032433.1,1218-1236).
gatacagctctgaccttat

SEQ ID NO: 45214 - DNA, 19 bp, Homo sapiens
  siRNA target sequence for ZNF333 (NM_032433.1,1267-1285).
gtgctttgactgtcaagaa

SEQ ID NO: 45215 - DNA, 19 bp, Homo sapiens
  siRNA target sequence for ZNF333 (NM_032433.1,1316-1334).
ctccggcgacacatgagaa

SEQ ID NO: 45216 - DNA, 19 bp, Homo sapiens
  siRNA target sequence for ZNF333 (NM_032433.1,1380-1398).
ccttcacgaggaactttaa

SEQ ID NO: 45217 - DNA, 19 bp, Homo sapiens
  siRNA target sequence for ZNF333 (NM_032433.1,1389-1407).
ggaactttaacctgatttt

SEQ ID NO: 45218 - DNA, 19 bp, Homo sapiens
  siRNA target sequence for ZNF333 (NM_032433.1,1638-1656).
ggacgagcactcatctgaa

SEQ ID NO: 45219 - DNA, 19 bp, Homo sapiens
  siRNA target sequence for ZNF333 (NM_032433.1,1714-1732).
ggtcttgagtcgtctttca

SEQ ID NO: 45220 - DNA, 19 bp, Homo sapiens
  siRNA target sequence for ZNF333 (NM_032433.1,1715-1733).
gtcttgagtcgtctttcaa

SEQ ID NO: 45221 - DNA, 19 bp, Homo sapiens
  siRNA target sequence for ZNF333 (NM_032433.1,1889-1907).
ggtcagtcttcacatctta

SEQ ID NO: 45222 - DNA, 19 bp, Homo sapiens
  siRNA target sequence for ZNF333 (NM_032433.1,1931-1949).
gccgggagaccctatcaat

SEQ ID NO: 45223 - DNA, 19 bp, Homo sapiens
  siRNA target sequence for ZNF333 (NM_032433.1,2015-2033).
ggaagagagaccattagga

SEQ ID NO: 45224 - DNA, 19 bp, Homo sapiens
  siRNA target sequence for ZNF334 (NM_018102.3,322-340).
ggtctctgtggggtatcat

SEQ ID NO: 45225 - DNA, 19 bp, Homo sapiens
  siRNA target sequence for ZNF334 (NM_018102.3,331-349).
ggggtatcatgttagcaaa

SEQ ID NO: 45226 - DNA, 19 bp, Homo sapiens
  siRNA target sequence for ZNF334 (NM_018102.3,387-405).
catggatagtggaggaatt

SEQ ID NO: 45227 - DNA, 19 bp, Homo sapiens
  siRNA target sequence for ZNF334 (NM_018102.3,415-433).
gaactacccagacattgat

SEQ ID NO: 45228 - DNA, 19 bp, Homo sapiens
  siRNA target sequence for ZNF334 (NM_018102.3,470-488).
catttgacacaaactgtat

SEQ ID NO: 45229 - DNA, 19 bp, Homo sapiens
  siRNA target sequence for ZNF334 (NM_018102.3,618-636).
ctaattcagaagtaattgt

SEQ ID NO: 45230 - DNA, 19 bp, Homo sapiens
  siRNA target sequence for ZNF334 (NM_018102.3,660-678).
gaaagattcctgatggata

SEQ ID NO: 45231 - DNA, 19 bp, Homo sapiens
  siRNA target sequence for ZNF334 (NM_018102.3,749-767).
gccagcaatcaaaacgaaa

SEQ ID NO: 45232 - DNA, 19 bp, Homo sapiens
  siRNA target sequence for ZNF334 (NM_018102.3,750-768).
ccagcaatcaaaacgaaaa

SEQ ID NO: 45233 - DNA, 19 bp, Homo sapiens
  siRNA target sequence for ZNF334 (NM_018102.3,753-771).
gcaatcaaaacgaaaatct

SEQ ID NO: 45234 - DNA, 19 bp, Homo sapiens
  siRNA target sequence for ZNF334 (NM_018102.3,799-817).
gaaacaaccgtttgactat

SEQ ID NO: 45235 - DNA, 19 bp, Homo sapiens
  siRNA target sequence for ZNF334 (NM_018102.3,803-821).
caaccgtttgactataata

SEQ ID NO: 45236 - DNA, 19 bp, Homo sapiens
  siRNA target sequence for ZNF334 (NM_018102.3,806-824).
ccgtttgactataataaat

SEQ ID NO: 45237 - DNA, 19 bp, Homo sapiens
  siRNA target sequence for ZNF334 (NM_018102.3,844-862).
gagggcaattctcattaca

SEQ ID NO: 45238 - DNA, 19 bp, Homo sapiens
  siRNA target sequence for ZNF334 (NM_018102.3,847-865).
ggcaattctcattacacaa

SEQ ID NO: 45239 - DNA, 19 bp, Homo sapiens
  siRNA target sequence for ZNF334 (NM_018102.3,848-866).
gcaattctcattacacaaa

SEQ ID NO: 45240 - DNA, 19 bp, Homo sapiens
  siRNA target sequence for ZNF334 (NM_018102.3,928-946).
gagatctaccctcattgta

SEQ ID NO: 45241 - DNA, 19 bp, Homo sapiens
  siRNA target sequence for ZNF334 (NM_018102.3,1254-1272).
ccttcagcaagaaatcgta

SEQ ID NO: 45242 - DNA, 19 bp, Homo sapiens
  siRNA target sequence for ZNF334 (NM_018102.3,1255-1273).
cttcagcaagaaatcgtat

SEQ ID NO: 45243 - DNA, 19 bp, Homo sapiens
  siRNA target sequence for ZNF334 (NM_018102.3,1258-1276).
cagcaagaaatcgtatctt

SEQ ID NO: 45244 - DNA, 19 bp, Homo sapiens
  siRNA target sequence for ZNF334 (NM_018102.3,1260-1278).
gcaagaaatcgtatcttgt

SEQ ID NO: 45245 - DNA, 19 bp, Homo sapiens
  siRNA target sequence for ZNF334 (NM_018102.3,1264-1282).
gaaatcgtatcttgttgta

SEQ ID NO: 45246 - DNA, 19 bp, Homo sapiens
  siRNA target sequence for ZNF334 (NM_018102.3,1444-1462).
caatgtgcatcgaagaagt

SEQ ID NO: 45247 - DNA, 19 bp, Homo sapiens
  siRNA target sequence for ZNF334 (NM_018102.3,1667-1685).
ggtagaatctccattgtga

SEQ ID NO: 45248 - DNA, 19 bp, Homo sapiens
  siRNA target sequence for ZNF334 (NM_018102.3,1668-1686).
gtagaatctccattgtgaa

SEQ ID NO: 45249 - DNA, 19 bp, Homo sapiens
  siRNA target sequence for ZNF334 (NM_018102.3,1754-1772).
catgccgtcagcaaaaact

SEQ ID NO: 45250 - DNA, 19 bp, Homo sapiens
  siRNA target sequence for ZNF334 (NM_018102.3,1784-1802).
gtacatcagagaactatat

SEQ ID NO: 45251 - DNA, 19 bp, Homo sapiens
  siRNA target sequence for ZNF334 (NM_018102.3,1933-1951).
gaagttctcctttgttgaa

SEQ ID NO: 45252 - DNA, 19 bp, Homo sapiens
  siRNA target sequence for ZNF334 (NM_018102.3,1936-1954).
gttctcctttgttgaacat

SEQ ID NO: 45253 - DNA, 19 bp, Homo sapiens
  siRNA target sequence for ZNF334 (NM_018102.3,2104-2122).
gtggactctcactgaacat

SEQ ID NO: 45254 - DNA, 19 bp, Homo sapiens
  siRNA target sequence for ZNF334 (NM_018102.3,2106-2124).
ggactctcactgaacatca

SEQ ID NO: 45255 - DNA, 19 bp, Homo sapiens
  siRNA target sequence for ZNF334 (NM_018102.3,2207-2225).
cagaaatcccacaaggaat

SEQ ID NO: 45256 - DNA, 19 bp, Homo sapiens
  siRNA target sequence for ZNF335 (NM_022095.3,515-533).
cggccatcgacaagatcat

SEQ ID NO: 45257 - DNA, 19 bp, Homo sapiens
  siRNA target sequence for ZNF335 (NM_022095.3,624-642).
cctacagggcccagatgat

SEQ ID NO: 45258 - DNA, 19 bp, Homo sapiens
  siRNA target sequence for ZNF335 (NM_022095.3,1075-1093).
gaggaggatagcgactata

SEQ ID NO: 45259 - DNA, 19 bp, Homo sapiens
  siRNA target sequence for ZNF335 (NM_022095.3,1077-1095).
ggaggatagcgactataat

SEQ ID NO: 45260 - DNA, 19 bp, Homo sapiens
  siRNA target sequence for ZNF335 (NM_022095.3,1080-1098).
ggatagcgactataatcca

SEQ ID NO: 45261 - DNA, 19 bp, Homo sapiens
  siRNA target sequence for ZNF335 (NM_022095.3,1452-1470).
gcgcttcctaggcaagaaa

SEQ ID NO: 45262 - DNA, 19 bp, Homo sapiens
  siRNA target sequence for ZNF335 (NM_022095.3,1453-1471).
cgcttcctaggcaagaaat

SEQ ID NO: 45263 - DNA, 19 bp, Homo sapiens
  siRNA target sequence for ZNF335 (NM_022095.3,1467-1485).
gaaataccgcaagtactat

SEQ ID NO: 45264 - DNA, 19 bp, Homo sapiens
  siRNA target sequence for ZNF335 (NM_022095.3,1592-1610).
gcgatccccagctcttcaa

SEQ ID NO: 45265 - DNA, 19 bp, Homo sapiens
  siRNA target sequence for ZNF335 (NM_022095.3,1594-1612).
gatccccagctcttcaagt

SEQ ID NO: 45266 - DNA, 19 bp, Homo sapiens
  siRNA target sequence for ZNF335 (NM_022095.3,1649-1667).
cgctcaaggagcacatgtt

SEQ ID NO: 45267 - DNA, 19 bp, Homo sapiens
  siRNA target sequence for ZNF335 (NM_022095.3,1923-1941).
gaagcgctacaccttcaaa

SEQ ID NO: 45268 - DNA, 19 bp, Homo sapiens
  siRNA target sequence for ZNF335 (NM_022095.3,1928-1946).
gctacaccttcaaaatgca

SEQ ID NO: 45269 - DNA, 19 bp, Homo sapiens
  siRNA target sequence for ZNF335 (NM_022095.3,1972-1990).
gccaaccgcaggttcaagt

SEQ ID NO: 45270 - DNA, 19 bp, Homo sapiens
  siRNA target sequence for ZNF335 (NM_022095.3,2096-2114).
ccttccgagaggacttctt

SEQ ID NO: 45271 - DNA, 19 bp, Homo sapiens
  siRNA target sequence for ZNF335 (NM_022095.3,2512-2530).
gatcttctgctgaacatga

SEQ ID NO: 45272 - DNA, 19 bp, Homo sapiens
  siRNA target sequence for ZNF335 (NM_022095.3,2736-2754).
ggcacctggtccatttggt

SEQ ID NO: 45273 - DNA, 19 bp, Homo sapiens
  siRNA target sequence for ZNF335 (NM_022095.3,3784-3802).
gacaaccaggtgcagtata

SEQ ID NO: 45274 - DNA, 19 bp, Homo sapiens
  siRNA target sequence for ZNF335 (NM_022095.3,3831-3849).
gctcccccaggaatatgtt

SEQ ID NO: 45275 - DNA, 19 bp, Homo sapiens
  siRNA target sequence for ZNF335 (NM_022095.3,3896-3914).
cacacatccagtatgaaca

SEQ ID NO: 45276 - DNA, 19 bp, Homo sapiens
  siRNA target sequence for ZNF335 (NM_022095.3,4077-4095).
gacagtgcccgaacacatt

SEQ ID NO: 45277 - DNA, 19 bp, Homo sapiens
  siRNA target sequence for ZNF335 (NM_022095.3,4079-4097).
cagtgcccgaacacattca

SEQ ID NO: 45278 - DNA, 19 bp, Homo sapiens
  siRNA target sequence for ZNF336 (NM_022482.3,29-47).
ccaaatcctccccatttaa

SEQ ID NO: 45279 - DNA, 19 bp, Homo sapiens
  siRNA target sequence for ZNF336 (NM_022482.3,101-119).
cagtcagcgtggagtatca

SEQ ID NO: 45280 - DNA, 19 bp, Homo sapiens
  siRNA target sequence for ZNF336 (NM_022482.3,163-181).
gccaccagcaagtttttta

SEQ ID NO: 45281 - DNA, 19 bp, Homo sapiens
  siRNA target sequence for ZNF336 (NM_022482.3,210-228).
ggatggtactaggactaat

SEQ ID NO: 45282 - DNA, 19 bp, Homo sapiens
  siRNA target sequence for ZNF336 (NM_022482.3,214-232).
ggtactaggactaatgtct

SEQ ID NO: 45283 - DNA, 19 bp, Homo sapiens
  siRNA target sequence for ZNF336 (NM_022482.3,215-233).
gtactaggactaatgtcta

SEQ ID NO: 45284 - DNA, 19 bp, Homo sapiens
  siRNA target sequence for ZNF336 (NM_022482.3,218-236).
ctaggactaatgtctactt

SEQ ID NO: 45285 - DNA, 19 bp, Homo sapiens
  siRNA target sequence for ZNF336 (NM_022482.3,221-239).
ggactaatgtctacttaaa

SEQ ID NO: 45286 - DNA, 19 bp, Homo sapiens
  siRNA target sequence for ZNF336 (NM_022482.3,222-240).
gactaatgtctacttaaat

SEQ ID NO: 45287 - DNA, 19 bp, Homo sapiens
  siRNA target sequence for ZNF336 (NM_022482.3,224-242).
ctaatgtctacttaaatga

SEQ ID NO: 45288 - DNA, 19 bp, Homo sapiens
  siRNA target sequence for ZNF336 (NM_022482.3,247-265).
caggttgctgactttgctt

SEQ ID NO: 45289 - DNA, 19 bp, Homo sapiens
  siRNA target sequence for ZNF336 (NM_022482.3,294-312).
ggtacaggtggaagaagat

SEQ ID NO: 45290 - DNA, 19 bp, Homo sapiens
  siRNA target sequence for ZNF336 (NM_022482.3,358-376).
gatttatcagaaacttgtt

SEQ ID NO: 45291 - DNA, 19 bp, Homo sapiens
  siRNA target sequence for ZNF336 (NM_022482.3,393-411).
gatgttagagtcagtactt

SEQ ID NO: 45292 - DNA, 19 bp, Homo sapiens
  siRNA target sequence for ZNF336 (NM_022482.3,406-424).
gtacttttggagttgcaaa

SEQ ID NO: 45293 - DNA, 19 bp, Homo sapiens
  siRNA target sequence for ZNF336 (NM_022482.3,414-432).
ggagttgcaaaatttctca

SEQ ID NO: 45294 - DNA, 19 bp, Homo sapiens
  siRNA target sequence for ZNF336 (NM_022482.3,456-474).
cagtggctcccaagttagt

SEQ ID NO: 45295 - DNA, 19 bp, Homo sapiens
  siRNA target sequence for ZNF336 (NM_022482.3,562-580).
gccagcaatggcatgtctt

SEQ ID NO: 45296 - DNA, 19 bp, Homo sapiens
  siRNA target sequence for ZNF336 (NM_022482.3,583-601).
gatttgccaccgaagaagt

SEQ ID NO: 45297 - DNA, 19 bp, Homo sapiens
  siRNA target sequence for ZNF336 (NM_022482.3,602-620).
ccaaggacaaactagacaa

SEQ ID NO: 45298 - DNA, 19 bp, Homo sapiens
  siRNA target sequence for ZNF336 (NM_022482.3,640-658).
cctccctaccctaaaatca

SEQ ID NO: 45299 - DNA, 19 bp, Homo sapiens
  siRNA target sequence for ZNF336 (NM_022482.3,732-750).
ccgagagcagcagaaaact

SEQ ID NO: 45300 - DNA, 19 bp, Homo sapiens
  siRNA target sequence for ZNF336 (NM_022482.3,854-872).
gtgctgagttggaggaatt

SEQ ID NO: 45301 - DNA, 19 bp, Homo sapiens
  siRNA target sequence for ZNF336 (NM_022482.3,1350-1368).
caagacgcacatgagaatt

SEQ ID NO: 45302 - DNA, 19 bp, Homo sapiens
  siRNA target sequence for ZNF336 (NM_022482.3,1420-1438).
cagaaccacatgctgattt

SEQ ID NO: 45303 - DNA, 19 bp, Homo sapiens
  siRNA target sequence for ZNF336 (NM_022482.3,1422-1440).
gaaccacatgctgatttat

SEQ ID NO: 45304 - DNA, 19 bp, Homo sapiens
  siRNA target sequence for ZNF336 (NM_022482.3,1428-1446).
catgctgatttatcataaa

SEQ ID NO: 45305 - DNA, 19 bp, Homo sapiens
  siRNA target sequence for ZNF336 (NM_022482.3,1449-1467).
gtgtcacacaggtgaaaga

SEQ ID NO: 45306 - DNA, 19 bp, Homo sapiens
  siRNA target sequence for ZNF336 (NM_022482.3,1468-1486).
ccttttatgtgtgaaacat

SEQ ID NO: 45307 - DNA, 19 bp, Homo sapiens
  siRNA target sequence for ZNF336 (NM_022482.3,1501-1519).
gcttctaaggagtacttaa

SEQ ID NO: 45308 - DNA, 19 bp, Homo sapiens
  siRNA target sequence for ZNF336 (NM_022482.3,1515-1533).
cttaaaacaccacaataga

SEQ ID NO: 45309 - DNA, 19 bp, Homo sapiens
  siRNA target sequence for ZNF336 (NM_022482.3,1735-1753).
gcgtgcggacggacattca

SEQ ID NO: 45310 - DNA, 19 bp, Homo sapiens
  siRNA target sequence for ZNF336 (NM_022482.3,1895-1913).
ccaagctttcggataaatt

SEQ ID NO: 45311 - DNA, 19 bp, Homo sapiens
  siRNA target sequence for ZNF337 (NM_015655.2,363-381).
gcccctgtgcaggaatata

SEQ ID NO: 45312 - DNA, 19 bp, Homo sapiens
  siRNA target sequence for ZNF337 (NM_015655.2,364-382).
cccctgtgcaggaatatat

SEQ ID NO: 45313 - DNA, 19 bp, Homo sapiens
  siRNA target sequence for ZNF337 (NM_015655.2,523-541).
cagcccacccctaagacat

SEQ ID NO: 45314 - DNA, 19 bp, Homo sapiens
  siRNA target sequence for ZNF337 (NM_015655.2,672-690).
cagagcgtgggcaagactt

SEQ ID NO: 45315 - DNA, 19 bp, Homo sapiens
  siRNA target sequence for ZNF337 (NM_015655.2,686-704).
gacttcagccggaagatga

SEQ ID NO: 45316 - DNA, 19 bp, Homo sapiens
  siRNA target sequence for ZNF337 (NM_015655.2,706-724).
ggtaatcatacacaaaaaa

SEQ ID NO: 45317 - DNA, 19 bp, Homo sapiens
  siRNA target sequence for ZNF337 (NM_015655.2,1017-1035).
ggcgaaggtttaacgataa

SEQ ID NO: 45318 - DNA, 19 bp, Homo sapiens
  siRNA target sequence for ZNF337 (NM_015655.2,1019-1037).
cgaaggtttaacgataagt

SEQ ID NO: 45319 - DNA, 19 bp, Homo sapiens
  siRNA target sequence for ZNF337 (NM_015655.2,1041-1059).
catacaacaagcacttgaa

SEQ ID NO: 45320 - DNA, 19 bp, Homo sapiens
  siRNA target sequence for ZNF337 (NM_015655.2,1098-1116).
gtgggcgaggctatactaa

SEQ ID NO: 45321 - DNA, 19 bp, Homo sapiens
  siRNA target sequence for ZNF337 (NM_015655.2,1100-1118).
gggcgaggctatactaata

SEQ ID NO: 45322 - DNA, 19 bp, Homo sapiens
  siRNA target sequence for ZNF337 (NM_015655.2,1101-1119).
ggcgaggctatactaataa

SEQ ID NO: 45323 - DNA, 19 bp, Homo sapiens
  siRNA target sequence for ZNF337 (NM_015655.2,1129-1147).
cgttgtgcacaagagaata

SEQ ID NO: 45324 - DNA, 19 bp, Homo sapiens
  siRNA target sequence for ZNF337 (NM_015655.2,1260-1278).
ggcagtgtaagcaaagttt

SEQ ID NO: 45325 - DNA, 19 bp, Homo sapiens
  siRNA target sequence for ZNF337 (NM_015655.2,1437-1455).
ggcaaggatttattcagaa

SEQ ID NO: 45326 - DNA, 19 bp, Homo sapiens
  siRNA target sequence for ZNF337 (NM_015655.2,1607-1625).
cgaaggtttcgggataagt

SEQ ID NO: 45327 - DNA, 19 bp, Homo sapiens
  siRNA target sequence for ZNF337 (NM_015655.2,1616-1634).
cgggataagtcctcctata

SEQ ID NO: 45328 - DNA, 19 bp, Homo sapiens
  siRNA target sequence for ZNF337 (NM_015655.2,1617-1635).
gggataagtcctcctataa

SEQ ID NO: 45329 - DNA, 19 bp, Homo sapiens
  siRNA target sequence for ZNF337 (NM_015655.2,1652-1670).
cacttgggtgagaaacgtt

SEQ ID NO: 45330 - DNA, 19 bp, Homo sapiens
  siRNA target sequence for ZNF337 (NM_015655.2,1654-1672).
cttgggtgagaaacgtttt

SEQ ID NO: 45331 - DNA, 19 bp, Homo sapiens
  siRNA target sequence for ZNF337 (NM_015655.2,1708-1726).
gccaaatctcaccatacat

SEQ ID NO: 45332 - DNA, 19 bp, Homo sapiens
  siRNA target sequence for ZNF337 (NM_015655.2,1772-1790).
gagaaaagttttagtttga

SEQ ID NO: 45333 - DNA, 19 bp, Homo sapiens
  siRNA target sequence for ZNF337 (NM_015655.2,1785-1803).
gtttgaaggcaaatcttct

SEQ ID NO: 45334 - DNA, 19 bp, Homo sapiens
  siRNA target sequence for ZNF337 (NM_015655.2,1792-1810).
ggcaaatcttcttagacat

SEQ ID NO: 45335 - DNA, 19 bp, Homo sapiens
  siRNA target sequence for ZNF337 (NM_015655.2,1824-1842).
cgggggaaaggccatttaa

SEQ ID NO: 45336 - DNA, 19 bp, Homo sapiens
  siRNA target sequence for ZNF337 (NM_015655.2,1825-1843).
gggggaaaggccatttaat

SEQ ID NO: 45337 - DNA, 19 bp, Homo sapiens
  siRNA target sequence for ZNF337 (NM_015655.2,1826-1844).
ggggaaaggccatttaatt

SEQ ID NO: 45338 - DNA, 19 bp, Homo sapiens
  siRNA target sequence for ZNF337 (NM_015655.2,1862-1880).
ggcttcatcctaaaatcaa

SEQ ID NO: 45339 - DNA, 19 bp, Homo sapiens
  siRNA target sequence for ZNF337 (NM_015655.2,1994-2012).
ggcaagcagccttttgtat

SEQ ID NO: 45340 - DNA, 19 bp, Homo sapiens
  siRNA target sequence for ZNF337 (NM_015655.2,2144-2162).
caccactggcggatacact

SEQ ID NO: 45341 - DNA, 19 bp, Homo sapiens
  siRNA target sequence for ZNF337 (NM_015655.2,2279-2297).
ggacgaaagtttagcaata

SEQ ID NO: 45342 - DNA, 19 bp, Homo sapiens
  siRNA target sequence for ZNF337 (NM_015655.2,2280-2298).
gacgaaagtttagcaataa

SEQ ID NO: 45343 - DNA, 19 bp, Homo sapiens
  siRNA target sequence for ZNF337 (NM_015655.2,2282-2300).
cgaaagtttagcaataagt

SEQ ID NO: 45344 - DNA, 19 bp, Homo sapiens
  siRNA target sequence for ZNF337 (NM_015655.2,2308-2326).
cagtaagcacttaaagaga

SEQ ID NO: 45345 - DNA, 19 bp, Homo sapiens
  siRNA target sequence for ZNF337 (NM_015655.2,2360-2378).
gtgggtgaggcttcatctt

SEQ ID NO: 45346 - DNA, 19 bp, Homo sapiens
  siRNA target sequence for ZNF339 (NM_021220.2,541-559).
ccggtcgccagatcgaaaa

SEQ ID NO: 45347 - DNA, 19 bp, Homo sapiens
  siRNA target sequence for ZNF339 (NM_021220.2,542-560).
cggtcgccagatcgaaaat

SEQ ID NO: 45348 - DNA, 19 bp, Homo sapiens
  siRNA target sequence for ZNF339 (NM_021220.2,544-562).
gtcgccagatcgaaaatca

SEQ ID NO: 45349 - DNA, 19 bp, Homo sapiens
  siRNA target sequence for ZNF339 (NM_021220.2,547-565).
gccagatcgaaaatcaagt

SEQ ID NO: 45350 - DNA, 19 bp, Homo sapiens
  siRNA target sequence for ZNF339 (NM_021220.2,548-566).
ccagatcgaaaatcaagtt

SEQ ID NO: 45351 - DNA, 19 bp, Homo sapiens
  siRNA target sequence for ZNF339 (NM_021220.2,754-772).
ggcattcgtccctacaaat

SEQ ID NO: 45352 - DNA, 19 bp, Homo sapiens
  siRNA target sequence for ZNF339 (NM_021220.2,819-837).
ccacctgaagaaaatccat

SEQ ID NO: 45353 - DNA, 19 bp, Homo sapiens
  siRNA target sequence for ZNF339 (NM_021220.2,956-974).
cgggcagctcgtttctcaa

SEQ ID NO: 45354 - DNA, 19 bp, Homo sapiens
  siRNA target sequence for ZNF339 (NM_021220.2,958-976).
ggcagctcgtttctcaaaa

SEQ ID NO: 45355 - DNA, 19 bp, Homo sapiens
  siRNA target sequence for ZNF341 (NM_032819.3,72-90).
ctggctgtccagtcattat

SEQ ID NO: 45356 - DNA, 19 bp, Homo sapiens
  siRNA target sequence for ZNF341 (NM_032819.3,119-137).
gacaggccagagtgtcaat

SEQ ID NO: 45357 - DNA, 19 bp, Homo sapiens
  siRNA target sequence for ZNF341 (NM_032819.3,161-179).
ggatgacgaggatgtattt

SEQ ID NO: 45358 - DNA, 19 bp, Homo sapiens
  siRNA target sequence for ZNF341 (NM_032819.3,165-183).
gacgaggatgtatttctct

SEQ ID NO: 45359 - DNA, 19 bp, Homo sapiens
  siRNA target sequence for ZNF341 (NM_032819.3,180-198).
ctctgcgggaagtgtaaga

SEQ ID NO: 45360 - DNA, 19 bp, Homo sapiens
  siRNA target sequence for ZNF341 (NM_032819.3,355-373).
gccagatctccacatacat

SEQ ID NO: 45361 - DNA, 19 bp, Homo sapiens
  siRNA target sequence for ZNF341 (NM_032819.3,450-468).
gccatgtcagccttcacat

SEQ ID NO: 45362 - DNA, 19 bp, Homo sapiens
  siRNA target sequence for ZNF341 (NM_032819.3,775-793).
gtgtggagcctccagtata

SEQ ID NO: 45363 - DNA, 19 bp, Homo sapiens
  siRNA target sequence for ZNF341 (NM_032819.3,917-935).
gaagacccgacgagctaaa

SEQ ID NO: 45364 - DNA, 19 bp, Homo sapiens
  siRNA target sequence for ZNF341 (NM_032819.3,920-938).
gacccgacgagctaaagct

SEQ ID NO: 45365 - DNA, 19 bp, Homo sapiens
  siRNA target sequence for ZNF341 (NM_032819.3,1145-1163).
caccgtgtctcgaaactct

SEQ ID NO: 45366 - DNA, 19 bp, Homo sapiens
  siRNA target sequence for ZNF341 (NM_032819.3,1386-1404).
cacatgacccagcataaga

SEQ ID NO: 45367 - DNA, 19 bp, Homo sapiens
  siRNA target sequence for ZNF341 (NM_032819.3,1388-1406).
catgacccagcataagaat

SEQ ID NO: 45368 - DNA, 19 bp, Homo sapiens
  siRNA target sequence for ZNF341 (NM_032819.3,1451-1469).
cccaaagctcgacacattt

SEQ ID NO: 45369 - DNA, 19 bp, Homo sapiens
  siRNA target sequence for ZNF341 (NM_032819.3,1453-1471).
caaagctcgacacatttct

SEQ ID NO: 45370 - DNA, 19 bp, Homo sapiens
  siRNA target sequence for ZNF341 (NM_032819.3,1605-1623).
gacaatgccgtctacaagt

SEQ ID NO: 45371 - DNA, 19 bp, Homo sapiens
  siRNA target sequence for ZNF341 (NM_032819.3,1614-1632).
gtctacaagtgtgtcaaat

SEQ ID NO: 45372 - DNA, 19 bp, Homo sapiens
  siRNA target sequence for ZNF341 (NM_032819.3,1813-1831).
gggagcattatctcaaact

SEQ ID NO: 45373 - DNA, 19 bp, Homo sapiens
  siRNA target sequence for ZNF341 (NM_032819.3,1908-1926).
ctgaagagacacatgttga

SEQ ID NO: 45374 - DNA, 19 bp, Homo sapiens
  siRNA target sequence for ZNF341 (NM_032819.3,2034-2052).
ggcatgaagctccacaaat

SEQ ID NO: 45375 - DNA, 19 bp, Homo sapiens
  siRNA target sequence for ZNF341 (NM_032819.3,2154-2172).
ggcttttcccgccacaaat

SEQ ID NO: 45376 - DNA, 19 bp, Homo sapiens
  siRNA target sequence for ZNF341 (NM_032819.3,2155-2173).
gcttttcccgccacaaata

SEQ ID NO: 45377 - DNA, 19 bp, Homo sapiens
  siRNA target sequence for ZNF342 (NM_145288.1,1119-1137).
catcaccacggaacaaaga

SEQ ID NO: 45378 - DNA, 19 bp, Homo sapiens
  siRNA target sequence for ZNF342 (NM_145288.1,1122-1140).
caccacggaacaaagaact

SEQ ID NO: 45379 - DNA, 19 bp, Homo sapiens
  siRNA target sequence for ZNF342 (NM_145288.1,1222-1240).
gagttctgcgggaagcatt

SEQ ID NO: 45380 - DNA, 19 bp, Homo sapiens
  siRNA target sequence for ZNF342 (NM_145288.1,1224-1242).
gttctgcgggaagcatttt

SEQ ID NO: 45381 - DNA, 19 bp, Homo sapiens
  siRNA target sequence for ZNF345 (NM_003419.2,425-443).
ggtgattgggaatgtaaaa

SEQ ID NO: 45382 - DNA, 19 bp, Homo sapiens
  siRNA target sequence for ZNF345 (NM_003419.2,506-524).
gaagacatgcccactttca

SEQ ID NO: 45383 - DNA, 19 bp, Homo sapiens
  siRNA target sequence for ZNF345 (NM_003419.2,1099-1117).
cagtggttcggctcttact

SEQ ID NO: 45384 - DNA, 19 bp, Homo sapiens
  siRNA target sequence for ZNF345 (NM_003419.2,1602-1620).
gtagtggttcagctcttaa

SEQ ID NO: 45385 - DNA, 19 bp, Homo sapiens
  siRNA target sequence for ZNF345 (NM_003419.2,1764-1782).
cttatgggagggattcaga

SEQ ID NO: 45386 - DNA, 19 bp, Homo sapiens
  siRNA target sequence for ZNF345 (NM_003419.2,1770-1788).
ggagggattcagagtttca

SEQ ID NO: 45387 - DNA, 19 bp, Homo sapiens
  siRNA target sequence for ZNF345 (NM_003419.2,1820-1838).
ctctgcgaattggaaacta

SEQ ID NO: 45388 - DNA, 19 bp, Homo sapiens
  siRNA target sequence for ZNF345 (NM_003419.2,1822-1840).
ctgcgaattggaaactata

SEQ ID NO: 45389 - DNA, 19 bp, Homo sapiens
  siRNA target sequence for ZNF347 (NM_032584.1,206-224).
ccctgggaatctcttgttt

SEQ ID NO: 45390 - DNA, 19 bp, Homo sapiens
  siRNA target sequence for ZNF347 (NM_032584.1,207-225).
cctgggaatctcttgtttt

SEQ ID NO: 45391 - DNA, 19 bp, Homo sapiens
  siRNA target sequence for ZNF347 (NM_032584.1,221-239).
gttttgacctcagtattat

SEQ ID NO: 45392 - DNA, 19 bp, Homo sapiens
  siRNA target sequence for ZNF347 (NM_032584.1,276-294).
ggagagccaagtacaaata

SEQ ID NO: 45393 - DNA, 19 bp, Homo sapiens
  siRNA target sequence for ZNF347 (NM_032584.1,279-297).
gagccaagtacaaatagca

SEQ ID NO: 45394 - DNA, 19 bp, Homo sapiens
  siRNA target sequence for ZNF347 (NM_032584.1,482-500).
cacatggccttgagtatca

SEQ ID NO: 45395 - DNA, 19 bp, Homo sapiens
  siRNA target sequence for ZNF347 (NM_032584.1,484-502).
catggccttgagtatcaat

SEQ ID NO: 45396 - DNA, 19 bp, Homo sapiens
  siRNA target sequence for ZNF347 (NM_032584.1,565-583).
ggaagagatgaacatgata

SEQ ID NO: 45397 - DNA, 19 bp, Homo sapiens
  siRNA target sequence for ZNF347 (NM_032584.1,589-607).
gatgcaagaaacaagctta

SEQ ID NO: 45398 - DNA, 19 bp, Homo sapiens
  siRNA target sequence for ZNF347 (NM_032584.1,840-858).
gggaagcccttacaaatct

SEQ ID NO: 45399 - DNA, 19 bp, Homo sapiens
  siRNA target sequence for ZNF347 (NM_032584.1,1403-1421).
ctattcatctggtaattca

SEQ ID NO: 45400 - DNA, 19 bp, Homo sapiens
  siRNA target sequence for ZNF347 (NM_032584.1,2528-2546).
gtaacgtgtggaaagttct

SEQ ID NO: 45401 - DNA, 19 bp, Homo sapiens
  siRNA target sequence for ZNF347 (NM_032584.1,2535-2553).
gtggaaagttctaaagtca

SEQ ID NO: 45402 - DNA, 19 bp, Homo sapiens
  siRNA target sequence for ZNF354A (NM_005649.2,490-508).
caaacacaagactcttcat

SEQ ID NO: 45403 - DNA, 19 bp, Homo sapiens
  siRNA target sequence for ZNF354A (NM_005649.2,494-512).
cacaagactcttcatttca

SEQ ID NO: 45404 - DNA, 19 bp, Homo sapiens
  siRNA target sequence for ZNF354A (NM_005649.2,514-532).
ggactgatactgaaaagat

SEQ ID NO: 45405 - DNA, 19 bp, Homo sapiens
  siRNA target sequence for ZNF354A (NM_005649.2,576-594).
catatatgaaggcagatta

SEQ ID NO: 45406 - DNA, 19 bp, Homo sapiens
  siRNA target sequence for ZNF354A (NM_005649.2,615-633).
gggaagttttcagatagtt

SEQ ID NO: 45407 - DNA, 19 bp, Homo sapiens
  siRNA target sequence for ZNF354A (NM_005649.2,635-653).
cagccacccacaaaaaaat

SEQ ID NO: 45408 - DNA, 19 bp, Homo sapiens
  siRNA target sequence for ZNF354A (NM_005649.2,704-722).
gcccaaagtcagtgcttat

SEQ ID NO: 45409 - DNA, 19 bp, Homo sapiens
  siRNA target sequence for ZNF354A (NM_005649.2,705-723).
cccaaagtcagtgcttatt

SEQ ID NO: 45410 - DNA, 19 bp, Homo sapiens
  siRNA target sequence for ZNF354A (NM_005649.2,717-735).
gcttattaggcaacagata

SEQ ID NO: 45411 - DNA, 19 bp, Homo sapiens
  siRNA target sequence for ZNF354A (NM_005649.2,786-804).
caaacagaattcacaatta

SEQ ID NO: 45412 - DNA, 19 bp, Homo sapiens
  siRNA target sequence for ZNF354A (NM_005649.2,792-810).
gaattcacaattacttaat

SEQ ID NO: 45413 - DNA, 19 bp, Homo sapiens
  siRNA target sequence for ZNF354A (NM_005649.2,1039-1057).
ctcagtacatccctttata

SEQ ID NO: 45414 - DNA, 19 bp, Homo sapiens
  siRNA target sequence for ZNF354A (NM_005649.2,1122-1140).
ccgaaggtcaggccttttt

SEQ ID NO: 45415 - DNA, 19 bp, Homo sapiens
  siRNA target sequence for ZNF358 (NM_018083.1,227-245).
cctcgatccagatgtgatt

SEQ ID NO: 45416 - DNA, 19 bp, Homo sapiens
  siRNA target sequence for ZNF358 (NM_018083.1,256-274).
ccctgattctcgatcctaa

SEQ ID NO: 45417 - DNA, 19 bp, Homo sapiens
  siRNA target sequence for ZNF358 (NM_018083.1,605-623).
ctccacgctgctgaaacat

SEQ ID NO: 45418 - DNA, 19 bp, Homo sapiens
  siRNA target sequence for ZNF366 (NM_152625.1,434-452).
ccacaaagatgccctataa

SEQ ID NO: 45419 - DNA, 19 bp, Homo sapiens
  siRNA target sequence for ZNF366 (NM_152625.1,581-599).
gcaacgtgggcttccaatt

SEQ ID NO: 45420 - DNA, 19 bp, Homo sapiens
  siRNA target sequence for ZNF366 (NM_152625.1,1827-1845).
cctgacacgccacatgaaa

SEQ ID NO: 45421 - DNA, 19 bp, Homo sapiens
  siRNA target sequence for ZNF366 (NM_152625.1,1832-1850).
cacgccacatgaaagtcaa

SEQ ID NO: 45422 - DNA, 19 bp, Homo sapiens
  siRNA target sequence for ZNF366 (NM_152625.1,2330-2348).
ctgattacttatacttcaa

SEQ ID NO: 45423 - DNA, 19 bp, Homo sapiens
  siRNA target sequence for ZNF366 (NM_152625.1,2398-2416).
caagcagtgcttttaggta

SEQ ID NO: 45424 - DNA, 19 bp, Homo sapiens
  siRNA target sequence for ZNF382 (NM_032825.2,192-210).
gctcagaaggcgctttaca

SEQ ID NO: 45425 - DNA, 19 bp, Homo sapiens
  siRNA target sequence for ZNF382 (NM_032825.2,366-384).
gatgtcttagtgaagttca

SEQ ID NO: 45426 - DNA, 19 bp, Homo sapiens
  siRNA target sequence for ZNF382 (NM_032825.2,402-420).
cattctagacccctcatat

SEQ ID NO: 45427 - DNA, 19 bp, Homo sapiens
  siRNA target sequence for ZNF382 (NM_032825.2,406-424).
ctagacccctcatattcat

SEQ ID NO: 45428 - DNA, 19 bp, Homo sapiens
  siRNA target sequence for ZNF382 (NM_032825.2,409-427).
gacccctcatattcatcaa

SEQ ID NO: 45429 - DNA, 19 bp, Homo sapiens
  siRNA target sequence for ZNF382 (NM_032825.2,438-456).
ctaattaaggagagaagta

SEQ ID NO: 45430 - DNA, 19 bp, Homo sapiens
  siRNA target sequence for ZNF382 (NM_032825.2,601-619).
ctggatgggagaaatcact

SEQ ID NO: 45431 - DNA, 19 bp, Homo sapiens
  siRNA target sequence for ZNF382 (NM_032825.2,649-667).
ctgcagtgaatctccataa

SEQ ID NO: 45432 - DNA, 19 bp, Homo sapiens
  siRNA target sequence for ZNF382 (NM_032825.2,652-670).
cagtgaatctccataaaca

SEQ ID NO: 45433 - DNA, 19 bp, Homo sapiens
  siRNA target sequence for ZNF382 (NM_032825.2,679-697).
gagttctcagtggtaaaca

SEQ ID NO: 45434 - DNA, 19 bp, Homo sapiens
  siRNA target sequence for ZNF382 (NM_032825.2,688-706).
gtggtaaacaggagcttat

SEQ ID NO: 45435 - DNA, 19 bp, Homo sapiens
  siRNA target sequence for ZNF382 (NM_032825.2,691-709).
gtaaacaggagcttattca

SEQ ID NO: 45436 - DNA, 19 bp, Homo sapiens
  siRNA target sequence for ZNF382 (NM_032825.2,738-756).
ccatttgaccataatgaat

SEQ ID NO: 45437 - DNA, 19 bp, Homo sapiens
  siRNA target sequence for ZNF382 (NM_032825.2,744-762).
gaccataatgaatgtgaaa

SEQ ID NO: 45438 - DNA, 19 bp, Homo sapiens
  siRNA target sequence for ZNF382 (NM_032825.2,780-798).
ggaatgctatttacacata

SEQ ID NO: 45439 - DNA, 19 bp, Homo sapiens
  siRNA target sequence for ZNF382 (NM_032825.2,785-803).
gctatttacacatactaga

SEQ ID NO: 45440 - DNA, 19 bp, Homo sapiens
  siRNA target sequence for ZNF382 (NM_032825.2,820-838).
gaacctttgaatacaataa

SEQ ID NO: 45441 - DNA, 19 bp, Homo sapiens
  siRNA target sequence for ZNF382 (NM_032825.2,872-890).
cagtgtccatccaagtaat

SEQ ID NO: 45442 - DNA, 19 bp, Homo sapiens
  siRNA target sequence for ZNF382 (NM_032825.2,874-892).
gtgtccatccaagtaatct

SEQ ID NO: 45443 - DNA, 19 bp, Homo sapiens
  siRNA target sequence for ZNF382 (NM_032825.2,907-925).
cctctgcctacaacaaata

SEQ ID NO: 45444 - DNA, 19 bp, Homo sapiens
  siRNA target sequence for ZNF382 (NM_032825.2,938-956).
ctgcagaaagcctgttttt

SEQ ID NO: 45445 - DNA, 19 bp, Homo sapiens
  siRNA target sequence for ZNF382 (NM_032825.2,1003-1021).
cttactgtgggaataactt

SEQ ID NO: 45446 - DNA, 19 bp, Homo sapiens
  siRNA target sequence for ZNF382 (NM_032825.2,1158-1176).
ccctttatttgtatcgatt

SEQ ID NO: 45447 - DNA, 19 bp, Homo sapiens
  siRNA target sequence for ZNF382 (NM_032825.2,1199-1217).
ggccaccctcactagacat

SEQ ID NO: 45448 - DNA, 19 bp, Homo sapiens
  siRNA target sequence for ZNF382 (NM_032825.2,1740-1758).
gaaaccacgggaattcagt

SEQ ID NO: 45449 - DNA, 19 bp, Homo sapiens
  siRNA target sequence for ZNF384 (NM_133476.2,299-317).
gaatctcacttcaattcta

SEQ ID NO: 45450 - DNA, 19 bp, Homo sapiens
  siRNA target sequence for ZNF384 (NM_133476.2,354-372).
gtcagatcgagaacacaat

SEQ ID NO: 45451 - DNA, 19 bp, Homo sapiens
  siRNA target sequence for ZNF384 (NM_133476.2,536-554).
gcgtccgttacccagaata

SEQ ID NO: 45452 - DNA, 19 bp, Homo sapiens
  siRNA target sequence for ZNF384 (NM_133476.2,537-555).
cgtccgttacccagaatat

SEQ ID NO: 45453 - DNA, 19 bp, Homo sapiens
  siRNA target sequence for ZNF384 (NM_133476.2,644-662).
ggtccgggtttggtaatca

SEQ ID NO: 45454 - DNA, 19 bp, Homo sapiens
  siRNA target sequence for ZNF384 (NM_133476.2,715-733).
catttcggctcccatgatt

SEQ ID NO: 45455 - DNA, 19 bp, Homo sapiens
  siRNA target sequence for ZNF384 (NM_133476.2,900-918).
ggctgcccgagatgaatga

SEQ ID NO: 45456 - DNA, 19 bp, Homo sapiens
  siRNA target sequence for ZNF384 (NM_133476.2,1109-1127).
cagcacatccgtatacact

SEQ ID NO: 45457 - DNA, 19 bp, Homo sapiens
  siRNA target sequence for ZNF384 (NM_133476.2,1130-1148).
ggggctaagccctacagtt

SEQ ID NO: 45458 - DNA, 19 bp, Homo sapiens
  siRNA target sequence for ZNF384 (NM_133476.2,1134-1152).
ctaagccctacagttgtaa

SEQ ID NO: 45459 - DNA, 19 bp, Homo sapiens
  siRNA target sequence for ZNF384 (NM_133476.2,1284-1302).
cccacagacggcaacacaa

SEQ ID NO: 45460 - DNA, 19 bp, Homo sapiens
  siRNA target sequence for ZNF384 (NM_133476.2,1288-1306).
cagacggcaacacaacaaa

SEQ ID NO: 45461 - DNA, 19 bp, Homo sapiens
  siRNA target sequence for ZNF384 (NM_133476.2,1292-1310).
cggcaacacaacaaagata

SEQ ID NO: 45462 - DNA, 19 bp, Homo sapiens
  siRNA target sequence for ZNF384 (NM_133476.2,1403-1421).
gtgtacacctgcactatct

SEQ ID NO: 45463 - DNA, 19 bp, Homo sapiens
  siRNA target sequence for ZNF384 (NM_133476.2,1427-1445).
cgggcatacacatcagaaa

SEQ ID NO: 45464 - DNA, 19 bp, Homo sapiens
  siRNA target sequence for ZNF384 (NM_133476.2,1430-1448).
gcatacacatcagaaacat

SEQ ID NO: 45465 - DNA, 19 bp, Homo sapiens
  siRNA target sequence for ZNF384 (NM_133476.2,1748-1766).
gacctgaccccgtataaga

SEQ ID NO: 45466 - DNA, 19 bp, Homo sapiens
  siRNA target sequence for ZNF384 (NM_133476.2,1767-1785).
cggcggagcatcataagga

SEQ ID NO: 45467 - DNA, 19 bp, Homo sapiens
  siRNA target sequence for ZNF398 (NM_020781.2,871-889).
ctctcatctccatggatta

SEQ ID NO: 45468 - DNA, 19 bp, Homo sapiens
  siRNA target sequence for ZNF398 (NM_020781.2,875-893).
catctccatggattatgct

SEQ ID NO: 45469 - DNA, 19 bp, Homo sapiens
  siRNA target sequence for ZNF398 (NM_020781.2,880-898).
ccatggattatgctataaa

SEQ ID NO: 45470 - DNA, 19 bp, Homo sapiens
  siRNA target sequence for ZNF398 (NM_020781.2,924-942).
caaccagaaggggaacata

SEQ ID NO: 45471 - DNA, 19 bp, Homo sapiens
  siRNA target sequence for ZNF398 (NM_020781.2,999-1017).
gagcctggtatttcaacat

SEQ ID NO: 45472 - DNA, 19 bp, Homo sapiens
  siRNA target sequence for ZNF398 (NM_020781.2,1001-1019).
gcctggtatttcaacatca

SEQ ID NO: 45473 - DNA, 19 bp, Homo sapiens
  siRNA target sequence for ZNF398 (NM_020781.2,1091-1109).
cgtgtacaaaagcacttat

SEQ ID NO: 45474 - DNA, 19 bp, Homo sapiens
  siRNA target sequence for ZNF398 (NM_020781.2,1301-1319).
gggacaagtgacttttact

SEQ ID NO: 45475 - DNA, 19 bp, Homo sapiens
  siRNA target sequence for ZNF398 (NM_020781.2,1353-1371).
ggcgagcaggtgttctcat

SEQ ID NO: 45476 - DNA, 19 bp, Homo sapiens
  siRNA target sequence for ZNF398 (NM_020781.2,1986-2004).
cgcaagcaccacctaatga

SEQ ID NO: 45477 - DNA, 19 bp, Homo sapiens
  siRNA target sequence for ZNF398 (NM_020781.2,1987-2005).
gcaagcaccacctaatgaa

SEQ ID NO: 45478 - DNA, 19 bp, Homo sapiens
  siRNA target sequence for ZNF398 (NM_020781.2,1988-2006).
caagcaccacctaatgaaa

SEQ ID NO: 45479 - DNA, 19 bp, Homo sapiens
  siRNA target sequence for ZNF398 (NM_020781.2,2116-2134).
gctgtgggggtgatagtga

SEQ ID NO: 45480 - DNA, 19 bp, Homo sapiens
  siRNA target sequence for ZNF398 (NM_020781.2,2157-2175).
ccaccaggtcccctcataa

SEQ ID NO: 45481 - DNA, 19 bp, Homo sapiens
  siRNA target sequence for ZNF398 (NM_170686.1,54-72).
gactccgagtgccttacat

SEQ ID NO: 45482 - DNA, 19 bp, Homo sapiens
  siRNA target sequence for ZNF398 (NM_170686.1,125-143).
gcagacagcagctatctct

SEQ ID NO: 45483 - DNA, 19 bp, Homo sapiens
  siRNA target sequence for ZNF398 (NM_170686.1,401-419).
gcggctccctccaggtatt

SEQ ID NO: 45484 - DNA, 19 bp, Homo sapiens
  siRNA target sequence for ZNF398 (NM_170686.1,402-420).
cggctccctccaggtatta

SEQ ID NO: 45485 - DNA, 19 bp, Homo sapiens
  siRNA target sequence for ZNF398 (NM_170686.1,403-421).
ggctccctccaggtattaa

SEQ ID NO: 45486 - DNA, 19 bp, Homo sapiens
  siRNA target sequence for ZNF398 (NM_170686.1,516-534).
ctttacaagaatatcatga

SEQ ID NO: 45487 - DNA, 19 bp, Homo sapiens
  siRNA target sequence for ZNF408 (NM_024741.1,297-315).
ctgggcctggacttaggat

SEQ ID NO: 45488 - DNA, 19 bp, Homo sapiens
  siRNA target sequence for ZNF408 (NM_024741.1,375-393).
cgagacatcctcgctttaa

SEQ ID NO: 45489 - DNA, 19 bp, Homo sapiens
  siRNA target sequence for ZNF408 (NM_024741.1,376-394).
gagacatcctcgctttaaa

SEQ ID NO: 45490 - DNA, 19 bp, Homo sapiens
  siRNA target sequence for ZNF408 (NM_024741.1,378-396).
gacatcctcgctttaaaga

SEQ ID NO: 45491 - DNA, 19 bp, Homo sapiens
  siRNA target sequence for ZNF408 (NM_024741.1,685-703).
ggcttcatctgcaagtgta

SEQ ID NO: 45492 - DNA, 19 bp, Homo sapiens
  siRNA target sequence for ZNF408 (NM_024741.1,957-975).
gaccgaatttccaaggata

SEQ ID NO: 45493 - DNA, 19 bp, Homo sapiens
  siRNA target sequence for ZNF408 (NM_024741.1,1047-1065).
cctgaacttcagagcaatt

SEQ ID NO: 45494 - DNA, 19 bp, Homo sapiens
  siRNA target sequence for ZNF408 (NM_024741.1,1089-1107).
ggcagtggagccagtttct

SEQ ID NO: 45495 - DNA, 19 bp, Homo sapiens
  siRNA target sequence for ZNF408 (NM_024741.1,1301-1319).
gtgtggcaaggcattccta

SEQ ID NO: 45496 - DNA, 19 bp, Homo sapiens
  siRNA target sequence for ZNF408 (NM_024741.1,1320-1338).
cagctgtgccacctaaaga

SEQ ID NO: 45497 - DNA, 19 bp, Homo sapiens
  siRNA target sequence for ZNF408 (NM_024741.1,1506-1524).
gagcaccaggtggtacatt

SEQ ID NO: 45498 - DNA, 19 bp, Homo sapiens
  siRNA target sequence for ZNF408 (NM_024741.1,1671-1689).
ggctccctgcggaaccata

SEQ ID NO: 45499 - DNA, 19 bp, Homo sapiens
  siRNA target sequence for ZNF408 (NM_024741.1,1672-1690).
gctccctgcggaaccatat

SEQ ID NO: 45500 - DNA, 19 bp, Homo sapiens
  siRNA target sequence for ZNF409 (NM_014894.1,604-622).
gtcacttcccaccaaatga

SEQ ID NO: 45501 - DNA, 19 bp, Homo sapiens
  siRNA target sequence for ZNF409 (NM_014894.1,681-699).
gacctaagcaaccacttat

SEQ ID NO: 45502 - DNA, 19 bp, Homo sapiens
  siRNA target sequence for ZNF409 (NM_014894.1,684-702).
ctaagcaaccacttattct

SEQ ID NO: 45503 - DNA, 19 bp, Homo sapiens
  siRNA target sequence for ZNF409 (NM_014894.1,885-903).
ccaatccaaggctttagct

SEQ ID NO: 45504 - DNA, 19 bp, Homo sapiens
  siRNA target sequence for ZNF409 (NM_014894.1,983-1001).
ctaccagctggctccaaat

SEQ ID NO: 45505 - DNA, 19 bp, Homo sapiens
  siRNA target sequence for ZNF409 (NM_014894.1,1142-1160).
gctaacccctgcccaatat

SEQ ID NO: 45506 - DNA, 19 bp, Homo sapiens
  siRNA target sequence for ZNF409 (NM_014894.1,1210-1228).
gcaaggccctcataagctt

SEQ ID NO: 45507 - DNA, 19 bp, Homo sapiens
  siRNA target sequence for ZNF409 (NM_014894.1,1845-1863).
cgtggagagagctacaact

SEQ ID NO: 45508 - DNA, 19 bp, Homo sapiens
  siRNA target sequence for ZNF409 (NM_014894.1,1856-1874).
ctacaactgtggctacaaa

SEQ ID NO: 45509 - DNA, 19 bp, Homo sapiens
  siRNA target sequence for ZNF409 (NM_014894.1,1887-1905).
gacgtctgcaactactcta

SEQ ID NO: 45510 - DNA, 19 bp, Homo sapiens
  siRNA target sequence for ZNF409 (NM_014894.1,1890-1908).
gtctgcaactactctacaa

SEQ ID NO: 45511 - DNA, 19 bp, Homo sapiens
  siRNA target sequence for ZNF409 (NM_014894.1,2077-2095).
gcagctacgagacaaacat

SEQ ID NO: 45512 - DNA, 19 bp, Homo sapiens
  siRNA target sequence for ZNF409 (NM_014894.1,2100-2118).
cgtaacctgcgcatccata

SEQ ID NO: 45513 - DNA, 19 bp, Homo sapiens
  siRNA target sequence for ZNF409 (NM_014894.1,2101-2119).
gtaacctgcgcatccatat

SEQ ID NO: 45514 - DNA, 19 bp, Homo sapiens
  siRNA target sequence for ZNF409 (NM_014894.1,2684-2702).
cctcaagactgacaaacat

SEQ ID NO: 45515 - DNA, 19 bp, Homo sapiens
  siRNA target sequence for ZNF409 (NM_014894.1,2777-2795).
gggagatggggctccttat

SEQ ID NO: 45516 - DNA, 19 bp, Homo sapiens
  siRNA target sequence for ZNF409 (NM_014894.1,2881-2899).
gtgcagcccacgaagaaaa

SEQ ID NO: 45517 - DNA, 19 bp, Homo sapiens
  siRNA target sequence for ZNF43 (NM_003423.1,878-896).
ccacatctagctcaacata

SEQ ID NO: 45518 - DNA, 19 bp, Homo sapiens
  siRNA target sequence for ZNF43 (NM_003423.1,948-966).
cttttaactgcccttcaat

SEQ ID NO: 45519 - DNA, 19 bp, Homo sapiens
  siRNA target sequence for ZNF43 (NM_003423.1,957-975).
gcccttcaatcatcactaa

SEQ ID NO: 45520 - DNA, 19 bp, Homo sapiens
  siRNA target sequence for ZNF43 (NM_003423.1,958-976).
cccttcaatcatcactaaa

SEQ ID NO: 45521 - DNA, 19 bp, Homo sapiens
  siRNA target sequence for ZNF43 (NM_003423.1,2469-2487).
gaccctcaaaccttattga

SEQ ID NO: 45522 - DNA, 19 bp, Homo sapiens
  siRNA target sequence for ZNF430 (NM_025189.2,406-424).
gacatgcgatggtagatca

SEQ ID NO: 45523 - DNA, 19 bp, Homo sapiens
  siRNA target sequence for ZNF431 (NM_133473.1,102-120).
ggacgacttgaaatatgga

SEQ ID NO: 45524 - DNA, 19 bp, Homo sapiens
  siRNA target sequence for ZNF431 (NM_133473.1,539-557).
gctccgcaagtgtagatga

SEQ ID NO: 45525 - DNA, 19 bp, Homo sapiens
  siRNA target sequence for ZNF431 (NM_133473.1,542-560).
ccgcaagtgtagatgagta

SEQ ID NO: 45526 - DNA, 19 bp, Homo sapiens
  siRNA target sequence for ZNF431 (NM_133473.1,543-561).
cgcaagtgtagatgagtat

SEQ ID NO: 45527 - DNA, 19 bp, Homo sapiens
  siRNA target sequence for ZNF432 (NM_014650.1,235-253).
ctgacactggaggatgtta

SEQ ID NO: 45528 - DNA, 19 bp, Homo sapiens
  siRNA target sequence for ZNF432 (NM_014650.1,237-255).
gacactggaggatgttact

SEQ ID NO: 45529 - DNA, 19 bp, Homo sapiens
  siRNA target sequence for ZNF432 (NM_014650.1,289-307).
ggcccttttcagaaggatt

SEQ ID NO: 45530 - DNA, 19 bp, Homo sapiens
  siRNA target sequence for ZNF432 (NM_014650.1,290-308).
gcccttttcagaaggattt

SEQ ID NO: 45531 - DNA, 19 bp, Homo sapiens
  siRNA target sequence for ZNF432 (NM_014650.1,345-363).
gctatcaatgggttatcaa

SEQ ID NO: 45532 - DNA, 19 bp, Homo sapiens
  siRNA target sequence for ZNF432 (NM_014650.1,544-562).
ggaaatactgcctctcaaa

SEQ ID NO: 45533 - DNA, 19 bp, Homo sapiens
  siRNA target sequence for ZNF432 (NM_014650.1,715-733).
ggtaactatgaagaacttt

SEQ ID NO: 45534 - DNA, 19 bp, Homo sapiens
  siRNA target sequence for ZNF432 (NM_014650.1,742-760).
gctaaattctctgtaagta

SEQ ID NO: 45535 - DNA, 19 bp, Homo sapiens
  siRNA target sequence for ZNF432 (NM_014650.1,776-794).
ctaaatcccaagtcagtaa

SEQ ID NO: 45536 - DNA, 19 bp, Homo sapiens
  siRNA target sequence for ZNF432 (NM_014650.1,920-938).
ctttgtgtgcaaaagtgtt

SEQ ID NO: 45537 - DNA, 19 bp, Homo sapiens
  siRNA target sequence for ZNF432 (NM_014650.1,944-962).
gaaagtccaggctaaatga

SEQ ID NO: 45538 - DNA, 19 bp, Homo sapiens
  siRNA target sequence for ZNF432 (NM_014650.1,1108-1126).
ccaggcaagcgtaatctca

SEQ ID NO: 45539 - DNA, 19 bp, Homo sapiens
  siRNA target sequence for ZNF432 (NM_014650.1,1109-1127).
caggcaagcgtaatctcat

SEQ ID NO: 45540 - DNA, 19 bp, Homo sapiens
  siRNA target sequence for ZNF432 (NM_014650.1,1112-1130).
gcaagcgtaatctcattgt

SEQ ID NO: 45541 - DNA, 19 bp, Homo sapiens
  siRNA target sequence for ZNF432 (NM_014650.1,1113-1131).
caagcgtaatctcattgta

SEQ ID NO: 45542 - DNA, 19 bp, Homo sapiens
  siRNA target sequence for ZNF432 (NM_014650.1,1270-1288).
ggcttcaccacaaaacact

SEQ ID NO: 45543 - DNA, 19 bp, Homo sapiens
  siRNA target sequence for ZNF432 (NM_014650.1,1280-1298).
caaaacactatgtcatcat

SEQ ID NO: 45544 - DNA, 19 bp, Homo sapiens
  siRNA target sequence for ZNF432 (NM_014650.1,1371-1389).
ccgtatgatcgaacatcaa

SEQ ID NO: 45545 - DNA, 19 bp, Homo sapiens
  siRNA target sequence for ZNF432 (NM_014650.1,1444-1462).
cccaggaagagtaatctta

SEQ ID NO: 45546 - DNA, 19 bp, Homo sapiens
  siRNA target sequence for ZNF432 (NM_014650.1,1448-1466).
ggaagagtaatcttattgt

SEQ ID NO: 45547 - DNA, 19 bp, Homo sapiens
  siRNA target sequence for ZNF432 (NM_014650.1,1494-1512).
gtcatatctatgtagtgaa

SEQ ID NO: 45548 - DNA, 19 bp, Homo sapiens
  siRNA target sequence for ZNF432 (NM_014650.1,1533-1551).
gaaaagcatgctcatcata

SEQ ID NO: 45549 - DNA, 19 bp, Homo sapiens
  siRNA target sequence for ZNF432 (NM_014650.1,1620-1638).
gagtcggctgattgtacat

SEQ ID NO: 45550 - DNA, 19 bp, Homo sapiens
  siRNA target sequence for ZNF432 (NM_014650.1,1622-1640).
gtcggctgattgtacatca

SEQ ID NO: 45551 - DNA, 19 bp, Homo sapiens
  siRNA target sequence for ZNF432 (NM_014650.1,1701-1719).
gaatagcggactgatgtta

SEQ ID NO: 45552 - DNA, 19 bp, Homo sapiens
  siRNA target sequence for ZNF432 (NM_014650.1,1706-1724).
gcggactgatgttacatca

SEQ ID NO: 45553 - DNA, 19 bp, Homo sapiens
  siRNA target sequence for ZNF432 (NM_014650.1,1782-1800).
ctttaagagcaatcttgtt

SEQ ID NO: 45554 - DNA, 19 bp, Homo sapiens
  siRNA target sequence for ZNF432 (NM_014650.1,1865-1883).
ccatgaaacgctatctcat

SEQ ID NO: 45555 - DNA, 19 bp, Homo sapiens
  siRNA target sequence for ZNF432 (NM_014650.1,1962-1980).
gcttgctttacataagcaa

SEQ ID NO: 45556 - DNA, 19 bp, Homo sapiens
  siRNA target sequence for ZNF432 (NM_014650.1,2037-2055).
gaagagccgtctaattgtt

SEQ ID NO: 45557 - DNA, 19 bp, Homo sapiens
  siRNA target sequence for ZNF432 (NM_014650.1,2040-2058).
gagccgtctaattgttcat

SEQ ID NO: 45558 - DNA, 19 bp, Homo sapiens
  siRNA target sequence for ZNF432 (NM_014650.1,2042-2060).
gccgtctaattgttcatca

SEQ ID NO: 45559 - DNA, 19 bp, Homo sapiens
  siRNA target sequence for ZNF432 (NM_014650.1,2043-2061).
ccgtctaattgttcatcaa

SEQ ID NO: 45560 - DNA, 19 bp, Homo sapiens
  siRNA target sequence for ZNF433 (NM_152602.1,320-338).
ggaaaccccagaacatata

SEQ ID NO: 45561 - DNA, 19 bp, Homo sapiens
  siRNA target sequence for ZNF433 (NM_152602.1,321-339).
gaaaccccagaacatatat

SEQ ID NO: 45562 - DNA, 19 bp, Homo sapiens
  siRNA target sequence for ZNF433 (NM_152602.1,326-344).
cccagaacatatatgtaga

SEQ ID NO: 45563 - DNA, 19 bp, Homo sapiens
  siRNA target sequence for ZNF433 (NM_152602.1,340-358).
gtagagtacgaaaatctaa

SEQ ID NO: 45564 - DNA, 19 bp, Homo sapiens
  siRNA target sequence for ZNF433 (NM_152602.1,657-675).
ggctcatagtggaaggaaa

SEQ ID NO: 45565 - DNA, 19 bp, Homo sapiens
  siRNA target sequence for ZNF433 (NM_152602.1,1473-1491).
ctcactccttcaaacacat

SEQ ID NO: 45566 - DNA, 19 bp, Homo sapiens
  siRNA target sequence for ZNF433 (NM_152602.1,1973-1991).
gtgcctcgcgacttcaaat

SEQ ID NO: 45567 - DNA, 19 bp, Homo sapiens
  siRNA target sequence for ZNF436 (NM_030634.1,433-451).
gatatggccatgtatctca

SEQ ID NO: 45568 - DNA, 19 bp, Homo sapiens
  siRNA target sequence for ZNF436 (NM_030634.1,554-572).
ggagtgagaacgaggtaaa

SEQ ID NO: 45569 - DNA, 19 bp, Homo sapiens
  siRNA target sequence for ZNF436 (NM_030634.1,555-573).
gagtgagaacgaggtaaat

SEQ ID NO: 45570 - DNA, 19 bp, Homo sapiens
  siRNA target sequence for ZNF436 (NM_030634.1,598-616).
gtacaatttgggactacat

SEQ ID NO: 45571 - DNA, 19 bp, Homo sapiens
  siRNA target sequence for ZNF436 (NM_030634.1,633-651).
gaatgctgaggaaaatcct

SEQ ID NO: 45572 - DNA, 19 bp, Homo sapiens
  siRNA target sequence for ZNF436 (NM_030634.1,675-693).
cggagataggtcagaaaga

SEQ ID NO: 45573 - DNA, 19 bp, Homo sapiens
  siRNA target sequence for ZNF436 (NM_030634.1,713-731).
cagaagagtgggtaagcta

SEQ ID NO: 45574 - DNA, 19 bp, Homo sapiens
  siRNA target sequence for ZNF436 (NM_030634.1,738-756).
ccaaccagtcactgatcta

SEQ ID NO: 45575 - DNA, 19 bp, Homo sapiens
  siRNA target sequence for ZNF436 (NM_030634.1,779-797).
caggcatccgctatcatat

SEQ ID NO: 45576 - DNA, 19 bp, Homo sapiens
  siRNA target sequence for ZNF436 (NM_030634.1,781-799).
ggcatccgctatcatatat

SEQ ID NO: 45577 - DNA, 19 bp, Homo sapiens
  siRNA target sequence for ZNF436 (NM_030634.1,783-801).
catccgctatcatatatgt

SEQ ID NO: 45578 - DNA, 19 bp, Homo sapiens
  siRNA target sequence for ZNF436 (NM_030634.1,786-804).
ccgctatcatatatgttct

SEQ ID NO: 45579 - DNA, 19 bp, Homo sapiens
  siRNA target sequence for ZNF436 (NM_030634.1,1076-1094).
gccgtctctctcacctaat

SEQ ID NO: 45580 - DNA, 19 bp, Homo sapiens
  siRNA target sequence for ZNF436 (NM_030634.1,1079-1097).
gtctctctcacctaatcca

SEQ ID NO: 45581 - DNA, 19 bp, Homo sapiens
  siRNA target sequence for ZNF436 (NM_030634.1,1244-1262).
gtgagagatctgatctcat

SEQ ID NO: 45582 - DNA, 19 bp, Homo sapiens
  siRNA target sequence for ZNF436 (NM_030634.1,1377-1395).
gccataccactgtaacgaa

SEQ ID NO: 45583 - DNA, 19 bp, Homo sapiens
  siRNA target sequence for ZNF436 (NM_030634.1,1580-1598).
gtgaaaggtcagatctaat

SEQ ID NO: 45584 - DNA, 19 bp, Homo sapiens
  siRNA target sequence for ZNF436 (NM_030634.1,1582-1600).
gaaaggtcagatctaatta

SEQ ID NO: 45585 - DNA, 19 bp, Homo sapiens
  siRNA target sequence for ZNF439 (NM_152262.1,1391-1409).
ctgccccaaatcttcaatt

SEQ ID NO: 45586 - DNA, 19 bp, Homo sapiens
  siRNA target sequence for ZNF439 (NM_152262.1,1395-1413).
cccaaatcttcaattgcat

SEQ ID NO: 45587 - DNA, 19 bp, Homo sapiens
  siRNA target sequence for ZNF44 (NM_016264.1,300-318).
gatcagcaccaaaatctca

SEQ ID NO: 45588 - DNA, 19 bp, Homo sapiens
  siRNA target sequence for ZNF44 (NM_016264.1,389-407).
cttaagccagattcgaaat

SEQ ID NO: 45589 - DNA, 19 bp, Homo sapiens
  siRNA target sequence for ZNF44 (NM_016264.1,398-416).
gattcgaaatagtattgta

SEQ ID NO: 45590 - DNA, 19 bp, Homo sapiens
  siRNA target sequence for ZNF44 (NM_016264.1,425-443).
cactcccgccagagtagat

SEQ ID NO: 45591 - DNA, 19 bp, Homo sapiens
  siRNA target sequence for ZNF44 (NM_016264.1,693-711).
cgaagacatatggtagtaa

SEQ ID NO: 45592 - DNA, 19 bp, Homo sapiens
  siRNA target sequence for ZNF44 (NM_016264.1,694-712).
gaagacatatggtagtaaa

SEQ ID NO: 45593 - DNA, 19 bp, Homo sapiens
  siRNA target sequence for ZNF44 (NM_016264.1,1186-1204).
ctggttcagcacgaattca

SEQ ID NO: 45594 - DNA, 19 bp, Homo sapiens
  siRNA target sequence for ZNF44 (NM_016264.1,1189-1207).
gttcagcacgaattcatga

SEQ ID NO: 45595 - DNA, 19 bp, Homo sapiens
  siRNA target sequence for ZNF441 (NM_152355.1,430-448).
ctcaagacagtattgtgaa

SEQ ID NO: 45596 - DNA, 19 bp, Homo sapiens
  siRNA target sequence for ZNF441 (NM_152355.1,439-457).
gtattgtgaacgagaaaat

SEQ ID NO: 45597 - DNA, 19 bp, Homo sapiens
  siRNA target sequence for ZNF441 (NM_152355.1,500-518).
cctcatgggtcgttcatct

SEQ ID NO: 45598 - DNA, 19 bp, Homo sapiens
  siRNA target sequence for ZNF441 (NM_152355.1,958-976).
cctgttacactcaactata

SEQ ID NO: 45599 - DNA, 19 bp, Homo sapiens
  siRNA target sequence for ZNF441 (NM_152355.1,1202-1220).
ctctgattgcacaggtttt

SEQ ID NO: 45600 - DNA, 19 bp, Homo sapiens
  siRNA target sequence for ZNF441 (NM_152355.1,1451-1469).
catttgttgcacttacctt

SEQ ID NO: 45601 - DNA, 19 bp, Homo sapiens
  siRNA target sequence for ZNF441 (NM_152355.1,1796-1814).
cagttacattcaactacat

SEQ ID NO: 45602 - DNA, 19 bp, Homo sapiens
  siRNA target sequence for ZNF441 (NM_152355.1,2043-2061).
cattcaagttacttacgaa

SEQ ID NO: 45603 - DNA, 19 bp, Homo sapiens
  siRNA target sequence for ZNF441 (NM_152355.1,2212-2230).
gtatcagttcctttcataa

SEQ ID NO: 45604 - DNA, 19 bp, Homo sapiens
  siRNA target sequence for ZNF442 (NM_030824.1,627-645).
ctgactctcagactaatga

SEQ ID NO: 45605 - DNA, 19 bp, Homo sapiens
  siRNA target sequence for ZNF442 (NM_030824.1,840-858).
ggagcctaagatgtcatat

SEQ ID NO: 45606 - DNA, 19 bp, Homo sapiens
  siRNA target sequence for ZNF442 (NM_030824.1,886-904).
gccagatagtactgtgaat

SEQ ID NO: 45607 - DNA, 19 bp, Homo sapiens
  siRNA target sequence for ZNF442 (NM_030824.1,888-906).
cagatagtactgtgaatga

SEQ ID NO: 45608 - DNA, 19 bp, Homo sapiens
  siRNA target sequence for ZNF442 (NM_030824.1,950-968).
gaaatcatgggttgttcat

SEQ ID NO: 45609 - DNA, 19 bp, Homo sapiens
  siRNA target sequence for ZNF442 (NM_030824.1,955-973).
catgggttgttcattcctt

SEQ ID NO: 45610 - DNA, 19 bp, Homo sapiens
  siRNA target sequence for ZNF442 (NM_030824.1,966-984).
cattccttaattgctatat

SEQ ID NO: 45611 - DNA, 19 bp, Homo sapiens
  siRNA target sequence for ZNF443 (NM_005815.2,1725-1743).
cggtcattatgataactta

SEQ ID NO: 45612 - DNA, 19 bp, Homo sapiens
  siRNA target sequence for ZNF450 (NM_014797.1,233-251).
ctgtgctggccagttttga

SEQ ID NO: 45613 - DNA, 19 bp, Homo sapiens
  siRNA target sequence for ZNF450 (NM_014797.1,278-296).
gtgacattactttaatcgt

SEQ ID NO: 45614 - DNA, 19 bp, Homo sapiens
  siRNA target sequence for ZNF450 (NM_014797.1,287-305).
ctttaatcgtggagaatgt

SEQ ID NO: 45615 - DNA, 19 bp, Homo sapiens
  siRNA target sequence for ZNF450 (NM_014797.1,331-349).
cttgctgccagtagtgaat

SEQ ID NO: 45616 - DNA, 19 bp, Homo sapiens
  siRNA target sequence for ZNF450 (NM_014797.1,341-359).
gtagtgaatacttctcaat

SEQ ID NO: 45617 - DNA, 19 bp, Homo sapiens
  siRNA target sequence for ZNF450 (NM_014797.1,344-362).
gtgaatacttctcaatgat

SEQ ID NO: 45618 - DNA, 19 bp, Homo sapiens
  siRNA target sequence for ZNF450 (NM_014797.1,430-448).
ggtatcctgctggaattta

SEQ ID NO: 45619 - DNA, 19 bp, Homo sapiens
  siRNA target sequence for ZNF450 (NM_014797.1,431-449).
gtatcctgctggaatttat

SEQ ID NO: 45620 - DNA, 19 bp, Homo sapiens
  siRNA target sequence for ZNF450 (NM_014797.1,498-516).
ggctactgctcagttctta

SEQ ID NO: 45621 - DNA, 19 bp, Homo sapiens
  siRNA target sequence for ZNF450 (NM_014797.1,547-565).
gacttccaaaataatcata

SEQ ID NO: 45622 - DNA, 19 bp, Homo sapiens
  siRNA target sequence for ZNF450 (NM_014797.1,598-616).
ggtgccccagtggttgtta

SEQ ID NO: 45623 - DNA, 19 bp, Homo sapiens
  siRNA target sequence for ZNF450 (NM_014797.1,599-617).
gtgccccagtggttgttat

SEQ ID NO: 45624 - DNA, 19 bp, Homo sapiens
  siRNA target sequence for ZNF450 (NM_014797.1,661-679).
ccaaaaaaagtcaatacat

SEQ ID NO: 45625 - DNA, 19 bp, Homo sapiens
  siRNA target sequence for ZNF450 (NM_014797.1,742-760).
gttcagaatagacaaaact

SEQ ID NO: 45626 - DNA, 19 bp, Homo sapiens
  siRNA target sequence for ZNF450 (NM_014797.1,782-800).
gtgtactgaatgagcaaat

SEQ ID NO: 45627 - DNA, 19 bp, Homo sapiens
  siRNA target sequence for ZNF450 (NM_014797.1,944-962).
ggagatccgtcaaacttaa

SEQ ID NO: 45628 - DNA, 19 bp, Homo sapiens
  siRNA target sequence for ZNF450 (NM_014797.1,947-965).
gatccgtcaaacttaaaga

SEQ ID NO: 45629 - DNA, 19 bp, Homo sapiens
  siRNA target sequence for ZNF450 (NM_014797.1,952-970).
gtcaaacttaaagattaca

SEQ ID NO: 45630 - DNA, 19 bp, Homo sapiens
  siRNA target sequence for ZNF450 (NM_014797.1,1296-1314).
gtcttttacctgtgatcaa

SEQ ID NO: 45631 - DNA, 19 bp, Homo sapiens
  siRNA target sequence for ZNF450 (NM_014797.1,1309-1327).
gatcaatgcggaaaatatt

SEQ ID NO: 45632 - DNA, 19 bp, Homo sapiens
  siRNA target sequence for ZNF450 (NM_014797.1,1350-1368).
gagccattaccgagttcat

SEQ ID NO: 45633 - DNA, 19 bp, Homo sapiens
  siRNA target sequence for ZNF450 (NM_014797.1,1640-1658).
cctgccctgagtgtaactt

SEQ ID NO: 45634 - DNA, 19 bp, Homo sapiens
  siRNA target sequence for ZNF450 (NM_014797.1,1641-1659).
ctgccctgagtgtaactta

SEQ ID NO: 45635 - DNA, 19 bp, Homo sapiens
  siRNA target sequence for ZNF450 (NM_014797.1,1660-1678).
cagtttgctcgcttagaca

SEQ ID NO: 45636 - DNA, 19 bp, Homo sapiens
  siRNA target sequence for ZNF450 (NM_014797.1,1666-1684).
gctcgcttagacaacttga

SEQ ID NO: 45637 - DNA, 19 bp, Homo sapiens
  siRNA target sequence for ZNF450 (NM_014797.1,1667-1685).
ctcgcttagacaacttgaa

SEQ ID NO: 45638 - DNA, 19 bp, Homo sapiens
  siRNA target sequence for ZNF450 (NM_014797.1,1680-1698).
cttgaaggctcacttgaaa

SEQ ID NO: 45639 - DNA, 19 bp, Homo sapiens
  siRNA target sequence for ZNF450 (NM_014797.1,1686-1704).
ggctcacttgaaaattcat

SEQ ID NO: 45640 - DNA, 19 bp, Homo sapiens
  siRNA target sequence for ZNF450 (NM_014797.1,1710-1728).
ggagaagcatgcttcagat

SEQ ID NO: 45641 - DNA, 19 bp, Homo sapiens
  siRNA target sequence for ZNF450 (NM_014797.1,1736-1754).
gcatttctggcagtagtaa

SEQ ID NO: 45642 - DNA, 19 bp, Homo sapiens
  siRNA target sequence for ZNF450 (NM_014797.1,1737-1755).
catttctggcagtagtaat

SEQ ID NO: 45643 - DNA, 19 bp, Homo sapiens
  siRNA target sequence for ZNF450 (NM_014797.1,1833-1851).
cgtaaccgattctgtacat

SEQ ID NO: 45644 - DNA, 19 bp, Homo sapiens
  siRNA target sequence for ZNF450 (NM_014797.1,1838-1856).
ccgattctgtacataacat

SEQ ID NO: 45645 - DNA, 19 bp, Homo sapiens
  siRNA target sequence for ZNF450 (NM_014797.1,1901-1919).
cagagagttcccaaaacat

SEQ ID NO: 45646 - DNA, 19 bp, Homo sapiens
  siRNA target sequence for ZNF450 (NM_014797.1,2084-2102).
ctctgtccaaggaaacact

SEQ ID NO: 45647 - DNA, 19 bp, Homo sapiens
  siRNA target sequence for ZNF450 (NM_014797.1,2134-2152).
gaggagctccatttagcta

SEQ ID NO: 45648 - DNA, 19 bp, Homo sapiens
  siRNA target sequence for ZNF450 (NM_014797.1,2139-2157).
gctccatttagctacaagt

SEQ ID NO: 45649 - DNA, 19 bp, Homo sapiens
  siRNA target sequence for ZNF450 (NM_014797.1,2140-2158).
ctccatttagctacaagta

SEQ ID NO: 45650 - DNA, 19 bp, Homo sapiens
  siRNA target sequence for ZNF450 (NM_014797.1,2142-2160).
ccatttagctacaagtact

SEQ ID NO: 45651 - DNA, 19 bp, Homo sapiens
  siRNA target sequence for ZNF481 (NM_020924.2,90-108).
gatctccttcacttcaagt

SEQ ID NO: 45652 - DNA, 19 bp, Homo sapiens
  siRNA target sequence for ZNF481 (NM_020924.2,207-225).
cagggacataaaattgtgt

SEQ ID NO: 45653 - DNA, 19 bp, Homo sapiens
  siRNA target sequence for ZNF481 (NM_020924.2,231-249).
gcaggttcccccttcttaa

SEQ ID NO: 45654 - DNA, 19 bp, Homo sapiens
  siRNA target sequence for ZNF481 (NM_020924.2,235-253).
gttcccccttcttaagaga

SEQ ID NO: 45655 - DNA, 19 bp, Homo sapiens
  siRNA target sequence for ZNF481 (NM_020924.2,270-288).
gattccagagaggtgaaaa

SEQ ID NO: 45656 - DNA, 19 bp, Homo sapiens
  siRNA target sequence for ZNF481 (NM_020924.2,281-299).
ggtgaaaatctccatatta

SEQ ID NO: 45657 - DNA, 19 bp, Homo sapiens
  siRNA target sequence for ZNF481 (NM_020924.2,315-333).
gggagacaattgctcttat

SEQ ID NO: 45658 - DNA, 19 bp, Homo sapiens
  siRNA target sequence for ZNF481 (NM_020924.2,439-457).
ccctgtggaagtttataaa

SEQ ID NO: 45659 - DNA, 19 bp, Homo sapiens
  siRNA target sequence for ZNF481 (NM_020924.2,458-476).
gccaaaacaaccaatggat

SEQ ID NO: 45660 - DNA, 19 bp, Homo sapiens
  siRNA target sequence for ZNF481 (NM_020924.2,502-520).
gtgcttctccccagtcaaa

SEQ ID NO: 45661 - DNA, 19 bp, Homo sapiens
  siRNA target sequence for ZNF481 (NM_020924.2,508-526).
ctccccagtcaaaagaaca

SEQ ID NO: 45662 - DNA, 19 bp, Homo sapiens
  siRNA target sequence for ZNF481 (NM_020924.2,557-575).
ggactcaccttgtattcat

SEQ ID NO: 45663 - DNA, 19 bp, Homo sapiens
  siRNA target sequence for ZNF481 (NM_020924.2,602-620).
ggacagtgatattcagatt

SEQ ID NO: 45664 - DNA, 19 bp, Homo sapiens
  siRNA target sequence for ZNF481 (NM_020924.2,645-663).
gtatcagaggttagaagta

SEQ ID NO: 45665 - DNA, 19 bp, Homo sapiens
  siRNA target sequence for ZNF481 (NM_020924.2,720-738).
ccccagcactccctgataa

SEQ ID NO: 45666 - DNA, 19 bp, Homo sapiens
  siRNA target sequence for ZNF481 (NM_020924.2,721-739).
cccagcactccctgataaa

SEQ ID NO: 45667 - DNA, 19 bp, Homo sapiens
  siRNA target sequence for ZNF481 (NM_020924.2,722-740).
ccagcactccctgataaat

SEQ ID NO: 45668 - DNA, 19 bp, Homo sapiens
  siRNA target sequence for ZNF481 (NM_020924.2,725-743).
gcactccctgataaattca

SEQ ID NO: 45669 - DNA, 19 bp, Homo sapiens
  siRNA target sequence for ZNF481 (NM_020924.2,726-744).
cactccctgataaattcaa

SEQ ID NO: 45670 - DNA, 19 bp, Homo sapiens
  siRNA target sequence for ZNF481 (NM_020924.2,786-804).
cacaattatgccctttctt

SEQ ID NO: 45671 - DNA, 19 bp, Homo sapiens
  siRNA target sequence for ZNF481 (NM_020924.2,811-829).
gcagtgataacatcatcat

SEQ ID NO: 45672 - DNA, 19 bp, Homo sapiens
  siRNA target sequence for ZNF481 (NM_020924.2,845-863).
ctttggccctaatattcga

SEQ ID NO: 45673 - DNA, 19 bp, Homo sapiens
  siRNA target sequence for ZNF481 (NM_020924.2,932-950).
gaactacgccaaccattta

SEQ ID NO: 45674 - DNA, 19 bp, Homo sapiens
  siRNA target sequence for ZNF481 (NM_020924.2,975-993).
ctactctgcggcaagactt

SEQ ID NO: 45675 - DNA, 19 bp, Homo sapiens
  siRNA target sequence for ZNF481 (NM_020924.2,1026-1044).
cgtgtgcatgccggaatta

SEQ ID NO: 45676 - DNA, 19 bp, Homo sapiens
  siRNA target sequence for ZNF481 (NM_020924.2,1027-1045).
gtgtgcatgccggaattaa

SEQ ID NO: 45677 - DNA, 19 bp, Homo sapiens
  siRNA target sequence for ZNF481 (NM_020924.2,1031-1049).
gcatgccggaattaaacct

SEQ ID NO: 45678 - DNA, 19 bp, Homo sapiens
  siRNA target sequence for ZNF481 (NM_020924.2,1032-1050).
catgccggaattaaacctt

SEQ ID NO: 45679 - DNA, 19 bp, Homo sapiens
  siRNA target sequence for ZNF481 (NM_020924.2,1093-1111).
ccttacaggatcatcttaa

SEQ ID NO: 45680 - DNA, 19 bp, Homo sapiens
  siRNA target sequence for ZNF481 (NM_020924.2,1282-1300).
caacagtcacagactctaa

SEQ ID NO: 45681 - DNA, 19 bp, Homo sapiens
  siRNA target sequence for ZNF481 (NM_020924.2,1355-1373).
ccaagctgtcctgaactta

SEQ ID NO: 45682 - DNA, 19 bp, Homo sapiens
  siRNA target sequence for ZNF481 (NM_020924.2,1356-1374).
caagctgtcctgaacttaa

SEQ ID NO: 45683 - DNA, 19 bp, Homo sapiens
  siRNA target sequence for ZNF481 (NM_020924.2,1359-1377).
gctgtcctgaacttaagaa

SEQ ID NO: 45684 - DNA, 19 bp, Homo sapiens
  siRNA target sequence for ZNF481 (NM_020924.2,1365-1383).
ctgaacttaagaaatgata

SEQ ID NO: 45685 - DNA, 19 bp, Homo sapiens
  siRNA target sequence for ZNF482 (NM_006626.3,162-180).
cttttgagacagcagaatt

SEQ ID NO: 45686 - DNA, 19 bp, Homo sapiens
  siRNA target sequence for ZNF482 (NM_006626.3,242-260).
ggctgcttgctccactttt

SEQ ID NO: 45687 - DNA, 19 bp, Homo sapiens
  siRNA target sequence for ZNF482 (NM_006626.3,243-261).
gctgcttgctccactttta

SEQ ID NO: 45688 - DNA, 19 bp, Homo sapiens
  siRNA target sequence for ZNF482 (NM_006626.3,246-264).
gcttgctccacttttatga

SEQ ID NO: 45689 - DNA, 19 bp, Homo sapiens
  siRNA target sequence for ZNF482 (NM_006626.3,311-329).
cttacagagtgcagaagtt

SEQ ID NO: 45690 - DNA, 19 bp, Homo sapiens
  siRNA target sequence for ZNF482 (NM_006626.3,341-359).
gttactgtcttgctatact

SEQ ID NO: 45691 - DNA, 19 bp, Homo sapiens
  siRNA target sequence for ZNF482 (NM_006626.3,363-381).
gcacttgaagttaaaagga

SEQ ID NO: 45692 - DNA, 19 bp, Homo sapiens
  siRNA target sequence for ZNF482 (NM_006626.3,364-382).
cacttgaagttaaaaggaa

SEQ ID NO: 45693 - DNA, 19 bp, Homo sapiens
  siRNA target sequence for ZNF482 (NM_006626.3,401-419).
gactgctgccagttacctt

SEQ ID NO: 45694 - DNA, 19 bp, Homo sapiens
  siRNA target sequence for ZNF482 (NM_006626.3,416-434).
ccttcagatggttcacatt

SEQ ID NO: 45695 - DNA, 19 bp, Homo sapiens
  siRNA target sequence for ZNF482 (NM_006626.3,426-444).
gttcacattgtggaaaagt

SEQ ID NO: 45696 - DNA, 19 bp, Homo sapiens
  siRNA target sequence for ZNF482 (NM_006626.3,448-466).
cagaagctttgtcaaagta

SEQ ID NO: 45697 - DNA, 19 bp, Homo sapiens
  siRNA target sequence for ZNF482 (NM_006626.3,471-489).
gaaattgatctttctatga

SEQ ID NO: 45698 - DNA, 19 bp, Homo sapiens
  siRNA target sequence for ZNF482 (NM_006626.3,561-579).
gataaagactgtgagataa

SEQ ID NO: 45699 - DNA, 19 bp, Homo sapiens
  siRNA target sequence for ZNF482 (NM_006626.3,569-587).
ctgtgagataattgaaatt

SEQ ID NO: 45700 - DNA, 19 bp, Homo sapiens
  siRNA target sequence for ZNF482 (NM_006626.3,601-619).
ctgtaaacatagatttcca

SEQ ID NO: 45701 - DNA, 19 bp, Homo sapiens
  siRNA target sequence for ZNF482 (NM_006626.3,709-727).
cagtagacataggttttaa

SEQ ID NO: 45702 - DNA, 19 bp, Homo sapiens
  siRNA target sequence for ZNF482 (NM_006626.3,766-784).
gtacagctggtgtcgaaaa

SEQ ID NO: 45703 - DNA, 19 bp, Homo sapiens
  siRNA target sequence for ZNF482 (NM_006626.3,777-795).
gtcgaaaatgggcagtttt

SEQ ID NO: 45704 - DNA, 19 bp, Homo sapiens
  siRNA target sequence for ZNF482 (NM_006626.3,841-859).
cacagcattcattgatcaa

SEQ ID NO: 45705 - DNA, 19 bp, Homo sapiens
  siRNA target sequence for ZNF482 (NM_006626.3,909-927).
ggcttattttgtgagaata

SEQ ID NO: 45706 - DNA, 19 bp, Homo sapiens
  siRNA target sequence for ZNF482 (NM_006626.3,1004-1022).
gtgtcctcgaggctttctt

SEQ ID NO: 45707 - DNA, 19 bp, Homo sapiens
  siRNA target sequence for ZNF482 (NM_006626.3,1006-1024).
gtcctcgaggctttcttca

SEQ ID NO: 45708 - DNA, 19 bp, Homo sapiens
  siRNA target sequence for ZNF482 (NM_006626.3,1012-1030).
gaggctttcttcatgttga

SEQ ID NO: 45709 - DNA, 19 bp, Homo sapiens
  siRNA target sequence for ZNF482 (NM_006626.3,1034-1052).
ctatctgcgccaccttaaa

SEQ ID NO: 45710 - DNA, 19 bp, Homo sapiens
  siRNA target sequence for ZNF482 (NM_006626.3,1062-1080).
ctattcttatgcttacagt

SEQ ID NO: 45711 - DNA, 19 bp, Homo sapiens
  siRNA target sequence for ZNF482 (NM_006626.3,1137-1155).
ggcatacggccctttcagt

SEQ ID NO: 45712 - DNA, 19 bp, Homo sapiens
  siRNA target sequence for ZNF482 (NM_006626.3,1194-1212).
cttcaggaccacttgaaca

SEQ ID NO: 45713 - DNA, 19 bp, Homo sapiens
  siRNA target sequence for ZNF482 (NM_006626.3,1219-1237).
gtggggatcggccatacaa

SEQ ID NO: 45714 - DNA, 19 bp, Homo sapiens
  siRNA target sequence for ZNF482 (NM_006626.3,1265-1283).
gcacaagtctgctctcaaa

SEQ ID NO: 45715 - DNA, 19 bp, Homo sapiens
  siRNA target sequence for ZNF482 (NM_006626.3,1313-1331).
cagtggtgaaaaactatct

SEQ ID NO: 45716 - DNA, 19 bp, Homo sapiens
  siRNA target sequence for ZNF490 (NM_020714.1,553-571).
ggaaactcctactggatta

SEQ ID NO: 45717 - DNA, 19 bp, Homo sapiens
  siRNA target sequence for ZNF490 (NM_020714.1,554-572).
gaaactcctactggattaa

SEQ ID NO: 45718 - DNA, 19 bp, Homo sapiens
  siRNA target sequence for ZNF490 (NM_020714.1,610-628).
gcatcaggtctcccttaat

SEQ ID NO: 45719 - DNA, 19 bp, Homo sapiens
  siRNA target sequence for ZNF490 (NM_020714.1,611-629).
catcaggtctcccttaata

SEQ ID NO: 45720 - DNA, 19 bp, Homo sapiens
  siRNA target sequence for ZNF490 (NM_020714.1,725-743).
cgcagctccagtattcgaa

SEQ ID NO: 45721 - DNA, 19 bp, Homo sapiens
  siRNA target sequence for ZNF490 (NM_020714.1,795-813).
gcaaagccttcgcatttct

SEQ ID NO: 45722 - DNA, 19 bp, Homo sapiens
  siRNA target sequence for ZNF490 (NM_020714.1,820-838).
ctttcgaaaccatataaga

SEQ ID NO: 45723 - DNA, 19 bp, Homo sapiens
  siRNA target sequence for ZNF490 (NM_020714.1,825-843).
gaaaccatataagaattca

SEQ ID NO: 45724 - DNA, 19 bp, Homo sapiens
  siRNA target sequence for ZNF490 (NM_020714.1,1072-1090).
cttacggagtcatgagaaa

SEQ ID NO: 45725 - DNA, 19 bp, Homo sapiens
  siRNA target sequence for ZNF490 (NM_020714.1,1146-1164).
ctcactcaagccttcgaaa

SEQ ID NO: 45726 - DNA, 19 bp, Homo sapiens
  siRNA target sequence for ZNF490 (NM_020714.1,1157-1175).
cttcgaaaacacgtgaaaa

SEQ ID NO: 45727 - DNA, 19 bp, Homo sapiens
  siRNA target sequence for ZNF490 (NM_020714.1,1180-1198).
caccggagttcaaccttat

SEQ ID NO: 45728 - DNA, 19 bp, Homo sapiens
  siRNA target sequence for ZNF490 (NM_020714.1,1183-1201).
cggagttcaaccttataca

SEQ ID NO: 45729 - DNA, 19 bp, Homo sapiens
  siRNA target sequence for ZNF490 (NM_020714.1,1184-1202).
ggagttcaaccttatacat

SEQ ID NO: 45730 - DNA, 19 bp, Homo sapiens
  siRNA target sequence for ZNF490 (NM_020714.1,1187-1205).
gttcaaccttatacatgta

SEQ ID NO: 45731 - DNA, 19 bp, Homo sapiens
  siRNA target sequence for ZNF490 (NM_020714.1,1214-1232).
ggggaagccttcaagtcat

SEQ ID NO: 45732 - DNA, 19 bp, Homo sapiens
  siRNA target sequence for ZNF490 (NM_020714.1,1402-1420).
cactcactttcgaatccat

SEQ ID NO: 45733 - DNA, 19 bp, Homo sapiens
  siRNA target sequence for ZNF490 (NM_020714.1,1466-1484).
ggtcgggtcttcatttact

SEQ ID NO: 45734 - DNA, 19 bp, Homo sapiens
  siRNA target sequence for ZNF490 (NM_020714.1,1469-1487).
cgggtcttcatttacttca

SEQ ID NO: 45735 - DNA, 19 bp, Homo sapiens
  siRNA target sequence for ZNF490 (NM_020714.1,1615-1633).
ctttcagtgtagacaatgt

SEQ ID NO: 45736 - DNA, 19 bp, Homo sapiens
  siRNA target sequence for ZNF490 (NM_020714.1,1640-1658).
gccttcagttactcaaagt

SEQ ID NO: 45737 - DNA, 19 bp, Homo sapiens
  siRNA target sequence for ZNF490 (NM_020714.1,1670-1688).
cacgaaaggactcatagta

SEQ ID NO: 45738 - DNA, 19 bp, Homo sapiens
  siRNA target sequence for ZNF490 (NM_020714.1,1672-1690).
cgaaaggactcatagtaga

SEQ ID NO: 45739 - DNA, 19 bp, Homo sapiens
  siRNA target sequence for ZNF510 (NM_014930.1,202-220).
ccagaagccatcacagatt

SEQ ID NO: 45740 - DNA, 19 bp, Homo sapiens
  siRNA target sequence for ZNF510 (NM_014930.1,378-396).
ggcccctgttcagaagaat

SEQ ID NO: 45741 - DNA, 19 bp, Homo sapiens
  siRNA target sequence for ZNF510 (NM_014930.1,380-398).
cccctgttcagaagaatct

SEQ ID NO: 45742 - DNA, 19 bp, Homo sapiens
  siRNA target sequence for ZNF510 (NM_014930.1,442-460).
gtggggtactgctgtttca

SEQ ID NO: 45743 - DNA, 19 bp, Homo sapiens
  siRNA target sequence for ZNF510 (NM_014930.1,597-615).
cttggagcaagcaatatgt

SEQ ID NO: 45744 - DNA, 19 bp, Homo sapiens
  siRNA target sequence for ZNF510 (NM_014930.1,601-619).
gagcaagcaatatgtatca

SEQ ID NO: 45745 - DNA, 19 bp, Homo sapiens
  siRNA target sequence for ZNF510 (NM_014930.1,716-734).
gcaactcatgggaagtgaa

SEQ ID NO: 45746 - DNA, 19 bp, Homo sapiens
  siRNA target sequence for ZNF510 (NM_014930.1,717-735).
caactcatgggaagtgaat

SEQ ID NO: 45747 - DNA, 19 bp, Homo sapiens
  siRNA target sequence for ZNF510 (NM_014930.1,794-812).
gttgcggtaatgtatgtga

SEQ ID NO: 45748 - DNA, 19 bp, Homo sapiens
  siRNA target sequence for ZNF510 (NM_014930.1,798-816).
cggtaatgtatgtgagaat

SEQ ID NO: 45749 - DNA, 19 bp, Homo sapiens
  siRNA target sequence for ZNF510 (NM_014930.1,889-907).
gctctcaattataatgaaa

SEQ ID NO: 45750 - DNA, 19 bp, Homo sapiens
  siRNA target sequence for ZNF510 (NM_014930.1,914-932).
ccaagcatccaaagtttca

SEQ ID NO: 45751 - DNA, 19 bp, Homo sapiens
  siRNA target sequence for ZNF510 (NM_014930.1,918-936).
gcatccaaagtttcaaact

SEQ ID NO: 45752 - DNA, 19 bp, Homo sapiens
  siRNA target sequence for ZNF510 (NM_014930.1,988-1006).
gctaactgtgttaaacata

SEQ ID NO: 45753 - DNA, 19 bp, Homo sapiens
  siRNA target sequence for ZNF510 (NM_014930.1,1028-1046).
catcctctaaagatgatga

SEQ ID NO: 45754 - DNA, 19 bp, Homo sapiens
  siRNA target sequence for ZNF510 (NM_014930.1,1111-1129).
cacctgcatcttaatcaat

SEQ ID NO: 45755 - DNA, 19 bp, Homo sapiens
  siRNA target sequence for ZNF510 (NM_014930.1,1149-1167).
gtcaactgtggaggaatat

SEQ ID NO: 45756 - DNA, 19 bp, Homo sapiens
  siRNA target sequence for ZNF510 (NM_014930.1,1250-1268).
ctcaaacagctgtcataga

SEQ ID NO: 45757 - DNA, 19 bp, Homo sapiens
  siRNA target sequence for ZNF510 (NM_014930.1,1270-1288).
gagaacccattggtaagta

SEQ ID NO: 45758 - DNA, 19 bp, Homo sapiens
  siRNA target sequence for ZNF510 (NM_014930.1,1272-1290).
gaacccattggtaagtaat

SEQ ID NO: 45759 - DNA, 19 bp, Homo sapiens
  siRNA target sequence for ZNF510 (NM_014930.1,1300-1318).
cagacttgggttaaatcct

SEQ ID NO: 45760 - DNA, 19 bp, Homo sapiens
  siRNA target sequence for ZNF510 (NM_014930.1,1307-1325).
gggttaaatcctctgaata

SEQ ID NO: 45761 - DNA, 19 bp, Homo sapiens
  siRNA target sequence for ZNF510 (NM_014930.1,1362-1380).
cagagttcgccgaagaagt

SEQ ID NO: 45762 - DNA, 19 bp, Homo sapiens
  siRNA target sequence for ZNF510 (NM_014930.1,1370-1388).
gccgaagaagtcactcaat

SEQ ID NO: 45763 - DNA, 19 bp, Homo sapiens
  siRNA target sequence for ZNF510 (NM_014930.1,1385-1403).
caatgatgaaaccctataa

SEQ ID NO: 45764 - DNA, 19 bp, Homo sapiens
  siRNA target sequence for ZNF510 (NM_014930.1,1521-1539).
gtcacacctcagtactcat

SEQ ID NO: 45765 - DNA, 19 bp, Homo sapiens
  siRNA target sequence for ZNF510 (NM_014930.1,1850-1868).
ggcgaaaagatcatctcat

SEQ ID NO: 45766 - DNA, 19 bp, Homo sapiens
  siRNA target sequence for ZNF510 (NM_014930.1,1851-1869).
gcgaaaagatcatctcatt

SEQ ID NO: 45767 - DNA, 19 bp, Homo sapiens
  siRNA target sequence for ZNF510 (NM_014930.1,2187-2205).
gaagtctaccctaagctta

SEQ ID NO: 45768 - DNA, 19 bp, Homo sapiens
  siRNA target sequence for ZNF510 (NM_014930.1,2192-2210).
ctaccctaagcttatacca

SEQ ID NO: 45769 - DNA, 19 bp, Homo sapiens
  siRNA target sequence for ZNF6 (NM_021998.2,599-617).
ctggtactgcacatatcga

SEQ ID NO: 45770 - DNA, 19 bp, Homo sapiens
  siRNA target sequence for ZNF6 (NM_021998.2,615-633).
cgatggagaccatattgtt

SEQ ID NO: 45771 - DNA, 19 bp, Homo sapiens
  siRNA target sequence for ZNF6 (NM_021998.2,718-736).
gtccatggacctgatatca

SEQ ID NO: 45772 - DNA, 19 bp, Homo sapiens
  siRNA target sequence for ZNF6 (NM_021998.2,721-739).
catggacctgatatcatca

SEQ ID NO: 45773 - DNA, 19 bp, Homo sapiens
  siRNA target sequence for ZNF6 (NM_021998.2,738-756).
cacagagactgatgtagta

SEQ ID NO: 45774 - DNA, 19 bp, Homo sapiens
  siRNA target sequence for ZNF6 (NM_021998.2,846-864).
gacttctgaactaattaca

SEQ ID NO: 45775 - DNA, 19 bp, Homo sapiens
  siRNA target sequence for ZNF6 (NM_021998.2,914-932).
gtcctaatggacacttaga

SEQ ID NO: 45776 - DNA, 19 bp, Homo sapiens
  siRNA target sequence for ZNF6 (NM_021998.2,937-955).
gtggtccaagattgtgttt

SEQ ID NO: 45777 - DNA, 19 bp, Homo sapiens
  siRNA target sequence for ZNF6 (NM_021998.2,963-981).
cgactctcccacaatggta

SEQ ID NO: 45778 - DNA, 19 bp, Homo sapiens
  siRNA target sequence for ZNF6 (NM_021998.2,964-982).
gactctcccacaatggtat

SEQ ID NO: 45779 - DNA, 19 bp, Homo sapiens
  siRNA target sequence for ZNF6 (NM_021998.2,987-1005).
ggaggttcttgtaactaat

SEQ ID NO: 45780 - DNA, 19 bp, Homo sapiens
  siRNA target sequence for ZNF6 (NM_021998.2,988-1006).
gaggttcttgtaactaatt

SEQ ID NO: 45781 - DNA, 19 bp, Homo sapiens
  siRNA target sequence for ZNF6 (NM_021998.2,994-1012).
cttgtaactaattcagata

SEQ ID NO: 45782 - DNA, 19 bp, Homo sapiens
  siRNA target sequence for ZNF6 (NM_021998.2,1042-1060).
gttcctggttctacagtta

SEQ ID NO: 45783 - DNA, 19 bp, Homo sapiens
  siRNA target sequence for ZNF6 (NM_021998.2,1046-1064).
ctggttctacagttactat

SEQ ID NO: 45784 - DNA, 19 bp, Homo sapiens
  siRNA target sequence for ZNF6 (NM_021998.2,1049-1067).
gttctacagttactataaa

SEQ ID NO: 45785 - DNA, 19 bp, Homo sapiens
  siRNA target sequence for ZNF6 (NM_021998.2,1101-1119).
cacttctgaagactactta

SEQ ID NO: 45786 - DNA, 19 bp, Homo sapiens
  siRNA target sequence for ZNF6 (NM_021998.2,1193-1211).
gttcacaagaagatgctaa

SEQ ID NO: 45787 - DNA, 19 bp, Homo sapiens
  siRNA target sequence for ZNF6 (NM_021998.2,1220-1238).
ggtttggttctgaagttat

SEQ ID NO: 45788 - DNA, 19 bp, Homo sapiens
  siRNA target sequence for ZNF6 (NM_021998.2,1279-1297).
gaaataggtggaacagaaa

SEQ ID NO: 45789 - DNA, 19 bp, Homo sapiens
  siRNA target sequence for ZNF6 (NM_021998.2,1314-1332).
gtacaccagtggacattca

SEQ ID NO: 45790 - DNA, 19 bp, Homo sapiens
  siRNA target sequence for ZNF6 (NM_021998.2,1317-1335).
caccagtggacattcagta

SEQ ID NO: 45791 - DNA, 19 bp, Homo sapiens
  siRNA target sequence for ZNF6 (NM_021998.2,1363-1381).
cagcgggagaagatggttt

SEQ ID NO: 45792 - DNA, 19 bp, Homo sapiens
  siRNA target sequence for ZNF6 (NM_021998.2,1383-1401).
catggcagttaaagattct

SEQ ID NO: 45793 - DNA, 19 bp, Homo sapiens
  siRNA target sequence for ZNF6 (NM_021998.2,1504-1522).
cttgaggactctgatgtta

SEQ ID NO: 45794 - DNA, 19 bp, Homo sapiens
  siRNA target sequence for ZNF6 (NM_021998.2,1507-1525).
gaggactctgatgttaata

SEQ ID NO: 45795 - DNA, 19 bp, Homo sapiens
  siRNA target sequence for ZNF6 (NM_021998.2,1547-1565).
gggctgcggcatatggaaa

SEQ ID NO: 45796 - DNA, 19 bp, Homo sapiens
  siRNA target sequence for ZNF6 (NM_021998.2,1548-1566).
ggctgcggcatatggaaat

SEQ ID NO: 45797 - DNA, 19 bp, Homo sapiens
  siRNA target sequence for ZNF6 (NM_021998.2,1549-1567).
gctgcggcatatggaaata

SEQ ID NO: 45798 - DNA, 19 bp, Homo sapiens
  siRNA target sequence for ZNF6 (NM_021998.2,1552-1570).
gcggcatatggaaatactt

SEQ ID NO: 45799 - DNA, 19 bp, Homo sapiens
  siRNA target sequence for ZNF6 (NM_021998.2,1553-1571).
cggcatatggaaatacttt

SEQ ID NO: 45800 - DNA, 19 bp, Homo sapiens
  siRNA target sequence for ZNF6 (NM_021998.2,1603-1621).
gcagcacagtaccttcaaa

SEQ ID NO: 45801 - DNA, 19 bp, Homo sapiens
  siRNA target sequence for ZNF6 (NM_021998.2,1625-1643).
gtgacggcattaatacaaa

SEQ ID NO: 45802 - DNA, 19 bp, Homo sapiens
  siRNA target sequence for ZNF6 (NM_021998.2,1627-1645).
gacggcattaatacaaata

SEQ ID NO: 45803 - DNA, 19 bp, Homo sapiens
  siRNA target sequence for ZNF6 (NM_021998.2,1629-1647).
cggcattaatacaaataaa

SEQ ID NO: 45804 - DNA, 19 bp, Homo sapiens
  siRNA target sequence for ZNF6 (NM_021998.2,1751-1769).
gccatatttgcacaaaaaa

SEQ ID NO: 45805 - DNA, 19 bp, Homo sapiens
  siRNA target sequence for ZNF6 (NM_021998.2,1753-1771).
catatttgcacaaaaaagt

SEQ ID NO: 45806 - DNA, 19 bp, Homo sapiens
  siRNA target sequence for ZNF6 (NM_021998.2,1813-1831).
cctgatcatttaatgagaa

SEQ ID NO: 45807 - DNA, 19 bp, Homo sapiens
  siRNA target sequence for ZNF6 (NM_021998.2,1853-1871).
gtgactttacaactaacaa

SEQ ID NO: 45808 - DNA, 19 bp, Homo sapiens
  siRNA target sequence for ZNF6 (NM_021998.2,1855-1873).
gactttacaactaacaaga

SEQ ID NO: 45809 - DNA, 19 bp, Homo sapiens
  siRNA target sequence for ZNF6 (NM_021998.2,1865-1883).
ctaacaagaaagtgagttt

SEQ ID NO: 45810 - DNA, 19 bp, Homo sapiens
  siRNA target sequence for ZNF6 (NM_021998.2,1869-1887).
caagaaagtgagtttccat

SEQ ID NO: 45811 - DNA, 19 bp, Homo sapiens
  siRNA target sequence for ZNF6 (NM_021998.2,1897-1915).
gaaagccataagctcataa

SEQ ID NO: 45812 - DNA, 19 bp, Homo sapiens
  siRNA target sequence for ZNF6 (NM_021998.2,1943-1961).
cagaatacacacgaagata

SEQ ID NO: 45813 - DNA, 19 bp, Homo sapiens
  siRNA target sequence for ZNF6 (NM_021998.2,1945-1963).
gaatacacacgaagataca

SEQ ID NO: 45814 - DNA, 19 bp, Homo sapiens
  siRNA target sequence for ZNF6 (NM_021998.2,1973-1991).
gtccactgagttccaataa

SEQ ID NO: 45815 - DNA, 19 bp, Homo sapiens
  siRNA target sequence for ZNF6 (NM_021998.2,1976-1994).
cactgagttccaataaact

SEQ ID NO: 45816 - DNA, 19 bp, Homo sapiens
  siRNA target sequence for ZNF6 (NM_021998.2,1978-1996).
ctgagttccaataaactta

SEQ ID NO: 45817 - DNA, 19 bp, Homo sapiens
  siRNA target sequence for ZNF6 (NM_021998.2,1980-1998).
gagttccaataaacttatt

SEQ ID NO: 45818 - DNA, 19 bp, Homo sapiens
  siRNA target sequence for ZNF6 (NM_021998.2,2028-2046).
gtgcaaatactgtgactat

SEQ ID NO: 45819 - DNA, 19 bp, Homo sapiens
  siRNA target sequence for ZNF6 (NM_021998.2,2065-2083).
ctgttaaacaggcatttgt

SEQ ID NO: 45820 - DNA, 19 bp, Homo sapiens
  siRNA target sequence for ZNF6 (NM_021998.2,2085-2103).
ggccgttcacagcaagaat

SEQ ID NO: 45821 - DNA, 19 bp, Homo sapiens
  siRNA target sequence for ZNF6 (NM_021998.2,2086-2104).
gccgttcacagcaagaatt

SEQ ID NO: 45822 - DNA, 19 bp, Homo sapiens
  siRNA target sequence for ZNF6 (NM_021998.2,2087-2105).
ccgttcacagcaagaattt

SEQ ID NO: 45823 - DNA, 19 bp, Homo sapiens
  siRNA target sequence for ZNF6 (NM_021998.2,2088-2106).
cgttcacagcaagaatttt

SEQ ID NO: 45824 - DNA, 19 bp, Homo sapiens
  siRNA target sequence for ZNF6 (NM_021998.2,2217-2235).
caggtgtgcagatcaatca

SEQ ID NO: 45825 - DNA, 19 bp, Homo sapiens
  siRNA target sequence for ZNF6 (NM_021998.2,2219-2237).
ggtgtgcagatcaatcaaa

SEQ ID NO: 45826 - DNA, 19 bp, Homo sapiens
  siRNA target sequence for ZNF6 (NM_021998.2,2220-2238).
gtgtgcagatcaatcaaat

SEQ ID NO: 45827 - DNA, 19 bp, Homo sapiens
  siRNA target sequence for ZNF6 (NM_021998.2,2222-2240).
gtgcagatcaatcaaatct

SEQ ID NO: 45828 - DNA, 19 bp, Homo sapiens
  siRNA target sequence for ZNF6 (NM_021998.2,2224-2242).
gcagatcaatcaaatctga

SEQ ID NO: 45829 - DNA, 19 bp, Homo sapiens
  siRNA target sequence for ZNF6 (NM_021998.2,2241-2259).
gaaaactcacattaagtct

SEQ ID NO: 45830 - DNA, 19 bp, Homo sapiens
  siRNA target sequence for ZNF6 (NM_021998.2,2246-2264).
ctcacattaagtctaaaca

SEQ ID NO: 45831 - DNA, 19 bp, Homo sapiens
  siRNA target sequence for ZNF6 (NM_021998.2,2258-2276).
ctaaacatggtaacaattt

SEQ ID NO: 45832 - DNA, 19 bp, Homo sapiens
  siRNA target sequence for ZNF6 (NM_021998.2,2292-2310).
gcattgtccccaagcattt

SEQ ID NO: 45833 - DNA, 19 bp, Homo sapiens
  siRNA target sequence for ZNF6 (NM_021998.2,2329-2347).
caacgccatctggatttgt

SEQ ID NO: 45834 - DNA, 19 bp, Homo sapiens
  siRNA target sequence for ZNF6 (NM_021998.2,2383-2401).
gaccataagagcaccaatt

SEQ ID NO: 45835 - DNA, 19 bp, Homo sapiens
  siRNA target sequence for ZNF6 (NM_021998.2,2396-2414).
ccaattcaagtgaccttaa

SEQ ID NO: 45836 - DNA, 19 bp, Homo sapiens
  siRNA target sequence for ZNF6 (NM_021998.2,2409-2427).
ccttaagcggcacatcata

SEQ ID NO: 45837 - DNA, 19 bp, Homo sapiens
  siRNA target sequence for ZNF6 (NM_021998.2,2410-2428).
cttaagcggcacatcatat

SEQ ID NO: 45838 - DNA, 19 bp, Homo sapiens
  siRNA target sequence for ZNF6 (NM_021998.2,2429-2447).
ctgtccatactaaggattt

SEQ ID NO: 45839 - DNA, 19 bp, Homo sapiens
  siRNA target sequence for ZNF6 (NM_021998.2,2486-2504).
gtccttctgagctcaaaaa

SEQ ID NO: 45840 - DNA, 19 bp, Homo sapiens
  siRNA target sequence for ZNF6 (NM_021998.2,2517-2535).
ccataagggtaggaagatt

SEQ ID NO: 45841 - DNA, 19 bp, Homo sapiens
  siRNA target sequence for ZNF6 (NM_021998.2,2564-2582).
catccgatccatttattct

SEQ ID NO: 45842 - DNA, 19 bp, Homo sapiens
  siRNA target sequence for ZNF6 (NM_021998.2,2581-2599).
cttagtggccatatccttt

SEQ ID NO: 45843 - DNA, 19 bp, Homo sapiens
  siRNA target sequence for ZNF6 (NM_021998.2,2585-2603).
gtggccatatcctttcagt

SEQ ID NO: 45844 - DNA, 19 bp, Homo sapiens
  siRNA target sequence for ZNF6 (NM_021998.2,2589-2607).
ccatatcctttcagttcat

SEQ ID NO: 45845 - DNA, 19 bp, Homo sapiens
  siRNA target sequence for ZNF6 (NM_021998.2,2590-2608).
catatcctttcagttcata

SEQ ID NO: 45846 - DNA, 19 bp, Homo sapiens
  siRNA target sequence for ZNF6 (NM_021998.2,2600-2618).
cagttcatactaaagatca

SEQ ID NO: 45847 - DNA, 19 bp, Homo sapiens
  siRNA target sequence for ZNF6 (NM_021998.2,2609-2627).
ctaaagatcagccattgaa

SEQ ID NO: 45848 - DNA, 19 bp, Homo sapiens
  siRNA target sequence for ZNF6 (NM_021998.2,2693-2711).
ctggaaggaagatttacca

SEQ ID NO: 45849 - DNA, 19 bp, Homo sapiens
  siRNA target sequence for ZNF6 (NM_021998.2,2695-2713).
ggaaggaagatttaccaat

SEQ ID NO: 45850 - DNA, 19 bp, Homo sapiens
  siRNA target sequence for ZNF6 (NM_021998.2,2750-2768).
gctttaaacgacatgtgat

SEQ ID NO: 45851 - DNA, 19 bp, Homo sapiens
  siRNA target sequence for ZNF6 (NM_021998.2,2751-2769).
ctttaaacgacatgtgata

SEQ ID NO: 45852 - DNA, 19 bp, Homo sapiens
  siRNA target sequence for ZNF6 (NM_021998.2,2761-2779).
catgtgatatcaatacata

SEQ ID NO: 45853 - DNA, 19 bp, Homo sapiens
  siRNA target sequence for ZNF6 (NM_021998.2,2764-2782).
gtgatatcaatacatacaa

SEQ ID NO: 45854 - DNA, 19 bp, Homo sapiens
  siRNA target sequence for ZNF7 (NM_003416.1,478-496).
caagacagattctacgatt

SEQ ID NO: 45855 - DNA, 19 bp, Homo sapiens
  siRNA target sequence for ZNF7 (NM_003416.1,489-507).
ctacgattaggactgaaaa

SEQ ID NO: 45856 - DNA, 19 bp, Homo sapiens
  siRNA target sequence for ZNF7 (NM_003416.1,524-542).
gacatggacatcctaaaat

SEQ ID NO: 45857 - DNA, 19 bp, Homo sapiens
  siRNA target sequence for ZNF7 (NM_003416.1,526-544).
catggacatcctaaaatca

SEQ ID NO: 45858 - DNA, 19 bp, Homo sapiens
  siRNA target sequence for ZNF7 (NM_003416.1,554-572).
gggacagtggtcagaatct

SEQ ID NO: 45859 - DNA, 19 bp, Homo sapiens
  siRNA target sequence for ZNF7 (NM_003416.1,601-619).
ctttggagacgtttctgat

SEQ ID NO: 45860 - DNA, 19 bp, Homo sapiens
  siRNA target sequence for ZNF7 (NM_003416.1,671-689).
ggctttaccttccaaaata

SEQ ID NO: 45861 - DNA, 19 bp, Homo sapiens
  siRNA target sequence for ZNF7 (NM_003416.1,850-868).
catcagagccacttcagat

SEQ ID NO: 45862 - DNA, 19 bp, Homo sapiens
  siRNA target sequence for ZNF7 (NM_003416.1,940-958).
ctgcttgcaggggaaacat

SEQ ID NO: 45863 - DNA, 19 bp, Homo sapiens
  siRNA target sequence for ZNF7 (NM_003416.1,1096-1114).
cttccgcctgagctcaaaa

SEQ ID NO: 45864 - DNA, 19 bp, Homo sapiens
  siRNA target sequence for ZNF7 (NM_003416.1,1100-1118).
cgcctgagctcaaaactta

SEQ ID NO: 45865 - DNA, 19 bp, Homo sapiens
  siRNA target sequence for ZNF7 (NM_003416.1,1101-1119).
gcctgagctcaaaacttat

SEQ ID NO: 45866 - DNA, 19 bp, Homo sapiens
  siRNA target sequence for ZNF7 (NM_003416.1,1102-1120).
cctgagctcaaaacttatt

SEQ ID NO: 45867 - DNA, 19 bp, Homo sapiens
  siRNA target sequence for ZNF7 (NM_003416.1,2053-2071).
ggcccagtggttttacgaa

SEQ ID NO: 45868 - DNA, 19 bp, Homo sapiens
  siRNA target sequence for ZNF7 (NM_003416.1,2054-2072).
gcccagtggttttacgaat

SEQ ID NO: 45869 - DNA, 19 bp, Homo sapiens
  siRNA target sequence for ZNF7 (NM_003416.1,2055-2073).
cccagtggttttacgaata

SEQ ID NO: 45870 - DNA, 19 bp, Homo sapiens
  siRNA target sequence for ZNF7 (NM_003416.1,2087-2105).
gaagggtccacctttgtga

SEQ ID NO: 45871 - DNA, 19 bp, Homo sapiens
  siRNA target sequence for ZNF7 (NM_003416.1,2104-2122).
gagccgtaaaaaggttaat

SEQ ID NO: 45872 - DNA, 19 bp, Homo sapiens
  siRNA target sequence for ZNF7 (NM_003416.1,2107-2125).
ccgtaaaaaggttaatact

SEQ ID NO: 45873 - DNA, 19 bp, Homo sapiens
  siRNA target sequence for ZNF7 (NM_003416.1,2108-2126).
cgtaaaaaggttaatacta

SEQ ID NO: 45874 - DNA, 19 bp, Homo sapiens
  siRNA target sequence for ZNF7 (NM_003416.1,2147-2165).
gaagactgtgagaagatat

SEQ ID NO: 45875 - DNA, 19 bp, Homo sapiens
  siRNA target sequence for ZNF7 (NM_003416.1,2169-2187).
ggtggcgttcacacctaat

SEQ ID NO: 45876 - DNA, 19 bp, Homo sapiens
  siRNA target sequence for ZNF7 (NM_003416.1,2170-2188).
gtggcgttcacacctaatt

SEQ ID NO: 45877 - DNA, 19 bp, Homo sapiens
  siRNA target sequence for ZNF7 (NM_003416.1,2172-2190).
ggcgttcacacctaattat

SEQ ID NO: 45878 - DNA, 19 bp, Homo sapiens
  siRNA target sequence for ZNF7 (NM_003416.1,2265-2283).
ggcttacccagcatcaaaa

SEQ ID NO: 45879 - DNA, 19 bp, Homo sapiens
  siRNA target sequence for ZNF71 (NM_021216.3,394-412).
ccccaggggaacaaactct

SEQ ID NO: 45880 - DNA, 19 bp, Homo sapiens
  siRNA target sequence for ZNF71 (NM_021216.3,395-413).
cccaggggaacaaactctt

SEQ ID NO: 45881 - DNA, 19 bp, Homo sapiens
  siRNA target sequence for ZNF71 (NM_021216.3,396-414).
ccaggggaacaaactctta

SEQ ID NO: 45882 - DNA, 19 bp, Homo sapiens
  siRNA target sequence for ZNF71 (NM_021216.3,487-505).
ctggacgaccccacagaaa

SEQ ID NO: 45883 - DNA, 19 bp, Homo sapiens
  siRNA target sequence for ZNF71 (NM_021216.3,523-541).
gtaaggcgtggcaagaact

SEQ ID NO: 45884 - DNA, 19 bp, Homo sapiens
  siRNA target sequence for ZNF71 (NM_021216.3,548-566).
gcacttcagacctcagtaa

SEQ ID NO: 45885 - DNA, 19 bp, Homo sapiens
  siRNA target sequence for ZNF71 (NM_021216.3,631-649).
cgaagctcgtccctgataa

SEQ ID NO: 45886 - DNA, 19 bp, Homo sapiens
  siRNA target sequence for ZNF71 (NM_021216.3,632-650).
gaagctcgtccctgataaa

SEQ ID NO: 45887 - DNA, 19 bp, Homo sapiens
  siRNA target sequence for ZNF74 (NM_003426.1,1786-1804).
cgccaagtgagccagaaaa

SEQ ID NO: 45888 - DNA, 19 bp, Homo sapiens
  siRNA target sequence for ZNF74 (NM_003426.1,1924-1942).
gccgggagaaggcttacaa

SEQ ID NO: 45889 - DNA, 19 bp, Homo sapiens
  siRNA target sequence for ZNF76 (NM_003427.3,226-244).
cacggtgacccttagtgat

SEQ ID NO: 45890 - DNA, 19 bp, Homo sapiens
  siRNA target sequence for ZNF76 (NM_003427.3,259-277).
cgtccagcaagctgtcaaa

SEQ ID NO: 45891 - DNA, 19 bp, Homo sapiens
  siRNA target sequence for ZNF76 (NM_003427.3,321-339).
ggaccaccgcatacattca

SEQ ID NO: 45892 - DNA, 19 bp, Homo sapiens
  siRNA target sequence for ZNF76 (NM_003427.3,405-423).
gcagcatggcttacataca

SEQ ID NO: 45893 - DNA, 19 bp, Homo sapiens
  siRNA target sequence for ZNF76 (NM_003427.3,655-673).
gattccccgtaatggaaaa

SEQ ID NO: 45894 - DNA, 19 bp, Homo sapiens
  siRNA target sequence for ZNF76 (NM_003427.3,735-753).
ccaccgctcatcacttaaa

SEQ ID NO: 45895 - DNA, 19 bp, Homo sapiens
  siRNA target sequence for ZNF76 (NM_003427.3,738-756).
ccgctcatcacttaaaggt

SEQ ID NO: 45896 - DNA, 19 bp, Homo sapiens
  siRNA target sequence for ZNF76 (NM_003427.3,757-775).
gcatgaacgagctcataca

SEQ ID NO: 45897 - DNA, 19 bp, Homo sapiens
  siRNA target sequence for ZNF76 (NM_003427.3,776-794).
ggtgaccgtccatacagat

SEQ ID NO: 45898 - DNA, 19 bp, Homo sapiens
  siRNA target sequence for ZNF76 (NM_003427.3,966-984).
cgttccagtgcccttttga

SEQ ID NO: 45899 - DNA, 19 bp, Homo sapiens
  siRNA target sequence for ZNF76 (NM_003427.3,1095-1113).
ccagcgccaccaactataa

SEQ ID NO: 45900 - DNA, 19 bp, Homo sapiens
  siRNA target sequence for ZNF76 (NM_003427.3,1098-1116).
gcgccaccaactataagaa

SEQ ID NO: 45901 - DNA, 19 bp, Homo sapiens
  siRNA target sequence for ZNF76 (NM_003427.3,1099-1117).
cgccaccaactataagaat

SEQ ID NO: 45902 - DNA, 19 bp, Homo sapiens
  siRNA target sequence for ZNF76 (NM_003427.3,1186-1204).
cgagtactcgagcttgtat

SEQ ID NO: 45903 - DNA, 19 bp, Homo sapiens
  siRNA target sequence for ZNF76 (NM_003427.3,1187-1205).
gagtactcgagcttgtata

SEQ ID NO: 45904 - DNA, 19 bp, Homo sapiens
  siRNA target sequence for ZNF76 (NM_003427.3,1640-1658).
gccacatctggcacacata

SEQ ID NO: 45905 - DNA, 19 bp, Homo sapiens
  siRNA target sequence for ZNF76 (NM_003427.3,1692-1710).
cgcagcccgtcacaatcat

SEQ ID NO: 45906 - DNA, 19 bp, Homo sapiens
  siRNA target sequence for ZNF76 (NM_003427.3,1693-1711).
gcagcccgtcacaatcatt

SEQ ID NO: 45907 - DNA, 19 bp, Homo sapiens
  siRNA target sequence for ZNF76 (NM_003427.3,1694-1712).
cagcccgtcacaatcatta

SEQ ID NO: 45908 - DNA, 19 bp, Homo sapiens
  siRNA target sequence for ZNF76 (NM_003427.3,1697-1715).
cccgtcacaatcattacct

SEQ ID NO: 45909 - DNA, 19 bp, Homo sapiens
  siRNA target sequence for ZNF76 (NM_003427.3,1738-1756).
ctcaagtgtagcatctctt

SEQ ID NO: 45910 - DNA, 19 bp, Homo sapiens
  siRNA target sequence for ZNF76 (NM_003427.3,1749-1767).
catctcttcgtcatcaaca

SEQ ID NO: 45911 - DNA, 19 bp, Homo sapiens
  siRNA target sequence for ZNF76 (NM_003427.3,1831-1849).
cttagaggaggccatcaat

SEQ ID NO: 45912 - DNA, 19 bp, Homo sapiens
  siRNA target sequence for ZNF79 (NM_007135.1,529-547).
cagtgtgacggtagctttt

SEQ ID NO: 45913 - DNA, 19 bp, Homo sapiens
  siRNA target sequence for ZNF79 (NM_007135.1,729-747).
ctccaggctggaagattat

SEQ ID NO: 45914 - DNA, 19 bp, Homo sapiens
  siRNA target sequence for ZNF79 (NM_007135.1,1608-1626).
gtaccaatctcataatcca

SEQ ID NO: 45915 - DNA, 19 bp, Homo sapiens
  siRNA target sequence for ZNF79 (NM_007135.1,1861-1879).
ctctgccttcgttagacat

SEQ ID NO: 45916 - DNA, 19 bp, Homo sapiens
  siRNA target sequence for ZNF8 (NM_021089.1,421-439).
ctgggagcctcgatctgaa

SEQ ID NO: 45917 - DNA, 19 bp, Homo sapiens
  siRNA target sequence for ZNF8 (NM_021089.1,684-702).
gttcaagcccaaatccatt

SEQ ID NO: 45918 - DNA, 19 bp, Homo sapiens
  siRNA target sequence for ZNF8 (NM_021089.1,719-737).
ggggagtatttgtatactt

SEQ ID NO: 45919 - DNA, 19 bp, Homo sapiens
  siRNA target sequence for ZNF8 (NM_021089.1,720-738).
gggagtatttgtatactta

SEQ ID NO: 45920 - DNA, 19 bp, Homo sapiens
  siRNA target sequence for ZNF8 (NM_021089.1,764-782).
cataactccagcttagtca

SEQ ID NO: 45921 - DNA, 19 bp, Homo sapiens
  siRNA target sequence for ZNF8 (NM_021089.1,844-862).
cagtcaggccattccaatt

SEQ ID NO: 45922 - DNA, 19 bp, Homo sapiens
  siRNA target sequence for ZNF8 (NM_021089.1,858-876).
caattacggaactcacaaa

SEQ ID NO: 45923 - DNA, 19 bp, Homo sapiens
  siRNA target sequence for ZNF8 (NM_021089.1,918-936).
ggaagtcgtttaaccataa

SEQ ID NO: 45924 - DNA, 19 bp, Homo sapiens
  siRNA target sequence for ZNF8 (NM_021089.1,1269-1287).
ggaccacttgccttttcct

SEQ ID NO: 45925 - DNA, 19 bp, Homo sapiens
  siRNA target sequence for ZNF8 (NM_021089.1,1410-1428).
gccgccagaggctgatctt

SEQ ID NO: 45926 - DNA, 19 bp, Homo sapiens
  siRNA target sequence for ZNF8 (NM_021089.1,1485-1503).
cacctttgagtcaagatga

SEQ ID NO: 45927 - DNA, 19 bp, Homo sapiens
  siRNA target sequence for ZNF8 (NM_021089.1,1739-1757).
gccctggctttgtttgaca

SEQ ID NO: 45928 - DNA, 19 bp, Homo sapiens
  siRNA target sequence for ZNF8 (NM_021089.1,1821-1839).
gtgcttccatgttatttga

SEQ ID NO: 45929 - DNA, 19 bp, Homo sapiens
  siRNA target sequence for ZNF84 (NM_003428.1,371-389).
cattctcatttgacgattt

SEQ ID NO: 45930 - DNA, 19 bp, Homo sapiens
  siRNA target sequence for ZNF84 (NM_003428.1,375-393).
ctcatttgacgatttatct

SEQ ID NO: 45931 - DNA, 19 bp, Homo sapiens
  siRNA target sequence for ZNF84 (NM_003428.1,377-395).
catttgacgatttatctgt

SEQ ID NO: 45932 - DNA, 19 bp, Homo sapiens
  siRNA target sequence for ZNF84 (NM_003428.1,618-636).
gtggcaccaggataaccaa

SEQ ID NO: 45933 - DNA, 19 bp, Homo sapiens
  siRNA target sequence for ZNF84 (NM_003428.1,744-762).
cttagatggattgatttta

SEQ ID NO: 45934 - DNA, 19 bp, Homo sapiens
  siRNA target sequence for ZNF84 (NM_003428.1,865-883).
gatactgatacctggttaa

SEQ ID NO: 45935 - DNA, 19 bp, Homo sapiens
  siRNA target sequence for ZNF84 (NM_003428.1,869-887).
ctgatacctggttaaaata

SEQ ID NO: 45936 - DNA, 19 bp, Homo sapiens
  siRNA target sequence for ZNF84 (NM_003428.1,875-893).
cctggttaaaatactatga

SEQ ID NO: 45937 - DNA, 19 bp, Homo sapiens
  siRNA target sequence for ZNF84 (NM_003428.1,930-948).
gattatcatatatcataga

SEQ ID NO: 45938 - DNA, 19 bp, Homo sapiens
  siRNA target sequence for ZNF84 (NM_003428.1,952-970).
cgtttaggggagaaactct

SEQ ID NO: 45939 - DNA, 19 bp, Homo sapiens
  siRNA target sequence for ZNF84 (NM_003428.1,953-971).
gtttaggggagaaactcta

SEQ ID NO: 45940 - DNA, 19 bp, Homo sapiens
  siRNA target sequence for ZNF84 (NM_003428.1,1032-1050).
cagacatataagagacata

SEQ ID NO: 45941 - DNA, 19 bp, Homo sapiens
  siRNA target sequence for ZNF84 (NM_003428.1,1086-1104).
ccagaagtctcagtttatt

SEQ ID NO: 45942 - DNA, 19 bp, Homo sapiens
  siRNA target sequence for ZNF84 (NM_003428.1,1092-1110).
gtctcagtttattacacat

SEQ ID NO: 45943 - DNA, 19 bp, Homo sapiens
  siRNA target sequence for ZNF84 (NM_003428.1,1428-1446).
gtcacaactcgttacacat

SEQ ID NO: 45944 - DNA, 19 bp, Homo sapiens
  siRNA target sequence for ZNF84 (NM_003428.1,1593-1611).
gaggtcgagtctcattaat

SEQ ID NO: 45945 - DNA, 19 bp, Homo sapiens
  siRNA target sequence for ZNF84 (NM_003428.1,1595-1613).
ggtcgagtctcattaatca

SEQ ID NO: 45946 - DNA, 19 bp, Homo sapiens
  siRNA target sequence for ZNF84 (NM_003428.1,2002-2020).
gcctttggtgagaagtcaa

SEQ ID NO: 45947 - DNA, 19 bp, Homo sapiens
  siRNA target sequence for ZNFN1A1 (NM_006060.2,176-194).
ctgatgagggtcaagacat

SEQ ID NO: 45948 - DNA, 19 bp, Homo sapiens
  siRNA target sequence for ZNFN1A1 (NM_006060.2,318-336).
cagagtcgtggccagtaat

SEQ ID NO: 45949 - DNA, 19 bp, Homo sapiens
  siRNA target sequence for ZNFN1A1 (NM_006060.2,320-338).
gagtcgtggccagtaatgt

SEQ ID NO: 45950 - DNA, 19 bp, Homo sapiens
  siRNA target sequence for ZNFN1A1 (NM_006060.2,322-340).
gtcgtggccagtaatgtta

SEQ ID NO: 45951 - DNA, 19 bp, Homo sapiens
  siRNA target sequence for ZNFN1A1 (NM_006060.2,372-390).
gcgtgcctgtgaaatgaat

SEQ ID NO: 45952 - DNA, 19 bp, Homo sapiens
  siRNA target sequence for ZNFN1A1 (NM_006060.2,401-419).
gtgcggaggatttacgaat

SEQ ID NO: 45953 - DNA, 19 bp, Homo sapiens
  siRNA target sequence for ZNFN1A1 (NM_006060.2,424-442).
gatgcctcgggagagaaaa

SEQ ID NO: 45954 - DNA, 19 bp, Homo sapiens
  siRNA target sequence for ZNFN1A1 (NM_006060.2,491-509).
gaggcattcgacttcctaa

SEQ ID NO: 45955 - DNA, 19 bp, Homo sapiens
  siRNA target sequence for ZNFN1A1 (NM_006060.2,500-518).
gacttcctaacggaaaact

SEQ ID NO: 45956 - DNA, 19 bp, Homo sapiens
  siRNA target sequence for ZNFN1A1 (NM_006060.2,505-523).
cctaacggaaaactaaagt

SEQ ID NO: 45957 - DNA, 19 bp, Homo sapiens
  siRNA target sequence for ZNFN1A1 (NM_006060.2,562-580).
ctcatggttcacaaaagaa

SEQ ID NO: 45958 - DNA, 19 bp, Homo sapiens
  siRNA target sequence for ZNFN1A1 (NM_006060.2,746-764).
ggacgcactccgttggtaa

SEQ ID NO: 45959 - DNA, 19 bp, Homo sapiens
  siRNA target sequence for ZNFN1A1 (NM_006060.2,747-765).
gacgcactccgttggtaaa

SEQ ID NO: 45960 - DNA, 19 bp, Homo sapiens
  siRNA target sequence for ZNFN1A1 (NM_006060.2,750-768).
gcactccgttggtaaacct

SEQ ID NO: 45961 - DNA, 19 bp, Homo sapiens
  siRNA target sequence for ZNFN1A1 (NM_006060.2,756-774).
cgttggtaaacctcacaaa

SEQ ID NO: 45962 - DNA, 19 bp, Homo sapiens
  siRNA target sequence for ZNFN1A1 (NM_006060.2,829-847).
gagcgctgccacaactact

SEQ ID NO: 45963 - DNA, 19 bp, Homo sapiens
  siRNA target sequence for ZNFN1A1 (NM_006060.2,974-992).
gtaacgtcgccaaacgtaa

SEQ ID NO: 45964 - DNA, 19 bp, Homo sapiens
  siRNA target sequence for ZNFN1A1 (NM_006060.2,1529-1547).
ccagcggggagcagatgaa

SEQ ID NO: 45965 - DNA, 19 bp, Homo sapiens
  siRNA target sequence for ZNFN1A2 (NM_016260.1,298-316).
catgacaagcacaaattca

SEQ ID NO: 45966 - DNA, 19 bp, Homo sapiens
  siRNA target sequence for ZNFN1A2 (NM_016260.1,406-424).
cctagaagaacccctaatt

SEQ ID NO: 45967 - DNA, 19 bp, Homo sapiens
  siRNA target sequence for ZNFN1A2 (NM_016260.1,410-428).
gaagaacccctaattgaga

SEQ ID NO: 45968 - DNA, 19 bp, Homo sapiens
  siRNA target sequence for ZNFN1A2 (NM_016260.1,484-502).
ccggcttccgaatggtaaa

SEQ ID NO: 45969 - DNA, 19 bp, Homo sapiens
  siRNA target sequence for ZNFN1A2 (NM_016260.1,486-504).
ggcttccgaatggtaaact

SEQ ID NO: 45970 - DNA, 19 bp, Homo sapiens
  siRNA target sequence for ZNFN1A2 (NM_016260.1,488-506).
cttccgaatggtaaactga

SEQ ID NO: 45971 - DNA, 19 bp, Homo sapiens
  siRNA target sequence for ZNFN1A2 (NM_016260.1,491-509).
ccgaatggtaaactgaaat

SEQ ID NO: 45972 - DNA, 19 bp, Homo sapiens
  siRNA target sequence for ZNFN1A2 (NM_016260.1,598-616).
ccagtgtggagcttctttt

SEQ ID NO: 45973 - DNA, 19 bp, Homo sapiens
  siRNA target sequence for ZNFN1A2 (NM_016260.1,632-650).
cttctgagacacataaagt

SEQ ID NO: 45974 - DNA, 19 bp, Homo sapiens
  siRNA target sequence for ZNFN1A2 (NM_016260.1,814-832).
ggaacgctgccacaactat

SEQ ID NO: 45975 - DNA, 19 bp, Homo sapiens
  siRNA target sequence for ZNFN1A2 (NM_016260.1,877-895).
ccatgtacctcctatggaa

SEQ ID NO: 45976 - DNA, 19 bp, Homo sapiens
  siRNA target sequence for ZNFN1A2 (NM_016260.1,881-899).
gtacctcctatggaagatt

SEQ ID NO: 45977 - DNA, 19 bp, Homo sapiens
  siRNA target sequence for ZNFN1A2 (NM_016260.1,884-902).
cctcctatggaagattgta

SEQ ID NO: 45978 - DNA, 19 bp, Homo sapiens
  siRNA target sequence for ZNFN1A2 (NM_016260.1,885-903).
ctcctatggaagattgtaa

SEQ ID NO: 45979 - DNA, 19 bp, Homo sapiens
  siRNA target sequence for ZNFN1A2 (NM_016260.1,913-931).
gcctattatggacaacaat

SEQ ID NO: 45980 - DNA, 19 bp, Homo sapiens
  siRNA target sequence for ZNFN1A2 (NM_016260.1,914-932).
cctattatggacaacaata

SEQ ID NO: 45981 - DNA, 19 bp, Homo sapiens
  siRNA target sequence for ZNFN1A2 (NM_016260.1,915-933).
ctattatggacaacaatat

SEQ ID NO: 45982 - DNA, 19 bp, Homo sapiens
  siRNA target sequence for ZNFN1A2 (NM_016260.1,1002-1020).
gctccactccacaaaagtt

SEQ ID NO: 45983 - DNA, 19 bp, Homo sapiens
  siRNA target sequence for ZNFN1A2 (NM_016260.1,1005-1023).
ccactccacaaaagtttgt

SEQ ID NO: 45984 - DNA, 19 bp, Homo sapiens
  siRNA target sequence for ZNFN1A2 (NM_016260.1,1047-1065).
gctacccagatattcactt

SEQ ID NO: 45985 - DNA, 19 bp, Homo sapiens
  siRNA target sequence for ZNFN1A2 (NM_016260.1,1063-1081).
ctttgatatgaacttaaca

SEQ ID NO: 45986 - DNA, 19 bp, Homo sapiens
  siRNA target sequence for ZNFN1A2 (NM_016260.1,1203-1221).
ctgaagtggccccagttat

SEQ ID NO: 45987 - DNA, 19 bp, Homo sapiens
  siRNA target sequence for ZNFN1A2 (NM_016260.1,1217-1235).
gttataagctcagcttatt

SEQ ID NO: 45988 - DNA, 19 bp, Homo sapiens
  siRNA target sequence for ZNFN1A2 (NM_016260.1,1230-1248).
cttattctcaggtctatca

SEQ ID NO: 45989 - DNA, 19 bp, Homo sapiens
  siRNA target sequence for ZNFN1A2 (NM_016260.1,1238-1256).
caggtctatcatccaaata

SEQ ID NO: 45990 - DNA, 19 bp, Homo sapiens
  siRNA target sequence for ZNFN1A2 (NM_016260.1,1241-1259).
gtctatcatccaaatagga

SEQ ID NO: 45991 - DNA, 19 bp, Homo sapiens
  siRNA target sequence for ZNFN1A2 (NM_016260.1,1358-1376).
gaggcctctcccagcaata

SEQ ID NO: 45992 - DNA, 19 bp, Homo sapiens
  siRNA target sequence for ZNFN1A2 (NM_016260.1,1568-1586).
cagattagggccttcaagt

SEQ ID NO: 45993 - DNA, 19 bp, Homo sapiens
  siRNA target sequence for ZNFN1A2 (NM_016260.1,1594-1612).
ctgccgagtccttttccta

SEQ ID NO: 45994 - DNA, 19 bp, Homo sapiens
  siRNA target sequence for ZNFN1A2 (NM_016260.1,1689-1707).
gaagccaggaccgttatga

SEQ ID NO: 45995 - DNA, 19 bp, Homo sapiens
  siRNA target sequence for ZNFN1A2 (NM_016260.1,1693-1711).
ccaggaccgttatgagttt

SEQ ID NO: 45996 - DNA, 19 bp, Homo sapiens
  siRNA target sequence for ZNFN1A2 (NM_016260.1,1694-1712).
caggaccgttatgagtttt

SEQ ID NO: 45997 - DNA, 19 bp, Homo sapiens
  siRNA target sequence for ZNFN1A2 (NM_016260.1,1696-1714).
ggaccgttatgagttttca

SEQ ID NO: 45998 - DNA, 19 bp, Homo sapiens
  siRNA target sequence for ZNFN1A2 (NM_016260.1,1697-1715).
gaccgttatgagttttcat

SEQ ID NO: 45999 - DNA, 19 bp, Homo sapiens
  siRNA target sequence for ZNFN1A2 (NM_016260.1,1699-1717).
ccgttatgagttttcatca

SEQ ID NO: 46000 - DNA, 19 bp, Homo sapiens
  siRNA target sequence for ZT86 (NM_015871.2,137-155).
cggacttggatgagattca

SEQ ID NO: 46001 - DNA, 19 bp, Homo sapiens
  siRNA target sequence for ZT86 (NM_015871.2,253-271).
gcctgcgcgaggtacttca

SEQ ID NO: 46002 - DNA, 19 bp, Homo sapiens
  siRNA target sequence for ZT86 (NM_015871.2,254-272).
cctgcgcgaggtacttcat

SEQ ID NO: 46003 - DNA, 19 bp, Homo sapiens
  siRNA target sequence for ZT86 (NM_015871.2,259-277).
gcgaggtacttcatcgatt

SEQ ID NO: 46004 - DNA, 19 bp, Homo sapiens
  siRNA target sequence for ZT86 (NM_015871.2,291-309).
gacccacttccgatccaaa

SEQ ID NO: 46005 - DNA, 19 bp, Homo sapiens
  siRNA target sequence for ZT86 (NM_015871.2,302-320).
gatccaaagaccacaagaa

SEQ ID NO: 46006 - DNA, 19 bp, Homo sapiens
  siRNA target sequence for ZT86 (NM_015871.2,436-454).
gaggtccctgagatggata

SEQ ID NO: 46007 - DNA, 19 bp, Homo sapiens
  siRNA target sequence for ZXDA (NM_007156.1,2074-2092).
gatgaggtctcaagtgtaa

SEQ ID NO: 46008 - DNA, 19 bp, Homo sapiens
  siRNA target sequence for BCAS2 (NM_005872.1,87-105).
ggatgcgctgccgtatttt

SEQ ID NO: 46009 - DNA, 19 bp, Homo sapiens
  siRNA target sequence for BCAS2 (NM_005872.1,92-110).
cgctgccgtattttgatca

SEQ ID NO: 46010 - DNA, 19 bp, Homo sapiens
  siRNA target sequence for BCAS2 (NM_005872.1,93-111).
gctgccgtattttgatcaa

SEQ ID NO: 46011 - DNA, 19 bp, Homo sapiens
  siRNA target sequence for BCAS2 (NM_005872.1,99-117).
gtattttgatcaaggttat

SEQ ID NO: 46012 - DNA, 19 bp, Homo sapiens
  siRNA target sequence for BCAS2 (NM_005872.1,170-188).
gcagataccgacctactaa

SEQ ID NO: 46013 - DNA, 19 bp, Homo sapiens
  siRNA target sequence for BCAS2 (NM_005872.1,236-254).
ctgacataatgagaaatga

SEQ ID NO: 46014 - DNA, 19 bp, Homo sapiens
  siRNA target sequence for BCAS2 (NM_005872.1,267-285).
ggctgctcgacaaccaatt

SEQ ID NO: 46015 - DNA, 19 bp, Homo sapiens
  siRNA target sequence for BCAS2 (NM_005872.1,269-287).
ctgctcgacaaccaattga

SEQ ID NO: 46016 - DNA, 19 bp, Homo sapiens
  siRNA target sequence for BCAS2 (NM_005872.1,272-290).
ctcgacaaccaattgaatt

SEQ ID NO: 46017 - DNA, 19 bp, Homo sapiens
  siRNA target sequence for BCAS2 (NM_005872.1,275-293).
gacaaccaattgaattgct

SEQ ID NO: 46018 - DNA, 19 bp, Homo sapiens
  siRNA target sequence for BCAS2 (NM_005872.1,291-309).
gctcagtatgaaacgatat

SEQ ID NO: 46019 - DNA, 19 bp, Homo sapiens
  siRNA target sequence for BCAS2 (NM_005872.1,393-411).
gcatcaagcagttagaatt

SEQ ID NO: 46020 - DNA, 19 bp, Homo sapiens
  siRNA target sequence for BCAS2 (NM_005872.1,397-415).
caagcagttagaattgaga

SEQ ID NO: 46021 - DNA, 19 bp, Homo sapiens
  siRNA target sequence for BCAS2 (NM_005872.1,412-430).
gagaatctggaactaatgt

SEQ ID NO: 46022 - DNA, 19 bp, Homo sapiens
  siRNA target sequence for BCAS2 (NM_005872.1,414-432).
gaatctggaactaatgtca

SEQ ID NO: 46023 - DNA, 19 bp, Homo sapiens
  siRNA target sequence for BCAS2 (NM_005872.1,429-447).
gtcacagcatggatgtaat

SEQ ID NO: 46024 - DNA, 19 bp, Homo sapiens
  siRNA target sequence for BCAS2 (NM_005872.1,449-467).
cctggaaagtatacaatga

SEQ ID NO: 46025 - DNA, 19 bp, Homo sapiens
  siRNA target sequence for BCAS2 (NM_005872.1,450-468).
ctggaaagtatacaatgaa

SEQ ID NO: 46026 - DNA, 19 bp, Homo sapiens
  siRNA target sequence for BCAS2 (NM_005872.1,466-484).
gaaaatctagttcatatga

SEQ ID NO: 46027 - DNA, 19 bp, Homo sapiens
  siRNA target sequence for BCAS2 (NM_005872.1,523-541).
catattcaagatttaaact

SEQ ID NO: 46028 - DNA, 19 bp, Homo sapiens
  siRNA target sequence for BCAS2 (NM_005872.1,562-580).
ctcacagctggatctaaat

SEQ ID NO: 46029 - DNA, 19 bp, Homo sapiens
  siRNA target sequence for BCAS2 (NM_005872.1,602-620).
gggtatccctggtcagtaa

SEQ ID NO: 46030 - DNA, 19 bp, Homo sapiens
  siRNA target sequence for BCAS2 (NM_005872.1,617-635).
gtaagaattatgagattga

SEQ ID NO: 46031 - DNA, 19 bp, Homo sapiens
  siRNA target sequence for BCAS2 (NM_005872.1,630-648).
gattgaacggactattgtt

SEQ ID NO: 46032 - DNA, 19 bp, Homo sapiens
  siRNA target sequence for BCAS2 (NM_005872.1,641-659).
ctattgttcagctagaaaa

SEQ ID NO: 46033 - DNA, 19 bp, Homo sapiens
  siRNA target sequence for C20orf14 (NM_012469.2,226-244).
caccacgcggtcagacatt

SEQ ID NO: 46034 - DNA, 19 bp, Homo sapiens
  siRNA target sequence for C20orf14 (NM_012469.2,344-362).
gatgacgacgaggatctaa

SEQ ID NO: 46035 - DNA, 19 bp, Homo sapiens
  siRNA target sequence for C20orf14 (NM_012469.2,356-374).
gatctaaatgacaccaatt

SEQ ID NO: 46036 - DNA, 19 bp, Homo sapiens
  siRNA target sequence for C20orf14 (NM_012469.2,370-388).
caattacgatgagtttaat

SEQ ID NO: 46037 - DNA, 19 bp, Homo sapiens
  siRNA target sequence for C20orf14 (NM_012469.2,414-432).
gtggaccctacgagaaaga

SEQ ID NO: 46038 - DNA, 19 bp, Homo sapiens
  siRNA target sequence for C20orf14 (NM_012469.2,459-477).
cagccctggataaaaggat

SEQ ID NO: 46039 - DNA, 19 bp, Homo sapiens
  siRNA target sequence for C20orf14 (NM_012469.2,521-539).
gaaatagagaaatatcgta

SEQ ID NO: 46040 - DNA, 19 bp, Homo sapiens
  siRNA target sequence for C20orf14 (NM_012469.2,537-555).
gtatggaacgccccaaaat

SEQ ID NO: 46041 - DNA, 19 bp, Homo sapiens
  siRNA target sequence for C20orf14 (NM_012469.2,541-559).
ggaacgccccaaaatccaa

SEQ ID NO: 46042 - DNA, 19 bp, Homo sapiens
  siRNA target sequence for C20orf14 (NM_012469.2,681-699).
cccctgttcctgacagttt

SEQ ID NO: 46043 - DNA, 19 bp, Homo sapiens
  siRNA target sequence for C20orf14 (NM_012469.2,683-701).
cctgttcctgacagtttct

SEQ ID NO: 46044 - DNA, 19 bp, Homo sapiens
  siRNA target sequence for C20orf14 (NM_012469.2,716-734).
cagaccggagagaaccata

SEQ ID NO: 46045 - DNA, 19 bp, Homo sapiens
  siRNA target sequence for C20orf14 (NM_012469.2,742-760).
ggatccccgacaaactcaa

SEQ ID NO: 46046 - DNA, 19 bp, Homo sapiens
  siRNA target sequence for C20orf14 (NM_012469.2,743-761).
gatccccgacaaactcaat

SEQ ID NO: 46047 - DNA, 19 bp, Homo sapiens
  siRNA target sequence for C20orf14 (NM_012469.2,780-798).
cctatccaggtggactaaa

SEQ ID NO: 46048 - DNA, 19 bp, Homo sapiens
  siRNA target sequence for C20orf14 (NM_012469.2,853-871).
gctggacatgaggaagatt

SEQ ID NO: 46049 - DNA, 19 bp, Homo sapiens
  siRNA target sequence for C20orf14 (NM_012469.2,956-974).
ggctacctgacggatttaa

SEQ ID NO: 46050 - DNA, 19 bp, Homo sapiens
  siRNA target sequence for C20orf14 (NM_012469.2,957-975).
gctacctgacggatttaaa

SEQ ID NO: 46051 - DNA, 19 bp, Homo sapiens
  siRNA target sequence for C20orf14 (NM_012469.2,958-976).
ctacctgacggatttaaat

SEQ ID NO: 46052 - DNA, 19 bp, Homo sapiens
  siRNA target sequence for C20orf14 (NM_012469.2,962-980).
ctgacggatttaaattcca

SEQ ID NO: 46053 - DNA, 19 bp, Homo sapiens
  siRNA target sequence for C20orf14 (NM_012469.2,990-1008).
cacacggaggagacatcaa

SEQ ID NO: 46054 - DNA, 19 bp, Homo sapiens
  siRNA target sequence for C20orf14 (NM_012469.2,1118-1136).
caagtagctcggaacctta

SEQ ID NO: 46055 - DNA, 19 bp, Homo sapiens
  siRNA target sequence for C20orf14 (NM_012469.2,1121-1139).
gtagctcggaaccttatca

SEQ ID NO: 46056 - DNA, 19 bp, Homo sapiens
  siRNA target sequence for C20orf14 (NM_012469.2,1124-1142).
gctcggaaccttatcatga

SEQ ID NO: 46057 - DNA, 19 bp, Homo sapiens
  siRNA target sequence for C20orf14 (NM_012469.2,1125-1143).
ctcggaaccttatcatgaa

SEQ ID NO: 46058 - DNA, 19 bp, Homo sapiens
  siRNA target sequence for C20orf14 (NM_012469.2,1251-1269).
cacagtctgtcaggattta

SEQ ID NO: 46059 - DNA, 19 bp, Homo sapiens
  siRNA target sequence for C20orf14 (NM_012469.2,1293-1311).
cggacattcgtgcaaagaa

SEQ ID NO: 46060 - DNA, 19 bp, Homo sapiens
  siRNA target sequence for C20orf14 (NM_012469.2,1523-1541).
cctacagaccgacatatct

SEQ ID NO: 46061 - DNA, 19 bp, Homo sapiens
  siRNA target sequence for C20orf14 (NM_012469.2,1629-1647).
ccaacggtgtggagatcaa

SEQ ID NO: 46062 - DNA, 19 bp, Homo sapiens
  siRNA target sequence for C20orf14 (NM_012469.2,1777-1795).
ggatgctgacagttgtgta

SEQ ID NO: 46063 - DNA, 19 bp, Homo sapiens
  siRNA target sequence for C20orf14 (NM_012469.2,2421-2439).
ctcgagcacgggccatttt

SEQ ID NO: 46064 - DNA, 19 bp, Homo sapiens
  siRNA target sequence for C20orf14 (NM_012469.2,2426-2444).
gcacgggccattttggaaa

SEQ ID NO: 46065 - DNA, 19 bp, Homo sapiens
  siRNA target sequence for C20orf14 (NM_012469.2,2429-2447).
cgggccattttggaaaagt

SEQ ID NO: 46066 - DNA, 19 bp, Homo sapiens
  siRNA target sequence for C20orf14 (NM_012469.2,2734-2752).
ccaccgcactgtgaagatt

SEQ ID NO: 46067 - DNA, 19 bp, Homo sapiens
  siRNA target sequence for C20orf14 (NM_012469.2,2738-2756).
cgcactgtgaagattgact

SEQ ID NO: 46068 - DNA, 19 bp, Homo sapiens
  siRNA target sequence for DDX23 (NM_004818.1,136-154).
gaccgggaccggaagtctt

SEQ ID NO: 46069 - DNA, 19 bp, Homo sapiens
  siRNA target sequence for DDX23 (NM_004818.1,146-164).
ggaagtcttccccatctaa

SEQ ID NO: 46070 - DNA, 19 bp, Homo sapiens
  siRNA target sequence for DDX23 (NM_004818.1,147-165).
gaagtcttccccatctaaa

SEQ ID NO: 46071 - DNA, 19 bp, Homo sapiens
  siRNA target sequence for DDX23 (NM_004818.1,219-237).
ctctcgttcccgttccaaa

SEQ ID NO: 46072 - DNA, 19 bp, Homo sapiens
  siRNA target sequence for DDX23 (NM_004818.1,283-301).
gagcgggatcggaataaga

SEQ ID NO: 46073 - DNA, 19 bp, Homo sapiens
  siRNA target sequence for DDX23 (NM_004818.1,336-354).
ggacaaggaccgtaaacga

SEQ ID NO: 46074 - DNA, 19 bp, Homo sapiens
  siRNA target sequence for DDX23 (NM_004818.1,346-364).
cgtaaacgatccagcttat

SEQ ID NO: 46075 - DNA, 19 bp, Homo sapiens
  siRNA target sequence for DDX23 (NM_004818.1,365-383).
ctcctggtcgaggaaaaga

SEQ ID NO: 46076 - DNA, 19 bp, Homo sapiens
  siRNA target sequence for DDX23 (NM_004818.1,367-385).
cctggtcgaggaaaagact

SEQ ID NO: 46077 - DNA, 19 bp, Homo sapiens
  siRNA target sequence for DDX23 (NM_004818.1,368-386).
ctggtcgaggaaaagactt

SEQ ID NO: 46078 - DNA, 19 bp, Homo sapiens
  siRNA target sequence for DDX23 (NM_004818.1,370-388).
ggtcgaggaaaagacttta

SEQ ID NO: 46079 - DNA, 19 bp, Homo sapiens
  siRNA target sequence for DDX23 (NM_004818.1,371-389).
gtcgaggaaaagactttaa

SEQ ID NO: 46080 - DNA, 19 bp, Homo sapiens
  siRNA target sequence for DDX23 (NM_004818.1,395-413).
ggaaggacagagactctaa

SEQ ID NO: 46081 - DNA, 19 bp, Homo sapiens
  siRNA target sequence for DDX23 (NM_004818.1,824-842).
gccgaacgagacatctcaa

SEQ ID NO: 46082 - DNA, 19 bp, Homo sapiens
  siRNA target sequence for DDX23 (NM_004818.1,827-845).
gaacgagacatctcaatga

SEQ ID NO: 46083 - DNA, 19 bp, Homo sapiens
  siRNA target sequence for DDX23 (NM_004818.1,917-935).
ggcaccaggtgcagttgtt

SEQ ID NO: 46084 - DNA, 19 bp, Homo sapiens
  siRNA target sequence for DDX23 (NM_004818.1,933-951).
gttagggcgaggcttcatt

SEQ ID NO: 46085 - DNA, 19 bp, Homo sapiens
  siRNA target sequence for DDX23 (NM_004818.1,980-998).
gagagcagtcacgtttcta

SEQ ID NO: 46086 - DNA, 19 bp, Homo sapiens
  siRNA target sequence for DDX23 (NM_004818.1,1055-1073).
gactccgcaaacttcgtaa

SEQ ID NO: 46087 - DNA, 19 bp, Homo sapiens
  siRNA target sequence for DDX23 (NM_004818.1,1112-1130).
ctcagaaaaagttagatga

SEQ ID NO: 46088 - DNA, 19 bp, Homo sapiens
  siRNA target sequence for DDX23 (NM_004818.1,1472-1490).
gtgagttggctcaacagat

SEQ ID NO: 46089 - DNA, 19 bp, Homo sapiens
  siRNA target sequence for DDX23 (NM_004818.1,1584-1602).
gcgcatgggttgtgagatt

SEQ ID NO: 46090 - DNA, 19 bp, Homo sapiens
  siRNA target sequence for DDX23 (NM_004818.1,1586-1604).
gcatgggttgtgagattgt

SEQ ID NO: 46091 - DNA, 19 bp, Homo sapiens
  siRNA target sequence for DDX23 (NM_004818.1,1590-1608).
gggttgtgagattgtgatt

SEQ ID NO: 46092 - DNA, 19 bp, Homo sapiens
  siRNA target sequence for DDX23 (NM_004818.1,1610-1628).
ctacccctgggcgtttgat

SEQ ID NO: 46093 - DNA, 19 bp, Homo sapiens
  siRNA target sequence for DDX23 (NM_004818.1,1614-1632).
ccctgggcgtttgattgat

SEQ ID NO: 46094 - DNA, 19 bp, Homo sapiens
  siRNA target sequence for DDX23 (NM_004818.1,1616-1634).
ctgggcgtttgattgatgt

SEQ ID NO: 46095 - DNA, 19 bp, Homo sapiens
  siRNA target sequence for DDX23 (NM_004818.1,1656-1674).
gctgagccgctgtacctat

SEQ ID NO: 46096 - DNA, 19 bp, Homo sapiens
  siRNA target sequence for DDX23 (NM_004818.1,1837-1855).
cgccaaacagtcatgttca

SEQ ID NO: 46097 - DNA, 19 bp, Homo sapiens
  siRNA target sequence for DDX23 (NM_004818.1,1907-1925).
gacctgctgtggtgtacat

SEQ ID NO: 46098 - DNA, 19 bp, Homo sapiens
  siRNA target sequence for DDX23 (NM_004818.1,2035-2053).
cccatcattatttttgtca

SEQ ID NO: 46099 - DNA, 19 bp, Homo sapiens
  siRNA target sequence for DDX23 (NM_004818.1,2136-2154).
ccaggagcagcgagagttt

SEQ ID NO: 46100 - DNA, 19 bp, Homo sapiens
  siRNA target sequence for DDX23 (NM_004818.1,2173-2191).
gctggggccaaggatattt

SEQ ID NO: 46101 - DNA, 19 bp, Homo sapiens
  siRNA target sequence for DDX23 (NM_004818.1,2219-2237).
gtattgacatccaagatgt

SEQ ID NO: 46102 - DNA, 19 bp, Homo sapiens
  siRNA target sequence for DDX23 (NM_004818.1,2238-2256).
gtctatggttgtcaactat

SEQ ID NO: 46103 - DNA, 19 bp, Homo sapiens
  siRNA target sequence for DDX23 (NM_004818.1,2240-2258).
ctatggttgtcaactatga

SEQ ID NO: 46104 - DNA, 19 bp, Homo sapiens
  siRNA target sequence for DDX23 (NM_004818.1,2253-2271).
ctatgatatggccaaaaat

SEQ ID NO: 46105 - DNA, 19 bp, Homo sapiens
  siRNA target sequence for DDX23 (NM_004818.1,2262-2280).
ggccaaaaatattgaagat

SEQ ID NO: 46106 - DNA, 19 bp, Homo sapiens
  siRNA target sequence for DHX38 (NM_014003.2,160-178).
ctcgatccatcgattggaa

SEQ ID NO: 46107 - DNA, 19 bp, Homo sapiens
  siRNA target sequence for DHX38 (NM_014003.2,195-213).
gtcaggttggtggtcttat

SEQ ID NO: 46108 - DNA, 19 bp, Homo sapiens
  siRNA target sequence for DHX38 (NM_014003.2,440-458).
caaaatatccggaaagaca

SEQ ID NO: 46109 - DNA, 19 bp, Homo sapiens
  siRNA target sequence for DHX38 (NM_014003.2,448-466).
ccggaaagacagacattat

SEQ ID NO: 46110 - DNA, 19 bp, Homo sapiens
  siRNA target sequence for DHX38 (NM_014003.2,501-519).
gtggtgtgagcgaagagtt

SEQ ID NO: 46111 - DNA, 19 bp, Homo sapiens
  siRNA target sequence for DHX38 (NM_014003.2,503-521).
ggtgtgagcgaagagtttt

SEQ ID NO: 46112 - DNA, 19 bp, Homo sapiens
  siRNA target sequence for DHX38 (NM_014003.2,612-630).
cgcgggatcgagactatga

SEQ ID NO: 46113 - DNA, 19 bp, Homo sapiens
  siRNA target sequence for DHX38 (NM_014003.2,647-665).
gatgagcgggatagaagta

SEQ ID NO: 46114 - DNA, 19 bp, Homo sapiens
  siRNA target sequence for DHX38 (NM_014003.2,701-719).
gagcgtagcagcagaagaa

SEQ ID NO: 46115 - DNA, 19 bp, Homo sapiens
  siRNA target sequence for DHX38 (NM_014003.2,733-751).
cccacgacatcgacctaaa

SEQ ID NO: 46116 - DNA, 19 bp, Homo sapiens
  siRNA target sequence for DHX38 (NM_014003.2,846-864).
cttcctatcgggattctga

SEQ ID NO: 46117 - DNA, 19 bp, Homo sapiens
  siRNA target sequence for DHX38 (NM_014003.2,938-956).
ccaactccctcctacaaat

SEQ ID NO: 46118 - DNA, 19 bp, Homo sapiens
  siRNA target sequence for DHX38 (NM_014003.2,945-963).
cctcctacaaatataacga

SEQ ID NO: 46119 - DNA, 19 bp, Homo sapiens
  siRNA target sequence for DHX38 (NM_014003.2,1030-1048).
ggagggcgaagaaggaatt

SEQ ID NO: 46120 - DNA, 19 bp, Homo sapiens
  siRNA target sequence for DHX38 (NM_014003.2,1031-1049).
gagggcgaagaaggaattt

SEQ ID NO: 46121 - DNA, 19 bp, Homo sapiens
  siRNA target sequence for DHX38 (NM_014003.2,1103-1121).
gatcgggattggtacatga

SEQ ID NO: 46122 - DNA, 19 bp, Homo sapiens
  siRNA target sequence for DHX38 (NM_014003.2,1188-1206).
gggagcagcacctgcataa

SEQ ID NO: 46123 - DNA, 19 bp, Homo sapiens
  siRNA target sequence for DHX38 (NM_014003.2,1189-1207).
ggagcagcacctgcataaa

SEQ ID NO: 46124 - DNA, 19 bp, Homo sapiens
  siRNA target sequence for DHX38 (NM_014003.2,1210-1228).
gaagcagaagcgcatttca

SEQ ID NO: 46125 - DNA, 19 bp, Homo sapiens
  siRNA target sequence for DHX38 (NM_014003.2,1385-1403).
ctggatgggcgcattgtct

SEQ ID NO: 46126 - DNA, 19 bp, Homo sapiens
  siRNA target sequence for DHX38 (NM_014003.2,1551-1569).
ggaccaaactgggagatat

SEQ ID NO: 46127 - DNA, 19 bp, Homo sapiens
  siRNA target sequence for DHX38 (NM_014003.2,1554-1572).
ccaaactgggagatataat

SEQ ID NO: 46128 - DNA, 19 bp, Homo sapiens
  siRNA target sequence for DHX38 (NM_014003.2,1588-1606).
ggaagagccagataaagct

SEQ ID NO: 46129 - DNA, 19 bp, Homo sapiens
  siRNA target sequence for DHX38 (NM_014003.2,1679-1697).
gccagcagtgaatttgcaa

SEQ ID NO: 46130 - DNA, 19 bp, Homo sapiens
  siRNA target sequence for DHX38 (NM_014003.2,1751-1769).
caggagctgctcactatta

SEQ ID NO: 46131 - DNA, 19 bp, Homo sapiens
  siRNA target sequence for DHX38 (NM_014003.2,1833-1851).
cgcagtacctgcatgaaga

SEQ ID NO: 46132 - DNA, 19 bp, Homo sapiens
  siRNA target sequence for DHX38 (NM_014003.2,1858-1876).
cacggactatgggatgatt

SEQ ID NO: 46133 - DNA, 19 bp, Homo sapiens
  siRNA target sequence for DHX38 (NM_014003.2,2289-2307).
ccccacaggaggattacgt

SEQ ID NO: 46134 - DNA, 19 bp, Homo sapiens
  siRNA target sequence for DHX38 (NM_014003.2,2538-2556).
gcatcgttgccaccaatat

SEQ ID NO: 46135 - DNA, 19 bp, Homo sapiens
  siRNA target sequence for DHX38 (NM_014003.2,2539-2557).
catcgttgccaccaatatt

SEQ ID NO: 46136 - DNA, 19 bp, Homo sapiens
  siRNA target sequence for DHX38 (NM_014003.2,2574-2592).
ctgttgacggcatcatgtt

SEQ ID NO: 46137 - DNA, 19 bp, Homo sapiens
  siRNA target sequence for DHX38 (NM_014003.2,2579-2597).
gacggcatcatgtttgtta

SEQ ID NO: 46138 - DNA, 19 bp, Homo sapiens
  siRNA target sequence for DHX38 (NM_014003.2,2583-2601).
gcatcatgtttgttatcga

SEQ ID NO: 46139 - DNA, 19 bp, Homo sapiens
  siRNA target sequence for DHX38 (NM_014003.2,2584-2602).
catcatgtttgttatcgat

SEQ ID NO: 46140 - DNA, 19 bp, Homo sapiens
  siRNA target sequence for DHX38 (NM_014003.2,2594-2612).
gttatcgattctggttatt

SEQ ID NO: 46141 - DNA, 19 bp, Homo sapiens
  siRNA target sequence for DHX38 (NM_014003.2,2599-2617).
cgattctggttattgcaaa

SEQ ID NO: 46142 - DNA, 19 bp, Homo sapiens
  siRNA target sequence for DHX38 (NM_014003.2,2607-2625).
gttattgcaaattaaaggt

SEQ ID NO: 46143 - DNA, 19 bp, Homo sapiens
  siRNA target sequence for DHX38 (NM_014003.2,2745-2763).
cccagagcgcctacaagaa

SEQ ID NO: 46144 - DNA, 19 bp, Homo sapiens
  siRNA target sequence for DHX38 (NM_014003.2,3072-3090).
cggtcccagccatcttcta

SEQ ID NO: 46145 - DNA, 19 bp, Homo sapiens
  siRNA target sequence for DHX38 (NM_014003.2,3143-3161).
gttcctgagagcgatcatt

SEQ ID NO: 46146 - DNA, 19 bp, Homo sapiens
  siRNA target sequence for DHX38 (NM_014003.2,3208-3226).
caccatctggtgtaacgat

SEQ ID NO: 46147 - DNA, 19 bp, Homo sapiens
  siRNA target sequence for DHX38 (NM_014003.2,3216-3234).
ggtgtaacgatcatttcat

SEQ ID NO: 46148 - DNA, 19 bp, Homo sapiens
  siRNA target sequence for DHX38 (NM_014003.2,3273-3291).
ctcaactcaaggacatcat

SEQ ID NO: 46149 - DNA, 19 bp, Homo sapiens
  siRNA target sequence for DHX38 (NM_014003.2,3351-3369).
gcatctgtgctgcctattt

SEQ ID NO: 46150 - DNA, 19 bp, Homo sapiens
  siRNA target sequence for DHX38 (NM_014003.2,3468-3486).
gctacaccccagattacat

SEQ ID NO: 46151 - DNA, 19 bp, Homo sapiens
  siRNA target sequence for DHX38 (NM_014003.2,3474-3492).
ccccagattacatagtgta

SEQ ID NO: 46152 - DNA, 19 bp, Homo sapiens
  siRNA target sequence for DHX38 (NM_014003.2,3475-3493).
cccagattacatagtgtat

SEQ ID NO: 46153 - DNA, 19 bp, Homo sapiens
  siRNA target sequence for DHX38 (NM_014003.2,3477-3495).
cagattacatagtgtatca

SEQ ID NO: 46154 - DNA, 19 bp, Homo sapiens
  siRNA target sequence for DHX38 (NM_014003.2,3731-3749).
gtcaggtctacgaagatct

SEQ ID NO: 46155 - DNA, 19 bp, Homo sapiens
  siRNA target sequence for DHX8 (NM_004941.1,90-108).
ccatggcgggagccttaat

SEQ ID NO: 46156 - DNA, 19 bp, Homo sapiens
  siRNA target sequence for DHX8 (NM_004941.1,157-175).
gtctttggtgtcaaaggtt

SEQ ID NO: 46157 - DNA, 19 bp, Homo sapiens
  siRNA target sequence for DHX8 (NM_004941.1,255-273).
ccacctttgatacttttaa

SEQ ID NO: 46158 - DNA, 19 bp, Homo sapiens
  siRNA target sequence for DHX8 (NM_004941.1,274-292).
ggcttctctcgtcaaaaat

SEQ ID NO: 46159 - DNA, 19 bp, Homo sapiens
  siRNA target sequence for DHX8 (NM_004941.1,297-315).
cagaatttacggattctct

SEQ ID NO: 46160 - DNA, 19 bp, Homo sapiens
  siRNA target sequence for DHX8 (NM_004941.1,299-317).
gaatttacggattctctta

SEQ ID NO: 46161 - DNA, 19 bp, Homo sapiens
  siRNA target sequence for DHX8 (NM_004941.1,325-343).
cttgctgcgtctcatacaa

SEQ ID NO: 46162 - DNA, 19 bp, Homo sapiens
  siRNA target sequence for DHX8 (NM_004941.1,361-379).
gaagccttccactagcaaa

SEQ ID NO: 46163 - DNA, 19 bp, Homo sapiens
  siRNA target sequence for DHX8 (NM_004941.1,364-382).
gccttccactagcaaagat

SEQ ID NO: 46164 - DNA, 19 bp, Homo sapiens
  siRNA target sequence for DHX8 (NM_004941.1,380-398).
gatccagttgttaaaccta

SEQ ID NO: 46165 - DNA, 19 bp, Homo sapiens
  siRNA target sequence for DHX8 (NM_004941.1,466-484).
gaccatgttggatgaagat

SEQ ID NO: 46166 - DNA, 19 bp, Homo sapiens
  siRNA target sequence for DHX8 (NM_004941.1,572-590).
caccgggacaggacaaaga

SEQ ID NO: 46167 - DNA, 19 bp, Homo sapiens
  siRNA target sequence for DHX8 (NM_004941.1,575-593).
cgggacaggacaaagaaga

SEQ ID NO: 46168 - DNA, 19 bp, Homo sapiens
  siRNA target sequence for DHX8 (NM_004941.1,603-621).
gtcgaagccgagatcgaaa

SEQ ID NO: 46169 - DNA, 19 bp, Homo sapiens
  siRNA target sequence for DHX8 (NM_004941.1,643-661).
ggaacgaaaccgagataga

SEQ ID NO: 46170 - DNA, 19 bp, Homo sapiens
  siRNA target sequence for DHX8 (NM_004941.1,706-724).
gacccgggagaggaataaa

SEQ ID NO: 46171 - DNA, 19 bp, Homo sapiens
  siRNA target sequence for DHX8 (NM_004941.1,708-726).
cccgggagaggaataaagt

SEQ ID NO: 46172 - DNA, 19 bp, Homo sapiens
  siRNA target sequence for DHX8 (NM_004941.1,776-794).
cggaaggaccgggacaaat

SEQ ID NO: 46173 - DNA, 19 bp, Homo sapiens
  siRNA target sequence for DHX8 (NM_004941.1,800-818).
gagcggaatctggatagat

SEQ ID NO: 46174 - DNA, 19 bp, Homo sapiens
  siRNA target sequence for DHX8 (NM_004941.1,858-876).
ccaccattggtgacattta

SEQ ID NO: 46175 - DNA, 19 bp, Homo sapiens
  siRNA target sequence for DHX8 (NM_004941.1,898-916).
catgcagtttggttgcttt

SEQ ID NO: 46176 - DNA, 19 bp, Homo sapiens
  siRNA target sequence for DHX8 (NM_004941.1,982-1000).
gggtcgtgtggccaatgta

SEQ ID NO: 46177 - DNA, 19 bp, Homo sapiens
  siRNA target sequence for DHX8 (NM_004941.1,1094-1112).
gagactggagaagatctaa

SEQ ID NO: 46178 - DNA, 19 bp, Homo sapiens
  siRNA target sequence for DHX8 (NM_004941.1,1116-1134).
caaatagacggcgaaatct

SEQ ID NO: 46179 - DNA, 19 bp, Homo sapiens
  siRNA target sequence for DHX8 (NM_004941.1,1240-1258).
gcgcctcacccgaatctct

SEQ ID NO: 46180 - DNA, 19 bp, Homo sapiens
  siRNA target sequence for DHX8 (NM_004941.1,1351-1369).
ccctaaggtggatgatgaa

SEQ ID NO: 46181 - DNA, 19 bp, Homo sapiens
  siRNA target sequence for DHX8 (NM_004941.1,1376-1394).
gaggaccttgagattgaat

SEQ ID NO: 46182 - DNA, 19 bp, Homo sapiens
  siRNA target sequence for DHX8 (NM_004941.1,1444-1462).
ggacatgagccccattaaa

SEQ ID NO: 46183 - DNA, 19 bp, Homo sapiens
  siRNA target sequence for DHX8 (NM_004941.1,1447-1465).
catgagccccattaaaatt

SEQ ID NO: 46184 - DNA, 19 bp, Homo sapiens
  siRNA target sequence for DHX8 (NM_004941.1,1452-1470).
gccccattaaaattgtcaa

SEQ ID NO: 46185 - DNA, 19 bp, Homo sapiens
  siRNA target sequence for DHX8 (NM_004941.1,1556-1574).
gaagctgagatggattcta

SEQ ID NO: 46186 - DNA, 19 bp, Homo sapiens
  siRNA target sequence for DHX8 (NM_004941.1,1663-1681).
gatgcccaatgatattcct

SEQ ID NO: 46187 - DNA, 19 bp, Homo sapiens
  siRNA target sequence for DHX8 (NM_004941.1,1715-1733).
gcctcttacggaaaaaaga

SEQ ID NO: 46188 - DNA, 19 bp, Homo sapiens
  siRNA target sequence for DHX8 (NM_004941.1,1760-1778).
gagagcctgcccatctaca

SEQ ID NO: 46189 - DNA, 19 bp, Homo sapiens
  siRNA target sequence for DHX8 (NM_004941.1,1798-1816).
ccaggccgtccatgacaat

SEQ ID NO: 46190 - DNA, 19 bp, Homo sapiens
  siRNA target sequence for DHX8 (NM_004941.1,1802-1820).
gccgtccatgacaatcaga

SEQ ID NO: 46191 - DNA, 19 bp, Homo sapiens
  siRNA target sequence for DHX8 (NM_004941.1,1803-1821).
ccgtccatgacaatcagat

SEQ ID NO: 46192 - DNA, 19 bp, Homo sapiens
  siRNA target sequence for DHX8 (NM_004941.1,1880-1898).
gcggaggcaggctacactt

SEQ ID NO: 46193 - DNA, 19 bp, Homo sapiens
  siRNA target sequence for DHX8 (NM_004941.1,1997-2015).
gtgggctacaccattcgat

SEQ ID NO: 46194 - DNA, 19 bp, Homo sapiens
  siRNA target sequence for DHX8 (NM_004941.1,1999-2017).
gggctacaccattcgattt

SEQ ID NO: 46195 - DNA, 19 bp, Homo sapiens
  siRNA target sequence for DHX8 (NM_004941.1,2033-2051).
cctgaaacagtcatcaagt

SEQ ID NO: 46196 - DNA, 19 bp, Homo sapiens
  siRNA target sequence for DHX8 (NM_004941.1,2034-2052).
ctgaaacagtcatcaagta

SEQ ID NO: 46197 - DNA, 19 bp, Homo sapiens
  siRNA target sequence for DHX8 (NM_004941.1,2103-2121).
ctcagtacgcgatcatcat

SEQ ID NO: 46198 - DNA, 19 bp, Homo sapiens
  siRNA target sequence for DHX8 (NM_004941.1,2229-2247).
ccttggatgcagtgaagtt

SEQ ID NO: 46199 - DNA, 19 bp, Homo sapiens
  siRNA target sequence for DHX8 (NM_004941.1,2233-2251).
ggatgcagtgaagttttct

SEQ ID NO: 46200 - DNA, 19 bp, Homo sapiens
  siRNA target sequence for DHX8 (NM_004941.1,2280-2298).
ccatcccaggtcgaacata

SEQ ID NO: 46201 - DNA, 19 bp, Homo sapiens
  siRNA target sequence for DHX8 (NM_004941.1,2281-2299).
catcccaggtcgaacatat

SEQ ID NO: 46202 - DNA, 19 bp, Homo sapiens
  siRNA target sequence for DHX8 (NM_004941.1,2284-2302).
cccaggtcgaacatatcca

SEQ ID NO: 46203 - DNA, 19 bp, Homo sapiens
  siRNA target sequence for DHX8 (NM_004941.1,2295-2313).
catatccagtggaaatact

SEQ ID NO: 46204 - DNA, 19 bp, Homo sapiens
  siRNA target sequence for DHX8 (NM_004941.1,2303-2321).
gtggaaatactgtacacaa

SEQ ID NO: 46205 - DNA, 19 bp, Homo sapiens
  siRNA target sequence for DHX8 (NM_004941.1,2344-2362).
ggatgccagcctgattact

SEQ ID NO: 46206 - DNA, 19 bp, Homo sapiens
  siRNA target sequence for DHX8 (NM_004941.1,2348-2366).
gccagcctgattactgtta

SEQ ID NO: 46207 - DNA, 19 bp, Homo sapiens
  siRNA target sequence for DHX8 (NM_004941.1,2352-2370).
gcctgattactgttatgca

SEQ ID NO: 46208 - DNA, 19 bp, Homo sapiens
  siRNA target sequence for DHX8 (NM_004941.1,2477-2495).
cctgatgttccagagttaa

SEQ ID NO: 46209 - DNA, 19 bp, Homo sapiens
  siRNA target sequence for DHX8 (NM_004941.1,2480-2498).
gatgttccagagttaatta

SEQ ID NO: 46210 - DNA, 19 bp, Homo sapiens
  siRNA target sequence for DHX8 (NM_004941.1,2530-2548).
gatgcagacccgaatcttt

SEQ ID NO: 46211 - DNA, 19 bp, Homo sapiens
  siRNA target sequence for DHX8 (NM_004941.1,2607-2625).
cgctgactattgatggtat

SEQ ID NO: 46212 - DNA, 19 bp, Homo sapiens
  siRNA target sequence for DHX8 (NM_004941.1,2613-2631).
ctattgatggtatctacta

SEQ ID NO: 46213 - DNA, 19 bp, Homo sapiens
  siRNA target sequence for DHX8 (NM_004941.1,2643-2661).
caggattcgtgaaacagaa

SEQ ID NO: 46214 - DNA, 19 bp, Homo sapiens
  siRNA target sequence for DHX8 (NM_004941.1,2646-2664).
gattcgtgaaacagaaagt

SEQ ID NO: 46215 - DNA, 19 bp, Homo sapiens
  siRNA target sequence for DHX8 (NM_004941.1,2693-2711).
ctcgtggtgacgcctattt

SEQ ID NO: 46216 - DNA, 19 bp, Homo sapiens
  siRNA target sequence for DHX8 (NM_004941.1,2695-2713).
cgtggtgacgcctatttct

SEQ ID NO: 46217 - DNA, 19 bp, Homo sapiens
  siRNA target sequence for DHX8 (NM_004941.1,2754-2772).
caggcccagggaagtgtta

SEQ ID NO: 46218 - DNA, 19 bp, Homo sapiens
  siRNA target sequence for DHX8 (NM_004941.1,2756-2774).
ggcccagggaagtgttaca

SEQ ID NO: 46219 - DNA, 19 bp, Homo sapiens
  siRNA target sequence for DHX8 (NM_004941.1,2790-2808).
gtgcctaccgagatgaaat

SEQ ID NO: 46220 - DNA, 19 bp, Homo sapiens
  siRNA target sequence for DHX8 (NM_004941.1,2793-2811).
cctaccgagatgaaatgct

SEQ ID NO: 46221 - DNA, 19 bp, Homo sapiens
  siRNA target sequence for DHX8 (NM_004941.1,2817-2835).
ccaacgtgccggaaatcca

SEQ ID NO: 46222 - DNA, 19 bp, Homo sapiens
  siRNA target sequence for DHX8 (NM_004941.1,2834-2852).
cagagaaccaacttagcaa

SEQ ID NO: 46223 - DNA, 19 bp, Homo sapiens
  siRNA target sequence for DHX8 (NM_004941.1,2874-2892).
ccatgggtatcaatgatct

SEQ ID NO: 46224 - DNA, 19 bp, Homo sapiens
  siRNA target sequence for DHX8 (NM_004941.1,2915-2933).
gccccacctatggaaactt

SEQ ID NO: 46225 - DNA, 19 bp, Homo sapiens
  siRNA target sequence for DHX8 (NM_004941.1,2916-2934).
ccccacctatggaaacttt

SEQ ID NO: 46226 - DNA, 19 bp, Homo sapiens
  siRNA target sequence for DHX8 (NM_004941.1,3028-3046).
ggagccaatgctatgcaaa

SEQ ID NO: 46227 - DNA, 19 bp, Homo sapiens
  siRNA target sequence for DHX8 (NM_004941.1,3029-3047).
gagccaatgctatgcaaaa

SEQ ID NO: 46228 - DNA, 19 bp, Homo sapiens
  siRNA target sequence for DHX8 (NM_004941.1,3111-3129).
ctgtgcagaacgtcttcta

SEQ ID NO: 46229 - DNA, 19 bp, Homo sapiens
  siRNA target sequence for DHX8 (NM_004941.1,3127-3145).
ctataggcccaaggataaa

SEQ ID NO: 46230 - DNA, 19 bp, Homo sapiens
  siRNA target sequence for DHX8 (NM_004941.1,3304-3322).
cattcgcaagcagatgtta

SEQ ID NO: 46231 - DNA, 19 bp, Homo sapiens
  siRNA target sequence for DHX8 (NM_004941.1,3458-3476).
gaccagcaggtggtctata

SEQ ID NO: 46232 - DNA, 19 bp, Homo sapiens
  siRNA target sequence for DHX8 (NM_004941.1,3463-3481).
gcaggtggtctatatccat

SEQ ID NO: 46233 - DNA, 19 bp, Homo sapiens
  siRNA target sequence for DHX8 (NM_004941.1,3551-3569).
gaatacatgcgtgaagtta

SEQ ID NO: 46234 - DNA, 19 bp, Homo sapiens
  siRNA target sequence for DHX8 (NM_004941.1,3628-3646).
cccaactaagctaagcaaa

SEQ ID NO: 46235 - DNA, 19 bp, Homo sapiens
  siRNA target sequence for DHX8 (NM_004941.1,3633-3651).
ctaagctaagcaaacagaa

SEQ ID NO: 46236 - DNA, 19 bp, Homo sapiens
  siRNA target sequence for DHX8 (NM_004941.1,3652-3670).
gaagcaacagcgtcttgaa

SEQ ID NO: 46237 - DNA, 19 bp, Homo sapiens
  siRNA target sequence for DHX8 (NM_004941.1,3662-3680).
cgtcttgaacccttgtaca

SEQ ID NO: 46238 - DNA, 19 bp, Homo sapiens
  siRNA target sequence for DHX8 (NM_004941.1,3695-3713).
cccaatgcctggagaatat

SEQ ID NO: 46239 - DNA, 19 bp, Homo sapiens
  siRNA target sequence for DIM1 (NM_006701.2,280-298).
gcatcgccgagaaggttaa

SEQ ID NO: 46240 - DNA, 19 bp, Homo sapiens
  siRNA target sequence for DIM1 (NM_006701.2,281-299).
catcgccgagaaggttaaa

SEQ ID NO: 46241 - DNA, 19 bp, Homo sapiens
  siRNA target sequence for DIM1 (NM_006701.2,284-302).
cgccgagaaggttaaaaat

SEQ ID NO: 46242 - DNA, 19 bp, Homo sapiens
  siRNA target sequence for FUSIP1 (NM_054016.1,555-573).
ccgacaatgatagattcaa

SEQ ID NO: 46243 - DNA, 19 bp, Homo sapiens
  siRNA target sequence for FUSIP1 (NM_054016.1,556-574).
cgacaatgatagattcaaa

SEQ ID NO: 46244 - DNA, 19 bp, Homo sapiens
  siRNA target sequence for FUSIP1 (NM_054016.1,577-595).
ccgaaatcgatctttttca

SEQ ID NO: 46245 - DNA, 19 bp, Homo sapiens
  siRNA target sequence for FUSIP1 (NM_054016.1,674-692).
gcatctcacaccaaaacta

SEQ ID NO: 46246 - DNA, 19 bp, Homo sapiens
  siRNA target sequence for FUSIP1 (NM_054016.1,735-753).
gctcaagatatgaaaagga

SEQ ID NO: 46247 - DNA, 19 bp, Homo sapiens
  siRNA target sequence for FUSIP1 (NM_054016.1,767-785).
gaaccacctagatccaaat

SEQ ID NO: 46248 - DNA, 19 bp, Homo sapiens
  siRNA target sequence for FUSIP1 (NM_054016.1,771-789).
cacctagatccaaatctca

SEQ ID NO: 46249 - DNA, 19 bp, Homo sapiens
  siRNA target sequence for FUSIP1 (NM_054016.1,802-820).
gtctaggtctaggtcaaaa

SEQ ID NO: 46250 - DNA, 19 bp, Homo sapiens
  siRNA target sequence for FUSIP1 (NM_054016.1,808-826).
gtctaggtcaaaatctaga

SEQ ID NO: 46251 - DNA, 19 bp, Homo sapiens
  siRNA target sequence for HPRP8BP (NM_004814.1,154-172).
gcgggacctccaagatgtt

SEQ ID NO: 46252 - DNA, 19 bp, Homo sapiens
  siRNA target sequence for HPRP8BP (NM_004814.1,176-194).
cccttcaagccccaatcat

SEQ ID NO: 46253 - DNA, 19 bp, Homo sapiens
  siRNA target sequence for HPRP8BP (NM_004814.1,206-224).
gacatgaaggggaagtcta

SEQ ID NO: 46254 - DNA, 19 bp, Homo sapiens
  siRNA target sequence for HPRP8BP (NM_004814.1,268-286).
ggatttgaccgactgatat

SEQ ID NO: 46255 - DNA, 19 bp, Homo sapiens
  siRNA target sequence for HPRP8BP (NM_004814.1,274-292).
gaccgactgatattactgt

SEQ ID NO: 46256 - DNA, 19 bp, Homo sapiens
  siRNA target sequence for HPRP8BP (NM_004814.1,369-387).
cacagatggcagtatgctt

SEQ ID NO: 46257 - DNA, 19 bp, Homo sapiens
  siRNA target sequence for HPRP8BP (NM_004814.1,373-391).
gatggcagtatgcttttct

SEQ ID NO: 46258 - DNA, 19 bp, Homo sapiens
  siRNA target sequence for HPRP8BP (NM_004814.1,414-432).
ggctgtgtgggatagtgaa

SEQ ID NO: 46259 - DNA, 19 bp, Homo sapiens
  siRNA target sequence for HPRP8BP (NM_004814.1,527-545).
gtgacgatggcacagttaa

SEQ ID NO: 46260 - DNA, 19 bp, Homo sapiens
  siRNA target sequence for HPRP8BP (NM_004814.1,531-549).
cgatggcacagttaagctt

SEQ ID NO: 46261 - DNA, 19 bp, Homo sapiens
  siRNA target sequence for HPRP8BP (NM_004814.1,624-642).
cacaagtgatcagattatt

SEQ ID NO: 46262 - DNA, 19 bp, Homo sapiens
  siRNA target sequence for HPRP8BP (NM_004814.1,649-667).
ggaatagacaatgatatca

SEQ ID NO: 46263 - DNA, 19 bp, Homo sapiens
  siRNA target sequence for HPRP8BP (NM_004814.1,650-668).
gaatagacaatgatatcaa

SEQ ID NO: 46264 - DNA, 19 bp, Homo sapiens
  siRNA target sequence for HPRP8BP (NM_004814.1,679-697).
ctgcgccagaacaagctaa

SEQ ID NO: 46265 - DNA, 19 bp, Homo sapiens
  siRNA target sequence for HPRP8BP (NM_004814.1,683-701).
gccagaacaagctaaccta

SEQ ID NO: 46266 - DNA, 19 bp, Homo sapiens
  siRNA target sequence for HPRP8BP (NM_004814.1,771-789).
caatgcaatggacaataca

SEQ ID NO: 46267 - DNA, 19 bp, Homo sapiens
  siRNA target sequence for HPRP8BP (NM_004814.1,894-912).
gtcacctgatggaagcaaa

SEQ ID NO: 46268 - DNA, 19 bp, Homo sapiens
  siRNA target sequence for HPRP8BP (NM_004814.1,926-944).
cagccgacaggtttgttta

SEQ ID NO: 46269 - DNA, 19 bp, Homo sapiens
  siRNA target sequence for HPRP8BP (NM_004814.1,929-947).
ccgacaggtttgtttatgt

SEQ ID NO: 46270 - DNA, 19 bp, Homo sapiens
  siRNA target sequence for KHSRP (NM_003685.1,367-385).
gctgccacgacagtgaata

SEQ ID NO: 46271 - DNA, 19 bp, Homo sapiens
  siRNA target sequence for KHSRP (NM_003685.1,368-386).
ctgccacgacagtgaataa

SEQ ID NO: 46272 - DNA, 19 bp, Homo sapiens
  siRNA target sequence for KHSRP (NM_003685.1,370-388).
gccacgacagtgaataaca

SEQ ID NO: 46273 - DNA, 19 bp, Homo sapiens
  siRNA target sequence for KHSRP (NM_003685.1,389-407).
gcactcctgattttggttt

SEQ ID NO: 46274 - DNA, 19 bp, Homo sapiens
  siRNA target sequence for KHSRP (NM_003685.1,468-486).
ccagggagactcaatcagt

SEQ ID NO: 46275 - DNA, 19 bp, Homo sapiens
  siRNA target sequence for KHSRP (NM_003685.1,555-573).
catggtgggcctgatcatt

SEQ ID NO: 46276 - DNA, 19 bp, Homo sapiens
  siRNA target sequence for KHSRP (NM_003685.1,877-895).
cgcgctggagtgaagatga

SEQ ID NO: 46277 - DNA, 19 bp, Homo sapiens
  siRNA target sequence for KHSRP (NM_003685.1,878-896).
gcgctggagtgaagatgat

SEQ ID NO: 46278 - DNA, 19 bp, Homo sapiens
  siRNA target sequence for KHSRP (NM_003685.1,904-922).
caggacggatctcagaata

SEQ ID NO: 46279 - DNA, 19 bp, Homo sapiens
  siRNA target sequence for KHSRP (NM_003685.1,907-925).
gacggatctcagaatacga

SEQ ID NO: 46280 - DNA, 19 bp, Homo sapiens
  siRNA target sequence for KHSRP (NM_003685.1,909-927).
cggatctcagaatacgaat

SEQ ID NO: 46281 - DNA, 19 bp, Homo sapiens
  siRNA target sequence for KHSRP (NM_003685.1,944-962).
gcatcattggggatcctta

SEQ ID NO: 46282 - DNA, 19 bp, Homo sapiens
  siRNA target sequence for KHSRP (NM_003685.1,1109-1127).
gccggagtggagagatgat

SEQ ID NO: 46283 - DNA, 19 bp, Homo sapiens
  siRNA target sequence for KHSRP (NM_003685.1,1147-1165).
gctggcgtgcggatacagt

SEQ ID NO: 46284 - DNA, 19 bp, Homo sapiens
  siRNA target sequence for KHSRP (NM_003685.1,1148-1166).
ctggcgtgcggatacagtt

SEQ ID NO: 46285 - DNA, 19 bp, Homo sapiens
  siRNA target sequence for KHSRP (NM_003685.1,1151-1169).
gcgtgcggatacagttcaa

SEQ ID NO: 46286 - DNA, 19 bp, Homo sapiens
  siRNA target sequence for KHSRP (NM_003685.1,1190-1208).
ccgagaagattgctcatat

SEQ ID NO: 46287 - DNA, 19 bp, Homo sapiens
  siRNA target sequence for KHSRP (NM_003685.1,1191-1209).
cgagaagattgctcatata

SEQ ID NO: 46288 - DNA, 19 bp, Homo sapiens
  siRNA target sequence for KHSRP (NM_003685.1,1234-1252).
cacgcagcccggatcatca

SEQ ID NO: 46289 - DNA, 19 bp, Homo sapiens
  siRNA target sequence for KHSRP (NM_003685.1,1417-1435).
cgaggtggcgagaatgtga

SEQ ID NO: 46290 - DNA, 19 bp, Homo sapiens
  siRNA target sequence for KHSRP (NM_003685.1,1418-1436).
gaggtggcgagaatgtgaa

SEQ ID NO: 46291 - DNA, 19 bp, Homo sapiens
  siRNA target sequence for KHSRP (NM_003685.1,1454-1472).
cgggagccttcgtagagat

SEQ ID NO: 46292 - DNA, 19 bp, Homo sapiens
  siRNA target sequence for KHSRP (NM_003685.1,1495-1513).
ggggaccccaacttcaagt

SEQ ID NO: 46293 - DNA, 19 bp, Homo sapiens
  siRNA target sequence for KHSRP (NM_003685.1,1496-1514).
gggaccccaacttcaagtt

SEQ ID NO: 46294 - DNA, 19 bp, Homo sapiens
  siRNA target sequence for KHSRP (NM_003685.1,1529-1547).
gttcaccccagcagattga

SEQ ID NO: 46295 - DNA, 19 bp, Homo sapiens
  siRNA target sequence for KHSRP (NM_003685.1,1558-1576).
cagcttatcgaggaaaaga

SEQ ID NO: 46296 - DNA, 19 bp, Homo sapiens
  siRNA target sequence for KHSRP (NM_003685.1,1826-1844).
cctactactcacactacta

SEQ ID NO: 46297 - DNA, 19 bp, Homo sapiens
  siRNA target sequence for KHSRP (NM_003685.1,1933-1951).
ggccagtcggactacacta

SEQ ID NO: 46298 - DNA, 19 bp, Homo sapiens
  siRNA target sequence for KHSRP (NM_003685.1,1934-1952).
gccagtcggactacactaa

SEQ ID NO: 46299 - DNA, 19 bp, Homo sapiens
  siRNA target sequence for KHSRP (NM_003685.1,2119-2137).
gccgcctgggcggaatatt

SEQ ID NO: 46300 - DNA, 19 bp, Homo sapiens
  siRNA target sequence for LSM1 (NM_014462.1,218-236).
catcgaggacattgacaaa

SEQ ID NO: 46301 - DNA, 19 bp, Homo sapiens
  siRNA target sequence for LSM1 (NM_014462.1,255-273).
cgagatggaaggacactta

SEQ ID NO: 46302 - DNA, 19 bp, Homo sapiens
  siRNA target sequence for LSM1 (NM_014462.1,256-274).
gagatggaaggacacttat

SEQ ID NO: 46303 - DNA, 19 bp, Homo sapiens
  siRNA target sequence for LSM1 (NM_014462.1,265-283).
ggacacttataggcttttt

SEQ ID NO: 46304 - DNA, 19 bp, Homo sapiens
  siRNA target sequence for LSM1 (NM_014462.1,266-284).
gacacttataggcttttta

SEQ ID NO: 46305 - DNA, 19 bp, Homo sapiens
  siRNA target sequence for LSM1 (NM_014462.1,323-341).
gactgtggagcgtattcat

SEQ ID NO: 46306 - DNA, 19 bp, Homo sapiens
  siRNA target sequence for LSM1 (NM_014462.1,347-365).
caaaaaatacggtgatatt

SEQ ID NO: 46307 - DNA, 19 bp, Homo sapiens
  siRNA target sequence for LSM1 (NM_014462.1,452-470).
gcaagtatccattgaagaa

SEQ ID NO: 46308 - DNA, 19 bp, Homo sapiens
  siRNA target sequence for LSM1 (NM_014462.1,453-471).
caagtatccattgaagaaa

SEQ ID NO: 46309 - DNA, 19 bp, Homo sapiens
  siRNA target sequence for LSM1 (NM_014462.1,542-560).
ggaccgaggtctttccatt

SEQ ID NO: 46310 - DNA, 19 bp, Homo sapiens
  siRNA target sequence for LSM1 (NM_014462.1,568-586).
cagatactcttgatgagta

SEQ ID NO: 46311 - DNA, 19 bp, Homo sapiens
  siRNA target sequence for LSM10 (NM_032881.1,265-283).
gcccacggacgcatagaca

SEQ ID NO: 46312 - DNA, 19 bp, Homo sapiens
  siRNA target sequence for LSM10 (NM_032881.1,266-284).
cccacggacgcatagacaa

SEQ ID NO: 46313 - DNA, 19 bp, Homo sapiens
  siRNA target sequence for LSM10 (NM_032881.1,267-285).
ccacggacgcatagacaat

SEQ ID NO: 46314 - DNA, 19 bp, Homo sapiens
  siRNA target sequence for LSM10 (NM_032881.1,403-421).
ccagatgacgtgaacatca

SEQ ID NO: 46315 - DNA, 19 bp, Homo sapiens
  siRNA target sequence for LSM10 (NM_032881.1,453-471).
ccatcgggtgcgaaacttt

SEQ ID NO: 46316 - DNA, 19 bp, Homo sapiens
  siRNA target sequence for LSM11 (NM_173491.1,503-521).
gggtgaaggtgaatgttca

SEQ ID NO: 46317 - DNA, 19 bp, Homo sapiens
  siRNA target sequence for LSM11 (NM_173491.1,517-535).
gttcacatccgcactttca

SEQ ID NO: 46318 - DNA, 19 bp, Homo sapiens
  siRNA target sequence for LSM11 (NM_173491.1,585-603).
ctggaatatggcacttact

SEQ ID NO: 46319 - DNA, 19 bp, Homo sapiens
  siRNA target sequence for LSM11 (NM_173491.1,629-647).
ctgtcctaggcaaagcata

SEQ ID NO: 46320 - DNA, 19 bp, Homo sapiens
  siRNA target sequence for LSM11 (NM_173491.1,643-661).
gcatatgaacgggattctt

SEQ ID NO: 46321 - DNA, 19 bp, Homo sapiens
  siRNA target sequence for LSM11 (NM_173491.1,666-684).
gactctcactaggctattt

SEQ ID NO: 46322 - DNA, 19 bp, Homo sapiens
  siRNA target sequence for LSM11 (NM_173491.1,668-686).
ctctcactaggctatttga

SEQ ID NO: 46323 - DNA, 19 bp, Homo sapiens
  siRNA target sequence for LSM11 (NM_173491.1,750-768).
cactctgtctagatactca

SEQ ID NO: 46324 - DNA, 19 bp, Homo sapiens
  siRNA target sequence for LSM11 (NM_173491.1,931-949).
gtgggaggtaccttttcca

SEQ ID NO: 46325 - DNA, 19 bp, Homo sapiens
  siRNA target sequence for LSM11 (NM_173491.1,968-986).
gaggccagtcccgtaagaa

SEQ ID NO: 46326 - DNA, 19 bp, Homo sapiens
  siRNA target sequence for LSM11 (NM_173491.1,970-988).
ggccagtcccgtaagaaaa

SEQ ID NO: 46327 - DNA, 19 bp, Homo sapiens
  siRNA target sequence for LSM11 (NM_173491.1,1017-1035).
ggtattcactcgacacata

SEQ ID NO: 46328 - DNA, 19 bp, Homo sapiens
  siRNA target sequence for LSM11 (NM_173491.1,1018-1036).
gtattcactcgacacataa

SEQ ID NO: 46329 - DNA, 19 bp, Homo sapiens
  siRNA target sequence for LSM11 (NM_173491.1,1025-1043).
ctcgacacataaatcagat

SEQ ID NO: 46330 - DNA, 19 bp, Homo sapiens
  siRNA target sequence for LSM11 (NM_173491.1,1027-1045).
cgacacataaatcagattt

SEQ ID NO: 46331 - DNA, 19 bp, Homo sapiens
  siRNA target sequence for LSM2 (NM_021177.3,252-270).
gtggtcgtggaactaaaga

SEQ ID NO: 46332 - DNA, 19 bp, Homo sapiens
  siRNA target sequence for LSM3 (NM_014463.1,42-60).
gtagaccagcaacaaacta

SEQ ID NO: 46333 - DNA, 19 bp, Homo sapiens
  siRNA target sequence for LSM3 (NM_014463.1,100-118).
gcctagatgagcgaattta

SEQ ID NO: 46334 - DNA, 19 bp, Homo sapiens
  siRNA target sequence for LSM3 (NM_014463.1,101-119).
cctagatgagcgaatttat

SEQ ID NO: 46335 - DNA, 19 bp, Homo sapiens
  siRNA target sequence for LSM3 (NM_014463.1,105-123).
gatgagcgaatttatgtga

SEQ ID NO: 46336 - DNA, 19 bp, Homo sapiens
  siRNA target sequence for LSM3 (NM_014463.1,108-126).
gagcgaatttatgtgaaaa

SEQ ID NO: 46337 - DNA, 19 bp, Homo sapiens
  siRNA target sequence for LSM3 (NM_014463.1,111-129).
cgaatttatgtgaaaatga

SEQ ID NO: 46338 - DNA, 19 bp, Homo sapiens
  siRNA target sequence for LSM3 (NM_014463.1,143-161).
gcttcgaggcagattacat

SEQ ID NO: 46339 - DNA, 19 bp, Homo sapiens
  siRNA target sequence for LSM3 (NM_014463.1,148-166).
gaggcagattacatgctta

SEQ ID NO: 46340 - DNA, 19 bp, Homo sapiens
  siRNA target sequence for LSM3 (NM_014463.1,151-169).
gcagattacatgcttatga

SEQ ID NO: 46341 - DNA, 19 bp, Homo sapiens
  siRNA target sequence for LSM3 (NM_014463.1,154-172).
gattacatgcttatgatca

SEQ ID NO: 46342 - DNA, 19 bp, Homo sapiens
  siRNA target sequence for LSM3 (NM_014463.1,159-177).
catgcttatgatcaacatt

SEQ ID NO: 46343 - DNA, 19 bp, Homo sapiens
  siRNA target sequence for LSM3 (NM_014463.1,171-189).
caacatttaaatatgatct

SEQ ID NO: 46344 - DNA, 19 bp, Homo sapiens
  siRNA target sequence for LSM3 (NM_014463.1,262-280).
cgaaacggaatattccaat

SEQ ID NO: 46345 - DNA, 19 bp, Homo sapiens
  siRNA target sequence for LSM4 (NM_012321.2,452-470).
cgctggccgaggtgtgttt

SEQ ID NO: 46346 - DNA, 19 bp, Homo sapiens
  siRNA target sequence for LSM5 (NM_012322.1,57-75).
caaatgtataggatcaaga

SEQ ID NO: 46347 - DNA, 19 bp, Homo sapiens
  siRNA target sequence for LSM5 (NM_012322.1,62-80).
gtataggatcaagaattca

SEQ ID NO: 46348 - DNA, 19 bp, Homo sapiens
  siRNA target sequence for LSM5 (NM_012322.1,74-92).
gaattcacatcgtgatgaa

SEQ ID NO: 46349 - DNA, 19 bp, Homo sapiens
  siRNA target sequence for LSM6 (NM_007080.1,101-119).
cccctagtgacttcttaaa

SEQ ID NO: 46350 - DNA, 19 bp, Homo sapiens
  siRNA target sequence for LSM6 (NM_007080.1,133-151).
cgaccagttgtggtaaaat

SEQ ID NO: 46351 - DNA, 19 bp, Homo sapiens
  siRNA target sequence for LSM6 (NM_007080.1,134-152).
gaccagttgtggtaaaatt

SEQ ID NO: 46352 - DNA, 19 bp, Homo sapiens
  siRNA target sequence for LSM6 (NM_007080.1,137-155).
cagttgtggtaaaattaaa

SEQ ID NO: 46353 - DNA, 19 bp, Homo sapiens
  siRNA target sequence for LSM6 (NM_007080.1,278-296).
gaggaaacaatgtgttgta

SEQ ID NO: 46354 - DNA, 19 bp, Homo sapiens
  siRNA target sequence for LSM7 (NM_016199.1,242-260).
gcacgtccgtggtgctaat

SEQ ID NO: 46355 - DNA, 19 bp, Homo sapiens
  siRNA target sequence for LSM8 (NM_016200.2,83-101).
ctacatcaaccgaactgtt

SEQ ID NO: 46356 - DNA, 19 bp, Homo sapiens
  siRNA target sequence for LSM8 (NM_016200.2,92-110).
ccgaactgttgccgttatt

SEQ ID NO: 46357 - DNA, 19 bp, Homo sapiens
  siRNA target sequence for LSM8 (NM_016200.2,93-111).
cgaactgttgccgttatta

SEQ ID NO: 46358 - DNA, 19 bp, Homo sapiens
  siRNA target sequence for LSM8 (NM_016200.2,147-165).
ggttttgaccagaccatta

SEQ ID NO: 46359 - DNA, 19 bp, Homo sapiens
  siRNA target sequence for LSM8 (NM_016200.2,153-171).
gaccagaccattaatttga

SEQ ID NO: 46360 - DNA, 19 bp, Homo sapiens
  siRNA target sequence for LSM8 (NM_016200.2,160-178).
ccattaatttgattttgga

SEQ ID NO: 46361 - DNA, 19 bp, Homo sapiens
  siRNA target sequence for LSM8 (NM_016200.2,205-223).
cttcacagggggtagaaca

SEQ ID NO: 46362 - DNA, 19 bp, Homo sapiens
  siRNA target sequence for LSM8 (NM_016200.2,225-243).
gtggtactaggattataca

SEQ ID NO: 46363 - DNA, 19 bp, Homo sapiens
  siRNA target sequence for LSM8 (NM_016200.2,227-245).
ggtactaggattatacatt

SEQ ID NO: 46364 - DNA, 19 bp, Homo sapiens
  siRNA target sequence for LSM8 (NM_016200.2,231-249).
ctaggattatacattgtaa

SEQ ID NO: 46365 - DNA, 19 bp, Homo sapiens
  siRNA target sequence for LSM8 (NM_016200.2,321-339).
cgagcagaacctttaaatt

SEQ ID NO: 46366 - DNA, 19 bp, Homo sapiens
  siRNA target sequence for MGC14151 (NM_032356.3,626-644).
gcggtctgagcgcttgtta

SEQ ID NO: 46367 - DNA, 19 bp, Homo sapiens
  siRNA target sequence for MGC14151 (NM_032356.3,628-646).
ggtctgagcgcttgttaca

SEQ ID NO: 46368 - DNA, 19 bp, Homo sapiens
  siRNA target sequence for MGC14151 (NM_032356.3,711-729).
gaggcgctgctcaacaaga

SEQ ID NO: 46369 - DNA, 19 bp, Homo sapiens
  siRNA target sequence for MGC14151 (NM_032356.3,714-732).
gcgctgctcaacaagacta

SEQ ID NO: 46370 - DNA, 19 bp, Homo sapiens
  siRNA target sequence for MGC14151 (NM_032356.3,715-733).
cgctgctcaacaagactat

SEQ ID NO: 46371 - DNA, 19 bp, Homo sapiens
  siRNA target sequence for MGC14151 (NM_032356.3,892-910).
gacaccacatcgtttccat

SEQ ID NO: 46372 - DNA, 19 bp, Homo sapiens
  siRNA target sequence for MPHOSPH10 (NM_005791.1,430-448).
gtgcttcctcacgattcaa

SEQ ID NO: 46373 - DNA, 19 bp, Homo sapiens
  siRNA target sequence for MPHOSPH10 (NM_005791.1,432-450).
gcttcctcacgattcaaga

SEQ ID NO: 46374 - DNA, 19 bp, Homo sapiens
  siRNA target sequence for MPHOSPH10 (NM_005791.1,452-470).
ggattggcatcaaagttca

SEQ ID NO: 46375 - DNA, 19 bp, Homo sapiens
  siRNA target sequence for MPHOSPH10 (NM_005791.1,534-552).
gccccttgcaaaaacttgt

SEQ ID NO: 46376 - DNA, 19 bp, Homo sapiens
  siRNA target sequence for MPHOSPH10 (NM_005791.1,537-555).
ccttgcaaaaacttgtgat

SEQ ID NO: 46377 - DNA, 19 bp, Homo sapiens
  siRNA target sequence for MPHOSPH10 (NM_005791.1,605-623).
gaaccaattttacaatact

SEQ ID NO: 46378 - DNA, 19 bp, Homo sapiens
  siRNA target sequence for MPHOSPH10 (NM_005791.1,628-646).
gaatgcagttagtgaaaca

SEQ ID NO: 46379 - DNA, 19 bp, Homo sapiens
  siRNA target sequence for MPHOSPH10 (NM_005791.1,632-650).
gcagttagtgaaacaatta

SEQ ID NO: 46380 - DNA, 19 bp, Homo sapiens
  siRNA target sequence for MPHOSPH10 (NM_005791.1,633-651).
cagttagtgaaacaattaa

SEQ ID NO: 46381 - DNA, 19 bp, Homo sapiens
  siRNA target sequence for MPHOSPH10 (NM_005791.1,645-663).
caattaatgatgaagatat

SEQ ID NO: 46382 - DNA, 19 bp, Homo sapiens
  siRNA target sequence for MPHOSPH10 (NM_005791.1,766-784).
gtccgacatgggtaatgat

SEQ ID NO: 46383 - DNA, 19 bp, Homo sapiens
  siRNA target sequence for MPHOSPH10 (NM_005791.1,768-786).
ccgacatgggtaatgatga

SEQ ID NO: 46384 - DNA, 19 bp, Homo sapiens
  siRNA target sequence for MPHOSPH10 (NM_005791.1,943-961).
gtccatagtagatgataaa

SEQ ID NO: 46385 - DNA, 19 bp, Homo sapiens
  siRNA target sequence for MPHOSPH10 (NM_005791.1,1348-1366).
ctttgctttaccagatgat

SEQ ID NO: 46386 - DNA, 19 bp, Homo sapiens
  siRNA target sequence for MPHOSPH10 (NM_005791.1,1617-1635).
cccttcaactggaagatat

SEQ ID NO: 46387 - DNA, 19 bp, Homo sapiens
  siRNA target sequence for MPHOSPH10 (NM_005791.1,1660-1678).
ggcttgggatgatgtagta

SEQ ID NO: 46388 - DNA, 19 bp, Homo sapiens
  siRNA target sequence for MPHOSPH10 (NM_005791.1,1665-1683).
gggatgatgtagtacgtaa

SEQ ID NO: 46389 - DNA, 19 bp, Homo sapiens
  siRNA target sequence for MPHOSPH10 (NM_005791.1,1666-1684).
ggatgatgtagtacgtaaa

SEQ ID NO: 46390 - DNA, 19 bp, Homo sapiens
  siRNA target sequence for MPHOSPH10 (NM_005791.1,1670-1688).
gatgtagtacgtaaagaaa

SEQ ID NO: 46391 - DNA, 19 bp, Homo sapiens
  siRNA target sequence for MPHOSPH10 (NM_005791.1,1676-1694).
gtacgtaaagaaaaaccta

SEQ ID NO: 46392 - DNA, 19 bp, Homo sapiens
  siRNA target sequence for MPHOSPH10 (NM_005791.1,1736-1754).
catgagaagagtaaattga

SEQ ID NO: 46393 - DNA, 19 bp, Homo sapiens
  siRNA target sequence for MPHOSPH10 (NM_005791.1,1753-1771).
gagccttgctgaaatttat

SEQ ID NO: 46394 - DNA, 19 bp, Homo sapiens
  siRNA target sequence for MPHOSPH10 (NM_005791.1,1880-1898).
ctctcaaacttccacttta

SEQ ID NO: 46395 - DNA, 19 bp, Homo sapiens
  siRNA target sequence for MPHOSPH10 (NM_005791.1,1907-1925).
ccgcctgtaccagagatta

SEQ ID NO: 46396 - DNA, 19 bp, Homo sapiens
  siRNA target sequence for MPHOSPH10 (NM_005791.1,1908-1926).
cgcctgtaccagagattaa

SEQ ID NO: 46397 - DNA, 19 bp, Homo sapiens
  siRNA target sequence for MPHOSPH10 (NM_005791.1,1909-1927).
gcctgtaccagagattaaa

SEQ ID NO: 46398 - DNA, 19 bp, Homo sapiens
  siRNA target sequence for MPHOSPH10 (NM_005791.1,1921-1939).
gattaaagttgtgtcaaat

SEQ ID NO: 46399 - DNA, 19 bp, Homo sapiens
  siRNA target sequence for MPHOSPH10 (NM_005791.1,1964-1982).
gtagccccagtgagtgtta

SEQ ID NO: 46400 - DNA, 19 bp, Homo sapiens
  siRNA target sequence for MPHOSPH10 (NM_005791.1,2135-2153).
cggagaaaactgcttgaaa

SEQ ID NO: 46401 - DNA, 19 bp, Homo sapiens
  siRNA target sequence for MPHOSPH10 (NM_005791.1,2190-2208).
cagtagcttcggagaagtt

SEQ ID NO: 46402 - DNA, 19 bp, Homo sapiens
  siRNA target sequence for MPHOSPH10 (NM_005791.1,2192-2210).
gtagcttcggagaagttaa

SEQ ID NO: 46403 - DNA, 19 bp, Homo sapiens
  siRNA target sequence for MPHOSPH10 (NM_005791.1,2256-2274).
gtaaagacaaggccttaaa

SEQ ID NO: 46404 - DNA, 19 bp, Homo sapiens
  siRNA target sequence for MPHOSPH10 (NM_005791.1,2278-2296).
ctctcaagcattcttttct

SEQ ID NO: 46405 - DNA, 19 bp, Homo sapiens
  siRNA target sequence for PPIG (NM_004792.1,177-195).
gtcctcgatgtttttttga

SEQ ID NO: 46406 - DNA, 19 bp, Homo sapiens
  siRNA target sequence for PPIG (NM_004792.1,179-197).
cctcgatgtttttttgaca

SEQ ID NO: 46407 - DNA, 19 bp, Homo sapiens
  siRNA target sequence for PPIG (NM_004792.1,259-277).
caaaacatgcgagaacttt

SEQ ID NO: 46408 - DNA, 19 bp, Homo sapiens
  siRNA target sequence for PPIG (NM_004792.1,268-286).
cgagaactttcgttgtctt

SEQ ID NO: 46409 - DNA, 19 bp, Homo sapiens
  siRNA target sequence for PPIG (NM_004792.1,269-287).
gagaactttcgttgtcttt

SEQ ID NO: 46410 - DNA, 19 bp, Homo sapiens
  siRNA target sequence for PPIG (NM_004792.1,271-289).
gaactttcgttgtctttgt

SEQ ID NO: 46411 - DNA, 19 bp, Homo sapiens
  siRNA target sequence for PPIG (NM_004792.1,274-292).
ctttcgttgtctttgtaca

SEQ ID NO: 46412 - DNA, 19 bp, Homo sapiens
  siRNA target sequence for PPIG (NM_004792.1,326-344).
ccattacattataagagtt

SEQ ID NO: 46413 - DNA, 19 bp, Homo sapiens
  siRNA target sequence for PPIG (NM_004792.1,357-375).
gagttgtcaaggattttat

SEQ ID NO: 46414 - DNA, 19 bp, Homo sapiens
  siRNA target sequence for PPIG (NM_004792.1,408-426).
gacgaggaggggaatctat

SEQ ID NO: 46415 - DNA, 19 bp, Homo sapiens
  siRNA target sequence for PPIG (NM_004792.1,410-428).
cgaggaggggaatctatct

SEQ ID NO: 46416 - DNA, 19 bp, Homo sapiens
  siRNA target sequence for PPIG (NM_004792.1,411-429).
gaggaggggaatctatcta

SEQ ID NO: 46417 - DNA, 19 bp, Homo sapiens
  siRNA target sequence for PPIG (NM_004792.1,448-466).
cgagagtttcgctgttaaa

SEQ ID NO: 46418 - DNA, 19 bp, Homo sapiens
  siRNA target sequence for PPIG (NM_004792.1,453-471).
gtttcgctgttaaacacaa

SEQ ID NO: 46419 - DNA, 19 bp, Homo sapiens
  siRNA target sequence for PPIG (NM_004792.1,457-475).
cgctgttaaacacaacaaa

SEQ ID NO: 46420 - DNA, 19 bp, Homo sapiens
  siRNA target sequence for PPIG (NM_004792.1,499-517).
cagagggaaggatacaaat

SEQ ID NO: 46421 - DNA, 19 bp, Homo sapiens
  siRNA target sequence for PPIG (NM_004792.1,540-558).
cgaaaccaactcctcattt

SEQ ID NO: 46422 - DNA, 19 bp, Homo sapiens
  siRNA target sequence for PPIG (NM_004792.1,592-610).
ctctggtcaagaagttgta

SEQ ID NO: 46423 - DNA, 19 bp, Homo sapiens
  siRNA target sequence for PPIG (NM_004792.1,656-674).
gcggaggtacggatactca

SEQ ID NO: 46424 - DNA, 19 bp, Homo sapiens
  siRNA target sequence for PPIG (NM_004792.1,721-739).
gaaaaggcataaatcatca

SEQ ID NO: 46425 - DNA, 19 bp, Homo sapiens
  siRNA target sequence for PPIG (NM_004792.1,727-745).
gcataaatcatcatcatct

SEQ ID NO: 46426 - DNA, 19 bp, Homo sapiens
  siRNA target sequence for PPIG (NM_004792.1,766-784).
ctcagatagctcaagtgat

SEQ ID NO: 46427 - DNA, 19 bp, Homo sapiens
  siRNA target sequence for PPIG (NM_004792.1,821-839).
gctactgaagagaaatcaa

SEQ ID NO: 46428 - DNA, 19 bp, Homo sapiens
  siRNA target sequence for PPIG (NM_004792.1,910-928).
caagaagagtgcatctagt

SEQ ID NO: 46429 - DNA, 19 bp, Homo sapiens
  siRNA target sequence for PPIG (NM_004792.1,999-1017).
ctgaaaatagattcctaat

SEQ ID NO: 46430 - DNA, 19 bp, Homo sapiens
  siRNA target sequence for PPIG (NM_004792.1,1113-1131).
cataccagagacgactttt

SEQ ID NO: 46431 - DNA, 19 bp, Homo sapiens
  siRNA target sequence for PPIG (NM_004792.1,1117-1135).
ccagagacgacttttagtt

SEQ ID NO: 46432 - DNA, 19 bp, Homo sapiens
  siRNA target sequence for PPIG (NM_004792.1,1118-1136).
cagagacgacttttagtta

SEQ ID NO: 46433 - DNA, 19 bp, Homo sapiens
  siRNA target sequence for PPIG (NM_004792.1,1124-1142).
cgacttttagttactagat

SEQ ID NO: 46434 - DNA, 19 bp, Homo sapiens
  siRNA target sequence for PPIG (NM_004792.1,1166-1184).
ggaccaaggcgttatcgaa

SEQ ID NO: 46435 - DNA, 19 bp, Homo sapiens
  siRNA target sequence for PPIG (NM_004792.1,1197-1215).
ccagatcaagggatcgttt

SEQ ID NO: 46436 - DNA, 19 bp, Homo sapiens
  siRNA target sequence for PPIG (NM_004792.1,1276-1294).
ggtatcaagtggtgaaaga

SEQ ID NO: 46437 - DNA, 19 bp, Homo sapiens
  siRNA target sequence for PPIG (NM_004792.1,1277-1295).
gtatcaagtggtgaaagat

SEQ ID NO: 46438 - DNA, 19 bp, Homo sapiens
  siRNA target sequence for PPIG (NM_004792.1,1297-1315).
gatcaagggggataagagt

SEQ ID NO: 46439 - DNA, 19 bp, Homo sapiens
  siRNA target sequence for PPIG (NM_004792.1,1305-1323).
gggataagagtgagttgaa

SEQ ID NO: 46440 - DNA, 19 bp, Homo sapiens
  siRNA target sequence for PPIG (NM_004792.1,1312-1330).
gagtgagttgaatgaaata

SEQ ID NO: 46441 - DNA, 19 bp, Homo sapiens
  siRNA target sequence for PPIG (NM_004792.1,1433-1451).
gttaaagaccataaatcta

SEQ ID NO: 46442 - DNA, 19 bp, Homo sapiens
  siRNA target sequence for PPIG (NM_004792.1,1571-1589).
gaaagagattcaaaacata

SEQ ID NO: 46443 - DNA, 19 bp, Homo sapiens
  siRNA target sequence for PPIG (NM_004792.1,1609-1627).
gatgaggtcaaggagtaaa

SEQ ID NO: 46444 - DNA, 19 bp, Homo sapiens
  siRNA target sequence for PPIG (NM_004792.1,1623-1641).
gtaaaggaagggatcatga

SEQ ID NO: 46445 - DNA, 19 bp, Homo sapiens
  siRNA target sequence for PPIG (NM_004792.1,1688-1706).
caggaaaggagtagaagta

SEQ ID NO: 46446 - DNA, 19 bp, Homo sapiens
  siRNA target sequence for PPIG (NM_004792.1,1690-1708).
ggaaaggagtagaagtaaa

SEQ ID NO: 46447 - DNA, 19 bp, Homo sapiens
  siRNA target sequence for PPIG (NM_004792.1,1711-1729).
gaagtctaaacagttagaa

SEQ ID NO: 46448 - DNA, 19 bp, Homo sapiens
  siRNA target sequence for PPIG (NM_004792.1,1714-1732).
gtctaaacagttagaatca

SEQ ID NO: 46449 - DNA, 19 bp, Homo sapiens
  siRNA target sequence for PPIG (NM_004792.1,1721-1739).
cagttagaatcaaagagta

SEQ ID NO: 46450 - DNA, 19 bp, Homo sapiens
  siRNA target sequence for PPIG (NM_004792.1,1723-1741).
gttagaatcaaagagtaat

SEQ ID NO: 46451 - DNA, 19 bp, Homo sapiens
  siRNA target sequence for PPIG (NM_004792.1,1784-1802).
caatccaggagtagagaat

SEQ ID NO: 46452 - DNA, 19 bp, Homo sapiens
  siRNA target sequence for PPIG (NM_004792.1,1792-1810).
gagtagagaatgtgatata

SEQ ID NO: 46453 - DNA, 19 bp, Homo sapiens
  siRNA target sequence for PPIG (NM_004792.1,1803-1821).
gtgatataactaaaggtaa

SEQ ID NO: 46454 - DNA, 19 bp, Homo sapiens
  siRNA target sequence for PPIG (NM_004792.1,1817-1835).
ggtaaacacagttataata

SEQ ID NO: 46455 - DNA, 19 bp, Homo sapiens
  siRNA target sequence for PPIG (NM_004792.1,1873-1891).
cagaagagtgcgatcaaga

SEQ ID NO: 46456 - DNA, 19 bp, Homo sapiens
  siRNA target sequence for PPIG (NM_004792.1,1921-1939).
ggagtaccatagatacaga

SEQ ID NO: 46457 - DNA, 19 bp, Homo sapiens
  siRNA target sequence for PPIG (NM_004792.1,2152-2170).
ctctaaaagtcgtgatcat

SEQ ID NO: 46458 - DNA, 19 bp, Homo sapiens
  siRNA target sequence for PPIG (NM_004792.1,2154-2172).
ctaaaagtcgtgatcataa

SEQ ID NO: 46459 - DNA, 19 bp, Homo sapiens
  siRNA target sequence for PPIG (NM_004792.1,2210-2228).
gatcaaagtcccttctcaa

SEQ ID NO: 46460 - DNA, 19 bp, Homo sapiens
  siRNA target sequence for PRPF18 (NM_003675.2,161-179).
gtagtgagctcgccaaaaa

SEQ ID NO: 46461 - DNA, 19 bp, Homo sapiens
  siRNA target sequence for PRPF18 (NM_003675.2,237-255).
ccagaaaccattaacttca

SEQ ID NO: 46462 - DNA, 19 bp, Homo sapiens
  siRNA target sequence for PRPF18 (NM_003675.2,257-275).
cgaatccagtgttagaact

SEQ ID NO: 46463 - DNA, 19 bp, Homo sapiens
  siRNA target sequence for PRPF18 (NM_003675.2,263-281).
cagtgttagaacttgaact

SEQ ID NO: 46464 - DNA, 19 bp, Homo sapiens
  siRNA target sequence for PRPF18 (NM_003675.2,319-337).
gaggtcatcagaagattga

SEQ ID NO: 46465 - DNA, 19 bp, Homo sapiens
  siRNA target sequence for PRPF18 (NM_003675.2,346-364).
ggagaaccaatcagactat

SEQ ID NO: 46466 - DNA, 19 bp, Homo sapiens
  siRNA target sequence for PRPF18 (NM_003675.2,347-365).
gagaaccaatcagactatt

SEQ ID NO: 46467 - DNA, 19 bp, Homo sapiens
  siRNA target sequence for PRPF18 (NM_003675.2,382-400).
gatgcttttcaacgtttaa

SEQ ID NO: 46468 - DNA, 19 bp, Homo sapiens
  siRNA target sequence for PRPF18 (NM_003675.2,528-546).
cacacagaatgatctgaaa

SEQ ID NO: 46469 - DNA, 19 bp, Homo sapiens
  siRNA target sequence for PRPF18 (NM_003675.2,601-619).
gggaaaggcgatgatcata

SEQ ID NO: 46470 - DNA, 19 bp, Homo sapiens
  siRNA target sequence for PRPF18 (NM_003675.2,602-620).
ggaaaggcgatgatcataa

SEQ ID NO: 46471 - DNA, 19 bp, Homo sapiens
  siRNA target sequence for PRPF18 (NM_003675.2,607-625).
ggcgatgatcataaagaca

SEQ ID NO: 46472 - DNA, 19 bp, Homo sapiens
  siRNA target sequence for PRPF18 (NM_003675.2,608-626).
gcgatgatcataaagacat

SEQ ID NO: 46473 - DNA, 19 bp, Homo sapiens
  siRNA target sequence for PRPF18 (NM_003675.2,661-679).
ggcgtttgggctaaagaat

SEQ ID NO: 46474 - DNA, 19 bp, Homo sapiens
  siRNA target sequence for PRPF18 (NM_003675.2,662-680).
gcgtttgggctaaagaatt

SEQ ID NO: 46475 - DNA, 19 bp, Homo sapiens
  siRNA target sequence for PRPF18 (NM_003675.2,745-763).
cagaccgagtcctacctaa

SEQ ID NO: 46476 - DNA, 19 bp, Homo sapiens
  siRNA target sequence for PRPF18 (NM_003675.2,756-774).
ctacctaagaccacttttt

SEQ ID NO: 46477 - DNA, 19 bp, Homo sapiens
  siRNA target sequence for PRPF18 (NM_003675.2,780-798).
gctacggaaaaggaatctt

SEQ ID NO: 46478 - DNA, 19 bp, Homo sapiens
  siRNA target sequence for PRPF18 (NM_003675.2,814-832).
gaatcaataacggatatta

SEQ ID NO: 46479 - DNA, 19 bp, Homo sapiens
  siRNA target sequence for PRPF18 (NM_003675.2,818-836).
caataacggatattattaa

SEQ ID NO: 46480 - DNA, 19 bp, Homo sapiens
  siRNA target sequence for PRPF18 (NM_003675.2,824-842).
cggatattattaaattcat

SEQ ID NO: 46481 - DNA, 19 bp, Homo sapiens
  siRNA target sequence for PRPF18 (NM_003675.2,826-844).
gatattattaaattcatgt

SEQ ID NO: 46482 - DNA, 19 bp, Homo sapiens
  siRNA target sequence for PRPF18 (NM_003675.2,908-926).
ggcccatcggtgtcactat

SEQ ID NO: 46483 - DNA, 19 bp, Homo sapiens
  siRNA target sequence for PRPF18 (NM_003675.2,996-1014).
cgaaactcagcggaaatat

SEQ ID NO: 46484 - DNA, 19 bp, Homo sapiens
  siRNA target sequence for PRPF18 (NM_003675.2,997-1015).
gaaactcagcggaaatata

SEQ ID NO: 46485 - DNA, 19 bp, Homo sapiens
  siRNA target sequence for PRPF18 (NM_003675.2,1001-1019).
ctcagcggaaatatattca

SEQ ID NO: 46486 - DNA, 19 bp, Homo sapiens
  siRNA target sequence for PRPF18 (NM_003675.2,1074-1092).
caaatgtgtggagtacaat

SEQ ID NO: 46487 - DNA, 19 bp, Homo sapiens
  siRNA target sequence for PRPF3 (NM_004698.1,210-228).
ggcagccgatcatctgaaa

SEQ ID NO: 46488 - DNA, 19 bp, Homo sapiens
  siRNA target sequence for PRPF3 (NM_004698.1,214-232).
gccgatcatctgaaacctt

SEQ ID NO: 46489 - DNA, 19 bp, Homo sapiens
  siRNA target sequence for PRPF3 (NM_004698.1,215-233).
ccgatcatctgaaaccttt

SEQ ID NO: 46490 - DNA, 19 bp, Homo sapiens
  siRNA target sequence for PRPF3 (NM_004698.1,293-311).
gaagctctaggcattccaa

SEQ ID NO: 46491 - DNA, 19 bp, Homo sapiens
  siRNA target sequence for PRPF3 (NM_004698.1,332-350).
gaaaacgagagctaaagga

SEQ ID NO: 46492 - DNA, 19 bp, Homo sapiens
  siRNA target sequence for PRPF3 (NM_004698.1,366-384).
ctctgagatctctaaagaa

SEQ ID NO: 46493 - DNA, 19 bp, Homo sapiens
  siRNA target sequence for PRPF3 (NM_004698.1,613-631).
cttcctattggcaacacta

SEQ ID NO: 46494 - DNA, 19 bp, Homo sapiens
  siRNA target sequence for PRPF3 (NM_004698.1,617-635).
ctattggcaacactattca

SEQ ID NO: 46495 - DNA, 19 bp, Homo sapiens
  siRNA target sequence for PRPF3 (NM_004698.1,643-661).
caggctgccactttcatga

SEQ ID NO: 46496 - DNA, 19 bp, Homo sapiens
  siRNA target sequence for PRPF3 (NM_004698.1,645-663).
ggctgccactttcatgaat

SEQ ID NO: 46497 - DNA, 19 bp, Homo sapiens
  siRNA target sequence for PRPF3 (NM_004698.1,647-665).
ctgccactttcatgaatga

SEQ ID NO: 46498 - DNA, 19 bp, Homo sapiens
  siRNA target sequence for PRPF3 (NM_004698.1,796-814).
cccccgaaggtggagttaa

SEQ ID NO: 46499 - DNA, 19 bp, Homo sapiens
  siRNA target sequence for PRPF3 (NM_004698.1,852-870).
gcaagggcgcactgtagat

SEQ ID NO: 46500 - DNA, 19 bp, Homo sapiens
  siRNA target sequence for PRPF3 (NM_004698.1,982-1000).
gacatggaatccaatacct

SEQ ID NO: 46501 - DNA, 19 bp, Homo sapiens
  siRNA target sequence for PRPF3 (NM_004698.1,1036-1054).
cgccagagacgcactttta

SEQ ID NO: 46502 - DNA, 19 bp, Homo sapiens
  siRNA target sequence for PRPF3 (NM_004698.1,1037-1055).
gccagagacgcacttttaa

SEQ ID NO: 46503 - DNA, 19 bp, Homo sapiens
  siRNA target sequence for PRPF3 (NM_004698.1,1038-1056).
ccagagacgcacttttaaa

SEQ ID NO: 46504 - DNA, 19 bp, Homo sapiens
  siRNA target sequence for PRPF3 (NM_004698.1,1043-1061).
gacgcacttttaaattcca

SEQ ID NO: 46505 - DNA, 19 bp, Homo sapiens
  siRNA target sequence for PRPF3 (NM_004698.1,1184-1202).
ccctcattgctcctaagaa

SEQ ID NO: 46506 - DNA, 19 bp, Homo sapiens
  siRNA target sequence for PRPF3 (NM_004698.1,1236-1254).
gtggtgggactcttacata

SEQ ID NO: 46507 - DNA, 19 bp, Homo sapiens
  siRNA target sequence for PRPF3 (NM_004698.1,1238-1256).
ggtgggactcttacataat

SEQ ID NO: 46508 - DNA, 19 bp, Homo sapiens
  siRNA target sequence for PRPF3 (NM_004698.1,1257-1275).
ccccaatggctttgatctt

SEQ ID NO: 46509 - DNA, 19 bp, Homo sapiens
  siRNA target sequence for PRPF3 (NM_004698.1,1288-1306).
cccaagagagaagattatt

SEQ ID NO: 46510 - DNA, 19 bp, Homo sapiens
  siRNA target sequence for PRPF3 (NM_004698.1,1310-1328).
gaatcacaaatcttgttga

SEQ ID NO: 46511 - DNA, 19 bp, Homo sapiens
  siRNA target sequence for PRPF3 (NM_004698.1,1344-1362).
caatcctccagttgacaat

SEQ ID NO: 46512 - DNA, 19 bp, Homo sapiens
  siRNA target sequence for PRPF3 (NM_004698.1,1348-1366).
cctccagttgacaatgaca

SEQ ID NO: 46513 - DNA, 19 bp, Homo sapiens
  siRNA target sequence for PRPF3 (NM_004698.1,1689-1707).
gggggtacacatatctgta

SEQ ID NO: 46514 - DNA, 19 bp, Homo sapiens
  siRNA target sequence for PRPF3 (NM_004698.1,1690-1708).
ggggtacacatatctgtat

SEQ ID NO: 46515 - DNA, 19 bp, Homo sapiens
  siRNA target sequence for PRPF3 (NM_004698.1,1691-1709).
gggtacacatatctgtata

SEQ ID NO: 46516 - DNA, 19 bp, Homo sapiens
  siRNA target sequence for PRPF3 (NM_004698.1,1703-1721).
ctgtatatagagttcgaaa

SEQ ID NO: 46517 - DNA, 19 bp, Homo sapiens
  siRNA target sequence for PRPF3 (NM_004698.1,1883-1901).
gggatgaacagacatctaa

SEQ ID NO: 46518 - DNA, 19 bp, Homo sapiens
  siRNA target sequence for PRPF3 (NM_004698.1,1885-1903).
gatgaacagacatctaaca

SEQ ID NO: 46519 - DNA, 19 bp, Homo sapiens
  siRNA target sequence for PRPF3 (NM_004698.1,1888-1906).
gaacagacatctaacacaa

SEQ ID NO: 46520 - DNA, 19 bp, Homo sapiens
  siRNA target sequence for PRPF3 (NM_004698.1,1952-1970).
ccaacaaatgtgtactagt

SEQ ID NO: 46521 - DNA, 19 bp, Homo sapiens
  siRNA target sequence for PRPF3 (NM_004698.1,2091-2109).
gctgagtgaatctgtgtta

SEQ ID NO: 46522 - DNA, 19 bp, Homo sapiens
  siRNA target sequence for PRPF3 (NM_004698.1,2104-2122).
gtgttagagtccactgatt

SEQ ID NO: 46523 - DNA, 19 bp, Homo sapiens
  siRNA target sequence for PRPF4 (NM_004697.3,74-92).
cacgcaggcaaccaaaact

SEQ ID NO: 46524 - DNA, 19 bp, Homo sapiens
  siRNA target sequence for PRPF4 (NM_004697.3,76-94).
cgcaggcaaccaaaactaa

SEQ ID NO: 46525 - DNA, 19 bp, Homo sapiens
  siRNA target sequence for PRPF4 (NM_004697.3,77-95).
gcaggcaaccaaaactaaa

SEQ ID NO: 46526 - DNA, 19 bp, Homo sapiens
  siRNA target sequence for PRPF4 (NM_004697.3,128-146).
gaaaccacacatctattat

SEQ ID NO: 46527 - DNA, 19 bp, Homo sapiens
  siRNA target sequence for PRPF4 (NM_004697.3,132-150).
ccacacatctattatggaa

SEQ ID NO: 46528 - DNA, 19 bp, Homo sapiens
  siRNA target sequence for PRPF4 (NM_004697.3,140-158).
ctattatggaagtttggaa

SEQ ID NO: 46529 - DNA, 19 bp, Homo sapiens
  siRNA target sequence for PRPF4 (NM_004697.3,203-221).
ggggaaagacggacttaaa

SEQ ID NO: 46530 - DNA, 19 bp, Homo sapiens
  siRNA target sequence for PRPF4 (NM_004697.3,206-224).
gaaagacggacttaaagca

SEQ ID NO: 46531 - DNA, 19 bp, Homo sapiens
  siRNA target sequence for PRPF4 (NM_004697.3,225-243).
gggatcgaagctggaaata

SEQ ID NO: 46532 - DNA, 19 bp, Homo sapiens
  siRNA target sequence for PRPF4 (NM_004697.3,226-244).
ggatcgaagctggaaatat

SEQ ID NO: 46533 - DNA, 19 bp, Homo sapiens
  siRNA target sequence for PRPF4 (NM_004697.3,227-245).
gatcgaagctggaaatatt

SEQ ID NO: 46534 - DNA, 19 bp, Homo sapiens
  siRNA target sequence for PRPF4 (NM_004697.3,290-308).
cgagcgacaggcagaagta

SEQ ID NO: 46535 - DNA, 19 bp, Homo sapiens
  siRNA target sequence for PRPF4 (NM_004697.3,291-309).
gagcgacaggcagaagtat

SEQ ID NO: 46536 - DNA, 19 bp, Homo sapiens
  siRNA target sequence for PRPF4 (NM_004697.3,396-414).
ggggaacccatcacacttt

SEQ ID NO: 46537 - DNA, 19 bp, Homo sapiens
  siRNA target sequence for PRPF4 (NM_004697.3,397-415).
gggaacccatcacactttt

SEQ ID NO: 46538 - DNA, 19 bp, Homo sapiens
  siRNA target sequence for PRPF4 (NM_004697.3,470-488).
cggtactgatgccttgaaa

SEQ ID NO: 46539 - DNA, 19 bp, Homo sapiens
  siRNA target sequence for PRPF4 (NM_004697.3,512-530).
gtctaaaaagtccaaagaa

SEQ ID NO: 46540 - DNA, 19 bp, Homo sapiens
  siRNA target sequence for PRPF4 (NM_004697.3,583-601).
gactatggattgctaatta

SEQ ID NO: 46541 - DNA, 19 bp, Homo sapiens
  siRNA target sequence for PRPF4 (NM_004697.3,585-603).
ctatggattgctaattatt

SEQ ID NO: 46542 - DNA, 19 bp, Homo sapiens
  siRNA target sequence for PRPF4 (NM_004697.3,589-607).
ggattgctaattattcgtt

SEQ ID NO: 46543 - DNA, 19 bp, Homo sapiens
  siRNA target sequence for PRPF4 (NM_004697.3,698-716).
gtctctccggtctttgaat

SEQ ID NO: 46544 - DNA, 19 bp, Homo sapiens
  siRNA target sequence for PRPF4 (NM_004697.3,700-718).
ctctccggtctttgaataa

SEQ ID NO: 46545 - DNA, 19 bp, Homo sapiens
  siRNA target sequence for PRPF4 (NM_004697.3,702-720).
ctccggtctttgaataatt

SEQ ID NO: 46546 - DNA, 19 bp, Homo sapiens
  siRNA target sequence for PRPF4 (NM_004697.3,762-780).
cactttagtcccaattcca

SEQ ID NO: 46547 - DNA, 19 bp, Homo sapiens
  siRNA target sequence for PRPF4 (NM_004697.3,855-873).
cttcgagggcataacacaa

SEQ ID NO: 46548 - DNA, 19 bp, Homo sapiens
  siRNA target sequence for PRPF4 (NM_004697.3,888-906).
gtattccatcccaaatcca

SEQ ID NO: 46549 - DNA, 19 bp, Homo sapiens
  siRNA target sequence for PRPF4 (NM_004697.3,974-992).
gagtctcgacagtgatgaa

SEQ ID NO: 46550 - DNA, 19 bp, Homo sapiens
  siRNA target sequence for PRPF4 (NM_004697.3,1090-1108).
ggcgcttatgggatttgga

SEQ ID NO: 46551 - DNA, 19 bp, Homo sapiens
  siRNA target sequence for PRPF4 (NM_004697.3,1139-1157).
ccatagcatgggtgtgtat

SEQ ID NO: 46552 - DNA, 19 bp, Homo sapiens
  siRNA target sequence for PRPF4 (NM_004697.3,1144-1162).
gcatgggtgtgtatgacat

SEQ ID NO: 46553 - DNA, 19 bp, Homo sapiens
  siRNA target sequence for PRPF4 (NM_004697.3,1195-1213).
ctgggggactggatgcatt

SEQ ID NO: 46554 - DNA, 19 bp, Homo sapiens
  siRNA target sequence for PRPF4 (NM_004697.3,1237-1255).
caggacgttgtatcatgtt

SEQ ID NO: 46555 - DNA, 19 bp, Homo sapiens
  siRNA target sequence for PRPF4 (NM_004697.3,1239-1257).
ggacgttgtatcatgttct

SEQ ID NO: 46556 - DNA, 19 bp, Homo sapiens
  siRNA target sequence for PRPF4 (NM_004697.3,1298-1316).
ccccaatggctatcacatt

SEQ ID NO: 46557 - DNA, 19 bp, Homo sapiens
  siRNA target sequence for PRPF4 (NM_004697.3,1389-1407).
gctcatcagaacttagtga

SEQ ID NO: 46558 - DNA, 19 bp, Homo sapiens
  siRNA target sequence for PRPF4 (NM_004697.3,1415-1433).
caagtttgagcctatccat

SEQ ID NO: 46559 - DNA, 19 bp, Homo sapiens
  siRNA target sequence for PRPF4 (NM_004697.3,1425-1443).
cctatccatgggaacttct

SEQ ID NO: 46560 - DNA, 19 bp, Homo sapiens
  siRNA target sequence for PRPF4 (NM_004697.3,1445-1463).
gcttactggtgcctatgat

SEQ ID NO: 46561 - DNA, 19 bp, Homo sapiens
  siRNA target sequence for PRPF4 (NM_004697.3,1446-1464).
cttactggtgcctatgata

SEQ ID NO: 46562 - DNA, 19 bp, Homo sapiens
  siRNA target sequence for PRPF4 (NM_004697.3,1519-1537).
gccacgaaggcaaagtgat

SEQ ID NO: 46563 - DNA, 19 bp, Homo sapiens
  siRNA target sequence for PRPF4 (NM_004697.3,1535-1553).
gatgggcctagatatttct

SEQ ID NO: 46564 - DNA, 19 bp, Homo sapiens
  siRNA target sequence for PRPF8 (NM_006445.2,41-59).
ggccggagtgtttccttat

SEQ ID NO: 46565 - DNA, 19 bp, Homo sapiens
  siRNA target sequence for PRPF8 (NM_006445.2,44-62).
cggagtgtttccttatcga

SEQ ID NO: 46566 - DNA, 19 bp, Homo sapiens
  siRNA target sequence for PRPF8 (NM_006445.2,139-157).
ctcgaaaatggcagcaatt

SEQ ID NO: 46567 - DNA, 19 bp, Homo sapiens
  siRNA target sequence for PRPF8 (NM_006445.2,163-181).
ccaagcgctatgcagaaaa

SEQ ID NO: 46568 - DNA, 19 bp, Homo sapiens
  siRNA target sequence for PRPF8 (NM_006445.2,275-293).
gaagttccgccatgacaaa

SEQ ID NO: 46569 - DNA, 19 bp, Homo sapiens
  siRNA target sequence for PRPF8 (NM_006445.2,285-303).
catgacaaaagggtttact

SEQ ID NO: 46570 - DNA, 19 bp, Homo sapiens
  siRNA target sequence for PRPF8 (NM_006445.2,412-430).
ccatttccttcgtcaatga

SEQ ID NO: 46571 - DNA, 19 bp, Homo sapiens
  siRNA target sequence for PRPF8 (NM_006445.2,431-449).
gattccctgggtcattgaa

SEQ ID NO: 46572 - DNA, 19 bp, Homo sapiens
  siRNA target sequence for PRPF8 (NM_006445.2,491-509).
gcgccgagaaaaaagagat

SEQ ID NO: 46573 - DNA, 19 bp, Homo sapiens
  siRNA target sequence for PRPF8 (NM_006445.2,492-510).
cgccgagaaaaaagagata

SEQ ID NO: 46574 - DNA, 19 bp, Homo sapiens
  siRNA target sequence for PRPF8 (NM_006445.2,679-697).
gggacagcaggaagtatgt

SEQ ID NO: 46575 - DNA, 19 bp, Homo sapiens
  siRNA target sequence for PRPF8 (NM_006445.2,680-698).
ggacagcaggaagtatgta

SEQ ID NO: 46576 - DNA, 19 bp, Homo sapiens
  siRNA target sequence for PRPF8 (NM_006445.2,721-739).
ggcagttcacactacctat

SEQ ID NO: 46577 - DNA, 19 bp, Homo sapiens
  siRNA target sequence for PRPF8 (NM_006445.2,786-804).
gtggatgacaactacttct

SEQ ID NO: 46578 - DNA, 19 bp, Homo sapiens
  siRNA target sequence for PRPF8 (NM_006445.2,914-932).
ctggaatgaattcaatgat

SEQ ID NO: 46579 - DNA, 19 bp, Homo sapiens
  siRNA target sequence for PRPF8 (NM_006445.2,1031-1049).
gtaccatactcccaatgtt

SEQ ID NO: 46580 - DNA, 19 bp, Homo sapiens
  siRNA target sequence for PRPF8 (NM_006445.2,1034-1052).
ccatactcccaatgttgta

SEQ ID NO: 46581 - DNA, 19 bp, Homo sapiens
  siRNA target sequence for PRPF8 (NM_006445.2,1035-1053).
catactcccaatgttgtat

SEQ ID NO: 46582 - DNA, 19 bp, Homo sapiens
  siRNA target sequence for PRPF8 (NM_006445.2,1470-1488).
gccaccaaattctttcagt

SEQ ID NO: 46583 - DNA, 19 bp, Homo sapiens
  siRNA target sequence for PRPF8 (NM_006445.2,1682-1700).
ggaagttctgcgtttgact

SEQ ID NO: 46584 - DNA, 19 bp, Homo sapiens
  siRNA target sequence for PRPF8 (NM_006445.2,1683-1701).
gaagttctgcgtttgacta

SEQ ID NO: 46585 - DNA, 19 bp, Homo sapiens
  siRNA target sequence for PRPF8 (NM_006445.2,1796-1814).
gcagttgacgggcatgtat

SEQ ID NO: 46586 - DNA, 19 bp, Homo sapiens
  siRNA target sequence for PRPF8 (NM_006445.2,1804-1822).
cgggcatgtatcgatacaa

SEQ ID NO: 46587 - DNA, 19 bp, Homo sapiens
  siRNA target sequence for PRPF8 (NM_006445.2,1805-1823).
gggcatgtatcgatacaaa

SEQ ID NO: 46588 - DNA, 19 bp, Homo sapiens
  siRNA target sequence for PRPF8 (NM_006445.2,1806-1824).
ggcatgtatcgatacaaat

SEQ ID NO: 46589 - DNA, 19 bp, Homo sapiens
  siRNA target sequence for PRPF8 (NM_006445.2,1807-1825).
gcatgtatcgatacaaata

SEQ ID NO: 46590 - DNA, 19 bp, Homo sapiens
  siRNA target sequence for PRPF8 (NM_006445.2,1826-1844).
caagctgatgcgacagatt

SEQ ID NO: 46591 - DNA, 19 bp, Homo sapiens
  siRNA target sequence for PRPF8 (NM_006445.2,1860-1878).
ctgaagcatctcatctatt

SEQ ID NO: 46592 - DNA, 19 bp, Homo sapiens
  siRNA target sequence for PRPF8 (NM_006445.2,1865-1883).
gcatctcatctattatcgt

SEQ ID NO: 46593 - DNA, 19 bp, Homo sapiens
  siRNA target sequence for PRPF8 (NM_006445.2,1866-1884).
catctcatctattatcgtt

SEQ ID NO: 46594 - DNA, 19 bp, Homo sapiens
  siRNA target sequence for PRPF8 (NM_006445.2,1962-1980).
cgtggcattacccctttat

SEQ ID NO: 46595 - DNA, 19 bp, Homo sapiens
  siRNA target sequence for PRPF8 (NM_006445.2,1963-1981).
gtggcattacccctttatt

SEQ ID NO: 46596 - DNA, 19 bp, Homo sapiens
  siRNA target sequence for PRPF8 (NM_006445.2,1966-1984).
gcattacccctttattaga

SEQ ID NO: 46597 - DNA, 19 bp, Homo sapiens
  siRNA target sequence for PRPF8 (NM_006445.2,2061-2079).
cagcgagtggagtcacatt

SEQ ID NO: 46598 - DNA, 19 bp, Homo sapiens
  siRNA target sequence for PRPF8 (NM_006445.2,2065-2083).
gagtggagtcacattttga

SEQ ID NO: 46599 - DNA, 19 bp, Homo sapiens
  siRNA target sequence for PRPF8 (NM_006445.2,2229-2247).
ctgccgacgcccatagaga

SEQ ID NO: 46600 - DNA, 19 bp, Homo sapiens
  siRNA target sequence for PRPF8 (NM_006445.2,2231-2249).
gccgacgcccatagagaat

SEQ ID NO: 46601 - DNA, 19 bp, Homo sapiens
  siRNA target sequence for PRPF8 (NM_006445.2,2232-2250).
ccgacgcccatagagaata

SEQ ID NO: 46602 - DNA, 19 bp, Homo sapiens
  siRNA target sequence for PRPF8 (NM_006445.2,2233-2251).
cgacgcccatagagaatat

SEQ ID NO: 46603 - DNA, 19 bp, Homo sapiens
  siRNA target sequence for PRPF8 (NM_006445.2,2236-2254).
cgcccatagagaatatgat

SEQ ID NO: 46604 - DNA, 19 bp, Homo sapiens
  siRNA target sequence for PRPF8 (NM_006445.2,2347-2365).
ctgtttgtaaaaagaatct

SEQ ID NO: 46605 - DNA, 19 bp, Homo sapiens
  siRNA target sequence for PRPF8 (NM_006445.2,2470-2488).
ccaccacagtgcattggtt

SEQ ID NO: 46606 - DNA, 19 bp, Homo sapiens
  siRNA target sequence for PRPF8 (NM_006445.2,2489-2507).
ggaaagccgcaggttttca

SEQ ID NO: 46607 - DNA, 19 bp, Homo sapiens
  siRNA target sequence for PRPF8 (NM_006445.2,2570-2588).
gcggctcaaggaagcttat

SEQ ID NO: 46608 - DNA, 19 bp, Homo sapiens
  siRNA target sequence for PRPF8 (NM_006445.2,2571-2589).
cggctcaaggaagcttata

SEQ ID NO: 46609 - DNA, 19 bp, Homo sapiens
  siRNA target sequence for PRPF8 (NM_006445.2,2573-2591).
gctcaaggaagcttatagt

SEQ ID NO: 46610 - DNA, 19 bp, Homo sapiens
  siRNA target sequence for PRPF8 (NM_006445.2,2746-2764).
gccacctcgttccagtata

SEQ ID NO: 46611 - DNA, 19 bp, Homo sapiens
  siRNA target sequence for PRPF8 (NM_006445.2,2747-2765).
ccacctcgttccagtatat

SEQ ID NO: 46612 - DNA, 19 bp, Homo sapiens
  siRNA target sequence for PRPF8 (NM_006445.2,2750-2768).
cctcgttccagtatatgat

SEQ ID NO: 46613 - DNA, 19 bp, Homo sapiens
  siRNA target sequence for PRPF8 (NM_006445.2,2807-2825).
ccagtacctgtggtatgaa

SEQ ID NO: 46614 - DNA, 19 bp, Homo sapiens
  siRNA target sequence for PRPF8 (NM_006445.2,2841-2859).
ctgttcccaccctggatta

SEQ ID NO: 46615 - DNA, 19 bp, Homo sapiens
  siRNA target sequence for PRPF8 (NM_006445.2,2902-2920).
ggtgtcaaggcatcaataa

SEQ ID NO: 46616 - DNA, 19 bp, Homo sapiens
  siRNA target sequence for PRPF8 (NM_006445.2,2946-2964).
gaaggcgagtgcaatgtca

SEQ ID NO: 46617 - DNA, 19 bp, Homo sapiens
  siRNA target sequence for PRPF8 (NM_006445.2,2967-2985).
ctggaatcccgctttgaga

SEQ ID NO: 46618 - DNA, 19 bp, Homo sapiens
  siRNA target sequence for PRPF8 (NM_006445.2,2974-2992).
cccgctttgagaagatgta

SEQ ID NO: 46619 - DNA, 19 bp, Homo sapiens
  siRNA target sequence for PRPF8 (NM_006445.2,2975-2993).
ccgctttgagaagatgtat

SEQ ID NO: 46620 - DNA, 19 bp, Homo sapiens
  siRNA target sequence for PRPF8 (NM_006445.2,2977-2995).
gctttgagaagatgtatga

SEQ ID NO: 46621 - DNA, 19 bp, Homo sapiens
  siRNA target sequence for PRPF8 (NM_006445.2,3077-3095).
caacgtcgtcatcaactat

SEQ ID NO: 46622 - DNA, 19 bp, Homo sapiens
  siRNA target sequence for PRPF8 (NM_006445.2,3099-3117).
gacatgaaccatacgaatt

SEQ ID NO: 46623 - DNA, 19 bp, Homo sapiens
  siRNA target sequence for PRPF8 (NM_006445.2,3101-3119).
catgaaccatacgaattca

SEQ ID NO: 46624 - DNA, 19 bp, Homo sapiens
  siRNA target sequence for PRPF8 (NM_006445.2,3177-3195).
gtgatggatttgcttgtat

SEQ ID NO: 46625 - DNA, 19 bp, Homo sapiens
  siRNA target sequence for PRPF8 (NM_006445.2,3229-3247).
cccctcagatgccaaatga

SEQ ID NO: 46626 - DNA, 19 bp, Homo sapiens
  siRNA target sequence for PRPF8 (NM_006445.2,3294-3312).
cgtctcttctgcagataca

SEQ ID NO: 46627 - DNA, 19 bp, Homo sapiens
  siRNA target sequence for PRPF8 (NM_006445.2,3311-3329).
cattgatcgcatccatatt

SEQ ID NO: 46628 - DNA, 19 bp, Homo sapiens
  siRNA target sequence for PRPF8 (NM_006445.2,3315-3333).
gatcgcatccatatttttt

SEQ ID NO: 46629 - DNA, 19 bp, Homo sapiens
  siRNA target sequence for PRPF8 (NM_006445.2,3358-3376).
gggacctgattcaacgtta

SEQ ID NO: 46630 - DNA, 19 bp, Homo sapiens
  siRNA target sequence for PRPF8 (NM_006445.2,3389-3407).
ccctgaccccaataatgaa

SEQ ID NO: 46631 - DNA, 19 bp, Homo sapiens
  siRNA target sequence for PRPF8 (NM_006445.2,3451-3469).
cccgcatgcgcctcatgaa

SEQ ID NO: 46632 - DNA, 19 bp, Homo sapiens
  siRNA target sequence for PRPF8 (NM_006445.2,3452-3470).
ccgcatgcgcctcatgaaa

SEQ ID NO: 46633 - DNA, 19 bp, Homo sapiens
  siRNA target sequence for PRPF8 (NM_006445.2,3454-3472).
gcatgcgcctcatgaaaca

SEQ ID NO: 46634 - DNA, 19 bp, Homo sapiens
  siRNA target sequence for PRPF8 (NM_006445.2,3455-3473).
catgcgcctcatgaaacat

SEQ ID NO: 46635 - DNA, 19 bp, Homo sapiens
  siRNA target sequence for PRPF8 (NM_006445.2,3493-3511).
cggtattctgggacatcaa

SEQ ID NO: 46636 - DNA, 19 bp, Homo sapiens
  siRNA target sequence for PRPF8 (NM_006445.2,3495-3513).
gtattctgggacatcaaga

SEQ ID NO: 46637 - DNA, 19 bp, Homo sapiens
  siRNA target sequence for PRPF8 (NM_006445.2,3730-3748).
gtgtggacgatgagtcaat

SEQ ID NO: 46638 - DNA, 19 bp, Homo sapiens
  siRNA target sequence for PRPF8 (NM_006445.2,3761-3779).
caaccgcgtgcgtcagatt

SEQ ID NO: 46639 - DNA, 19 bp, Homo sapiens
  siRNA target sequence for PRPF8 (NM_006445.2,3765-3783).
cgcgtgcgtcagattctca

SEQ ID NO: 46640 - DNA, 19 bp, Homo sapiens
  siRNA target sequence for PRPF8 (NM_006445.2,3766-3784).
gcgtgcgtcagattctcat

SEQ ID NO: 46641 - DNA, 19 bp, Homo sapiens
  siRNA target sequence for PRPF8 (NM_006445.2,4009-4027).
gactcggcatgctctcaat

SEQ ID NO: 46642 - DNA, 19 bp, Homo sapiens
  siRNA target sequence for PRPF8 (NM_006445.2,4136-4154).
caacttgtaccgctacata

SEQ ID NO: 46643 - DNA, 19 bp, Homo sapiens
  siRNA target sequence for PRPF8 (NM_006445.2,4159-4177).
catgggagagcgagttcat

SEQ ID NO: 46644 - DNA, 19 bp, Homo sapiens
  siRNA target sequence for PRPF8 (NM_006445.2,4162-4180).
gggagagcgagttcattga

SEQ ID NO: 46645 - DNA, 19 bp, Homo sapiens
  siRNA target sequence for PRPF8 (NM_006445.2,4235-4253).
gaacagacgcctgacttta

SEQ ID NO: 46646 - DNA, 19 bp, Homo sapiens
  siRNA target sequence for PRPF8 (NM_006445.2,4238-4256).
cagacgcctgactttagaa

SEQ ID NO: 46647 - DNA, 19 bp, Homo sapiens
  siRNA target sequence for PRPF8 (NM_006445.2,4240-4258).
gacgcctgactttagaaga

SEQ ID NO: 46648 - DNA, 19 bp, Homo sapiens
  siRNA target sequence for PRPF8 (NM_006445.2,4281-4299).
ggcattcctcgaatcaata

SEQ ID NO: 46649 - DNA, 19 bp, Homo sapiens
  siRNA target sequence for PRPF8 (NM_006445.2,4319-4337).
gcacacactggcttatgat

SEQ ID NO: 46650 - DNA, 19 bp, Homo sapiens
  siRNA target sequence for PRPF8 (NM_006445.2,4320-4338).
cacacactggcttatgata

SEQ ID NO: 46651 - DNA, 19 bp, Homo sapiens
  siRNA target sequence for PRPF8 (NM_006445.2,4347-4365).
cgtgtcagaactgacttta

SEQ ID NO: 46652 - DNA, 19 bp, Homo sapiens
  siRNA target sequence for PRPF8 (NM_006445.2,4348-4366).
gtgtcagaactgactttaa

SEQ ID NO: 46653 - DNA, 19 bp, Homo sapiens
  siRNA target sequence for PRPF8 (NM_006445.2,4503-4521).
ctctttaagggcacttact

SEQ ID NO: 46654 - DNA, 19 bp, Homo sapiens
  siRNA target sequence for PRPF8 (NM_006445.2,4648-4666).
ggtggtccccgaccattaa

SEQ ID NO: 46655 - DNA, 19 bp, Homo sapiens
  siRNA target sequence for PRPF8 (NM_006445.2,4649-4667).
gtggtccccgaccattaat

SEQ ID NO: 46656 - DNA, 19 bp, Homo sapiens
  siRNA target sequence for PRPF8 (NM_006445.2,4652-4670).
gtccccgaccattaatcga

SEQ ID NO: 46657 - DNA, 19 bp, Homo sapiens
  siRNA target sequence for PRPF8 (NM_006445.2,4661-4679).
cattaatcgagccaatgta

SEQ ID NO: 46658 - DNA, 19 bp, Homo sapiens
  siRNA target sequence for PRPF8 (NM_006445.2,4704-4722).
gacctgacgggtatcttca

SEQ ID NO: 46659 - DNA, 19 bp, Homo sapiens
  siRNA target sequence for PRPF8 (NM_006445.2,4790-4808).
gatccatgagagcattgtt

SEQ ID NO: 46660 - DNA, 19 bp, Homo sapiens
  siRNA target sequence for PRPF8 (NM_006445.2,4861-4879).
cagtacaaaaggagacaat

SEQ ID NO: 46661 - DNA, 19 bp, Homo sapiens
  siRNA target sequence for PRPF8 (NM_006445.2,4880-4898).
ccatccccgaaagtcatat

SEQ ID NO: 46662 - DNA, 19 bp, Homo sapiens
  siRNA target sequence for PRPF8 (NM_006445.2,4881-4899).
catccccgaaagtcatata

SEQ ID NO: 46663 - DNA, 19 bp, Homo sapiens
  siRNA target sequence for PRPF8 (NM_006445.2,4884-4902).
ccccgaaagtcatataaga

SEQ ID NO: 46664 - DNA, 19 bp, Homo sapiens
  siRNA target sequence for PRPF8 (NM_006445.2,4885-4903).
cccgaaagtcatataagat

SEQ ID NO: 46665 - DNA, 19 bp, Homo sapiens
  siRNA target sequence for PRPF8 (NM_006445.2,4909-4927).
cttcctgtgcagatatcct

SEQ ID NO: 46666 - DNA, 19 bp, Homo sapiens
  siRNA target sequence for PRPF8 (NM_006445.2,5036-5054).
gcgctggggggactatgat

SEQ ID NO: 46667 - DNA, 19 bp, Homo sapiens
  siRNA target sequence for PRPF8 (NM_006445.2,5037-5055).
cgctggggggactatgatt

SEQ ID NO: 46668 - DNA, 19 bp, Homo sapiens
  siRNA target sequence for PRPF8 (NM_006445.2,5128-5146).
cgcccacaggtgtactcat

SEQ ID NO: 46669 - DNA, 19 bp, Homo sapiens
  siRNA target sequence for PRPF8 (NM_006445.2,5200-5218).
gcagcaagcctctcataca

SEQ ID NO: 46670 - DNA, 19 bp, Homo sapiens
  siRNA target sequence for PRPF8 (NM_006445.2,5203-5221).
gcaagcctctcatacaaca

SEQ ID NO: 46671 - DNA, 19 bp, Homo sapiens
  siRNA target sequence for PRPF8 (NM_006445.2,5249-5267).
ccctgccctgtatgtgtta

SEQ ID NO: 46672 - DNA, 19 bp, Homo sapiens
  siRNA target sequence for PRPF8 (NM_006445.2,5285-5303).
ggggctacagctctattca

SEQ ID NO: 46673 - DNA, 19 bp, Homo sapiens
  siRNA target sequence for PRPF8 (NM_006445.2,5286-5304).
gggctacagctctattcat

SEQ ID NO: 46674 - DNA, 19 bp, Homo sapiens
  siRNA target sequence for PRPF8 (NM_006445.2,5288-5306).
gctacagctctattcatct

SEQ ID NO: 46675 - DNA, 19 bp, Homo sapiens
  siRNA target sequence for PRPF8 (NM_006445.2,5310-5328).
cccactgagccttatttgt

SEQ ID NO: 46676 - DNA, 19 bp, Homo sapiens
  siRNA target sequence for PRPF8 (NM_006445.2,5390-5408).
cgtctacagagtgactatt

SEQ ID NO: 46677 - DNA, 19 bp, Homo sapiens
  siRNA target sequence for PRPF8 (NM_006445.2,5675-5693).
ccccaatattgtcatcaaa

SEQ ID NO: 46678 - DNA, 19 bp, Homo sapiens
  siRNA target sequence for PRPF8 (NM_006445.2,5744-5762).
cggggatctcatccttaaa

SEQ ID NO: 46679 - DNA, 19 bp, Homo sapiens
  siRNA target sequence for PRPF8 (NM_006445.2,5801-5819).
cgactggctcaagactatt

SEQ ID NO: 46680 - DNA, 19 bp, Homo sapiens
  siRNA target sequence for PRPF8 (NM_006445.2,5802-5820).
gactggctcaagactattt

SEQ ID NO: 46681 - DNA, 19 bp, Homo sapiens
  siRNA target sequence for PRPF8 (NM_006445.2,5807-5825).
gctcaagactatttcatct

SEQ ID NO: 46682 - DNA, 19 bp, Homo sapiens
  siRNA target sequence for PRPF8 (NM_006445.2,5860-5878).
gtgccctacatgtgaacaa

SEQ ID NO: 46683 - DNA, 19 bp, Homo sapiens
  siRNA target sequence for PRPF8 (NM_006445.2,5898-5916).
ctgaagccagacaagacta

SEQ ID NO: 46684 - DNA, 19 bp, Homo sapiens
  siRNA target sequence for PRPF8 (NM_006445.2,5903-5921).
gccagacaagactactatt

SEQ ID NO: 46685 - DNA, 19 bp, Homo sapiens
  siRNA target sequence for PRPF8 (NM_006445.2,5904-5922).
ccagacaagactactatta

SEQ ID NO: 46686 - DNA, 19 bp, Homo sapiens
  siRNA target sequence for PRPF8 (NM_006445.2,5909-5927).
caagactactattacagaa

SEQ ID NO: 46687 - DNA, 19 bp, Homo sapiens
  siRNA target sequence for PRPF8 (NM_006445.2,6002-6020).
ggctgactacggcaagaaa

SEQ ID NO: 46688 - DNA, 19 bp, Homo sapiens
  siRNA target sequence for PRPF8 (NM_006445.2,6003-6021).
gctgactacggcaagaaaa

SEQ ID NO: 46689 - DNA, 19 bp, Homo sapiens
  siRNA target sequence for PRPF8 (NM_006445.2,6044-6062).
gacacaatcagaaattcga

SEQ ID NO: 46690 - DNA, 19 bp, Homo sapiens
  siRNA target sequence for PRPF8 (NM_006445.2,6052-6070).
cagaaattcgagacatcat

SEQ ID NO: 46691 - DNA, 19 bp, Homo sapiens
  siRNA target sequence for PRPF8 (NM_006445.2,6288-6306).
cacctaaggaccaatcaca

SEQ ID NO: 46692 - DNA, 19 bp, Homo sapiens
  siRNA target sequence for PRPF8 (NM_006445.2,6295-6313).
ggaccaatcacatctatgt

SEQ ID NO: 46693 - DNA, 19 bp, Homo sapiens
  siRNA target sequence for PRPF8 (NM_006445.2,6296-6314).
gaccaatcacatctatgtt

SEQ ID NO: 46694 - DNA, 19 bp, Homo sapiens
  siRNA target sequence for PRPF8 (NM_006445.2,6357-6375).
cccaagaatgtgcttaaga

SEQ ID NO: 46695 - DNA, 19 bp, Homo sapiens
  siRNA target sequence for PRPF8 (NM_006445.2,6366-6384).
gtgcttaagaagttcatct

SEQ ID NO: 46696 - DNA, 19 bp, Homo sapiens
  siRNA target sequence for PRPF8 (NM_006445.2,6427-6445).
gggtgagcccaccagataa

SEQ ID NO: 46697 - DNA, 19 bp, Homo sapiens
  siRNA target sequence for PRPF8 (NM_006445.2,6459-6477).
gagatccgctgcattgtga

SEQ ID NO: 46698 - DNA, 19 bp, Homo sapiens
  siRNA target sequence for PRPF8 (NM_006445.2,6549-6567).
gagatggaacccttaggtt

SEQ ID NO: 46699 - DNA, 19 bp, Homo sapiens
  siRNA target sequence for PRPF8 (NM_006445.2,6573-6591).
cacactcagcccaatgagt

SEQ ID NO: 46700 - DNA, 19 bp, Homo sapiens
  siRNA target sequence for PRPF8 (NM_006445.2,6660-6678).
ggcgagaagaccattatca

SEQ ID NO: 46701 - DNA, 19 bp, Homo sapiens
  siRNA target sequence for PRPF8 (NM_006445.2,6868-6886).
cctcgtggaactacaactt

SEQ ID NO: 46702 - DNA, 19 bp, Homo sapiens
  siRNA target sequence for SCA2 (NM_002973.1,375-393).
ctccgcctcagactgtttt

SEQ ID NO: 46703 - DNA, 19 bp, Homo sapiens
  siRNA target sequence for SCA2 (NM_002973.1,378-396).
cgcctcagactgttttggt

SEQ ID NO: 46704 - DNA, 19 bp, Homo sapiens
  siRNA target sequence for SCA2 (NM_002973.1,379-397).
gcctcagactgttttggta

SEQ ID NO: 46705 - DNA, 19 bp, Homo sapiens
  siRNA target sequence for SCA2 (NM_002973.1,890-908).
gaggtcgaaacagtaacaa

SEQ ID NO: 46706 - DNA, 19 bp, Homo sapiens
  siRNA target sequence for SCA2 (NM_002973.1,913-931).
ctgcctcagtctacgattt

SEQ ID NO: 46707 - DNA, 19 bp, Homo sapiens
  siRNA target sequence for SCA2 (NM_002973.1,916-934).
cctcagtctacgatttctt

SEQ ID NO: 46708 - DNA, 19 bp, Homo sapiens
  siRNA target sequence for SCA2 (NM_002973.1,917-935).
ctcagtctacgatttcttt

SEQ ID NO: 46709 - DNA, 19 bp, Homo sapiens
  siRNA target sequence for SCA2 (NM_002973.1,960-978).
gatggttcatatacttaca

SEQ ID NO: 46710 - DNA, 19 bp, Homo sapiens
  siRNA target sequence for SCA2 (NM_002973.1,1009-1027).
gtgaaaaatggaggtatat

SEQ ID NO: 46711 - DNA, 19 bp, Homo sapiens
  siRNA target sequence for SCA2 (NM_002973.1,1011-1029).
gaaaaatggaggtatatat

SEQ ID NO: 46712 - DNA, 19 bp, Homo sapiens
  siRNA target sequence for SCA2 (NM_002973.1,1022-1040).
gtatatatgaaggagtttt

SEQ ID NO: 46713 - DNA, 19 bp, Homo sapiens
  siRNA target sequence for SCA2 (NM_002973.1,1052-1070).
gtccgaagtgtgatttggt

SEQ ID NO: 46714 - DNA, 19 bp, Homo sapiens
  siRNA target sequence for SCA2 (NM_002973.1,1059-1077).
gtgtgatttggtacttgat

SEQ ID NO: 46715 - DNA, 19 bp, Homo sapiens
  siRNA target sequence for SCA2 (NM_002973.1,1075-1093).
gatgccgcacatgagaaaa

SEQ ID NO: 46716 - DNA, 19 bp, Homo sapiens
  siRNA target sequence for SCA2 (NM_002973.1,1080-1098).
cgcacatgagaaaagtaca

SEQ ID NO: 46717 - DNA, 19 bp, Homo sapiens
  siRNA target sequence for SCA2 (NM_002973.1,1410-1428).
cagtttatcttcgtataca

SEQ ID NO: 46718 - DNA, 19 bp, Homo sapiens
  siRNA target sequence for SCA2 (NM_002973.1,1412-1430).
gtttatcttcgtatacagt

SEQ ID NO: 46719 - DNA, 19 bp, Homo sapiens
  siRNA target sequence for SCA2 (NM_002973.1,1429-1447).
gtgcccttagaaagagata

SEQ ID NO: 46720 - DNA, 19 bp, Homo sapiens
  siRNA target sequence for SCA2 (NM_002973.1,1432-1450).
cccttagaaagagataact

SEQ ID NO: 46721 - DNA, 19 bp, Homo sapiens
  siRNA target sequence for SCA2 (NM_002973.1,1600-1618).
cgtgaggggcacagcataa

SEQ ID NO: 46722 - DNA, 19 bp, Homo sapiens
  siRNA target sequence for SCA2 (NM_002973.1,1605-1623).
ggggcacagcataaacact

SEQ ID NO: 46723 - DNA, 19 bp, Homo sapiens
  siRNA target sequence for SCA2 (NM_002973.1,1606-1624).
gggcacagcataaacacta

SEQ ID NO: 46724 - DNA, 19 bp, Homo sapiens
  siRNA target sequence for SCA2 (NM_002973.1,1785-1803).
ccaaagagtagttaatgga

SEQ ID NO: 46725 - DNA, 19 bp, Homo sapiens
  siRNA target sequence for SCA2 (NM_002973.1,2040-2058).
ccagcgacatcctcgaaat

SEQ ID NO: 46726 - DNA, 19 bp, Homo sapiens
  siRNA target sequence for SCA2 (NM_002973.1,2044-2062).
cgacatcctcgaaatcaca

SEQ ID NO: 46727 - DNA, 19 bp, Homo sapiens
  siRNA target sequence for SCA2 (NM_002973.1,2050-2068).
cctcgaaatcacagagttt

SEQ ID NO: 46728 - DNA, 19 bp, Homo sapiens
  siRNA target sequence for SCA2 (NM_002973.1,2071-2089).
gctgggaggggttccatat

SEQ ID NO: 46729 - DNA, 19 bp, Homo sapiens
  siRNA target sequence for SCA2 (NM_002973.1,2074-2092).
gggaggggttccatatcca

SEQ ID NO: 46730 - DNA, 19 bp, Homo sapiens
  siRNA target sequence for SCA2 (NM_002973.1,2190-2208).
cagtggggttccaagatta

SEQ ID NO: 46731 - DNA, 19 bp, Homo sapiens
  siRNA target sequence for SCA2 (NM_002973.1,2200-2218).
ccaagattatcccctaaaa

SEQ ID NO: 46732 - DNA, 19 bp, Homo sapiens
  siRNA target sequence for SCA2 (NM_002973.1,2204-2222).
gattatcccctaaaactca

SEQ ID NO: 46733 - DNA, 19 bp, Homo sapiens
  siRNA target sequence for SCA2 (NM_002973.1,2471-2489).
catcacctagcttctcaaa

SEQ ID NO: 46734 - DNA, 19 bp, Homo sapiens
  siRNA target sequence for SCA2 (NM_002973.1,2503-2521).
ggtatatcaccagttgttt

SEQ ID NO: 46735 - DNA, 19 bp, Homo sapiens
  siRNA target sequence for SCA2 (NM_002973.1,2512-2530).
ccagttgtttctgaacata

SEQ ID NO: 46736 - DNA, 19 bp, Homo sapiens
  siRNA target sequence for SCA2 (NM_002973.1,2515-2533).
gttgtttctgaacatagaa

SEQ ID NO: 46737 - DNA, 19 bp, Homo sapiens
  siRNA target sequence for SCA2 (NM_002973.1,2600-2618).
ctatggatcaactactaaa

SEQ ID NO: 46738 - DNA, 19 bp, Homo sapiens
  siRNA target sequence for SCA2 (NM_002973.1,2605-2623).
gatcaactactaaacaaaa

SEQ ID NO: 46739 - DNA, 19 bp, Homo sapiens
  siRNA target sequence for SCA2 (NM_002973.1,2675-2693).
gtgctaaggattctttcat

SEQ ID NO: 46740 - DNA, 19 bp, Homo sapiens
  siRNA target sequence for SCA2 (NM_002973.1,2734-2752).
ccgaatagccccagcattt

SEQ ID NO: 46741 - DNA, 19 bp, Homo sapiens
  siRNA target sequence for SCA2 (NM_002973.1,2819-2837).
cttccagcccagcatgtaa

SEQ ID NO: 46742 - DNA, 19 bp, Homo sapiens
  siRNA target sequence for SCA2 (NM_002973.1,2823-2841).
cagcccagcatgtaaacaa

SEQ ID NO: 46743 - DNA, 19 bp, Homo sapiens
  siRNA target sequence for SCA2 (NM_002973.1,2878-2896).
gagcaagttaggaaatcaa

SEQ ID NO: 46744 - DNA, 19 bp, Homo sapiens
  siRNA target sequence for SCA2 (NM_002973.1,2880-2898).
gcaagttaggaaatcaaca

SEQ ID NO: 46745 - DNA, 19 bp, Homo sapiens
  siRNA target sequence for SCA2 (NM_002973.1,2881-2899).
caagttaggaaatcaacat

SEQ ID NO: 46746 - DNA, 19 bp, Homo sapiens
  siRNA target sequence for SCA2 (NM_002973.1,2941-2959).
cagccaaagccttctacta

SEQ ID NO: 46747 - DNA, 19 bp, Homo sapiens
  siRNA target sequence for SCA2 (NM_002973.1,2999-3017).
ctatggtgggtcatcaaca

SEQ ID NO: 46748 - DNA, 19 bp, Homo sapiens
  siRNA target sequence for SCA2 (NM_002973.1,3043-3061).
gtttgttttgcaccaaata

SEQ ID NO: 46749 - DNA, 19 bp, Homo sapiens
  siRNA target sequence for SCA2 (NM_002973.1,3083-3101).
gcccaggcgtgcaaccttt

SEQ ID NO: 46750 - DNA, 19 bp, Homo sapiens
  siRNA target sequence for SCA2 (NM_002973.1,3085-3103).
ccaggcgtgcaacctttat

SEQ ID NO: 46751 - DNA, 19 bp, Homo sapiens
  siRNA target sequence for SCA2 (NM_002973.1,3086-3104).
caggcgtgcaacctttata

SEQ ID NO: 46752 - DNA, 19 bp, Homo sapiens
  siRNA target sequence for SCA2 (NM_002973.1,3097-3115).
cctttatacccaataccta

SEQ ID NO: 46753 - DNA, 19 bp, Homo sapiens
  siRNA target sequence for SCA2 (NM_002973.1,3098-3116).
ctttatacccaatacctat

SEQ ID NO: 46754 - DNA, 19 bp, Homo sapiens
  siRNA target sequence for SCA2 (NM_002973.1,3120-3138).
gcccatgccagtgaatcaa

SEQ ID NO: 46755 - DNA, 19 bp, Homo sapiens
  siRNA target sequence for SCA2 (NM_002973.1,3132-3150).
gaatcaagccaagacatat

SEQ ID NO: 46756 - DNA, 19 bp, Homo sapiens
  siRNA target sequence for SCA2 (NM_002973.1,3146-3164).
catatagagcagtaccaaa

SEQ ID NO: 46757 - DNA, 19 bp, Homo sapiens
  siRNA target sequence for SCA2 (NM_002973.1,3257-3275).
cttactccacgcaatatgt

SEQ ID NO: 46758 - DNA, 19 bp, Homo sapiens
  siRNA target sequence for SCA2 (NM_002973.1,3340-3358).
cagcatcctcatgtctata

SEQ ID NO: 46759 - DNA, 19 bp, Homo sapiens
  siRNA target sequence for SCA2 (NM_002973.1,3364-3382).
gtaatacagggtaatgcta

SEQ ID NO: 46760 - DNA, 19 bp, Homo sapiens
  siRNA target sequence for SCA2 (NM_002973.1,3370-3388).
cagggtaatgctagaatga

SEQ ID NO: 46761 - DNA, 19 bp, Homo sapiens
  siRNA target sequence for SCA2 (NM_002973.1,3408-3426).
ccagcctggtttagtatct

SEQ ID NO: 46762 - DNA, 19 bp, Homo sapiens
  siRNA target sequence for SCA2 (NM_002973.1,3409-3427).
cagcctggtttagtatctt

SEQ ID NO: 46763 - DNA, 19 bp, Homo sapiens
  siRNA target sequence for SCA2 (NM_002973.1,3411-3429).
gcctggtttagtatcttct

SEQ ID NO: 46764 - DNA, 19 bp, Homo sapiens
  siRNA target sequence for SCA2 (NM_002973.1,3456-3474).
gcagacgcatgcgatgtat

SEQ ID NO: 46765 - DNA, 19 bp, Homo sapiens
  siRNA target sequence for SCA2 (NM_002973.1,3471-3489).
gtatgcatgtcccaaatta

SEQ ID NO: 46766 - DNA, 19 bp, Homo sapiens
  siRNA target sequence for SCA2 (NM_002973.1,3479-3497).
gtcccaaattaccatacaa

SEQ ID NO: 46767 - DNA, 19 bp, Homo sapiens
  siRNA target sequence for SCA2 (NM_002973.1,3481-3499).
cccaaattaccatacaaca

SEQ ID NO: 46768 - DNA, 19 bp, Homo sapiens
  siRNA target sequence for SCA2 (NM_002973.1,3789-3807).
cacgcagtcgccacagaat

SEQ ID NO: 46769 - DNA, 19 bp, Homo sapiens
  siRNA target sequence for SCA2 (NM_002973.1,3793-3811).
cagtcgccacagaatagtt

SEQ ID NO: 46770 - DNA, 19 bp, Homo sapiens
  siRNA target sequence for SCA2 (NM_002973.1,3823-3841).
caacagactgtctttacga

SEQ ID NO: 46771 - DNA, 19 bp, Homo sapiens
  siRNA target sequence for SCA2 (NM_002973.1,3894-3912).
cgtacctcaggctcatgta

SEQ ID NO: 46772 - DNA, 19 bp, Homo sapiens
  siRNA target sequence for SCA2 (NM_002973.1,3946-3964).
catgcgccaatgatgctaa

SEQ ID NO: 46773 - DNA, 19 bp, Homo sapiens
  siRNA target sequence for SCA2 (NM_002973.1,3949-3967).
gcgccaatgatgctaatga

SEQ ID NO: 46774 - DNA, 19 bp, Homo sapiens
  siRNA target sequence for SCA2 (NM_002973.1,4040-4058).
cagcgcatttcccctatat

SEQ ID NO: 46775 - DNA, 19 bp, Homo sapiens
  siRNA target sequence for SCA2 (NM_002973.1,4042-4060).
gcgcatttcccctatatga

SEQ ID NO: 46776 - DNA, 19 bp, Homo sapiens
  siRNA target sequence for SF3A1 (NM_005877.3,234-252).
ccagttgtggggattattt

SEQ ID NO: 46777 - DNA, 19 bp, Homo sapiens
  siRNA target sequence for SF3A1 (NM_005877.3,304-322).
ccagaaacgggcctgaatt

SEQ ID NO: 46778 - DNA, 19 bp, Homo sapiens
  siRNA target sequence for SF3A1 (NM_005877.3,336-354).
cgacagaacgagatcaaca

SEQ ID NO: 46779 - DNA, 19 bp, Homo sapiens
  siRNA target sequence for SF3A1 (NM_005877.3,337-355).
gacagaacgagatcaacaa

SEQ ID NO: 46780 - DNA, 19 bp, Homo sapiens
  siRNA target sequence for SF3A1 (NM_005877.3,353-371).
caaccccaagttcaacttt

SEQ ID NO: 46781 - DNA, 19 bp, Homo sapiens
  siRNA target sequence for SF3A1 (NM_005877.3,377-395).
ccccaatgacccttaccat

SEQ ID NO: 46782 - DNA, 19 bp, Homo sapiens
  siRNA target sequence for SF3A1 (NM_005877.3,518-536).
ccaagcccaagtaatccaa

SEQ ID NO: 46783 - DNA, 19 bp, Homo sapiens
  siRNA target sequence for SF3A1 (NM_005877.3,582-600).
gctgatcctccctctatct

SEQ ID NO: 46784 - DNA, 19 bp, Homo sapiens
  siRNA target sequence for SF3A1 (NM_005877.3,748-766).
cgaagctagtggaacagta

SEQ ID NO: 46785 - DNA, 19 bp, Homo sapiens
  siRNA target sequence for SF3A1 (NM_005877.3,779-797).
gattccacccaaaggttta

SEQ ID NO: 46786 - DNA, 19 bp, Homo sapiens
  siRNA target sequence for SF3A1 (NM_005877.3,822-840).
gaaaacccccgagaagttt

SEQ ID NO: 46787 - DNA, 19 bp, Homo sapiens
  siRNA target sequence for SF3A1 (NM_005877.3,827-845).
cccccgagaagttttggat

SEQ ID NO: 46788 - DNA, 19 bp, Homo sapiens
  siRNA target sequence for SF3A1 (NM_005877.3,859-877).
gagtggaatgggccaaatt

SEQ ID NO: 46789 - DNA, 19 bp, Homo sapiens
  siRNA target sequence for SF3A1 (NM_005877.3,939-957).
cagatcgactggcatgatt

SEQ ID NO: 46790 - DNA, 19 bp, Homo sapiens
  siRNA target sequence for SF3A1 (NM_005877.3,941-959).
gatcgactggcatgatttt

SEQ ID NO: 46791 - DNA, 19 bp, Homo sapiens
  siRNA target sequence for SF3A1 (NM_005877.3,1053-1071).
caggagcgctatgaaaagt

SEQ ID NO: 46792 - DNA, 19 bp, Homo sapiens
  siRNA target sequence for SF3A1 (NM_005877.3,1055-1073).
ggagcgctatgaaaagttt

SEQ ID NO: 46793 - DNA, 19 bp, Homo sapiens
  siRNA target sequence for SF3A1 (NM_005877.3,1166-1184).
ggacacccaagtacaagat

SEQ ID NO: 46794 - DNA, 19 bp, Homo sapiens
  siRNA target sequence for SF3A1 (NM_005877.3,1172-1190).
ccaagtacaagatatggat

SEQ ID NO: 46795 - DNA, 19 bp, Homo sapiens
  siRNA target sequence for SF3A1 (NM_005877.3,1267-1285).
caactccagaccaagtcat

SEQ ID NO: 46796 - DNA, 19 bp, Homo sapiens
  siRNA target sequence for SF3A1 (NM_005877.3,1283-1301).
cattgtccgcaaggattat

SEQ ID NO: 46797 - DNA, 19 bp, Homo sapiens
  siRNA target sequence for SF3A1 (NM_005877.3,1406-1424).
catgcgcattggacttctt

SEQ ID NO: 46798 - DNA, 19 bp, Homo sapiens
  siRNA target sequence for SF3A1 (NM_005877.3,1490-1508).
cgcaccaggtctggatatt

SEQ ID NO: 46799 - DNA, 19 bp, Homo sapiens
  siRNA target sequence for SF3A1 (NM_005877.3,1695-1713).
cagattgaggccattcaca

SEQ ID NO: 46800 - DNA, 19 bp, Homo sapiens
  siRNA target sequence for SF3A1 (NM_005877.3,1761-1779).
cccagcaagcccaatgaaa

SEQ ID NO: 46801 - DNA, 19 bp, Homo sapiens
  siRNA target sequence for SF3A1 (NM_005877.3,2047-2065).
gcccaccccccatgattgt

SEQ ID NO: 46802 - DNA, 19 bp, Homo sapiens
  siRNA target sequence for SF3A1 (NM_005877.3,2256-2274).
cccaacatgcaggataaga

SEQ ID NO: 46803 - DNA, 19 bp, Homo sapiens
  siRNA target sequence for SF3A1 (NM_005877.3,2267-2285).
ggataagacggaatggaaa

SEQ ID NO: 46804 - DNA, 19 bp, Homo sapiens
  siRNA target sequence for SF3A1 (NM_005877.3,2324-2342).
ggaccaggtctctgtcatt

SEQ ID NO: 46805 - DNA, 19 bp, Homo sapiens
  siRNA target sequence for SF3A1 (NM_005877.3,2325-2343).
gaccaggtctctgtcatta

SEQ ID NO: 46806 - DNA, 19 bp, Homo sapiens
  siRNA target sequence for SF3A1 (NM_005877.3,2339-2357).
cattaaggtgaagattcat

SEQ ID NO: 46807 - DNA, 19 bp, Homo sapiens
  siRNA target sequence for SF3A1 (NM_005877.3,2394-2412).
cagtatgagggtatcttca

SEQ ID NO: 46808 - DNA, 19 bp, Homo sapiens
  siRNA target sequence for SF3A1 (NM_005877.3,2403-2421).
ggtatcttcatcaaagatt

SEQ ID NO: 46809 - DNA, 19 bp, Homo sapiens
  siRNA target sequence for SF3A3 (NM_006802.1,105-123).
ctccgggaccagatcaatt

SEQ ID NO: 46810 - DNA, 19 bp, Homo sapiens
  siRNA target sequence for SF3A3 (NM_006802.1,107-125).
ccgggaccagatcaattct

SEQ ID NO: 46811 - DNA, 19 bp, Homo sapiens
  siRNA target sequence for SF3A3 (NM_006802.1,139-157).
gggccatgcaagataggta

SEQ ID NO: 46812 - DNA, 19 bp, Homo sapiens
  siRNA target sequence for SF3A3 (NM_006802.1,172-190).
ggaacctgagggatttgta

SEQ ID NO: 46813 - DNA, 19 bp, Homo sapiens
  siRNA target sequence for SF3A3 (NM_006802.1,176-194).
cctgagggatttgtatgat

SEQ ID NO: 46814 - DNA, 19 bp, Homo sapiens
  siRNA target sequence for SF3A3 (NM_006802.1,195-213).
gataaggatggattacgaa

SEQ ID NO: 46815 - DNA, 19 bp, Homo sapiens
  siRNA target sequence for SF3A3 (NM_006802.1,218-236).
ggagctcaatgccatttca

SEQ ID NO: 46816 - DNA, 19 bp, Homo sapiens
  siRNA target sequence for SF3A3 (NM_006802.1,253-271).
ctgaattctataatagact

SEQ ID NO: 46817 - DNA, 19 bp, Homo sapiens
  siRNA target sequence for SF3A3 (NM_006802.1,294-312).
cggaagcacccaaatgaga

SEQ ID NO: 46818 - DNA, 19 bp, Homo sapiens
  siRNA target sequence for SF3A3 (NM_006802.1,370-388).
gtgaagaggcacaaaactt

SEQ ID NO: 46819 - DNA, 19 bp, Homo sapiens
  siRNA target sequence for SF3A3 (NM_006802.1,581-599).
gtaccttcaggattacaca

SEQ ID NO: 46820 - DNA, 19 bp, Homo sapiens
  siRNA target sequence for SF3A3 (NM_006802.1,783-801).
ggtttggacagattgaaat

SEQ ID NO: 46821 - DNA, 19 bp, Homo sapiens
  siRNA target sequence for SF3A3 (NM_006802.1,846-864).
gagcgagcccagagactat

SEQ ID NO: 46822 - DNA, 19 bp, Homo sapiens
  siRNA target sequence for SF3A3 (NM_006802.1,849-867).
cgagcccagagactattca

SEQ ID NO: 46823 - DNA, 19 bp, Homo sapiens
  siRNA target sequence for SF3A3 (NM_006802.1,857-875).
gagactattcagtaccaaa

SEQ ID NO: 46824 - DNA, 19 bp, Homo sapiens
  siRNA target sequence for SF3A3 (NM_006802.1,861-879).
ctattcagtaccaaaggaa

SEQ ID NO: 46825 - DNA, 19 bp, Homo sapiens
  siRNA target sequence for SF3A3 (NM_006802.1,892-910).
cacttgatacctctttgtt

SEQ ID NO: 46826 - DNA, 19 bp, Homo sapiens
  siRNA target sequence for SF3A3 (NM_006802.1,912-930).
gccaaaaatcccaagtcaa

SEQ ID NO: 46827 - DNA, 19 bp, Homo sapiens
  siRNA target sequence for SF3A3 (NM_006802.1,1020-1038).
cgacatctcactcatgaaa

SEQ ID NO: 46828 - DNA, 19 bp, Homo sapiens
  siRNA target sequence for SF3A3 (NM_006802.1,1203-1221).
cttcatggcctaaatatca

SEQ ID NO: 46829 - DNA, 19 bp, Homo sapiens
  siRNA target sequence for SF3A3 (NM_006802.1,1206-1224).
catggcctaaatatcaact

SEQ ID NO: 46830 - DNA, 19 bp, Homo sapiens
  siRNA target sequence for SF3A3 (NM_006802.1,1210-1228).
gcctaaatatcaactacaa

SEQ ID NO: 46831 - DNA, 19 bp, Homo sapiens
  siRNA target sequence for SF3A3 (NM_006802.1,1231-1249).
gtgagatttgtggaaacta

SEQ ID NO: 46832 - DNA, 19 bp, Homo sapiens
  siRNA target sequence for SF3A3 (NM_006802.1,1233-1251).
gagatttgtggaaactaca

SEQ ID NO: 46833 - DNA, 19 bp, Homo sapiens
  siRNA target sequence for SF3B1 (NM_012433.1,38-56).
cacagattcgagaaattca

SEQ ID NO: 46834 - DNA, 19 bp, Homo sapiens
  siRNA target sequence for SF3B1 (NM_012433.1,60-78).
caagaaggcagctcttgat

SEQ ID NO: 46835 - DNA, 19 bp, Homo sapiens
  siRNA target sequence for SF3B1 (NM_012433.1,88-106).
ggagtgggcctcgattcta

SEQ ID NO: 46836 - DNA, 19 bp, Homo sapiens
  siRNA target sequence for SF3B1 (NM_012433.1,96-114).
cctcgattctacaggttat

SEQ ID NO: 46837 - DNA, 19 bp, Homo sapiens
  siRNA target sequence for SF3B1 (NM_012433.1,97-115).
ctcgattctacaggttatt

SEQ ID NO: 46838 - DNA, 19 bp, Homo sapiens
  siRNA target sequence for SF3B1 (NM_012433.1,99-117).
cgattctacaggttattat

SEQ ID NO: 46839 - DNA, 19 bp, Homo sapiens
  siRNA target sequence for SF3B1 (NM_012433.1,110-128).
gttattatgaccaggaaat

SEQ ID NO: 46840 - DNA, 19 bp, Homo sapiens
  siRNA target sequence for SF3B1 (NM_012433.1,154-172).
gctggatacgtgacatcaa

SEQ ID NO: 46841 - DNA, 19 bp, Homo sapiens
  siRNA target sequence for SF3B1 (NM_012433.1,155-173).
ctggatacgtgacatcaat

SEQ ID NO: 46842 - DNA, 19 bp, Homo sapiens
  siRNA target sequence for SF3B1 (NM_012433.1,196-214).
gatgacgatgactattcat

SEQ ID NO: 46843 - DNA, 19 bp, Homo sapiens
  siRNA target sequence for SF3B1 (NM_012433.1,199-217).
gacgatgactattcatcat

SEQ ID NO: 46844 - DNA, 19 bp, Homo sapiens
  siRNA target sequence for SF3B1 (NM_012433.1,201-219).
cgatgactattcatcatct

SEQ ID NO: 46845 - DNA, 19 bp, Homo sapiens
  siRNA target sequence for SF3B1 (NM_012433.1,256-274).
gcccctgtggcattgctta

SEQ ID NO: 46846 - DNA, 19 bp, Homo sapiens
  siRNA target sequence for SF3B1 (NM_012433.1,260-278).
ctgtggcattgcttaatga

SEQ ID NO: 46847 - DNA, 19 bp, Homo sapiens
  siRNA target sequence for SF3B1 (NM_012433.1,264-282).
ggcattgcttaatgatata

SEQ ID NO: 46848 - DNA, 19 bp, Homo sapiens
  siRNA target sequence for SF3B1 (NM_012433.1,340-358).
gaccgggaagatgaataca

SEQ ID NO: 46849 - DNA, 19 bp, Homo sapiens
  siRNA target sequence for SF3B1 (NM_012433.1,363-381).
gcataggcggaccatgata

SEQ ID NO: 46850 - DNA, 19 bp, Homo sapiens
  siRNA target sequence for SF3B1 (NM_012433.1,364-382).
cataggcggaccatgataa

SEQ ID NO: 46851 - DNA, 19 bp, Homo sapiens
  siRNA target sequence for SF3B1 (NM_012433.1,389-407).
cagagcgtcttgatccttt

SEQ ID NO: 46852 - DNA, 19 bp, Homo sapiens
  siRNA target sequence for SF3B1 (NM_012433.1,393-411).
gcgtcttgatccttttgca

SEQ ID NO: 46853 - DNA, 19 bp, Homo sapiens
  siRNA target sequence for SF3B1 (NM_012433.1,449-467).
ggacttacatggatgtaat

SEQ ID NO: 46854 - DNA, 19 bp, Homo sapiens
  siRNA target sequence for SF3B1 (NM_012433.1,469-487).
cgagaacaacacttgacta

SEQ ID NO: 46855 - DNA, 19 bp, Homo sapiens
  siRNA target sequence for SF3B1 (NM_012433.1,526-544).
gctaaagctggagaactaa

SEQ ID NO: 46856 - DNA, 19 bp, Homo sapiens
  siRNA target sequence for SF3B1 (NM_012433.1,567-585).
gtcccagcctccatcaaaa

SEQ ID NO: 46857 - DNA, 19 bp, Homo sapiens
  siRNA target sequence for SF3B1 (NM_012433.1,623-641).
ctggtgccactcccaaaaa

SEQ ID NO: 46858 - DNA, 19 bp, Homo sapiens
  siRNA target sequence for SF3B1 (NM_012433.1,673-691).
gggcatactccttccttaa

SEQ ID NO: 46859 - DNA, 19 bp, Homo sapiens
  siRNA target sequence for SF3B1 (NM_012433.1,854-872).
cttccagtgctcgtaaaaa

SEQ ID NO: 46860 - DNA, 19 bp, Homo sapiens
  siRNA target sequence for SF3B1 (NM_012433.1,949-967).
gatcgaggtggagattcta

SEQ ID NO: 46861 - DNA, 19 bp, Homo sapiens
  siRNA target sequence for SF3B1 (NM_012433.1,1114-1132).
ccaggtcacataatgagta

SEQ ID NO: 46862 - DNA, 19 bp, Homo sapiens
  siRNA target sequence for SF3B1 (NM_012433.1,1115-1133).
caggtcacataatgagtat

SEQ ID NO: 46863 - DNA, 19 bp, Homo sapiens
  siRNA target sequence for SF3B1 (NM_012433.1,1117-1135).
ggtcacataatgagtatga

SEQ ID NO: 46864 - DNA, 19 bp, Homo sapiens
  siRNA target sequence for SF3B1 (NM_012433.1,1154-1172).
cttggcggtgggaaagaga

SEQ ID NO: 46865 - DNA, 19 bp, Homo sapiens
  siRNA target sequence for SF3B1 (NM_012433.1,1158-1176).
gcggtgggaaagagaaatt

SEQ ID NO: 46866 - DNA, 19 bp, Homo sapiens
  siRNA target sequence for SF3B1 (NM_012433.1,1217-1235).
ctatgttcccagaaggata

SEQ ID NO: 46867 - DNA, 19 bp, Homo sapiens
  siRNA target sequence for SF3B1 (NM_012433.1,1253-1271).
cagctggttatgttcctat

SEQ ID NO: 46868 - DNA, 19 bp, Homo sapiens
  siRNA target sequence for SF3B1 (NM_012433.1,1258-1276).
ggttatgttcctattcgaa

SEQ ID NO: 46869 - DNA, 19 bp, Homo sapiens
  siRNA target sequence for SF3B1 (NM_012433.1,1351-1369).
cgaactatgaaaagtgtta

SEQ ID NO: 46870 - DNA, 19 bp, Homo sapiens
  siRNA target sequence for SF3B1 (NM_012433.1,1405-1423).
cctgatgatattcaatact

SEQ ID NO: 46871 - DNA, 19 bp, Homo sapiens
  siRNA target sequence for SF3B1 (NM_012433.1,1539-1557).
ggctgcattgcgtcagatt

SEQ ID NO: 46872 - DNA, 19 bp, Homo sapiens
  siRNA target sequence for SF3B1 (NM_012433.1,1544-1562).
cattgcgtcagattactga

SEQ ID NO: 46873 - DNA, 19 bp, Homo sapiens
  siRNA target sequence for SF3B1 (NM_012433.1,1548-1566).
gcgtcagattactgataaa

SEQ ID NO: 46874 - DNA, 19 bp, Homo sapiens
  siRNA target sequence for SF3B1 (NM_012433.1,1579-1597).
ggagctggtcctttgttta

SEQ ID NO: 46875 - DNA, 19 bp, Homo sapiens
  siRNA target sequence for SF3B1 (NM_012433.1,1635-1653).
ggatcaagagcgtcattta

SEQ ID NO: 46876 - DNA, 19 bp, Homo sapiens
  siRNA target sequence for SF3B1 (NM_012433.1,1644-1662).
gcgtcatttacttgtgaaa

SEQ ID NO: 46877 - DNA, 19 bp, Homo sapiens
  siRNA target sequence for SF3B1 (NM_012433.1,1646-1664).
gtcatttacttgtgaaagt

SEQ ID NO: 46878 - DNA, 19 bp, Homo sapiens
  siRNA target sequence for SF3B1 (NM_012433.1,1659-1677).
gaaagttattgataggata

SEQ ID NO: 46879 - DNA, 19 bp, Homo sapiens
  siRNA target sequence for SF3B1 (NM_012433.1,1702-1720).
cgtccatatgtgcataaga

SEQ ID NO: 46880 - DNA, 19 bp, Homo sapiens
  siRNA target sequence for SF3B1 (NM_012433.1,1703-1721).
gtccatatgtgcataagat

SEQ ID NO: 46881 - DNA, 19 bp, Homo sapiens
  siRNA target sequence for SF3B1 (NM_012433.1,1719-1737).
gatcctcgtggtcattgaa

SEQ ID NO: 46882 - DNA, 19 bp, Homo sapiens
  siRNA target sequence for SF3B1 (NM_012433.1,1729-1747).
gtcattgaaccgctattga

SEQ ID NO: 46883 - DNA, 19 bp, Homo sapiens
  siRNA target sequence for SF3B1 (NM_012433.1,1731-1749).
cattgaaccgctattgatt

SEQ ID NO: 46884 - DNA, 19 bp, Homo sapiens
  siRNA target sequence for SF3B1 (NM_012433.1,1739-1757).
cgctattgattgatgaaga

SEQ ID NO: 46885 - DNA, 19 bp, Homo sapiens
  siRNA target sequence for SF3B1 (NM_012433.1,1746-1764).
gattgatgaagattactat

SEQ ID NO: 46886 - DNA, 19 bp, Homo sapiens
  siRNA target sequence for SF3B1 (NM_012433.1,1813-1831).
ggtctggctactatgatct

SEQ ID NO: 46887 - DNA, 19 bp, Homo sapiens
  siRNA target sequence for SF3B1 (NM_012433.1,1816-1834).
ctggctactatgatctcta

SEQ ID NO: 46888 - DNA, 19 bp, Homo sapiens
  siRNA target sequence for SF3B1 (NM_012433.1,1832-1850).
ctaccatgagacctgatat

SEQ ID NO: 46889 - DNA, 19 bp, Homo sapiens
  siRNA target sequence for SF3B1 (NM_012433.1,1835-1853).
ccatgagacctgatataga

SEQ ID NO: 46890 - DNA, 19 bp, Homo sapiens
  siRNA target sequence for SF3B1 (NM_012433.1,1836-1854).
catgagacctgatatagat

SEQ ID NO: 46891 - DNA, 19 bp, Homo sapiens
  siRNA target sequence for SF3B1 (NM_012433.1,1864-1882).
gagtatgtccgtaacacaa

SEQ ID NO: 46892 - DNA, 19 bp, Homo sapiens
  siRNA target sequence for SF3B1 (NM_012433.1,1878-1896).
cacaacagctagagctttt

SEQ ID NO: 46893 - DNA, 19 bp, Homo sapiens
  siRNA target sequence for SF3B1 (NM_012433.1,1914-1932).
cctgggcattccttcttta

SEQ ID NO: 46894 - DNA, 19 bp, Homo sapiens
  siRNA target sequence for SF3B1 (NM_012433.1,1978-1996).
gcgagacacactggtatta

SEQ ID NO: 46895 - DNA, 19 bp, Homo sapiens
  siRNA target sequence for SF3B1 (NM_012433.1,1979-1997).
cgagacacactggtattaa

SEQ ID NO: 46896 - DNA, 19 bp, Homo sapiens
  siRNA target sequence for SF3B1 (NM_012433.1,1982-2000).
gacacactggtattaagat

SEQ ID NO: 46897 - DNA, 19 bp, Homo sapiens
  siRNA target sequence for SF3B1 (NM_012433.1,1986-2004).
cactggtattaagattgta

SEQ ID NO: 46898 - DNA, 19 bp, Homo sapiens
  siRNA target sequence for SF3B1 (NM_012433.1,2005-2023).
caacagatagctattctta

SEQ ID NO: 46899 - DNA, 19 bp, Homo sapiens
  siRNA target sequence for SF3B1 (NM_012433.1,2037-2055).
cttgccacatcttagaagt

SEQ ID NO: 46900 - DNA, 19 bp, Homo sapiens
  siRNA target sequence for SF3B1 (NM_012433.1,2042-2060).
cacatcttagaagtttagt

SEQ ID NO: 46901 - DNA, 19 bp, Homo sapiens
  siRNA target sequence for SF3B1 (NM_012433.1,2054-2072).
gtttagttgaaatcattga

SEQ ID NO: 46902 - DNA, 19 bp, Homo sapiens
  siRNA target sequence for SF3B1 (NM_012433.1,2143-2161).
gcagcaactccttatggta

SEQ ID NO: 46903 - DNA, 19 bp, Homo sapiens
  siRNA target sequence for SF3B1 (NM_012433.1,2152-2170).
ccttatggtatcgaatctt

SEQ ID NO: 46904 - DNA, 19 bp, Homo sapiens
  siRNA target sequence for SF3B1 (NM_012433.1,2153-2171).
cttatggtatcgaatcttt

SEQ ID NO: 46905 - DNA, 19 bp, Homo sapiens
  siRNA target sequence for SF3B1 (NM_012433.1,2399-2417).
gtgtagaagcaaactacat

SEQ ID NO: 46906 - DNA, 19 bp, Homo sapiens
  siRNA target sequence for SF3B1 (NM_012433.1,2404-2422).
gaagcaaactacattaaaa

SEQ ID NO: 46907 - DNA, 19 bp, Homo sapiens
  siRNA target sequence for SF3B1 (NM_012433.1,2461-2479).
cacaggatggctttggata

SEQ ID NO: 46908 - DNA, 19 bp, Homo sapiens
  siRNA target sequence for SF3B1 (NM_012433.1,2469-2487).
ggctttggatagaagaaat

SEQ ID NO: 46909 - DNA, 19 bp, Homo sapiens
  siRNA target sequence for SF3B1 (NM_012433.1,2483-2501).
gaaattaccgacagttagt

SEQ ID NO: 46910 - DNA, 19 bp, Homo sapiens
  siRNA target sequence for SF3B1 (NM_012433.1,2490-2508).
ccgacagttagttgatact

SEQ ID NO: 46911 - DNA, 19 bp, Homo sapiens
  siRNA target sequence for SF3B1 (NM_012433.1,2491-2509).
cgacagttagttgatacta

SEQ ID NO: 46912 - DNA, 19 bp, Homo sapiens
  siRNA target sequence for SF3B1 (NM_012433.1,2555-2573).
ggattgtggatgatctgaa

SEQ ID NO: 46913 - DNA, 19 bp, Homo sapiens
  siRNA target sequence for SF3B1 (NM_012433.1,2581-2599).
gccgaacagtacagaaaaa

SEQ ID NO: 46914 - DNA, 19 bp, Homo sapiens
  siRNA target sequence for SF3B1 (NM_012433.1,2582-2600).
ccgaacagtacagaaaaat

SEQ ID NO: 46915 - DNA, 19 bp, Homo sapiens
  siRNA target sequence for SF3B1 (NM_012433.1,2639-2657).
gagcagcagatattgatca

SEQ ID NO: 46916 - DNA, 19 bp, Homo sapiens
  siRNA target sequence for SF3B1 (NM_012433.1,2674-2692).
ctgattgatggtattcttt

SEQ ID NO: 46917 - DNA, 19 bp, Homo sapiens
  siRNA target sequence for SF3B1 (NM_012433.1,2711-2729).
ctacagaggactcagtaat

SEQ ID NO: 46918 - DNA, 19 bp, Homo sapiens
  siRNA target sequence for SF3B1 (NM_012433.1,2765-2783).
gcaaacgagtcaaaccata

SEQ ID NO: 46919 - DNA, 19 bp, Homo sapiens
  siRNA target sequence for SF3B1 (NM_012433.1,2811-2829).
gtggcgtttaaataacaaa

SEQ ID NO: 46920 - DNA, 19 bp, Homo sapiens
  siRNA target sequence for SF3B1 (NM_012433.1,2814-2832).
gcgtttaaataacaaatct

SEQ ID NO: 46921 - DNA, 19 bp, Homo sapiens
  siRNA target sequence for SF3B1 (NM_012433.1,2914-2932).
ggacacttgggtgttgtat

SEQ ID NO: 46922 - DNA, 19 bp, Homo sapiens
  siRNA target sequence for SF3B1 (NM_012433.1,2915-2933).
gacacttgggtgttgtatt

SEQ ID NO: 46923 - DNA, 19 bp, Homo sapiens
  siRNA target sequence for SF3B1 (NM_012433.1,2926-2944).
gttgtattgtatgagtatt

SEQ ID NO: 46924 - DNA, 19 bp, Homo sapiens
  siRNA target sequence for SF3B1 (NM_012433.1,2987-3005).
cactgaaggccattgtaaa

SEQ ID NO: 46925 - DNA, 19 bp, Homo sapiens
  siRNA target sequence for SF3B1 (NM_012433.1,3007-3025).
gtcataggtatgcataaga

SEQ ID NO: 46926 - DNA, 19 bp, Homo sapiens
  siRNA target sequence for SF3B1 (NM_012433.1,3024-3042).
gatgactccaccaattaaa

SEQ ID NO: 46927 - DNA, 19 bp, Homo sapiens
  siRNA target sequence for SF3B1 (NM_012433.1,3056-3074).
gactcacccccatcttaaa

SEQ ID NO: 46928 - DNA, 19 bp, Homo sapiens
  siRNA target sequence for SF3B1 (NM_012433.1,3128-3146).
ctgacaggggagctgaata

SEQ ID NO: 46929 - DNA, 19 bp, Homo sapiens
  siRNA target sequence for SF3B1 (NM_012433.1,3204-3222).
ccacaaaaaggctattcgt

SEQ ID NO: 46930 - DNA, 19 bp, Homo sapiens
  siRNA target sequence for SF3B1 (NM_012433.1,3205-3223).
cacaaaaaggctattcgta

SEQ ID NO: 46931 - DNA, 19 bp, Homo sapiens
  siRNA target sequence for SF3B1 (NM_012433.1,3224-3242).
gagccacagtcaacacatt

SEQ ID NO: 46932 - DNA, 19 bp, Homo sapiens
  siRNA target sequence for SF3B1 (NM_012433.1,3258-3276).
ggccattggccctcatgat

SEQ ID NO: 46933 - DNA, 19 bp, Homo sapiens
  siRNA target sequence for SF3B1 (NM_012433.1,3335-3353).
ccactgtagcaatagctat

SEQ ID NO: 46934 - DNA, 19 bp, Homo sapiens
  siRNA target sequence for SF3B1 (NM_012433.1,3338-3356).
ctgtagcaatagctattgt

SEQ ID NO: 46935 - DNA, 19 bp, Homo sapiens
  siRNA target sequence for SF3B1 (NM_012433.1,3365-3383).
catgttcaccctttacagt

SEQ ID NO: 46936 - DNA, 19 bp, Homo sapiens
  siRNA target sequence for SF3B1 (NM_012433.1,3382-3400).
gtactccctgccttaatga

SEQ ID NO: 46937 - DNA, 19 bp, Homo sapiens
  siRNA target sequence for SF3B1 (NM_012433.1,3503-3521).
ccgtaacaccgttacttga

SEQ ID NO: 46938 - DNA, 19 bp, Homo sapiens
  siRNA target sequence for SF3B1 (NM_012433.1,3504-3522).
cgtaacaccgttacttgaa

SEQ ID NO: 46939 - DNA, 19 bp, Homo sapiens
  siRNA target sequence for SF3B1 (NM_012433.1,3585-3603).
gtcacttggggtttatgga

SEQ ID NO: 46940 - DNA, 19 bp, Homo sapiens
  siRNA target sequence for SF3B1 (NM_012433.1,3587-3605).
cacttggggtttatggatt

SEQ ID NO: 46941 - DNA, 19 bp, Homo sapiens
  siRNA target sequence for SF3B1 (NM_012433.1,3592-3610).
ggggtttatggatttggtt

SEQ ID NO: 46942 - DNA, 19 bp, Homo sapiens
  siRNA target sequence for SF3B1 (NM_012433.1,3613-3631).
gaagattcgctgaatcact

SEQ ID NO: 46943 - DNA, 19 bp, Homo sapiens
  siRNA target sequence for SF3B1 (NM_012433.1,3620-3638).
cgctgaatcacttgttgaa

SEQ ID NO: 46944 - DNA, 19 bp, Homo sapiens
  siRNA target sequence for SF3B1 (NM_012433.1,3624-3642).
gaatcacttgttgaactat

SEQ ID NO: 46945 - DNA, 19 bp, Homo sapiens
  siRNA target sequence for SF3B1 (NM_012433.1,3639-3657).
ctatgtatggcccaatgta

SEQ ID NO: 46946 - DNA, 19 bp, Homo sapiens
  siRNA target sequence for SF3B1 (NM_012433.1,3661-3679).
gagacatctcctcatgtaa

SEQ ID NO: 46947 - DNA, 19 bp, Homo sapiens
  siRNA target sequence for SF3B1 (NM_012433.1,3665-3683).
catctcctcatgtaattca

SEQ ID NO: 46948 - DNA, 19 bp, Homo sapiens
  siRNA target sequence for SF3B1 (NM_012433.1,3708-3726).
cctgagagttgctattgga

SEQ ID NO: 46949 - DNA, 19 bp, Homo sapiens
  siRNA target sequence for SF3B1 (NM_012433.1,3718-3736).
gctattggaccatgtagaa

SEQ ID NO: 46950 - DNA, 19 bp, Homo sapiens
  siRNA target sequence for SF3B1 (NM_012433.1,3719-3737).
ctattggaccatgtagaat

SEQ ID NO: 46951 - DNA, 19 bp, Homo sapiens
  siRNA target sequence for SF3B1 (NM_012433.1,3734-3752).
gaatgttgcaatattgttt

SEQ ID NO: 46952 - DNA, 19 bp, Homo sapiens
  siRNA target sequence for SF3B1 (NM_012433.1,3749-3767).
gtttacagggtctgtttca

SEQ ID NO: 46953 - DNA, 19 bp, Homo sapiens
  siRNA target sequence for SF3B1 (NM_012433.1,3844-3862).
gcacattacccaagaatct

SEQ ID NO: 46954 - DNA, 19 bp, Homo sapiens
  siRNA target sequence for SF3B1 (NM_012433.1,3847-3865).
cattacccaagaatctaca

SEQ ID NO: 46955 - DNA, 19 bp, Homo sapiens
  siRNA target sequence for SF3B1 (NM_012433.1,3857-3875).
gaatctacaacgatgataa

SEQ ID NO: 46956 - DNA, 19 bp, Homo sapiens
  siRNA target sequence for SF3B1 (NM_012433.1,3868-3886).
gatgataagaacacctata

SEQ ID NO: 46957 - DNA, 19 bp, Homo sapiens
  siRNA target sequence for SF3B1 (NM_012433.1,3876-3894).
gaacacctatattcgttat

SEQ ID NO: 46958 - DNA, 19 bp, Homo sapiens
  siRNA target sequence for SF3B1 (NM_012433.1,3879-3897).
cacctatattcgttatgaa

SEQ ID NO: 46959 - DNA, 19 bp, Homo sapiens
  siRNA target sequence for SF3B1 (NM_012433.1,3889-3907).
cgttatgaacttgactata

SEQ ID NO: 46960 - DNA, 19 bp, Homo sapiens
  siRNA target sequence for SF3B1 (NM_012433.1,3890-3908).
gttatgaacttgactatat

SEQ ID NO: 46961 - DNA, 19 bp, Homo sapiens
  siRNA target sequence for SF3B1 (NM_012433.1,3895-3913).
gaacttgactatatcttat

SEQ ID NO: 46962 - DNA, 19 bp, Homo sapiens
  siRNA target sequence for SF3B4 (NM_005850.3,251-269).
ctgactatgccattaagat

SEQ ID NO: 46963 - DNA, 19 bp, Homo sapiens
  siRNA target sequence for SF3B4 (NM_005850.3,253-271).
gactatgccattaagatca

SEQ ID NO: 46964 - DNA, 19 bp, Homo sapiens
  siRNA target sequence for SF3B4 (NM_005850.3,297-315).
gccaatacgggtgaacaaa

SEQ ID NO: 46965 - DNA, 19 bp, Homo sapiens
  siRNA target sequence for SF3B4 (NM_005850.3,316-334).
gcatcagctcacaacaaaa

SEQ ID NO: 46966 - DNA, 19 bp, Homo sapiens
  siRNA target sequence for SF3B4 (NM_005850.3,414-432).
cgcctttggggtcatctta

SEQ ID NO: 46967 - DNA, 19 bp, Homo sapiens
  siRNA target sequence for SF3B4 (NM_005850.3,416-434).
cctttggggtcatcttaca

SEQ ID NO: 46968 - DNA, 19 bp, Homo sapiens
  siRNA target sequence for SF3B4 (NM_005850.3,417-435).
ctttggggtcatcttacaa

SEQ ID NO: 46969 - DNA, 19 bp, Homo sapiens
  siRNA target sequence for SF3B4 (NM_005850.3,429-447).
cttacaaacccccaaaatt

SEQ ID NO: 46970 - DNA, 19 bp, Homo sapiens
  siRNA target sequence for SF3B4 (NM_005850.3,464-482).
caggcaactccaaaggtta

SEQ ID NO: 46971 - DNA, 19 bp, Homo sapiens
  siRNA target sequence for SF3B4 (NM_005850.3,479-497).
gttatgcctttattaattt

SEQ ID NO: 46972 - DNA, 19 bp, Homo sapiens
  siRNA target sequence for SF3B4 (NM_005850.3,512-530).
cttcggatgcagcaattga

SEQ ID NO: 46973 - DNA, 19 bp, Homo sapiens
  siRNA target sequence for SF3B4 (NM_005850.3,559-577).
cgtcctatcaccgtatctt

SEQ ID NO: 46974 - DNA, 19 bp, Homo sapiens
  siRNA target sequence for SF3B4 (NM_005850.3,560-578).
gtcctatcaccgtatctta

SEQ ID NO: 46975 - DNA, 19 bp, Homo sapiens
  siRNA target sequence for SF3B4 (NM_005850.3,1151-1169).
ctatgcctccgcatggtat

SEQ ID NO: 46976 - DNA, 19 bp, Homo sapiens
  siRNA target sequence for SFRS1 (NM_006924.3,93-111).
gtcgggaggtggtgtgatt

SEQ ID NO: 46977 - DNA, 19 bp, Homo sapiens
  siRNA target sequence for SFRS1 (NM_006924.3,141-159).
catctacgtgggtaactta

SEQ ID NO: 46978 - DNA, 19 bp, Homo sapiens
  siRNA target sequence for SFRS1 (NM_006924.3,307-325).
ggtcgcgacggctatgatt

SEQ ID NO: 46979 - DNA, 19 bp, Homo sapiens
  siRNA target sequence for SFRS1 (NM_006924.3,308-326).
gtcgcgacggctatgatta

SEQ ID NO: 46980 - DNA, 19 bp, Homo sapiens
  siRNA target sequence for SFRS1 (NM_006924.3,311-329).
gcgacggctatgattacga

SEQ ID NO: 46981 - DNA, 19 bp, Homo sapiens
  siRNA target sequence for SFRS1 (NM_006924.3,513-531).
gcgtgaagcaggtgatgta

SEQ ID NO: 46982 - DNA, 19 bp, Homo sapiens
  siRNA target sequence for SFRS1 (NM_006924.3,517-535).
gaagcaggtgatgtatgtt

SEQ ID NO: 46983 - DNA, 19 bp, Homo sapiens
  siRNA target sequence for SFRS1 (NM_006924.3,570-588).
ggagtttgtacggaaagaa

SEQ ID NO: 46984 - DNA, 19 bp, Homo sapiens
  siRNA target sequence for SFRS1 (NM_006924.3,577-595).
gtacggaaagaagatatga

SEQ ID NO: 46985 - DNA, 19 bp, Homo sapiens
  siRNA target sequence for SFRS1 (NM_006924.3,594-612).
gacctatgcagttcgaaaa

SEQ ID NO: 46986 - DNA, 19 bp, Homo sapiens
  siRNA target sequence for SFRS1 (NM_006924.3,596-614).
cctatgcagttcgaaaact

SEQ ID NO: 46987 - DNA, 19 bp, Homo sapiens
  siRNA target sequence for SFRS1 (NM_006924.3,602-620).
cagttcgaaaactggataa

SEQ ID NO: 46988 - DNA, 19 bp, Homo sapiens
  siRNA target sequence for SFRS1 (NM_006924.3,604-622).
gttcgaaaactggataaca

SEQ ID NO: 46989 - DNA, 19 bp, Homo sapiens
  siRNA target sequence for SFRS1 (NM_006924.3,607-625).
cgaaaactggataacacta

SEQ ID NO: 46990 - DNA, 19 bp, Homo sapiens
  siRNA target sequence for SFRS1 (NM_006924.3,608-626).
gaaaactggataacactaa

SEQ ID NO: 46991 - DNA, 19 bp, Homo sapiens
  siRNA target sequence for SFRS1 (NM_006924.3,653-671).
cctacatccgggttaaagt

SEQ ID NO: 46992 - DNA, 19 bp, Homo sapiens
  siRNA target sequence for SFRS1 (NM_006924.3,654-672).
ctacatccgggttaaagtt

SEQ ID NO: 46993 - DNA, 19 bp, Homo sapiens
  siRNA target sequence for SFRS1 (NM_006924.3,681-699).
cagaagtccaagttatgga

SEQ ID NO: 46994 - DNA, 19 bp, Homo sapiens
  siRNA target sequence for SFRS10 (NM_004593.1,249-267).
ccaggcgttccagatcaaa

SEQ ID NO: 46995 - DNA, 19 bp, Homo sapiens
  siRNA target sequence for SFRS10 (NM_004593.1,268-286).
gtccaggtcccgatctgaa

SEQ ID NO: 46996 - DNA, 19 bp, Homo sapiens
  siRNA target sequence for SFRS10 (NM_004593.1,271-289).
caggtcccgatctgaatct

SEQ ID NO: 46997 - DNA, 19 bp, Homo sapiens
  siRNA target sequence for SFRS10 (NM_004593.1,372-390).
ggtcttacagtcgagatta

SEQ ID NO: 46998 - DNA, 19 bp, Homo sapiens
  siRNA target sequence for SFRS10 (NM_004593.1,373-391).
gtcttacagtcgagattat

SEQ ID NO: 46999 - DNA, 19 bp, Homo sapiens
  siRNA target sequence for SFRS10 (NM_004593.1,516-534).
gagatctaagagaagtgtt

SEQ ID NO: 47000 - DNA, 19 bp, Homo sapiens
  siRNA target sequence for SFRS10 (NM_004593.1,521-539).
ctaagagaagtgttctcta

SEQ ID NO: 47001 - DNA, 19 bp, Homo sapiens
  siRNA target sequence for SFRS10 (NM_004593.1,679-697).
gcgtaggatcagagttgat

SEQ ID NO: 47002 - DNA, 19 bp, Homo sapiens
  siRNA target sequence for SFRS10 (NM_004593.1,680-698).
cgtaggatcagagttgatt

SEQ ID NO: 47003 - DNA, 19 bp, Homo sapiens
  siRNA target sequence for SFRS10 (NM_004593.1,685-703).
gatcagagttgatttctct

SEQ ID NO: 47004 - DNA, 19 bp, Homo sapiens
  siRNA target sequence for SFRS10 (NM_004593.1,692-710).
gttgatttctctataacaa

SEQ ID NO: 47005 - DNA, 19 bp, Homo sapiens
  siRNA target sequence for SFRS10 (NM_004593.1,742-760).
catggggagacctacctat

SEQ ID NO: 47006 - DNA, 19 bp, Homo sapiens
  siRNA target sequence for SFRS10 (NM_004593.1,768-786).
ctcgccgtcgggattacta

SEQ ID NO: 47007 - DNA, 19 bp, Homo sapiens
  siRNA target sequence for SFRS10 (NM_004593.1,771-789).
gccgtcgggattactatga

SEQ ID NO: 47008 - DNA, 19 bp, Homo sapiens
  siRNA target sequence for SFRS10 (NM_004593.1,773-791).
cgtcgggattactatgaca

SEQ ID NO: 47009 - DNA, 19 bp, Homo sapiens
  siRNA target sequence for SFRS10 (NM_004593.1,812-830).
gatgatcgggactactata

SEQ ID NO: 47010 - DNA, 19 bp, Homo sapiens
  siRNA target sequence for SFRS10 (NM_004593.1,815-833).
gatcgggactactatagca

SEQ ID NO: 47011 - DNA, 19 bp, Homo sapiens
  siRNA target sequence for SFRS10 (NM_004593.1,826-844).
ctatagcagatcatacaga

SEQ ID NO: 47012 - DNA, 19 bp, Homo sapiens
  siRNA target sequence for SFRS10 (NM_004593.1,880-898).
ccaagacagggatcagatt

SEQ ID NO: 47013 - DNA, 19 bp, Homo sapiens
  siRNA target sequence for SFRS10 (NM_004593.1,951-969).
gttccagatctcgatcata

SEQ ID NO: 47014 - DNA, 19 bp, Homo sapiens
  siRNA target sequence for SFRS10 (NM_004593.1,955-973).
cagatctcgatcatactca

SEQ ID NO: 47015 - DNA, 19 bp, Homo sapiens
  siRNA target sequence for SFRS11 (NM_004768.2,223-241).
ggtaatccaggtgactaat

SEQ ID NO: 47016 - DNA, 19 bp, Homo sapiens
  siRNA target sequence for SFRS11 (NM_004768.2,274-292).
gactctcttcggtttccta

SEQ ID NO: 47017 - DNA, 19 bp, Homo sapiens
  siRNA target sequence for SFRS11 (NM_004768.2,398-416).
gcacagcatctgacaaaca

SEQ ID NO: 47018 - DNA, 19 bp, Homo sapiens
  siRNA target sequence for SFRS11 (NM_004768.2,409-427).
gacaaacactgtattcgtt

SEQ ID NO: 47019 - DNA, 19 bp, Homo sapiens
  siRNA target sequence for SFRS11 (NM_004768.2,424-442).
cgttgacagagctttgata

SEQ ID NO: 47020 - DNA, 19 bp, Homo sapiens
  siRNA target sequence for SFRS11 (NM_004768.2,496-514).
gttggcaccagctaatgca

SEQ ID NO: 47021 - DNA, 19 bp, Homo sapiens
  siRNA target sequence for SFRS11 (NM_004768.2,598-616).
gggggctcctactcttgat

SEQ ID NO: 47022 - DNA, 19 bp, Homo sapiens
  siRNA target sequence for SFRS11 (NM_004768.2,677-695).
gatcagttgctgaagctta

SEQ ID NO: 47023 - DNA, 19 bp, Homo sapiens
  siRNA target sequence for SFRS11 (NM_004768.2,739-757).
cgtttcaccaagtctgaaa

SEQ ID NO: 47024 - DNA, 19 bp, Homo sapiens
  siRNA target sequence for SFRS11 (NM_004768.2,760-778).
ggatacctctagtaaagaa

SEQ ID NO: 47025 - DNA, 19 bp, Homo sapiens
  siRNA target sequence for SFRS11 (NM_004768.2,806-824).
gaagcacagtccctaattt

SEQ ID NO: 47026 - DNA, 19 bp, Homo sapiens
  siRNA target sequence for SFRS11 (NM_004768.2,828-846).
ctgctatagaaccagataa

SEQ ID NO: 47027 - DNA, 19 bp, Homo sapiens
  siRNA target sequence for SFRS11 (NM_004768.2,943-961).
gagacggcggtcacattct

SEQ ID NO: 47028 - DNA, 19 bp, Homo sapiens
  siRNA target sequence for SFRS11 (NM_004768.2,945-963).
gacggcggtcacattctaa

SEQ ID NO: 47029 - DNA, 19 bp, Homo sapiens
  siRNA target sequence for SFRS11 (NM_004768.2,947-965).
cggcggtcacattctaagt

SEQ ID NO: 47030 - DNA, 19 bp, Homo sapiens
  siRNA target sequence for SFRS11 (NM_004768.2,949-967).
gcggtcacattctaagtct

SEQ ID NO: 47031 - DNA, 19 bp, Homo sapiens
  siRNA target sequence for SFRS11 (NM_004768.2,950-968).
cggtcacattctaagtcta

SEQ ID NO: 47032 - DNA, 19 bp, Homo sapiens
  siRNA target sequence for SFRS11 (NM_004768.2,970-988).
gagtcggcgacgatccaaa

SEQ ID NO: 47033 - DNA, 19 bp, Homo sapiens
  siRNA target sequence for SFRS11 (NM_004768.2,1117-1135).
cacagccagacgttctaga

SEQ ID NO: 47034 - DNA, 19 bp, Homo sapiens
  siRNA target sequence for SFRS11 (NM_004768.2,1277-1295).
gaaagaagtagggatgaaa

SEQ ID NO: 47035 - DNA, 19 bp, Homo sapiens
  siRNA target sequence for SFRS11 (NM_004768.2,1301-1319).
cgatcaacaagcaagaaga

SEQ ID NO: 47036 - DNA, 19 bp, Homo sapiens
  siRNA target sequence for SFRS11 (NM_004768.2,1501-1519).
gggaactggtgattcacta

SEQ ID NO: 47037 - DNA, 19 bp, Homo sapiens
  siRNA target sequence for SFRS11 (NM_004768.2,1502-1520).
ggaactggtgattcactaa

SEQ ID NO: 47038 - DNA, 19 bp, Homo sapiens
  siRNA target sequence for SFRS11 (NM_004768.2,1506-1524).
ctggtgattcactaagaga

SEQ ID NO: 47039 - DNA, 19 bp, Homo sapiens
  siRNA target sequence for SFRS11 (NM_004768.2,1508-1526).
ggtgattcactaagagaat

SEQ ID NO: 47040 - DNA, 19 bp, Homo sapiens
  siRNA target sequence for SFRS11 (NM_004768.2,1517-1535).
ctaagagaatccaaagtga

SEQ ID NO: 47041 - DNA, 19 bp, Homo sapiens
  siRNA target sequence for SFRS11 (NM_004768.2,1534-1552).
gaatggggatgatcatcat

SEQ ID NO: 47042 - DNA, 19 bp, Homo sapiens
  siRNA target sequence for SFRS11 (NM_004768.2,1539-1557).
gggatgatcatcatgaaga

SEQ ID NO: 47043 - DNA, 19 bp, Homo sapiens
  siRNA target sequence for SFRS2IP (NM_004719.1,1228-1246).
gaggtctacacgtaacaca

SEQ ID NO: 47044 - DNA, 19 bp, Homo sapiens
  siRNA target sequence for SFRS2IP (NM_004719.1,1304-1322).
gatgccccaggtaacagta

SEQ ID NO: 47045 - DNA, 19 bp, Homo sapiens
  siRNA target sequence for SFRS2IP (NM_004719.1,1320-1338).
gtaatccatctttaagtgt

SEQ ID NO: 47046 - DNA, 19 bp, Homo sapiens
  siRNA target sequence for SFRS2IP (NM_004719.1,1445-1463).
gtagctgcccctgaaaaat

SEQ ID NO: 47047 - DNA, 19 bp, Homo sapiens
  siRNA target sequence for SFRS2IP (NM_004719.1,1464-1482).
catcttccaatgattcagt

SEQ ID NO: 47048 - DNA, 19 bp, Homo sapiens
  siRNA target sequence for SFRS2IP (NM_004719.1,1538-1556).
ccagatgtagacagtagta

SEQ ID NO: 47049 - DNA, 19 bp, Homo sapiens
  siRNA target sequence for SFRS2IP (NM_004719.1,1539-1557).
cagatgtagacagtagtaa

SEQ ID NO: 47050 - DNA, 19 bp, Homo sapiens
  siRNA target sequence for SFRS2IP (NM_004719.1,1547-1565).
gacagtagtaacatttgta

SEQ ID NO: 47051 - DNA, 19 bp, Homo sapiens
  siRNA target sequence for SFRS2IP (NM_004719.1,1566-1584).
ctgtgcagactcatgtaga

SEQ ID NO: 47052 - DNA, 19 bp, Homo sapiens
  siRNA target sequence for SFRS2IP (NM_004719.1,1568-1586).
gtgcagactcatgtagaaa

SEQ ID NO: 47053 - DNA, 19 bp, Homo sapiens
  siRNA target sequence for SFRS2IP (NM_004719.1,1591-1609).
gtctgctaattgcttgaaa

SEQ ID NO: 47054 - DNA, 19 bp, Homo sapiens
  siRNA target sequence for SFRS2IP (NM_004719.1,1693-1711).
gtcttgtgctcaagatctt

SEQ ID NO: 47055 - DNA, 19 bp, Homo sapiens
  siRNA target sequence for SFRS2IP (NM_004719.1,1739-1757).
gttaaaaaactcgagaata

SEQ ID NO: 47056 - DNA, 19 bp, Homo sapiens
  siRNA target sequence for SFRS2IP (NM_004719.1,1758-1776).
caggtatagaggctaatgt

SEQ ID NO: 47057 - DNA, 19 bp, Homo sapiens
  siRNA target sequence for SFRS2IP (NM_004719.1,1760-1778).
ggtatagaggctaatgttt

SEQ ID NO: 47058 - DNA, 19 bp, Homo sapiens
  siRNA target sequence for SFRS2IP (NM_004719.1,1761-1779).
gtatagaggctaatgtttt

SEQ ID NO: 47059 - DNA, 19 bp, Homo sapiens
  siRNA target sequence for SFRS2IP (NM_004719.1,1820-1838).
ggaggtgatccattggaaa

SEQ ID NO: 47060 - DNA, 19 bp, Homo sapiens
  siRNA target sequence for SFRS2IP (NM_004719.1,1821-1839).
gaggtgatccattggaaaa

SEQ ID NO: 47061 - DNA, 19 bp, Homo sapiens
  siRNA target sequence for SFRS2IP (NM_004719.1,1846-1864).
ccagatatctggactttca

SEQ ID NO: 47062 - DNA, 19 bp, Homo sapiens
  siRNA target sequence for SFRS2IP (NM_004719.1,1945-1963).
gtaccaacctgtatcttgt

SEQ ID NO: 47063 - DNA, 19 bp, Homo sapiens
  siRNA target sequence for SFRS2IP (NM_004719.1,1965-1983).
ccctaagtgacttatctga

SEQ ID NO: 47064 - DNA, 19 bp, Homo sapiens
  siRNA target sequence for SFRS2IP (NM_004719.1,1971-1989).
gtgacttatctgagaatgt

SEQ ID NO: 47065 - DNA, 19 bp, Homo sapiens
  siRNA target sequence for SFRS2IP (NM_004719.1,1993-2011).
gtcagtggttaatgaagaa

SEQ ID NO: 47066 - DNA, 19 bp, Homo sapiens
  siRNA target sequence for SFRS2IP (NM_004719.1,2019-2037).
cagagagttccctagtaga

SEQ ID NO: 47067 - DNA, 19 bp, Homo sapiens
  siRNA target sequence for SFRS2IP (NM_004719.1,2021-2039).
gagagttccctagtagaaa

SEQ ID NO: 47068 - DNA, 19 bp, Homo sapiens
  siRNA target sequence for SFRS2IP (NM_004719.1,2023-2041).
gagttccctagtagaaatt

SEQ ID NO: 47069 - DNA, 19 bp, Homo sapiens
  siRNA target sequence for SFRS2IP (NM_004719.1,2048-2066).
cataaagattttacactaa

SEQ ID NO: 47070 - DNA, 19 bp, Homo sapiens
  siRNA target sequence for SFRS2IP (NM_004719.1,2089-2107).
ccccaagttagaatcttct

SEQ ID NO: 47071 - DNA, 19 bp, Homo sapiens
  siRNA target sequence for SFRS2IP (NM_004719.1,2129-2147).
gtggacagacaatctgtta

SEQ ID NO: 47072 - DNA, 19 bp, Homo sapiens
  siRNA target sequence for SFRS2IP (NM_004719.1,2132-2150).
gacagacaatctgttaaga

SEQ ID NO: 47073 - DNA, 19 bp, Homo sapiens
  siRNA target sequence for SFRS2IP (NM_004719.1,2151-2169).
gcccagaggttcaattgct

SEQ ID NO: 47074 - DNA, 19 bp, Homo sapiens
  siRNA target sequence for SFRS2IP (NM_004719.1,2167-2185).
gcttgggcatgttgaaact

SEQ ID NO: 47075 - DNA, 19 bp, Homo sapiens
  siRNA target sequence for SFRS2IP (NM_004719.1,2329-2347).
gaccgaacatcctagatct

SEQ ID NO: 47076 - DNA, 19 bp, Homo sapiens
  siRNA target sequence for SFRS2IP (NM_004719.1,2332-2350).
cgaacatcctagatctaca

SEQ ID NO: 47077 - DNA, 19 bp, Homo sapiens
  siRNA target sequence for SFRS2IP (NM_004719.1,2423-2441).
gagtgtgattcattttgca

SEQ ID NO: 47078 - DNA, 19 bp, Homo sapiens
  siRNA target sequence for SFRS2IP (NM_004719.1,2510-2528).
gtgacacactgttctgaaa

SEQ ID NO: 47079 - DNA, 19 bp, Homo sapiens
  siRNA target sequence for SFRS2IP (NM_004719.1,2563-2581).
ggttgaaactgtttctcaa

SEQ ID NO: 47080 - DNA, 19 bp, Homo sapiens
  siRNA target sequence for SFRS2IP (NM_004719.1,2600-2618).
gataccatagataaaacca

SEQ ID NO: 47081 - DNA, 19 bp, Homo sapiens
  siRNA target sequence for SFRS2IP (NM_004719.1,2623-2641).
gcctcgtactcgaagatct

SEQ ID NO: 47082 - DNA, 19 bp, Homo sapiens
  siRNA target sequence for SFRS2IP (NM_004719.1,2624-2642).
cctcgtactcgaagatcta

SEQ ID NO: 47083 - DNA, 19 bp, Homo sapiens
  siRNA target sequence for SFRS2IP (NM_004719.1,2664-2682).
cttggtcacccaacaaaga

SEQ ID NO: 47084 - DNA, 19 bp, Homo sapiens
  siRNA target sequence for SFRS2IP (NM_004719.1,2741-2759).
gaaagcaggaagtctcaat

SEQ ID NO: 47085 - DNA, 19 bp, Homo sapiens
  siRNA target sequence for SFRS2IP (NM_004719.1,2812-2830).
gtccccaaaaaaggatatt

SEQ ID NO: 47086 - DNA, 19 bp, Homo sapiens
  siRNA target sequence for SFRS2IP (NM_004719.1,2864-2882).
ccaaaaagggatactacta

SEQ ID NO: 47087 - DNA, 19 bp, Homo sapiens
  siRNA target sequence for SFRS2IP (NM_004719.1,2889-2907).
gcagaagatctgaatcact

SEQ ID NO: 47088 - DNA, 19 bp, Homo sapiens
  siRNA target sequence for SFRS2IP (NM_004719.1,2908-2926).
gtccccaagaagagaaact

SEQ ID NO: 47089 - DNA, 19 bp, Homo sapiens
  siRNA target sequence for SFRS2IP (NM_004719.1,3204-3222).
gaaatgatcggtacagaaa

SEQ ID NO: 47090 - DNA, 19 bp, Homo sapiens
  siRNA target sequence for SFRS2IP (NM_004719.1,3320-3338).
gactgtcccaattggataa

SEQ ID NO: 47091 - DNA, 19 bp, Homo sapiens
  siRNA target sequence for SFRS2IP (NM_004719.1,3324-3342).
gtcccaattggataacaga

SEQ ID NO: 47092 - DNA, 19 bp, Homo sapiens
  siRNA target sequence for SFRS2IP (NM_004719.1,3455-3473).
ggttctggttgggtatcta

SEQ ID NO: 47093 - DNA, 19 bp, Homo sapiens
  siRNA target sequence for SFRS2IP (NM_004719.1,3456-3474).
gttctggttgggtatctaa

SEQ ID NO: 47094 - DNA, 19 bp, Homo sapiens
  siRNA target sequence for SFRS2IP (NM_004719.1,3497-3515).
cgtggcagaggcacttaca

SEQ ID NO: 47095 - DNA, 19 bp, Homo sapiens
  siRNA target sequence for SFRS2IP (NM_004719.1,3519-3537).
gtagttttgcctataaaga

SEQ ID NO: 47096 - DNA, 19 bp, Homo sapiens
  siRNA target sequence for SFRS2IP (NM_004719.1,3569-3587).
cccctctcagggaattcaa

SEQ ID NO: 47097 - DNA, 19 bp, Homo sapiens
  siRNA target sequence for SFRS2IP (NM_004719.1,3570-3588).
ccctctcagggaattcaaa

SEQ ID NO: 47098 - DNA, 19 bp, Homo sapiens
  siRNA target sequence for SFRS2IP (NM_004719.1,3572-3590).
ctctcagggaattcaaaca

SEQ ID NO: 47099 - DNA, 19 bp, Homo sapiens
  siRNA target sequence for SFRS2IP (NM_004719.1,3589-3607).
cagttcagggagtgaatct

SEQ ID NO: 47100 - DNA, 19 bp, Homo sapiens
  siRNA target sequence for SFRS2IP (NM_004719.1,3617-3635).
gtggaacagcaatcctata

SEQ ID NO: 47101 - DNA, 19 bp, Homo sapiens
  siRNA target sequence for SFRS2IP (NM_004719.1,3626-3644).
caatcctataagcgaaaaa

SEQ ID NO: 47102 - DNA, 19 bp, Homo sapiens
  siRNA target sequence for SFRS2IP (NM_004719.1,3630-3648).
cctataagcgaaaaagtga

SEQ ID NO: 47103 - DNA, 19 bp, Homo sapiens
  siRNA target sequence for SFRS2IP (NM_004719.1,3631-3649).
ctataagcgaaaaagtgaa

SEQ ID NO: 47104 - DNA, 19 bp, Homo sapiens
  siRNA target sequence for SFRS2IP (NM_004719.1,3708-3726).
gggccgtgagaaagacttt

SEQ ID NO: 47105 - DNA, 19 bp, Homo sapiens
  siRNA target sequence for SFRS2IP (NM_004719.1,3734-3752).
gatgtacaaaactactact

SEQ ID NO: 47106 - DNA, 19 bp, Homo sapiens
  siRNA target sequence for SFRS2IP (NM_004719.1,3755-3773).
cgacgaggcagaaattctt

SEQ ID NO: 47107 - DNA, 19 bp, Homo sapiens
  siRNA target sequence for SFRS2IP (NM_004719.1,3867-3885).
ctcagctacctataaatat

SEQ ID NO: 47108 - DNA, 19 bp, Homo sapiens
  siRNA target sequence for SFRS2IP (NM_004719.1,3869-3887).
cagctacctataaatatga

SEQ ID NO: 47109 - DNA, 19 bp, Homo sapiens
  siRNA target sequence for SFRS2IP (NM_004719.1,3889-3907).
gcaaccgcaaatgaatgta

SEQ ID NO: 47110 - DNA, 19 bp, Homo sapiens
  siRNA target sequence for SFRS2IP (NM_004719.1,3890-3908).
caaccgcaaatgaatgtaa

SEQ ID NO: 47111 - DNA, 19 bp, Homo sapiens
  siRNA target sequence for SFRS2IP (NM_004719.1,3894-3912).
cgcaaatgaatgtaatgca

SEQ ID NO: 47112 - DNA, 19 bp, Homo sapiens
  siRNA target sequence for SFRS2IP (NM_004719.1,3932-3950).
caccagcctatgaatatct

SEQ ID NO: 47113 - DNA, 19 bp, Homo sapiens
  siRNA target sequence for SFRS2IP (NM_004719.1,3966-3984).
gtgttcatgctcctttgat

SEQ ID NO: 47114 - DNA, 19 bp, Homo sapiens
  siRNA target sequence for SFRS2IP (NM_004719.1,3968-3986).
gttcatgctcctttgatga

SEQ ID NO: 47115 - DNA, 19 bp, Homo sapiens
  siRNA target sequence for SFRS2IP (NM_004719.1,3971-3989).
catgctcctttgatgaaca

SEQ ID NO: 47116 - DNA, 19 bp, Homo sapiens
  siRNA target sequence for SFRS2IP (NM_004719.1,3996-4014).
gcaatccatttaacattca

SEQ ID NO: 47117 - DNA, 19 bp, Homo sapiens
  siRNA target sequence for SFRS2IP (NM_004719.1,3997-4015).
caatccatttaacattcat

SEQ ID NO: 47118 - DNA, 19 bp, Homo sapiens
  siRNA target sequence for SFRS2IP (NM_004719.1,4116-4134).
caccatcccaacaagtcaa

SEQ ID NO: 47119 - DNA, 19 bp, Homo sapiens
  siRNA target sequence for SFRS2IP (NM_004719.1,4119-4137).
catcccaacaagtcaacta

SEQ ID NO: 47120 - DNA, 19 bp, Homo sapiens
  siRNA target sequence for SFRS2IP (NM_004719.1,4127-4145).
caagtcaactacattgctt

SEQ ID NO: 47121 - DNA, 19 bp, Homo sapiens
  siRNA target sequence for SFRS2IP (NM_004719.1,4132-4150).
caactacattgcttcacaa

SEQ ID NO: 47122 - DNA, 19 bp, Homo sapiens
  siRNA target sequence for SFRS2IP (NM_004719.1,4143-4161).
cttcacaaccagatggaaa

SEQ ID NO: 47123 - DNA, 19 bp, Homo sapiens
  siRNA target sequence for SFRS2IP (NM_004719.1,4162-4180).
gcaattgcagggtattcct

SEQ ID NO: 47124 - DNA, 19 bp, Homo sapiens
  siRNA target sequence for SFRS2IP (NM_004719.1,4163-4181).
caattgcagggtattccta

SEQ ID NO: 47125 - DNA, 19 bp, Homo sapiens
  siRNA target sequence for SFRS2IP (NM_004719.1,4178-4196).
cctagttcttctcatgtaa

SEQ ID NO: 47126 - DNA, 19 bp, Homo sapiens
  siRNA target sequence for SFRS2IP (NM_004719.1,4193-4211).
gtaagtaataacatgagta

SEQ ID NO: 47127 - DNA, 19 bp, Homo sapiens
  siRNA target sequence for SFRS2IP (NM_004719.1,4264-4282).
gggaccaagttctggtaat

SEQ ID NO: 47128 - DNA, 19 bp, Homo sapiens
  siRNA target sequence for SFRS2IP (NM_004719.1,4308-4326).
cctctaatgctgctgtaaa

SEQ ID NO: 47129 - DNA, 19 bp, Homo sapiens
  siRNA target sequence for SFRS2IP (NM_004719.1,4412-4430).
gcagcacaagaggtaaaat

SEQ ID NO: 47130 - DNA, 19 bp, Homo sapiens
  siRNA target sequence for SFRS2IP (NM_004719.1,4438-4456).
caagccattttaccaaaat

SEQ ID NO: 47131 - DNA, 19 bp, Homo sapiens
  siRNA target sequence for SFRS2IP (NM_004719.1,4529-4547).
ggagaagtaaattctacta

SEQ ID NO: 47132 - DNA, 19 bp, Homo sapiens
  siRNA target sequence for SFRS2IP (NM_004719.1,4542-4560).
ctactaaagtggcaaatct

SEQ ID NO: 47133 - DNA, 19 bp, Homo sapiens
  siRNA target sequence for SFRS2IP (NM_004719.1,4568-4586).
gcctatgtagacaaataca

SEQ ID NO: 47134 - DNA, 19 bp, Homo sapiens
  siRNA target sequence for SFRS2IP (NM_004719.1,4569-4587).
cctatgtagacaaatacaa

SEQ ID NO: 47135 - DNA, 19 bp, Homo sapiens
  siRNA target sequence for SFRS2IP (NM_004719.1,4595-4613).
cggaaggggagccaaaaga

SEQ ID NO: 47136 - DNA, 19 bp, Homo sapiens
  siRNA target sequence for SFRS4 (NM_005626.3,145-163).
cgatgtggagcgcttcttt

SEQ ID NO: 47137 - DNA, 19 bp, Homo sapiens
  siRNA target sequence for SFRS4 (NM_005626.3,146-164).
gatgtggagcgcttcttta

SEQ ID NO: 47138 - DNA, 19 bp, Homo sapiens
  siRNA target sequence for SFRS4 (NM_005626.3,194-212).
ctgaagaacggatatggtt

SEQ ID NO: 47139 - DNA, 19 bp, Homo sapiens
  siRNA target sequence for SFRS4 (NM_005626.3,342-360).
gacgcagtggatatggtta

SEQ ID NO: 47140 - DNA, 19 bp, Homo sapiens
  siRNA target sequence for SFRS4 (NM_005626.3,344-362).
cgcagtggatatggttata

SEQ ID NO: 47141 - DNA, 19 bp, Homo sapiens
  siRNA target sequence for SFRS4 (NM_005626.3,346-364).
cagtggatatggttataga

SEQ ID NO: 47142 - DNA, 19 bp, Homo sapiens
  siRNA target sequence for SFRS4 (NM_005626.3,366-384).
gaagtggccgagataaata

SEQ ID NO: 47143 - DNA, 19 bp, Homo sapiens
  siRNA target sequence for SFRS4 (NM_005626.3,398-416).
cgcacagagtacagactta

SEQ ID NO: 47144 - DNA, 19 bp, Homo sapiens
  siRNA target sequence for SFRS4 (NM_005626.3,448-466).
gcaagacctaaaggattat

SEQ ID NO: 47145 - DNA, 19 bp, Homo sapiens
  siRNA target sequence for SFRS4 (NM_005626.3,449-467).
caagacctaaaggattata

SEQ ID NO: 47146 - DNA, 19 bp, Homo sapiens
  siRNA target sequence for SFRS4 (NM_005626.3,501-519).
ctcacaagggacgcaaaaa

SEQ ID NO: 47147 - DNA, 19 bp, Homo sapiens
  siRNA target sequence for SFRS4 (NM_005626.3,505-523).
caagggacgcaaaaatgaa

SEQ ID NO: 47148 - DNA, 19 bp, Homo sapiens
  siRNA target sequence for SFRS4 (NM_005626.3,524-542).
ggggtgattgaatttgtat

SEQ ID NO: 47149 - DNA, 19 bp, Homo sapiens
  siRNA target sequence for SFRS4 (NM_005626.3,969-987).
ctagcaggcataaaagtaa

SEQ ID NO: 47150 - DNA, 19 bp, Homo sapiens
  siRNA target sequence for SFRS4 (NM_005626.3,1317-1335).
catcccgctccgtgtcaaa

SEQ ID NO: 47151 - DNA, 19 bp, Homo sapiens
  siRNA target sequence for SFRS4 (NM_005626.3,1425-1443).
ggtcgagatccaattccaa

SEQ ID NO: 47152 - DNA, 19 bp, Homo sapiens
  siRNA target sequence for SFRS4 (NM_005626.3,1426-1444).
gtcgagatccaattccaaa

SEQ ID NO: 47153 - DNA, 19 bp, Homo sapiens
  siRNA target sequence for SFRS4 (NM_005626.3,1431-1449).
gatccaattccaaatcgaa

SEQ ID NO: 47154 - DNA, 19 bp, Homo sapiens
  siRNA target sequence for SFRS4 (NM_005626.3,1466-1484).
gaatcacgctccagatcaa

SEQ ID NO: 47155 - DNA, 19 bp, Homo sapiens
  siRNA target sequence for SFRS4 (NM_005626.3,1502-1520).
cgatctcggtccaagtcta

SEQ ID NO: 47156 - DNA, 19 bp, Homo sapiens
  siRNA target sequence for SFRS4 (NM_005626.3,1543-1561).
gccctcccgatctagatct

SEQ ID NO: 47157 - DNA, 19 bp, Homo sapiens
  siRNA target sequence for SFRS4 (NM_005626.3,1544-1562).
ccctcccgatctagatcta

SEQ ID NO: 47158 - DNA, 19 bp, Homo sapiens
  siRNA target sequence for SFRS6 (NM_006275.4,241-259).
ctcgaagtagacctcaaaa

SEQ ID NO: 47159 - DNA, 19 bp, Homo sapiens
  siRNA target sequence for SFRS7 (NM_006276.36,70-88).
ggtacggaggagaaaccaa

SEQ ID NO: 47160 - DNA, 19 bp, Homo sapiens
  siRNA target sequence for SFRS7 (NM_006276.36,85-103).
ccaaggtgtatgttggtaa

SEQ ID NO: 47161 - DNA, 19 bp, Homo sapiens
  siRNA target sequence for SFRS7 (NM_006276.36,131-149).
gttagaaagggctttcagt

SEQ ID NO: 47162 - DNA, 19 bp, Homo sapiens
  siRNA target sequence for SFRS7 (NM_006276.36,135-153).
gaaagggctttcagttatt

SEQ ID NO: 47163 - DNA, 19 bp, Homo sapiens
  siRNA target sequence for SFRS7 (NM_006276.36,140-158).
ggctttcagttattatggt

SEQ ID NO: 47164 - DNA, 19 bp, Homo sapiens
  siRNA target sequence for SFRS7 (NM_006276.36,146-164).
cagttattatggtccttta

SEQ ID NO: 47165 - DNA, 19 bp, Homo sapiens
  siRNA target sequence for SFRS7 (NM_006276.36,254-272).
ggatggaaaggtgatttgt

SEQ ID NO: 47166 - DNA, 19 bp, Homo sapiens
  siRNA target sequence for SFRS7 (NM_006276.36,277-295).
cccgagtgagggttgaact

SEQ ID NO: 47167 - DNA, 19 bp, Homo sapiens
  siRNA target sequence for SFRS7 (NM_006276.36,308-326).
gcctcggagatcacgtttt

SEQ ID NO: 47168 - DNA, 19 bp, Homo sapiens
  siRNA target sequence for SFRS7 (NM_006276.36,310-328).
ctcggagatcacgttttga

SEQ ID NO: 47169 - DNA, 19 bp, Homo sapiens
  siRNA target sequence for SFRS7 (NM_006276.36,346-364).
gtccctttgatccaaatga

SEQ ID NO: 47170 - DNA, 19 bp, Homo sapiens
  siRNA target sequence for SFRS7 (NM_006276.36,348-366).
ccctttgatccaaatgata

SEQ ID NO: 47171 - DNA, 19 bp, Homo sapiens
  siRNA target sequence for SFRS7 (NM_006276.36,350-368).
ctttgatccaaatgataga

SEQ ID NO: 47172 - DNA, 19 bp, Homo sapiens
  siRNA target sequence for SFRS7 (NM_006276.36,383-401).
cgaaaagggacattatgct

SEQ ID NO: 47173 - DNA, 19 bp, Homo sapiens
  siRNA target sequence for SFRS7 (NM_006276.36,389-407).
gggacattatgcttatgat

SEQ ID NO: 47174 - DNA, 19 bp, Homo sapiens
  siRNA target sequence for SFRS7 (NM_006276.36,433-451).
gaagcaggtttcttcgttt

SEQ ID NO: 47175 - DNA, 19 bp, Homo sapiens
  siRNA target sequence for SFRS7 (NM_006276.36,437-455).
caggtttcttcgtttgagt

SEQ ID NO: 47176 - DNA, 19 bp, Homo sapiens
  siRNA target sequence for SFRS8 (NM_004592.2,234-252).
cgagtggagctcttggttt

SEQ ID NO: 47177 - DNA, 19 bp, Homo sapiens
  siRNA target sequence for SFRS8 (NM_004592.2,328-346).
ggatgggggaccacaagat

SEQ ID NO: 47178 - DNA, 19 bp, Homo sapiens
  siRNA target sequence for SFRS8 (NM_004592.2,344-362).
gatcctcatcgacagatat

SEQ ID NO: 47179 - DNA, 19 bp, Homo sapiens
  siRNA target sequence for SFRS8 (NM_004592.2,347-365).
cctcatcgacagatatgat

SEQ ID NO: 47180 - DNA, 19 bp, Homo sapiens
  siRNA target sequence for SFRS8 (NM_004592.2,595-613).
cttacggtagcgactatta

SEQ ID NO: 47181 - DNA, 19 bp, Homo sapiens
  siRNA target sequence for SFRS8 (NM_004592.2,808-826).
gagcacagtttgagatcat

SEQ ID NO: 47182 - DNA, 19 bp, Homo sapiens
  siRNA target sequence for SFRS8 (NM_004592.2,941-959).
cctggcagaaaacaaaagt

SEQ ID NO: 47183 - DNA, 19 bp, Homo sapiens
  siRNA target sequence for SFRS8 (NM_004592.2,979-997).
gagtcagctctgacaatga

SEQ ID NO: 47184 - DNA, 19 bp, Homo sapiens
  siRNA target sequence for SFRS8 (NM_004592.2,1257-1275).
ctaccggacggcacttact

SEQ ID NO: 47185 - DNA, 19 bp, Homo sapiens
  siRNA target sequence for SFRS8 (NM_004592.2,1296-1314).
ggaatcgacgtgactactt

SEQ ID NO: 47186 - DNA, 19 bp, Homo sapiens
  siRNA target sequence for SFRS8 (NM_004592.2,1297-1315).
gaatcgacgtgactactta

SEQ ID NO: 47187 - DNA, 19 bp, Homo sapiens
  siRNA target sequence for SFRS8 (NM_004592.2,1302-1320).
gacgtgactacttactaca

SEQ ID NO: 47188 - DNA, 19 bp, Homo sapiens
  siRNA target sequence for SFRS8 (NM_004592.2,1333-1351).
ctggcgtgaccgtgtctaa

SEQ ID NO: 47189 - DNA, 19 bp, Homo sapiens
  siRNA target sequence for SFRS8 (NM_004592.2,1335-1353).
ggcgtgaccgtgtctaact

SEQ ID NO: 47190 - DNA, 19 bp, Homo sapiens
  siRNA target sequence for SFRS8 (NM_004592.2,1543-1561).
ccaggaacggcctgaagtt

SEQ ID NO: 47191 - DNA, 19 bp, Homo sapiens
  siRNA target sequence for SFRS8 (NM_004592.2,1575-1593).
cgtgccaagaatgatcaaa

SEQ ID NO: 47192 - DNA, 19 bp, Homo sapiens
  siRNA target sequence for SFRS8 (NM_004592.2,1579-1597).
ccaagaatgatcaaagatt

SEQ ID NO: 47193 - DNA, 19 bp, Homo sapiens
  siRNA target sequence for SFRS8 (NM_004592.2,1608-1626).
cagccgtggcaccagtata

SEQ ID NO: 47194 - DNA, 19 bp, Homo sapiens
  siRNA target sequence for SFRS8 (NM_004592.2,1610-1628).
gccgtggcaccagtataat

SEQ ID NO: 47195 - DNA, 19 bp, Homo sapiens
  siRNA target sequence for SFRS8 (NM_004592.2,1615-1633).
ggcaccagtataatgctta

SEQ ID NO: 47196 - DNA, 19 bp, Homo sapiens
  siRNA target sequence for SFRS8 (NM_004592.2,1616-1634).
gcaccagtataatgcttat

SEQ ID NO: 47197 - DNA, 19 bp, Homo sapiens
  siRNA target sequence for SFRS8 (NM_004592.2,1850-1868).
gctggtgaaagcttccttt

SEQ ID NO: 47198 - DNA, 19 bp, Homo sapiens
  siRNA target sequence for SFRS8 (NM_004592.2,1864-1882).
cctttgctccaataagctt

SEQ ID NO: 47199 - DNA, 19 bp, Homo sapiens
  siRNA target sequence for SFRS8 (NM_004592.2,1869-1887).
gctccaataagctttgcaa

SEQ ID NO: 47200 - DNA, 19 bp, Homo sapiens
  siRNA target sequence for SFRS8 (NM_004592.2,1870-1888).
ctccaataagctttgcaat

SEQ ID NO: 47201 - DNA, 19 bp, Homo sapiens
  siRNA target sequence for SFRS8 (NM_004592.2,1884-1902).
gcaatcaaggccaaagaaa

SEQ ID NO: 47202 - DNA, 19 bp, Homo sapiens
  siRNA target sequence for SFRS8 (NM_004592.2,1930-1948).
gtgttaagctagatgatga

SEQ ID NO: 47203 - DNA, 19 bp, Homo sapiens
  siRNA target sequence for SFRS8 (NM_004592.2,1979-1997).
ccaagaaagttctagtagt

SEQ ID NO: 47204 - DNA, 19 bp, Homo sapiens
  siRNA target sequence for SFRS8 (NM_004592.2,1993-2011).
gtagtgctgcaaacactaa

SEQ ID NO: 47205 - DNA, 19 bp, Homo sapiens
  siRNA target sequence for SFRS8 (NM_004592.2,2024-2042).
cccaccctgtgtagttgtt

SEQ ID NO: 47206 - DNA, 19 bp, Homo sapiens
  siRNA target sequence for SFRS8 (NM_004592.2,2026-2044).
caccctgtgtagttgttga

SEQ ID NO: 47207 - DNA, 19 bp, Homo sapiens
  siRNA target sequence for SFRS8 (NM_004592.2,2147-2165).
ggcgtctaaggagtcaaaa

SEQ ID NO: 47208 - DNA, 19 bp, Homo sapiens
  siRNA target sequence for SFRS8 (NM_004592.2,2175-2193).
cttcaagcagaacgtaaaa

SEQ ID NO: 47209 - DNA, 19 bp, Homo sapiens
  siRNA target sequence for SFRS8 (NM_004592.2,2194-2212).
ggaaagcggcgttattttt

SEQ ID NO: 47210 - DNA, 19 bp, Homo sapiens
  siRNA target sequence for SFRS8 (NM_004592.2,2199-2217).
gcggcgttatttttacaga

SEQ ID NO: 47211 - DNA, 19 bp, Homo sapiens
  siRNA target sequence for SFRS8 (NM_004592.2,2328-2346).
ctgcctactttagaagtta

SEQ ID NO: 47212 - DNA, 19 bp, Homo sapiens
  siRNA target sequence for SFRS8 (NM_004592.2,2360-2378).
gccttcgagcaaaagcaaa

SEQ ID NO: 47213 - DNA, 19 bp, Homo sapiens
  siRNA target sequence for SFRS8 (NM_004592.2,2448-2466).
cgttctcccaagtaccatt

SEQ ID NO: 47214 - DNA, 19 bp, Homo sapiens
  siRNA target sequence for SFRS8 (NM_004592.2,2474-2492).
caagtccaggtctagatca

SEQ ID NO: 47215 - DNA, 19 bp, Homo sapiens
  siRNA target sequence for SFRS8 (NM_004592.2,2482-2500).
ggtctagatcacactcaaa

SEQ ID NO: 47216 - DNA, 19 bp, Homo sapiens
  siRNA target sequence for SFRS8 (NM_004592.2,2483-2501).
gtctagatcacactcaaaa

SEQ ID NO: 47217 - DNA, 19 bp, Homo sapiens
  siRNA target sequence for SFRS8 (NM_004592.2,2674-2692).
gaagtccccacgagaagaa

SEQ ID NO: 47218 - DNA, 19 bp, Homo sapiens
  siRNA target sequence for SFRS8 (NM_004592.2,2885-2903).
gatctcttcagcaatcgtt

SEQ ID NO: 47219 - DNA, 19 bp, Homo sapiens
  siRNA target sequence for SFRS8 (NM_004592.2,2909-2927).
cgtgcagagcaaaatcact

SEQ ID NO: 47220 - DNA, 19 bp, Homo sapiens
  siRNA target sequence for SFRS9 (NM_003769.2,342-360).
gaggatgctatttatggaa

SEQ ID NO: 47221 - DNA, 19 bp, Homo sapiens
  siRNA target sequence for SFRS9 (NM_003769.2,358-376).
gaagaaatggttatgatta

SEQ ID NO: 47222 - DNA, 19 bp, Homo sapiens
  siRNA target sequence for SFRS9 (NM_003769.2,401-419).
gttccccaggacttatgga

SEQ ID NO: 47223 - DNA, 19 bp, Homo sapiens
  siRNA target sequence for SFRS9 (NM_003769.2,449-467).
gaatgggcctcctacaaga

SEQ ID NO: 47224 - DNA, 19 bp, Homo sapiens
  siRNA target sequence for SFRS9 (NM_003769.2,459-477).
cctacaagaagatctgatt

SEQ ID NO: 47225 - DNA, 19 bp, Homo sapiens
  siRNA target sequence for SFRS9 (NM_003769.2,472-490).
ctgatttccgagttcttgt

SEQ ID NO: 47226 - DNA, 19 bp, Homo sapiens
  siRNA target sequence for SFRS9 (NM_003769.2,588-606).
gggatggtcgagtatctca

SEQ ID NO: 47227 - DNA, 19 bp, Homo sapiens
  siRNA target sequence for SFRS9 (NM_003769.2,593-611).
ggtcgagtatctcagaaaa

SEQ ID NO: 47228 - DNA, 19 bp, Homo sapiens
  siRNA target sequence for SFRS9 (NM_003769.2,676-694).
cttcctacatccgagttta

SEQ ID NO: 47229 - DNA, 19 bp, Homo sapiens
  siRNA target sequence for SFRS9 (NM_003769.2,750-768).
cgtgactctccataccaaa

SEQ ID NO: 47230 - DNA, 19 bp, Homo sapiens
  siRNA target sequence for SFRS9 (NM_003769.2,772-790).
ggggttccccacactactt

SEQ ID NO: 47231 - DNA, 19 bp, Homo sapiens
  siRNA target sequence for SIP1 (NM_003616.1,94-112).
cggaactggctggtttgaa

SEQ ID NO: 47232 - DNA, 19 bp, Homo sapiens
  siRNA target sequence for SIP1 (NM_003616.1,139-157).
ccgcagtggaagagttgat

SEQ ID NO: 47233 - DNA, 19 bp, Homo sapiens
  siRNA target sequence for SIP1 (NM_003616.1,184-202).
gcgacttgacggaaggttt

SEQ ID NO: 47234 - DNA, 19 bp, Homo sapiens
  siRNA target sequence for SIP1 (NM_003616.1,188-206).
cttgacggaaggtttcgat

SEQ ID NO: 47235 - DNA, 19 bp, Homo sapiens
  siRNA target sequence for SIP1 (NM_003616.1,220-238).
cgaggacgcctcaggaata

SEQ ID NO: 47236 - DNA, 19 bp, Homo sapiens
  siRNA target sequence for SIP1 (NM_003616.1,223-241).
ggacgcctcaggaatacct

SEQ ID NO: 47237 - DNA, 19 bp, Homo sapiens
  siRNA target sequence for SIP1 (NM_003616.1,254-272).
gatcgaagcagctcaatgt

SEQ ID NO: 47238 - DNA, 19 bp, Homo sapiens
  siRNA target sequence for SIP1 (NM_003616.1,399-417).
caagtggcacagttttcaa

SEQ ID NO: 47239 - DNA, 19 bp, Homo sapiens
  siRNA target sequence for SIP1 (NM_003616.1,415-433).
caactgttcgacagaatgt

SEQ ID NO: 47240 - DNA, 19 bp, Homo sapiens
  siRNA target sequence for SIP1 (NM_003616.1,465-483).
cagttggatagtaatgtga

SEQ ID NO: 47241 - DNA, 19 bp, Homo sapiens
  siRNA target sequence for SIP1 (NM_003616.1,576-594).
gaaagtcctggaatagatt

SEQ ID NO: 47242 - DNA, 19 bp, Homo sapiens
  siRNA target sequence for SIP1 (NM_003616.1,580-598).
gtcctggaatagattatgt

SEQ ID NO: 47243 - DNA, 19 bp, Homo sapiens
  siRNA target sequence for SIP1 (NM_003616.1,615-633).
cccttgcttagtattgtta

SEQ ID NO: 47244 - DNA, 19 bp, Homo sapiens
  siRNA target sequence for SIP1 (NM_003616.1,658-676).
ctagtgtcttggaatatct

SEQ ID NO: 47245 - DNA, 19 bp, Homo sapiens
  siRNA target sequence for SIP1 (NM_003616.1,665-683).
cttggaatatctgagtaat

SEQ ID NO: 47246 - DNA, 19 bp, Homo sapiens
  siRNA target sequence for SIP1 (NM_003616.1,697-715).
gagactttactccagaatt

SEQ ID NO: 47247 - DNA, 19 bp, Homo sapiens
  siRNA target sequence for SIP1 (NM_003616.1,716-734).
gggaagatggctttatgct

SEQ ID NO: 47248 - DNA, 19 bp, Homo sapiens
  siRNA target sequence for SIP1 (NM_003616.1,817-835).
ggctcttagtggatagcaa

SEQ ID NO: 47249 - DNA, 19 bp, Homo sapiens
  siRNA target sequence for SIP1 (NM_003616.1,821-839).
cttagtggatagcaaagat

SEQ ID NO: 47250 - DNA, 19 bp, Homo sapiens
  siRNA target sequence for SIP1 (NM_003616.1,845-863).
gagggttcctgctttgaat

SEQ ID NO: 47251 - DNA, 19 bp, Homo sapiens
  siRNA target sequence for SIP1 (NM_003616.1,847-865).
gggttcctgctttgaattt

SEQ ID NO: 47252 - DNA, 19 bp, Homo sapiens
  siRNA target sequence for SIP1 (NM_003616.1,852-870).
cctgctttgaatttattaa

SEQ ID NO: 47253 - DNA, 19 bp, Homo sapiens
  siRNA target sequence for SIP1 (NM_003616.1,874-892).
gcttggttagcaggtattt

SEQ ID NO: 47254 - DNA, 19 bp, Homo sapiens
  siRNA target sequence for SIP1 (NM_003616.1,875-893).
cttggttagcaggtatttt

SEQ ID NO: 47255 - DNA, 19 bp, Homo sapiens
  siRNA target sequence for SLU7 (NM_006425.3,92-110).
cagttgtagatgcagttaa

SEQ ID NO: 47256 - DNA, 19 bp, Homo sapiens
  siRNA target sequence for SLU7 (NM_006425.3,261-279).
cccccatattcctcagtat

SEQ ID NO: 47257 - DNA, 19 bp, Homo sapiens
  siRNA target sequence for SLU7 (NM_006425.3,287-305).
cagtgccatggtatattga

SEQ ID NO: 47258 - DNA, 19 bp, Homo sapiens
  siRNA target sequence for SLU7 (NM_006425.3,383-401).
ggtacaagaggggtgtaaa

SEQ ID NO: 47259 - DNA, 19 bp, Homo sapiens
  siRNA target sequence for SLU7 (NM_006425.3,384-402).
gtacaagaggggtgtaaaa

SEQ ID NO: 47260 - DNA, 19 bp, Homo sapiens
  siRNA target sequence for SLU7 (NM_006425.3,451-469).
ggggccatgacacacaaaa

SEQ ID NO: 47261 - DNA, 19 bp, Homo sapiens
  siRNA target sequence for SLU7 (NM_006425.3,452-470).
gggccatgacacacaaaaa

SEQ ID NO: 47262 - DNA, 19 bp, Homo sapiens
  siRNA target sequence for SLU7 (NM_006425.3,494-512).
ggcgagttggagccaaatt

SEQ ID NO: 47263 - DNA, 19 bp, Homo sapiens
  siRNA target sequence for SLU7 (NM_006425.3,507-525).
caaatttacaggtactaat

SEQ ID NO: 47264 - DNA, 19 bp, Homo sapiens
  siRNA target sequence for SLU7 (NM_006425.3,551-569).
ctcaactgatgtttgacta

SEQ ID NO: 47265 - DNA, 19 bp, Homo sapiens
  siRNA target sequence for SLU7 (NM_006425.3,643-661).
gttgatttggcaaaacgaa

SEQ ID NO: 47266 - DNA, 19 bp, Homo sapiens
  siRNA target sequence for SLU7 (NM_006425.3,761-779).
ctcagatggaaaaagatca

SEQ ID NO: 47267 - DNA, 19 bp, Homo sapiens
  siRNA target sequence for SLU7 (NM_006425.3,763-781).
cagatggaaaaagatcata

SEQ ID NO: 47268 - DNA, 19 bp, Homo sapiens
  siRNA target sequence for SLU7 (NM_006425.3,844-862).
gactccaagagacgaatta

SEQ ID NO: 47269 - DNA, 19 bp, Homo sapiens
  siRNA target sequence for SLU7 (NM_006425.3,874-892).
ctcaggattcgagaagata

SEQ ID NO: 47270 - DNA, 19 bp, Homo sapiens
  siRNA target sequence for SLU7 (NM_006425.3,879-897).
gattcgagaagatattgca

SEQ ID NO: 47271 - DNA, 19 bp, Homo sapiens
  siRNA target sequence for SLU7 (NM_006425.3,906-924).
gaggaatttagatccaaat

SEQ ID NO: 47272 - DNA, 19 bp, Homo sapiens
  siRNA target sequence for SLU7 (NM_006425.3,933-951).
ctatgatccaaaaactaga

SEQ ID NO: 47273 - DNA, 19 bp, Homo sapiens
  siRNA target sequence for SLU7 (NM_006425.3,1072-1090).
gcatgggaagcctatgaca

SEQ ID NO: 47274 - DNA, 19 bp, Homo sapiens
  siRNA target sequence for SLU7 (NM_006425.3,1073-1091).
catgggaagcctatgacaa

SEQ ID NO: 47275 - DNA, 19 bp, Homo sapiens
  siRNA target sequence for SLU7 (NM_006425.3,1113-1131).
ggcagatcctacaaagcta

SEQ ID NO: 47276 - DNA, 19 bp, Homo sapiens
  siRNA target sequence for SLU7 (NM_006425.3,1124-1142).
caaagctagagctgttgta

SEQ ID NO: 47277 - DNA, 19 bp, Homo sapiens
  siRNA target sequence for SLU7 (NM_006425.3,1267-1285).
gactatgtggagtactcaa

SEQ ID NO: 47278 - DNA, 19 bp, Homo sapiens
  siRNA target sequence for SLU7 (NM_006425.3,1286-1304).
gacatgggacagtcatcaa

SEQ ID NO: 47279 - DNA, 19 bp, Homo sapiens
  siRNA target sequence for SLU7 (NM_006425.3,1319-1337).
ctgttgcctgctctaagta

SEQ ID NO: 47280 - DNA, 19 bp, Homo sapiens
  siRNA target sequence for SLU7 (NM_006425.3,1348-1366).
gtgaagatccacaatcaca

SEQ ID NO: 47281 - DNA, 19 bp, Homo sapiens
  siRNA target sequence for SLU7 (NM_006425.3,1396-1414).
ggccgatggggatacaaat

SEQ ID NO: 47282 - DNA, 19 bp, Homo sapiens
  siRNA target sequence for SLU7 (NM_006425.3,1399-1417).
cgatggggatacaaatgct

SEQ ID NO: 47283 - DNA, 19 bp, Homo sapiens
  siRNA target sequence for SLU7 (NM_006425.3,1461-1479).
gaaggagattgttaactct

SEQ ID NO: 47284 - DNA, 19 bp, Homo sapiens
  siRNA target sequence for SLU7 (NM_006425.3,1476-1494).
ctctgaggagtgtattata

SEQ ID NO: 47285 - DNA, 19 bp, Homo sapiens
  siRNA target sequence for SLU7 (NM_006425.3,1478-1496).
ctgaggagtgtattataaa

SEQ ID NO: 47286 - DNA, 19 bp, Homo sapiens
  siRNA target sequence for SLU7 (NM_006425.3,1483-1501).
gagtgtattataaatgaga

SEQ ID NO: 47287 - DNA, 19 bp, Homo sapiens
  siRNA target sequence for SLU7 (NM_006425.3,1606-1624).
cgaaagagcagttcagata

SEQ ID NO: 47288 - DNA, 19 bp, Homo sapiens
  siRNA target sequence for SLU7 (NM_006425.3,1722-1740).
gaggaagcggccttacaat

SEQ ID NO: 47289 - DNA, 19 bp, Homo sapiens
  siRNA target sequence for SLU7 (NM_006425.3,1733-1751).
cttacaatagcatgtatga

SEQ ID NO: 47290 - DNA, 19 bp, Homo sapiens
  siRNA target sequence for SMNDC1 (NM_005871.2,233-251).
ctcagctccagcaagttga

SEQ ID NO: 47291 - DNA, 19 bp, Homo sapiens
  siRNA target sequence for SMNDC1 (NM_005871.2,443-461).
gtgaagatggacagtgtta

SEQ ID NO: 47292 - DNA, 19 bp, Homo sapiens
  siRNA target sequence for SMNDC1 (NM_005871.2,738-756).
caacagagcctattctaaa

SEQ ID NO: 47293 - DNA, 19 bp, Homo sapiens
  siRNA target sequence for SMNDC1 (NM_005871.2,768-786).
ccaggtaaagaggagtatt

SEQ ID NO: 47294 - DNA, 19 bp, Homo sapiens
  siRNA target sequence for SMNDC1 (NM_005871.2,801-819).
gagtgtgactggtaaagtt

SEQ ID NO: 47295 - DNA, 19 bp, Homo sapiens
  siRNA target sequence for SMNDC1 (NM_005871.2,830-848).
cctgtggaattgctgataa

SEQ ID NO: 47296 - DNA, 19 bp, Homo sapiens
  siRNA target sequence for SMNDC1 (NM_005871.2,836-854).
gaattgctgataaacctat

SEQ ID NO: 47297 - DNA, 19 bp, Homo sapiens
  siRNA target sequence for SNRP70 (NM_003089.3,215-233).
cccgtgaccctattccata

SEQ ID NO: 47298 - DNA, 19 bp, Homo sapiens
  siRNA target sequence for SNRP70 (NM_003089.3,297-315).
gccgtacattcgagagttt

SEQ ID NO: 47299 - DNA, 19 bp, Homo sapiens
  siRNA target sequence for SNRP70 (NM_003089.3,299-317).
cgtacattcgagagtttga

SEQ ID NO: 47300 - DNA, 19 bp, Homo sapiens
  siRNA target sequence for SNRP70 (NM_003089.3,415-433).
gtggagacagagcttaaaa

SEQ ID NO: 47301 - DNA, 19 bp, Homo sapiens
  siRNA target sequence for SNRP70 (NM_003089.3,486-504).
cttcgtggcgagagtgaat

SEQ ID NO: 47302 - DNA, 19 bp, Homo sapiens
  siRNA target sequence for SNRP70 (NM_003089.3,489-507).
cgtggcgagagtgaattat

SEQ ID NO: 47303 - DNA, 19 bp, Homo sapiens
  siRNA target sequence for SNRP70 (NM_003089.3,543-561).
ggtgtacggacctatcaaa

SEQ ID NO: 47304 - DNA, 19 bp, Homo sapiens
  siRNA target sequence for SNRP70 (NM_003089.3,544-562).
gtgtacggacctatcaaaa

SEQ ID NO: 47305 - DNA, 19 bp, Homo sapiens
  siRNA target sequence for SNRP70 (NM_003089.3,546-564).
gtacggacctatcaaaaga

SEQ ID NO: 47306 - DNA, 19 bp, Homo sapiens
  siRNA target sequence for SNRP70 (NM_003089.3,549-567).
cggacctatcaaaagaata

SEQ ID NO: 47307 - DNA, 19 bp, Homo sapiens
  siRNA target sequence for SNRP70 (NM_003089.3,658-676).
cacgcagatggcaagaaga

SEQ ID NO: 47308 - DNA, 19 bp, Homo sapiens
  siRNA target sequence for SNRP70 (NM_003089.3,660-678).
cgcagatggcaagaagatt

SEQ ID NO: 47309 - DNA, 19 bp, Homo sapiens
  siRNA target sequence for SNRP70 (NM_003089.3,1448-1466).
cggagaatgggtatttgat

SEQ ID NO: 47310 - DNA, 19 bp, Homo sapiens
  siRNA target sequence for SNRPB (NM_003091.3,388-406).
gaatctggtctcaatgaca

SEQ ID NO: 47311 - DNA, 19 bp, Homo sapiens
  siRNA target sequence for SNRPB (NM_003091.3,412-430).
gggacctcctcccaaagat

SEQ ID NO: 47312 - DNA, 19 bp, Homo sapiens
  siRNA target sequence for SNRPB (NM_003091.3,413-431).
ggacctcctcccaaagata

SEQ ID NO: 47313 - DNA, 19 bp, Homo sapiens
  siRNA target sequence for SNRPB2 (NM_003092.3,294-312).
cctatatgccctgttttct

SEQ ID NO: 47314 - DNA, 19 bp, Homo sapiens
  siRNA target sequence for SNRPB2 (NM_003092.3,320-338).
gtcatgtggtggacattgt

SEQ ID NO: 47315 - DNA, 19 bp, Homo sapiens
  siRNA target sequence for SNRPB2 (NM_003092.3,418-436).
cagctacaaggatttccat

SEQ ID NO: 47316 - DNA, 19 bp, Homo sapiens
  siRNA target sequence for SNRPB2 (NM_003092.3,443-461).
gtaaaccaatgcgaataca

SEQ ID NO: 47317 - DNA, 19 bp, Homo sapiens
  siRNA target sequence for SNRPB2 (NM_003092.3,453-471).
gcgaatacagtatgcaaaa

SEQ ID NO: 47318 - DNA, 19 bp, Homo sapiens
  siRNA target sequence for SNRPB2 (NM_003092.3,475-493).
gattcggatataatatcaa

SEQ ID NO: 47319 - DNA, 19 bp, Homo sapiens
  siRNA target sequence for SNRPB2 (NM_003092.3,479-497).
cggatataatatcaaaaat

SEQ ID NO: 47320 - DNA, 19 bp, Homo sapiens
  siRNA target sequence for SNRPB2 (NM_003092.3,491-509).
caaaaatgcgtggaacttt

SEQ ID NO: 47321 - DNA, 19 bp, Homo sapiens
  siRNA target sequence for SNRPB2 (NM_003092.3,589-607).
ggccagggaactccaaatt

SEQ ID NO: 47322 - DNA, 19 bp, Homo sapiens
  siRNA target sequence for SNRPB2 (NM_003092.3,591-609).
ccagggaactccaaattca

SEQ ID NO: 47323 - DNA, 19 bp, Homo sapiens
  siRNA target sequence for SNRPB2 (NM_003092.3,650-668).
ctgattaccctccaaacta

SEQ ID NO: 47324 - DNA, 19 bp, Homo sapiens
  siRNA target sequence for SNRPB2 (NM_003092.3,652-670).
gattaccctccaaactata

SEQ ID NO: 47325 - DNA, 19 bp, Homo sapiens
  siRNA target sequence for SNRPB2 (NM_003092.3,657-675).
ccctccaaactatatttta

SEQ ID NO: 47326 - DNA, 19 bp, Homo sapiens
  siRNA target sequence for SNRPB2 (NM_003092.3,687-705).
cttaccagaagagactaat

SEQ ID NO: 47327 - DNA, 19 bp, Homo sapiens
  siRNA target sequence for SNRPB2 (NM_003092.3,699-717).
gactaatgagatgatgtta

SEQ ID NO: 47328 - DNA, 19 bp, Homo sapiens
  siRNA target sequence for SNRPB2 (NM_003092.3,769-787).
gggaggcatgacattgctt

SEQ ID NO: 47329 - DNA, 19 bp, Homo sapiens
  siRNA target sequence for SNRPB2 (NM_003092.3,770-788).
ggaggcatgacattgcttt

SEQ ID NO: 47330 - DNA, 19 bp, Homo sapiens
  siRNA target sequence for SNRPB2 (NM_003092.3,833-851).
ctttacagggatttaagat

SEQ ID NO: 47331 - DNA, 19 bp, Homo sapiens
  siRNA target sequence for SNRPB2 (NM_003092.3,856-874).
ccgtcccatgctatgaaga

SEQ ID NO: 47332 - DNA, 19 bp, Homo sapiens
  siRNA target sequence for SNRPB2 (NM_003092.3,857-875).
cgtcccatgctatgaagat

SEQ ID NO: 47333 - DNA, 19 bp, Homo sapiens
  siRNA target sequence for SNRPD1 (NM_006938.2,140-158).
cgtgagatttttgatgaaa

SEQ ID NO: 47334 - DNA, 19 bp, Homo sapiens
  siRNA target sequence for SNRPD1 (NM_006938.2,199-217).
cacaggtccatggaacaat

SEQ ID NO: 47335 - DNA, 19 bp, Homo sapiens
  siRNA target sequence for SNRPD1 (NM_006938.2,203-221).
ggtccatggaacaatcaca

SEQ ID NO: 47336 - DNA, 19 bp, Homo sapiens
  siRNA target sequence for SNRPD1 (NM_006938.2,293-311).
gctggaaacgctgagtatt

SEQ ID NO: 47337 - DNA, 19 bp, Homo sapiens
  siRNA target sequence for SNRPD1 (NM_006938.2,296-314).
ggaaacgctgagtattcga

SEQ ID NO: 47338 - DNA, 19 bp, Homo sapiens
  siRNA target sequence for SNRPD1 (NM_006938.2,302-320).
gctgagtattcgaggaaat

SEQ ID NO: 47339 - DNA, 19 bp, Homo sapiens
  siRNA target sequence for SNRPD1 (NM_006938.2,307-325).
gtattcgaggaaataacat

SEQ ID NO: 47340 - DNA, 19 bp, Homo sapiens
  siRNA target sequence for SNRPD1 (NM_006938.2,323-341).
cattcggtattttattcta

SEQ ID NO: 47341 - DNA, 19 bp, Homo sapiens
  siRNA target sequence for SNRPD1 (NM_006938.2,355-373).
ctctggatacactacttgt

SEQ ID NO: 47342 - DNA, 19 bp, Homo sapiens
  siRNA target sequence for SNRPD2 (NM_004597.4,433-451).
gccgcaacaataagaaact

SEQ ID NO: 47343 - DNA, 19 bp, Homo sapiens
  siRNA target sequence for SNRPD2 (NM_004597.4,459-477).
cgcgtgaaggccttcgata

SEQ ID NO: 47344 - DNA, 19 bp, Homo sapiens
  siRNA target sequence for SNRPD3 (NM_004175.3,445-463).
ctattggtgtgccgattaa

SEQ ID NO: 47345 - DNA, 19 bp, Homo sapiens
  siRNA target sequence for SNRPD3 (NM_004175.3,451-469).
gtgtgccgattaaagtact

SEQ ID NO: 47346 - DNA, 19 bp, Homo sapiens
  siRNA target sequence for SNRPD3 (NM_004175.3,505-523).
cgaacaccggtgaggtata

SEQ ID NO: 47347 - DNA, 19 bp, Homo sapiens
  siRNA target sequence for SNRPD3 (NM_004175.3,506-524).
gaacaccggtgaggtatat

SEQ ID NO: 47348 - DNA, 19 bp, Homo sapiens
  siRNA target sequence for SNRPD3 (NM_004175.3,722-740).
ggctggccgaggaaaagct

SEQ ID NO: 47349 - DNA, 19 bp, Homo sapiens
  siRNA target sequence for SNRPD3 (NM_004175.3,728-746).
ccgaggaaaagctgctatt

SEQ ID NO: 47350 - DNA, 19 bp, Homo sapiens
  siRNA target sequence for SNRPD3 (NM_004175.3,790-808).
gacgtggaaacatctttca

SEQ ID NO: 47351 - DNA, 19 bp, Homo sapiens
  siRNA target sequence for SNRPF (NM_003095.1,125-143).
cccctcaatcccaaacctt

SEQ ID NO: 47352 - DNA, 19 bp, Homo sapiens
  siRNA target sequence for SNRPF (NM_003095.1,309-327).
ggtgtaataatgtccttta

SEQ ID NO: 47353 - DNA, 19 bp, Homo sapiens
  siRNA target sequence for SNRPF (NM_003095.1,312-330).
gtaataatgtcctttatat

SEQ ID NO: 47354 - DNA, 19 bp, Homo sapiens
  siRNA target sequence for SNRPN (NM_003097.3,492-510).
gctgcagcacattgactat

SEQ ID NO: 47355 - DNA, 19 bp, Homo sapiens
  siRNA target sequence for SNRPN (NM_003097.3,495-513).
gcagcacattgactataga

SEQ ID NO: 47356 - DNA, 19 bp, Homo sapiens
  siRNA target sequence for SNRPN (NM_003097.3,717-735).
gccaccccccaaagatact

SEQ ID NO: 47357 - DNA, 19 bp, Homo sapiens
  siRNA target sequence for SRRM1 (NM_005839.1,1002-1020).
cctccaccaaggcatagaa

SEQ ID NO: 47358 - DNA, 19 bp, Homo sapiens
  siRNA target sequence for SRRM1 (NM_005839.1,1102-1120).
cacggtcaccaccaaagaa

SEQ ID NO: 47359 - DNA, 19 bp, Homo sapiens
  siRNA target sequence for SRRM1 (NM_005839.1,1149-1167).
cggaaaactcgtaggttat

SEQ ID NO: 47360 - DNA, 19 bp, Homo sapiens
  siRNA target sequence for SRRM1 (NM_005839.1,1151-1169).
gaaaactcgtaggttatct

SEQ ID NO: 47361 - DNA, 19 bp, Homo sapiens
  siRNA target sequence for SRRM1 (NM_005839.1,1253-1271).
gcagtcaaaccgtacaaga

SEQ ID NO: 47362 - DNA, 19 bp, Homo sapiens
  siRNA target sequence for SRRM1 (NM_005839.1,1254-1272).
cagtcaaaccgtacaagaa

SEQ ID NO: 47363 - DNA, 19 bp, Homo sapiens
  siRNA target sequence for SRRM1 (NM_005839.1,1256-1274).
gtcaaaccgtacaagaaaa

SEQ ID NO: 47364 - DNA, 19 bp, Homo sapiens
  siRNA target sequence for SRRM1 (NM_005839.1,1270-1288).
gaaaaagtcgtgtttctgt

SEQ ID NO: 47365 - DNA, 19 bp, Homo sapiens
  siRNA target sequence for SRRM1 (NM_005839.1,1287-1305).
gtgtctccagggagaactt

SEQ ID NO: 47366 - DNA, 19 bp, Homo sapiens
  siRNA target sequence for SRRM1 (NM_005839.1,1309-1327).
gtaaagtgacaaaacataa

SEQ ID NO: 47367 - DNA, 19 bp, Homo sapiens
  siRNA target sequence for SRRM1 (NM_005839.1,1360-1378).
caccgaagcctagaaaagt

SEQ ID NO: 47368 - DNA, 19 bp, Homo sapiens
  siRNA target sequence for SRRM1 (NM_005839.1,1372-1390).
gaaaagtagagttatctga

SEQ ID NO: 47369 - DNA, 19 bp, Homo sapiens
  siRNA target sequence for SRRM1 (NM_005839.1,1437-1455).
cagcagagacgccaataca

SEQ ID NO: 47370 - DNA, 19 bp, Homo sapiens
  siRNA target sequence for TRA2A (NM_013293.2,226-244).
gaactcctgctcgtgtaaa

SEQ ID NO: 47371 - DNA, 19 bp, Homo sapiens
  siRNA target sequence for TRA2A (NM_013293.2,271-289).
gtccatcaagggtttccaa

SEQ ID NO: 47372 - DNA, 19 bp, Homo sapiens
  siRNA target sequence for TRA2A (NM_013293.2,282-300).
gtttccaaacactctgaat

SEQ ID NO: 47373 - DNA, 19 bp, Homo sapiens
  siRNA target sequence for TRA2A (NM_013293.2,302-320).
ccattctcgatcaagatca

SEQ ID NO: 47374 - DNA, 19 bp, Homo sapiens
  siRNA target sequence for TRA2A (NM_013293.2,309-327).
cgatcaagatcaaaatcca

SEQ ID NO: 47375 - DNA, 19 bp, Homo sapiens
  siRNA target sequence for TRA2A (NM_013293.2,334-352).
ggtcaaggagacattctca

SEQ ID NO: 47376 - DNA, 19 bp, Homo sapiens
  siRNA target sequence for TRA2A (NM_013293.2,335-353).
gtcaaggagacattctcat

SEQ ID NO: 47377 - DNA, 19 bp, Homo sapiens
  siRNA target sequence for TRA2A (NM_013293.2,399-417).
cgatctcgaagtagatcat

SEQ ID NO: 47378 - DNA, 19 bp, Homo sapiens
  siRNA target sequence for TRA2A (NM_013293.2,400-418).
gatctcgaagtagatcata

SEQ ID NO: 47379 - DNA, 19 bp, Homo sapiens
  siRNA target sequence for TRA2A (NM_013293.2,412-430).
gatcatatacaccagaata

SEQ ID NO: 47380 - DNA, 19 bp, Homo sapiens
  siRNA target sequence for TRA2A (NM_013293.2,464-482).
gtctaaccggagaagacat

SEQ ID NO: 47381 - DNA, 19 bp, Homo sapiens
  siRNA target sequence for TRA2A (NM_013293.2,556-574).
gggatcttcgtgaagtatt

SEQ ID NO: 47382 - DNA, 19 bp, Homo sapiens
  siRNA target sequence for TRA2A (NM_013293.2,557-575).
ggatcttcgtgaagtattt

SEQ ID NO: 47383 - DNA, 19 bp, Homo sapiens
  siRNA target sequence for TRA2A (NM_013293.2,589-607).
cattgagtggtgtcaatgt

SEQ ID NO: 47384 - DNA, 19 bp, Homo sapiens
  siRNA target sequence for TRA2A (NM_013293.2,595-613).
gtggtgtcaatgtggttta

SEQ ID NO: 47385 - DNA, 19 bp, Homo sapiens
  siRNA target sequence for TRA2A (NM_013293.2,629-647).
gcgatctcgaggatttgct

SEQ ID NO: 47386 - DNA, 19 bp, Homo sapiens
  siRNA target sequence for TRA2A (NM_013293.2,630-648).
cgatctcgaggatttgctt

SEQ ID NO: 47387 - DNA, 19 bp, Homo sapiens
  siRNA target sequence for TRA2A (NM_013293.2,631-649).
gatctcgaggatttgcttt

SEQ ID NO: 47388 - DNA, 19 bp, Homo sapiens
  siRNA target sequence for TRA2A (NM_013293.2,707-725).
ggagctggatggtagaaga

SEQ ID NO: 47389 - DNA, 19 bp, Homo sapiens
  siRNA target sequence for TRA2A (NM_013293.2,849-867).
ggcagacgtcgagattctt

SEQ ID NO: 47390 - DNA, 19 bp, Homo sapiens
  siRNA target sequence for TRA2A (NM_013293.2,850-868).
gcagacgtcgagattctta

SEQ ID NO: 47391 - DNA, 19 bp, Homo sapiens
  siRNA target sequence for TRA2A (NM_013293.2,853-871).
gacgtcgagattcttacta

SEQ ID NO: 47392 - DNA, 19 bp, Homo sapiens
  siRNA target sequence for TRA2A (NM_013293.2,856-874).
gtcgagattcttactatga

SEQ ID NO: 47393 - DNA, 19 bp, Homo sapiens
  siRNA target sequence for TRA2A (NM_013293.2,858-876).
cgagattcttactatgata

SEQ ID NO: 47394 - DNA, 19 bp, Homo sapiens
  siRNA target sequence for TRA2A (NM_013293.2,911-929).
ctatgattaccgatacaga

SEQ ID NO: 47395 - DNA, 19 bp, Homo sapiens
  siRNA target sequence for TRA2A (NM_013293.2,945-963).
ccttattatagtcgatata

SEQ ID NO: 47396 - DNA, 19 bp, Homo sapiens
  siRNA target sequence for U2AF1 (NM_006758.1,67-85).
gcaccgagaaagacaaagt

SEQ ID NO: 47397 - DNA, 19 bp, Homo sapiens
  siRNA target sequence for U2AF1 (NM_006758.1,136-154).
gctctcggttgcacaataa

SEQ ID NO: 47398 - DNA, 19 bp, Homo sapiens
  siRNA target sequence for U2AF1 (NM_006758.1,137-155).
ctctcggttgcacaataaa

SEQ ID NO: 47399 - DNA, 19 bp, Homo sapiens
  siRNA target sequence for U2AF1 (NM_006758.1,147-165).
cacaataaaccgacgttta

SEQ ID NO: 47400 - DNA, 19 bp, Homo sapiens
  siRNA target sequence for U2AF1 (NM_006758.1,172-190).
ccattgccctcttgaacat

SEQ ID NO: 47401 - DNA, 19 bp, Homo sapiens
  siRNA target sequence for U2AF1 (NM_006758.1,194-212).
ccgtaaccctcaaaactct

SEQ ID NO: 47402 - DNA, 19 bp, Homo sapiens
  siRNA target sequence for U2AF1 (NM_006758.1,195-213).
cgtaaccctcaaaactctt

SEQ ID NO: 47403 - DNA, 19 bp, Homo sapiens
  siRNA target sequence for U2AF1 (NM_006758.1,263-281).
ggaacactatgatgagttt

SEQ ID NO: 47404 - DNA, 19 bp, Homo sapiens
  siRNA target sequence for U2AF1 (NM_006758.1,264-282).
gaacactatgatgagtttt

SEQ ID NO: 47405 - DNA, 19 bp, Homo sapiens
  siRNA target sequence for U2AF1 (NM_006758.1,285-303).
gaggaggtttttacagaaa

SEQ ID NO: 47406 - DNA, 19 bp, Homo sapiens
  siRNA target sequence for U2AF1 (NM_006758.1,370-388).
ggaacgtgtacgtcaagtt

SEQ ID NO: 47407 - DNA, 19 bp, Homo sapiens
  siRNA target sequence for U2AF1 (NM_006758.1,371-389).
gaacgtgtacgtcaagttt

SEQ ID NO: 47408 - DNA, 19 bp, Homo sapiens
  siRNA target sequence for U2AF1 (NM_006758.1,425-443).
cttgaataaccgttggttt

SEQ ID NO: 47409 - DNA, 19 bp, Homo sapiens
  siRNA target sequence for U2AF1 (NM_006758.1,428-446).
gaataaccgttggtttaat

SEQ ID NO: 47410 - DNA, 19 bp, Homo sapiens
  siRNA target sequence for U2AF2 (NM_007279.1,65-83).
cggcagctcaacgagaata

SEQ ID NO: 47411 - DNA, 19 bp, Homo sapiens
  siRNA target sequence for U2AF2 (NM_007279.1,70-88).
gctcaacgagaataaacaa

SEQ ID NO: 47412 - DNA, 19 bp, Homo sapiens
  siRNA target sequence for U2AF2 (NM_007279.1,215-233).
cgacgacgcagcaaacctt

SEQ ID NO: 47413 - DNA, 19 bp, Homo sapiens
  siRNA target sequence for U2AF2 (NM_007279.1,216-234).
gacgacgcagcaaaccttt

SEQ ID NO: 47414 - DNA, 19 bp, Homo sapiens
  siRNA target sequence for U2AF2 (NM_007279.1,257-275).
cacggtggactgattcgtt

SEQ ID NO: 47415 - DNA, 19 bp, Homo sapiens
  siRNA target sequence for U2AF2 (NM_007279.1,370-388).
gcaagctgcgggtcagatt

SEQ ID NO: 47416 - DNA, 19 bp, Homo sapiens
  siRNA target sequence for U2AF2 (NM_007279.1,1260-1278).
gcaagtacgggcttgtcaa

SEQ ID NO: 47417 - DNA, 19 bp, Homo sapiens
  siRNA target sequence for U2AF2 (NM_007279.1,1342-1360).
ggagttcacctctgtgttt

SEQ ID NO: 47418 - DNA, 19 bp, Homo sapiens
  siRNA target sequence for U2AF2 (NM_007279.1,1412-1430).
gtggttgtcacaaaatact

SEQ ID NO: 47419 - DNA, 19 bp, Homo sapiens
  siRNA target sequence for U2AF2 (NM_007279.1,1429-1447).
ctgtgaccccgactcttat

SEQ ID NO: 47420 - DNA, 19 bp, Homo sapiens
  siRNA target sequence for U2AF2 (NM_007279.1,1431-1449).
gtgaccccgactcttatca

SEQ ID NO: 47421 - DNA, 19 bp, Homo sapiens
  siRNA target sequence for U5-116KD (NM_004247.1,63-81).
ggataccgacttatatgat

SEQ ID NO: 47422 - DNA, 19 bp, Homo sapiens
  siRNA target sequence for U5-116KD (NM_004247.1,68-86).
ccgacttatatgatgagtt

SEQ ID NO: 47423 - DNA, 19 bp, Homo sapiens
  siRNA target sequence for U5-116KD (NM_004247.1,69-87).
cgacttatatgatgagttt

SEQ ID NO: 47424 - DNA, 19 bp, Homo sapiens
  siRNA target sequence for U5-116KD (NM_004247.1,101-119).
gaccagagcttgattctga

SEQ ID NO: 47425 - DNA, 19 bp, Homo sapiens
  siRNA target sequence for U5-116KD (NM_004247.1,140-158).
gtagagagaccaaagatct

SEQ ID NO: 47426 - DNA, 19 bp, Homo sapiens
  siRNA target sequence for U5-116KD (NM_004247.1,186-204).
cgatgacgtaggagatcat

SEQ ID NO: 47427 - DNA, 19 bp, Homo sapiens
  siRNA target sequence for U5-116KD (NM_004247.1,323-341).
ctctcacagaacccattat

SEQ ID NO: 47428 - DNA, 19 bp, Homo sapiens
  siRNA target sequence for U5-116KD (NM_004247.1,388-406).
cctgttacggtgtatgaga

SEQ ID NO: 47429 - DNA, 19 bp, Homo sapiens
  siRNA target sequence for U5-116KD (NM_004247.1,389-407).
ctgttacggtgtatgagat

SEQ ID NO: 47430 - DNA, 19 bp, Homo sapiens
  siRNA target sequence for U5-116KD (NM_004247.1,395-413).
cggtgtatgagatggattt

SEQ ID NO: 47431 - DNA, 19 bp, Homo sapiens
  siRNA target sequence for U5-116KD (NM_004247.1,418-436).
gcggatctgatggataact

SEQ ID NO: 47432 - DNA, 19 bp, Homo sapiens
  siRNA target sequence for U5-116KD (NM_004247.1,514-532).
cagactcacccggaaatca

SEQ ID NO: 47433 - DNA, 19 bp, Homo sapiens
  siRNA target sequence for U5-116KD (NM_004247.1,588-606).
gagaggtgtaggcatcaaa

SEQ ID NO: 47434 - DNA, 19 bp, Homo sapiens
  siRNA target sequence for U5-116KD (NM_004247.1,592-610).
ggtgtaggcatcaaaagca

SEQ ID NO: 47435 - DNA, 19 bp, Homo sapiens
  siRNA target sequence for U5-116KD (NM_004247.1,821-839).
ctgtgtgcatcaacaagat

SEQ ID NO: 47436 - DNA, 19 bp, Homo sapiens
  siRNA target sequence for U5-116KD (NM_004247.1,861-879).
gaagctgcctccaactgat

SEQ ID NO: 47437 - DNA, 19 bp, Homo sapiens
  siRNA target sequence for U5-116KD (NM_004247.1,867-885).
gcctccaactgatgcttat

SEQ ID NO: 47438 - DNA, 19 bp, Homo sapiens
  siRNA target sequence for U5-116KD (NM_004247.1,869-887).
ctccaactgatgcttatta

SEQ ID NO: 47439 - DNA, 19 bp, Homo sapiens
  siRNA target sequence for U5-116KD (NM_004247.1,913-931).
gtcaatggattaataagca

SEQ ID NO: 47440 - DNA, 19 bp, Homo sapiens
  siRNA target sequence for U5-116KD (NM_004247.1,1044-1062).
cgacacctttggtgacatt

SEQ ID NO: 47441 - DNA, 19 bp, Homo sapiens
  siRNA target sequence for U5-116KD (NM_004247.1,1045-1063).
gacacctttggtgacatta

SEQ ID NO: 47442 - DNA, 19 bp, Homo sapiens
  siRNA target sequence for U5-116KD (NM_004247.1,1085-1103).
gactctggggtgacatcta

SEQ ID NO: 47443 - DNA, 19 bp, Homo sapiens
  siRNA target sequence for U5-116KD (NM_004247.1,1087-1105).
ctctggggtgacatctact

SEQ ID NO: 47444 - DNA, 19 bp, Homo sapiens
  siRNA target sequence for U5-116KD (NM_004247.1,1091-1109).
ggggtgacatctacttcaa

SEQ ID NO: 47445 - DNA, 19 bp, Homo sapiens
  siRNA target sequence for U5-116KD (NM_004247.1,1111-1129).
cctaagacgcgaaagttca

SEQ ID NO: 47446 - DNA, 19 bp, Homo sapiens
  siRNA target sequence for U5-116KD (NM_004247.1,1118-1136).
cgcgaaagttcaccaaaaa

SEQ ID NO: 47447 - DNA, 19 bp, Homo sapiens
  siRNA target sequence for U5-116KD (NM_004247.1,1163-1181).
gtttcgtggagtttatctt

SEQ ID NO: 47448 - DNA, 19 bp, Homo sapiens
  siRNA target sequence for U5-116KD (NM_004247.1,1310-1328).
ggctggtctgcaaaaagtt

SEQ ID NO: 47449 - DNA, 19 bp, Homo sapiens
  siRNA target sequence for U5-116KD (NM_004247.1,1312-1330).
ctggtctgcaaaaagttct

SEQ ID NO: 47450 - DNA, 19 bp, Homo sapiens
  siRNA target sequence for U5-116KD (NM_004247.1,1440-1458).
cctcggcgaggctatgagt

SEQ ID NO: 47451 - DNA, 19 bp, Homo sapiens
  siRNA target sequence for U5-116KD (NM_004247.1,1480-1498).
ctgatgtgccacactacta

SEQ ID NO: 47452 - DNA, 19 bp, Homo sapiens
  siRNA target sequence for U5-116KD (NM_004247.1,1487-1505).
gccacactactaagatgta

SEQ ID NO: 47453 - DNA, 19 bp, Homo sapiens
  siRNA target sequence for U5-116KD (NM_004247.1,1489-1507).
cacactactaagatgtaca

SEQ ID NO: 47454 - DNA, 19 bp, Homo sapiens
  siRNA target sequence for U5-116KD (NM_004247.1,1500-1518).
gatgtacagcacagatgat

SEQ ID NO: 47455 - DNA, 19 bp, Homo sapiens
  siRNA target sequence for U5-116KD (NM_004247.1,1548-1566).
gctgagtggcaccattcat

SEQ ID NO: 47456 - DNA, 19 bp, Homo sapiens
  siRNA target sequence for U5-116KD (NM_004247.1,1615-1633).
gaggaagactcccagatat

SEQ ID NO: 47457 - DNA, 19 bp, Homo sapiens
  siRNA target sequence for U5-116KD (NM_004247.1,1618-1636).
gaagactcccagatatgca

SEQ ID NO: 47458 - DNA, 19 bp, Homo sapiens
  siRNA target sequence for U5-116KD (NM_004247.1,1713-1731).
gattgaaggtgttgatcaa

SEQ ID NO: 47459 - DNA, 19 bp, Homo sapiens
  siRNA target sequence for U5-116KD (NM_004247.1,1721-1739).
gtgttgatcaaccaattgt

SEQ ID NO: 47460 - DNA, 19 bp, Homo sapiens
  siRNA target sequence for U5-116KD (NM_004247.1,1723-1741).
gttgatcaaccaattgtga

SEQ ID NO: 47461 - DNA, 19 bp, Homo sapiens
  siRNA target sequence for U5-116KD (NM_004247.1,1738-1756).
gtgaagacagcaaccataa

SEQ ID NO: 47462 - DNA, 19 bp, Homo sapiens
  siRNA target sequence for U5-116KD (NM_004247.1,1791-1809).
ccgacccttgaagttcaat

SEQ ID NO: 47463 - DNA, 19 bp, Homo sapiens
  siRNA target sequence for U5-116KD (NM_004247.1,1792-1810).
cgacccttgaagttcaata

SEQ ID NO: 47464 - DNA, 19 bp, Homo sapiens
  siRNA target sequence for U5-116KD (NM_004247.1,1888-1906).
gtcaacaagagctatccat

SEQ ID NO: 47465 - DNA, 19 bp, Homo sapiens
  siRNA target sequence for U5-116KD (NM_004247.1,1984-2002).
catgatttgcggaagatgt

SEQ ID NO: 47466 - DNA, 19 bp, Homo sapiens
  siRNA target sequence for U5-116KD (NM_004247.1,1995-2013).
gaagatgtactcagagata

SEQ ID NO: 47467 - DNA, 19 bp, Homo sapiens
  siRNA target sequence for U5-116KD (NM_004247.1,2029-2047).
gacccagttgtcacgtttt

SEQ ID NO: 47468 - DNA, 19 bp, Homo sapiens
  siRNA target sequence for U5-116KD (NM_004247.1,2031-2049).
cccagttgtcacgttttgt

SEQ ID NO: 47469 - DNA, 19 bp, Homo sapiens
  siRNA target sequence for U5-116KD (NM_004247.1,2050-2068).
gagacggtggtggaaacat

SEQ ID NO: 47470 - DNA, 19 bp, Homo sapiens
  siRNA target sequence for U5-116KD (NM_004247.1,2086-2104).
gctgaaacgcctaataaga

SEQ ID NO: 47471 - DNA, 19 bp, Homo sapiens
  siRNA target sequence for U5-116KD (NM_004247.1,2087-2105).
ctgaaacgcctaataagaa

SEQ ID NO: 47472 - DNA, 19 bp, Homo sapiens
  siRNA target sequence for U5-116KD (NM_004247.1,2089-2107).
gaaacgcctaataagaaga

SEQ ID NO: 47473 - DNA, 19 bp, Homo sapiens
  siRNA target sequence for U5-116KD (NM_004247.1,2093-2111).
cgcctaataagaagaacaa

SEQ ID NO: 47474 - DNA, 19 bp, Homo sapiens
  siRNA target sequence for U5-116KD (NM_004247.1,2167-2185).
gaggtggtccagattacgt

SEQ ID NO: 47475 - DNA, 19 bp, Homo sapiens
  siRNA target sequence for U5-116KD (NM_004247.1,2276-2294).
cgactggccccaacattct

SEQ ID NO: 47476 - DNA, 19 bp, Homo sapiens
  siRNA target sequence for U5-116KD (NM_004247.1,2393-2411).
ccctctgtgatgaattgat

SEQ ID NO: 47477 - DNA, 19 bp, Homo sapiens
  siRNA target sequence for U5-116KD (NM_004247.1,2409-2427).
gattcggaatgtcaagttt

SEQ ID NO: 47478 - DNA, 19 bp, Homo sapiens
  siRNA target sequence for U5-116KD (NM_004247.1,2413-2431).
cggaatgtcaagtttaaga

SEQ ID NO: 47479 - DNA, 19 bp, Homo sapiens
  siRNA target sequence for U5-116KD (NM_004247.1,2414-2432).
ggaatgtcaagtttaagat

SEQ ID NO: 47480 - DNA, 19 bp, Homo sapiens
  siRNA target sequence for U5-116KD (NM_004247.1,2539-2557).
ctgatggagccttactact

SEQ ID NO: 47481 - DNA, 19 bp, Homo sapiens
  siRNA target sequence for U5-116KD (NM_004247.1,2541-2559).
gatggagccttactacttt

SEQ ID NO: 47482 - DNA, 19 bp, Homo sapiens
  siRNA target sequence for U5-116KD (NM_004247.1,2544-2562).
ggagccttactactttgta

SEQ ID NO: 47483 - DNA, 19 bp, Homo sapiens
  siRNA target sequence for U5-116KD (NM_004247.1,2695-2713).
gactcttttggctttgaga

SEQ ID NO: 47484 - DNA, 19 bp, Homo sapiens
  siRNA target sequence for U5-116KD (NM_004247.1,2851-2869).
cgggaattcatgatcaaaa

SEQ ID NO: 47485 - DNA, 19 bp, Homo sapiens
  siRNA target sequence for U5-116KD (NM_004247.1,2896-2914).
gatgtgagcatcagcaaat

SEQ ID NO: 47486 - DNA, 19 bp, Homo sapiens
  siRNA target sequence for U5-116KD (NM_004247.1,2950-2968).
caggatgttgtgctcaatt

SEQ ID NO: 47487 - DNA, 19 bp, Homo sapiens
  siRNA target sequence for USP39 (NM_006590.1,507-525).
ctccacaccctcaagtttt

SEQ ID NO: 47488 - DNA, 19 bp, Homo sapiens
  siRNA target sequence for USP39 (NM_006590.1,665-683).
cttacctgccgggtattgt

SEQ ID NO: 47489 - DNA, 19 bp, Homo sapiens
  siRNA target sequence for USP39 (NM_006590.1,676-694).
ggtattgtgggactgaata

SEQ ID NO: 47490 - DNA, 19 bp, Homo sapiens
  siRNA target sequence for USP39 (NM_006590.1,682-700).
gtgggactgaataacataa

SEQ ID NO: 47491 - DNA, 19 bp, Homo sapiens
  siRNA target sequence for USP39 (NM_006590.1,748-766).
cctcctctccggaactact

SEQ ID NO: 47492 - DNA, 19 bp, Homo sapiens
  siRNA target sequence for USP39 (NM_006590.1,749-767).
ctcctctccggaactactt

SEQ ID NO: 47493 - DNA, 19 bp, Homo sapiens
  siRNA target sequence for USP39 (NM_006590.1,752-770).
ctctccggaactactttct

SEQ ID NO: 47494 - DNA, 19 bp, Homo sapiens
  siRNA target sequence for USP39 (NM_006590.1,800-818).
gtcctccaggggatatcat

SEQ ID NO: 47495 - DNA, 19 bp, Homo sapiens
  siRNA target sequence for USP39 (NM_006590.1,802-820).
cctccaggggatatcatgt

SEQ ID NO: 47496 - DNA, 19 bp, Homo sapiens
  siRNA target sequence for USP39 (NM_006590.1,803-821).
ctccaggggatatcatgtt

SEQ ID NO: 47497 - DNA, 19 bp, Homo sapiens
  siRNA target sequence for USP39 (NM_006590.1,805-823).
ccaggggatatcatgttct

SEQ ID NO: 47498 - DNA, 19 bp, Homo sapiens
  siRNA target sequence for USP39 (NM_006590.1,859-877).
ctctggaaccctcgaaatt

SEQ ID NO: 47499 - DNA, 19 bp, Homo sapiens
  siRNA target sequence for USP39 (NM_006590.1,863-881).
ggaaccctcgaaatttcaa

SEQ ID NO: 47500 - DNA, 19 bp, Homo sapiens
  siRNA target sequence for USP39 (NM_006590.1,903-921).
gatgcttcaggcagttgta

SEQ ID NO: 47501 - DNA, 19 bp, Homo sapiens
  siRNA target sequence for USP39 (NM_006590.1,916-934).
gttgtactttgcagtaaga

SEQ ID NO: 47502 - DNA, 19 bp, Homo sapiens
  siRNA target sequence for USP39 (NM_006590.1,961-979).
gatggcgttgactttctgt

SEQ ID NO: 47503 - DNA, 19 bp, Homo sapiens
  siRNA target sequence for USP39 (NM_006590.1,1035-1053).
gactattgtgactgatgtt

SEQ ID NO: 47504 - DNA, 19 bp, Homo sapiens
  siRNA target sequence for USP39 (NM_006590.1,1060-1078).
gggtccatgaggatcttca

SEQ ID NO: 47505 - DNA, 19 bp, Homo sapiens
  siRNA target sequence for USP39 (NM_006590.1,1070-1088).
ggatcttcactaaaaagct

SEQ ID NO: 47506 - DNA, 19 bp, Homo sapiens
  siRNA target sequence for USP39 (NM_006590.1,1071-1089).
gatcttcactaaaaagctt

SEQ ID NO: 47507 - DNA, 19 bp, Homo sapiens
  siRNA target sequence for USP39 (NM_006590.1,1241-1259).
cccaagtgccactcttcaa

SEQ ID NO: 47508 - DNA, 19 bp, Homo sapiens
  siRNA target sequence for USP39 (NM_006590.1,1260-1278).
catcctggctaagttcaat

SEQ ID NO: 47509 - DNA, 19 bp, Homo sapiens
  siRNA target sequence for USP39 (NM_006590.1,1341-1359).
caagttgcctccatatcta

SEQ ID NO: 47510 - DNA, 19 bp, Homo sapiens
  siRNA target sequence for USP39 (NM_006590.1,1348-1366).
cctccatatctaatctttt

SEQ ID NO: 47511 - DNA, 19 bp, Homo sapiens
  siRNA target sequence for USP39 (NM_006590.1,1382-1400).
ctaagaacaacttctttgt

SEQ ID NO: 47512 - DNA, 19 bp, Homo sapiens
  siRNA target sequence for USP39 (NM_006590.1,1421-1439).
gtcaatttccctattacaa

SEQ ID NO: 47513 - DNA, 19 bp, Homo sapiens
  siRNA target sequence for USP39 (NM_006590.1,1423-1441).
caatttccctattacaaat

SEQ ID NO: 47514 - DNA, 19 bp, Homo sapiens
  siRNA target sequence for AUH (NM_001698.1,311-329).
ctcagtaaaaatcttataa

SEQ ID NO: 47515 - DNA, 19 bp, Homo sapiens
  siRNA target sequence for AUH (NM_001698.1,370-388).
gaaagtacggaccataata

SEQ ID NO: 47516 - DNA, 19 bp, Homo sapiens
  siRNA target sequence for AUH (NM_001698.1,374-392).
gtacggaccataataatca

SEQ ID NO: 47517 - DNA, 19 bp, Homo sapiens
  siRNA target sequence for AUH (NM_001698.1,422-440).
ggtgctgaccttaaggaaa

SEQ ID NO: 47518 - DNA, 19 bp, Homo sapiens
  siRNA target sequence for AUH (NM_001698.1,489-507).
gagcagtgattaacgatat

SEQ ID NO: 47519 - DNA, 19 bp, Homo sapiens
  siRNA target sequence for AUH (NM_001698.1,494-512).
gtgattaacgatattgcta

SEQ ID NO: 47520 - DNA, 19 bp, Homo sapiens
  siRNA target sequence for AUH (NM_001698.1,572-590).
ctggctttagcctgtgata

SEQ ID NO: 47521 - DNA, 19 bp, Homo sapiens
  siRNA target sequence for AUH (NM_001698.1,574-592).
ggctttagcctgtgatata

SEQ ID NO: 47522 - DNA, 19 bp, Homo sapiens
  siRNA target sequence for AUH (NM_001698.1,821-839).
gacctggcgagagagtttt

SEQ ID NO: 47523 - DNA, 19 bp, Homo sapiens
  siRNA target sequence for AUH (NM_001698.1,823-841).
cctggcgagagagttttta

SEQ ID NO: 47524 - DNA, 19 bp, Homo sapiens
  siRNA target sequence for AUH (NM_001698.1,847-865).
gggacctgttgcaatgaga

SEQ ID NO: 47525 - DNA, 19 bp, Homo sapiens
  siRNA target sequence for AUH (NM_001698.1,858-876).
caatgagagtggcaaaatt

SEQ ID NO: 47526 - DNA, 19 bp, Homo sapiens
  siRNA target sequence for AUH (NM_001698.1,864-882).
gagtggcaaaattagcaat

SEQ ID NO: 47527 - DNA, 19 bp, Homo sapiens
  siRNA target sequence for AUH (NM_001698.1,868-886).
ggcaaaattagcaattaat

SEQ ID NO: 47528 - DNA, 19 bp, Homo sapiens
  siRNA target sequence for AUH (NM_001698.1,891-909).
ggatggaggtcgatttagt

SEQ ID NO: 47529 - DNA, 19 bp, Homo sapiens
  siRNA target sequence for AUH (NM_001698.1,892-910).
gatggaggtcgatttagta

SEQ ID NO: 47530 - DNA, 19 bp, Homo sapiens
  siRNA target sequence for AUH (NM_001698.1,895-913).
ggaggtcgatttagtaaca

SEQ ID NO: 47531 - DNA, 19 bp, Homo sapiens
  siRNA target sequence for AUH (NM_001698.1,964-982).
cagacttgaaggtcttctt

SEQ ID NO: 47532 - DNA, 19 bp, Homo sapiens
  siRNA target sequence for AUH (NM_001698.1,971-989).
gaaggtcttcttgctttta

SEQ ID NO: 47533 - DNA, 19 bp, Homo sapiens
  siRNA target sequence for CPSF1 (NM_013291.1,441-459).
cgggtttgtgcagaatgta

SEQ ID NO: 47534 - DNA, 19 bp, Homo sapiens
  siRNA target sequence for CPSF1 (NM_013291.1,497-515).
gtgcagccatgcttgtcta

SEQ ID NO: 47535 - DNA, 19 bp, Homo sapiens
  siRNA target sequence for CPSF1 (NM_013291.1,896-914).
ccgtcaactcgctgttgta

SEQ ID NO: 47536 - DNA, 19 bp, Homo sapiens
  siRNA target sequence for CPSF1 (NM_013291.1,1123-1141).
cgagcgttccactttgaca

SEQ ID NO: 47537 - DNA, 19 bp, Homo sapiens
  siRNA target sequence for CPSF1 (NM_013291.1,1124-1142).
gagcgttccactttgacaa

SEQ ID NO: 47538 - DNA, 19 bp, Homo sapiens
  siRNA target sequence for CPSF1 (NM_013291.1,1614-1632).
ccaggtggtgacaaccttt

SEQ ID NO: 47539 - DNA, 19 bp, Homo sapiens
  siRNA target sequence for CPSF1 (NM_013291.1,1763-1781).
gacacggattcctgattct

SEQ ID NO: 47540 - DNA, 19 bp, Homo sapiens
  siRNA target sequence for CPSF1 (NM_013291.1,1765-1783).
cacggattcctgattctga

SEQ ID NO: 47541 - DNA, 19 bp, Homo sapiens
  siRNA target sequence for CPSF1 (NM_013291.1,1887-1905).
cggggacaaccgctacatt

SEQ ID NO: 47542 - DNA, 19 bp, Homo sapiens
  siRNA target sequence for CPSF1 (NM_013291.1,2713-2731).
ctcaaagtccgctttaaga

SEQ ID NO: 47543 - DNA, 19 bp, Homo sapiens
  siRNA target sequence for CPSF1 (NM_013291.1,2844-2862).
ccgctacttcgaggatatt

SEQ ID NO: 47544 - DNA, 19 bp, Homo sapiens
  siRNA target sequence for CPSF1 (NM_013291.1,2845-2863).
cgctacttcgaggatattt

SEQ ID NO: 47545 - DNA, 19 bp, Homo sapiens
  siRNA target sequence for CPSF1 (NM_013291.1,2846-2864).
gctacttcgaggatattta

SEQ ID NO: 47546 - DNA, 19 bp, Homo sapiens
  siRNA target sequence for CPSF1 (NM_013291.1,2867-2885).
gctactcaggggtcttcat

SEQ ID NO: 47547 - DNA, 19 bp, Homo sapiens
  siRNA target sequence for CPSF1 (NM_013291.1,3107-3125).
gctgcacggcccactatgt

SEQ ID NO: 47548 - DNA, 19 bp, Homo sapiens
  siRNA target sequence for CPSF1 (NM_013291.1,4028-4046).
cggtcgtgtgggagaataa

SEQ ID NO: 47549 - DNA, 19 bp, Homo sapiens
  siRNA target sequence for CPSF1 (NM_013291.1,4314-4332).
cggcaccacaccagacata

SEQ ID NO: 47550 - DNA, 19 bp, Homo sapiens
  siRNA target sequence for CPSF1 (NM_013291.1,4315-4333).
ggcaccacaccagacataa

SEQ ID NO: 47551 - DNA, 19 bp, Homo sapiens
  siRNA target sequence for CPSF1 (NM_013291.1,4316-4334).
gcaccacaccagacataat

SEQ ID NO: 47552 - DNA, 19 bp, Homo sapiens
  siRNA target sequence for CPSF1 (NM_013291.1,4319-4337).
ccacaccagacataatcct

SEQ ID NO: 47553 - DNA, 19 bp, Homo sapiens
  siRNA target sequence for ELAVL1 (NM_001419.2,213-231).
gacatcgggagaacgaatt

SEQ ID NO: 47554 - DNA, 19 bp, Homo sapiens
  siRNA target sequence for ELAVL1 (NM_001419.2,226-244).
cgaatttgatcgtcaacta

SEQ ID NO: 47555 - DNA, 19 bp, Homo sapiens
  siRNA target sequence for ELAVL1 (NM_001419.2,460-478).
cgagctcagaggtgatcaa

SEQ ID NO: 47556 - DNA, 19 bp, Homo sapiens
  siRNA target sequence for ELAVL1 (NM_001419.2,463-481).
gctcagaggtgatcaaaga

SEQ ID NO: 47557 - DNA, 19 bp, Homo sapiens
  siRNA target sequence for ELAVL1 (NM_001419.2,480-498).
gacgccaacttgtacatca

SEQ ID NO: 47558 - DNA, 19 bp, Homo sapiens
  siRNA target sequence for ELAVL1 (NM_001419.2,604-622).
ccagaggggttgcgtttat

SEQ ID NO: 47559 - DNA, 19 bp, Homo sapiens
  siRNA target sequence for ELAVL1 (NM_001419.2,661-679).
ccagtttcaatggtcataa

SEQ ID NO: 47560 - DNA, 19 bp, Homo sapiens
  siRNA target sequence for ELAVL1 (NM_001419.2,832-850).
ccatgggcgtcgatcacat

SEQ ID NO: 47561 - DNA, 19 bp, Homo sapiens
  siRNA target sequence for ELAVL1 (NM_001419.2,898-916).
ggtgcattttcatctacaa

SEQ ID NO: 47562 - DNA, 19 bp, Homo sapiens
  siRNA target sequence for ELAVL2 (NM_004432.1,608-626).
gccaacttgcaataacaca

SEQ ID NO: 47563 - DNA, 19 bp, Homo sapiens
  siRNA target sequence for ELAVL2 (NM_004432.1,633-651).
ggtccaaccaccataaaca

SEQ ID NO: 47564 - DNA, 19 bp, Homo sapiens
  siRNA target sequence for ELAVL2 (NM_004432.1,694-712).
gcaagaccaacttaatagt

SEQ ID NO: 47565 - DNA, 19 bp, Homo sapiens
  siRNA target sequence for ELAVL2 (NM_004432.1,743-761).
ggaactaaagagtctcttt

SEQ ID NO: 47566 - DNA, 19 bp, Homo sapiens
  siRNA target sequence for ELAVL2 (NM_004432.1,782-800).
gtcctgtaagcttgtaaga

SEQ ID NO: 47567 - DNA, 19 bp, Homo sapiens
  siRNA target sequence for ELAVL2 (NM_004432.1,784-802).
cctgtaagcttgtaagaga

SEQ ID NO: 47568 - DNA, 19 bp, Homo sapiens
  siRNA target sequence for ELAVL2 (NM_004432.1,923-941).
ctatgctcgcccaagttca

SEQ ID NO: 47569 - DNA, 19 bp, Homo sapiens
  siRNA target sequence for ELAVL2 (NM_004432.1,969-987).
gtcagcggacttccaaaaa

SEQ ID NO: 47570 - DNA, 19 bp, Homo sapiens
  siRNA target sequence for ELAVL2 (NM_004432.1,971-989).
cagcggacttccaaaaaca

SEQ ID NO: 47571 - DNA, 19 bp, Homo sapiens
  siRNA target sequence for ELAVL2 (NM_004432.1,973-991).
gcggacttccaaaaacaat

SEQ ID NO: 47572 - DNA, 19 bp, Homo sapiens
  siRNA target sequence for ELAVL2 (NM_004432.1,1001-1019).
ggagttggaacagcttttt

SEQ ID NO: 47573 - DNA, 19 bp, Homo sapiens
  siRNA target sequence for ELAVL2 (NM_004432.1,1008-1026).
gaacagcttttttcacaat

SEQ ID NO: 47574 - DNA, 19 bp, Homo sapiens
  siRNA target sequence for ELAVL2 (NM_004432.1,1013-1031).
gcttttttcacaatatgga

SEQ ID NO: 47575 - DNA, 19 bp, Homo sapiens
  siRNA target sequence for ELAVL2 (NM_004432.1,1021-1039).
cacaatatggacgcattat

SEQ ID NO: 47576 - DNA, 19 bp, Homo sapiens
  siRNA target sequence for ELAVL2 (NM_004432.1,1023-1041).
caatatggacgcattatta

SEQ ID NO: 47577 - DNA, 19 bp, Homo sapiens
  siRNA target sequence for ELAVL2 (NM_004432.1,1034-1052).
cattattacttctcgtatt

SEQ ID NO: 47578 - DNA, 19 bp, Homo sapiens
  siRNA target sequence for ELAVL2 (NM_004432.1,1078-1096).
caaggggtgtagggtttat

SEQ ID NO: 47579 - DNA, 19 bp, Homo sapiens
  siRNA target sequence for ELAVL2 (NM_004432.1,1082-1100).
gggtgtagggtttattcga

SEQ ID NO: 47580 - DNA, 19 bp, Homo sapiens
  siRNA target sequence for ELAVL2 (NM_004432.1,1083-1101).
ggtgtagggtttattcgat

SEQ ID NO: 47581 - DNA, 19 bp, Homo sapiens
  siRNA target sequence for ELAVL2 (NM_004432.1,1089-1107).
gggtttattcgatttgaca

SEQ ID NO: 47582 - DNA, 19 bp, Homo sapiens
  siRNA target sequence for ELAVL2 (NM_004432.1,1099-1117).
gatttgacaagcgaattga

SEQ ID NO: 47583 - DNA, 19 bp, Homo sapiens
  siRNA target sequence for ELAVL2 (NM_004432.1,1244-1262).
gtctccaaacagaaggtat

SEQ ID NO: 47584 - DNA, 19 bp, Homo sapiens
  siRNA target sequence for ELAVL2 (NM_004432.1,1402-1420).
gaacagggtggtgtatatt

SEQ ID NO: 47585 - DNA, 19 bp, Homo sapiens
  siRNA target sequence for ELAVL2 (NM_004432.1,1408-1426).
ggtggtgtatatttgtgta

SEQ ID NO: 47586 - DNA, 19 bp, Homo sapiens
  siRNA target sequence for ELAVL2 (NM_004432.1,1453-1471).
gtatcctgtggcaaatgtt

SEQ ID NO: 47587 - DNA, 19 bp, Homo sapiens
  siRNA target sequence for ELAVL2 (NM_004432.1,1512-1530).
gactttaacaccaataaat

SEQ ID NO: 47588 - DNA, 19 bp, Homo sapiens
  siRNA target sequence for ELAVL2 (NM_004432.1,1522-1540).
ccaataaatgcaaaggttt

SEQ ID NO: 47589 - DNA, 19 bp, Homo sapiens
  siRNA target sequence for ELAVL2 (NM_004432.1,1537-1555).
gttttggatttgtgactat

SEQ ID NO: 47590 - DNA, 19 bp, Homo sapiens
  siRNA target sequence for ELAVL2 (NM_004432.1,1629-1647).
gtctcctttaagacaaaca

SEQ ID NO: 47591 - DNA, 19 bp, Homo sapiens
  siRNA target sequence for ELAVL3 (NM_001420.2,220-238).
ggccactccttggtacaaa

SEQ ID NO: 47592 - DNA, 19 bp, Homo sapiens
  siRNA target sequence for ELAVL3 (NM_001420.2,221-239).
gccactccttggtacaaat

SEQ ID NO: 47593 - DNA, 19 bp, Homo sapiens
  siRNA target sequence for ELAVL3 (NM_001420.2,384-402).
cttggctacgggtttgtga

SEQ ID NO: 47594 - DNA, 19 bp, Homo sapiens
  siRNA target sequence for ELAVL3 (NM_001420.2,389-407).
ctacgggtttgtgaactat

SEQ ID NO: 47595 - DNA, 19 bp, Homo sapiens
  siRNA target sequence for ELAVL3 (NM_001420.2,442-460).
ccctcaacggcctcaaatt

SEQ ID NO: 47596 - DNA, 19 bp, Homo sapiens
  siRNA target sequence for ELAVL3 (NM_001420.2,443-461).
cctcaacggcctcaaatta

SEQ ID NO: 47597 - DNA, 19 bp, Homo sapiens
  siRNA target sequence for ELAVL3 (NM_001420.2,505-523).
catccatccgggatgctaa

SEQ ID NO: 47598 - DNA, 19 bp, Homo sapiens
  siRNA target sequence for ELAVL3 (NM_001420.2,852-870).
cgtttccggctggacaatt

SEQ ID NO: 47599 - DNA, 19 bp, Homo sapiens
  siRNA target sequence for ELAVL3 (NM_001420.2,907-925).
cgatcgccatcgatggtat

SEQ ID NO: 47600 - DNA, 19 bp, Homo sapiens
  siRNA target sequence for ELAVL4 (NM_021952.2,267-285).
ggtccgacatccaatacaa

SEQ ID NO: 47601 - DNA, 19 bp, Homo sapiens
  siRNA target sequence for ELAVL4 (NM_021952.2,365-383).
cctcatcgtcaactattta

SEQ ID NO: 47602 - DNA, 19 bp, Homo sapiens
  siRNA target sequence for ELAVL4 (NM_021952.2,477-495).
cagagtttagggtatggat

SEQ ID NO: 47603 - DNA, 19 bp, Homo sapiens
  siRNA target sequence for ELAVL4 (NM_021952.2,487-505).
ggtatggatttgttaacta

SEQ ID NO: 47604 - DNA, 19 bp, Homo sapiens
  siRNA target sequence for ELAVL4 (NM_021952.2,558-576).
ctccagaccaaaaccataa

SEQ ID NO: 47605 - DNA, 19 bp, Homo sapiens
  siRNA target sequence for ELAVL4 (NM_021952.2,594-612).
ccgagctctgcctcaatca

SEQ ID NO: 47606 - DNA, 19 bp, Homo sapiens
  siRNA target sequence for ELAVL4 (NM_021952.2,615-633).
gatgctaacctctatgtta

SEQ ID NO: 47607 - DNA, 19 bp, Homo sapiens
  siRNA target sequence for ELAVL4 (NM_021952.2,663-681).
gaactggagcaacttttct

SEQ ID NO: 47608 - DNA, 19 bp, Homo sapiens
  siRNA target sequence for ELAVL4 (NM_021952.2,682-700).
cgcaatacggccgtatcat

SEQ ID NO: 47609 - DNA, 19 bp, Homo sapiens
  siRNA target sequence for ELAVL4 (NM_021952.2,706-724).
cacgaatcctggttgatca

SEQ ID NO: 47610 - DNA, 19 bp, Homo sapiens
  siRNA target sequence for ELAVL4 (NM_021952.2,709-727).
gaatcctggttgatcaagt

SEQ ID NO: 47611 - DNA, 19 bp, Homo sapiens
  siRNA target sequence for ELAVL4 (NM_021952.2,739-757).
ccagaggggtgggattcat

SEQ ID NO: 47612 - DNA, 19 bp, Homo sapiens
  siRNA target sequence for ELAVL4 (NM_021952.2,826-844).
ctacggaaccgattactgt

SEQ ID NO: 47613 - DNA, 19 bp, Homo sapiens
  siRNA target sequence for ELAVL4 (NM_021952.2,1040-1058).
gttctccccaattaccatt

SEQ ID NO: 47614 - DNA, 19 bp, Homo sapiens
  siRNA target sequence for ELAVL4 (NM_021952.2,1043-1061).
ctccccaattaccattgat

SEQ ID NO: 47615 - DNA, 19 bp, Homo sapiens
  siRNA target sequence for ELAVL4 (NM_021952.2,1108-1126).
ctgggtggtgcatctttgt

SEQ ID NO: 47616 - DNA, 19 bp, Homo sapiens
  siRNA target sequence for ELAVL4 (NM_021952.2,1111-1129).
ggtggtgcatctttgtcta

SEQ ID NO: 47617 - DNA, 19 bp, Homo sapiens
  siRNA target sequence for ELAVL4 (NM_021952.2,1180-1198).
cctttggagcagtgaacaa

SEQ ID NO: 47618 - DNA, 19 bp, Homo sapiens
  siRNA target sequence for ELAVL4 (NM_021952.2,1185-1203).
ggagcagtgaacaacgtaa

SEQ ID NO: 47619 - DNA, 19 bp, Homo sapiens
  siRNA target sequence for ELAVL4 (NM_021952.2,1186-1204).
gagcagtgaacaacgtaaa

SEQ ID NO: 47620 - DNA, 19 bp, Homo sapiens
  siRNA target sequence for ELAVL4 (NM_021952.2,1189-1207).
cagtgaacaacgtaaaggt

SEQ ID NO: 47621 - DNA, 19 bp, Homo sapiens
  siRNA target sequence for ELAVL4 (NM_021952.2,1317-1335).
gacagagtgttgcaagttt

SEQ ID NO: 47622 - DNA, 19 bp, Homo sapiens
  siRNA target sequence for ELAVL4 (NM_021952.2,1321-1339).
gagtgttgcaagtttcctt

SEQ ID NO: 47623 - DNA, 19 bp, Homo sapiens
  siRNA target sequence for PARN (NM_002582.1,61-79).
gagataatcaggagcaatt

SEQ ID NO: 47624 - DNA, 19 bp, Homo sapiens
  siRNA target sequence for PARN (NM_002582.1,69-87).
caggagcaattttaagagt

SEQ ID NO: 47625 - DNA, 19 bp, Homo sapiens
  siRNA target sequence for PARN (NM_002582.1,135-153).
catcgatggggagttttca

SEQ ID NO: 47626 - DNA, 19 bp, Homo sapiens
  siRNA target sequence for PARN (NM_002582.1,240-258).
catggactttttgctattt

SEQ ID NO: 47627 - DNA, 19 bp, Homo sapiens
  siRNA target sequence for PARN (NM_002582.1,261-279).
gtttggcctttgcactttt

SEQ ID NO: 47628 - DNA, 19 bp, Homo sapiens
  siRNA target sequence for PARN (NM_002582.1,266-284).
gcctttgcacttttaagta

SEQ ID NO: 47629 - DNA, 19 bp, Homo sapiens
  siRNA target sequence for PARN (NM_002582.1,272-290).
gcacttttaagtatgacta

SEQ ID NO: 47630 - DNA, 19 bp, Homo sapiens
  siRNA target sequence for PARN (NM_002582.1,286-304).
gactacacagattcaaagt

SEQ ID NO: 47631 - DNA, 19 bp, Homo sapiens
  siRNA target sequence for PARN (NM_002582.1,295-313).
gattcaaagtatataacga

SEQ ID NO: 47632 - DNA, 19 bp, Homo sapiens
  siRNA target sequence for PARN (NM_002582.1,303-321).
gtatataacgaagtcattt

SEQ ID NO: 47633 - DNA, 19 bp, Homo sapiens
  siRNA target sequence for PARN (NM_002582.1,311-329).
cgaagtcatttaacttcta

SEQ ID NO: 47634 - DNA, 19 bp, Homo sapiens
  siRNA target sequence for PARN (NM_002582.1,336-354).
cccgaaacccttcaataga

SEQ ID NO: 47635 - DNA, 19 bp, Homo sapiens
  siRNA target sequence for PARN (NM_002582.1,337-355).
ccgaaacccttcaatagat

SEQ ID NO: 47636 - DNA, 19 bp, Homo sapiens
  siRNA target sequence for PARN (NM_002582.1,357-375).
ctcaccagatgtcaaattt

SEQ ID NO: 47637 - DNA, 19 bp, Homo sapiens
  siRNA target sequence for PARN (NM_002582.1,359-377).
caccagatgtcaaatttgt

SEQ ID NO: 47638 - DNA, 19 bp, Homo sapiens
  siRNA target sequence for PARN (NM_002582.1,406-424).
gcaagccagggatttgatt

SEQ ID NO: 47639 - DNA, 19 bp, Homo sapiens
  siRNA target sequence for PARN (NM_002582.1,407-425).
caagccagggatttgattt

SEQ ID NO: 47640 - DNA, 19 bp, Homo sapiens
  siRNA target sequence for PARN (NM_002582.1,489-507).
gcagtatgatgaaaaacgt

SEQ ID NO: 47641 - DNA, 19 bp, Homo sapiens
  siRNA target sequence for PARN (NM_002582.1,526-544).
ggagctctgtcctatgtat

SEQ ID NO: 47642 - DNA, 19 bp, Homo sapiens
  siRNA target sequence for PARN (NM_002582.1,580-598).
gaggatcaaaagaagttta

SEQ ID NO: 47643 - DNA, 19 bp, Homo sapiens
  siRNA target sequence for PARN (NM_002582.1,667-685).
ccatgtaccgggttccaaa

SEQ ID NO: 47644 - DNA, 19 bp, Homo sapiens
  siRNA target sequence for PARN (NM_002582.1,674-692).
ccgggttccaaagaaaact

SEQ ID NO: 47645 - DNA, 19 bp, Homo sapiens
  siRNA target sequence for PARN (NM_002582.1,675-693).
cgggttccaaagaaaacta

SEQ ID NO: 47646 - DNA, 19 bp, Homo sapiens
  siRNA target sequence for PARN (NM_002582.1,759-777).
gaaggagcgatatatagtt

SEQ ID NO: 47647 - DNA, 19 bp, Homo sapiens
  siRNA target sequence for PARN (NM_002582.1,763-781).
gagcgatatatagttatca

SEQ ID NO: 47648 - DNA, 19 bp, Homo sapiens
  siRNA target sequence for PARN (NM_002582.1,853-871).
gatgctgtgggattttcta

SEQ ID NO: 47649 - DNA, 19 bp, Homo sapiens
  siRNA target sequence for PARN (NM_002582.1,874-892).
gtcattcacgccattgcta

SEQ ID NO: 47650 - DNA, 19 bp, Homo sapiens
  siRNA target sequence for PARN (NM_002582.1,890-908).
ctaattcgggaaaacttgt

SEQ ID NO: 47651 - DNA, 19 bp, Homo sapiens
  siRNA target sequence for PARN (NM_002582.1,933-951).
cgtcatgcacacagttcat

SEQ ID NO: 47652 - DNA, 19 bp, Homo sapiens
  siRNA target sequence for PARN (NM_002582.1,974-992).
cggacttaagtgagtttaa

SEQ ID NO: 47653 - DNA, 19 bp, Homo sapiens
  siRNA target sequence for PARN (NM_002582.1,1015-1033).
cccagactcttggatacta

SEQ ID NO: 47654 - DNA, 19 bp, Homo sapiens
  siRNA target sequence for PARN (NM_002582.1,1016-1034).
ccagactcttggatactaa

SEQ ID NO: 47655 - DNA, 19 bp, Homo sapiens
  siRNA target sequence for PARN (NM_002582.1,1017-1035).
cagactcttggatactaaa

SEQ ID NO: 47656 - DNA, 19 bp, Homo sapiens
  siRNA target sequence for PARN (NM_002582.1,1047-1065).
cacacaaccttttaaggat

SEQ ID NO: 47657 - DNA, 19 bp, Homo sapiens
  siRNA target sequence for PARN (NM_002582.1,1079-1097).
catcccttgcggaattgga

SEQ ID NO: 47658 - DNA, 19 bp, Homo sapiens
  siRNA target sequence for PARN (NM_002582.1,1122-1140).
caaccctcctaaagttgaa

SEQ ID NO: 47659 - DNA, 19 bp, Homo sapiens
  siRNA target sequence for PARN (NM_002582.1,1145-1163).
ccgaaggttttccaagtta

SEQ ID NO: 47660 - DNA, 19 bp, Homo sapiens
  siRNA target sequence for PARN (NM_002582.1,1238-1256).
ccaattacctaggttcttt

SEQ ID NO: 47661 - DNA, 19 bp, Homo sapiens
  siRNA target sequence for PARN (NM_002582.1,1239-1257).
caattacctaggttctttt

SEQ ID NO: 47662 - DNA, 19 bp, Homo sapiens
  siRNA target sequence for PARN (NM_002582.1,1283-1301).
ctgccagatcaaaactcat

SEQ ID NO: 47663 - DNA, 19 bp, Homo sapiens
  siRNA target sequence for PARN (NM_002582.1,1292-1310).
caaaactcattgaaccttt

SEQ ID NO: 47664 - DNA, 19 bp, Homo sapiens
  siRNA target sequence for PARN (NM_002582.1,1303-1321).
gaacctttttttaacaagt

SEQ ID NO: 47665 - DNA, 19 bp, Homo sapiens
  siRNA target sequence for PARN (NM_002582.1,1327-1345).
cttatgagggtcatggata

SEQ ID NO: 47666 - DNA, 19 bp, Homo sapiens
  siRNA target sequence for PARN (NM_002582.1,1338-1356).
catggatatcccctatcta

SEQ ID NO: 47667 - DNA, 19 bp, Homo sapiens
  siRNA target sequence for PARN (NM_002582.1,1342-1360).
gatatcccctatctaaact

SEQ ID NO: 47668 - DNA, 19 bp, Homo sapiens
  siRNA target sequence for PARN (NM_002582.1,1377-1395).
gcagcctaaacgtgatcat

SEQ ID NO: 47669 - DNA, 19 bp, Homo sapiens
  siRNA target sequence for PARN (NM_002582.1,1380-1398).
gcctaaacgtgatcatgtt

SEQ ID NO: 47670 - DNA, 19 bp, Homo sapiens
  siRNA target sequence for PARN (NM_002582.1,1382-1400).
ctaaacgtgatcatgttct

SEQ ID NO: 47671 - DNA, 19 bp, Homo sapiens
  siRNA target sequence for PARN (NM_002582.1,1405-1423).
gtgacattccccaaagaat

SEQ ID NO: 47672 - DNA, 19 bp, Homo sapiens
  siRNA target sequence for PARN (NM_002582.1,1435-1453).
gacctttaccagcttttca

SEQ ID NO: 47673 - DNA, 19 bp, Homo sapiens
  siRNA target sequence for PARN (NM_002582.1,1452-1470).
cagtgcctttggtaacatt

SEQ ID NO: 47674 - DNA, 19 bp, Homo sapiens
  siRNA target sequence for PARN (NM_002582.1,1462-1480).
ggtaacattcagatatcct

SEQ ID NO: 47675 - DNA, 19 bp, Homo sapiens
  siRNA target sequence for PARN (NM_002582.1,1489-1507).
gacacatcagcatttgttt

SEQ ID NO: 47676 - DNA, 19 bp, Homo sapiens
  siRNA target sequence for PARN (NM_002582.1,1514-1532).
gccagcccgagcaagtaaa

SEQ ID NO: 47677 - DNA, 19 bp, Homo sapiens
  siRNA target sequence for PARN (NM_002582.1,1518-1536).
gcccgagcaagtaaagatt

SEQ ID NO: 47678 - DNA, 19 bp, Homo sapiens
  siRNA target sequence for PARN (NM_002582.1,1537-1555).
gctgtcaataccagcaaat

SEQ ID NO: 47679 - DNA, 19 bp, Homo sapiens
  siRNA target sequence for PARN (NM_002582.1,1538-1556).
ctgtcaataccagcaaata

SEQ ID NO: 47680 - DNA, 19 bp, Homo sapiens
  siRNA target sequence for PARN (NM_002582.1,1565-1583).
gctatcggatccaaaccta

SEQ ID NO: 47681 - DNA, 19 bp, Homo sapiens
  siRNA target sequence for PARN (NM_002582.1,1566-1584).
ctatcggatccaaacctat

SEQ ID NO: 47682 - DNA, 19 bp, Homo sapiens
  siRNA target sequence for PARN (NM_002582.1,1658-1676).
ctgacagcaaacggttaaa

SEQ ID NO: 47683 - DNA, 19 bp, Homo sapiens
  siRNA target sequence for PARN (NM_002582.1,1708-1726).
cactattaccgcaacaata

SEQ ID NO: 47684 - DNA, 19 bp, Homo sapiens
  siRNA target sequence for PARN (NM_002582.1,1710-1728).
ctattaccgcaacaatagt

SEQ ID NO: 47685 - DNA, 19 bp, Homo sapiens
  siRNA target sequence for PARN (NM_002582.1,1716-1734).
ccgcaacaatagttttaca

SEQ ID NO: 47686 - DNA, 19 bp, Homo sapiens
  siRNA target sequence for PABPC3 (NM_030979.1,178-196).
ccaactacgcgtatgtgaa

SEQ ID NO: 47687 - DNA, 19 bp, Homo sapiens
  siRNA target sequence for PABPC3 (NM_030979.1,330-348).
gttaaaaatctggataagt

SEQ ID NO: 47688 - DNA, 19 bp, Homo sapiens
  siRNA target sequence for PABPC3 (NM_030979.1,341-359).
ggataagtccattaataat

SEQ ID NO: 47689 - DNA, 19 bp, Homo sapiens
  siRNA target sequence for PABPC3 (NM_030979.1,1370-1388).
cccaggtgctcctagagta

SEQ ID NO: 47690 - DNA, 19 bp, Homo sapiens
  siRNA target sequence for PABPC3 (NM_030979.1,1375-1393).
gtgctcctagagtaccatt

SEQ ID NO: 47691 - DNA, 19 bp, Homo sapiens
  siRNA target sequence for PABPC4 (NM_003819.2,915-933).
cgggtctgccgcgatatga

SEQ ID NO: 47692 - DNA, 19 bp, Homo sapiens
  siRNA target sequence for PABPC4 (NM_003819.2,916-934).
gggtctgccgcgatatgat

SEQ ID NO: 47693 - DNA, 19 bp, Homo sapiens
  siRNA target sequence for PABPC4 (NM_003819.2,918-936).
gtctgccgcgatatgatca

SEQ ID NO: 47694 - DNA, 19 bp, Homo sapiens
  siRNA target sequence for PABPC4 (NM_003819.2,1344-1362).
ggagccaaagccaaggaat

SEQ ID NO: 47695 - DNA, 19 bp, Homo sapiens
  siRNA target sequence for PABPC4 (NM_003819.2,1347-1365).
gccaaagccaaggaattca

SEQ ID NO: 47696 - DNA, 19 bp, Homo sapiens
  siRNA target sequence for PABPC4 (NM_003819.2,1643-1661).
gaaacaggagagaattagt

SEQ ID NO: 47697 - DNA, 19 bp, Homo sapiens
  siRNA target sequence for PABPC4 (NM_003819.2,1649-1667).
ggagagaattagtcgatat

SEQ ID NO: 47698 - DNA, 19 bp, Homo sapiens
  siRNA target sequence for PABPC4 (NM_003819.2,1663-1681).
gatatcagggggtgaatct

SEQ ID NO: 47699 - DNA, 19 bp, Homo sapiens
  siRNA target sequence for PABPC4 (NM_003819.2,1670-1688).
gggggtgaatctctacatt

SEQ ID NO: 47700 - DNA, 19 bp, Homo sapiens
  siRNA target sequence for PABPC4 (NM_003819.2,1671-1689).
ggggtgaatctctacatta

SEQ ID NO: 47701 - DNA, 19 bp, Homo sapiens
  siRNA target sequence for PABPC4 (NM_003819.2,1672-1690).
gggtgaatctctacattaa

SEQ ID NO: 47702 - DNA, 19 bp, Homo sapiens
  siRNA target sequence for PABPC4 (NM_003819.2,1691-1709).
gaacttggatgacactatt

SEQ ID NO: 47703 - DNA, 19 bp, Homo sapiens
  siRNA target sequence for PABPC4 (NM_003819.2,1740-1758).
ccttttggatcaattacca

SEQ ID NO: 47704 - DNA, 19 bp, Homo sapiens
  siRNA target sequence for PABPC4 (NM_003819.2,1868-1886).
gggctccaagccactatat

SEQ ID NO: 47705 - DNA, 19 bp, Homo sapiens
  siRNA target sequence for PABPC4 (NM_003819.2,1870-1888).
gctccaagccactatatgt

SEQ ID NO: 47706 - DNA, 19 bp, Homo sapiens
  siRNA target sequence for PABPC4 (NM_003819.2,1871-1889).
ctccaagccactatatgtt

SEQ ID NO: 47707 - DNA, 19 bp, Homo sapiens
  siRNA target sequence for PABPC4 (NM_003819.2,1971-1989).
cctgccaatgccatcttaa

SEQ ID NO: 47708 - DNA, 19 bp, Homo sapiens
  siRNA target sequence for PABPC4 (NM_003819.2,1975-1993).
ccaatgccatcttaaatca

SEQ ID NO: 47709 - DNA, 19 bp, Homo sapiens
  siRNA target sequence for PABPC4 (NM_003819.2,2005-2023).
cagcgggtggctactttgt

SEQ ID NO: 47710 - DNA, 19 bp, Homo sapiens
  siRNA target sequence for PABPC4 (NM_003819.2,2046-2064).
ggaaggcctccatattata

SEQ ID NO: 47711 - DNA, 19 bp, Homo sapiens
  siRNA target sequence for TIA1 (NM_022037.1,195-213).
gagatgcccaagactctat

SEQ ID NO: 47712 - DNA, 19 bp, Homo sapiens
  siRNA target sequence for TIA1 (NM_022037.1,525-543).
gcttttgcaccatttggaa

SEQ ID NO: 47713 - DNA, 19 bp, Homo sapiens
  siRNA target sequence for TIA1 (NM_022037.1,550-568).
cagatgcccgagtggtaaa

SEQ ID NO: 47714 - DNA, 19 bp, Homo sapiens
  siRNA target sequence for TIA1 (NM_022037.1,555-573).
gcccgagtggtaaaagaca

SEQ ID NO: 47715 - DNA, 19 bp, Homo sapiens
  siRNA target sequence for TIA1 (NM_022037.1,556-574).
cccgagtggtaaaagacat

SEQ ID NO: 47716 - DNA, 19 bp, Homo sapiens
  siRNA target sequence for TIA1 (NM_022037.1,631-649).
ctgaaaacgccattcaaca

SEQ ID NO: 47717 - DNA, 19 bp, Homo sapiens
  siRNA target sequence for TIA1 (NM_022037.1,673-691).
gaagacaaatcagaactaa

SEQ ID NO: 47718 - DNA, 19 bp, Homo sapiens
  siRNA target sequence for TIA1 (NM_022037.1,708-726).
cctcccgctccaaagagta

SEQ ID NO: 47719 - DNA, 19 bp, Homo sapiens
  siRNA target sequence for TIA1 (NM_022037.1,711-729).
cccgctccaaagagtacat

SEQ ID NO: 47720 - DNA, 19 bp, Homo sapiens
  siRNA target sequence for TIA1 (NM_022037.1,712-730).
ccgctccaaagagtacata

SEQ ID NO: 47721 - DNA, 19 bp, Homo sapiens
  siRNA target sequence for TIA1 (NM_022037.1,713-731).
cgctccaaagagtacatat

SEQ ID NO: 47722 - DNA, 19 bp, Homo sapiens
  siRNA target sequence for TIA1 (NM_022037.1,717-735).
ccaaagagtacatatgagt

SEQ ID NO: 47723 - DNA, 19 bp, Homo sapiens
  siRNA target sequence for TIA1 (NM_022037.1,722-740).
gagtacatatgagtcaaat

SEQ ID NO: 47724 - DNA, 19 bp, Homo sapiens
  siRNA target sequence for TIA1 (NM_022037.1,727-745).
catatgagtcaaataccaa

SEQ ID NO: 47725 - DNA, 19 bp, Homo sapiens
  siRNA target sequence for TIA1 (NM_022037.1,820-838).
ctgggctaacagaacaact

SEQ ID NO: 47726 - DNA, 19 bp, Homo sapiens
  siRNA target sequence for TIA1 (NM_022037.1,822-840).
gggctaacagaacaactaa

SEQ ID NO: 47727 - DNA, 19 bp, Homo sapiens
  siRNA target sequence for TIA1 (NM_022037.1,823-841).
ggctaacagaacaactaat

SEQ ID NO: 47728 - DNA, 19 bp, Homo sapiens
  siRNA target sequence for TIA1 (NM_022037.1,837-855).
ctaatgcgtcagacttttt

SEQ ID NO: 47729 - DNA, 19 bp, Homo sapiens
  siRNA target sequence for TIA1 (NM_022037.1,887-905).
ctttccagataaaggatat

SEQ ID NO: 47730 - DNA, 19 bp, Homo sapiens
  siRNA target sequence for TIA1 (NM_022037.1,891-909).
ccagataaaggatattcat

SEQ ID NO: 47731 - DNA, 19 bp, Homo sapiens
  siRNA target sequence for TIA1 (NM_022037.1,915-933).
cggttcaattcccatgaaa

SEQ ID NO: 47732 - DNA, 19 bp, Homo sapiens
  siRNA target sequence for TIA1 (NM_022037.1,917-935).
gttcaattcccatgaaagt

SEQ ID NO: 47733 - DNA, 19 bp, Homo sapiens
  siRNA target sequence for TIA1 (NM_022037.1,970-988).
ccattgaaggtcatgttgt

SEQ ID NO: 47734 - DNA, 19 bp, Homo sapiens
  siRNA target sequence for TIA1 (NM_022037.1,978-996).
ggtcatgttgtgaaatgct

SEQ ID NO: 47735 - DNA, 19 bp, Homo sapiens
  siRNA target sequence for TIA1 (NM_022037.1,979-997).
gtcatgttgtgaaatgcta

SEQ ID NO: 47736 - DNA, 19 bp, Homo sapiens
  siRNA target sequence for TIA1 (NM_022037.1,1001-1019).
gggcaaagaaactcttgat

SEQ ID NO: 47737 - DNA, 19 bp, Homo sapiens
  siRNA target sequence for TIA1 (NM_022037.1,1008-1026).
gaaactcttgatatgataa

SEQ ID NO: 47738 - DNA, 19 bp, Homo sapiens
  siRNA target sequence for TIA1 (NM_022037.1,1040-1058).
gcagaatcaaattggatat

SEQ ID NO: 47739 - DNA, 19 bp, Homo sapiens
  siRNA target sequence for TIA1 (NM_022037.1,1078-1096).
ggggccagtggtatggaaa

SEQ ID NO: 47740 - DNA, 19 bp, Homo sapiens
  siRNA target sequence for TIA1 (NM_022037.1,1079-1097).
gggccagtggtatggaaat

SEQ ID NO: 47741 - DNA, 19 bp, Homo sapiens
  siRNA target sequence for TIA1 (NM_022037.1,1088-1106).
gtatggaaatgcacaacaa

SEQ ID NO: 47742 - DNA, 19 bp, Homo sapiens
  siRNA target sequence for TIA1 (NM_022037.1,1112-1130).
ccagtatatgcctaatggt

SEQ ID NO: 47743 - DNA, 19 bp, Homo sapiens
  siRNA target sequence for TIA1 (NM_022037.1,1113-1131).
cagtatatgcctaatggtt

SEQ ID NO: 47744 - DNA, 19 bp, Homo sapiens
  siRNA target sequence for TIA1 (NM_022037.1,1133-1151).
gcaagttcctgcatatgga

SEQ ID NO: 47745 - DNA, 19 bp, Homo sapiens
  siRNA target sequence for TIA1 (NM_022173.1,479-497).
cacacagcgttcacaagat

SEQ ID NO: 47746 - DNA, 19 bp, Homo sapiens
  siRNA target sequence for PCF11 (NM_015885.2,317-335).
ggacgcctgtcgggattat

SEQ ID NO: 47747 - DNA, 19 bp, Homo sapiens
  siRNA target sequence for PCF11 (NM_015885.2,321-339).
gcctgtcgggattatcagt

SEQ ID NO: 47748 - DNA, 19 bp, Homo sapiens
  siRNA target sequence for PCF11 (NM_015885.2,347-365).
cgaagacctgaccttcaat

SEQ ID NO: 47749 - DNA, 19 bp, Homo sapiens
  siRNA target sequence for PCF11 (NM_015885.2,367-385).
gcaagccgcacatcaatat

SEQ ID NO: 47750 - DNA, 19 bp, Homo sapiens
  siRNA target sequence for PCF11 (NM_015885.2,472-490).
cagagaagcttcctgttat

SEQ ID NO: 47751 - DNA, 19 bp, Homo sapiens
  siRNA target sequence for PCF11 (NM_015885.2,474-492).
gagaagcttcctgttatgt

SEQ ID NO: 47752 - DNA, 19 bp, Homo sapiens
  siRNA target sequence for PCF11 (NM_015885.2,491-509).
gtaccttatggattctatt

SEQ ID NO: 47753 - DNA, 19 bp, Homo sapiens
  siRNA target sequence for PCF11 (NM_015885.2,530-548).
gtatctcactgcctttact

SEQ ID NO: 47754 - DNA, 19 bp, Homo sapiens
  siRNA target sequence for PCF11 (NM_015885.2,625-643).
gttctacatgggatgaaat

SEQ ID NO: 47755 - DNA, 19 bp, Homo sapiens
  siRNA target sequence for PCF11 (NM_015885.2,693-711).
gatcctgcttggcctatta

SEQ ID NO: 47756 - DNA, 19 bp, Homo sapiens
  siRNA target sequence for PCF11 (NM_015885.2,720-738).
ccccccaatgtgaatacgt

SEQ ID NO: 47757 - DNA, 19 bp, Homo sapiens
  siRNA target sequence for PCF11 (NM_015885.2,742-760).
gcatccatgtgaatcctaa

SEQ ID NO: 47758 - DNA, 19 bp, Homo sapiens
  siRNA target sequence for PCF11 (NM_015885.2,746-764).
ccatgtgaatcctaaattt

SEQ ID NO: 47759 - DNA, 19 bp, Homo sapiens
  siRNA target sequence for PCF11 (NM_015885.2,776-794).
gcccgaggagccttcaaca

SEQ ID NO: 47760 - DNA, 19 bp, Homo sapiens
  siRNA target sequence for PCF11 (NM_015885.2,832-850).
ctccaattgttcctgatat

SEQ ID NO: 47761 - DNA, 19 bp, Homo sapiens
  siRNA target sequence for PCF11 (NM_015885.2,840-858).
gttcctgatatacaaaaga

SEQ ID NO: 47762 - DNA, 19 bp, Homo sapiens
  siRNA target sequence for PCF11 (NM_015885.2,888-906).
cagttactggcaaagcaaa

SEQ ID NO: 47763 - DNA, 19 bp, Homo sapiens
  siRNA target sequence for PCF11 (NM_015885.2,962-980).
ggcacagttggcagtttct

SEQ ID NO: 47764 - DNA, 19 bp, Homo sapiens
  siRNA target sequence for PCF11 (NM_015885.2,1018-1036).
gatctgcaccatccaaatt

SEQ ID NO: 47765 - DNA, 19 bp, Homo sapiens
  siRNA target sequence for PCF11 (NM_015885.2,1021-1039).
ctgcaccatccaaattaca

SEQ ID NO: 47766 - DNA, 19 bp, Homo sapiens
  siRNA target sequence for PCF11 (NM_015885.2,1024-1042).
caccatccaaattacatgt

SEQ ID NO: 47767 - DNA, 19 bp, Homo sapiens
  siRNA target sequence for PCF11 (NM_015885.2,1026-1044).
ccatccaaattacatgttt

SEQ ID NO: 47768 - DNA, 19 bp, Homo sapiens
  siRNA target sequence for PCF11 (NM_015885.2,1110-1128).
ccaggaccatccttacaaa

SEQ ID NO: 47769 - DNA, 19 bp, Homo sapiens
  siRNA target sequence for PCF11 (NM_015885.2,1114-1132).
gaccatccttacaaattca

SEQ ID NO: 47770 - DNA, 19 bp, Homo sapiens
  siRNA target sequence for PCF11 (NM_015885.2,1120-1138).
ccttacaaattcaggattt

SEQ ID NO: 47771 - DNA, 19 bp, Homo sapiens
  siRNA target sequence for PCF11 (NM_015885.2,1121-1139).
cttacaaattcaggattta

SEQ ID NO: 47772 - DNA, 19 bp, Homo sapiens
  siRNA target sequence for PCF11 (NM_015885.2,1158-1176).
cctcgtctgaacaggataa

SEQ ID NO: 47773 - DNA, 19 bp, Homo sapiens
  siRNA target sequence for PCF11 (NM_015885.2,1169-1187).
caggataagccaacattct

SEQ ID NO: 47774 - DNA, 19 bp, Homo sapiens
  siRNA target sequence for PCF11 (NM_015885.2,1171-1189).
ggataagccaacattctca

SEQ ID NO: 47775 - DNA, 19 bp, Homo sapiens
  siRNA target sequence for PCF11 (NM_015885.2,1172-1190).
gataagccaacattctcat

SEQ ID NO: 47776 - DNA, 19 bp, Homo sapiens
  siRNA target sequence for PCF11 (NM_015885.2,1238-1256).
ccagtctgatactaagaca

SEQ ID NO: 47777 - DNA, 19 bp, Homo sapiens
  siRNA target sequence for PCF11 (NM_015885.2,1239-1257).
cagtctgatactaagacaa

SEQ ID NO: 47778 - DNA, 19 bp, Homo sapiens
  siRNA target sequence for PCF11 (NM_015885.2,1264-1282).
ctataccctctgaaaaact

SEQ ID NO: 47779 - DNA, 19 bp, Homo sapiens
  siRNA target sequence for PCF11 (NM_015885.2,1338-1356).
cttgaccaattagattcta

SEQ ID NO: 47780 - DNA, 19 bp, Homo sapiens
  siRNA target sequence for PCF11 (NM_015885.2,1341-1359).
gaccaattagattctaaat

SEQ ID NO: 47781 - DNA, 19 bp, Homo sapiens
  siRNA target sequence for PCF11 (NM_015885.2,1344-1362).
caattagattctaaatcga

SEQ ID NO: 47782 - DNA, 19 bp, Homo sapiens
  siRNA target sequence for PCF11 (NM_015885.2,1350-1368).
gattctaaatcgaaatcga

SEQ ID NO: 47783 - DNA, 19 bp, Homo sapiens
  siRNA target sequence for PCF11 (NM_015885.2,1428-1446).
caagaatcggaaagtatga

SEQ ID NO: 47784 - DNA, 19 bp, Homo sapiens
  siRNA target sequence for PCF11 (NM_015885.2,1502-1520).
gaccgatggcaaagatgat

SEQ ID NO: 47785 - DNA, 19 bp, Homo sapiens
  siRNA target sequence for PCF11 (NM_015885.2,1563-1581).
gatgagcacatgaagtcat

SEQ ID NO: 47786 - DNA, 19 bp, Homo sapiens
  siRNA target sequence for PCF11 (NM_015885.2,1680-1698).
ccagggagatcgagtacta

SEQ ID NO: 47787 - DNA, 19 bp, Homo sapiens
  siRNA target sequence for PCF11 (NM_015885.2,1683-1701).
gggagatcgagtactagaa

SEQ ID NO: 47788 - DNA, 19 bp, Homo sapiens
  siRNA target sequence for PCF11 (NM_015885.2,1727-1745).
gtctaggtcaccaattata

SEQ ID NO: 47789 - DNA, 19 bp, Homo sapiens
  siRNA target sequence for PCF11 (NM_015885.2,1729-1747).
ctaggtcaccaattataca

SEQ ID NO: 47790 - DNA, 19 bp, Homo sapiens
  siRNA target sequence for PCF11 (NM_015885.2,1842-1860).
ggagctaagcagtcacata

SEQ ID NO: 47791 - DNA, 19 bp, Homo sapiens
  siRNA target sequence for PCF11 (NM_015885.2,1843-1861).
gagctaagcagtcacatat

SEQ ID NO: 47792 - DNA, 19 bp, Homo sapiens
  siRNA target sequence for PCF11 (NM_015885.2,1846-1864).
ctaagcagtcacatatgga

SEQ ID NO: 47793 - DNA, 19 bp, Homo sapiens
  siRNA target sequence for PCF11 (NM_015885.2,1885-1903).
gggaagacagaaatgctaa

SEQ ID NO: 47794 - DNA, 19 bp, Homo sapiens
  siRNA target sequence for PCF11 (NM_015885.2,1900-1918).
ctaagagaagtactaaaca

SEQ ID NO: 47795 - DNA, 19 bp, Homo sapiens
  siRNA target sequence for PCF11 (NM_015885.2,1906-1924).
gaagtactaaacaggatat

SEQ ID NO: 47796 - DNA, 19 bp, Homo sapiens
  siRNA target sequence for PCF11 (NM_015885.2,1927-1945).
gggatccaaggcgaatgaa

SEQ ID NO: 47797 - DNA, 19 bp, Homo sapiens
  siRNA target sequence for PCF11 (NM_015885.2,1961-1979).
gcgaccacaagaaactaca

SEQ ID NO: 47798 - DNA, 19 bp, Homo sapiens
  siRNA target sequence for PCF11 (NM_015885.2,1962-1980).
cgaccacaagaaactacaa

SEQ ID NO: 47799 - DNA, 19 bp, Homo sapiens
  siRNA target sequence for PCF11 (NM_015885.2,2086-2104).
gcttacaacaggttgatga

SEQ ID NO: 47800 - DNA, 19 bp, Homo sapiens
  siRNA target sequence for PCF11 (NM_015885.2,2091-2109).
caacaggttgatgaacata

SEQ ID NO: 47801 - DNA, 19 bp, Homo sapiens
  siRNA target sequence for PCF11 (NM_015885.2,2094-2112).
caggttgatgaacatagta

SEQ ID NO: 47802 - DNA, 19 bp, Homo sapiens
  siRNA target sequence for PCF11 (NM_015885.2,2143-2161).
ggtcaagcactaaaggaat

SEQ ID NO: 47803 - DNA, 19 bp, Homo sapiens
  siRNA target sequence for PCF11 (NM_015885.2,2150-2168).
cactaaaggaattttatca

SEQ ID NO: 47804 - DNA, 19 bp, Homo sapiens
  siRNA target sequence for PCF11 (NM_015885.2,2192-2210).
gcatcgattaagtgtagat

SEQ ID NO: 47805 - DNA, 19 bp, Homo sapiens
  siRNA target sequence for PCF11 (NM_015885.2,2203-2221).
gtgtagatgccaatcttca

SEQ ID NO: 47806 - DNA, 19 bp, Homo sapiens
  siRNA target sequence for PCF11 (NM_015885.2,2212-2230).
ccaatcttcagattcctaa

SEQ ID NO: 47807 - DNA, 19 bp, Homo sapiens
  siRNA target sequence for PCF11 (NM_015885.2,2287-2305).
catctggtgaaattacaca

SEQ ID NO: 47808 - DNA, 19 bp, Homo sapiens
  siRNA target sequence for PCF11 (NM_015885.2,2338-2356).
gacagctatttcagtatca

SEQ ID NO: 47809 - DNA, 19 bp, Homo sapiens
  siRNA target sequence for PCF11 (NM_015885.2,2375-2393).
gcagagatctccattcaat

SEQ ID NO: 47810 - DNA, 19 bp, Homo sapiens
  siRNA target sequence for PCF11 (NM_015885.2,2378-2396).
gagatctccattcaatgat

SEQ ID NO: 47811 - DNA, 19 bp, Homo sapiens
  siRNA target sequence for PCF11 (NM_015885.2,2383-2401).
ctccattcaatgatcgttt

SEQ ID NO: 47812 - DNA, 19 bp, Homo sapiens
  siRNA target sequence for PCF11 (NM_015885.2,2411-2429).
gcgacctcgatatgaagat

SEQ ID NO: 47813 - DNA, 19 bp, Homo sapiens
  siRNA target sequence for PCF11 (NM_015885.2,2412-2430).
cgacctcgatatgaagatt

SEQ ID NO: 47814 - DNA, 19 bp, Homo sapiens
  siRNA target sequence for PCF11 (NM_015885.2,2418-2436).
cgatatgaagattcagata

SEQ ID NO: 47815 - DNA, 19 bp, Homo sapiens
  siRNA target sequence for PCF11 (NM_015885.2,2419-2437).
gatatgaagattcagataa

SEQ ID NO: 47816 - DNA, 19 bp, Homo sapiens
  siRNA target sequence for PCF11 (NM_015885.2,2448-2466).
gatagtccagcatcaagat

SEQ ID NO: 47817 - DNA, 19 bp, Homo sapiens
  siRNA target sequence for PCF11 (NM_015885.2,2489-2507).
gcgacttacagctttagct

SEQ ID NO: 47818 - DNA, 19 bp, Homo sapiens
  siRNA target sequence for PCF11 (NM_015885.2,2506-2524).
ctgaagacagaccgttatt

SEQ ID NO: 47819 - DNA, 19 bp, Homo sapiens
  siRNA target sequence for PCF11 (NM_015885.2,2540-2558).
gccatcagtagcaagagat

SEQ ID NO: 47820 - DNA, 19 bp, Homo sapiens
  siRNA target sequence for PCF11 (NM_015885.2,2556-2574).
gatggcccaacgaagatga

SEQ ID NO: 47821 - DNA, 19 bp, Homo sapiens
  siRNA target sequence for PCF11 (NM_015885.2,2559-2577).
ggcccaacgaagatgattt

SEQ ID NO: 47822 - DNA, 19 bp, Homo sapiens
  siRNA target sequence for PCF11 (NM_015885.2,2560-2578).
gcccaacgaagatgatttt

SEQ ID NO: 47823 - DNA, 19 bp, Homo sapiens
  siRNA target sequence for PCF11 (NM_015885.2,2563-2581).
caacgaagatgatttttga

SEQ ID NO: 47824 - DNA, 19 bp, Homo sapiens
  siRNA target sequence for PCF11 (NM_015885.2,2768-2786).
gtttgagggcccaattggt

SEQ ID NO: 47825 - DNA, 19 bp, Homo sapiens
  siRNA target sequence for PCF11 (NM_015885.2,3040-3058).
caggggctgcgattaggtt

SEQ ID NO: 47826 - DNA, 19 bp, Homo sapiens
  siRNA target sequence for PCF11 (NM_015885.2,3179-3197).
gggacaacataatcaactt

SEQ ID NO: 47827 - DNA, 19 bp, Homo sapiens
  siRNA target sequence for PCF11 (NM_015885.2,3192-3210).
caacttggtgggaacctta

SEQ ID NO: 47828 - DNA, 19 bp, Homo sapiens
  siRNA target sequence for PCF11 (NM_015885.2,3229-3247).
gtcagccaggggttggtat

SEQ ID NO: 47829 - DNA, 19 bp, Homo sapiens
  siRNA target sequence for PCF11 (NM_015885.2,3343-3361).
gtcaaggtggtccaagatt

SEQ ID NO: 47830 - DNA, 19 bp, Homo sapiens
  siRNA target sequence for PCF11 (NM_015885.2,3366-3384).
ggttgtcatgctttaaggt

SEQ ID NO: 47831 - DNA, 19 bp, Homo sapiens
  siRNA target sequence for PCF11 (NM_015885.2,3409-3427).
cactcttgccaagatttga

SEQ ID NO: 47832 - DNA, 19 bp, Homo sapiens
  siRNA target sequence for PCF11 (NM_015885.2,3416-3434).
gccaagatttgatggatta

SEQ ID NO: 47833 - DNA, 19 bp, Homo sapiens
  siRNA target sequence for PCF11 (NM_015885.2,3443-3461).
gccaggtcctagatttgaa

SEQ ID NO: 47834 - DNA, 19 bp, Homo sapiens
  siRNA target sequence for PCF11 (NM_015885.2,3444-3462).
ccaggtcctagatttgaaa

SEQ ID NO: 47835 - DNA, 19 bp, Homo sapiens
  siRNA target sequence for PCF11 (NM_015885.2,3531-3549).
gacggtgtacctcaaagat

SEQ ID NO: 47836 - DNA, 19 bp, Homo sapiens
  siRNA target sequence for PCF11 (NM_015885.2,3533-3551).
cggtgtacctcaaagattt

SEQ ID NO: 47837 - DNA, 19 bp, Homo sapiens
  siRNA target sequence for PCF11 (NM_015885.2,3570-3588).
caagcatcaaggtttgata

SEQ ID NO: 47838 - DNA, 19 bp, Homo sapiens
  siRNA target sequence for PCF11 (NM_015885.2,3607-3625).
gcacaagatttgacaatca

SEQ ID NO: 47839 - DNA, 19 bp, Homo sapiens
  siRNA target sequence for PCF11 (NM_015885.2,3608-3626).
cacaagatttgacaatcat

SEQ ID NO: 47840 - DNA, 19 bp, Homo sapiens
  siRNA target sequence for PCF11 (NM_015885.2,3627-3645).
ccttcacaaaggcttgaat

SEQ ID NO: 47841 - DNA, 19 bp, Homo sapiens
  siRNA target sequence for PCF11 (NM_015885.2,3637-3655).
ggcttgaatcagtatcttt

SEQ ID NO: 47842 - DNA, 19 bp, Homo sapiens
  siRNA target sequence for PCF11 (NM_015885.2,3656-3674).
caatcagactggtccatat

SEQ ID NO: 47843 - DNA, 19 bp, Homo sapiens
  siRNA target sequence for PCF11 (NM_015885.2,3681-3699).
ccacctggcaatgctttta

SEQ ID NO: 47844 - DNA, 19 bp, Homo sapiens
  siRNA target sequence for PCF11 (NM_015885.2,3682-3700).
cacctggcaatgcttttaa

SEQ ID NO: 47845 - DNA, 19 bp, Homo sapiens
  siRNA target sequence for PCF11 (NM_015885.2,3715-3733).
gactacagttccaaagaca

SEQ ID NO: 47846 - DNA, 19 bp, Homo sapiens
  siRNA target sequence for PCF11 (NM_015885.2,3803-3821).
ctctaatccacttaacaga

SEQ ID NO: 47847 - DNA, 19 bp, Homo sapiens
  siRNA target sequence for PCF11 (NM_015885.2,3994-4012).
cacaaaatcctggatttgt

SEQ ID NO: 47848 - DNA, 19 bp, Homo sapiens
  siRNA target sequence for PCF11 (NM_015885.2,4005-4023).
ggatttgttcagaatcctt

SEQ ID NO: 47849 - DNA, 19 bp, Homo sapiens
  siRNA target sequence for PCF11 (NM_015885.2,4042-4060).
catatcctgataatcatct

SEQ ID NO: 47850 - DNA, 19 bp, Homo sapiens
  siRNA target sequence for PCF11 (NM_015885.2,4059-4077).
ctcagtcaggtggatgtaa

SEQ ID NO: 47851 - DNA, 19 bp, Homo sapiens
  siRNA target sequence for PCF11 (NM_015885.2,4138-4156).
ctacaacacaagtaagtga

SEQ ID NO: 47852 - DNA, 19 bp, Homo sapiens
  siRNA target sequence for PCF11 (NM_015885.2,4206-4224).
caagatgttccagatctta

SEQ ID NO: 47853 - DNA, 19 bp, Homo sapiens
  siRNA target sequence for PCF11 (NM_015885.2,4209-4227).
gatgttccagatcttacta

SEQ ID NO: 47854 - DNA, 19 bp, Homo sapiens
  siRNA target sequence for PCF11 (NM_015885.2,4251-4269).
caacgttatgacagtgtta

SEQ ID NO: 47855 - DNA, 19 bp, Homo sapiens
  siRNA target sequence for PCF11 (NM_015885.2,4276-4294).
gactgtacactggtattca

SEQ ID NO: 47856 - DNA, 19 bp, Homo sapiens
  siRNA target sequence for PCF11 (NM_015885.2,4278-4296).
ctgtacactggtattcagt

SEQ ID NO: 47857 - DNA, 19 bp, Homo sapiens
  siRNA target sequence for PCF11 (NM_015885.2,4308-4326).
ggaatgaggtttacaacat

SEQ ID NO: 47858 - DNA, 19 bp, Homo sapiens
  siRNA target sequence for PCF11 (NM_015885.2,4335-4353).
gatgtttatgcagatcatt

SEQ ID NO: 47859 - DNA, 19 bp, Homo sapiens
  siRNA target sequence for PCF11 (NM_015885.2,4358-4376).
ctggcattatcggcaaaat

SEQ ID NO: 47860 - DNA, 19 bp, Homo sapiens
  siRNA target sequence for PCF11 (NM_015885.2,4389-4407).
gatgttagccgaaaagtca

SEQ ID NO: 47861 - DNA, 19 bp, Homo sapiens
  siRNA target sequence for PCF11 (NM_015885.2,4397-4415).
ccgaaaagtcactcataga

SEQ ID NO: 47862 - DNA, 19 bp, Homo sapiens
  siRNA target sequence for PCF11 (NM_015885.2,4410-4428).
catagacgttggtactaca

SEQ ID NO: 47863 - DNA, 19 bp, Homo sapiens
  siRNA target sequence for PCF11 (NM_015885.2,4414-4432).
gacgttggtactacagttt

SEQ ID NO: 47864 - DNA, 19 bp, Homo sapiens
  siRNA target sequence for PCF11 (NM_015885.2,4416-4434).
cgttggtactacagtttaa

SEQ ID NO: 47865 - DNA, 19 bp, Homo sapiens
  siRNA target sequence for PCF11 (NM_015885.2,4476-4494).
cgggcaaagagccagtttt

SEQ ID NO: 47866 - DNA, 19 bp, Homo sapiens
  siRNA target sequence for PCF11 (NM_015885.2,4480-4498).
caaagagccagttttttga

SEQ ID NO: 47867 - DNA, 19 bp, Homo sapiens
  siRNA target sequence for PCF11 (NM_015885.2,4646-4664).
ggaatggcatttgaaaaat

SEQ ID NO: 47868 - DNA, 19 bp, Homo sapiens
  siRNA target sequence for PCF11 (NM_015885.2,4666-4684).
ctattagagtagatggaaa

SEQ ID NO: 47869 - DNA, 19 bp, Homo sapiens
  siRNA target sequence for PCF11 (NM_015885.2,4764-4782).
gttgaaaaccccttgaata

SEQ ID NO: 47870 - DNA, 19 bp, Homo sapiens
  siRNA target sequence for PCF11 (NM_015885.2,4767-4785).
gaaaaccccttgaatatta

SEQ ID NO: 47871 - DNA, 19 bp, Homo sapiens
  siRNA target sequence for PCF11 (NM_015885.2,4820-4838).
ctgtgacagtcccaaagtt

SEQ ID NO: 47872 - DNA, 19 bp, Homo sapiens
  siRNA target sequence for PCF11 (NM_015885.2,4822-4840).
gtgacagtcccaaagttaa

SEQ ID NO: 47873 - DNA, 19 bp, Homo sapiens
  siRNA target sequence for PCF11 (NM_015885.2,4887-4905).
gcaacaccctctgaaatta

SEQ ID NO: 47874 - DNA, 19 bp, Homo sapiens
  siRNA target sequence for PCF11 (NM_015885.2,4917-4935).
gacacagtcgagtcagttt

SEQ ID NO: 47875 - DNA, 19 bp, Homo sapiens
  siRNA target sequence for FMR1 (NM_002024.1,248-266).
gctccaatggcgctttcta

SEQ ID NO: 47876 - DNA, 19 bp, Homo sapiens
  siRNA target sequence for FMR1 (NM_002024.1,251-269).
ccaatggcgctttctacaa

SEQ ID NO: 47877 - DNA, 19 bp, Homo sapiens
  siRNA target sequence for FMR1 (NM_002024.1,267-285).
caaggcatttgtaaaggat

SEQ ID NO: 47878 - DNA, 19 bp, Homo sapiens
  siRNA target sequence for FMR1 (NM_002024.1,307-325).
gttgcatttgaaaacaact

SEQ ID NO: 47879 - DNA, 19 bp, Homo sapiens
  siRNA target sequence for FMR1 (NM_002024.1,339-357).
gcagattccatttcatgat

SEQ ID NO: 47880 - DNA, 19 bp, Homo sapiens
  siRNA target sequence for FMR1 (NM_002024.1,366-384).
cccacctcctgtaggttat

SEQ ID NO: 47881 - DNA, 19 bp, Homo sapiens
  siRNA target sequence for FMR1 (NM_002024.1,367-385).
ccacctcctgtaggttata

SEQ ID NO: 47882 - DNA, 19 bp, Homo sapiens
  siRNA target sequence for FMR1 (NM_002024.1,368-386).
cacctcctgtaggttataa

SEQ ID NO: 47883 - DNA, 19 bp, Homo sapiens
  siRNA target sequence for FMR1 (NM_002024.1,374-392).
ctgtaggttataataaaga

SEQ ID NO: 47884 - DNA, 19 bp, Homo sapiens
  siRNA target sequence for FMR1 (NM_002024.1,449-467).
gctgttggtggttagctaa

SEQ ID NO: 47885 - DNA, 19 bp, Homo sapiens
  siRNA target sequence for FMR1 (NM_002024.1,450-468).
ctgttggtggttagctaaa

SEQ ID NO: 47886 - DNA, 19 bp, Homo sapiens
  siRNA target sequence for FMR1 (NM_002024.1,512-530).
catgtgatgcaacttacaa

SEQ ID NO: 47887 - DNA, 19 bp, Homo sapiens
  siRNA target sequence for FMR1 (NM_002024.1,547-565).
gaacgtctaagatctgtta

SEQ ID NO: 47888 - DNA, 19 bp, Homo sapiens
  siRNA target sequence for FMR1 (NM_002024.1,573-591).
caaacctgccacaaaagat

SEQ ID NO: 47889 - DNA, 19 bp, Homo sapiens
  siRNA target sequence for FMR1 (NM_002024.1,589-607).
gatactttccataagatca

SEQ ID NO: 47890 - DNA, 19 bp, Homo sapiens
  siRNA target sequence for FMR1 (NM_002024.1,612-630).
ggatgtgccagaagactta

SEQ ID NO: 47891 - DNA, 19 bp, Homo sapiens
  siRNA target sequence for FMR1 (NM_002024.1,622-640).
gaagacttacggcaaatgt

SEQ ID NO: 47892 - DNA, 19 bp, Homo sapiens
  siRNA target sequence for FMR1 (NM_002024.1,649-667).
gaggcggcacataaggatt

SEQ ID NO: 47893 - DNA, 19 bp, Homo sapiens
  siRNA target sequence for FMR1 (NM_002024.1,675-693).
ggcagttggtgccttttct

SEQ ID NO: 47894 - DNA, 19 bp, Homo sapiens
  siRNA target sequence for FMR1 (NM_002024.1,677-695).
cagttggtgccttttctgt

SEQ ID NO: 47895 - DNA, 19 bp, Homo sapiens
  siRNA target sequence for FMR1 (NM_002024.1,749-767).
cctcaaagcgagcacatat

SEQ ID NO: 47896 - DNA, 19 bp, Homo sapiens
  siRNA target sequence for FMR1 (NM_002024.1,752-770).
caaagcgagcacatatgct

SEQ ID NO: 47897 - DNA, 19 bp, Homo sapiens
  siRNA target sequence for FMR1 (NM_002024.1,758-776).
gagcacatatgctgattga

SEQ ID NO: 47898 - DNA, 19 bp, Homo sapiens
  siRNA target sequence for FMR1 (NM_002024.1,761-779).
cacatatgctgattgacat

SEQ ID NO: 47899 - DNA, 19 bp, Homo sapiens
  siRNA target sequence for FMR1 (NM_002024.1,787-805).
cggagtctgcgcactaagt

SEQ ID NO: 47900 - DNA, 19 bp, Homo sapiens
  siRNA target sequence for FMR1 (NM_002024.1,788-806).
ggagtctgcgcactaagtt

SEQ ID NO: 47901 - DNA, 19 bp, Homo sapiens
  siRNA target sequence for FMR1 (NM_002024.1,798-816).
cactaagttgtctctgata

SEQ ID NO: 47902 - DNA, 19 bp, Homo sapiens
  siRNA target sequence for FMR1 (NM_002024.1,800-818).
ctaagttgtctctgataat

SEQ ID NO: 47903 - DNA, 19 bp, Homo sapiens
  siRNA target sequence for FMR1 (NM_002024.1,858-876).
gcagcttgcctcgagattt

SEQ ID NO: 47904 - DNA, 19 bp, Homo sapiens
  siRNA target sequence for FMR1 (NM_002024.1,861-879).
gcttgcctcgagatttcat

SEQ ID NO: 47905 - DNA, 19 bp, Homo sapiens
  siRNA target sequence for FMR1 (NM_002024.1,866-884).
cctcgagatttcatgaaca

SEQ ID NO: 47906 - DNA, 19 bp, Homo sapiens
  siRNA target sequence for FMR1 (NM_002024.1,906-924).
gatgggtctagctattggt

SEQ ID NO: 47907 - DNA, 19 bp, Homo sapiens
  siRNA target sequence for FMR1 (NM_002024.1,926-944).
ctcatggtgctaatattca

SEQ ID NO: 47908 - DNA, 19 bp, Homo sapiens
  siRNA target sequence for FMR1 (NM_002024.1,962-980).
ctggggtcactgctattga

SEQ ID NO: 47909 - DNA, 19 bp, Homo sapiens
  siRNA target sequence for FMR1 (NM_002024.1,969-987).
cactgctattgatctagat

SEQ ID NO: 47910 - DNA, 19 bp, Homo sapiens
  siRNA target sequence for FMR1 (NM_002024.1,991-1009).
gatacctgcacatttcata

SEQ ID NO: 47911 - DNA, 19 bp, Homo sapiens
  siRNA target sequence for FMR1 (NM_002024.1,1043-1061).
ctagaagctttctcgaatt

SEQ ID NO: 47912 - DNA, 19 bp, Homo sapiens
  siRNA target sequence for FMR1 (NM_002024.1,1064-1082).
ctgaagatgtaatacaagt

SEQ ID NO: 47913 - DNA, 19 bp, Homo sapiens
  siRNA target sequence for FMR1 (NM_002024.1,1089-1107).
gaacttagtaggcaaagta

SEQ ID NO: 47914 - DNA, 19 bp, Homo sapiens
  siRNA target sequence for FMR1 (NM_002024.1,1092-1110).
cttagtaggcaaagtaata

SEQ ID NO: 47915 - DNA, 19 bp, Homo sapiens
  siRNA target sequence for FMR1 (NM_002024.1,1230-1248).
ccttccttccaataattca

SEQ ID NO: 47916 - DNA, 19 bp, Homo sapiens
  siRNA target sequence for FMR1 (NM_002024.1,1307-1325).
cccatttttctcaacctaa

SEQ ID NO: 47917 - DNA, 19 bp, Homo sapiens
  siRNA target sequence for FMR1 (NM_002024.1,1316-1334).
ctcaacctaacagtacaaa

SEQ ID NO: 47918 - DNA, 19 bp, Homo sapiens
  siRNA target sequence for FMR1 (NM_002024.1,1344-1362).
ggtgttagtggcttcatca

SEQ ID NO: 47919 - DNA, 19 bp, Homo sapiens
  siRNA target sequence for FMR1 (NM_002024.1,1398-1416).
ggcttggcagggtatggta

SEQ ID NO: 47920 - DNA, 19 bp, Homo sapiens
  siRNA target sequence for FMR1 (NM_002024.1,1403-1421).
ggcagggtatggtaccatt

SEQ ID NO: 47921 - DNA, 19 bp, Homo sapiens
  siRNA target sequence for FMR1 (NM_002024.1,1407-1425).
gggtatggtaccatttgtt

SEQ ID NO: 47922 - DNA, 19 bp, Homo sapiens
  siRNA target sequence for FMR1 (NM_002024.1,1456-1474).
gccactgttcttttggatt

SEQ ID NO: 47923 - DNA, 19 bp, Homo sapiens
  siRNA target sequence for FMR1 (NM_002024.1,1457-1475).
ccactgttcttttggatta

SEQ ID NO: 47924 - DNA, 19 bp, Homo sapiens
  siRNA target sequence for FMR1 (NM_002024.1,1509-1527).
gcgtttggagagattacaa

SEQ ID NO: 47925 - DNA, 19 bp, Homo sapiens
  siRNA target sequence for FMR1 (NM_002024.1,1546-1564).
cagattggagctagttcta

SEQ ID NO: 47926 - DNA, 19 bp, Homo sapiens
  siRNA target sequence for FMR1 (NM_002024.1,1548-1566).
gattggagctagttctaga

SEQ ID NO: 47927 - DNA, 19 bp, Homo sapiens
  siRNA target sequence for FMR1 (NM_002024.1,1570-1588).
ccaccaaatcgtacagata

SEQ ID NO: 47928 - DNA, 19 bp, Homo sapiens
  siRNA target sequence for FMR1 (NM_002024.1,1571-1589).
caccaaatcgtacagataa

SEQ ID NO: 47929 - DNA, 19 bp, Homo sapiens
  siRNA target sequence for FMR1 (NM_002024.1,1574-1592).
caaatcgtacagataagga

SEQ ID NO: 47930 - DNA, 19 bp, Homo sapiens
  siRNA target sequence for FMR1 (NM_002024.1,1633-1651).
ggtagtagaccttacagaa

SEQ ID NO: 47931 - DNA, 19 bp, Homo sapiens
  siRNA target sequence for FMR1 (NM_002024.1,1665-1683).
cagacgcggtcctggatat

SEQ ID NO: 47932 - DNA, 19 bp, Homo sapiens
  siRNA target sequence for FMR1 (NM_002024.1,1669-1687).
cgcggtcctggatatactt

SEQ ID NO: 47933 - DNA, 19 bp, Homo sapiens
  siRNA target sequence for FMR1 (NM_002024.1,1671-1689).
cggtcctggatatacttca

SEQ ID NO: 47934 - DNA, 19 bp, Homo sapiens
  siRNA target sequence for FMR1 (NM_002024.1,1881-1899).
cgatcactcccgaacagat

SEQ ID NO: 47935 - DNA, 19 bp, Homo sapiens
  siRNA target sequence for FMR1 (NM_002024.1,1882-1900).
gatcactcccgaacagata

SEQ ID NO: 47936 - DNA, 19 bp, Homo sapiens
  siRNA target sequence for FMR1 (NM_002024.1,1887-1905).
ctcccgaacagataatcgt

SEQ ID NO: 47937 - DNA, 19 bp, Homo sapiens
  siRNA target sequence for FMR1 (NM_002024.1,1961-1979).
gagttgactgcaataatga

SEQ ID NO: 47938 - DNA, 19 bp, Homo sapiens
  siRNA target sequence for FMR1 (NM_002024.1,2030-2048).
ggctgcgcacgggtaaaga

SEQ ID NO: 47939 - DNA, 19 bp, Homo sapiens
  siRNA target sequence for FMR1 (NM_002024.1,2031-2049).
gctgcgcacgggtaaagat

SEQ ID NO: 47940 - DNA, 19 bp, Homo sapiens
  siRNA target sequence for FMR1 (NM_002024.1,2036-2054).
gcacgggtaaagatcgtaa

SEQ ID NO: 47941 - DNA, 19 bp, Homo sapiens
  siRNA target sequence for GRSF1 (NM_002092.1,247-265).
ccaggagtccaaaactact

SEQ ID NO: 47942 - DNA, 19 bp, Homo sapiens
  siRNA target sequence for GRSF1 (NM_002092.1,284-302).
ccaccccctgagtatgaat

SEQ ID NO: 47943 - DNA, 19 bp, Homo sapiens
  siRNA target sequence for GRSF1 (NM_002092.1,285-303).
caccccctgagtatgaatt

SEQ ID NO: 47944 - DNA, 19 bp, Homo sapiens
  siRNA target sequence for GRSF1 (NM_002092.1,331-349).
ggatgatgtctttctcatt

SEQ ID NO: 47945 - DNA, 19 bp, Homo sapiens
  siRNA target sequence for GRSF1 (NM_002092.1,367-385).
ctggtcatgcactatggaa

SEQ ID NO: 47946 - DNA, 19 bp, Homo sapiens
  siRNA target sequence for GRSF1 (NM_002092.1,419-437).
cgcaacggtgagaatggaa

SEQ ID NO: 47947 - DNA, 19 bp, Homo sapiens
  siRNA target sequence for GRSF1 (NM_002092.1,421-439).
caacggtgagaatggaata

SEQ ID NO: 47948 - DNA, 19 bp, Homo sapiens
  siRNA target sequence for GRSF1 (NM_002092.1,424-442).
cggtgagaatggaatacat

SEQ ID NO: 47949 - DNA, 19 bp, Homo sapiens
  siRNA target sequence for GRSF1 (NM_002092.1,425-443).
ggtgagaatggaatacatt

SEQ ID NO: 47950 - DNA, 19 bp, Homo sapiens
  siRNA target sequence for GRSF1 (NM_002092.1,426-444).
gtgagaatggaatacattt

SEQ ID NO: 47951 - DNA, 19 bp, Homo sapiens
  siRNA target sequence for GRSF1 (NM_002092.1,468-486).
gaaggggtgatgccttaat

SEQ ID NO: 47952 - DNA, 19 bp, Homo sapiens
  siRNA target sequence for GRSF1 (NM_002092.1,524-542).
gagaagcaccgcatgtaca

SEQ ID NO: 47953 - DNA, 19 bp, Homo sapiens
  siRNA target sequence for GRSF1 (NM_002092.1,550-568).
gcggtatgtggaagtatat

SEQ ID NO: 47954 - DNA, 19 bp, Homo sapiens
  siRNA target sequence for GRSF1 (NM_002092.1,552-570).
ggtatgtggaagtatatga

SEQ ID NO: 47955 - DNA, 19 bp, Homo sapiens
  siRNA target sequence for GRSF1 (NM_002092.1,560-578).
gaagtatatgagataaaca

SEQ ID NO: 47956 - DNA, 19 bp, Homo sapiens
  siRNA target sequence for GRSF1 (NM_002092.1,587-605).
gtggatgccttaatgaaga

SEQ ID NO: 47957 - DNA, 19 bp, Homo sapiens
  siRNA target sequence for GRSF1 (NM_002092.1,651-669).
gtttgagaggacttcctta

SEQ ID NO: 47958 - DNA, 19 bp, Homo sapiens
  siRNA target sequence for GRSF1 (NM_002092.1,700-718).
ctttgcaggactgaatata

SEQ ID NO: 47959 - DNA, 19 bp, Homo sapiens
  siRNA target sequence for GRSF1 (NM_002092.1,708-726).
gactgaatatagttgacat

SEQ ID NO: 47960 - DNA, 19 bp, Homo sapiens
  siRNA target sequence for GRSF1 (NM_002092.1,719-737).
gttgacattacttttgtga

SEQ ID NO: 47961 - DNA, 19 bp, Homo sapiens
  siRNA target sequence for GRSF1 (NM_002092.1,772-790).
ctatgtgcaatttgaagaa

SEQ ID NO: 47962 - DNA, 19 bp, Homo sapiens
  siRNA target sequence for GRSF1 (NM_002092.1,802-820).
caaccaagccctgttgaaa

SEQ ID NO: 47963 - DNA, 19 bp, Homo sapiens
  siRNA target sequence for GRSF1 (NM_002092.1,826-844).
ggaagaaattggtaatcga

SEQ ID NO: 47964 - DNA, 19 bp, Homo sapiens
  siRNA target sequence for GRSF1 (NM_002092.1,827-845).
gaagaaattggtaatcgat

SEQ ID NO: 47965 - DNA, 19 bp, Homo sapiens
  siRNA target sequence for GRSF1 (NM_002092.1,882-900).
gaacacatgtcggttctta

SEQ ID NO: 47966 - DNA, 19 bp, Homo sapiens
  siRNA target sequence for GRSF1 (NM_002092.1,885-903).
cacatgtcggttcttataa

SEQ ID NO: 47967 - DNA, 19 bp, Homo sapiens
  siRNA target sequence for GRSF1 (NM_002092.1,921-939).
cttttcctactgctaagta

SEQ ID NO: 47968 - DNA, 19 bp, Homo sapiens
  siRNA target sequence for GRSF1 (NM_002092.1,930-948).
ctgctaagtatataactga

SEQ ID NO: 47969 - DNA, 19 bp, Homo sapiens
  siRNA target sequence for GRSF1 (NM_002092.1,1102-1120).
ccacatgagaggattacct

SEQ ID NO: 47970 - DNA, 19 bp, Homo sapiens
  siRNA target sequence for GRSF1 (NM_002092.1,1127-1145).
gccaatgcccaagacatta

SEQ ID NO: 47971 - DNA, 19 bp, Homo sapiens
  siRNA target sequence for GRSF1 (NM_002092.1,1133-1151).
gcccaagacattataaact

SEQ ID NO: 47972 - DNA, 19 bp, Homo sapiens
  siRNA target sequence for GRSF1 (NM_002092.1,1134-1152).
cccaagacattataaactt

SEQ ID NO: 47973 - DNA, 19 bp, Homo sapiens
  siRNA target sequence for GRSF1 (NM_002092.1,1163-1181).
ctcaagcctgttagaatca

SEQ ID NO: 47974 - DNA, 19 bp, Homo sapiens
  siRNA target sequence for GRSF1 (NM_002092.1,1274-1292).
cggtcccacgttcatcata

SEQ ID NO: 47975 - DNA, 19 bp, Homo sapiens
  siRNA target sequence for GRSF1 (NM_002092.1,1278-1296).
cccacgttcatcataggta

SEQ ID NO: 47976 - DNA, 19 bp, Homo sapiens
  siRNA target sequence for GRSF1 (NM_002092.1,1279-1297).
ccacgttcatcataggtat

SEQ ID NO: 47977 - DNA, 19 bp, Homo sapiens
  siRNA target sequence for GRSF1 (NM_002092.1,1280-1298).
cacgttcatcataggtata

SEQ ID NO: 47978 - DNA, 19 bp, Homo sapiens
  siRNA target sequence for RBM8A (NM_005105.2,32-50).
ggcggacgtgctagatctt

SEQ ID NO: 47979 - DNA, 19 bp, Homo sapiens
  siRNA target sequence for RBM8A (NM_005105.2,34-52).
cggacgtgctagatcttca

SEQ ID NO: 47980 - DNA, 19 bp, Homo sapiens
  siRNA target sequence for RBM8A (NM_005105.2,90-108).
ggggacgagagcattcaca

SEQ ID NO: 47981 - DNA, 19 bp, Homo sapiens
  siRNA target sequence for RBM8A (NM_005105.2,96-114).
gagagcattcacaaactga

SEQ ID NO: 47982 - DNA, 19 bp, Homo sapiens
  siRNA target sequence for RBM8A (NM_005105.2,172-190).
cgcggatgcgtgaggatta

SEQ ID NO: 47983 - DNA, 19 bp, Homo sapiens
  siRNA target sequence for RBM8A (NM_005105.2,173-191).
gcggatgcgtgaggattat

SEQ ID NO: 47984 - DNA, 19 bp, Homo sapiens
  siRNA target sequence for RBM8A (NM_005105.2,175-193).
ggatgcgtgaggattatga

SEQ ID NO: 47985 - DNA, 19 bp, Homo sapiens
  siRNA target sequence for RBM8A (NM_005105.2,280-298).
ccaccgaagaagacataca

SEQ ID NO: 47986 - DNA, 19 bp, Homo sapiens
  siRNA target sequence for RBM8A (NM_005105.2,347-365).
cgacaggcgaacaggatat

SEQ ID NO: 47987 - DNA, 19 bp, Homo sapiens
  siRNA target sequence for RBM8A (NM_005105.2,352-370).
ggcgaacaggatatctgaa

SEQ ID NO: 47988 - DNA, 19 bp, Homo sapiens
  siRNA target sequence for RBM8A (NM_005105.2,368-386).
gaaggggtatactctagtt

SEQ ID NO: 47989 - DNA, 19 bp, Homo sapiens
  siRNA target sequence for RBM8A (NM_005105.2,371-389).
ggggtatactctagttgaa

SEQ ID NO: 47990 - DNA, 19 bp, Homo sapiens
  siRNA target sequence for RBM8A (NM_005105.2,372-390).
gggtatactctagttgaat

SEQ ID NO: 47991 - DNA, 19 bp, Homo sapiens
  siRNA target sequence for RBM8A (NM_005105.2,373-391).
ggtatactctagttgaata

SEQ ID NO: 47992 - DNA, 19 bp, Homo sapiens
  siRNA target sequence for RBM8A (NM_005105.2,374-392).
gtatactctagttgaatat

SEQ ID NO: 47993 - DNA, 19 bp, Homo sapiens
  siRNA target sequence for RBM8A (NM_005105.2,427-445).
gactcaatggccaggattt

SEQ ID NO: 47994 - DNA, 19 bp, Homo sapiens
  siRNA target sequence for RBM8A (NM_005105.2,429-447).
ctcaatggccaggatttga

SEQ ID NO: 47995 - DNA, 19 bp, Homo sapiens
  siRNA target sequence for RBM8A (NM_005105.2,461-479).
cagcgttgactggtgtttt

SEQ ID NO: 47996 - DNA, 19 bp, Homo sapiens
  siRNA target sequence for SLBP (NM_006527.2,278-296).
cgcagacccgagagcttta

SEQ ID NO: 47997 - DNA, 19 bp, Homo sapiens
  siRNA target sequence for SLBP (NM_006527.2,461-479).
gattcaaaggagtctatgt

SEQ ID NO: 47998 - DNA, 19 bp, Homo sapiens
  siRNA target sequence for SLBP (NM_006527.2,483-501).
ctgtgccggctgactttga

SEQ ID NO: 47999 - DNA, 19 bp, Homo sapiens
  siRNA target sequence for SLBP (NM_006527.2,485-503).
gtgccggctgactttgaga

SEQ ID NO: 48000 - DNA, 19 bp, Homo sapiens
  siRNA target sequence for SLBP (NM_006527.2,504-522).
cagatgaaagtgtcctaat

SEQ ID NO: 48001 - DNA, 19 bp, Homo sapiens
  siRNA target sequence for SLBP (NM_006527.2,506-524).
gatgaaagtgtcctaatga

SEQ ID NO: 48002 - DNA, 19 bp, Homo sapiens
  siRNA target sequence for SLBP (NM_006527.2,528-546).
gacagaagcagatcaacta

SEQ ID NO: 48003 - DNA, 19 bp, Homo sapiens
  siRNA target sequence for SLBP (NM_006527.2,563-581).
gcctacgatcgttatatta

SEQ ID NO: 48004 - DNA, 19 bp, Homo sapiens
  siRNA target sequence for SLBP (NM_006527.2,564-582).
cctacgatcgttatattaa

SEQ ID NO: 48005 - DNA, 19 bp, Homo sapiens
  siRNA target sequence for SLBP (NM_006527.2,565-583).
ctacgatcgttatattaaa

SEQ ID NO: 48006 - DNA, 19 bp, Homo sapiens
  siRNA target sequence for SLBP (NM_006527.2,568-586).
cgatcgttatattaaagaa

SEQ ID NO: 48007 - DNA, 19 bp, Homo sapiens
  siRNA target sequence for SLBP (NM_006527.2,617-635).
catcccaagacccctaata

SEQ ID NO: 48008 - DNA, 19 bp, Homo sapiens
  siRNA target sequence for SLBP (NM_006527.2,621-639).
ccaagacccctaataaatt

SEQ ID NO: 48009 - DNA, 19 bp, Homo sapiens
  siRNA target sequence for SLBP (NM_006527.2,622-640).
caagacccctaataaattt

SEQ ID NO: 48010 - DNA, 19 bp, Homo sapiens
  siRNA target sequence for SLBP (NM_006527.2,657-675).
gttcatgggaccagcaaat

SEQ ID NO: 48011 - DNA, 19 bp, Homo sapiens
  siRNA target sequence for SLBP (NM_006527.2,729-747).
gtgatttgcaagaaataca

SEQ ID NO: 48012 - DNA, 19 bp, Homo sapiens
  siRNA target sequence for SLBP (NM_006527.2,855-873).
gtcaagtggaggatgagtt

SEQ ID NO: 48013 - DNA, 19 bp, Homo sapiens
  siRNA target sequence for SSB (NM_003142.2,149-167).
ggccaaaatctgtcatcaa

SEQ ID NO: 48014 - DNA, 19 bp, Homo sapiens
  siRNA target sequence for SSB (NM_003142.2,160-178).
gtcatcaaattgagtatta

SEQ ID NO: 48015 - DNA, 19 bp, Homo sapiens
  siRNA target sequence for SSB (NM_003142.2,197-215).
gccacgggacaagtttcta

SEQ ID NO: 48016 - DNA, 19 bp, Homo sapiens
  siRNA target sequence for SSB (NM_003142.2,198-216).
ccacgggacaagtttctaa

SEQ ID NO: 48017 - DNA, 19 bp, Homo sapiens
  siRNA target sequence for SSB (NM_003142.2,199-217).
cacgggacaagtttctaaa

SEQ ID NO: 48018 - DNA, 19 bp, Homo sapiens
  siRNA target sequence for SSB (NM_003142.2,246-264).
gtacctttggagataatga

SEQ ID NO: 48019 - DNA, 19 bp, Homo sapiens
  siRNA target sequence for SSB (NM_003142.2,275-293).
caggttgaaccgtctaaca

SEQ ID NO: 48020 - DNA, 19 bp, Homo sapiens
  siRNA target sequence for SSB (NM_003142.2,278-296).
gttgaaccgtctaacaaca

SEQ ID NO: 48021 - DNA, 19 bp, Homo sapiens
  siRNA target sequence for SSB (NM_003142.2,284-302).
ccgtctaacaacagacttt

SEQ ID NO: 48022 - DNA, 19 bp, Homo sapiens
  siRNA target sequence for SSB (NM_003142.2,285-303).
cgtctaacaacagacttta

SEQ ID NO: 48023 - DNA, 19 bp, Homo sapiens
  siRNA target sequence for SSB (NM_003142.2,292-310).
caacagactttaatgtaat

SEQ ID NO: 48024 - DNA, 19 bp, Homo sapiens
  siRNA target sequence for SSB (NM_003142.2,315-333).
gaagcattgagcaaatcca

SEQ ID NO: 48025 - DNA, 19 bp, Homo sapiens
  siRNA target sequence for SSB (NM_003142.2,471-489).
gcaactcttgatgacataa

SEQ ID NO: 48026 - DNA, 19 bp, Homo sapiens
  siRNA target sequence for SSB (NM_003142.2,472-490).
caactcttgatgacataaa

SEQ ID NO: 48027 - DNA, 19 bp, Homo sapiens
  siRNA target sequence for SSB (NM_003142.2,504-522).
gataaaggtcaagtactaa

SEQ ID NO: 48028 - DNA, 19 bp, Homo sapiens
  siRNA target sequence for SSB (NM_003142.2,511-529).
gtcaagtactaaatattca

SEQ ID NO: 48029 - DNA, 19 bp, Homo sapiens
  siRNA target sequence for SSB (NM_003142.2,533-551).
gagaagaacattgcataaa

SEQ ID NO: 48030 - DNA, 19 bp, Homo sapiens
  siRNA target sequence for SSB (NM_003142.2,576-594).
gtgtttgatagcattgaat

SEQ ID NO: 48031 - DNA, 19 bp, Homo sapiens
  siRNA target sequence for SSB (NM_003142.2,578-596).
gtttgatagcattgaatct

SEQ ID NO: 48032 - DNA, 19 bp, Homo sapiens
  siRNA target sequence for SSB (NM_003142.2,595-613).
ctgctaagaaatttgtaga

SEQ ID NO: 48033 - DNA, 19 bp, Homo sapiens
  siRNA target sequence for SSB (NM_003142.2,817-835).
cgggtgatttagatgatca

SEQ ID NO: 48034 - DNA, 19 bp, Homo sapiens
  siRNA target sequence for SSB (NM_003142.2,879-897).
gaaataaaatggatagact

SEQ ID NO: 48035 - DNA, 19 bp, Homo sapiens
  siRNA target sequence for SSB (NM_003142.2,910-928).
caaaagaggggataattct

SEQ ID NO: 48036 - DNA, 19 bp, Homo sapiens
  siRNA target sequence for SSB (NM_003142.2,915-933).
gaggggataattctattta

SEQ ID NO: 48037 - DNA, 19 bp, Homo sapiens
  siRNA target sequence for SSB (NM_003142.2,981-999).
ggtaacctacaattaagga

SEQ ID NO: 48038 - DNA, 19 bp, Homo sapiens
  siRNA target sequence for SSB (NM_003142.2,982-1000).
gtaacctacaattaaggaa

SEQ ID NO: 48039 - DNA, 19 bp, Homo sapiens
  siRNA target sequence for SSB (NM_003142.2,986-1004).
cctacaattaaggaacaaa

SEQ ID NO: 48040 - DNA, 19 bp, Homo sapiens
  siRNA target sequence for SSB (NM_003142.2,1097-1115).
gtcaaaaggtcgtagattt

SEQ ID NO: 48041 - DNA, 19 bp, Homo sapiens
  siRNA target sequence for SSB (NM_003142.2,1099-1117).
caaaaggtcgtagatttaa

SEQ ID NO: 48042 - DNA, 19 bp, Homo sapiens
  siRNA target sequence for SSB (NM_003142.2,1104-1122).
ggtcgtagatttaaaggaa

SEQ ID NO: 48043 - DNA, 19 bp, Homo sapiens
  siRNA target sequence for SSB (NM_003142.2,1105-1123).
gtcgtagatttaaaggaaa

SEQ ID NO: 48044 - DNA, 19 bp, Homo sapiens
  siRNA target sequence for SSB (NM_003142.2,1148-1166).
gcctgggtctggtaaagga

SEQ ID NO: 48045 - DNA, 19 bp, Homo sapiens
  siRNA target sequence for ADAR (NM_001111.2,219-237).
gatactacacccatccatt

SEQ ID NO: 48046 - DNA, 19 bp, Homo sapiens
  siRNA target sequence for ADAR (NM_001111.2,223-241).
ctacacccatccatttcaa

SEQ ID NO: 48047 - DNA, 19 bp, Homo sapiens
  siRNA target sequence for ADAR (NM_001111.2,297-315).
gtagtttcctgcttaagca

SEQ ID NO: 48048 - DNA, 19 bp, Homo sapiens
  siRNA target sequence for ADAR (NM_001111.2,304-322).
cctgcttaagcaaatagaa

SEQ ID NO: 48049 - DNA, 19 bp, Homo sapiens
  siRNA target sequence for ADAR (NM_001111.2,305-323).
ctgcttaagcaaatagaat

SEQ ID NO: 48050 - DNA, 19 bp, Homo sapiens
  siRNA target sequence for ADAR (NM_001111.2,307-325).
gcttaagcaaatagaattt

SEQ ID NO: 48051 - DNA, 19 bp, Homo sapiens
  siRNA target sequence for ADAR (NM_001111.2,344-362).
gaagcaccggtgattggaa

SEQ ID NO: 48052 - DNA, 19 bp, Homo sapiens
  siRNA target sequence for ADAR (NM_001111.2,605-623).
gaacaaaggatcttaaagt

SEQ ID NO: 48053 - DNA, 19 bp, Homo sapiens
  siRNA target sequence for ADAR (NM_001111.2,649-667).
ggccaccacagcacatgat

SEQ ID NO: 48054 - DNA, 19 bp, Homo sapiens
  siRNA target sequence for ADAR (NM_001111.2,1077-1095).
ccgagatcaaggagaaaat

SEQ ID NO: 48055 - DNA, 19 bp, Homo sapiens
  siRNA target sequence for ADAR (NM_001111.2,1096-1114).
ctgcgactatctcttcaat

SEQ ID NO: 48056 - DNA, 19 bp, Homo sapiens
  siRNA target sequence for ADAR (NM_001111.2,1100-1118).
gactatctcttcaatgtgt

SEQ ID NO: 48057 - DNA, 19 bp, Homo sapiens
  siRNA target sequence for ADAR (NM_001111.2,1161-1179).
ccaaggcccgagatataaa

SEQ ID NO: 48058 - DNA, 19 bp, Homo sapiens
  siRNA target sequence for ADAR (NM_001111.2,1162-1180).
caaggcccgagatataaat

SEQ ID NO: 48059 - DNA, 19 bp, Homo sapiens
  siRNA target sequence for ADAR (NM_001111.2,1204-1222).
gcagggggatgtctataga

SEQ ID NO: 48060 - DNA, 19 bp, Homo sapiens
  siRNA target sequence for ADAR (NM_001111.2,1207-1225).
gggggatgtctatagacaa

SEQ ID NO: 48061 - DNA, 19 bp, Homo sapiens
  siRNA target sequence for ADAR (NM_001111.2,1235-1253).
cctcccatatggcatttga

SEQ ID NO: 48062 - DNA, 19 bp, Homo sapiens
  siRNA target sequence for ADAR (NM_001111.2,1424-1442).
caggaacctgtcataaagt

SEQ ID NO: 48063 - DNA, 19 bp, Homo sapiens
  siRNA target sequence for ADAR (NM_001111.2,1426-1444).
ggaacctgtcataaagtta

SEQ ID NO: 48064 - DNA, 19 bp, Homo sapiens
  siRNA target sequence for ADAR (NM_001111.2,1430-1448).
cctgtcataaagttagaaa

SEQ ID NO: 48065 - DNA, 19 bp, Homo sapiens
  siRNA target sequence for ADAR (NM_001111.2,1481-1499).
ctgaaaccacctgttcatt

SEQ ID NO: 48066 - DNA, 19 bp, Homo sapiens
  siRNA target sequence for ADAR (NM_001111.2,1518-1536).
cagggtatgttgactttga

SEQ ID NO: 48067 - DNA, 19 bp, Homo sapiens
  siRNA target sequence for ADAR (NM_001111.2,1520-1538).
gggtatgttgactttgaaa

SEQ ID NO: 48068 - DNA, 19 bp, Homo sapiens
  siRNA target sequence for ADAR (NM_001111.2,1652-1670).
cggtgttcaccctacaaga

SEQ ID NO: 48069 - DNA, 19 bp, Homo sapiens
  siRNA target sequence for ADAR (NM_001111.2,1654-1672).
gtgttcaccctacaagaaa

SEQ ID NO: 48070 - DNA, 19 bp, Homo sapiens
  siRNA target sequence for ADAR (NM_001111.2,1698-1716).
ccatcagcgggctgttaga

SEQ ID NO: 48071 - DNA, 19 bp, Homo sapiens
  siRNA target sequence for ADAR (NM_001111.2,1699-1717).
catcagcgggctgttagaa

SEQ ID NO: 48072 - DNA, 19 bp, Homo sapiens
  siRNA target sequence for ADAR (NM_001111.2,1702-1720).
cagcgggctgttagaatat

SEQ ID NO: 48073 - DNA, 19 bp, Homo sapiens
  siRNA target sequence for ADAR (NM_001111.2,1721-1739).
gcccagttcgctagtcaaa

SEQ ID NO: 48074 - DNA, 19 bp, Homo sapiens
  siRNA target sequence for ADAR (NM_001111.2,1741-1759).
ctgtgagttcaacatgata

SEQ ID NO: 48075 - DNA, 19 bp, Homo sapiens
  siRNA target sequence for ADAR (NM_001111.2,1775-1793).
ccccatgaacctcgattta

SEQ ID NO: 48076 - DNA, 19 bp, Homo sapiens
  siRNA target sequence for ADAR (NM_001111.2,1776-1794).
cccatgaacctcgatttaa

SEQ ID NO: 48077 - DNA, 19 bp, Homo sapiens
  siRNA target sequence for ADAR (NM_001111.2,1777-1795).
ccatgaacctcgatttaaa

SEQ ID NO: 48078 - DNA, 19 bp, Homo sapiens
  siRNA target sequence for ADAR (NM_001111.2,1778-1796).
catgaacctcgatttaaat

SEQ ID NO: 48079 - DNA, 19 bp, Homo sapiens
  siRNA target sequence for ADAR (NM_001111.2,1807-1825).
catcaatggccgagagttt

SEQ ID NO: 48080 - DNA, 19 bp, Homo sapiens
  siRNA target sequence for ADAR (NM_001111.2,1872-1890).
ctatgaaagccatgacaat

SEQ ID NO: 48081 - DNA, 19 bp, Homo sapiens
  siRNA target sequence for ADAR (NM_001111.2,1922-1940).
ggaaaatcagaagaatcat

SEQ ID NO: 48082 - DNA, 19 bp, Homo sapiens
  siRNA target sequence for ADAR (NM_001111.2,2278-2296).
gatctcagagtcacttgat

SEQ ID NO: 48083 - DNA, 19 bp, Homo sapiens
  siRNA target sequence for ADAR (NM_001111.2,2447-2465).
cacgagcccaagttcgttt

SEQ ID NO: 48084 - DNA, 19 bp, Homo sapiens
  siRNA target sequence for ADAR (NM_001111.2,2624-2642).
gccagtctcagaagaacta

SEQ ID NO: 48085 - DNA, 19 bp, Homo sapiens
  siRNA target sequence for ADAR (NM_001111.2,2625-2643).
ccagtctcagaagaactat

SEQ ID NO: 48086 - DNA, 19 bp, Homo sapiens
  siRNA target sequence for ADAR (NM_001111.2,2886-2904).
gcctaaaaggagaaactgt

SEQ ID NO: 48087 - DNA, 19 bp, Homo sapiens
  siRNA target sequence for ADAR (NM_001111.2,2894-2912).
ggagaaactgtcaatgact

SEQ ID NO: 48088 - DNA, 19 bp, Homo sapiens
  siRNA target sequence for ADAR (NM_001111.2,2939-2957).
ggcttcatcaggtttctct

SEQ ID NO: 48089 - DNA, 19 bp, Homo sapiens
  siRNA target sequence for ADAR (NM_001111.2,2940-2958).
gcttcatcaggtttctcta

SEQ ID NO: 48090 - DNA, 19 bp, Homo sapiens
  siRNA target sequence for ADAR (NM_001111.2,2984-3002).
cagactgcgaaggatagta

SEQ ID NO: 48091 - DNA, 19 bp, Homo sapiens
  siRNA target sequence for ADAR (NM_001111.2,2986-3004).
gactgcgaaggatagtata

SEQ ID NO: 48092 - DNA, 19 bp, Homo sapiens
  siRNA target sequence for ADAR (NM_001111.2,2988-3006).
ctgcgaaggatagtatatt

SEQ ID NO: 48093 - DNA, 19 bp, Homo sapiens
  siRNA target sequence for ADAR (NM_001111.2,2991-3009).
cgaaggatagtatatttga

SEQ ID NO: 48094 - DNA, 19 bp, Homo sapiens
  siRNA target sequence for ADAR (NM_001111.2,2992-3010).
gaaggatagtatatttgaa

SEQ ID NO: 48095 - DNA, 19 bp, Homo sapiens
  siRNA target sequence for ADAR (NM_001111.2,3115-3133).
cagcgaccgtgctatggaa

SEQ ID NO: 48096 - DNA, 19 bp, Homo sapiens
  siRNA target sequence for ADAR (NM_001111.2,3125-3143).
gctatggaaagcacagaat

SEQ ID NO: 48097 - DNA, 19 bp, Homo sapiens
  siRNA target sequence for ADAR (NM_001111.2,3160-3178).
cttcgagaatcccaaacaa

SEQ ID NO: 48098 - DNA, 19 bp, Homo sapiens
  siRNA target sequence for ADAR (NM_001111.2,3352-3370).
cttcctgcagcccatttat

SEQ ID NO: 48099 - DNA, 19 bp, Homo sapiens
  siRNA target sequence for ADAR (NM_001111.2,3358-3376).
gcagcccatttatctcaaa

SEQ ID NO: 48100 - DNA, 19 bp, Homo sapiens
  siRNA target sequence for ADAR (NM_001111.2,3361-3379).
gcccatttatctcaaatct

SEQ ID NO: 48101 - DNA, 19 bp, Homo sapiens
  siRNA target sequence for ADAR (NM_001111.2,3363-3381).
ccatttatctcaaatctgt

SEQ ID NO: 48102 - DNA, 19 bp, Homo sapiens
  siRNA target sequence for ADAR (NM_001111.2,3409-3427).
gcatctgacccgtgctatt

SEQ ID NO: 48103 - DNA, 19 bp, Homo sapiens
  siRNA target sequence for ADAR (NM_001111.2,3430-3448).
ctgtcgtgtgacaagagat

SEQ ID NO: 48104 - DNA, 19 bp, Homo sapiens
  siRNA target sequence for ADAR (NM_001111.2,3473-3491).
cgacatccctttattgtca

SEQ ID NO: 48105 - DNA, 19 bp, Homo sapiens
  siRNA target sequence for ADAR (NM_001111.2,3534-3552).
ggcaatccgggaagactaa

SEQ ID NO: 48106 - DNA, 19 bp, Homo sapiens
  siRNA target sequence for ADAR (NM_001111.2,3625-3643).
ggatgggccacggaatgaa

SEQ ID NO: 48107 - DNA, 19 bp, Homo sapiens
  siRNA target sequence for ADAR (NM_001111.2,3626-3644).
gatgggccacggaatgaat

SEQ ID NO: 48108 - DNA, 19 bp, Homo sapiens
  siRNA target sequence for ADAR (NM_001111.2,3629-3647).
gggccacggaatgaattgt

SEQ ID NO: 48109 - DNA, 19 bp, Homo sapiens
  siRNA target sequence for ADAR (NM_001111.2,3702-3720).
gttaccgcagggatctact

SEQ ID NO: 48110 - DNA, 19 bp, Homo sapiens
  siRNA target sequence for ADAR (NM_001111.2,3764-3782).
gagacggccaagaactact

SEQ ID NO: 48111 - DNA, 19 bp, Homo sapiens
  siRNA target sequence for ADARB1 (NM_001112.1,602-620).
caagtaccgcctgaagaaa

SEQ ID NO: 48112 - DNA, 19 bp, Homo sapiens
  siRNA target sequence for ADARB1 (NM_001112.1,721-739).
ccgtgcacgcgcctttgtt

SEQ ID NO: 48113 - DNA, 19 bp, Homo sapiens
  siRNA target sequence for ADARB1 (NM_001112.1,722-740).
cgtgcacgcgcctttgttt

SEQ ID NO: 48114 - DNA, 19 bp, Homo sapiens
  siRNA target sequence for ADARB1 (NM_001112.1,726-744).
cacgcgcctttgtttgtca

SEQ ID NO: 48115 - DNA, 19 bp, Homo sapiens
  siRNA target sequence for ADARB1 (NM_001112.1,824-842).
ggccttgaggtctttcgtt

SEQ ID NO: 48116 - DNA, 19 bp, Homo sapiens
  siRNA target sequence for ADARB1 (NM_001112.1,830-848).
gaggtctttcgttcagttt

SEQ ID NO: 48117 - DNA, 19 bp, Homo sapiens
  siRNA target sequence for ADARB1 (NM_001112.1,894-912).
gtcaacacggacttcacat

SEQ ID NO: 48118 - DNA, 19 bp, Homo sapiens
  siRNA target sequence for ADARB1 (NM_001112.1,929-947).
ccctgacacgctcttcaat

SEQ ID NO: 48119 - DNA, 19 bp, Homo sapiens
  siRNA target sequence for ADARB1 (NM_001112.1,933-951).
gacacgctcttcaatggtt

SEQ ID NO: 48120 - DNA, 19 bp, Homo sapiens
  siRNA target sequence for ADARB1 (NM_001112.1,935-953).
cacgctcttcaatggtttt

SEQ ID NO: 48121 - DNA, 19 bp, Homo sapiens
  siRNA target sequence for ADARB1 (NM_001112.1,937-955).
cgctcttcaatggttttga

SEQ ID NO: 48122 - DNA, 19 bp, Homo sapiens
  siRNA target sequence for ADARB1 (NM_001112.1,970-988).
cggagcctcccttttacgt

SEQ ID NO: 48123 - DNA, 19 bp, Homo sapiens
  siRNA target sequence for ADARB1 (NM_001112.1,1142-1160).
gcgcccaggactcaagtat

SEQ ID NO: 48124 - DNA, 19 bp, Homo sapiens
  siRNA target sequence for ADARB1 (NM_001112.1,1144-1162).
gcccaggactcaagtatga

SEQ ID NO: 48125 - DNA, 19 bp, Homo sapiens
  siRNA target sequence for ADARB1 (NM_001112.1,1146-1164).
ccaggactcaagtatgact

SEQ ID NO: 48126 - DNA, 19 bp, Homo sapiens
  siRNA target sequence for ADARB1 (NM_001112.1,1147-1165).
caggactcaagtatgactt

SEQ ID NO: 48127 - DNA, 19 bp, Homo sapiens
  siRNA target sequence for ADARB1 (NM_001112.1,1217-1235).
cgtggatggtcagttcttt

SEQ ID NO: 48128 - DNA, 19 bp, Homo sapiens
  siRNA target sequence for ADARB1 (NM_001112.1,1352-1370).
gggtcttcagctgcattta

SEQ ID NO: 48129 - DNA, 19 bp, Homo sapiens
  siRNA target sequence for ADARB1 (NM_001112.1,1364-1382).
gcatttaccgcaggtttta

SEQ ID NO: 48130 - DNA, 19 bp, Homo sapiens
  siRNA target sequence for ADARB1 (NM_001112.1,1445-1463).
ccctcacgctcgcagaaaa

SEQ ID NO: 48131 - DNA, 19 bp, Homo sapiens
  siRNA target sequence for ADARB1 (NM_001112.1,1447-1465).
ctcacgctcgcagaaaagt

SEQ ID NO: 48132 - DNA, 19 bp, Homo sapiens
  siRNA target sequence for ADARB1 (NM_001112.1,1470-1488).
gctggagtcgtcatgacaa

SEQ ID NO: 48133 - DNA, 19 bp, Homo sapiens
  siRNA target sequence for ADARB1 (NM_001112.1,1543-1561).
gtattaatggtgaatacat

SEQ ID NO: 48134 - DNA, 19 bp, Homo sapiens
  siRNA target sequence for ADARB1 (NM_001112.1,1564-1582).
gtgatcgtggccttgcatt

SEQ ID NO: 48135 - DNA, 19 bp, Homo sapiens
  siRNA target sequence for ADARB1 (NM_001112.1,1570-1588).
gtggccttgcattaaatga

SEQ ID NO: 48136 - DNA, 19 bp, Homo sapiens
  siRNA target sequence for ADARB1 (NM_001112.1,1572-1590).
ggccttgcattaaatgact

SEQ ID NO: 48137 - DNA, 19 bp, Homo sapiens
  siRNA target sequence for ADARB1 (NM_001112.1,1613-1631).
gagatccttgctcagattt

SEQ ID NO: 48138 - DNA, 19 bp, Homo sapiens
  siRNA target sequence for ADARB1 (NM_001112.1,1649-1667).
gctttacttaaataacaaa

SEQ ID NO: 48139 - DNA, 19 bp, Homo sapiens
  siRNA target sequence for ADARB1 (NM_001112.1,1734-1752).
cagtttcatctgtacatca

SEQ ID NO: 48140 - DNA, 19 bp, Homo sapiens
  siRNA target sequence for ADARB1 (NM_001112.1,1765-1783).
gtggagatgccagaatctt

SEQ ID NO: 48141 - DNA, 19 bp, Homo sapiens
  siRNA target sequence for ADARB1 (NM_001112.1,1818-1836).
gatagacacccaaatcgta

SEQ ID NO: 48142 - DNA, 19 bp, Homo sapiens
  siRNA target sequence for ADARB1 (NM_001112.1,1845-1863).
ggacagctacggaccaaaa

SEQ ID NO: 48143 - DNA, 19 bp, Homo sapiens
  siRNA target sequence for ADARB1 (NM_001112.1,1846-1864).
gacagctacggaccaaaat

SEQ ID NO: 48144 - DNA, 19 bp, Homo sapiens
  siRNA target sequence for ADARB1 (NM_001112.1,1851-1869).
ctacggaccaaaatagagt

SEQ ID NO: 48145 - DNA, 19 bp, Homo sapiens
  siRNA target sequence for ADARB1 (NM_001112.1,2001-2019).
ggatccctgctcagcattt

SEQ ID NO: 48146 - DNA, 19 bp, Homo sapiens
  siRNA target sequence for ADARB1 (NM_001112.1,2096-2114).
ccagcggatctccaacata

SEQ ID NO: 48147 - DNA, 19 bp, Homo sapiens
  siRNA target sequence for ADARB1 (NM_001112.1,2233-2251).
ccgctattgaggtcatcaa

SEQ ID NO: 48148 - DNA, 19 bp, Homo sapiens
  siRNA target sequence for ADARB1 (NM_001112.1,2351-2369).
cttactacgctccaagatt

SEQ ID NO: 48149 - DNA, 19 bp, Homo sapiens
  siRNA target sequence for ADARB1 (NM_001112.1,2355-2373).
ctacgctccaagattacca

SEQ ID NO: 48150 - DNA, 19 bp, Homo sapiens
  siRNA target sequence for ADARB1 (NM_015833.1,1806-1824).
gaagggtctcgctcttaca

SEQ ID NO: 48151 - DNA, 19 bp, Homo sapiens
  siRNA target sequence for ADARB2 (NM_018702.1,418-436).
gaggtccaagcggaaagat

SEQ ID NO: 48152 - DNA, 19 bp, Homo sapiens
  siRNA target sequence for ADARB2 (NM_018702.1,420-438).
ggtccaagcggaaagataa

SEQ ID NO: 48153 - DNA, 19 bp, Homo sapiens
  siRNA target sequence for ADARB2 (NM_018702.1,421-439).
gtccaagcggaaagataaa

SEQ ID NO: 48154 - DNA, 19 bp, Homo sapiens
  siRNA target sequence for ADARB2 (NM_018702.1,423-441).
ccaagcggaaagataaagt

SEQ ID NO: 48155 - DNA, 19 bp, Homo sapiens
  siRNA target sequence for ADARB2 (NM_018702.1,424-442).
caagcggaaagataaagta

SEQ ID NO: 48156 - DNA, 19 bp, Homo sapiens
  siRNA target sequence for ADARB2 (NM_018702.1,479-497).
ctgagtcctggcatcacaa

SEQ ID NO: 48157 - DNA, 19 bp, Homo sapiens
  siRNA target sequence for ADARB2 (NM_018702.1,1398-1416).
cgccaatgccgcaggaatt

SEQ ID NO: 48158 - DNA, 19 bp, Homo sapiens
  siRNA target sequence for ADARB2 (NM_018702.1,1708-1726).
ggactcagagcgatcgata

SEQ ID NO: 48159 - DNA, 19 bp, Homo sapiens
  siRNA target sequence for ADARB2 (NM_018702.1,1709-1727).
gactcagagcgatcgatat

SEQ ID NO: 48160 - DNA, 19 bp, Homo sapiens
  siRNA target sequence for ADARB2 (NM_018702.1,1713-1731).
cagagcgatcgatattcgt

SEQ ID NO: 48161 - DNA, 19 bp, Homo sapiens
  siRNA target sequence for ADARB2 (NM_018702.1,1722-1740).
cgatattcgtgcggttaaa

SEQ ID NO: 48162 - DNA, 19 bp, Homo sapiens
  siRNA target sequence for ADARB2 (NM_018702.1,1723-1741).
gatattcgtgcggttaaaa

SEQ ID NO: 48163 - DNA, 19 bp, Homo sapiens
  siRNA target sequence for ADARB2 (NM_018702.1,2268-2286).
gcgcggacctggagattat

SEQ ID NO: 48164 - DNA, 19 bp, Homo sapiens
  siRNA target sequence for ADARB2 (NM_018702.1,2270-2288).
gcggacctggagattatca

SEQ ID NO: 48165 - DNA, 19 bp, Homo sapiens
  siRNA target sequence for ADARB2 (NM_018702.1,2405-2423).
gacacgccctccatgtact

SEQ ID NO: 48166 - DNA, 19 bp, Homo sapiens
  siRNA target sequence for ADARB2 (NM_018702.1,2448-2466).
cctaccagtctgtgaaaca

SEQ ID NO: 48167 - DNA, 19 bp, Homo sapiens
  siRNA target sequence for CARF (NM_017632.1,234-252).
cgacggcgagactgacaaa

SEQ ID NO: 48168 - DNA, 19 bp, Homo sapiens
  siRNA target sequence for CARF (NM_017632.1,238-256).
ggcgagactgacaaacact

SEQ ID NO: 48169 - DNA, 19 bp, Homo sapiens
  siRNA target sequence for CARF (NM_017632.1,428-446).
ggtgccgataccctcaaaa

SEQ ID NO: 48170 - DNA, 19 bp, Homo sapiens
  siRNA target sequence for CARF (NM_017632.1,429-447).
gtgccgataccctcaaaaa

SEQ ID NO: 48171 - DNA, 19 bp, Homo sapiens
  siRNA target sequence for CARF (NM_017632.1,431-449).
gccgataccctcaaaaagt

SEQ ID NO: 48172 - DNA, 19 bp, Homo sapiens
  siRNA target sequence for CARF (NM_017632.1,432-450).
ccgataccctcaaaaagtt

SEQ ID NO: 48173 - DNA, 19 bp, Homo sapiens
  siRNA target sequence for CARF (NM_017632.1,433-451).
cgataccctcaaaaagtta

SEQ ID NO: 48174 - DNA, 19 bp, Homo sapiens
  siRNA target sequence for CARF (NM_017632.1,434-452).
gataccctcaaaaagttat

SEQ ID NO: 48175 - DNA, 19 bp, Homo sapiens
  siRNA target sequence for CARF (NM_017632.1,489-507).
gacagatgctccaacctat

SEQ ID NO: 48176 - DNA, 19 bp, Homo sapiens
  siRNA target sequence for CARF (NM_017632.1,549-567).
gatatcgagtagcaatgaa

SEQ ID NO: 48177 - DNA, 19 bp, Homo sapiens
  siRNA target sequence for CARF (NM_017632.1,581-599).
catccaaaaaacgagttat

SEQ ID NO: 48178 - DNA, 19 bp, Homo sapiens
  siRNA target sequence for CARF (NM_017632.1,584-602).
ccaaaaaacgagttataga

SEQ ID NO: 48179 - DNA, 19 bp, Homo sapiens
  siRNA target sequence for CARF (NM_017632.1,585-603).
caaaaaacgagttatagaa

SEQ ID NO: 48180 - DNA, 19 bp, Homo sapiens
  siRNA target sequence for CARF (NM_017632.1,595-613).
gttatagaaggaaaaaaca

SEQ ID NO: 48181 - DNA, 19 bp, Homo sapiens
  siRNA target sequence for CARF (NM_017632.1,625-643).
gagcaagatcacgcaaaaa

SEQ ID NO: 48182 - DNA, 19 bp, Homo sapiens
  siRNA target sequence for CARF (NM_017632.1,628-646).
caagatcacgcaaaaacct

SEQ ID NO: 48183 - DNA, 19 bp, Homo sapiens
  siRNA target sequence for CARF (NM_017632.1,701-719).
ggtcggccatcaaatcaga

SEQ ID NO: 48184 - DNA, 19 bp, Homo sapiens
  siRNA target sequence for CARF (NM_017632.1,775-793).
gatggagatcgatctgttt

SEQ ID NO: 48185 - DNA, 19 bp, Homo sapiens
  siRNA target sequence for DHX30 (NM_014966.2,331-349).
ctagggacctattaaaaga

SEQ ID NO: 48186 - DNA, 19 bp, Homo sapiens
  siRNA target sequence for DHX30 (NM_014966.2,412-430).
caaaagacaaactagtcta

SEQ ID NO: 48187 - DNA, 19 bp, Homo sapiens
  siRNA target sequence for DHX30 (NM_014966.2,428-446).
ctacgtgcacacaaatgga

SEQ ID NO: 48188 - DNA, 19 bp, Homo sapiens
  siRNA target sequence for DHX30 (NM_014966.2,437-455).
cacaaatggaccgaagaaa

SEQ ID NO: 48189 - DNA, 19 bp, Homo sapiens
  siRNA target sequence for DHX30 (NM_014966.2,582-600).
ctaggtccccggaatgagt

SEQ ID NO: 48190 - DNA, 19 bp, Homo sapiens
  siRNA target sequence for DHX30 (NM_014966.2,586-604).
gtccccggaatgagttgtt

SEQ ID NO: 48191 - DNA, 19 bp, Homo sapiens
  siRNA target sequence for DHX30 (NM_014966.2,589-607).
cccggaatgagttgtttga

SEQ ID NO: 48192 - DNA, 19 bp, Homo sapiens
  siRNA target sequence for DHX30 (NM_014966.2,704-722).
gctgaatccagagagtatt

SEQ ID NO: 48193 - DNA, 19 bp, Homo sapiens
  siRNA target sequence for DHX30 (NM_014966.2,707-725).
gaatccagagagtattcga

SEQ ID NO: 48194 - DNA, 19 bp, Homo sapiens
  siRNA target sequence for DHX30 (NM_014966.2,866-884).
ctcaagggggagttccttt

SEQ ID NO: 48195 - DNA, 19 bp, Homo sapiens
  siRNA target sequence for DHX30 (NM_014966.2,871-889).
gggggagttcctttgagat

SEQ ID NO: 48196 - DNA, 19 bp, Homo sapiens
  siRNA target sequence for DHX30 (NM_014966.2,1120-1138).
ccttggcctgcaagaaact

SEQ ID NO: 48197 - DNA, 19 bp, Homo sapiens
  siRNA target sequence for DHX30 (NM_014966.2,1175-1193).
gcttacacacgccatgtat

SEQ ID NO: 48198 - DNA, 19 bp, Homo sapiens
  siRNA target sequence for DHX30 (NM_014966.2,1180-1198).
cacacgccatgtataacct

SEQ ID NO: 48199 - DNA, 19 bp, Homo sapiens
  siRNA target sequence for DHX30 (NM_014966.2,1259-1277).
gcccatcctccgcaagata

SEQ ID NO: 48200 - DNA, 19 bp, Homo sapiens
  siRNA target sequence for DHX30 (NM_014966.2,1261-1279).
ccatcctccgcaagataga

SEQ ID NO: 48201 - DNA, 19 bp, Homo sapiens
  siRNA target sequence for DHX30 (NM_014966.2,1333-1351).
ggctgcagagtgatgacat

SEQ ID NO: 48202 - DNA, 19 bp, Homo sapiens
  siRNA target sequence for DHX30 (NM_014966.2,1444-1462).
gccagagtctgctagaact

SEQ ID NO: 48203 - DNA, 19 bp, Homo sapiens
  siRNA target sequence for DHX30 (NM_014966.2,1644-1662).
ggtgcccgctgcaatgtta

SEQ ID NO: 48204 - DNA, 19 bp, Homo sapiens
  siRNA target sequence for DHX30 (NM_014966.2,1648-1666).
cccgctgcaatgttatcat

SEQ ID NO: 48205 - DNA, 19 bp, Homo sapiens
  siRNA target sequence for DHX30 (NM_014966.2,1895-1913).
ggacgtgaacacagacttt

SEQ ID NO: 48206 - DNA, 19 bp, Homo sapiens
  siRNA target sequence for DHX30 (NM_014966.2,2014-2032).
gtggctgccccgtcatcaa

SEQ ID NO: 48207 - DNA, 19 bp, Homo sapiens
  siRNA target sequence for DHX30 (NM_014966.2,2230-2248).
ctgggtggcaggagatcaa

SEQ ID NO: 48208 - DNA, 19 bp, Homo sapiens
  siRNA target sequence for DHX30 (NM_014966.2,2370-2388).
ggggtgcgcaagattgtct

SEQ ID NO: 48209 - DNA, 19 bp, Homo sapiens
  siRNA target sequence for DHX30 (NM_014966.2,2371-2389).
gggtgcgcaagattgtctt

SEQ ID NO: 48210 - DNA, 19 bp, Homo sapiens
  siRNA target sequence for DHX30 (NM_014966.2,2403-2421).
gctgagacttccatcacaa

SEQ ID NO: 48211 - DNA, 19 bp, Homo sapiens
  siRNA target sequence for DHX30 (NM_014966.2,2404-2422).
ctgagacttccatcacaat

SEQ ID NO: 48212 - DNA, 19 bp, Homo sapiens
  siRNA target sequence for DHX30 (NM_014966.2,2406-2424).
gagacttccatcacaatca

SEQ ID NO: 48213 - DNA, 19 bp, Homo sapiens
  siRNA target sequence for DHX30 (NM_014966.2,2502-2520).
gagacagtgtgggtatcaa

SEQ ID NO: 48214 - DNA, 19 bp, Homo sapiens
  siRNA target sequence for DHX30 (NM_014966.2,2569-2587).
gctttgcctaccacttgtt

SEQ ID NO: 48215 - DNA, 19 bp, Homo sapiens
  siRNA target sequence for DHX30 (NM_014966.2,2596-2614).
gccggctggagaaaatggt

SEQ ID NO: 48216 - DNA, 19 bp, Homo sapiens
  siRNA target sequence for DHX30 (NM_014966.2,3066-3084).
cgcagctcccgggagaatt

SEQ ID NO: 48217 - DNA, 19 bp, Homo sapiens
  siRNA target sequence for DHX30 (NM_014966.2,3070-3088).
gctcccgggagaattacct

SEQ ID NO: 48218 - DNA, 19 bp, Homo sapiens
  siRNA target sequence for DHX30 (NM_014966.2,3329-3347).
gcccaacagcgtcacatat

SEQ ID NO: 48219 - DNA, 19 bp, Homo sapiens
  siRNA target sequence for DHX30 (NM_014966.2,3330-3348).
cccaacagcgtcacatata

SEQ ID NO: 48220 - DNA, 19 bp, Homo sapiens
  siRNA target sequence for DHX30 (NM_014966.2,3339-3357).
gtcacatataggaccaaat

SEQ ID NO: 48221 - DNA, 19 bp, Homo sapiens
  siRNA target sequence for DHX30 (NM_014966.2,3375-3393).
cacaagtcgaccattaaca

SEQ ID NO: 48222 - DNA, 19 bp, Homo sapiens
  siRNA target sequence for DHX30 (NM_138615.1,186-204).
ggactcattcagaaaagat

SEQ ID NO: 48223 - DNA, 19 bp, Homo sapiens
  siRNA target sequence for DHX30 (NM_138615.1,219-237).
gcagcgtcagtgcaaactt

SEQ ID NO: 48224 - DNA, 19 bp, Homo sapiens
  siRNA target sequence for DICER1 (NM_030621.2,285-303).
gaagcaattcatgataaca

SEQ ID NO: 48225 - DNA, 19 bp, Homo sapiens
  siRNA target sequence for DICER1 (NM_030621.2,302-320).
catttatacgccaagaaaa

SEQ ID NO: 48226 - DNA, 19 bp, Homo sapiens
  siRNA target sequence for DICER1 (NM_030621.2,345-363).
gctctggatcataatacca

SEQ ID NO: 48227 - DNA, 19 bp, Homo sapiens
  siRNA target sequence for DICER1 (NM_030621.2,346-364).
ctctggatcataataccat

SEQ ID NO: 48228 - DNA, 19 bp, Homo sapiens
  siRNA target sequence for DICER1 (NM_030621.2,394-412).
catttattgcagtactact

SEQ ID NO: 48229 - DNA, 19 bp, Homo sapiens
  siRNA target sequence for DICER1 (NM_030621.2,403-421).
cagtactactcactaaaga

SEQ ID NO: 48230 - DNA, 19 bp, Homo sapiens
  siRNA target sequence for DICER1 (NM_030621.2,537-555).
ctcaaggttggggaatact

SEQ ID NO: 48231 - DNA, 19 bp, Homo sapiens
  siRNA target sequence for DICER1 (NM_030621.2,539-557).
caaggttggggaatactca

SEQ ID NO: 48232 - DNA, 19 bp, Homo sapiens
  siRNA target sequence for DICER1 (NM_030621.2,554-572).
ctcaaacctagaagtaaat

SEQ ID NO: 48233 - DNA, 19 bp, Homo sapiens
  siRNA target sequence for DICER1 (NM_030621.2,595-613).
ggaaccaagagtttactaa

SEQ ID NO: 48234 - DNA, 19 bp, Homo sapiens
  siRNA target sequence for DICER1 (NM_030621.2,610-628).
ctaagcaccaggttctcat

SEQ ID NO: 48235 - DNA, 19 bp, Homo sapiens
  siRNA target sequence for DICER1 (NM_030621.2,615-633).
caccaggttctcattatga

SEQ ID NO: 48236 - DNA, 19 bp, Homo sapiens
  siRNA target sequence for DICER1 (NM_030621.2,618-636).
caggttctcattatgactt

SEQ ID NO: 48237 - DNA, 19 bp, Homo sapiens
  siRNA target sequence for DICER1 (NM_030621.2,637-655).
gctatgtcgccttgaatgt

SEQ ID NO: 48238 - DNA, 19 bp, Homo sapiens
  siRNA target sequence for DICER1 (NM_030621.2,638-656).
ctatgtcgccttgaatgtt

SEQ ID NO: 48239 - DNA, 19 bp, Homo sapiens
  siRNA target sequence for DICER1 (NM_030621.2,642-660).
gtcgccttgaatgttttga

SEQ ID NO: 48240 - DNA, 19 bp, Homo sapiens
  siRNA target sequence for DICER1 (NM_030621.2,659-677).
gaaaaatggttacttatca

SEQ ID NO: 48241 - DNA, 19 bp, Homo sapiens
  siRNA target sequence for DICER1 (NM_030621.2,671-689).
cttatcactgtcagacatt

SEQ ID NO: 48242 - DNA, 19 bp, Homo sapiens
  siRNA target sequence for DICER1 (NM_030621.2,676-694).
cactgtcagacattaacct

SEQ ID NO: 48243 - DNA, 19 bp, Homo sapiens
  siRNA target sequence for DICER1 (NM_030621.2,678-696).
ctgtcagacattaaccttt

SEQ ID NO: 48244 - DNA, 19 bp, Homo sapiens
  siRNA target sequence for DICER1 (NM_030621.2,710-728).
gtgtcatcttgcaatccta

SEQ ID NO: 48245 - DNA, 19 bp, Homo sapiens
  siRNA target sequence for DICER1 (NM_030621.2,731-749).
ccacccctatcgagaaatt

SEQ ID NO: 48246 - DNA, 19 bp, Homo sapiens
  siRNA target sequence for DICER1 (NM_030621.2,732-750).
cacccctatcgagaaatta

SEQ ID NO: 48247 - DNA, 19 bp, Homo sapiens
  siRNA target sequence for DICER1 (NM_030621.2,735-753).
ccctatcgagaaattatga

SEQ ID NO: 48248 - DNA, 19 bp, Homo sapiens
  siRNA target sequence for DICER1 (NM_030621.2,736-754).
cctatcgagaaattatgaa

SEQ ID NO: 48249 - DNA, 19 bp, Homo sapiens
  siRNA target sequence for DICER1 (NM_030621.2,903-921).
gtggtcttagacaggtata

SEQ ID NO: 48250 - DNA, 19 bp, Homo sapiens
  siRNA target sequence for DICER1 (NM_030621.2,905-923).
ggtcttagacaggtatact

SEQ ID NO: 48251 - DNA, 19 bp, Homo sapiens
  siRNA target sequence for DICER1 (NM_030621.2,1078-1096).
cgaaacagatactatcaga

SEQ ID NO: 48252 - DNA, 19 bp, Homo sapiens
  siRNA target sequence for DICER1 (NM_030621.2,1097-1115).
ctgtcgtgccgtattggta

SEQ ID NO: 48253 - DNA, 19 bp, Homo sapiens
  siRNA target sequence for DICER1 (NM_030621.2,1102-1120).
gtgccgtattggtagttct

SEQ ID NO: 48254 - DNA, 19 bp, Homo sapiens
  siRNA target sequence for DICER1 (NM_030621.2,1123-1141).
gaccctggtgtgcagataa

SEQ ID NO: 48255 - DNA, 19 bp, Homo sapiens
  siRNA target sequence for DICER1 (NM_030621.2,1127-1145).
ctggtgtgcagataaagta

SEQ ID NO: 48256 - DNA, 19 bp, Homo sapiens
  siRNA target sequence for DICER1 (NM_030621.2,1225-1243).
cagacactttcctaaggaa

SEQ ID NO: 48257 - DNA, 19 bp, Homo sapiens
  siRNA target sequence for DICER1 (NM_030621.2,1303-1321).
ctcctaaagtaatcaaact

SEQ ID NO: 48258 - DNA, 19 bp, Homo sapiens
  siRNA target sequence for DICER1 (NM_030621.2,1325-1343).
cgaaatcttacgcaaatat

SEQ ID NO: 48259 - DNA, 19 bp, Homo sapiens
  siRNA target sequence for DICER1 (NM_030621.2,1326-1344).
gaaatcttacgcaaatata

SEQ ID NO: 48260 - DNA, 19 bp, Homo sapiens
  siRNA target sequence for DICER1 (NM_030621.2,1331-1349).
cttacgcaaatataaacca

SEQ ID NO: 48261 - DNA, 19 bp, Homo sapiens
  siRNA target sequence for DICER1 (NM_030621.2,1336-1354).
gcaaatataaaccatatga

SEQ ID NO: 48262 - DNA, 19 bp, Homo sapiens
  siRNA target sequence for DICER1 (NM_030621.2,1368-1386).
gaaagcgttgagtggtata

SEQ ID NO: 48263 - DNA, 19 bp, Homo sapiens
  siRNA target sequence for DICER1 (NM_030621.2,1372-1390).
gcgttgagtggtataataa

SEQ ID NO: 48264 - DNA, 19 bp, Homo sapiens
  siRNA target sequence for DICER1 (NM_030621.2,1373-1391).
cgttgagtggtataataat

SEQ ID NO: 48265 - DNA, 19 bp, Homo sapiens
  siRNA target sequence for DICER1 (NM_030621.2,1374-1392).
gttgagtggtataataata

SEQ ID NO: 48266 - DNA, 19 bp, Homo sapiens
  siRNA target sequence for DICER1 (NM_030621.2,1377-1395).
gagtggtataataatagaa

SEQ ID NO: 48267 - DNA, 19 bp, Homo sapiens
  siRNA target sequence for DICER1 (NM_030621.2,1502-1520).
cattttgtgcggaattatt

SEQ ID NO: 48268 - DNA, 19 bp, Homo sapiens
  siRNA target sequence for DICER1 (NM_030621.2,1534-1552).
gatacacagcagttgtctt

SEQ ID NO: 48269 - DNA, 19 bp, Homo sapiens
  siRNA target sequence for DICER1 (NM_030621.2,1545-1563).
gttgtcttaaacagattga

SEQ ID NO: 48270 - DNA, 19 bp, Homo sapiens
  siRNA target sequence for DICER1 (NM_030621.2,1548-1566).
gtcttaaacagattgataa

SEQ ID NO: 48271 - DNA, 19 bp, Homo sapiens
  siRNA target sequence for DICER1 (NM_030621.2,1587-1605).
ccagagctggcttatatca

SEQ ID NO: 48272 - DNA, 19 bp, Homo sapiens
  siRNA target sequence for DICER1 (NM_030621.2,1590-1608).
gagctggcttatatcagta

SEQ ID NO: 48273 - DNA, 19 bp, Homo sapiens
  siRNA target sequence for DICER1 (NM_030621.2,1640-1658).
gaatcagcctcgcaacaaa

SEQ ID NO: 48274 - DNA, 19 bp, Homo sapiens
  siRNA target sequence for DICER1 (NM_030621.2,1691-1709).
ggtacttaggaaatttcga

SEQ ID NO: 48275 - DNA, 19 bp, Homo sapiens
  siRNA target sequence for DICER1 (NM_030621.2,1724-1742).
cctgcttattgcaacaagt

SEQ ID NO: 48276 - DNA, 19 bp, Homo sapiens
  siRNA target sequence for DICER1 (NM_030621.2,1725-1743).
ctgcttattgcaacaagta

SEQ ID NO: 48277 - DNA, 19 bp, Homo sapiens
  siRNA target sequence for DICER1 (NM_030621.2,1746-1764).
gtagaagagggtgttgata

SEQ ID NO: 48278 - DNA, 19 bp, Homo sapiens
  siRNA target sequence for DICER1 (NM_030621.2,1752-1770).
gagggtgttgatataccaa

SEQ ID NO: 48279 - DNA, 19 bp, Homo sapiens
  siRNA target sequence for DICER1 (NM_030621.2,1774-1792).
gcaacttggtggttcgttt

SEQ ID NO: 48280 - DNA, 19 bp, Homo sapiens
  siRNA target sequence for DICER1 (NM_030621.2,1775-1793).
caacttggtggttcgtttt

SEQ ID NO: 48281 - DNA, 19 bp, Homo sapiens
  siRNA target sequence for DICER1 (NM_030621.2,1778-1796).
cttggtggttcgttttgat

SEQ ID NO: 48282 - DNA, 19 bp, Homo sapiens
  siRNA target sequence for DICER1 (NM_030621.2,1802-1820).
cacagaatatcgatcctat

SEQ ID NO: 48283 - DNA, 19 bp, Homo sapiens
  siRNA target sequence for DICER1 (NM_030621.2,1812-1830).
cgatcctatgttcaatcta

SEQ ID NO: 48284 - DNA, 19 bp, Homo sapiens
  siRNA target sequence for DICER1 (NM_030621.2,1813-1831).
gatcctatgttcaatctaa

SEQ ID NO: 48285 - DNA, 19 bp, Homo sapiens
  siRNA target sequence for DICER1 (NM_030621.2,1839-1857).
gcaagggcacccatctcta

SEQ ID NO: 48286 - DNA, 19 bp, Homo sapiens
  siRNA target sequence for DICER1 (NM_030621.2,1840-1858).
caagggcacccatctctaa

SEQ ID NO: 48287 - DNA, 19 bp, Homo sapiens
  siRNA target sequence for DICER1 (NM_030621.2,1843-1861).
gggcacccatctctaatta

SEQ ID NO: 48288 - DNA, 19 bp, Homo sapiens
  siRNA target sequence for DICER1 (NM_030621.2,1844-1862).
ggcacccatctctaattat

SEQ ID NO: 48289 - DNA, 19 bp, Homo sapiens
  siRNA target sequence for DICER1 (NM_030621.2,1846-1864).
cacccatctctaattatat

SEQ ID NO: 48290 - DNA, 19 bp, Homo sapiens
  siRNA target sequence for DICER1 (NM_030621.2,1969-1987).
ctggtgagactgacattga

SEQ ID NO: 48291 - DNA, 19 bp, Homo sapiens
  siRNA target sequence for DICER1 (NM_030621.2,2046-2064).
ggtccacgagtcacaatca

SEQ ID NO: 48292 - DNA, 19 bp, Homo sapiens
  siRNA target sequence for DICER1 (NM_030621.2,2047-2065).
gtccacgagtcacaatcaa

SEQ ID NO: 48293 - DNA, 19 bp, Homo sapiens
  siRNA target sequence for DICER1 (NM_030621.2,2049-2067).
ccacgagtcacaatcaaca

SEQ ID NO: 48294 - DNA, 19 bp, Homo sapiens
  siRNA target sequence for DICER1 (NM_030621.2,2068-2086).
cggccattggacacatcaa

SEQ ID NO: 48295 - DNA, 19 bp, Homo sapiens
  siRNA target sequence for DICER1 (NM_030621.2,2069-2087).
ggccattggacacatcaat

SEQ ID NO: 48296 - DNA, 19 bp, Homo sapiens
  siRNA target sequence for DICER1 (NM_030621.2,2070-2088).
gccattggacacatcaata

SEQ ID NO: 48297 - DNA, 19 bp, Homo sapiens
  siRNA target sequence for DICER1 (NM_030621.2,2072-2090).
cattggacacatcaataga

SEQ ID NO: 48298 - DNA, 19 bp, Homo sapiens
  siRNA target sequence for DICER1 (NM_030621.2,2076-2094).
ggacacatcaatagatact

SEQ ID NO: 48299 - DNA, 19 bp, Homo sapiens
  siRNA target sequence for DICER1 (NM_030621.2,2107-2125).
caagtgatccgtttactca

SEQ ID NO: 48300 - DNA, 19 bp, Homo sapiens
  siRNA target sequence for DICER1 (NM_030621.2,2124-2142).
catctagctcctaaatgca

SEQ ID NO: 48301 - DNA, 19 bp, Homo sapiens
  siRNA target sequence for DICER1 (NM_030621.2,2230-2248).
caatgagctgtgtacgatt

SEQ ID NO: 48302 - DNA, 19 bp, Homo sapiens
  siRNA target sequence for DICER1 (NM_030621.2,2400-2418).
ccaggttccacgaaacgaa

SEQ ID NO: 48303 - DNA, 19 bp, Homo sapiens
  siRNA target sequence for DICER1 (NM_030621.2,2423-2441).
gtgctacccaaaagcaatt

SEQ ID NO: 48304 - DNA, 19 bp, Homo sapiens
  siRNA target sequence for DICER1 (NM_030621.2,2426-2444).
ctacccaaaagcaattcca

SEQ ID NO: 48305 - DNA, 19 bp, Homo sapiens
  siRNA target sequence for DICER1 (NM_030621.2,2445-2463).
gagtgtttgagggatagtt

SEQ ID NO: 48306 - DNA, 19 bp, Homo sapiens
  siRNA target sequence for DICER1 (NM_030621.2,2482-2500).
cctgttacctgtatgtgat

SEQ ID NO: 48307 - DNA, 19 bp, Homo sapiens
  siRNA target sequence for DICER1 (NM_030621.2,2483-2501).
ctgttacctgtatgtgata

SEQ ID NO: 48308 - DNA, 19 bp, Homo sapiens
  siRNA target sequence for DICER1 (NM_030621.2,2492-2510).
gtatgtgataggaatggtt

SEQ ID NO: 48309 - DNA, 19 bp, Homo sapiens
  siRNA target sequence for DICER1 (NM_030621.2,2498-2516).
gataggaatggttttaact

SEQ ID NO: 48310 - DNA, 19 bp, Homo sapiens
  siRNA target sequence for DICER1 (NM_030621.2,2529-2547).
gatgaactcaactttagaa

SEQ ID NO: 48311 - DNA, 19 bp, Homo sapiens
  siRNA target sequence for DICER1 (NM_030621.2,2644-2662).
gctctggagaggttaccat

SEQ ID NO: 48312 - DNA, 19 bp, Homo sapiens
  siRNA target sequence for DICER1 (NM_030621.2,2649-2667).
ggagaggttaccatatcca

SEQ ID NO: 48313 - DNA, 19 bp, Homo sapiens
  siRNA target sequence for DICER1 (NM_030621.2,2650-2668).
gagaggttaccatatccat

SEQ ID NO: 48314 - DNA, 19 bp, Homo sapiens
  siRNA target sequence for DICER1 (NM_030621.2,2708-2726).
gcttgagttgattacaaga

SEQ ID NO: 48315 - DNA, 19 bp, Homo sapiens
  siRNA target sequence for DICER1 (NM_030621.2,2727-2745).
cttcaccagtatatattct

SEQ ID NO: 48316 - DNA, 19 bp, Homo sapiens
  siRNA target sequence for DICER1 (NM_030621.2,2733-2751).
cagtatatattctcacata

SEQ ID NO: 48317 - DNA, 19 bp, Homo sapiens
  siRNA target sequence for DICER1 (NM_030621.2,2763-2781).
gaaaaacctgcactagaat

SEQ ID NO: 48318 - DNA, 19 bp, Homo sapiens
  siRNA target sequence for DICER1 (NM_030621.2,2795-2813).
cgctgattcagcatactgt

SEQ ID NO: 48319 - DNA, 19 bp, Homo sapiens
  siRNA target sequence for DICER1 (NM_030621.2,2812-2830).
gtgttctacctcttaatgt

SEQ ID NO: 48320 - DNA, 19 bp, Homo sapiens
  siRNA target sequence for DICER1 (NM_030621.2,2838-2856).
gactccagcactttggata

SEQ ID NO: 48321 - DNA, 19 bp, Homo sapiens
  siRNA target sequence for DICER1 (NM_030621.2,2842-2860).
ccagcactttggatattga

SEQ ID NO: 48322 - DNA, 19 bp, Homo sapiens
  siRNA target sequence for DICER1 (NM_030621.2,2845-2863).
gcactttggatattgactt

SEQ ID NO: 48323 - DNA, 19 bp, Homo sapiens
  siRNA target sequence for DICER1 (NM_030621.2,2906-2924).
cattcccagtacaaagtat

SEQ ID NO: 48324 - DNA, 19 bp, Homo sapiens
  siRNA target sequence for DICER1 (NM_030621.2,2963-2981).
ccaagatgccgttatcatt

SEQ ID NO: 48325 - DNA, 19 bp, Homo sapiens
  siRNA target sequence for DICER1 (NM_030621.2,2971-2989).
ccgttatcattccaagata

SEQ ID NO: 48326 - DNA, 19 bp, Homo sapiens
  siRNA target sequence for DICER1 (NM_030621.2,2972-2990).
cgttatcattccaagatat

SEQ ID NO: 48327 - DNA, 19 bp, Homo sapiens
  siRNA target sequence for DICER1 (NM_030621.2,2986-3004).
gatatcgcaattttgatca

SEQ ID NO: 48328 - DNA, 19 bp, Homo sapiens
  siRNA target sequence for DICER1 (NM_030621.2,3005-3023).
gcctcatcgattttatgta

SEQ ID NO: 48329 - DNA, 19 bp, Homo sapiens
  siRNA target sequence for DICER1 (NM_030621.2,3042-3060).
cttaccccactcagtaaat

SEQ ID NO: 48330 - DNA, 19 bp, Homo sapiens
  siRNA target sequence for DICER1 (NM_030621.2,3047-3065).
cccactcagtaaatttcct

SEQ ID NO: 48331 - DNA, 19 bp, Homo sapiens
  siRNA target sequence for DICER1 (NM_030621.2,3048-3066).
ccactcagtaaatttcctt

SEQ ID NO: 48332 - DNA, 19 bp, Homo sapiens
  siRNA target sequence for DICER1 (NM_030621.2,3067-3085).
cccctgagtatgaaacttt

SEQ ID NO: 48333 - DNA, 19 bp, Homo sapiens
  siRNA target sequence for DICER1 (NM_030621.2,3068-3086).
ccctgagtatgaaactttt

SEQ ID NO: 48334 - DNA, 19 bp, Homo sapiens
  siRNA target sequence for DICER1 (NM_030621.2,3114-3132).
cttgacctaaccaatctca

SEQ ID NO: 48335 - DNA, 19 bp, Homo sapiens
  siRNA target sequence for DICER1 (NM_030621.2,3155-3173).
ccacacatcttcaagactt

SEQ ID NO: 48336 - DNA, 19 bp, Homo sapiens
  siRNA target sequence for DICER1 (NM_030621.2,3156-3174).
cacacatcttcaagactta

SEQ ID NO: 48337 - DNA, 19 bp, Homo sapiens
  siRNA target sequence for DICER1 (NM_030621.2,3160-3178).
catcttcaagacttaatct

SEQ ID NO: 48338 - DNA, 19 bp, Homo sapiens
  siRNA target sequence for DICER1 (NM_030621.2,3163-3181).
cttcaagacttaatctttt

SEQ ID NO: 48339 - DNA, 19 bp, Homo sapiens
  siRNA target sequence for DICER1 (NM_030621.2,3184-3202).
cacctcgacatttgaatca

SEQ ID NO: 48340 - DNA, 19 bp, Homo sapiens
  siRNA target sequence for DICER1 (NM_030621.2,3206-3224).
ggggaaagcgcttccttta

SEQ ID NO: 48341 - DNA, 19 bp, Homo sapiens
  siRNA target sequence for DICER1 (NM_030621.2,3207-3225).
gggaaagcgcttcctttaa

SEQ ID NO: 48342 - DNA, 19 bp, Homo sapiens
  siRNA target sequence for DICER1 (NM_030621.2,3293-3311).
ctgtgctatacatccaatt

SEQ ID NO: 48343 - DNA, 19 bp, Homo sapiens
  siRNA target sequence for DICER1 (NM_030621.2,3362-3380).
ccttcactgccttttgact

SEQ ID NO: 48344 - DNA, 19 bp, Homo sapiens
  siRNA target sequence for DICER1 (NM_030621.2,3435-3453).
cttcctgcggattttagat

SEQ ID NO: 48345 - DNA, 19 bp, Homo sapiens
  siRNA target sequence for DICER1 (NM_030621.2,3465-3483).
gacttcgggtggaaaaaat

SEQ ID NO: 48346 - DNA, 19 bp, Homo sapiens
  siRNA target sequence for DICER1 (NM_030621.2,3484-3502).
ctattgacagcaaatcttt

SEQ ID NO: 48347 - DNA, 19 bp, Homo sapiens
  siRNA target sequence for DICER1 (NM_030621.2,3489-3507).
gacagcaaatctttcatct

SEQ ID NO: 48348 - DNA, 19 bp, Homo sapiens
  siRNA target sequence for DICER1 (NM_030621.2,3493-3511).
gcaaatctttcatctcaat

SEQ ID NO: 48349 - DNA, 19 bp, Homo sapiens
  siRNA target sequence for DICER1 (NM_030621.2,3547-3565).
gtaagcacagcacaattgt

SEQ ID NO: 48350 - DNA, 19 bp, Homo sapiens
  siRNA target sequence for DICER1 (NM_030621.2,3579-3597).
gcacatcaaggtgctaata

SEQ ID NO: 48351 - DNA, 19 bp, Homo sapiens
  siRNA target sequence for DICER1 (NM_030621.2,3582-3600).
catcaaggtgctaatagaa

SEQ ID NO: 48352 - DNA, 19 bp, Homo sapiens
  siRNA target sequence for DICER1 (NM_030621.2,3601-3619).
cctcctctctagaaaatca

SEQ ID NO: 48353 - DNA, 19 bp, Homo sapiens
  siRNA target sequence for DICER1 (NM_030621.2,3667-3685).
gtaagctccacgttgaagt

SEQ ID NO: 48354 - DNA, 19 bp, Homo sapiens
  siRNA target sequence for DICER1 (NM_030621.2,3671-3689).
gctccacgttgaagtttca

SEQ ID NO: 48355 - DNA, 19 bp, Homo sapiens
  siRNA target sequence for DICER1 (NM_030621.2,3681-3699).
gaagtttcagcagatctta

SEQ ID NO: 48356 - DNA, 19 bp, Homo sapiens
  siRNA target sequence for DICER1 (NM_030621.2,3691-3709).
cagatcttacagcaattaa

SEQ ID NO: 48357 - DNA, 19 bp, Homo sapiens
  siRNA target sequence for DICER1 (NM_030621.2,3711-3729).
ggtctttcttacaatcaaa

SEQ ID NO: 48358 - DNA, 19 bp, Homo sapiens
  siRNA target sequence for DICER1 (NM_030621.2,3712-3730).
gtctttcttacaatcaaaa

SEQ ID NO: 48359 - DNA, 19 bp, Homo sapiens
  siRNA target sequence for DICER1 (NM_030621.2,3737-3755).
caatggcagttatgattta

SEQ ID NO: 48360 - DNA, 19 bp, Homo sapiens
  siRNA target sequence for DICER1 (NM_030621.2,3777-3795).
ggaaatcagctaaattact

SEQ ID NO: 48361 - DNA, 19 bp, Homo sapiens
  siRNA target sequence for DICER1 (NM_030621.2,3815-3833).
gcaaccaactacctcatat

SEQ ID NO: 48362 - DNA, 19 bp, Homo sapiens
  siRNA target sequence for DICER1 (NM_030621.2,3819-3837).
ccaactacctcatattcca

SEQ ID NO: 48363 - DNA, 19 bp, Homo sapiens
  siRNA target sequence for DICER1 (NM_030621.2,3867-3885).
ccccagcccagcgatgaat

SEQ ID NO: 48364 - DNA, 19 bp, Homo sapiens
  siRNA target sequence for DICER1 (NM_030621.2,3869-3887).
ccagcccagcgatgaatgt

SEQ ID NO: 48365 - DNA, 19 bp, Homo sapiens
  siRNA target sequence for DICER1 (NM_030621.2,3870-3888).
cagcccagcgatgaatgta

SEQ ID NO: 48366 - DNA, 19 bp, Homo sapiens
  siRNA target sequence for DICER1 (NM_030621.2,3872-3890).
gcccagcgatgaatgtact

SEQ ID NO: 48367 - DNA, 19 bp, Homo sapiens
  siRNA target sequence for DICER1 (NM_030621.2,3886-3904).
gtactctcctgagtaataa

SEQ ID NO: 48368 - DNA, 19 bp, Homo sapiens
  siRNA target sequence for DICER1 (NM_030621.2,3967-3985).
ctggtacgacagacactat

SEQ ID NO: 48369 - DNA, 19 bp, Homo sapiens
  siRNA target sequence for DICER1 (NM_030621.2,3970-3988).
gtacgacagacactattca

SEQ ID NO: 48370 - DNA, 19 bp, Homo sapiens
  siRNA target sequence for DICER1 (NM_030621.2,4118-4136).
ggagcggcttgaaatgctt

SEQ ID NO: 48371 - DNA, 19 bp, Homo sapiens
  siRNA target sequence for DICER1 (NM_030621.2,4133-4151).
gcttggcgactccttttta

SEQ ID NO: 48372 - DNA, 19 bp, Homo sapiens
  siRNA target sequence for DICER1 (NM_030621.2,4134-4152).
cttggcgactcctttttaa

SEQ ID NO: 48373 - DNA, 19 bp, Homo sapiens
  siRNA target sequence for DICER1 (NM_030621.2,4158-4176).
gccatcaccacatatctat

SEQ ID NO: 48374 - DNA, 19 bp, Homo sapiens
  siRNA target sequence for DICER1 (NM_030621.2,4159-4177).
ccatcaccacatatctatt

SEQ ID NO: 48375 - DNA, 19 bp, Homo sapiens
  siRNA target sequence for DICER1 (NM_030621.2,4160-4178).
catcaccacatatctattt

SEQ ID NO: 48376 - DNA, 19 bp, Homo sapiens
  siRNA target sequence for DICER1 (NM_030621.2,4206-4224).
cgcctttcatatatgagaa

SEQ ID NO: 48377 - DNA, 19 bp, Homo sapiens
  siRNA target sequence for DICER1 (NM_030621.2,4233-4251).
gtcagcaactgtaatctgt

SEQ ID NO: 48378 - DNA, 19 bp, Homo sapiens
  siRNA target sequence for DICER1 (NM_030621.2,4282-4300).
gccgcatggtggtgtcaat

SEQ ID NO: 48379 - DNA, 19 bp, Homo sapiens
  siRNA target sequence for DICER1 (NM_030621.2,4283-4301).
ccgcatggtggtgtcaata

SEQ ID NO: 48380 - DNA, 19 bp, Homo sapiens
  siRNA target sequence for DICER1 (NM_030621.2,4289-4307).
ggtggtgtcaatatttgat

SEQ ID NO: 48381 - DNA, 19 bp, Homo sapiens
  siRNA target sequence for DICER1 (NM_030621.2,4327-4345).
ctcctggttatgtagtaaa

SEQ ID NO: 48382 - DNA, 19 bp, Homo sapiens
  siRNA target sequence for DICER1 (NM_030621.2,4512-4530).
gagtatgatcaggaacata

SEQ ID NO: 48383 - DNA, 19 bp, Homo sapiens
  siRNA target sequence for DICER1 (NM_030621.2,4521-4539).
caggaacatatcagattta

SEQ ID NO: 48384 - DNA, 19 bp, Homo sapiens
  siRNA target sequence for DICER1 (NM_030621.2,4534-4552).
gatttatagataatatgtt

SEQ ID NO: 48385 - DNA, 19 bp, Homo sapiens
  siRNA target sequence for DICER1 (NM_030621.2,4603-4621).
ccactgattctgcatatga

SEQ ID NO: 48386 - DNA, 19 bp, Homo sapiens
  siRNA target sequence for DICER1 (NM_030621.2,4712-4730).
ctatctggatcctagcaaa

SEQ ID NO: 48387 - DNA, 19 bp, Homo sapiens
  siRNA target sequence for DICER1 (NM_030621.2,4723-4741).
ctagcaaagctgttgaaga

SEQ ID NO: 48388 - DNA, 19 bp, Homo sapiens
  siRNA target sequence for DICER1 (NM_030621.2,4763-4781).
ctggaatccatcagaagaa

SEQ ID NO: 48389 - DNA, 19 bp, Homo sapiens
  siRNA target sequence for DICER1 (NM_030621.2,4800-4818).
ggaaagcagtccatttctt

SEQ ID NO: 48390 - DNA, 19 bp, Homo sapiens
  siRNA target sequence for DICER1 (NM_030621.2,4953-4971).
ctcccggtaattaaaagga

SEQ ID NO: 48391 - DNA, 19 bp, Homo sapiens
  siRNA target sequence for DICER1 (NM_030621.2,4993-5011).
gccctactcgggagaattt

SEQ ID NO: 48392 - DNA, 19 bp, Homo sapiens
  siRNA target sequence for DICER1 (NM_030621.2,5065-5083).
gttcacgctcttctgtatt

SEQ ID NO: 48393 - DNA, 19 bp, Homo sapiens
  siRNA target sequence for DICER1 (NM_030621.2,5068-5086).
cacgctcttctgtattgaa

SEQ ID NO: 48394 - DNA, 19 bp, Homo sapiens
  siRNA target sequence for DICER1 (NM_030621.2,5071-5089).
gctcttctgtattgaaaga

SEQ ID NO: 48395 - DNA, 19 bp, Homo sapiens
  siRNA target sequence for DICER1 (NM_030621.2,5092-5110).
cggaatatggttgtttgaa

SEQ ID NO: 48396 - DNA, 19 bp, Homo sapiens
  siRNA target sequence for DICER1 (NM_030621.2,5094-5112).
gaatatggttgtttgaaga

SEQ ID NO: 48397 - DNA, 19 bp, Homo sapiens
  siRNA target sequence for DICER1 (NM_030621.2,5136-5154).
catccagatgcagataaaa

SEQ ID NO: 48398 - DNA, 19 bp, Homo sapiens
  siRNA target sequence for DICER1 (NM_030621.2,5140-5158).
cagatgcagataaaacact

SEQ ID NO: 48399 - DNA, 19 bp, Homo sapiens
  siRNA target sequence for DICER1 (NM_030621.2,5165-5183).
ccttatatcggggtttgaa

SEQ ID NO: 48400 - DNA, 19 bp, Homo sapiens
  siRNA target sequence for DICER1 (NM_030621.2,5166-5184).
cttatatcggggtttgaaa

SEQ ID NO: 48401 - DNA, 19 bp, Homo sapiens
  siRNA target sequence for DICER1 (NM_030621.2,5250-5268).
gcctcctaccactacaata

SEQ ID NO: 48402 - DNA, 19 bp, Homo sapiens
  siRNA target sequence for DICER1 (NM_030621.2,5252-5270).
ctcctaccactacaatact

SEQ ID NO: 48403 - DNA, 19 bp, Homo sapiens
  siRNA target sequence for DICER1 (NM_030621.2,5254-5272).
cctaccactacaatactat

SEQ ID NO: 48404 - DNA, 19 bp, Homo sapiens
  siRNA target sequence for DICER1 (NM_030621.2,5258-5276).
ccactacaatactatcact

SEQ ID NO: 48405 - DNA, 19 bp, Homo sapiens
  siRNA target sequence for DICER1 (NM_030621.2,5281-5299).
gttaccagcgcttagaatt

SEQ ID NO: 48406 - DNA, 19 bp, Homo sapiens
  siRNA target sequence for DICER1 (NM_030621.2,5327-5345).
cataaccaagcacctttat

SEQ ID NO: 48407 - DNA, 19 bp, Homo sapiens
  siRNA target sequence for DICER1 (NM_030621.2,5419-5437).
catcgctggctgtaaagta

SEQ ID NO: 48408 - DNA, 19 bp, Homo sapiens
  siRNA target sequence for DICER1 (NM_030621.2,5439-5457).
gactaccacaagtacttca

SEQ ID NO: 48409 - DNA, 19 bp, Homo sapiens
  siRNA target sequence for DICER1 (NM_030621.2,5474-5492).
gctcttccatgtcattgat

SEQ ID NO: 48410 - DNA, 19 bp, Homo sapiens
  siRNA target sequence for DICER1 (NM_030621.2,5504-5522).
gtttcagcttgagaagaat

SEQ ID NO: 48411 - DNA, 19 bp, Homo sapiens
  siRNA target sequence for DICER1 (NM_030621.2,5600-5618).
ggccatgggggatattttt

SEQ ID NO: 48412 - DNA, 19 bp, Homo sapiens
  siRNA target sequence for DICER1 (NM_030621.2,5625-5643).
cttgctggtgccatttaca

SEQ ID NO: 48413 - DNA, 19 bp, Homo sapiens
  siRNA target sequence for DICER1 (NM_030621.2,5668-5686).
cagtctggcaggtgtacta

SEQ ID NO: 48414 - DNA, 19 bp, Homo sapiens
  siRNA target sequence for DICER1 (NM_030621.2,5690-5708).
catgatgcggccactaata

SEQ ID NO: 48415 - DNA, 19 bp, Homo sapiens
  siRNA target sequence for DICER1 (NM_030621.2,5693-5711).
gatgcggccactaatagaa

SEQ ID NO: 48416 - DNA, 19 bp, Homo sapiens
  siRNA target sequence for DICER1 (NM_030621.2,5697-5715).
cggccactaatagaaaagt

SEQ ID NO: 48417 - DNA, 19 bp, Homo sapiens
  siRNA target sequence for DICER1 (NM_030621.2,5734-5752).
gttcccctgtgcgagaatt

SEQ ID NO: 48418 - DNA, 19 bp, Homo sapiens
  siRNA target sequence for DICER1 (NM_030621.2,5737-5755).
cccctgtgcgagaattgct

SEQ ID NO: 48419 - DNA, 19 bp, Homo sapiens
  siRNA target sequence for DICER1 (NM_030621.2,5856-5874).
ggtgttggtcgaagttaca

SEQ ID NO: 48420 - DNA, 19 bp, Homo sapiens
  siRNA target sequence for DICER1 (NM_030621.2,5907-5925).
ctccgaagcctcaaagcta

SEQ ID NO: 48421 - DNA, 19 bp, Homo sapiens
  siRNA target sequence for DICER1 (NM_030621.2,5909-5927).
ccgaagcctcaaagctaat

SEQ ID NO: 48422 - DNA, 19 bp, Homo sapiens
  siRNA target sequence for DICER1 (NM_030621.2,5911-5929).
gaagcctcaaagctaatca

SEQ ID NO: 48423 - DNA, 19 bp, Homo sapiens
  siRNA target sequence for FLJ20399 (NM_017803.3,175-193).
gttaccataataagctaat

SEQ ID NO: 48424 - DNA, 19 bp, Homo sapiens
  siRNA target sequence for FLJ20399 (NM_017803.3,211-229).
gggtagggactcttccaat

SEQ ID NO: 48425 - DNA, 19 bp, Homo sapiens
  siRNA target sequence for FLJ20399 (NM_017803.3,252-270).
ggagcggacattgtttact

SEQ ID NO: 48426 - DNA, 19 bp, Homo sapiens
  siRNA target sequence for FLJ20399 (NM_017803.3,281-299).
gatcgacctcaagatgatt

SEQ ID NO: 48427 - DNA, 19 bp, Homo sapiens
  siRNA target sequence for FLJ20399 (NM_017803.3,285-303).
gacctcaagatgattcagt

SEQ ID NO: 48428 - DNA, 19 bp, Homo sapiens
  siRNA target sequence for FLJ20399 (NM_017803.3,302-320).
gtgcaagagagttgttaat

SEQ ID NO: 48429 - DNA, 19 bp, Homo sapiens
  siRNA target sequence for FLJ20399 (NM_017803.3,341-359).
ctttgtcgcccctgatgat

SEQ ID NO: 48430 - DNA, 19 bp, Homo sapiens
  siRNA target sequence for FLJ20399 (NM_017803.3,368-386).
cttccgcacctgtgaaaga

SEQ ID NO: 48431 - DNA, 19 bp, Homo sapiens
  siRNA target sequence for FLJ20399 (NM_017803.3,444-462).
gtggccaggcttgtagaaa

SEQ ID NO: 48432 - DNA, 19 bp, Homo sapiens
  siRNA target sequence for FLJ20399 (NM_017803.3,491-509).
gggctgtccaaaacaatat

SEQ ID NO: 48433 - DNA, 19 bp, Homo sapiens
  siRNA target sequence for FLJ20399 (NM_017803.3,542-560).
gtcagaccctgacaagatt

SEQ ID NO: 48434 - DNA, 19 bp, Homo sapiens
  siRNA target sequence for FLJ20399 (NM_017803.3,544-562).
cagaccctgacaagattga

SEQ ID NO: 48435 - DNA, 19 bp, Homo sapiens
  siRNA target sequence for FLJ20399 (NM_017803.3,566-584).
gatcctcagcactcttgtt

SEQ ID NO: 48436 - DNA, 19 bp, Homo sapiens
  siRNA target sequence for FLJ20399 (NM_017803.3,569-587).
cctcagcactcttgttaaa

SEQ ID NO: 48437 - DNA, 19 bp, Homo sapiens
  siRNA target sequence for FLJ20399 (NM_017803.3,623-641).
cctgccatcgctagaagat

SEQ ID NO: 48438 - DNA, 19 bp, Homo sapiens
  siRNA target sequence for FLJ20399 (NM_017803.3,624-642).
ctgccatcgctagaagata

SEQ ID NO: 48439 - DNA, 19 bp, Homo sapiens
  siRNA target sequence for FLJ20399 (NM_017803.3,804-822).
gaccacatccaacagtatt

SEQ ID NO: 48440 - DNA, 19 bp, Homo sapiens
  siRNA target sequence for FLJ20399 (NM_017803.3,955-973).
gatacgcggtgcagtatga

SEQ ID NO: 48441 - DNA, 19 bp, Homo sapiens
  siRNA target sequence for FLJ20399 (NM_017803.3,1062-1080).
cagtcttcccgggaaattt

SEQ ID NO: 48442 - DNA, 19 bp, Homo sapiens
  siRNA target sequence for FLJ20399 (NM_017803.3,1064-1082).
gtcttcccgggaaatttgt

SEQ ID NO: 48443 - DNA, 19 bp, Homo sapiens
  siRNA target sequence for FLJ20399 (NM_017803.3,1176-1194).
ggggagccagctgaagata

SEQ ID NO: 48444 - DNA, 19 bp, Homo sapiens
  siRNA target sequence for FLJ20399 (NM_017803.3,1191-1209).
gatacctctggtgtcatta

SEQ ID NO: 48445 - DNA, 19 bp, Homo sapiens
  siRNA target sequence for FLJ20399 (NM_017803.3,1246-1264).
cccagatcacccctaagat

SEQ ID NO: 48446 - DNA, 19 bp, Homo sapiens
  siRNA target sequence for FLJ20399 (NM_017803.3,1248-1266).
cagatcacccctaagatgt

SEQ ID NO: 48447 - DNA, 19 bp, Homo sapiens
  siRNA target sequence for FLJ20399 (NM_017803.3,1258-1276).
ctaagatgtgcctactaga

SEQ ID NO: 48448 - DNA, 19 bp, Homo sapiens
  siRNA target sequence for FLJ20399 (NM_017803.3,1319-1337).
ggttcaacgccctctagat

SEQ ID NO: 48449 - DNA, 19 bp, Homo sapiens
  siRNA target sequence for FLJ20399 (NM_017803.3,1339-1357).
gcctgttctcctctattgt

SEQ ID NO: 48450 - DNA, 19 bp, Homo sapiens
  siRNA target sequence for FLJ20399 (NM_017803.3,1356-1374).
gtcaccgttgctgaacaaa

SEQ ID NO: 48451 - DNA, 19 bp, Homo sapiens
  siRNA target sequence for FLJ20399 (NM_017803.3,1360-1378).
ccgttgctgaacaaaagta

SEQ ID NO: 48452 - DNA, 19 bp, Homo sapiens
  siRNA target sequence for FLJ20399 (NM_017803.3,1361-1379).
cgttgctgaacaaaagtat

SEQ ID NO: 48453 - DNA, 19 bp, Homo sapiens
  siRNA target sequence for FLJ20399 (NM_017803.3,1365-1383).
gctgaacaaaagtatcagt

SEQ ID NO: 48454 - DNA, 19 bp, Homo sapiens
  siRNA target sequence for JAZ (NM_012279.2,272-290).
gtttgctgcgccttgctta

SEQ ID NO: 48455 - DNA, 19 bp, Homo sapiens
  siRNA target sequence for JAZ (NM_012279.2,311-329).
gcacattaccagagcaaaa

SEQ ID NO: 48456 - DNA, 19 bp, Homo sapiens
  siRNA target sequence for JAZ (NM_012279.2,349-367).
gagatacctagcaatccat

SEQ ID NO: 48457 - DNA, 19 bp, Homo sapiens
  siRNA target sequence for JAZ (NM_012279.2,364-382).
ccatggaatggagacatta

SEQ ID NO: 48458 - DNA, 19 bp, Homo sapiens
  siRNA target sequence for JAZ (NM_012279.2,365-383).
catggaatggagacattaa

SEQ ID NO: 48459 - DNA, 19 bp, Homo sapiens
  siRNA target sequence for JAZ (NM_012279.2,513-531).
cccacgcaaagaacttaaa

SEQ ID NO: 48460 - DNA, 19 bp, Homo sapiens
  siRNA target sequence for JAZ (NM_012279.2,557-575).
gaagccttgcaccagaata

SEQ ID NO: 48461 - DNA, 19 bp, Homo sapiens
  siRNA target sequence for JAZ (NM_012279.2,568-586).
ccagaatagagagatgata

SEQ ID NO: 48462 - DNA, 19 bp, Homo sapiens
  siRNA target sequence for JAZ (NM_012279.2,606-624).
gcctctgccatgcaacttt

SEQ ID NO: 48463 - DNA, 19 bp, Homo sapiens
  siRNA target sequence for JAZ (NM_012279.2,608-626).
ctctgccatgcaactttca

SEQ ID NO: 48464 - DNA, 19 bp, Homo sapiens
  siRNA target sequence for JAZ (NM_012279.2,633-651).
ctgtcatggctcaacaaca

SEQ ID NO: 48465 - DNA, 19 bp, Homo sapiens
  siRNA target sequence for JAZ (NM_012279.2,635-653).
gtcatggctcaacaacatt

SEQ ID NO: 48466 - DNA, 19 bp, Homo sapiens
  siRNA target sequence for JAZ (NM_012279.2,754-772).
gggctacccctgcaaaaca

SEQ ID NO: 48467 - DNA, 19 bp, Homo sapiens
  siRNA target sequence for JAZ (NM_012279.2,762-780).
cctgcaaaacatgtaagat

SEQ ID NO: 48468 - DNA, 19 bp, Homo sapiens
  siRNA target sequence for JAZ (NM_012279.2,763-781).
ctgcaaaacatgtaagata

SEQ ID NO: 48469 - DNA, 19 bp, Homo sapiens
  siRNA target sequence for JAZ (NM_012279.2,815-833).
gtcagcggcttcaaacaca

SEQ ID NO: 48470 - DNA, 19 bp, Homo sapiens
  siRNA target sequence for JAZ (NM_012279.2,890-908).
caacccattcagaaagact

SEQ ID NO: 48471 - DNA, 19 bp, Homo sapiens
  siRNA target sequence for LOC161931 (NM_139174.2,623-641).
ggagaggggacctggattt

SEQ ID NO: 48472 - DNA, 19 bp, Homo sapiens
  siRNA target sequence for LOC161931 (NM_139174.2,781-799).
gcgggcactgcgaatagca

SEQ ID NO: 48473 - DNA, 19 bp, Homo sapiens
  siRNA target sequence for LOC161931 (NM_139174.2,782-800).
cgggcactgcgaatagcaa

SEQ ID NO: 48474 - DNA, 19 bp, Homo sapiens
  siRNA target sequence for LOC161931 (NM_139174.2,1213-1231).
gccctgctgaggttcttgt

SEQ ID NO: 48475 - DNA, 19 bp, Homo sapiens
  siRNA target sequence for LOC161931 (NM_139174.2,1214-1232).
ccctgctgaggttcttgtt

SEQ ID NO: 48476 - DNA, 19 bp, Homo sapiens
  siRNA target sequence for LOC161931 (NM_139174.2,2065-2083).
ccactggtgggcaaattca

SEQ ID NO: 48477 - DNA, 19 bp, Homo sapiens
  siRNA target sequence for LOC161931 (NM_139174.2,2068-2086).
ctggtgggcaaattcagaa

SEQ ID NO: 48478 - DNA, 19 bp, Homo sapiens
  siRNA target sequence for LOC161931 (NM_139174.2,2071-2089).
gtgggcaaattcagaaact

SEQ ID NO: 48479 - DNA, 19 bp, Homo sapiens
  siRNA target sequence for LRRFIP1 (NM_004735.1,676-694).
ccaggttgataccctaaaa

SEQ ID NO: 48480 - DNA, 19 bp, Homo sapiens
  siRNA target sequence for LRRFIP1 (NM_004735.1,909-927).
ccctcaataatgttggata

SEQ ID NO: 48481 - DNA, 19 bp, Homo sapiens
  siRNA target sequence for LRRFIP1 (NM_004735.1,1107-1125).
gtgtggacatagaggtatt

SEQ ID NO: 48482 - DNA, 19 bp, Homo sapiens
  siRNA target sequence for LRRFIP1 (NM_004735.1,1189-1207).
cttagcaggtgctacctat

SEQ ID NO: 48483 - DNA, 19 bp, Homo sapiens
  siRNA target sequence for LRRFIP1 (NM_004735.1,1319-1337).
cttgagccatccaactgtt

SEQ ID NO: 48484 - DNA, 19 bp, Homo sapiens
  siRNA target sequence for LRRFIP1 (NM_004735.1,1330-1348).
caactgttggagtgactta

SEQ ID NO: 48485 - DNA, 19 bp, Homo sapiens
  siRNA target sequence for LRRFIP1 (NM_004735.1,1333-1351).
ctgttggagtgacttagat

SEQ ID NO: 48486 - DNA, 19 bp, Homo sapiens
  siRNA target sequence for LRRFIP1 (NM_004735.1,1428-1446).
gtcctttagggcatagtga

SEQ ID NO: 48487 - DNA, 19 bp, Homo sapiens
  siRNA target sequence for LRRFIP1 (NM_004735.1,1454-1472).
gtttatcatgatgacaaat

SEQ ID NO: 48488 - DNA, 19 bp, Homo sapiens
  siRNA target sequence for LRRFIP1 (NM_004735.1,1506-1524).
gcacagggcatagtttaga

SEQ ID NO: 48489 - DNA, 19 bp, Homo sapiens
  siRNA target sequence for LRRFIP1 (NM_004735.1,1512-1530).
ggcatagtttagagaaaga

SEQ ID NO: 48490 - DNA, 19 bp, Homo sapiens
  siRNA target sequence for LRRFIP1 (NM_004735.1,1513-1531).
gcatagtttagagaaagaa

SEQ ID NO: 48491 - DNA, 19 bp, Homo sapiens
  siRNA target sequence for LRRFIP1 (NM_004735.1,1727-1745).
caaaatgaacccttagata

SEQ ID NO: 48492 - DNA, 19 bp, Homo sapiens
  siRNA target sequence for LRRFIP1 (NM_004735.1,1793-1811).
gactcatcgcagaagaaga

SEQ ID NO: 48493 - DNA, 19 bp, Homo sapiens
  siRNA target sequence for LRRFIP1 (NM_004735.1,2284-2302).
caccctgcccgaacatgaa

SEQ ID NO: 48494 - DNA, 19 bp, Homo sapiens
  siRNA target sequence for LRRFIP1 (NM_004735.1,2287-2305).
cctgcccgaacatgaaagt

SEQ ID NO: 48495 - DNA, 19 bp, Homo sapiens
  siRNA target sequence for LRRFIP1 (NM_004735.1,2409-2427).
gcctagagaacgatgactt

SEQ ID NO: 48496 - DNA, 19 bp, Homo sapiens
  siRNA target sequence for MRPL44 (NM_022915.2,61-79).
cgtccgggctggtaagatt

SEQ ID NO: 48497 - DNA, 19 bp, Homo sapiens
  siRNA target sequence for MRPL44 (NM_022915.2,136-154).
cggttcggggagtgaagaa

SEQ ID NO: 48498 - DNA, 19 bp, Homo sapiens
  siRNA target sequence for MRPL44 (NM_022915.2,245-263).
gccgaactgggattaccat

SEQ ID NO: 48499 - DNA, 19 bp, Homo sapiens
  siRNA target sequence for MRPL44 (NM_022915.2,253-271).
gggattaccatgcagaaat

SEQ ID NO: 48500 - DNA, 19 bp, Homo sapiens
  siRNA target sequence for MRPL44 (NM_022915.2,285-303).
catcggttacaggaaaact

SEQ ID NO: 48501 - DNA, 19 bp, Homo sapiens
  siRNA target sequence for MRPL44 (NM_022915.2,288-306).
cggttacaggaaaactttt

SEQ ID NO: 48502 - DNA, 19 bp, Homo sapiens
  siRNA target sequence for MRPL44 (NM_022915.2,318-336).
ctcaaaactgcatttgtta

SEQ ID NO: 48503 - DNA, 19 bp, Homo sapiens
  siRNA target sequence for MRPL44 (NM_022915.2,320-338).
caaaactgcatttgttaat

SEQ ID NO: 48504 - DNA, 19 bp, Homo sapiens
  siRNA target sequence for MRPL44 (NM_022915.2,362-380).
ggccaaacgccaacaactt

SEQ ID NO: 48505 - DNA, 19 bp, Homo sapiens
  siRNA target sequence for MRPL44 (NM_022915.2,433-451).
ccgaacaagggacatcttt

SEQ ID NO: 48506 - DNA, 19 bp, Homo sapiens
  siRNA target sequence for MRPL44 (NM_022915.2,434-452).
cgaacaagggacatctttt

SEQ ID NO: 48507 - DNA, 19 bp, Homo sapiens
  siRNA target sequence for MRPL44 (NM_022915.2,500-518).
gcccactgaaggcataaaa

SEQ ID NO: 48508 - DNA, 19 bp, Homo sapiens
  siRNA target sequence for MRPL44 (NM_022915.2,501-519).
cccactgaaggcataaaaa

SEQ ID NO: 48509 - DNA, 19 bp, Homo sapiens
  siRNA target sequence for MRPL44 (NM_022915.2,511-529).
gcataaaaaatcttgttga

SEQ ID NO: 48510 - DNA, 19 bp, Homo sapiens
  siRNA target sequence for MRPL44 (NM_022915.2,556-574).
gtcacgtggctagaaactt

SEQ ID NO: 48511 - DNA, 19 bp, Homo sapiens
  siRNA target sequence for MRPL44 (NM_022915.2,587-605).
gttaacactgagtgaagaa

SEQ ID NO: 48512 - DNA, 19 bp, Homo sapiens
  siRNA target sequence for MRPL44 (NM_022915.2,626-644).
gttacagcagactttcttt

SEQ ID NO: 48513 - DNA, 19 bp, Homo sapiens
  siRNA target sequence for MRPL44 (NM_022915.2,681-699).
gagaggactgcacttttca

SEQ ID NO: 48514 - DNA, 19 bp, Homo sapiens
  siRNA target sequence for MRPL44 (NM_022915.2,710-728).
cttaattactcaaatgact

SEQ ID NO: 48515 - DNA, 19 bp, Homo sapiens
  siRNA target sequence for MRPL44 (NM_022915.2,730-748).
gaaaagagctctttgagat

SEQ ID NO: 48516 - DNA, 19 bp, Homo sapiens
  siRNA target sequence for MRPL44 (NM_022915.2,746-764).
gatgtggaagataataaat

SEQ ID NO: 48517 - DNA, 19 bp, Homo sapiens
  siRNA target sequence for MRPL44 (NM_022915.2,772-790).
ggctattggtagaagaact

SEQ ID NO: 48518 - DNA, 19 bp, Homo sapiens
  siRNA target sequence for MRPL44 (NM_022915.2,945-963).
gctcgagtggcccttagaa

SEQ ID NO: 48519 - DNA, 19 bp, Homo sapiens
  siRNA target sequence for MRPL44 (NM_022915.2,946-964).
ctcgagtggcccttagaaa

SEQ ID NO: 48520 - DNA, 19 bp, Homo sapiens
  siRNA target sequence for MRPL44 (NM_022915.2,949-967).
gagtggcccttagaaaact

SEQ ID NO: 48521 - DNA, 19 bp, Homo sapiens
  siRNA target sequence for MRPL44 (NM_022915.2,990-1008).
cggccgtggaactattcca

SEQ ID NO: 48522 - DNA, 19 bp, Homo sapiens
  siRNA target sequence for MRPL44 (NM_022915.2,1006-1024).
ccaagcccaaagaaacctt

SEQ ID NO: 48523 - DNA, 19 bp, Homo sapiens
  siRNA target sequence for PRKR (NM_002759.1,448-466).
ctttcagcaggtttcttca

SEQ ID NO: 48524 - DNA, 19 bp, Homo sapiens
  siRNA target sequence for PRKR (NM_002759.1,492-510).
gaagcagggagtagtactt

SEQ ID NO: 48525 - DNA, 19 bp, Homo sapiens
  siRNA target sequence for PRKR (NM_002759.1,495-513).
gcagggagtagtacttaaa

SEQ ID NO: 48526 - DNA, 19 bp, Homo sapiens
  siRNA target sequence for PRKR (NM_002759.1,498-516).
gggagtagtacttaaatat

SEQ ID NO: 48527 - DNA, 19 bp, Homo sapiens
  siRNA target sequence for PRKR (NM_002759.1,500-518).
gagtagtacttaaatatca

SEQ ID NO: 48528 - DNA, 19 bp, Homo sapiens
  siRNA target sequence for PRKR (NM_002759.1,638-656).
ccaaattagctgttgagat

SEQ ID NO: 48529 - DNA, 19 bp, Homo sapiens
  siRNA target sequence for PRKR (NM_002759.1,639-657).
caaattagctgttgagata

SEQ ID NO: 48530 - DNA, 19 bp, Homo sapiens
  siRNA target sequence for PRKR (NM_002759.1,646-664).
gctgttgagatacttaata

SEQ ID NO: 48531 - DNA, 19 bp, Homo sapiens
  siRNA target sequence for PRKR (NM_002759.1,647-665).
ctgttgagatacttaataa

SEQ ID NO: 48532 - DNA, 19 bp, Homo sapiens
  siRNA target sequence for PRKR (NM_002759.1,652-670).
gagatacttaataaggaaa

SEQ ID NO: 48533 - DNA, 19 bp, Homo sapiens
  siRNA target sequence for PRKR (NM_002759.1,672-690).
gaaggcagttagtccttta

SEQ ID NO: 48534 - DNA, 19 bp, Homo sapiens
  siRNA target sequence for PRKR (NM_002759.1,675-693).
ggcagttagtcctttatta

SEQ ID NO: 48535 - DNA, 19 bp, Homo sapiens
  siRNA target sequence for PRKR (NM_002759.1,676-694).
gcagttagtcctttattat

SEQ ID NO: 48536 - DNA, 19 bp, Homo sapiens
  siRNA target sequence for PRKR (NM_002759.1,710-728).
cttcagaaggattatccat

SEQ ID NO: 48537 - DNA, 19 bp, Homo sapiens
  siRNA target sequence for PRKR (NM_002759.1,719-737).
gattatccatggggaatta

SEQ ID NO: 48538 - DNA, 19 bp, Homo sapiens
  siRNA target sequence for PRKR (NM_002759.1,738-756).
cataggccttatcaataga

SEQ ID NO: 48539 - DNA, 19 bp, Homo sapiens
  siRNA target sequence for PRKR (NM_002759.1,773-791).
gactaactgtaaattatga

SEQ ID NO: 48540 - DNA, 19 bp, Homo sapiens
  siRNA target sequence for PRKR (NM_002759.1,815-833).
ggccagaaggatttcatta

SEQ ID NO: 48541 - DNA, 19 bp, Homo sapiens
  siRNA target sequence for PRKR (NM_002759.1,878-896).
ctactaaacaggaagcaaa

SEQ ID NO: 48542 - DNA, 19 bp, Homo sapiens
  siRNA target sequence for PRKR (NM_002759.1,881-899).
ctaaacaggaagcaaaaca

SEQ ID NO: 48543 - DNA, 19 bp, Homo sapiens
  siRNA target sequence for PRKR (NM_002759.1,905-923).
ccgctaaacttgcatatct

SEQ ID NO: 48544 - DNA, 19 bp, Homo sapiens
  siRNA target sequence for PRKR (NM_002759.1,906-924).
cgctaaacttgcatatctt

SEQ ID NO: 48545 - DNA, 19 bp, Homo sapiens
  siRNA target sequence for PRKR (NM_002759.1,966-984).
gtcctctggttcttttgct

SEQ ID NO: 48546 - DNA, 19 bp, Homo sapiens
  siRNA target sequence for PRKR (NM_002759.1,989-1007).
cgtgtgagtcccaaagcaa

SEQ ID NO: 48547 - DNA, 19 bp, Homo sapiens
  siRNA target sequence for PRKR (NM_002759.1,1000-1018).
caaagcaactctttagtga

SEQ ID NO: 48548 - DNA, 19 bp, Homo sapiens
  siRNA target sequence for PRKR (NM_002759.1,1020-1038).
cagcacactcgcttctgaa

SEQ ID NO: 48549 - DNA, 19 bp, Homo sapiens
  siRNA target sequence for PRKR (NM_002759.1,1023-1041).
cacactcgcttctgaatca

SEQ ID NO: 48550 - DNA, 19 bp, Homo sapiens
  siRNA target sequence for PRKR (NM_002759.1,1066-1084).
gatacatcagagataaatt

SEQ ID NO: 48551 - DNA, 19 bp, Homo sapiens
  siRNA target sequence for PRKR (NM_002759.1,1093-1111).
gacagtttaaacagttctt

SEQ ID NO: 48552 - DNA, 19 bp, Homo sapiens
  siRNA target sequence for PRKR (NM_002759.1,1106-1124).
gttcttcgttgcttatgaa

SEQ ID NO: 48553 - DNA, 19 bp, Homo sapiens
  siRNA target sequence for PRKR (NM_002759.1,1293-1311).
cagaattgacggaaagact

SEQ ID NO: 48554 - DNA, 19 bp, Homo sapiens
  siRNA target sequence for PRKR (NM_002759.1,1295-1313).
gaattgacggaaagactta

SEQ ID NO: 48555 - DNA, 19 bp, Homo sapiens
  siRNA target sequence for PRKR (NM_002759.1,1300-1318).
gacggaaagacttacgtta

SEQ ID NO: 48556 - DNA, 19 bp, Homo sapiens
  siRNA target sequence for PRKR (NM_002759.1,1302-1320).
cggaaagacttacgttatt

SEQ ID NO: 48557 - DNA, 19 bp, Homo sapiens
  siRNA target sequence for PRKR (NM_002759.1,1303-1321).
ggaaagacttacgttatta

SEQ ID NO: 48558 - DNA, 19 bp, Homo sapiens
  siRNA target sequence for PRKR (NM_002759.1,1308-1326).
gacttacgttattaaacgt

SEQ ID NO: 48559 - DNA, 19 bp, Homo sapiens
  siRNA target sequence for PRKR (NM_002759.1,1344-1362).
gaaggcggagcgtgaagta

SEQ ID NO: 48560 - DNA, 19 bp, Homo sapiens
  siRNA target sequence for PRKR (NM_002759.1,1347-1365).
ggcggagcgtgaagtaaaa

SEQ ID NO: 48561 - DNA, 19 bp, Homo sapiens
  siRNA target sequence for PRKR (NM_002759.1,1351-1369).
gagcgtgaagtaaaagcat

SEQ ID NO: 48562 - DNA, 19 bp, Homo sapiens
  siRNA target sequence for PRKR (NM_002759.1,1371-1389).
ggcaaaacttgatcatgta

SEQ ID NO: 48563 - DNA, 19 bp, Homo sapiens
  siRNA target sequence for PRKR (NM_002759.1,1454-1472).
ctcttgagagcagtgatta

SEQ ID NO: 48564 - DNA, 19 bp, Homo sapiens
  siRNA target sequence for PRKR (NM_002759.1,1517-1535).
gccttttcatccaaatgga

SEQ ID NO: 48565 - DNA, 19 bp, Homo sapiens
  siRNA target sequence for PRKR (NM_002759.1,1524-1542).
catccaaatggaattctgt

SEQ ID NO: 48566 - DNA, 19 bp, Homo sapiens
  siRNA target sequence for PRKR (NM_002759.1,1551-1569).
gaccttggaacaatggatt

SEQ ID NO: 48567 - DNA, 19 bp, Homo sapiens
  siRNA target sequence for PRKR (NM_002759.1,1585-1603).
gagaaactagacaaagttt

SEQ ID NO: 48568 - DNA, 19 bp, Homo sapiens
  siRNA target sequence for PRKR (NM_002759.1,1698-1716).
cttagtagatacaaaacaa

SEQ ID NO: 48569 - DNA, 19 bp, Homo sapiens
  siRNA target sequence for PRKR (NM_002759.1,1783-1801).
ggaactttgcgatacatga

SEQ ID NO: 48570 - DNA, 19 bp, Homo sapiens
  siRNA target sequence for PRKR (NM_002759.1,1800-1818).
gagcccagaacagatttct

SEQ ID NO: 48571 - DNA, 19 bp, Homo sapiens
  siRNA target sequence for PRKR (NM_002759.1,1817-1835).
cttcgcaagactatggaaa

SEQ ID NO: 48572 - DNA, 19 bp, Homo sapiens
  siRNA target sequence for PRKR (NM_002759.1,1821-1839).
gcaagactatggaaaggaa

SEQ ID NO: 48573 - DNA, 19 bp, Homo sapiens
  siRNA target sequence for PRKR (NM_002759.1,1927-1945).
ctacgggatggcatcatct

SEQ ID NO: 48574 - DNA, 19 bp, Homo sapiens
  siRNA target sequence for PRKR (NM_002759.1,1933-1951).
gatggcatcatctcagata

SEQ ID NO: 48575 - DNA, 19 bp, Homo sapiens
  siRNA target sequence for PRKR (NM_002759.1,1936-1954).
ggcatcatctcagatatat

SEQ ID NO: 48576 - DNA, 19 bp, Homo sapiens
  siRNA target sequence for PRKR (NM_002759.1,1937-1955).
gcatcatctcagatatatt

SEQ ID NO: 48577 - DNA, 19 bp, Homo sapiens
  siRNA target sequence for PRKR (NM_002759.1,1938-1956).
catcatctcagatatattt

SEQ ID NO: 48578 - DNA, 19 bp, Homo sapiens
  siRNA target sequence for PRKR (NM_002759.1,2005-2023).
gaggatcgacctaacacat

SEQ ID NO: 48579 - DNA, 19 bp, Homo sapiens
  siRNA target sequence for PRKR (NM_002759.1,2011-2029).
cgacctaacacatctgaaa

SEQ ID NO: 48580 - DNA, 19 bp, Homo sapiens
  siRNA target sequence for PRKRA (NM_003690.3,225-243).
cacgaatacggcatgaaga

SEQ ID NO: 48581 - DNA, 19 bp, Homo sapiens
  siRNA target sequence for PRKRA (NM_003690.3,244-262).
ccaagaacatcccagttta

SEQ ID NO: 48582 - DNA, 19 bp, Homo sapiens
  siRNA target sequence for PRKRA (NM_003690.3,274-292).
gatctgatgtgcaaataca

SEQ ID NO: 48583 - DNA, 19 bp, Homo sapiens
  siRNA target sequence for PRKRA (NM_003690.3,315-333).
gtaaccgttggtgacataa

SEQ ID NO: 48584 - DNA, 19 bp, Homo sapiens
  siRNA target sequence for PRKRA (NM_003690.3,408-426).
gccaatgcaagtatttgct

SEQ ID NO: 48585 - DNA, 19 bp, Homo sapiens
  siRNA target sequence for PRKRA (NM_003690.3,430-448).
cagttcctgaccccttaat

SEQ ID NO: 48586 - DNA, 19 bp, Homo sapiens
  siRNA target sequence for PRKRA (NM_003690.3,473-491).
gaaccagcttaatcctatt

SEQ ID NO: 48587 - DNA, 19 bp, Homo sapiens
  siRNA target sequence for PRKRA (NM_003690.3,476-494).
ccagcttaatcctattggt

SEQ ID NO: 48588 - DNA, 19 bp, Homo sapiens
  siRNA target sequence for PRKRA (NM_003690.3,503-521).
ggaattggctattcatcat

SEQ ID NO: 48589 - DNA, 19 bp, Homo sapiens
  siRNA target sequence for PRKRA (NM_003690.3,523-541).
gctggagacttcctgaata

SEQ ID NO: 48590 - DNA, 19 bp, Homo sapiens
  siRNA target sequence for PRKRA (NM_003690.3,524-542).
ctggagacttcctgaatat

SEQ ID NO: 48591 - DNA, 19 bp, Homo sapiens
  siRNA target sequence for PRKRA (NM_003690.3,558-576).
ggaggacctgctcataaga

SEQ ID NO: 48592 - DNA, 19 bp, Homo sapiens
  siRNA target sequence for PRKRA (NM_003690.3,575-593).
gagagaatatactacaatt

SEQ ID NO: 48593 - DNA, 19 bp, Homo sapiens
  siRNA target sequence for PRKRA (NM_003690.3,579-597).
gaatatactacaatttgca

SEQ ID NO: 48594 - DNA, 19 bp, Homo sapiens
  siRNA target sequence for PRKRA (NM_003690.3,599-617).
gctagagtcatttatggaa

SEQ ID NO: 48595 - DNA, 19 bp, Homo sapiens
  siRNA target sequence for PRKRA (NM_003690.3,726-744).
gtaggacattctttaggat

SEQ ID NO: 48596 - DNA, 19 bp, Homo sapiens
  siRNA target sequence for PRKRA (NM_003690.3,771-789).
cctggtgaaaagatcaact

SEQ ID NO: 48597 - DNA, 19 bp, Homo sapiens
  siRNA target sequence for PRKRA (NM_003690.3,772-790).
ctggtgaaaagatcaactt

SEQ ID NO: 48598 - DNA, 19 bp, Homo sapiens
  siRNA target sequence for PRKRA (NM_003690.3,833-851).
ccagctgcttagtgaaatt

SEQ ID NO: 48599 - DNA, 19 bp, Homo sapiens
  siRNA target sequence for PRKRA (NM_003690.3,901-919).
gcgccaatggacaatatca

SEQ ID NO: 48600 - DNA, 19 bp, Homo sapiens
  siRNA target sequence for PRKRA (NM_003690.3,902-920).
cgccaatggacaatatcaa

SEQ ID NO: 48601 - DNA, 19 bp, Homo sapiens
  siRNA target sequence for PRKRA (NM_003690.3,977-995).
ctgtggcaatgcacaaagt

SEQ ID NO: 48602 - DNA, 19 bp, Homo sapiens
  siRNA target sequence for PRKRA (NM_003690.3,979-997).
gtggcaatgcacaaagtga

SEQ ID NO: 48603 - DNA, 19 bp, Homo sapiens
  siRNA target sequence for PRKRA (NM_003690.3,996-1014).
gatgcagctcacaatgctt

SEQ ID NO: 48604 - DNA, 19 bp, Homo sapiens
  siRNA target sequence for RNASE3L (NM_013235.2,256-274).
gaaacacatgtcacagaat

SEQ ID NO: 48605 - DNA, 19 bp, Homo sapiens
  siRNA target sequence for RNASE3L (NM_013235.2,343-361).
cctttaggccccaaaatct

SEQ ID NO: 48606 - DNA, 19 bp, Homo sapiens
  siRNA target sequence for RNASE3L (NM_013235.2,380-398).
gcagcctcctgtgcaatat

SEQ ID NO: 48607 - DNA, 19 bp, Homo sapiens
  siRNA target sequence for RNASE3L (NM_013235.2,383-401).
gcctcctgtgcaatatcaa

SEQ ID NO: 48608 - DNA, 19 bp, Homo sapiens
  siRNA target sequence for RNASE3L (NM_013235.2,388-406).
ctgtgcaatatcaatatga

SEQ ID NO: 48609 - DNA, 19 bp, Homo sapiens
  siRNA target sequence for RNASE3L (NM_013235.2,612-630).
ccaatgccttgtcctaata

SEQ ID NO: 48610 - DNA, 19 bp, Homo sapiens
  siRNA target sequence for RNASE3L (NM_013235.2,613-631).
caatgccttgtcctaataa

SEQ ID NO: 48611 - DNA, 19 bp, Homo sapiens
  siRNA target sequence for RNASE3L (NM_013235.2,722-740).
catgccgcagcaggttaat

SEQ ID NO: 48612 - DNA, 19 bp, Homo sapiens
  siRNA target sequence for RNASE3L (NM_013235.2,727-745).
cgcagcaggttaattatca

SEQ ID NO: 48613 - DNA, 19 bp, Homo sapiens
  siRNA target sequence for RNASE3L (NM_013235.2,729-747).
cagcaggttaattatcagt

SEQ ID NO: 48614 - DNA, 19 bp, Homo sapiens
  siRNA target sequence for RNASE3L (NM_013235.2,746-764).
gtaccctccgggctattct

SEQ ID NO: 48615 - DNA, 19 bp, Homo sapiens
  siRNA target sequence for RNASE3L (NM_013235.2,757-775).
gctattctcaccacaactt

SEQ ID NO: 48616 - DNA, 19 bp, Homo sapiens
  siRNA target sequence for RNASE3L (NM_013235.2,801-819).
cagaacaaccctagttctt

SEQ ID NO: 48617 - DNA, 19 bp, Homo sapiens
  siRNA target sequence for RNASE3L (NM_013235.2,1026-1044).
caagacagccggtacagat

SEQ ID NO: 48618 - DNA, 19 bp, Homo sapiens
  siRNA target sequence for RNASE3L (NM_013235.2,1031-1049).
cagccggtacagatctgat

SEQ ID NO: 48619 - DNA, 19 bp, Homo sapiens
  siRNA target sequence for RNASE3L (NM_013235.2,1033-1051).
gccggtacagatctgatta

SEQ ID NO: 48620 - DNA, 19 bp, Homo sapiens
  siRNA target sequence for RNASE3L (NM_013235.2,1152-1170).
ctggaaaggtcctacaaaa

SEQ ID NO: 48621 - DNA, 19 bp, Homo sapiens
  siRNA target sequence for RNASE3L (NM_013235.2,1159-1177).
ggtcctacaaaaaagagta

SEQ ID NO: 48622 - DNA, 19 bp, Homo sapiens
  siRNA target sequence for RNASE3L (NM_013235.2,1160-1178).
gtcctacaaaaaagagtat

SEQ ID NO: 48623 - DNA, 19 bp, Homo sapiens
  siRNA target sequence for RNASE3L (NM_013235.2,1162-1180).
cctacaaaaaagagtataa

SEQ ID NO: 48624 - DNA, 19 bp, Homo sapiens
  siRNA target sequence for RNASE3L (NM_013235.2,1225-1243).
ctggatgcacaccagaatt

SEQ ID NO: 48625 - DNA, 19 bp, Homo sapiens
  siRNA target sequence for RNASE3L (NM_013235.2,1481-1499).
gattcgatgcactcattca

SEQ ID NO: 48626 - DNA, 19 bp, Homo sapiens
  siRNA target sequence for RNASE3L (NM_013235.2,1485-1503).
cgatgcactcattcagaaa

SEQ ID NO: 48627 - DNA, 19 bp, Homo sapiens
  siRNA target sequence for RNASE3L (NM_013235.2,1489-1507).
gcactcattcagaaaacta

SEQ ID NO: 48628 - DNA, 19 bp, Homo sapiens
  siRNA target sequence for RNASE3L (NM_013235.2,1559-1577).
gagtaggcttcgtgactta

SEQ ID NO: 48629 - DNA, 19 bp, Homo sapiens
  siRNA target sequence for RNASE3L (NM_013235.2,1561-1579).
gtaggcttcgtgacttata

SEQ ID NO: 48630 - DNA, 19 bp, Homo sapiens
  siRNA target sequence for RNASE3L (NM_013235.2,1564-1582).
ggcttcgtgacttatatga

SEQ ID NO: 48631 - DNA, 19 bp, Homo sapiens
  siRNA target sequence for RNASE3L (NM_013235.2,1655-1673).
gacgaagctcgatgaagat

SEQ ID NO: 48632 - DNA, 19 bp, Homo sapiens
  siRNA target sequence for RNASE3L (NM_013235.2,1657-1675).
cgaagctcgatgaagattt

SEQ ID NO: 48633 - DNA, 19 bp, Homo sapiens
  siRNA target sequence for RNASE3L (NM_013235.2,1662-1680).
ctcgatgaagatttagaga

SEQ ID NO: 48634 - DNA, 19 bp, Homo sapiens
  siRNA target sequence for RNASE3L (NM_013235.2,1730-1748).
cagctcagactctgaagtt

SEQ ID NO: 48635 - DNA, 19 bp, Homo sapiens
  siRNA target sequence for RNASE3L (NM_013235.2,1732-1750).
gctcagactctgaagtttt

SEQ ID NO: 48636 - DNA, 19 bp, Homo sapiens
  siRNA target sequence for RNASE3L (NM_013235.2,1741-1759).
ctgaagtttttgacgttat

SEQ ID NO: 48637 - DNA, 19 bp, Homo sapiens
  siRNA target sequence for RNASE3L (NM_013235.2,1752-1770).
gacgttattgcagaaatca

SEQ ID NO: 48638 - DNA, 19 bp, Homo sapiens
  siRNA target sequence for RNASE3L (NM_013235.2,1787-1805).
ccctgaccgacttcatgat

SEQ ID NO: 48639 - DNA, 19 bp, Homo sapiens
  siRNA target sequence for RNASE3L (NM_013235.2,1794-1812).
cgacttcatgatgaacttt

SEQ ID NO: 48640 - DNA, 19 bp, Homo sapiens
  siRNA target sequence for RNASE3L (NM_013235.2,1820-1838).
cgatccaggccagatgaat

SEQ ID NO: 48641 - DNA, 19 bp, Homo sapiens
  siRNA target sequence for RNASE3L (NM_013235.2,1839-1857).
gatggaccactctgcaaat

SEQ ID NO: 48642 - DNA, 19 bp, Homo sapiens
  siRNA target sequence for RNASE3L (NM_013235.2,1842-1860).
ggaccactctgcaaatgca

SEQ ID NO: 48643 - DNA, 19 bp, Homo sapiens
  siRNA target sequence for RNASE3L (NM_013235.2,1868-1886).
ggcaagacgcacaggaatt

SEQ ID NO: 48644 - DNA, 19 bp, Homo sapiens
  siRNA target sequence for RNASE3L (NM_013235.2,1869-1887).
gcaagacgcacaggaatta

SEQ ID NO: 48645 - DNA, 19 bp, Homo sapiens
  siRNA target sequence for RNASE3L (NM_013235.2,1881-1899).
ggaattaggcacagcattt

SEQ ID NO: 48646 - DNA, 19 bp, Homo sapiens
  siRNA target sequence for RNASE3L (NM_013235.2,1985-2003).
gcctacgaactttttaact

SEQ ID NO: 48647 - DNA, 19 bp, Homo sapiens
  siRNA target sequence for RNASE3L (NM_013235.2,1987-2005).
ctacgaactttttaactga

SEQ ID NO: 48648 - DNA, 19 bp, Homo sapiens
  siRNA target sequence for RNASE3L (NM_013235.2,2002-2020).
ctgacaggccaactgttat

SEQ ID NO: 48649 - DNA, 19 bp, Homo sapiens
  siRNA target sequence for RNASE3L (NM_013235.2,2011-2029).
caactgttatagaatacga

SEQ ID NO: 48650 - DNA, 19 bp, Homo sapiens
  siRNA target sequence for RNASE3L (NM_013235.2,2028-2046).
gatgatcacgagtatatct

SEQ ID NO: 48651 - DNA, 19 bp, Homo sapiens
  siRNA target sequence for RNASE3L (NM_013235.2,2091-2109).
ccactgtgtaaagtaatta

SEQ ID NO: 48652 - DNA, 19 bp, Homo sapiens
  siRNA target sequence for RNASE3L (NM_013235.2,2094-2112).
ctgtgtaaagtaattagat

SEQ ID NO: 48653 - DNA, 19 bp, Homo sapiens
  siRNA target sequence for RNASE3L (NM_013235.2,2098-2116).
gtaaagtaattagattcaa

SEQ ID NO: 48654 - DNA, 19 bp, Homo sapiens
  siRNA target sequence for RNASE3L (NM_013235.2,2117-2135).
catagactacacgattcat

SEQ ID NO: 48655 - DNA, 19 bp, Homo sapiens
  siRNA target sequence for RNASE3L (NM_013235.2,2121-2139).
gactacacgattcatttca

SEQ ID NO: 48656 - DNA, 19 bp, Homo sapiens
  siRNA target sequence for RNASE3L (NM_013235.2,2126-2144).
cacgattcatttcattgaa

SEQ ID NO: 48657 - DNA, 19 bp, Homo sapiens
  siRNA target sequence for RNASE3L (NM_013235.2,2150-2168).
gatgccggagaatttttgt

SEQ ID NO: 48658 - DNA, 19 bp, Homo sapiens
  siRNA target sequence for RNASE3L (NM_013235.2,2167-2185).
gtgtgaaagggcttgaact

SEQ ID NO: 48659 - DNA, 19 bp, Homo sapiens
  siRNA target sequence for RNASE3L (NM_013235.2,2176-2194).
ggcttgaactcttttcact

SEQ ID NO: 48660 - DNA, 19 bp, Homo sapiens
  siRNA target sequence for RNASE3L (NM_013235.2,2293-2311).
cacgttttgtaagatttct

SEQ ID NO: 48661 - DNA, 19 bp, Homo sapiens
  siRNA target sequence for RNASE3L (NM_013235.2,2346-2364).
cagattctcctgtacttgt

SEQ ID NO: 48662 - DNA, 19 bp, Homo sapiens
  siRNA target sequence for RNASE3L (NM_013235.2,2352-2370).
ctcctgtacttgttaaggt

SEQ ID NO: 48663 - DNA, 19 bp, Homo sapiens
  siRNA target sequence for RNASE3L (NM_013235.2,2429-2447).
ggagtggcagaaatatgca

SEQ ID NO: 48664 - DNA, 19 bp, Homo sapiens
  siRNA target sequence for RNASE3L (NM_013235.2,2497-2515).
ctgtccgtatcgatcaact

SEQ ID NO: 48665 - DNA, 19 bp, Homo sapiens
  siRNA target sequence for RNASE3L (NM_013235.2,2528-2546).
gttcaaccccgatgtgatt

SEQ ID NO: 48666 - DNA, 19 bp, Homo sapiens
  siRNA target sequence for RNASE3L (NM_013235.2,2534-2552).
ccccgatgtgattactttt

SEQ ID NO: 48667 - DNA, 19 bp, Homo sapiens
  siRNA target sequence for RNASE3L (NM_013235.2,2577-2595).
cgccctgcacagttgagtt

SEQ ID NO: 48668 - DNA, 19 bp, Homo sapiens
  siRNA target sequence for RNASE3L (NM_013235.2,2579-2597).
ccctgcacagttgagttat

SEQ ID NO: 48669 - DNA, 19 bp, Homo sapiens
  siRNA target sequence for RNASE3L (NM_013235.2,2602-2620).
gagacccacagtaccaaaa

SEQ ID NO: 48670 - DNA, 19 bp, Homo sapiens
  siRNA target sequence for RNASE3L (NM_013235.2,2624-2642).
gtggaagagttatgtgaaa

SEQ ID NO: 48671 - DNA, 19 bp, Homo sapiens
  siRNA target sequence for RNASE3L (NM_013235.2,2626-2644).
ggaagagttatgtgaaact

SEQ ID NO: 48672 - DNA, 19 bp, Homo sapiens
  siRNA target sequence for RNASE3L (NM_013235.2,2658-2676).
gcaaatagtcccaaagtca

SEQ ID NO: 48673 - DNA, 19 bp, Homo sapiens
  siRNA target sequence for RNASE3L (NM_013235.2,2757-2775).
gtaacggtggagctaagta

SEQ ID NO: 48674 - DNA, 19 bp, Homo sapiens
  siRNA target sequence for RNASE3L (NM_013235.2,2835-2853).
cctgttctgacccatcata

SEQ ID NO: 48675 - DNA, 19 bp, Homo sapiens
  siRNA target sequence for RNASE3L (NM_013235.2,2861-2879).
ccaccaatgcctaatgcat

SEQ ID NO: 48676 - DNA, 19 bp, Homo sapiens
  siRNA target sequence for RNASE3L (NM_013235.2,2862-2880).
caccaatgcctaatgcatt

SEQ ID NO: 48677 - DNA, 19 bp, Homo sapiens
  siRNA target sequence for RNASE3L (NM_013235.2,2882-2900).
ggacaagttgataggatat

SEQ ID NO: 48678 - DNA, 19 bp, Homo sapiens
  siRNA target sequence for RNASE3L (NM_013235.2,2883-2901).
gacaagttgataggatata

SEQ ID NO: 48679 - DNA, 19 bp, Homo sapiens
  siRNA target sequence for RNASE3L (NM_013235.2,2976-2994).
gatcatgccaggaattcat

SEQ ID NO: 48680 - DNA, 19 bp, Homo sapiens
  siRNA target sequence for RNASE3L (NM_013235.2,2982-3000).
gccaggaattcattatcta

SEQ ID NO: 48681 - DNA, 19 bp, Homo sapiens
  siRNA target sequence for RNASE3L (NM_013235.2,3007-3025).
gaattcggcagcccaaata

SEQ ID NO: 48682 - DNA, 19 bp, Homo sapiens
  siRNA target sequence for RNASE3L (NM_013235.2,3019-3037).
ccaaatacggagacagaaa

SEQ ID NO: 48683 - DNA, 19 bp, Homo sapiens
  siRNA target sequence for RNASE3L (NM_013235.2,3066-3084).
gggattaacaccttgataa

SEQ ID NO: 48684 - DNA, 19 bp, Homo sapiens
  siRNA target sequence for RNASE3L (NM_013235.2,3067-3085).
ggattaacaccttgataaa

SEQ ID NO: 48685 - DNA, 19 bp, Homo sapiens
  siRNA target sequence for RNASE3L (NM_013235.2,3114-3132).
ccaactccctcgaggatta

SEQ ID NO: 48686 - DNA, 19 bp, Homo sapiens
  siRNA target sequence for RNASE3L (NM_013235.2,3115-3133).
caactccctcgaggattaa

SEQ ID NO: 48687 - DNA, 19 bp, Homo sapiens
  siRNA target sequence for RNASE3L (NM_013235.2,3118-3136).
ctccctcgaggattaacca

SEQ ID NO: 48688 - DNA, 19 bp, Homo sapiens
  siRNA target sequence for RNASE3L (NM_013235.2,3124-3142).
cgaggattaaccacaatga

SEQ ID NO: 48689 - DNA, 19 bp, Homo sapiens
  siRNA target sequence for RNASE3L (NM_013235.2,3125-3143).
gaggattaaccacaatgaa

SEQ ID NO: 48690 - DNA, 19 bp, Homo sapiens
  siRNA target sequence for RNASE3L (NM_013235.2,3135-3153).
cacaatgaacggttggaat

SEQ ID NO: 48691 - DNA, 19 bp, Homo sapiens
  siRNA target sequence for RNASE3L (NM_013235.2,3184-3202).
ccagcgtccatttgtacta

SEQ ID NO: 48692 - DNA, 19 bp, Homo sapiens
  siRNA target sequence for RNASE3L (NM_013235.2,3185-3203).
cagcgtccatttgtactat

SEQ ID NO: 48693 - DNA, 19 bp, Homo sapiens
  siRNA target sequence for RNASE3L (NM_013235.2,3187-3205).
gcgtccatttgtactattt

SEQ ID NO: 48694 - DNA, 19 bp, Homo sapiens
  siRNA target sequence for RNASE3L (NM_013235.2,3189-3207).
gtccatttgtactatttgt

SEQ ID NO: 48695 - DNA, 19 bp, Homo sapiens
  siRNA target sequence for RNASE3L (NM_013235.2,3239-3257).
ctatcggactgccattgtt

SEQ ID NO: 48696 - DNA, 19 bp, Homo sapiens
  siRNA target sequence for RNASE3L (NM_013235.2,3278-3296).
gctagcaaagaaacttgaa

SEQ ID NO: 48697 - DNA, 19 bp, Homo sapiens
  siRNA target sequence for RNASE3L (NM_013235.2,3321-3339).
cacgggcctgacctttgta

SEQ ID NO: 48698 - DNA, 19 bp, Homo sapiens
  siRNA target sequence for RNASE3L (NM_013235.2,3323-3341).
cgggcctgacctttgtaga

SEQ ID NO: 48699 - DNA, 19 bp, Homo sapiens
  siRNA target sequence for RNASE3L (NM_013235.2,3327-3345).
cctgacctttgtagagaat

SEQ ID NO: 48700 - DNA, 19 bp, Homo sapiens
  siRNA target sequence for RNASE3L (NM_013235.2,3346-3364).
cggaccttcgacatgcaat

SEQ ID NO: 48701 - DNA, 19 bp, Homo sapiens
  siRNA target sequence for RNASE3L (NM_013235.2,3357-3375).
catgcaatggccaattgtt

SEQ ID NO: 48702 - DNA, 19 bp, Homo sapiens
  siRNA target sequence for RNASE3L (NM_013235.2,3382-3400).
cgttaataggagctgttta

SEQ ID NO: 48703 - DNA, 19 bp, Homo sapiens
  siRNA target sequence for RNASE3L (NM_013235.2,3439-3457).
gacgcttgctctttaatga

SEQ ID NO: 48704 - DNA, 19 bp, Homo sapiens
  siRNA target sequence for RNASE3L (NM_013235.2,3468-3486).
cgcgaagtctggctcaatt

SEQ ID NO: 48705 - DNA, 19 bp, Homo sapiens
  siRNA target sequence for RNASE3L (NM_013235.2,3469-3487).
gcgaagtctggctcaatta

SEQ ID NO: 48706 - DNA, 19 bp, Homo sapiens
  siRNA target sequence for RNASE3L (NM_013235.2,3470-3488).
cgaagtctggctcaattat

SEQ ID NO: 48707 - DNA, 19 bp, Homo sapiens
  siRNA target sequence for RNASE3L (NM_013235.2,3523-3541).
ctgatcgacaacttattga

SEQ ID NO: 48708 - DNA, 19 bp, Homo sapiens
  siRNA target sequence for RNASE3L (NM_013235.2,3525-3543).
gatcgacaacttattgaaa

SEQ ID NO: 48709 - DNA, 19 bp, Homo sapiens
  siRNA target sequence for RNASE3L (NM_013235.2,3528-3546).
cgacaacttattgaaactt

SEQ ID NO: 48710 - DNA, 19 bp, Homo sapiens
  siRNA target sequence for RNASE3L (NM_013235.2,3615-3633).
ctggcaagggcattcacat

SEQ ID NO: 48711 - DNA, 19 bp, Homo sapiens
  siRNA target sequence for RNASE3L (NM_013235.2,3637-3655).
gaactgtgggatttaacca

SEQ ID NO: 48712 - DNA, 19 bp, Homo sapiens
  siRNA target sequence for RNASE3L (NM_013235.2,3777-3795).
cgaagctctttggtgaata

SEQ ID NO: 48713 - DNA, 19 bp, Homo sapiens
  siRNA target sequence for RNASE3L (NM_013235.2,3834-3852).
caggagtacgccataacca

SEQ ID NO: 48714 - DNA, 19 bp, Homo sapiens
  siRNA target sequence for RNASE3L (NM_013235.2,3897-3915).
gcggaccttttggaatcat

SEQ ID NO: 48715 - DNA, 19 bp, Homo sapiens
  siRNA target sequence for RNASE3L (NM_013235.2,3898-3916).
cggaccttttggaatcatt

SEQ ID NO: 48716 - DNA, 19 bp, Homo sapiens
  siRNA target sequence for RNASE3L (NM_013235.2,3899-3917).
ggaccttttggaatcattt

SEQ ID NO: 48717 - DNA, 19 bp, Homo sapiens
  siRNA target sequence for RNASE3L (NM_013235.2,3976-3994).
gcttctttccacgattgaa

SEQ ID NO: 48718 - DNA, 19 bp, Homo sapiens
  siRNA target sequence for RNASE3L (NM_013235.2,4044-4062).
cagtgttgcttgacactta

SEQ ID NO: 48719 - DNA, 19 bp, Homo sapiens
  siRNA target sequence for RNASE3L (NM_013235.2,4081-4099).
cagacattcctctgtacaa

SEQ ID NO: 48720 - DNA, 19 bp, Homo sapiens
  siRNA target sequence for RNASE3L (NM_013235.2,4218-4236).
gcaatggatgcgcttgaaa

SEQ ID NO: 48721 - DNA, 19 bp, Homo sapiens
  siRNA target sequence for RNASE3L (NM_013235.2,4219-4237).
caatggatgcgcttgaaaa

SEQ ID NO: 48722 - DNA, 19 bp, Homo sapiens
  siRNA target sequence for RNASE3L (NM_013235.2,4223-4241).
ggatgcgcttgaaaaatat

SEQ ID NO: 48723 - DNA, 19 bp, Homo sapiens
  siRNA target sequence for RNASE3L (NM_013235.2,4224-4242).
gatgcgcttgaaaaatata

SEQ ID NO: 48724 - DNA, 19 bp, Homo sapiens
  siRNA target sequence for RNASE3L (NM_013235.2,4282-4300).
ggaagtacagacaagagtt

SEQ ID NO: 48725 - DNA, 19 bp, Homo sapiens
  siRNA target sequence for RNASE3L (NM_013235.2,4283-4301).
gaagtacagacaagagtta

SEQ ID NO: 48726 - DNA, 19 bp, Homo sapiens
  siRNA target sequence for SLC4A1AP (NM_018158.1,373-391).
gacgtggacaggaacgtaa

SEQ ID NO: 48727 - DNA, 19 bp, Homo sapiens
  siRNA target sequence for SLC4A1AP (NM_018158.1,376-394).
gtggacaggaacgtaaaga

SEQ ID NO: 48728 - DNA, 19 bp, Homo sapiens
  siRNA target sequence for SLC4A1AP (NM_018158.1,395-413).
ccgaagggtgggtttcgaa

SEQ ID NO: 48729 - DNA, 19 bp, Homo sapiens
  siRNA target sequence for SLC4A1AP (NM_018158.1,601-619).
gcgttgcaggactccaatt

SEQ ID NO: 48730 - DNA, 19 bp, Homo sapiens
  siRNA target sequence for SLC4A1AP (NM_018158.1,603-621).
gttgcaggactccaattct

SEQ ID NO: 48731 - DNA, 19 bp, Homo sapiens
  siRNA target sequence for SLC4A1AP (NM_018158.1,648-666).
gccggactgcggtgatttt

SEQ ID NO: 48732 - DNA, 19 bp, Homo sapiens
  siRNA target sequence for SLC4A1AP (NM_018158.1,649-667).
ccggactgcggtgatttta

SEQ ID NO: 48733 - DNA, 19 bp, Homo sapiens
  siRNA target sequence for SLC4A1AP (NM_018158.1,652-670).
gactgcggtgattttagga

SEQ ID NO: 48734 - DNA, 19 bp, Homo sapiens
  siRNA target sequence for SLC4A1AP (NM_018158.1,775-793).
gccccctacagcttagaga

SEQ ID NO: 48735 - DNA, 19 bp, Homo sapiens
  siRNA target sequence for SLC4A1AP (NM_018158.1,1005-1023).
cacttttctcaacaaaact

SEQ ID NO: 48736 - DNA, 19 bp, Homo sapiens
  siRNA target sequence for SLC4A1AP (NM_018158.1,1053-1071).
ccacgttgggcatgttgtt

SEQ ID NO: 48737 - DNA, 19 bp, Homo sapiens
  siRNA target sequence for SLC4A1AP (NM_018158.1,1085-1103).
gcacccggctctttatcct

SEQ ID NO: 48738 - DNA, 19 bp, Homo sapiens
  siRNA target sequence for SLC4A1AP (NM_018158.1,1126-1144).
gaggcagaatccgagttaa

SEQ ID NO: 48739 - DNA, 19 bp, Homo sapiens
  siRNA target sequence for SLC4A1AP (NM_018158.1,1130-1148).
cagaatccgagttaacagt

SEQ ID NO: 48740 - DNA, 19 bp, Homo sapiens
  siRNA target sequence for SLC4A1AP (NM_018158.1,1132-1150).
gaatccgagttaacagtaa

SEQ ID NO: 48741 - DNA, 19 bp, Homo sapiens
  siRNA target sequence for SLC4A1AP (NM_018158.1,1136-1154).
ccgagttaacagtaacaca

SEQ ID NO: 48742 - DNA, 19 bp, Homo sapiens
  siRNA target sequence for SLC4A1AP (NM_018158.1,1328-1346).
ctgaagagaaccctattgt

SEQ ID NO: 48743 - DNA, 19 bp, Homo sapiens
  siRNA target sequence for SLC4A1AP (NM_018158.1,1330-1348).
gaagagaaccctattgtct

SEQ ID NO: 48744 - DNA, 19 bp, Homo sapiens
  siRNA target sequence for SLC4A1AP (NM_018158.1,1500-1518).
cgattcaactggaaaacaa

SEQ ID NO: 48745 - DNA, 19 bp, Homo sapiens
  siRNA target sequence for SLC4A1AP (NM_018158.1,1532-1550).
ccattcactcaggaaagaa

SEQ ID NO: 48746 - DNA, 19 bp, Homo sapiens
  siRNA target sequence for SLC4A1AP (NM_018158.1,1563-1581).
gatccagtgctcattggaa

SEQ ID NO: 48747 - DNA, 19 bp, Homo sapiens
  siRNA target sequence for SLC4A1AP (NM_018158.1,1625-1643).
cagtatctcggaaaaggaa

SEQ ID NO: 48748 - DNA, 19 bp, Homo sapiens
  siRNA target sequence for SLC4A1AP (NM_018158.1,1703-1721).
ggactggcctgattgagaa

SEQ ID NO: 48749 - DNA, 19 bp, Homo sapiens
  siRNA target sequence for SLC4A1AP (NM_018158.1,1743-1761).
gaaggctggcaagattgat

SEQ ID NO: 48750 - DNA, 19 bp, Homo sapiens
  siRNA target sequence for SLC4A1AP (NM_018158.1,1773-1791).
gacctttgaatcattggtt

SEQ ID NO: 48751 - DNA, 19 bp, Homo sapiens
  siRNA target sequence for SLC4A1AP (NM_018158.1,1788-1806).
ggttgcaaaattaaatgat

SEQ ID NO: 48752 - DNA, 19 bp, Homo sapiens
  siRNA target sequence for SLC4A1AP (NM_018158.1,1804-1822).
gatgctgaaagggaacttt

SEQ ID NO: 48753 - DNA, 19 bp, Homo sapiens
  siRNA target sequence for SLC4A1AP (NM_018158.1,1848-1866).
ctcaagccaagttctatca

SEQ ID NO: 48754 - DNA, 19 bp, Homo sapiens
  siRNA target sequence for SLC4A1AP (NM_018158.1,1911-1929).
gaaatcaggcagtacatta

SEQ ID NO: 48755 - DNA, 19 bp, Homo sapiens
  siRNA target sequence for SLC4A1AP (NM_018158.1,2122-2140).
ggaagcaaattcaaattaa

SEQ ID NO: 48756 - DNA, 19 bp, Homo sapiens
  siRNA target sequence for SLC4A1AP (NM_018158.1,2179-2197).
gaactccctccaactctaa

SEQ ID NO: 48757 - DNA, 19 bp, Homo sapiens
  siRNA target sequence for SLC4A1AP (NM_018158.1,2189-2207).
caactctaatgagaatgaa

SEQ ID NO: 48758 - DNA, 19 bp, Homo sapiens
  siRNA target sequence for SLC4A1AP (NM_018158.1,2205-2223).
gaaagatgagcctgaagta

SEQ ID NO: 48759 - DNA, 19 bp, Homo sapiens
  siRNA target sequence for STAU (NM_004602.1,524-542).
gcctgttgacccttactct

SEQ ID NO: 48760 - DNA, 19 bp, Homo sapiens
  siRNA target sequence for STAU (NM_004602.1,544-562).
ggatgcagtccacctataa

SEQ ID NO: 48761 - DNA, 19 bp, Homo sapiens
  siRNA target sequence for STAU (NM_004602.1,569-587).
catgagaggaggtgcttat

SEQ ID NO: 48762 - DNA, 19 bp, Homo sapiens
  siRNA target sequence for STAU (NM_004602.1,613-631).
cagttccacctttacttta

SEQ ID NO: 48763 - DNA, 19 bp, Homo sapiens
  siRNA target sequence for STAU (NM_004602.1,650-668).
gggaggacagcaatttaat

SEQ ID NO: 48764 - DNA, 19 bp, Homo sapiens
  siRNA target sequence for STAU (NM_004602.1,779-797).
cgaagaagaaaatctcaat

SEQ ID NO: 48765 - DNA, 19 bp, Homo sapiens
  siRNA target sequence for STAU (NM_004602.1,837-855).
cggaacttgcctgtgaatt

SEQ ID NO: 48766 - DNA, 19 bp, Homo sapiens
  siRNA target sequence for STAU (NM_004602.1,885-903).
cacatgaagaactttgtga

SEQ ID NO: 48767 - DNA, 19 bp, Homo sapiens
  siRNA target sequence for STAU (NM_004602.1,973-991).
ccgccatagctgttcttga

SEQ ID NO: 48768 - DNA, 19 bp, Homo sapiens
  siRNA target sequence for STAU (NM_004602.1,1029-1047).
cgagtaaagcctagaatca

SEQ ID NO: 48769 - DNA, 19 bp, Homo sapiens
  siRNA target sequence for STAU (NM_004602.1,1032-1050).
gtaaagcctagaatcaaaa

SEQ ID NO: 48770 - DNA, 19 bp, Homo sapiens
  siRNA target sequence for STAU (NM_004602.1,1460-1478).
caggatgccttatctaagt

SEQ ID NO: 48771 - DNA, 19 bp, Homo sapiens
  siRNA target sequence for STAU (NM_004602.1,1462-1480).
ggatgccttatctaagtca

SEQ ID NO: 48772 - DNA, 19 bp, Homo sapiens
  siRNA target sequence for STAU (NM_004602.1,1487-1505).
gctgcctgctggaattctt

SEQ ID NO: 48773 - DNA, 19 bp, Homo sapiens
  siRNA target sequence for STAU (NM_004602.1,1529-1547).
ggctgtaggagttagtcaa

SEQ ID NO: 48774 - DNA, 19 bp, Homo sapiens
  siRNA target sequence for STAU (NM_004602.1,1598-1616).
cacggtaactgccatgata

SEQ ID NO: 48775 - DNA, 19 bp, Homo sapiens
  siRNA target sequence for STAU (NM_004602.1,1647-1665).
cccacagccgagaccattt

SEQ ID NO: 48776 - DNA, 19 bp, Homo sapiens
  siRNA target sequence for STAU (NM_004602.1,1648-1666).
ccacagccgagaccatttt

SEQ ID NO: 48777 - DNA, 19 bp, Homo sapiens
  siRNA target sequence for STAU (NM_004602.1,1649-1667).
cacagccgagaccatttta

SEQ ID NO: 48778 - DNA, 19 bp, Homo sapiens
  siRNA target sequence for STAU (NM_004602.1,1651-1669).
cagccgagaccattttaaa

SEQ ID NO: 48779 - DNA, 19 bp, Homo sapiens
  siRNA target sequence for STAU (NM_004602.1,1653-1671).
gccgagaccattttaaaga

SEQ ID NO: 48780 - DNA, 19 bp, Homo sapiens
  siRNA target sequence for STAU (NM_004602.1,1793-1811).
gaacgaatttgtatctctt

SEQ ID NO: 48781 - DNA, 19 bp, Homo sapiens
  siRNA target sequence for STAU (NM_004602.1,1797-1815).
gaatttgtatctcttatca

SEQ ID NO: 48782 - DNA, 19 bp, Homo sapiens
  siRNA target sequence for STAU (NM_004602.1,1883-1901).
ggctgcgctgaacatctta

SEQ ID NO: 48783 - DNA, 19 bp, Homo sapiens
  siRNA target sequence for STAU (NM_004602.1,1884-1902).
gctgcgctgaacatcttaa

SEQ ID NO: 48784 - DNA, 19 bp, Homo sapiens
  siRNA target sequence for STAU (NM_004602.1,1885-1903).
ctgcgctgaacatcttaaa

SEQ ID NO: 48785 - DNA, 19 bp, Homo sapiens
  siRNA target sequence for STAU (NM_004602.1,1887-1905).
gcgctgaacatcttaaagt

SEQ ID NO: 48786 - DNA, 19 bp, Homo sapiens
  siRNA target sequence for STAU (NM_017453.1,498-516).
gcctttgatgagtattcct

SEQ ID NO: 48787 - DNA, 19 bp, Homo sapiens
  siRNA target sequence for STAU (NM_017453.1,499-517).
cctttgatgagtattcctt

SEQ ID NO: 48788 - DNA, 19 bp, Homo sapiens
  siRNA target sequence for STAU (NM_017453.1,504-522).
gatgagtattccttctact

SEQ ID NO: 48789 - DNA, 19 bp, Homo sapiens
  siRNA target sequence for STAU (NM_017453.1,547-565).
gcaggtagacccattcaaa

SEQ ID NO: 48790 - DNA, 19 bp, Homo sapiens
  siRNA target sequence for STAU (NM_017453.1,572-590).
ctttaccctctgcatctat

SEQ ID NO: 48791 - DNA, 19 bp, Homo sapiens
  siRNA target sequence for STAU2 (NM_014393.1,496-514).
cggggcatgtacaatcaga

SEQ ID NO: 48792 - DNA, 19 bp, Homo sapiens
  siRNA target sequence for STAU2 (NM_014393.1,896-914).
ctgcgaccaccgtcttaca

SEQ ID NO: 48793 - DNA, 19 bp, Homo sapiens
  siRNA target sequence for STAU2 (NM_014393.1,905-923).
ccgtcttacaggagcttaa

SEQ ID NO: 48794 - DNA, 19 bp, Homo sapiens
  siRNA target sequence for STAU2 (NM_014393.1,976-994).
cgccctaaaacaatagtaa

SEQ ID NO: 48795 - DNA, 19 bp, Homo sapiens
  siRNA target sequence for STAU2 (NM_014393.1,977-995).
gccctaaaacaatagtaaa

SEQ ID NO: 48796 - DNA, 19 bp, Homo sapiens
  siRNA target sequence for STAU2 (NM_014393.1,1015-1033).
caagggatgaaccctatta

SEQ ID NO: 48797 - DNA, 19 bp, Homo sapiens
  siRNA target sequence for STAU2 (NM_014393.1,1034-1052).
gccgcctggcgcaaattca

SEQ ID NO: 48798 - DNA, 19 bp, Homo sapiens
  siRNA target sequence for STAU2 (NM_014393.1,1035-1053).
ccgcctggcgcaaattcaa

SEQ ID NO: 48799 - DNA, 19 bp, Homo sapiens
  siRNA target sequence for STAU2 (NM_014393.1,1065-1083).
ggaaaaggagccggattat

SEQ ID NO: 48800 - DNA, 19 bp, Homo sapiens
  siRNA target sequence for STAU2 (NM_014393.1,1075-1093).
ccggattatgttttgcttt

SEQ ID NO: 48801 - DNA, 19 bp, Homo sapiens
  siRNA target sequence for STAU2 (NM_014393.1,1107-1125).
gcctcgacgtcgagaattt

SEQ ID NO: 48802 - DNA, 19 bp, Homo sapiens
  siRNA target sequence for STAU2 (NM_014393.1,1109-1127).
ctcgacgtcgagaatttgt

SEQ ID NO: 48803 - DNA, 19 bp, Homo sapiens
  siRNA target sequence for STAU2 (NM_014393.1,1111-1129).
cgacgtcgagaatttgtga

SEQ ID NO: 48804 - DNA, 19 bp, Homo sapiens
  siRNA target sequence for STAU2 (NM_014393.1,1112-1130).
gacgtcgagaatttgtgat

SEQ ID NO: 48805 - DNA, 19 bp, Homo sapiens
  siRNA target sequence for STAU2 (NM_014393.1,1160-1178).
caggaacaggacctaataa

SEQ ID NO: 48806 - DNA, 19 bp, Homo sapiens
  siRNA target sequence for STAU2 (NM_014393.1,1166-1184).
caggacctaataaaaagat

SEQ ID NO: 48807 - DNA, 19 bp, Homo sapiens
  siRNA target sequence for STAU2 (NM_014393.1,1182-1200).
gatagccaaaaaaaatgct

SEQ ID NO: 48808 - DNA, 19 bp, Homo sapiens
  siRNA target sequence for STAU2 (NM_014393.1,1213-1231).
ctgttacaacttggttata

SEQ ID NO: 48809 - DNA, 19 bp, Homo sapiens
  siRNA target sequence for STAU2 (NM_014393.1,1215-1233).
gttacaacttggttataaa

SEQ ID NO: 48810 - DNA, 19 bp, Homo sapiens
  siRNA target sequence for STAU2 (NM_014393.1,1309-1327).
cctgaaccaacaaataata

SEQ ID NO: 48811 - DNA, 19 bp, Homo sapiens
  siRNA target sequence for STAU2 (NM_014393.1,1379-1397).
ccagccgccacaaagtaat

SEQ ID NO: 48812 - DNA, 19 bp, Homo sapiens
  siRNA target sequence for STAU2 (NM_014393.1,1383-1401).
ccgccacaaagtaatctct

SEQ ID NO: 48813 - DNA, 19 bp, Homo sapiens
  siRNA target sequence for STAU2 (NM_014393.1,1403-1421).
gcactactctaggctattt

SEQ ID NO: 48814 - DNA, 19 bp, Homo sapiens
  siRNA target sequence for STAU2 (NM_014393.1,1478-1496).
cgaatagttcagctacaat

SEQ ID NO: 48815 - DNA, 19 bp, Homo sapiens
  siRNA target sequence for STAU2 (NM_014393.1,1479-1497).
gaatagttcagctacaatt

SEQ ID NO: 48816 - DNA, 19 bp, Homo sapiens
  siRNA target sequence for STAU2 (NM_014393.1,1534-1552).
gctgaagccataggtttaa

SEQ ID NO: 48817 - DNA, 19 bp, Homo sapiens
  siRNA target sequence for STRBP (NM_018387.2,433-451).
gagatctattcgatctttt

SEQ ID NO: 48818 - DNA, 19 bp, Homo sapiens
  siRNA target sequence for STRBP (NM_018387.2,470-488).
gttatggtgaaacattcaa

SEQ ID NO: 48819 - DNA, 19 bp, Homo sapiens
  siRNA target sequence for STRBP (NM_018387.2,498-516).
catctccggaggaacttga

SEQ ID NO: 48820 - DNA, 19 bp, Homo sapiens
  siRNA target sequence for STRBP (NM_018387.2,521-539).
gttcagaatatggtatcta

SEQ ID NO: 48821 - DNA, 19 bp, Homo sapiens
  siRNA target sequence for STRBP (NM_018387.2,629-647).
gatgaggccggagaaaact

SEQ ID NO: 48822 - DNA, 19 bp, Homo sapiens
  siRNA target sequence for STRBP (NM_018387.2,635-653).
gccggagaaaactattcca

SEQ ID NO: 48823 - DNA, 19 bp, Homo sapiens
  siRNA target sequence for STRBP (NM_018387.2,659-677).
caaggtggtcggacattgt

SEQ ID NO: 48824 - DNA, 19 bp, Homo sapiens
  siRNA target sequence for STRBP (NM_018387.2,690-708).
ggattggcctggttgcaaa

SEQ ID NO: 48825 - DNA, 19 bp, Homo sapiens
  siRNA target sequence for STRBP (NM_018387.2,704-722).
gcaaaaggcttgctgatta

SEQ ID NO: 48826 - DNA, 19 bp, Homo sapiens
  siRNA target sequence for STRBP (NM_018387.2,855-873).
gtgtaaatgaggcatctat

SEQ ID NO: 48827 - DNA, 19 bp, Homo sapiens
  siRNA target sequence for STRBP (NM_018387.2,893-911).
gagcccacgctaactttga

SEQ ID NO: 48828 - DNA, 19 bp, Homo sapiens
  siRNA target sequence for STRBP (NM_018387.2,920-938).
cttacctcacctctaatta

SEQ ID NO: 48829 - DNA, 19 bp, Homo sapiens
  siRNA target sequence for STRBP (NM_018387.2,930-948).
ctctaattagggacgaatt

SEQ ID NO: 48830 - DNA, 19 bp, Homo sapiens
  siRNA target sequence for STRBP (NM_018387.2,1034-1052).
cttcgacatgccaaatggt

SEQ ID NO: 48831 - DNA, 19 bp, Homo sapiens
  siRNA target sequence for STRBP (NM_018387.2,1057-1075).
ggcaagggcaaatggatta

SEQ ID NO: 48832 - DNA, 19 bp, Homo sapiens
  siRNA target sequence for STRBP (NM_018387.2,1058-1076).
gcaagggcaaatggattaa

SEQ ID NO: 48833 - DNA, 19 bp, Homo sapiens
  siRNA target sequence for STRBP (NM_018387.2,1071-1089).
gattaaaatcatgtgtaat

SEQ ID NO: 48834 - DNA, 19 bp, Homo sapiens
  siRNA target sequence for STRBP (NM_018387.2,1097-1115).
cgcattctgcgtgatttgt

SEQ ID NO: 48835 - DNA, 19 bp, Homo sapiens
  siRNA target sequence for STRBP (NM_018387.2,1128-1146).
ccacatgggcaccattgaa

SEQ ID NO: 48836 - DNA, 19 bp, Homo sapiens
  siRNA target sequence for STRBP (NM_018387.2,1129-1147).
cacatgggcaccattgaaa

SEQ ID NO: 48837 - DNA, 19 bp, Homo sapiens
  siRNA target sequence for STRBP (NM_018387.2,1149-1167).
gatggccactagaacttat

SEQ ID NO: 48838 - DNA, 19 bp, Homo sapiens
  siRNA target sequence for STRBP (NM_018387.2,1153-1171).
gccactagaacttatatgt

SEQ ID NO: 48839 - DNA, 19 bp, Homo sapiens
  siRNA target sequence for STRBP (NM_018387.2,1155-1173).
cactagaacttatatgtga

SEQ ID NO: 48840 - DNA, 19 bp, Homo sapiens
  siRNA target sequence for STRBP (NM_018387.2,1160-1178).
gaacttatatgtgaaaagt

SEQ ID NO: 48841 - DNA, 19 bp, Homo sapiens
  siRNA target sequence for STRBP (NM_018387.2,1177-1195).
gtctataggtacttgtaat

SEQ ID NO: 48842 - DNA, 19 bp, Homo sapiens
  siRNA target sequence for STRBP (NM_018387.2,1224-1242).
gacgagtaatggagtgttt

SEQ ID NO: 48843 - DNA, 19 bp, Homo sapiens
  siRNA target sequence for STRBP (NM_018387.2,1267-1285).
gggtcctggtcttcatgat

SEQ ID NO: 48844 - DNA, 19 bp, Homo sapiens
  siRNA target sequence for STRBP (NM_018387.2,1425-1443).
catctagtaagccttttca

SEQ ID NO: 48845 - DNA, 19 bp, Homo sapiens
  siRNA target sequence for STRBP (NM_018387.2,1431-1449).
gtaagccttttcagaagta

SEQ ID NO: 48846 - DNA, 19 bp, Homo sapiens
  siRNA target sequence for STRBP (NM_018387.2,1436-1454).
ccttttcagaagtattcct

SEQ ID NO: 48847 - DNA, 19 bp, Homo sapiens
  siRNA target sequence for STRBP (NM_018387.2,1447-1465).
gtattcctggtcagttact

SEQ ID NO: 48848 - DNA, 19 bp, Homo sapiens
  siRNA target sequence for STRBP (NM_018387.2,1500-1518).
ggccatttgaagatggatt

SEQ ID NO: 48849 - DNA, 19 bp, Homo sapiens
  siRNA target sequence for STRBP (NM_018387.2,1511-1529).
gatggattaggggatgata

SEQ ID NO: 48850 - DNA, 19 bp, Homo sapiens
  siRNA target sequence for STRBP (NM_018387.2,1602-1620).
cactaatgaggctaaatca

SEQ ID NO: 48851 - DNA, 19 bp, Homo sapiens
  siRNA target sequence for STRBP (NM_018387.2,1629-1647).
ctgggcttcagtataagct

SEQ ID NO: 48852 - DNA, 19 bp, Homo sapiens
  siRNA target sequence for STRBP (NM_018387.2,1723-1741).
ctcaggaccatccaagaaa

SEQ ID NO: 48853 - DNA, 19 bp, Homo sapiens
  siRNA target sequence for STRBP (NM_018387.2,1754-1772).
cacgtagcggtgaaggtat

SEQ ID NO: 48854 - DNA, 19 bp, Homo sapiens
  siRNA target sequence for STRBP (NM_018387.2,1774-1792).
gcaggcaatgggatatcca

SEQ ID NO: 48855 - DNA, 19 bp, Homo sapiens
  siRNA target sequence for STRBP (NM_018387.2,1775-1793).
caggcaatgggatatccaa

SEQ ID NO: 48856 - DNA, 19 bp, Homo sapiens
  siRNA target sequence for STRBP (NM_018387.2,1797-1815).
gctttgatgcagatattga

SEQ ID NO: 48857 - DNA, 19 bp, Homo sapiens
  siRNA target sequence for STRBP (NM_018387.2,1828-1846).
cgatgaaaaatcagataat

SEQ ID NO: 48858 - DNA, 19 bp, Homo sapiens
  siRNA target sequence for STRBP (NM_018387.2,1959-1977).
gtggcaaaaaccctgtaat

SEQ ID NO: 48859 - DNA, 19 bp, Homo sapiens
  siRNA target sequence for STRBP (NM_018387.2,1962-1980).
gcaaaaaccctgtaatgga

SEQ ID NO: 48860 - DNA, 19 bp, Homo sapiens
  siRNA target sequence for STRBP (NM_018387.2,1973-1991).
gtaatggagctcaatgaaa

SEQ ID NO: 48861 - DNA, 19 bp, Homo sapiens
  siRNA target sequence for STRBP (NM_018387.2,1995-2013).
gaagaggtctcaagtatga

SEQ ID NO: 48862 - DNA, 19 bp, Homo sapiens
  siRNA target sequence for STRBP (NM_018387.2,2038-2056).
ccatgacaagcgctttgta

SEQ ID NO: 48863 - DNA, 19 bp, Homo sapiens
  siRNA target sequence for STRBP (NM_018387.2,2039-2057).
catgacaagcgctttgtaa

SEQ ID NO: 48864 - DNA, 19 bp, Homo sapiens
  siRNA target sequence for STRBP (NM_018387.2,2088-2106).
gaggcgcaggtccaaataa

SEQ ID NO: 48865 - DNA, 19 bp, Homo sapiens
  siRNA target sequence for STRBP (NM_018387.2,2090-2108).
ggcgcaggtccaaataaga

SEQ ID NO: 48866 - DNA, 19 bp, Homo sapiens
  siRNA target sequence for STRBP (NM_018387.2,2091-2109).
gcgcaggtccaaataagaa

SEQ ID NO: 48867 - DNA, 19 bp, Homo sapiens
  siRNA target sequence for STRBP (NM_018387.2,2092-2110).
cgcaggtccaaataagaaa

SEQ ID NO: 48868 - DNA, 19 bp, Homo sapiens
  siRNA target sequence for STRBP (NM_018387.2,2159-2177).
ggacccaatgcggcaaata

SEQ ID NO: 48869 - DNA, 19 bp, Homo sapiens
  siRNA target sequence for STRBP (NM_018387.2,2162-2180).
cccaatgcggcaaataata

SEQ ID NO: 48870 - DNA, 19 bp, Homo sapiens
  siRNA target sequence for STRBP (NM_018387.2,2163-2181).
ccaatgcggcaaataataa

SEQ ID NO: 48871 - DNA, 19 bp, Homo sapiens
  siRNA target sequence for STRBP (NM_018387.2,2203-2221).
ggcaaagggcgttgtgaat

SEQ ID NO: 48872 - DNA, 19 bp, Homo sapiens
  siRNA target sequence for STRBP (NM_018387.2,2329-2347).
ctatggaacaccatatggt

SEQ ID NO: 48873 - DNA, 19 bp, Homo sapiens
  siRNA target sequence for STRBP (NM_018387.2,2390-2408).
gttctgttacccgttatga

SEQ ID NO: 48874 - DNA, 19 bp, Homo sapiens
  siRNA target sequence for STRBP (NM_018387.2,2393-2411).
ctgttacccgttatgaaat

SEQ ID NO: 48875 - DNA, 19 bp, Homo sapiens
  siRNA target sequence for STRBP (NM_018387.2,2395-2413).
gttacccgttatgaaattt

SEQ ID NO: 48876 - DNA, 19 bp, Homo sapiens
  siRNA target sequence for STRBP (NM_018387.2,2426-2444).
gttccccactactcattct

SEQ ID NO: 48877 - DNA, 19 bp, Homo sapiens
  siRNA target sequence for TARBP2 (NM_004178.3,99-117).
ggagtatgggaccagaata

SEQ ID NO: 48878 - DNA, 19 bp, Homo sapiens
  siRNA target sequence for TARBP2 (NM_004178.3,160-178).
gcccaccagcctaatttca

SEQ ID NO: 48879 - DNA, 19 bp, Homo sapiens
  siRNA target sequence for TARBP2 (NM_004178.3,351-369).
ggacattccggtttttact

SEQ ID NO: 48880 - DNA, 19 bp, Homo sapiens
  siRNA target sequence for TARBP2 (NM_004178.3,578-596).
gtcgagtggagcgtttcat

SEQ ID NO: 48881 - DNA, 19 bp, Homo sapiens
  siRNA target sequence for TARBP2 (NM_004178.3,581-599).
gagtggagcgtttcattga

SEQ ID NO: 48882 - DNA, 19 bp, Homo sapiens
  siRNA target sequence for TARBP2 (NM_004178.3,604-622).
gggagtggcacttccaaaa

SEQ ID NO: 48883 - DNA, 19 bp, Homo sapiens
  siRNA target sequence for TARBP2 (NM_004178.3,605-623).
ggagtggcacttccaaaaa

SEQ ID NO: 48884 - DNA, 19 bp, Homo sapiens
  siRNA target sequence for TARBP2 (NM_004178.3,606-624).
gagtggcacttccaaaaaa

SEQ ID NO: 48885 - DNA, 19 bp, Homo sapiens
  siRNA target sequence for TARBP2 (NM_004178.3,783-801).
ctgggattctctacgaaat

SEQ ID NO: 48886 - DNA, 19 bp, Homo sapiens
  siRNA target sequence for TARBP2 (NM_004178.3,786-804).
ggattctctacgaaattca

SEQ ID NO: 48887 - DNA, 19 bp, Homo sapiens
  siRNA target sequence for TARBP2 (NM_004178.3,915-933).
cgtcagctacctggatatt

SEQ ID NO: 48888 - DNA, 19 bp, Homo sapiens
  siRNA target sequence for TARBP2 (NM_134323.1,527-545).
ctgcgggctgcctagtata

SEQ ID NO: 48889 - DNA, 19 bp, Homo sapiens
  siRNA target sequence for TARBP2 (NM_134323.1,529-547).
gcgggctgcctagtataga

SEQ ID NO: 48890 - DNA, 19 bp, Homo sapiens
  siRNA target sequence for Tenr (NM_139243.1,268-286).
ccagcgacaaagacgataa

SEQ ID NO: 48891 - DNA, 19 bp, Homo sapiens
  siRNA target sequence for Tenr (NM_139243.1,271-289).
gcgacaaagacgataacta

SEQ ID NO: 48892 - DNA, 19 bp, Homo sapiens
  siRNA target sequence for Tenr (NM_139243.1,298-316).
ggatggtcctcagaaagtt

SEQ ID NO: 48893 - DNA, 19 bp, Homo sapiens
  siRNA target sequence for Tenr (NM_139243.1,347-365).
cgcaagtaacgggtaattt

SEQ ID NO: 48894 - DNA, 19 bp, Homo sapiens
  siRNA target sequence for Tenr (NM_139243.1,348-366).
gcaagtaacgggtaatttt

SEQ ID NO: 48895 - DNA, 19 bp, Homo sapiens
  siRNA target sequence for Tenr (NM_139243.1,372-390).
gccgttgctttccaagaat

SEQ ID NO: 48896 - DNA, 19 bp, Homo sapiens
  siRNA target sequence for Tenr (NM_139243.1,512-530).
gagttcagcttgaccttaa

SEQ ID NO: 48897 - DNA, 19 bp, Homo sapiens
  siRNA target sequence for Tenr (NM_139243.1,538-556).
gtgacaacaggtaatgtta

SEQ ID NO: 48898 - DNA, 19 bp, Homo sapiens
  siRNA target sequence for Tenr (NM_139243.1,578-596).
gtgctgtggtggatggtat

SEQ ID NO: 48899 - DNA, 19 bp, Homo sapiens
  siRNA target sequence for Tenr (NM_139243.1,650-668).
caaaattagctcttgatga

SEQ ID NO: 48900 - DNA, 19 bp, Homo sapiens
  siRNA target sequence for Tenr (NM_139243.1,659-677).
ctcttgatgagcttctaca

SEQ ID NO: 48901 - DNA, 19 bp, Homo sapiens
  siRNA target sequence for Tenr (NM_139243.1,729-747).
ccctgcagaacctgttgtt

SEQ ID NO: 48902 - DNA, 19 bp, Homo sapiens
  siRNA target sequence for Tenr (NM_139243.1,754-772).
gaactagcatatgtttcaa

SEQ ID NO: 48903 - DNA, 19 bp, Homo sapiens
  siRNA target sequence for Tenr (NM_139243.1,810-828).
gatttcacagatcgttaaa

SEQ ID NO: 48904 - DNA, 19 bp, Homo sapiens
  siRNA target sequence for Tenr (NM_139243.1,819-837).
gatcgttaaagaaagattt

SEQ ID NO: 48905 - DNA, 19 bp, Homo sapiens
  siRNA target sequence for Tenr (NM_139243.1,822-840).
cgttaaagaaagatttaat

SEQ ID NO: 48906 - DNA, 19 bp, Homo sapiens
  siRNA target sequence for Tenr (NM_139243.1,841-859).
caactaatttctaatcgtt

SEQ ID NO: 48907 - DNA, 19 bp, Homo sapiens
  siRNA target sequence for Tenr (NM_139243.1,851-869).
ctaatcgttcagaatacct

SEQ ID NO: 48908 - DNA, 19 bp, Homo sapiens
  siRNA target sequence for Tenr (NM_139243.1,932-950).
ctataggcacaggtgaata

SEQ ID NO: 48909 - DNA, 19 bp, Homo sapiens
  siRNA target sequence for Tenr (NM_139243.1,994-1012).
gacactcatgctgttgtta

SEQ ID NO: 48910 - DNA, 19 bp, Homo sapiens
  siRNA target sequence for Tenr (NM_139243.1,1023-1041).
gtctcttcttaggtacttt

SEQ ID NO: 48911 - DNA, 19 bp, Homo sapiens
  siRNA target sequence for Tenr (NM_139243.1,1027-1045).
cttcttaggtacttttata

SEQ ID NO: 48912 - DNA, 19 bp, Homo sapiens
  siRNA target sequence for Tenr (NM_139243.1,1035-1053).
gtacttttatagacaactt

SEQ ID NO: 48913 - DNA, 19 bp, Homo sapiens
  siRNA target sequence for Tenr (NM_139243.1,1067-1085).
gcaaaaatcctgctatgat

SEQ ID NO: 48914 - DNA, 19 bp, Homo sapiens
  siRNA target sequence for Tenr (NM_139243.1,1075-1093).
cctgctatgatggaaaaat

SEQ ID NO: 48915 - DNA, 19 bp, Homo sapiens
  siRNA target sequence for Tenr (NM_139243.1,1103-1121).
gtacagaaccaacttctaa

SEQ ID NO: 48916 - DNA, 19 bp, Homo sapiens
  siRNA target sequence for Tenr (NM_139243.1,1118-1136).
ctaatctactcactcttaa

SEQ ID NO: 48917 - DNA, 19 bp, Homo sapiens
  siRNA target sequence for Tenr (NM_139243.1,1164-1182).
gaaccagttgcctaaagga

SEQ ID NO: 48918 - DNA, 19 bp, Homo sapiens
  siRNA target sequence for Tenr (NM_139243.1,1180-1198).
ggatcagcccagattaagt

SEQ ID NO: 48919 - DNA, 19 bp, Homo sapiens
  siRNA target sequence for Tenr (NM_139243.1,1197-1215).
gtcacagttacgtcttaat

SEQ ID NO: 48920 - DNA, 19 bp, Homo sapiens
  siRNA target sequence for Tenr (NM_139243.1,1207-1225).
cgtcttaatccacattcta

SEQ ID NO: 48921 - DNA, 19 bp, Homo sapiens
  siRNA target sequence for Tenr (NM_139243.1,1303-1321).
cctaaagatggtgttaata

SEQ ID NO: 48922 - DNA, 19 bp, Homo sapiens
  siRNA target sequence for Tenr (NM_139243.1,1312-1330).
ggtgttaatagaataagca

SEQ ID NO: 48923 - DNA, 19 bp, Homo sapiens
  siRNA target sequence for Tenr (NM_139243.1,1382-1400).
gagcattgctgagtcattt

SEQ ID NO: 48924 - DNA, 19 bp, Homo sapiens
  siRNA target sequence for Tenr (NM_139243.1,1416-1434).
catcagcagtatacttatt

SEQ ID NO: 48925 - DNA, 19 bp, Homo sapiens
  siRNA target sequence for Tenr (NM_139243.1,1419-1437).
cagcagtatacttattggt

SEQ ID NO: 48926 - DNA, 19 bp, Homo sapiens
  siRNA target sequence for Tenr (NM_139243.1,1453-1471).
gataccagaggcttagaaa

SEQ ID NO: 48927 - DNA, 19 bp, Homo sapiens
  siRNA target sequence for Tenr (NM_139243.1,1462-1480).
ggcttagaaatcgctataa

SEQ ID NO: 48928 - DNA, 19 bp, Homo sapiens
  siRNA target sequence for Tenr (NM_139243.1,1463-1481).
gcttagaaatcgctataaa

SEQ ID NO: 48929 - DNA, 19 bp, Homo sapiens
  siRNA target sequence for Tenr (NM_139243.1,1492-1510).
gatgatgcactcacttcaa

SEQ ID NO: 48930 - DNA, 19 bp, Homo sapiens
  siRNA target sequence for Tenr (NM_139243.1,1516-1534).
ccaatgttttacttagtca

SEQ ID NO: 48931 - DNA, 19 bp, Homo sapiens
  siRNA target sequence for Tenr (NM_139243.1,1531-1549).
gtcaacagacctcatatta

SEQ ID NO: 48932 - DNA, 19 bp, Homo sapiens
  siRNA target sequence for Tenr (NM_139243.1,1533-1551).
caacagacctcatattagt

SEQ ID NO: 48933 - DNA, 19 bp, Homo sapiens
  siRNA target sequence for Tenr (NM_139243.1,1536-1554).
cagacctcatattagttta

SEQ ID NO: 48934 - DNA, 19 bp, Homo sapiens
  siRNA target sequence for Tenr (NM_139243.1,1538-1556).
gacctcatattagtttagt

SEQ ID NO: 48935 - DNA, 19 bp, Homo sapiens
  siRNA target sequence for Tenr (NM_139243.1,1614-1632).
ggcacaaggagatgtttct

SEQ ID NO: 48936 - DNA, 19 bp, Homo sapiens
  siRNA target sequence for Tenr (NM_139243.1,1724-1742).
caatgttaagtcggtttaa

SEQ ID NO: 48937 - DNA, 19 bp, Homo sapiens
  siRNA target sequence for Tenr (NM_139243.1,1746-1764).
gcttgccaaagaagctaaa

SEQ ID NO: 48938 - DNA, 19 bp, Homo sapiens
  siRNA target sequence for Tenr (NM_139243.1,1792-1810).
catgcagctaagtgtatgt

SEQ ID NO: 48939 - DNA, 19 bp, Homo sapiens
  siRNA target sequence for Tenr (NM_139243.1,1825-1843).
gaagctaaatgtaagttga

SEQ ID NO: 48940 - DNA, 19 bp, Homo sapiens
  siRNA target sequence for Tenr (NM_139243.1,1842-1860).
gaaatcctacttacaacaa

SEQ ID NO: 48941 - DNA, 19 bp, Homo sapiens
  siRNA target sequence for Tenr (NM_139243.1,1889-1907).
ctccctgcatagagcaatt

SEQ ID NO: 48942 - DNA, 19 bp, Homo sapiens
  siRNA target sequence for Tenr (NM_139243.1,1891-1909).
ccctgcatagagcaattta

SEQ ID NO: 48943 - DNA, 19 bp, Homo sapiens
  siRNA target sequence for Tenr (NM_139243.1,1895-1913).
gcatagagcaatttaacat

SEQ ID NO: 48944 - DNA, 19 bp, Homo sapiens
  siRNA target sequence for TLR3 (NM_003265.2,112-130).
ctttgccttgtatctactt

SEQ ID NO: 48945 - DNA, 19 bp, Homo sapiens
  siRNA target sequence for TLR3 (NM_003265.2,184-202).
gcactgttagccatgaagt

SEQ ID NO: 48946 - DNA, 19 bp, Homo sapiens
  siRNA target sequence for TLR3 (NM_003265.2,253-271).
caaacataacagtgttgaa

SEQ ID NO: 48947 - DNA, 19 bp, Homo sapiens
  siRNA target sequence for TLR3 (NM_003265.2,269-287).
gaaccttacccataatcaa

SEQ ID NO: 48948 - DNA, 19 bp, Homo sapiens
  siRNA target sequence for TLR3 (NM_003265.2,306-324).
gccaacttcacaaggtata

SEQ ID NO: 48949 - DNA, 19 bp, Homo sapiens
  siRNA target sequence for TLR3 (NM_003265.2,422-440).
gcacaatgagctatctcaa

SEQ ID NO: 48950 - DNA, 19 bp, Homo sapiens
  siRNA target sequence for TLR3 (NM_003265.2,431-449).
gctatctcaactttctgat

SEQ ID NO: 48951 - DNA, 19 bp, Homo sapiens
  siRNA target sequence for TLR3 (NM_003265.2,459-477).
gccttctgcacgaatttga

SEQ ID NO: 48952 - DNA, 19 bp, Homo sapiens
  siRNA target sequence for TLR3 (NM_003265.2,461-479).
cttctgcacgaatttgact

SEQ ID NO: 48953 - DNA, 19 bp, Homo sapiens
  siRNA target sequence for TLR3 (NM_003265.2,496-514).
ccaactcaatccagaaaat

SEQ ID NO: 48954 - DNA, 19 bp, Homo sapiens
  siRNA target sequence for TLR3 (NM_003265.2,497-515).
caactcaatccagaaaatt

SEQ ID NO: 48955 - DNA, 19 bp, Homo sapiens
  siRNA target sequence for TLR3 (NM_003265.2,542-560).
gaatttaatcacattagat

SEQ ID NO: 48956 - DNA, 19 bp, Homo sapiens
  siRNA target sequence for TLR3 (NM_003265.2,626-644).
gcttctattatcaaacaat

SEQ ID NO: 48957 - DNA, 19 bp, Homo sapiens
  siRNA target sequence for TLR3 (NM_003265.2,655-673).
cgctaaaaagtgaagaact

SEQ ID NO: 48958 - DNA, 19 bp, Homo sapiens
  siRNA target sequence for TLR3 (NM_003265.2,708-726).
gagttgtcatcgaatcaaa

SEQ ID NO: 48959 - DNA, 19 bp, Homo sapiens
  siRNA target sequence for TLR3 (NM_003265.2,715-733).
catcgaatcaaattaaaga

SEQ ID NO: 48960 - DNA, 19 bp, Homo sapiens
  siRNA target sequence for TLR3 (NM_003265.2,718-736).
cgaatcaaattaaagagtt

SEQ ID NO: 48961 - DNA, 19 bp, Homo sapiens
  siRNA target sequence for TLR3 (NM_003265.2,746-764).
gtgttttcacgcaattgga

SEQ ID NO: 48962 - DNA, 19 bp, Homo sapiens
  siRNA target sequence for TLR3 (NM_003265.2,753-771).
cacgcaattggaagattat

SEQ ID NO: 48963 - DNA, 19 bp, Homo sapiens
  siRNA target sequence for TLR3 (NM_003265.2,879-897).
ctgtccaccaccagcaata

SEQ ID NO: 48964 - DNA, 19 bp, Homo sapiens
  siRNA target sequence for TLR3 (NM_003265.2,881-899).
gtccaccaccagcaataca

SEQ ID NO: 48965 - DNA, 19 bp, Homo sapiens
  siRNA target sequence for TLR3 (NM_003265.2,908-926).
gggactaaagtggacaaat

SEQ ID NO: 48966 - DNA, 19 bp, Homo sapiens
  siRNA target sequence for TLR3 (NM_003265.2,927-945).
ctcactatgctcgatcttt

SEQ ID NO: 48967 - DNA, 19 bp, Homo sapiens
  siRNA target sequence for TLR3 (NM_003265.2,931-949).
ctatgctcgatctttccta

SEQ ID NO: 48968 - DNA, 19 bp, Homo sapiens
  siRNA target sequence for TLR3 (NM_003265.2,965-983).
ggttggtaacgattccttt

SEQ ID NO: 48969 - DNA, 19 bp, Homo sapiens
  siRNA target sequence for TLR3 (NM_003265.2,969-987).
ggtaacgattcctttgctt

SEQ ID NO: 48970 - DNA, 19 bp, Homo sapiens
  siRNA target sequence for TLR3 (NM_003265.2,988-1006).
ggcttccacaactagaata

SEQ ID NO: 48971 - DNA, 19 bp, Homo sapiens
  siRNA target sequence for TLR3 (NM_003265.2,1056-1074).
cacgggcttttcaatgtga

SEQ ID NO: 48972 - DNA, 19 bp, Homo sapiens
  siRNA target sequence for TLR3 (NM_003265.2,1071-1089).
gtgaggtacctgaatttga

SEQ ID NO: 48973 - DNA, 19 bp, Homo sapiens
  siRNA target sequence for TLR3 (NM_003265.2,1073-1091).
gaggtacctgaatttgaaa

SEQ ID NO: 48974 - DNA, 19 bp, Homo sapiens
  siRNA target sequence for TLR3 (NM_003265.2,1088-1106).
gaaacggtcttttactaaa

SEQ ID NO: 48975 - DNA, 19 bp, Homo sapiens
  siRNA target sequence for TLR3 (NM_003265.2,1094-1112).
gtcttttactaaacaaagt

SEQ ID NO: 48976 - DNA, 19 bp, Homo sapiens
  siRNA target sequence for TLR3 (NM_003265.2,1126-1144).
cactccccaagattgatga

SEQ ID NO: 48977 - DNA, 19 bp, Homo sapiens
  siRNA target sequence for TLR3 (NM_003265.2,1128-1146).
ctccccaagattgatgatt

SEQ ID NO: 48978 - DNA, 19 bp, Homo sapiens
  siRNA target sequence for TLR3 (NM_003265.2,1130-1148).
ccccaagattgatgatttt

SEQ ID NO: 48979 - DNA, 19 bp, Homo sapiens
  siRNA target sequence for TLR3 (NM_003265.2,1168-1186).
gtttggagcaccttaacat

SEQ ID NO: 48980 - DNA, 19 bp, Homo sapiens
  siRNA target sequence for TLR3 (NM_003265.2,1207-1225).
gcataaaaagcaatatgtt

SEQ ID NO: 48981 - DNA, 19 bp, Homo sapiens
  siRNA target sequence for TLR3 (NM_003265.2,1235-1253).
gataaacctgaaatactta

SEQ ID NO: 48982 - DNA, 19 bp, Homo sapiens
  siRNA target sequence for TLR3 (NM_003265.2,1241-1259).
cctgaaatacttaagtcta

SEQ ID NO: 48983 - DNA, 19 bp, Homo sapiens
  siRNA target sequence for TLR3 (NM_003265.2,1276-1294).
gtttgcgaactttgacaaa

SEQ ID NO: 48984 - DNA, 19 bp, Homo sapiens
  siRNA target sequence for TLR3 (NM_003265.2,1280-1298).
gcgaactttgacaaatgaa

SEQ ID NO: 48985 - DNA, 19 bp, Homo sapiens
  siRNA target sequence for TLR3 (NM_003265.2,1281-1299).
cgaactttgacaaatgaaa

SEQ ID NO: 48986 - DNA, 19 bp, Homo sapiens
  siRNA target sequence for TLR3 (NM_003265.2,1321-1339).
ctcccttacacatactcaa

SEQ ID NO: 48987 - DNA, 19 bp, Homo sapiens
  siRNA target sequence for TLR3 (NM_003265.2,1335-1353).
ctcaacctaaccaagaata

SEQ ID NO: 48988 - DNA, 19 bp, Homo sapiens
  siRNA target sequence for TLR3 (NM_003265.2,1387-1405).
ggttgggccacctagaagt

SEQ ID NO: 48989 - DNA, 19 bp, Homo sapiens
  siRNA target sequence for TLR3 (NM_003265.2,1388-1406).
gttgggccacctagaagta

SEQ ID NO: 48990 - DNA, 19 bp, Homo sapiens
  siRNA target sequence for TLR3 (NM_003265.2,1410-1428).
gacctgggccttaatgaaa

SEQ ID NO: 48991 - DNA, 19 bp, Homo sapiens
  siRNA target sequence for TLR3 (NM_003265.2,1462-1480).
gtctagaaaatattttcga

SEQ ID NO: 48992 - DNA, 19 bp, Homo sapiens
  siRNA target sequence for TLR3 (NM_003265.2,1563-1581).
cgaagggtggcccttaaaa

SEQ ID NO: 48993 - DNA, 19 bp, Homo sapiens
  siRNA target sequence for TLR3 (NM_003265.2,1603-1621).
cattccagcctcttcgtaa

SEQ ID NO: 48994 - DNA, 19 bp, Homo sapiens
  siRNA target sequence for TLR3 (NM_003265.2,1608-1626).
cagcctcttcgtaacttga

SEQ ID NO: 48995 - DNA, 19 bp, Homo sapiens
  siRNA target sequence for TLR3 (NM_003265.2,1646-1664).
caacaacatagccaacata

SEQ ID NO: 48996 - DNA, 19 bp, Homo sapiens
  siRNA target sequence for TLR3 (NM_003265.2,1652-1670).
catagccaacataaatgat

SEQ ID NO: 48997 - DNA, 19 bp, Homo sapiens
  siRNA target sequence for TLR3 (NM_003265.2,1707-1725).
gatttgcagcataacaact

SEQ ID NO: 48998 - DNA, 19 bp, Homo sapiens
  siRNA target sequence for TLR3 (NM_003265.2,1839-1857).
gaggtcttcaaggatttat

SEQ ID NO: 48999 - DNA, 19 bp, Homo sapiens
  siRNA target sequence for TLR3 (NM_003265.2,1860-1878).
gaactaaagatcatcgatt

SEQ ID NO: 49000 - DNA, 19 bp, Homo sapiens
  siRNA target sequence for TLR3 (NM_003265.2,1871-1889).
catcgatttaggattgaat

SEQ ID NO: 49001 - DNA, 19 bp, Homo sapiens
  siRNA target sequence for TLR3 (NM_003265.2,1874-1892).
cgatttaggattgaataat

SEQ ID NO: 49002 - DNA, 19 bp, Homo sapiens
  siRNA target sequence for TLR3 (NM_003265.2,1875-1893).
gatttaggattgaataatt

SEQ ID NO: 49003 - DNA, 19 bp, Homo sapiens
  siRNA target sequence for TLR3 (NM_003265.2,1905-1923).
ccagcatctgtctttaata

SEQ ID NO: 49004 - DNA, 19 bp, Homo sapiens
  siRNA target sequence for TLR3 (NM_003265.2,1906-1924).
cagcatctgtctttaataa

SEQ ID NO: 49005 - DNA, 19 bp, Homo sapiens
  siRNA target sequence for TLR3 (NM_003265.2,2003-2021).
caggaacctgactgagtta

SEQ ID NO: 49006 - DNA, 19 bp, Homo sapiens
  siRNA target sequence for TLR3 (NM_003265.2,2006-2024).
gaacctgactgagttagat

SEQ ID NO: 49007 - DNA, 19 bp, Homo sapiens
  siRNA target sequence for TLR3 (NM_003265.2,2027-2045).
gcgctttaatccctttgat

SEQ ID NO: 49008 - DNA, 19 bp, Homo sapiens
  siRNA target sequence for TLR3 (NM_003265.2,2028-2046).
cgctttaatccctttgatt

SEQ ID NO: 49009 - DNA, 19 bp, Homo sapiens
  siRNA target sequence for TLR3 (NM_003265.2,2064-2082).
gcctggtttgttaattgga

SEQ ID NO: 49010 - DNA, 19 bp, Homo sapiens
  siRNA target sequence for TLR3 (NM_003265.2,2112-2130).
ctgtcaagccactaccttt

SEQ ID NO: 49011 - DNA, 19 bp, Homo sapiens
  siRNA target sequence for TLR3 (NM_003265.2,2156-2174).
gttcccagtgagacttttt

SEQ ID NO: 49012 - DNA, 19 bp, Homo sapiens
  siRNA target sequence for TLR3 (NM_003265.2,2163-2181).
gtgagactttttgatacat

SEQ ID NO: 49013 - DNA, 19 bp, Homo sapiens
  siRNA target sequence for TLR3 (NM_003265.2,2208-2226).
gaactctttttcatgatca

SEQ ID NO: 49014 - DNA, 19 bp, Homo sapiens
  siRNA target sequence for TLR3 (NM_003265.2,2211-2229).
ctctttttcatgatcaata

SEQ ID NO: 49015 - DNA, 19 bp, Homo sapiens
  siRNA target sequence for TLR3 (NM_003265.2,2347-2365).
gacagacagaacagtttga

SEQ ID NO: 49016 - DNA, 19 bp, Homo sapiens
  siRNA target sequence for TLR3 (NM_003265.2,2360-2378).
gtttgaatatgcagcatat

SEQ ID NO: 49017 - DNA, 19 bp, Homo sapiens
  siRNA target sequence for TLR3 (NM_003265.2,2403-2421).
gattgggtctgggaacatt

SEQ ID NO: 49018 - DNA, 19 bp, Homo sapiens
  siRNA target sequence for TLR3 (NM_003265.2,2444-2462).
ccaatctctcaaattttgt

SEQ ID NO: 49019 - DNA, 19 bp, Homo sapiens
  siRNA target sequence for TLR3 (NM_003265.2,2477-2495).
ctttgaggcgggtgttttt

SEQ ID NO: 49020 - DNA, 19 bp, Homo sapiens
  siRNA target sequence for TLR3 (NM_003265.2,2485-2503).
cgggtgtttttgaactaga

SEQ ID NO: 49021 - DNA, 19 bp, Homo sapiens
  siRNA target sequence for TLR3 (NM_003265.2,2486-2504).
gggtgtttttgaactagaa

SEQ ID NO: 49022 - DNA, 19 bp, Homo sapiens
  siRNA target sequence for TLR3 (NM_003265.2,2499-2517).
ctagaagcaattgttaaca

SEQ ID NO: 49023 - DNA, 19 bp, Homo sapiens
  siRNA target sequence for TLR3 (NM_003265.2,2594-2612).
ggtacatcatgcagttcaa

SEQ ID NO: 49024 - DNA, 19 bp, Homo sapiens
  siRNA target sequence for TLR3 (NM_003265.2,2605-2623).
cagttcaacaagctattga

SEQ ID NO: 49025 - DNA, 19 bp, Homo sapiens
  siRNA target sequence for TLR3 (NM_003265.2,2660-2678).
ggagattccagattataaa

SEQ ID NO: 49026 - DNA, 19 bp, Homo sapiens
  siRNA target sequence for TLR3 (NM_003265.2,2760-2778).
ggtgcctttcgtcataaat

SEQ ID NO: 49027 - DNA, 19 bp, Homo sapiens
  siRNA target sequence for TLR3 (NM_003265.2,2761-2779).
gtgcctttcgtcataaatt

SEQ ID NO: 49028 - DNA, 19 bp, Homo sapiens
  siRNA target sequence for TLR3 (NM_003265.2,2764-2782).
cctttcgtcataaattgca

SEQ ID NO: 49029 - DNA, 19 bp, Homo sapiens
  siRNA target sequence for TLR3 (NM_003265.2,2765-2783).
ctttcgtcataaattgcaa

SEQ ID NO: 49030 - DNA, 19 bp, Homo sapiens
  siRNA target sequence for TLR3 (NM_003265.2,2784-2802).
gtagcacttggatccaaaa

SEQ ID NO: 49031 - DNA, 19 bp, Homo sapiens
  siRNA target sequence for HNRPH1 (NM_005520.1,145-163).
gatgaagtgcagaggtttt

SEQ ID NO: 49032 - DNA, 19 bp, Homo sapiens
  siRNA target sequence for HNRPH1 (NM_005520.1,187-205).
ggggctcaaggtattcgtt

SEQ ID NO: 49033 - DNA, 19 bp, Homo sapiens
  siRNA target sequence for HNRPH1 (NM_005520.1,188-206).
gggctcaaggtattcgttt

SEQ ID NO: 49034 - DNA, 19 bp, Homo sapiens
  siRNA target sequence for HNRPH1 (NM_005520.1,191-209).
ctcaaggtattcgtttcat

SEQ ID NO: 49035 - DNA, 19 bp, Homo sapiens
  siRNA target sequence for HNRPH1 (NM_005520.1,366-384).
gcatactggtccaaatagt

SEQ ID NO: 49036 - DNA, 19 bp, Homo sapiens
  siRNA target sequence for HNRPH1 (NM_005520.1,637-655).
gctgaagttagaactcatt

SEQ ID NO: 49037 - DNA, 19 bp, Homo sapiens
  siRNA target sequence for HNRPH1 (NM_005520.1,658-676).
gatccaccacgaaagctta

SEQ ID NO: 49038 - DNA, 19 bp, Homo sapiens
  siRNA target sequence for HNRPH1 (NM_005520.1,1071-1089).
cgagttcgcaactcatgaa

SEQ ID NO: 49039 - DNA, 19 bp, Homo sapiens
  siRNA target sequence for HNRPH1 (NM_005520.1,1074-1092).
gttcgcaactcatgaagat

SEQ ID NO: 49040 - DNA, 19 bp, Homo sapiens
  siRNA target sequence for HNRPH1 (NM_005520.1,1264-1282).
ggaggcatgggcttgtcaa

SEQ ID NO: 49041 - DNA, 19 bp, Homo sapiens
  siRNA target sequence for AARS (NM_001605.1,135-153).
gaaatccggcagcgattta

SEQ ID NO: 49042 - DNA, 19 bp, Homo sapiens
  siRNA target sequence for AARS (NM_001605.1,140-158).
ccggcagcgatttatagat

SEQ ID NO: 49043 - DNA, 19 bp, Homo sapiens
  siRNA target sequence for AARS (NM_001605.1,141-159).
cggcagcgatttatagatt

SEQ ID NO: 49044 - DNA, 19 bp, Homo sapiens
  siRNA target sequence for AARS (NM_001605.1,142-160).
ggcagcgatttatagattt

SEQ ID NO: 49045 - DNA, 19 bp, Homo sapiens
  siRNA target sequence for AARS (NM_001605.1,167-185).
gaggaacgagcatacgtat

SEQ ID NO: 49046 - DNA, 19 bp, Homo sapiens
  siRNA target sequence for AARS (NM_001605.1,263-281).
cattttcctgaacacaatt

SEQ ID NO: 49047 - DNA, 19 bp, Homo sapiens
  siRNA target sequence for AARS (NM_001605.1,374-392).
gggcaaggatgtctatcat

SEQ ID NO: 49048 - DNA, 19 bp, Homo sapiens
  siRNA target sequence for AARS (NM_001605.1,410-428).
gctgggctcttggtctttt

SEQ ID NO: 49049 - DNA, 19 bp, Homo sapiens
  siRNA target sequence for AARS (NM_001605.1,501-519).
gaaagactttatgttactt

SEQ ID NO: 49050 - DNA, 19 bp, Homo sapiens
  siRNA target sequence for AARS (NM_001605.1,588-606).
gggctggatgacaccaaaa

SEQ ID NO: 49051 - DNA, 19 bp, Homo sapiens
  siRNA target sequence for AARS (NM_001605.1,589-607).
ggctggatgacaccaaaat

SEQ ID NO: 49052 - DNA, 19 bp, Homo sapiens
  siRNA target sequence for AARS (NM_001605.1,703-721).
gggacgccgcacatcttgt

SEQ ID NO: 49053 - DNA, 19 bp, Homo sapiens
  siRNA target sequence for AARS (NM_001605.1,762-780).
gtgttcatccagtataaca

SEQ ID NO: 49054 - DNA, 19 bp, Homo sapiens
  siRNA target sequence for AARS (NM_001605.1,805-823).
ctcttcccaagaaaagcat

SEQ ID NO: 49055 - DNA, 19 bp, Homo sapiens
  siRNA target sequence for AARS (NM_001605.1,866-884).
gaataagatgtccaactat

SEQ ID NO: 49056 - DNA, 19 bp, Homo sapiens
  siRNA target sequence for AARS (NM_001605.1,1063-1081).
cagggcgtggatatgtgtt

SEQ ID NO: 49057 - DNA, 19 bp, Homo sapiens
  siRNA target sequence for AARS (NM_001605.1,1104-1122).
gtccgatacgcccatgaaa

SEQ ID NO: 49058 - DNA, 19 bp, Homo sapiens
  siRNA target sequence for AARS (NM_001605.1,1108-1126).
gatacgcccatgaaaagct

SEQ ID NO: 49059 - DNA, 19 bp, Homo sapiens
  siRNA target sequence for AARS (NM_001605.1,1139-1157).
gggcttctttgctacgtta

SEQ ID NO: 49060 - DNA, 19 bp, Homo sapiens
  siRNA target sequence for AARS (NM_001605.1,1150-1168).
ctacgttagtggatgttgt

SEQ ID NO: 49061 - DNA, 19 bp, Homo sapiens
  siRNA target sequence for AARS (NM_001605.1,1339-1357).
ctgcttggctcctctatga

SEQ ID NO: 49062 - DNA, 19 bp, Homo sapiens
  siRNA target sequence for AARS (NM_001605.1,1376-1394).
ggatctgactggactgatt

SEQ ID NO: 49063 - DNA, 19 bp, Homo sapiens
  siRNA target sequence for AARS (NM_001605.1,1494-1512).
ctcattatgctggacattt

SEQ ID NO: 49064 - DNA, 19 bp, Homo sapiens
  siRNA target sequence for AARS (NM_001605.1,1505-1523).
ggacatttacgctatcgaa

SEQ ID NO: 49065 - DNA, 19 bp, Homo sapiens
  siRNA target sequence for AARS (NM_001605.1,1554-1572).
gatgattccccaaagtaca

SEQ ID NO: 49066 - DNA, 19 bp, Homo sapiens
  siRNA target sequence for AARS (NM_001605.1,1561-1579).
ccccaaagtacaattacca

SEQ ID NO: 49067 - DNA, 19 bp, Homo sapiens
  siRNA target sequence for AARS (NM_001605.1,1562-1580).
cccaaagtacaattaccat

SEQ ID NO: 49068 - DNA, 19 bp, Homo sapiens
  siRNA target sequence for AARS (NM_001605.1,1583-1601).
ggactccagtggtagctat

SEQ ID NO: 49069 - DNA, 19 bp, Homo sapiens
  siRNA target sequence for AARS (NM_001605.1,1588-1606).
ccagtggtagctatgtatt

SEQ ID NO: 49070 - DNA, 19 bp, Homo sapiens
  siRNA target sequence for AARS (NM_001605.1,1589-1607).
cagtggtagctatgtattt

SEQ ID NO: 49071 - DNA, 19 bp, Homo sapiens
  siRNA target sequence for AARS (NM_001605.1,1593-1611).
ggtagctatgtatttgaga

SEQ ID NO: 49072 - DNA, 19 bp, Homo sapiens
  siRNA target sequence for AARS (NM_001605.1,1594-1612).
gtagctatgtatttgagaa

SEQ ID NO: 49073 - DNA, 19 bp, Homo sapiens
  siRNA target sequence for AARS (NM_001605.1,1869-1887).
gatcaggtctggctgttta

SEQ ID NO: 49074 - DNA, 19 bp, Homo sapiens
  siRNA target sequence for AARS (NM_001605.1,1899-1917).
cgacgaagacccatcatga

SEQ ID NO: 49075 - DNA, 19 bp, Homo sapiens
  siRNA target sequence for AARS (NM_001605.1,1927-1945).
cagctacgcacattctgaa

SEQ ID NO: 49076 - DNA, 19 bp, Homo sapiens
  siRNA target sequence for AARS (NM_001605.1,1930-1948).
ctacgcacattctgaactt

SEQ ID NO: 49077 - DNA, 19 bp, Homo sapiens
  siRNA target sequence for AARS (NM_001605.1,1979-1997).
ccagaaaggctcattggtt

SEQ ID NO: 49078 - DNA, 19 bp, Homo sapiens
  siRNA target sequence for AARS (NM_001605.1,1999-2017).
ctcctgaccgcctcagatt

SEQ ID NO: 49079 - DNA, 19 bp, Homo sapiens
  siRNA target sequence for AARS (NM_001605.1,2002-2020).
ctgaccgcctcagatttga

SEQ ID NO: 49080 - DNA, 19 bp, Homo sapiens
  siRNA target sequence for AARS (NM_001605.1,2004-2022).
gaccgcctcagatttgact

SEQ ID NO: 49081 - DNA, 19 bp, Homo sapiens
  siRNA target sequence for AARS (NM_001605.1,2006-2024).
ccgcctcagatttgacttt

SEQ ID NO: 49082 - DNA, 19 bp, Homo sapiens
  siRNA target sequence for AARS (NM_001605.1,2007-2025).
cgcctcagatttgacttta

SEQ ID NO: 49083 - DNA, 19 bp, Homo sapiens
  siRNA target sequence for AARS (NM_001605.1,2063-2081).
ggctgaagagattgctaat

SEQ ID NO: 49084 - DNA, 19 bp, Homo sapiens
  siRNA target sequence for AARS (NM_001605.1,2094-2112).
gcagccaaggccgtctata

SEQ ID NO: 49085 - DNA, 19 bp, Homo sapiens
  siRNA target sequence for AARS (NM_001605.1,2150-2168).
gggcctacgggctgtgttt

SEQ ID NO: 49086 - DNA, 19 bp, Homo sapiens
  siRNA target sequence for AARS (NM_001605.1,2305-2323).
gtcatgcaggagcttttgt

SEQ ID NO: 49087 - DNA, 19 bp, Homo sapiens
  siRNA target sequence for AARS (NM_001605.1,2458-2476).
ctcagactgctccaaacaa

SEQ ID NO: 49088 - DNA, 19 bp, Homo sapiens
  siRNA target sequence for AARS (NM_001605.1,2836-2854).
cagccaatcggggcttaaa

SEQ ID NO: 49089 - DNA, 19 bp, Homo sapiens
  siRNA target sequence for AARS (NM_001605.1,2885-2903).
cttgatggacggtaaaggt

SEQ ID NO: 49090 - DNA, 19 bp, Homo sapiens
  siRNA target sequence for AARS (NM_001605.1,2994-3012).
cgcctcggggatgtaaaga

SEQ ID NO: 49091 - DNA, 19 bp, Homo sapiens
  siRNA target sequence for AARS (NM_001605.1,2997-3015).
ctcggggatgtaaagaact

SEQ ID NO: 49092 - DNA, 19 bp, Homo sapiens
  siRNA target sequence for CARS (NM_001751.3,147-165).
catgcagactccaccttta

SEQ ID NO: 49093 - DNA, 19 bp, Homo sapiens
  siRNA target sequence for CARS (NM_001751.3,234-252).
gtgggccaaccgtctatga

SEQ ID NO: 49094 - DNA, 19 bp, Homo sapiens
  siRNA target sequence for CARS (NM_001751.3,269-287).
cacgccaggtcctacatct

SEQ ID NO: 49095 - DNA, 19 bp, Homo sapiens
  siRNA target sequence for CARS (NM_001751.3,272-290).
gccaggtcctacatctctt

SEQ ID NO: 49096 - DNA, 19 bp, Homo sapiens
  siRNA target sequence for CARS (NM_001751.3,273-291).
ccaggtcctacatctcttt

SEQ ID NO: 49097 - DNA, 19 bp, Homo sapiens
  siRNA target sequence for CARS (NM_001751.3,274-292).
caggtcctacatctctttt

SEQ ID NO: 49098 - DNA, 19 bp, Homo sapiens
  siRNA target sequence for CARS (NM_001751.3,276-294).
ggtcctacatctcttttga

SEQ ID NO: 49099 - DNA, 19 bp, Homo sapiens
  siRNA target sequence for CARS (NM_001751.3,349-367).
gaacattacggatattgat

SEQ ID NO: 49100 - DNA, 19 bp, Homo sapiens
  siRNA target sequence for CARS (NM_001751.3,496-514).
gaccacggatcccgataaa

SEQ ID NO: 49101 - DNA, 19 bp, Homo sapiens
  siRNA target sequence for CARS (NM_001751.3,501-519).
cggatcccgataaaaagca

SEQ ID NO: 49102 - DNA, 19 bp, Homo sapiens
  siRNA target sequence for CARS (NM_001751.3,556-574).
cacagagccacttgagaaa

SEQ ID NO: 49103 - DNA, 19 bp, Homo sapiens
  siRNA target sequence for CARS (NM_001751.3,786-804).
cccgggttagtgagtatgt

SEQ ID NO: 49104 - DNA, 19 bp, Homo sapiens
  siRNA target sequence for CARS (NM_001751.3,861-879).
ccaatgggtctgtctactt

SEQ ID NO: 49105 - DNA, 19 bp, Homo sapiens
  siRNA target sequence for CARS (NM_001751.3,862-880).
caatgggtctgtctacttt

SEQ ID NO: 49106 - DNA, 19 bp, Homo sapiens
  siRNA target sequence for CARS (NM_001751.3,868-886).
gtctgtctactttgataca

SEQ ID NO: 49107 - DNA, 19 bp, Homo sapiens
  siRNA target sequence for CARS (NM_001751.3,877-895).
ctttgatacagcgaagttt

SEQ ID NO: 49108 - DNA, 19 bp, Homo sapiens
  siRNA target sequence for CARS (NM_001751.3,881-899).
gatacagcgaagtttgctt

SEQ ID NO: 49109 - DNA, 19 bp, Homo sapiens
  siRNA target sequence for CARS (NM_001751.3,937-955).
ggccgttggagatcagaaa

SEQ ID NO: 49110 - DNA, 19 bp, Homo sapiens
  siRNA target sequence for CARS (NM_001751.3,1180-1198).
gttcccccaccatgacaat

SEQ ID NO: 49111 - DNA, 19 bp, Homo sapiens
  siRNA target sequence for CARS (NM_001751.3,1272-1290).
ccattgcaggctgcaaaat

SEQ ID NO: 49112 - DNA, 19 bp, Homo sapiens
  siRNA target sequence for CARS (NM_001751.3,1277-1295).
gcaggctgcaaaatgtcaa

SEQ ID NO: 49113 - DNA, 19 bp, Homo sapiens
  siRNA target sequence for CARS (NM_001751.3,1417-1435).
ggagtcagcgcttcaatat

SEQ ID NO: 49114 - DNA, 19 bp, Homo sapiens
  siRNA target sequence for CARS (NM_001751.3,1422-1440).
cagcgcttcaatatgagaa

SEQ ID NO: 49115 - DNA, 19 bp, Homo sapiens
  siRNA target sequence for CARS (NM_001751.3,1425-1443).
cgcttcaatatgagaagtt

SEQ ID NO: 49116 - DNA, 19 bp, Homo sapiens
  siRNA target sequence for CARS (NM_001751.3,1430-1448).
caatatgagaagttcttga

SEQ ID NO: 49117 - DNA, 19 bp, Homo sapiens
  siRNA target sequence for CARS (NM_001751.3,1605-1623).
gcaccgtcatggaagagat

SEQ ID NO: 49118 - DNA, 19 bp, Homo sapiens
  siRNA target sequence for CARS (NM_001751.3,1638-1656).
gtcagtgcaacctctatat

SEQ ID NO: 49119 - DNA, 19 bp, Homo sapiens
  siRNA target sequence for CARS (NM_001751.3,1828-1846).
ctaccttcaggtgttatca

SEQ ID NO: 49120 - DNA, 19 bp, Homo sapiens
  siRNA target sequence for CARS (NM_001751.3,1832-1850).
cttcaggtgttatcagaat

SEQ ID NO: 49121 - DNA, 19 bp, Homo sapiens
  siRNA target sequence for CARS (NM_001751.3,1882-1900).
gcaaaaagtccctgagatt

SEQ ID NO: 49122 - DNA, 19 bp, Homo sapiens
  siRNA target sequence for CARS (NM_001751.3,1942-1960).
gcttggggtgcggtttgaa

SEQ ID NO: 49123 - DNA, 19 bp, Homo sapiens
  siRNA target sequence for CARS (NM_001751.3,1994-2012).
gtagacagaaacaccttat

SEQ ID NO: 49124 - DNA, 19 bp, Homo sapiens
  siRNA target sequence for CARS (NM_001751.3,1997-2015).
gacagaaacaccttattaa

SEQ ID NO: 49125 - DNA, 19 bp, Homo sapiens
  siRNA target sequence for CARS (NM_001751.3,2126-2144).
ccccccagtgagatgttct

SEQ ID NO: 49126 - DNA, 19 bp, Homo sapiens
  siRNA target sequence for CARS (NM_001751.3,2127-2145).
cccccagtgagatgttctt

SEQ ID NO: 49127 - DNA, 19 bp, Homo sapiens
  siRNA target sequence for CARS (NM_001751.3,2135-2153).
gagatgttcttgtcagaaa

SEQ ID NO: 49128 - DNA, 19 bp, Homo sapiens
  siRNA target sequence for FARS1 (NM_006567.1,35-53).
gaggtgcccatgcatatgt

SEQ ID NO: 49129 - DNA, 19 bp, Homo sapiens
  siRNA target sequence for FARS1 (NM_006567.1,372-390).
cacgacctggcagaacttt

SEQ ID NO: 49130 - DNA, 19 bp, Homo sapiens
  siRNA target sequence for FARS1 (NM_006567.1,374-392).
cgacctggcagaactttga

SEQ ID NO: 49131 - DNA, 19 bp, Homo sapiens
  siRNA target sequence for FARS1 (NM_006567.1,426-444).
gaagaagggggacaactat

SEQ ID NO: 49132 - DNA, 19 bp, Homo sapiens
  siRNA target sequence for FARS1 (NM_006567.1,566-584).
cccagcactaccctatttt

SEQ ID NO: 49133 - DNA, 19 bp, Homo sapiens
  siRNA target sequence for FARS1 (NM_006567.1,658-676).
cagctctttgaacaaagtt

SEQ ID NO: 49134 - DNA, 19 bp, Homo sapiens
  siRNA target sequence for FARS1 (NM_006567.1,677-695).
ctcgctctgcgcataaaca

SEQ ID NO: 49135 - DNA, 19 bp, Homo sapiens
  siRNA target sequence for FARS1 (NM_006567.1,680-698).
gctctgcgcataaacaaga

SEQ ID NO: 49136 - DNA, 19 bp, Homo sapiens
  siRNA target sequence for FARS1 (NM_006567.1,716-734).
ccgtgaagcttgtagagtt

SEQ ID NO: 49137 - DNA, 19 bp, Homo sapiens
  siRNA target sequence for FARS1 (NM_006567.1,717-735).
cgtgaagcttgtagagttt

SEQ ID NO: 49138 - DNA, 19 bp, Homo sapiens
  siRNA target sequence for FARS1 (NM_006567.1,723-741).
gcttgtagagtttgatctt

SEQ ID NO: 49139 - DNA, 19 bp, Homo sapiens
  siRNA target sequence for FARS1 (NM_006567.1,724-742).
cttgtagagtttgatctta

SEQ ID NO: 49140 - DNA, 19 bp, Homo sapiens
  siRNA target sequence for FARS1 (NM_006567.1,781-799).
gatgagctggagataagat

SEQ ID NO: 49141 - DNA, 19 bp, Homo sapiens
  siRNA target sequence for FARS1 (NM_006567.1,805-823).
gactgctacttccctttta

SEQ ID NO: 49142 - DNA, 19 bp, Homo sapiens
  siRNA target sequence for FARS1 (NM_006567.1,810-828).
ctacttcccttttacacat

SEQ ID NO: 49143 - DNA, 19 bp, Homo sapiens
  siRNA target sequence for FARS1 (NM_006567.1,824-842).
cacatccttcctttgagat

SEQ ID NO: 49144 - DNA, 19 bp, Homo sapiens
  siRNA target sequence for FARS1 (NM_006567.1,884-902).
gcggggtgatggaacaaca

SEQ ID NO: 49145 - DNA, 19 bp, Homo sapiens
  siRNA target sequence for FARS1 (NM_006567.1,885-903).
cggggtgatggaacaacaa

SEQ ID NO: 49146 - DNA, 19 bp, Homo sapiens
  siRNA target sequence for FARS1 (NM_006567.1,941-959).
gggcttttggcctaggatt

SEQ ID NO: 49147 - DNA, 19 bp, Homo sapiens
  siRNA target sequence for FARS1 (NM_006567.1,942-960).
ggcttttggcctaggatta

SEQ ID NO: 49148 - DNA, 19 bp, Homo sapiens
  siRNA target sequence for FARS1 (NM_006567.1,1030-1048).
ctgaagcagttctgtgtat

SEQ ID NO: 49149 - DNA, 19 bp, Homo sapiens
  siRNA target sequence for FARS1 (NM_006567.1,1041-1059).
ctgtgtatccaacattaat

SEQ ID NO: 49150 - DNA, 19 bp, Homo sapiens
  siRNA target sequence for FARS1 (NM_006567.1,1043-1061).
gtgtatccaacattaatca

SEQ ID NO: 49151 - DNA, 19 bp, Homo sapiens
  siRNA target sequence for FARS1 (NM_006567.1,1071-1089).
gtttcagcctcttagcaaa

SEQ ID NO: 49152 - DNA, 19 bp, Homo sapiens
  siRNA target sequence for FARS1 (NM_006567.1,1093-1111).
ccggctgtgatcaatgata

SEQ ID NO: 49153 - DNA, 19 bp, Homo sapiens
  siRNA target sequence for FARS1 (NM_006567.1,1094-1112).
cggctgtgatcaatgatat

SEQ ID NO: 49154 - DNA, 19 bp, Homo sapiens
  siRNA target sequence for FARS1 (NM_006567.1,1095-1113).
ggctgtgatcaatgatatt

SEQ ID NO: 49155 - DNA, 19 bp, Homo sapiens
  siRNA target sequence for FARS1 (NM_006567.1,1121-1139).
ggttgccctctgagaatta

SEQ ID NO: 49156 - DNA, 19 bp, Homo sapiens
  siRNA target sequence for FARS1 (NM_006567.1,1161-1179).
cttagtccgaacaattgga

SEQ ID NO: 49157 - DNA, 19 bp, Homo sapiens
  siRNA target sequence for MARS (NM_004990.2,211-229).
gtgcaatctgccgatattt

SEQ ID NO: 49158 - DNA, 19 bp, Homo sapiens
  siRNA target sequence for MARS (NM_004990.2,213-231).
gcaatctgccgatattttt

SEQ ID NO: 49159 - DNA, 19 bp, Homo sapiens
  siRNA target sequence for MARS (NM_004990.2,311-329).
gtctgctgccctgtactat

SEQ ID NO: 49160 - DNA, 19 bp, Homo sapiens
  siRNA target sequence for MARS (NM_004990.2,316-334).
ctgccctgtactatttagt

SEQ ID NO: 49161 - DNA, 19 bp, Homo sapiens
  siRNA target sequence for MARS (NM_004990.2,448-466).
ctctagccgacattgtttt

SEQ ID NO: 49162 - DNA, 19 bp, Homo sapiens
  siRNA target sequence for MARS (NM_004990.2,450-468).
ctagccgacattgttttgt

SEQ ID NO: 49163 - DNA, 19 bp, Homo sapiens
  siRNA target sequence for MARS (NM_004990.2,835-853).
ccctcccttacgtcaacaa

SEQ ID NO: 49164 - DNA, 19 bp, Homo sapiens
  siRNA target sequence for MARS (NM_004990.2,836-854).
cctcccttacgtcaacaat

SEQ ID NO: 49165 - DNA, 19 bp, Homo sapiens
  siRNA target sequence for MARS (NM_004990.2,858-876).
ccccaccttgggaacatca

SEQ ID NO: 49166 - DNA, 19 bp, Homo sapiens
  siRNA target sequence for MARS (NM_004990.2,864-882).
cttgggaacatcattggtt

SEQ ID NO: 49167 - DNA, 19 bp, Homo sapiens
  siRNA target sequence for MARS (NM_004990.2,887-905).
gctcagtgccgatgtcttt

SEQ ID NO: 49168 - DNA, 19 bp, Homo sapiens
  siRNA target sequence for MARS (NM_004990.2,951-969).
gggacagatgagtatggta

SEQ ID NO: 49169 - DNA, 19 bp, Homo sapiens
  siRNA target sequence for MARS (NM_004990.2,1052-1070).
ctaccgctggtttaacatt

SEQ ID NO: 49170 - DNA, 19 bp, Homo sapiens
  siRNA target sequence for MARS (NM_004990.2,1056-1074).
cgctggtttaacatttcgt

SEQ ID NO: 49171 - DNA, 19 bp, Homo sapiens
  siRNA target sequence for MARS (NM_004990.2,1057-1075).
gctggtttaacatttcgtt

SEQ ID NO: 49172 - DNA, 19 bp, Homo sapiens
  siRNA target sequence for MARS (NM_004990.2,1058-1076).
ctggtttaacatttcgttt

SEQ ID NO: 49173 - DNA, 19 bp, Homo sapiens
  siRNA target sequence for MARS (NM_004990.2,1061-1079).
gtttaacatttcgtttgat

SEQ ID NO: 49174 - DNA, 19 bp, Homo sapiens
  siRNA target sequence for MARS (NM_004990.2,1099-1117).
ctccacagcagaccaaaat

SEQ ID NO: 49175 - DNA, 19 bp, Homo sapiens
  siRNA target sequence for MARS (NM_004990.2,1139-1157).
gttgctgaaacgaggtttt

SEQ ID NO: 49176 - DNA, 19 bp, Homo sapiens
  siRNA target sequence for MARS (NM_004990.2,1152-1170).
ggttttgtgctgcaagata

SEQ ID NO: 49177 - DNA, 19 bp, Homo sapiens
  siRNA target sequence for MARS (NM_004990.2,1360-1378).
cgagccagcacctgtttct

SEQ ID NO: 49178 - DNA, 19 bp, Homo sapiens
  siRNA target sequence for MARS (NM_004990.2,1449-1467).
cccaatgcccagtttatca

SEQ ID NO: 49179 - DNA, 19 bp, Homo sapiens
  siRNA target sequence for MARS (NM_004990.2,1491-1509).
ctcaagccacgctgcataa

SEQ ID NO: 49180 - DNA, 19 bp, Homo sapiens
  siRNA target sequence for MARS (NM_004990.2,1574-1592).
ctggtttgatgccactatt

SEQ ID NO: 49181 - DNA, 19 bp, Homo sapiens
  siRNA target sequence for MARS (NM_004990.2,1656-1674).
caagtggacctgtatcagt

SEQ ID NO: 49182 - DNA, 19 bp, Homo sapiens
  siRNA target sequence for MARS (NM_004990.2,1673-1691).
gttcatggccaaagacaat

SEQ ID NO: 49183 - DNA, 19 bp, Homo sapiens
  siRNA target sequence for MARS (NM_004990.2,1731-1749).
ggagctgaggataactata

SEQ ID NO: 49184 - DNA, 19 bp, Homo sapiens
  siRNA target sequence for MARS (NM_004990.2,1734-1752).
gctgaggataactatacct

SEQ ID NO: 49185 - DNA, 19 bp, Homo sapiens
  siRNA target sequence for MARS (NM_004990.2,1755-1773).
gtcagccacctcattgcta

SEQ ID NO: 49186 - DNA, 19 bp, Homo sapiens
  siRNA target sequence for MARS (NM_004990.2,1771-1789).
ctacagagtacctgaacta

SEQ ID NO: 49187 - DNA, 19 bp, Homo sapiens
  siRNA target sequence for MARS (NM_004990.2,1876-1894).
gcttctatctgctgtacat

SEQ ID NO: 49188 - DNA, 19 bp, Homo sapiens
  siRNA target sequence for MARS (NM_004990.2,1877-1895).
cttctatctgctgtacatt

SEQ ID NO: 49189 - DNA, 19 bp, Homo sapiens
  siRNA target sequence for MARS (NM_004990.2,1993-2011).
ctgggatgtttgtgtctaa

SEQ ID NO: 49190 - DNA, 19 bp, Homo sapiens
  siRNA target sequence for MARS (NM_004990.2,2141-2159).
cagtatcctcaccatatct

SEQ ID NO: 49191 - DNA, 19 bp, Homo sapiens
  siRNA target sequence for MARS (NM_004990.2,2158-2176).
ctcgacatggcaaccaata

SEQ ID NO: 49192 - DNA, 19 bp, Homo sapiens
  siRNA target sequence for MARS (NM_004990.2,2160-2178).
cgacatggcaaccaatata

SEQ ID NO: 49193 - DNA, 19 bp, Homo sapiens
  siRNA target sequence for MARS (NM_004990.2,2356-2374).
gcagtatcctgctgacaaa

SEQ ID NO: 49194 - DNA, 19 bp, Homo sapiens
  siRNA target sequence for MARS (NM_004990.2,2415-2433).
gtcagtcccttgttccaaa

SEQ ID NO: 49195 - DNA, 19 bp, Homo sapiens
  siRNA target sequence for MARS (NM_004990.2,2498-2516).
cccgaagccagcagttgta

SEQ ID NO: 49196 - DNA, 19 bp, Homo sapiens
  siRNA target sequence for MARS (NM_004990.2,2508-2526).
gcagttgtagagactgtta

SEQ ID NO: 49197 - DNA, 19 bp, Homo sapiens
  siRNA target sequence for MARS (NM_004990.2,2643-2661).
gcgaaactcttggatctaa

SEQ ID NO: 49198 - DNA, 19 bp, Homo sapiens
  siRNA target sequence for MARS (NM_004990.2,2644-2662).
cgaaactcttggatctaaa

SEQ ID NO: 49199 - DNA, 19 bp, Homo sapiens
  siRNA target sequence for SCYE1 (NM_004757.1,93-111).
gtgcagaggcagatcaaat

SEQ ID NO: 49200 - DNA, 19 bp, Homo sapiens
  siRNA target sequence for SCYE1 (NM_004757.1,96-114).
cagaggcagatcaaatcat

SEQ ID NO: 49201 - DNA, 19 bp, Homo sapiens
  siRNA target sequence for SCYE1 (NM_004757.1,102-120).
cagatcaaatcattgaata

SEQ ID NO: 49202 - DNA, 19 bp, Homo sapiens
  siRNA target sequence for SCYE1 (NM_004757.1,307-325).
gcacgctaattctatggtt

SEQ ID NO: 49203 - DNA, 19 bp, Homo sapiens
  siRNA target sequence for SCYE1 (NM_004757.1,308-326).
cacgctaattctatggttt

SEQ ID NO: 49204 - DNA, 19 bp, Homo sapiens
  siRNA target sequence for SCYE1 (NM_004757.1,341-359).
cagtctacagcagtaacaa

SEQ ID NO: 49205 - DNA, 19 bp, Homo sapiens
  siRNA target sequence for SCYE1 (NM_004757.1,361-379).
cgtatcttctggtaccaaa

SEQ ID NO: 49206 - DNA, 19 bp, Homo sapiens
  siRNA target sequence for SCYE1 (NM_004757.1,369-387).
ctggtaccaaagaacagat

SEQ ID NO: 49207 - DNA, 19 bp, Homo sapiens
  siRNA target sequence for SCYE1 (NM_004757.1,371-389).
ggtaccaaagaacagataa

SEQ ID NO: 49208 - DNA, 19 bp, Homo sapiens
  siRNA target sequence for SCYE1 (NM_004757.1,483-501).
ccgactctaagccaataga

SEQ ID NO: 49209 - DNA, 19 bp, Homo sapiens
  siRNA target sequence for SCYE1 (NM_004757.1,507-525).
cccgtctggatcttcgaat

SEQ ID NO: 49210 - DNA, 19 bp, Homo sapiens
  siRNA target sequence for SCYE1 (NM_004757.1,508-526).
ccgtctggatcttcgaatt

SEQ ID NO: 49211 - DNA, 19 bp, Homo sapiens
  siRNA target sequence for SCYE1 (NM_004757.1,512-530).
ctggatcttcgaattggtt

SEQ ID NO: 49212 - DNA, 19 bp, Homo sapiens
  siRNA target sequence for SCYE1 (NM_004757.1,521-539).
cgaattggttgcatcataa

SEQ ID NO: 49213 - DNA, 19 bp, Homo sapiens
  siRNA target sequence for SCYE1 (NM_004757.1,531-549).
gcatcataactgctagaaa

SEQ ID NO: 49214 - DNA, 19 bp, Homo sapiens
  siRNA target sequence for SCYE1 (NM_004757.1,532-550).
catcataactgctagaaaa

SEQ ID NO: 49215 - DNA, 19 bp, Homo sapiens
  siRNA target sequence for SCYE1 (NM_004757.1,696-714).
caaagatgaggggagtatt

SEQ ID NO: 49216 - DNA, 19 bp, Homo sapiens
  siRNA target sequence for SCYE1 (NM_004757.1,700-718).
gatgaggggagtattatct

SEQ ID NO: 49217 - DNA, 19 bp, Homo sapiens
  siRNA target sequence for SCYE1 (NM_004757.1,727-745).
ggtcatgtgtgctagttca

SEQ ID NO: 49218 - DNA, 19 bp, Homo sapiens
  siRNA target sequence for SCYE1 (NM_004757.1,744-762).
caccagagaaaattgaaat

SEQ ID NO: 49219 - DNA, 19 bp, Homo sapiens
  siRNA target sequence for SLA/LP (NM_016955.1,21-39).
cttctggagaaggttcatt

SEQ ID NO: 49220 - DNA, 19 bp, Homo sapiens
  siRNA target sequence for SLA/LP (NM_016955.1,88-106).
gcaggctctagccttttga

SEQ ID NO: 49221 - DNA, 19 bp, Homo sapiens
  siRNA target sequence for SLA/LP (NM_016955.1,89-107).
caggctctagccttttgaa

SEQ ID NO: 49222 - DNA, 19 bp, Homo sapiens
  siRNA target sequence for SLA/LP (NM_016955.1,92-110).
gctctagccttttgaacaa

SEQ ID NO: 49223 - DNA, 19 bp, Homo sapiens
  siRNA target sequence for SLA/LP (NM_016955.1,147-165).
ggctggtgtccatacagta

SEQ ID NO: 49224 - DNA, 19 bp, Homo sapiens
  siRNA target sequence for SLA/LP (NM_016955.1,190-208).
gcaactggtatgagtctaa

SEQ ID NO: 49225 - DNA, 19 bp, Homo sapiens
  siRNA target sequence for SLA/LP (NM_016955.1,205-223).
ctaactctgtgtttcttaa

SEQ ID NO: 49226 - DNA, 19 bp, Homo sapiens
  siRNA target sequence for SLA/LP (NM_016955.1,213-231).
gtgtttcttaacattacga

SEQ ID NO: 49227 - DNA, 19 bp, Homo sapiens
  siRNA target sequence for SLA/LP (NM_016955.1,239-257).
gaccaaaggcaaagtatat

SEQ ID NO: 49228 - DNA, 19 bp, Homo sapiens
  siRNA target sequence for SLA/LP (NM_016955.1,241-259).
ccaaaggcaaagtatatta

SEQ ID NO: 49229 - DNA, 19 bp, Homo sapiens
  siRNA target sequence for SLA/LP (NM_016955.1,297-315).
catgatcactgcaggtttt

SEQ ID NO: 49230 - DNA, 19 bp, Homo sapiens
  siRNA target sequence for SLA/LP (NM_016955.1,404-422).
ctgattgcattctgtgtat

SEQ ID NO: 49231 - DNA, 19 bp, Homo sapiens
  siRNA target sequence for SLA/LP (NM_016955.1,448-466).
ccaagggtgcctgatagat

SEQ ID NO: 49232 - DNA, 19 bp, Homo sapiens
  siRNA target sequence for SLA/LP (NM_016955.1,529-547).
ggagtgcagtcttcaaagt

SEQ ID NO: 49233 - DNA, 19 bp, Homo sapiens
  siRNA target sequence for SLA/LP (NM_016955.1,532-550).
gtgcagtcttcaaagtgta

SEQ ID NO: 49234 - DNA, 19 bp, Homo sapiens
  siRNA target sequence for SLA/LP (NM_016955.1,569-587).
gggctcgagttggtagaat

SEQ ID NO: 49235 - DNA, 19 bp, Homo sapiens
  siRNA target sequence for SLA/LP (NM_016955.1,570-588).
ggctcgagttggtagaata

SEQ ID NO: 49236 - DNA, 19 bp, Homo sapiens
  siRNA target sequence for SLA/LP (NM_016955.1,572-590).
ctcgagttggtagaataga

SEQ ID NO: 49237 - DNA, 19 bp, Homo sapiens
  siRNA target sequence for SLA/LP (NM_016955.1,584-602).
gaatagatgcttttgttca

SEQ ID NO: 49238 - DNA, 19 bp, Homo sapiens
  siRNA target sequence for SLA/LP (NM_016955.1,605-623).
gcttggacaaaaattttat

SEQ ID NO: 49239 - DNA, 19 bp, Homo sapiens
  siRNA target sequence for SLA/LP (NM_016955.1,628-646).
ccagtaggtggtgctataa

SEQ ID NO: 49240 - DNA, 19 bp, Homo sapiens
  siRNA target sequence for SLA/LP (NM_016955.1,629-647).
cagtaggtggtgctataat

SEQ ID NO: 49241 - DNA, 19 bp, Homo sapiens
  siRNA target sequence for SLA/LP (NM_016955.1,649-667).
gctggctttaatgattcat

SEQ ID NO: 49242 - DNA, 19 bp, Homo sapiens
  siRNA target sequence for SLA/LP (NM_016955.1,710-728).
cttcaccttctttagatgt

SEQ ID NO: 49243 - DNA, 19 bp, Homo sapiens
  siRNA target sequence for SLA/LP (NM_016955.1,760-778).
ggctataagaagctactaa

SEQ ID NO: 49244 - DNA, 19 bp, Homo sapiens
  siRNA target sequence for SLA/LP (NM_016955.1,852-870).
gttgcatacacctcacaat

SEQ ID NO: 49245 - DNA, 19 bp, Homo sapiens
  siRNA target sequence for SLA/LP (NM_016955.1,862-880).
cctcacaatcccatatctt

SEQ ID NO: 49246 - DNA, 19 bp, Homo sapiens
  siRNA target sequence for SLA/LP (NM_016955.1,867-885).
caatcccatatctttagct

SEQ ID NO: 49247 - DNA, 19 bp, Homo sapiens
  siRNA target sequence for SLA/LP (NM_016955.1,873-891).
catatctttagctatgaca

SEQ ID NO: 49248 - DNA, 19 bp, Homo sapiens
  siRNA target sequence for SLA/LP (NM_016955.1,934-952).
cttggctcgatgcttttta

SEQ ID NO: 49249 - DNA, 19 bp, Homo sapiens
  siRNA target sequence for SLA/LP (NM_016955.1,937-955).
ggctcgatgctttttacca

SEQ ID NO: 49250 - DNA, 19 bp, Homo sapiens
  siRNA target sequence for SLA/LP (NM_016955.1,982-1000).
cctcttgggtccatgcaaa

SEQ ID NO: 49251 - DNA, 19 bp, Homo sapiens
  siRNA target sequence for SLA/LP (NM_016955.1,1001-1019).
ctgtgagtggctatacttt

SEQ ID NO: 49252 - DNA, 19 bp, Homo sapiens
  siRNA target sequence for SLA/LP (NM_016955.1,1003-1021).
gtgagtggctatactttca

SEQ ID NO: 49253 - DNA, 19 bp, Homo sapiens
  siRNA target sequence for SLA/LP (NM_016955.1,1073-1091).
catcagccatcggaatgaa

SEQ ID NO: 49254 - DNA, 19 bp, Homo sapiens
  siRNA target sequence for SLA/LP (NM_153825.1,244-262).
gttgctcgtcgtcattaca

SEQ ID NO: 49255 - DNA, 19 bp, Homo sapiens
  siRNA target sequence for SLA/LP (NM_153825.1,254-272).
gtcattacaggttcattca

SEQ ID NO: 49256 - DNA, 19 bp, Homo sapiens
  siRNA target sequence for SLA/LP (NM_153825.1,1350-1368).
gagacttgacaggtgttta

SEQ ID NO: 49257 - DNA, 19 bp, Homo sapiens
  siRNA target sequence for YARS (NM_003680.2,802-820).
ccagccctgaagagaaact

SEQ ID NO: 49258 - DNA, 19 bp, Homo sapiens
  siRNA target sequence for YARS (NM_003680.2,931-949).
cacatgtggcttactttgt

SEQ ID NO: 49259 - DNA, 19 bp, Homo sapiens
  siRNA target sequence for YARS (NM_003680.2,981-999).
gcagggtgtgaggtaacaa

SEQ ID NO: 49260 - DNA, 19 bp, Homo sapiens
  siRNA target sequence for YARS (NM_003680.2,1021-1039).
catacctggataacatgaa

SEQ ID NO: 49261 - DNA, 19 bp, Homo sapiens
  siRNA target sequence for YARS (NM_003680.2,1042-1060).
ccccatgggaacttctaga

SEQ ID NO: 49262 - DNA, 19 bp, Homo sapiens
  siRNA target sequence for YARS (NM_003680.2,1059-1077).
gaactccgagtcagttact

SEQ ID NO: 49263 - DNA, 19 bp, Homo sapiens
  siRNA target sequence for YARS (NM_003680.2,1076-1094).
ctatgagaatgtgatcaaa

SEQ ID NO: 49264 - DNA, 19 bp, Homo sapiens
  siRNA target sequence for YARS (NM_003680.2,1080-1098).
gagaatgtgatcaaagcaa

SEQ ID NO: 49265 - DNA, 19 bp, Homo sapiens
  siRNA target sequence for YARS (NM_003680.2,1289-1307).
cggactgcaggctttggat

SEQ ID NO: 49266 - DNA, 19 bp, Homo sapiens
  siRNA target sequence for YARS (NM_003680.2,1298-1316).
ggctttggatgaagagtat

SEQ ID NO: 49267 - DNA, 19 bp, Homo sapiens
  siRNA target sequence for YARS (NM_003680.2,1385-1403).
ccctgcacttggctattca

SEQ ID NO: 49268 - DNA, 19 bp, Homo sapiens
  siRNA target sequence for YARS (NM_003680.2,1386-1404).
cctgcacttggctattcaa

SEQ ID NO: 49269 - DNA, 19 bp, Homo sapiens
  siRNA target sequence for YARS (NM_003680.2,1402-1420).
caaaacgggtccatctgat

SEQ ID NO: 49270 - DNA, 19 bp, Homo sapiens
  siRNA target sequence for YARS (NM_003680.2,1410-1428).
gtccatctgatgaatccta

SEQ ID NO: 49271 - DNA, 19 bp, Homo sapiens
  siRNA target sequence for YARS (NM_003680.2,1451-1469).
caaaatgagctcttcagaa

SEQ ID NO: 49272 - DNA, 19 bp, Homo sapiens
  siRNA target sequence for YARS (NM_003680.2,1577-1595).
catcaagcatgtccttttt

SEQ ID NO: 49273 - DNA, 19 bp, Homo sapiens
  siRNA target sequence for YARS (NM_003680.2,1587-1605).
gtcctttttccccttaagt

SEQ ID NO: 49274 - DNA, 19 bp, Homo sapiens
  siRNA target sequence for YARS (NM_003680.2,1597-1615).
cccttaagtccgagtttgt

SEQ ID NO: 49275 - DNA, 19 bp, Homo sapiens
  siRNA target sequence for YARS (NM_003680.2,1616-1634).
gatcctacgagatgagaaa

SEQ ID NO: 49276 - DNA, 19 bp, Homo sapiens
  siRNA target sequence for YARS (NM_003680.2,1660-1678).
cttacgtggacctggaaaa

SEQ ID NO: 49277 - DNA, 19 bp, Homo sapiens
  siRNA target sequence for YARS (NM_003680.2,1899-1917).
cgtgtggggaaaatcatca

SEQ ID NO: 49278 - DNA, 19 bp, Homo sapiens
  siRNA target sequence for YARS (NM_003680.2,1945-1963).
gcctgtatgtagagaagat

SEQ ID NO: 49279 - DNA, 19 bp, Homo sapiens
  siRNA target sequence for YARS (NM_003680.2,2116-2134).
cttctatagaagggataaa

SEQ ID NO: 49280 - DNA, 19 bp, Homo sapiens
  siRNA target sequence for YARS (NM_003680.2,2176-2194).
ctggtgagcacgtgtttgt

SEQ ID NO: 49281 - DNA, 19 bp, Homo sapiens
  siRNA target sequence for YARS (NM_003680.2,2178-2196).
ggtgagcacgtgtttgtga

SEQ ID NO: 49282 - DNA, 19 bp, Homo sapiens
  siRNA target sequence for YARS (NM_003680.2,2179-2197).
gtgagcacgtgtttgtgaa

SEQ ID NO: 49283 - DNA, 19 bp, Homo sapiens
  siRNA target sequence for YARS (NM_003680.2,2189-2207).
gtttgtgaagggctatgaa

SEQ ID NO: 49284 - DNA, 19 bp, Homo sapiens
  siRNA target sequence for YARS (NM_003680.2,2258-2276).
gttgcaggctgacttcaaa

SEQ ID NO: 49285 - DNA, 19 bp, Homo sapiens
  siRNA target sequence for RPL11 (NM_000975.2,25-43).
cgcaggatcaaggtgaaaa

SEQ ID NO: 49286 - DNA, 19 bp, Homo sapiens
  siRNA target sequence for RPL11 (NM_000975.2,153-171).
gggcagacccctgtgtttt

SEQ ID NO: 49287 - DNA, 19 bp, Homo sapiens
  siRNA target sequence for RPL11 (NM_000975.2,197-215).
ctttggcatccggagaaat

SEQ ID NO: 49288 - DNA, 19 bp, Homo sapiens
  siRNA target sequence for RPL5 (NM_000969.2,222-240).
cgtgtgacaaacagagata

SEQ ID NO: 49289 - DNA, 19 bp, Homo sapiens
  siRNA target sequence for RPL5 (NM_000969.2,225-243).
gtgacaaacagagatatca

SEQ ID NO: 49290 - DNA, 19 bp, Homo sapiens
  siRNA target sequence for RPL5 (NM_000969.2,227-245).
gacaaacagagatatcatt

SEQ ID NO: 49291 - DNA, 19 bp, Homo sapiens
  siRNA target sequence for RPS11 (NM_001015.3,259-277).
gccccttcactggtaatgt

SEQ ID NO: 49292 - DNA, 19 bp, Homo sapiens
  siRNA target sequence for EIF4EL3 (NM_004846.1,26-44).
gttcgacgctttgaaagat

SEQ ID NO: 49293 - DNA, 19 bp, Homo sapiens
  siRNA target sequence for EIF4EL3 (NM_004846.1,29-47).
cgacgctttgaaagatgat

SEQ ID NO: 49294 - DNA, 19 bp, Homo sapiens
  siRNA target sequence for EIF4EL3 (NM_004846.1,52-70).
gtggggaccatgatcagaa

SEQ ID NO: 49295 - DNA, 19 bp, Homo sapiens
  siRNA target sequence for EIF4EL3 (NM_004846.1,55-73).
gggaccatgatcagaatga

SEQ ID NO: 49296 - DNA, 19 bp, Homo sapiens
  siRNA target sequence for EIF4EL3 (NM_004846.1,114-132).
gaacgagacaagaatcaga

SEQ ID NO: 49297 - DNA, 19 bp, Homo sapiens
  siRNA target sequence for EIF4EL3 (NM_004846.1,174-192).
catcccctgcagtacaact

SEQ ID NO: 49298 - DNA, 19 bp, Homo sapiens
  siRNA target sequence for EIF4EL3 (NM_004846.1,180-198).
ctgcagtacaactacactt

SEQ ID NO: 49299 - DNA, 19 bp, Homo sapiens
  siRNA target sequence for EIF4EL3 (NM_004846.1,182-200).
gcagtacaactacactttt

SEQ ID NO: 49300 - DNA, 19 bp, Homo sapiens
  siRNA target sequence for EIF4EL3 (NM_004846.1,183-201).
cagtacaactacacttttt

SEQ ID NO: 49301 - DNA, 19 bp, Homo sapiens
  siRNA target sequence for EIF4EL3 (NM_004846.1,233-251).
gagctcacagagctatgaa

SEQ ID NO: 49302 - DNA, 19 bp, Homo sapiens
  siRNA target sequence for EIF4EL3 (NM_004846.1,235-253).
gctcacagagctatgaaca

SEQ ID NO: 49303 - DNA, 19 bp, Homo sapiens
  siRNA target sequence for EIF4EL3 (NM_004846.1,244-262).
gctatgaacagaatatcaa

SEQ ID NO: 49304 - DNA, 19 bp, Homo sapiens
  siRNA target sequence for EIF4EL3 (NM_004846.1,290-308).
gcagttctggaggttttat

SEQ ID NO: 49305 - DNA, 19 bp, Homo sapiens
  siRNA target sequence for EIF4EL3 (NM_004846.1,448-466).
cccgttgctgggagaatct

SEQ ID NO: 49306 - DNA, 19 bp, Homo sapiens
  siRNA target sequence for EIF4EL3 (NM_004846.1,450-468).
cgttgctgggagaatctca

SEQ ID NO: 49307 - DNA, 19 bp, Homo sapiens
  siRNA target sequence for EIF4EL3 (NM_004846.1,542-560).
ggaagacattatttcaata

SEQ ID NO: 49308 - DNA, 19 bp, Homo sapiens
  siRNA target sequence for EIF4EL3 (NM_004846.1,543-561).
gaagacattatttcaatat

SEQ ID NO: 49309 - DNA, 19 bp, Homo sapiens
  siRNA target sequence for EIF4EL3 (NM_004846.1,610-628).
cacttcggcgagtgcttaa

SEQ ID NO: 49310 - DNA, 19 bp, Homo sapiens
  siRNA target sequence for EIF4EL3 (NM_004846.1,634-652).
ctcccaacaccattatgga

SEQ ID NO: 49311 - DNA, 19 bp, Homo sapiens
  siRNA target sequence for EIF4EL3 (NM_004846.1,636-654).
cccaacaccattatggaat

SEQ ID NO: 49312 - DNA, 19 bp, Homo sapiens
  siRNA target sequence for EIF4EL3 (NM_004846.1,637-655).
ccaacaccattatggaata

SEQ ID NO: 49313 - DNA, 19 bp, Homo sapiens
  siRNA target sequence for EIF4EL3 (NM_004846.1,663-681).
cacaccgacagcatcaaaa

SEQ ID NO: 49314 - DNA, 19 bp, Homo sapiens
  siRNA target sequence for EIF4G3 (NM_003760.2,276-294).
cccgttctccgtttttcca

SEQ ID NO: 49315 - DNA, 19 bp, Homo sapiens
  siRNA target sequence for EIF4G3 (NM_003760.2,375-393).
cagtgtaccaggctaatca

SEQ ID NO: 49316 - DNA, 19 bp, Homo sapiens
  siRNA target sequence for EIF4G3 (NM_003760.2,440-458).
caggggcctcagtactgta

SEQ ID NO: 49317 - DNA, 19 bp, Homo sapiens
  siRNA target sequence for EIF4G3 (NM_003760.2,442-460).
ggggcctcagtactgtata

SEQ ID NO: 49318 - DNA, 19 bp, Homo sapiens
  siRNA target sequence for EIF4G3 (NM_003760.2,575-593).
gcttatggaacgccttttt

SEQ ID NO: 49319 - DNA, 19 bp, Homo sapiens
  siRNA target sequence for EIF4G3 (NM_003760.2,597-615).
caagtcagccggtgtatca

SEQ ID NO: 49320 - DNA, 19 bp, Homo sapiens
  siRNA target sequence for EIF4G3 (NM_003760.2,998-1016).
ggccagacatctgaaacta

SEQ ID NO: 49321 - DNA, 19 bp, Homo sapiens
  siRNA target sequence for EIF4G3 (NM_003760.2,1010-1028).
gaaactactgcaatagtat

SEQ ID NO: 49322 - DNA, 19 bp, Homo sapiens
  siRNA target sequence for EIF4G3 (NM_003760.2,1074-1092).
ctgttgctcgaagtacaat

SEQ ID NO: 49323 - DNA, 19 bp, Homo sapiens
  siRNA target sequence for EIF4G3 (NM_003760.2,1113-1131).
ctcttagtagccaaccaat

SEQ ID NO: 49324 - DNA, 19 bp, Homo sapiens
  siRNA target sequence for EIF4G3 (NM_003760.2,1170-1188).
ccccaagagaagacacaat

SEQ ID NO: 49325 - DNA, 19 bp, Homo sapiens
  siRNA target sequence for EIF4G3 (NM_003760.2,1229-1247).
cctttaccaacaaatgaaa

SEQ ID NO: 49326 - DNA, 19 bp, Homo sapiens
  siRNA target sequence for EIF4G3 (NM_003760.2,1264-1282).
caagaaaccctgtagtgta

SEQ ID NO: 49327 - DNA, 19 bp, Homo sapiens
  siRNA target sequence for EIF4G3 (NM_003760.2,1275-1293).
gtagtgtagcacctaatga

SEQ ID NO: 49328 - DNA, 19 bp, Homo sapiens
  siRNA target sequence for EIF4G3 (NM_003760.2,1278-1296).
gtgtagcacctaatgatat

SEQ ID NO: 49329 - DNA, 19 bp, Homo sapiens
  siRNA target sequence for EIF4G3 (NM_003760.2,1299-1317).
cactggtttctagtactaa

SEQ ID NO: 49330 - DNA, 19 bp, Homo sapiens
  siRNA target sequence for EIF4G3 (NM_003760.2,1303-1321).
ggtttctagtactaaccta

SEQ ID NO: 49331 - DNA, 19 bp, Homo sapiens
  siRNA target sequence for EIF4G3 (NM_003760.2,1304-1322).
gtttctagtactaacctaa

SEQ ID NO: 49332 - DNA, 19 bp, Homo sapiens
  siRNA target sequence for EIF4G3 (NM_003760.2,1311-1329).
gtactaacctaattaatga

SEQ ID NO: 49333 - DNA, 19 bp, Homo sapiens
  siRNA target sequence for EIF4G3 (NM_003760.2,1390-1408).
ggaagtattgccattgact

SEQ ID NO: 49334 - DNA, 19 bp, Homo sapiens
  siRNA target sequence for EIF4G3 (NM_003760.2,1615-1633).
ggaggacgagagcataaga

SEQ ID NO: 49335 - DNA, 19 bp, Homo sapiens
  siRNA target sequence for EIF4G3 (NM_003760.2,1618-1636).
ggacgagagcataagaact

SEQ ID NO: 49336 - DNA, 19 bp, Homo sapiens
  siRNA target sequence for EIF4G3 (NM_003760.2,1619-1637).
gacgagagcataagaactt

SEQ ID NO: 49337 - DNA, 19 bp, Homo sapiens
  siRNA target sequence for EIF4G3 (NM_003760.2,1711-1729).
ggattctcaaaacttaaat

SEQ ID NO: 49338 - DNA, 19 bp, Homo sapiens
  siRNA target sequence for EIF4G3 (NM_003760.2,1741-1759).
ccctgtcccagctcaaata

SEQ ID NO: 49339 - DNA, 19 bp, Homo sapiens
  siRNA target sequence for EIF4G3 (NM_003760.2,1745-1763).
gtcccagctcaaatagcta

SEQ ID NO: 49340 - DNA, 19 bp, Homo sapiens
  siRNA target sequence for EIF4G3 (NM_003760.2,1747-1765).
cccagctcaaatagctata

SEQ ID NO: 49341 - DNA, 19 bp, Homo sapiens
  siRNA target sequence for EIF4G3 (NM_003760.2,1748-1766).
ccagctcaaatagctataa

SEQ ID NO: 49342 - DNA, 19 bp, Homo sapiens
  siRNA target sequence for EIF4G3 (NM_003760.2,1923-1941).
gagacccctctgacctaaa

SEQ ID NO: 49343 - DNA, 19 bp, Homo sapiens
  siRNA target sequence for EIF4G3 (NM_003760.2,2060-2078).
gatggggttacatttccat

SEQ ID NO: 49344 - DNA, 19 bp, Homo sapiens
  siRNA target sequence for EIF4G3 (NM_003760.2,2092-2110).
ctggaagcctactgatact

SEQ ID NO: 49345 - DNA, 19 bp, Homo sapiens
  siRNA target sequence for EIF4G3 (NM_003760.2,2100-2118).
ctactgatactgaaggtaa

SEQ ID NO: 49346 - DNA, 19 bp, Homo sapiens
  siRNA target sequence for EIF4G3 (NM_003760.2,2103-2121).
ctgatactgaaggtaagaa

SEQ ID NO: 49347 - DNA, 19 bp, Homo sapiens
  siRNA target sequence for EIF4G3 (NM_003760.2,2158-2176).
catgcctgcctgtatacaa

SEQ ID NO: 49348 - DNA, 19 bp, Homo sapiens
  siRNA target sequence for EIF4G3 (NM_003760.2,2207-2225).
gtggttcttgacaagatca

SEQ ID NO: 49349 - DNA, 19 bp, Homo sapiens
  siRNA target sequence for EIF4G3 (NM_003760.2,2250-2268).
ctctggatcctcgaatttt

SEQ ID NO: 49350 - DNA, 19 bp, Homo sapiens
  siRNA target sequence for EIF4G3 (NM_003760.2,2269-2287).
gcctcgaggaccagacttt

SEQ ID NO: 49351 - DNA, 19 bp, Homo sapiens
  siRNA target sequence for EIF4G3 (NM_003760.2,2270-2288).
cctcgaggaccagacttta

SEQ ID NO: 49352 - DNA, 19 bp, Homo sapiens
  siRNA target sequence for EIF4G3 (NM_003760.2,2325-2343).
gtggaagaggcgtaccttt

SEQ ID NO: 49353 - DNA, 19 bp, Homo sapiens
  siRNA target sequence for EIF4G3 (NM_003760.2,2331-2349).
gaggcgtacctttgttgaa

SEQ ID NO: 49354 - DNA, 19 bp, Homo sapiens
  siRNA target sequence for EIF4G3 (NM_003760.2,2334-2352).
gcgtacctttgttgaatgt

SEQ ID NO: 49355 - DNA, 19 bp, Homo sapiens
  siRNA target sequence for EIF4G3 (NM_003760.2,2335-2353).
cgtacctttgttgaatgtt

SEQ ID NO: 49356 - DNA, 19 bp, Homo sapiens
  siRNA target sequence for EIF4G3 (NM_003760.2,2398-2416).
gatcatcacagtttctgta

SEQ ID NO: 49357 - DNA, 19 bp, Homo sapiens
  siRNA target sequence for EIF4G3 (NM_003760.2,2455-2473).
gaagccaagccaaaaacga

SEQ ID NO: 49358 - DNA, 19 bp, Homo sapiens
  siRNA target sequence for EIF4G3 (NM_003760.2,2483-2501).
gccgatgatcccgaaaaca

SEQ ID NO: 49359 - DNA, 19 bp, Homo sapiens
  siRNA target sequence for EIF4G3 (NM_003760.2,2484-2502).
ccgatgatcccgaaaacat

SEQ ID NO: 49360 - DNA, 19 bp, Homo sapiens
  siRNA target sequence for EIF4G3 (NM_003760.2,2485-2503).
cgatgatcccgaaaacatt

SEQ ID NO: 49361 - DNA, 19 bp, Homo sapiens
  siRNA target sequence for EIF4G3 (NM_003760.2,2486-2504).
gatgatcccgaaaacatta

SEQ ID NO: 49362 - DNA, 19 bp, Homo sapiens
  siRNA target sequence for EIF4G3 (NM_003760.2,2489-2507).
gatcccgaaaacattaaaa

SEQ ID NO: 49363 - DNA, 19 bp, Homo sapiens
  siRNA target sequence for EIF4G3 (NM_003760.2,2551-2569).
gacaccacagatgttcaat

SEQ ID NO: 49364 - DNA, 19 bp, Homo sapiens
  siRNA target sequence for EIF4G3 (NM_003760.2,2553-2571).
caccacagatgttcaatca

SEQ ID NO: 49365 - DNA, 19 bp, Homo sapiens
  siRNA target sequence for EIF4G3 (NM_003760.2,2581-2599).
gcaagtgtcaggacttact

SEQ ID NO: 49366 - DNA, 19 bp, Homo sapiens
  siRNA target sequence for EIF4G3 (NM_003760.2,2641-2659).
ctttgagaaggctattgat

SEQ ID NO: 49367 - DNA, 19 bp, Homo sapiens
  siRNA target sequence for EIF4G3 (NM_003760.2,2673-2691).
ctgtggcttacgcaaacat

SEQ ID NO: 49368 - DNA, 19 bp, Homo sapiens
  siRNA target sequence for EIF4G3 (NM_003760.2,2675-2693).
gtggcttacgcaaacatgt

SEQ ID NO: 49369 - DNA, 19 bp, Homo sapiens
  siRNA target sequence for EIF4G3 (NM_003760.2,2689-2707).
catgtgtcgatgtctagta

SEQ ID NO: 49370 - DNA, 19 bp, Homo sapiens
  siRNA target sequence for EIF4G3 (NM_003760.2,2700-2718).
gtctagtaacgctgaaagt

SEQ ID NO: 49371 - DNA, 19 bp, Homo sapiens
  siRNA target sequence for EIF4G3 (NM_003760.2,2919-2937).
gatccattggcaacatcaa

SEQ ID NO: 49372 - DNA, 19 bp, Homo sapiens
  siRNA target sequence for EIF4G3 (NM_003760.2,3096-3114).
cacgtatggaccagtactt

SEQ ID NO: 49373 - DNA, 19 bp, Homo sapiens
  siRNA target sequence for EIF4G3 (NM_003760.2,3098-3116).
cgtatggaccagtacttta

SEQ ID NO: 49374 - DNA, 19 bp, Homo sapiens
  siRNA target sequence for EIF4G3 (NM_003760.2,3099-3117).
gtatggaccagtactttaa

SEQ ID NO: 49375 - DNA, 19 bp, Homo sapiens
  siRNA target sequence for EIF4G3 (NM_003760.2,3104-3122).
gaccagtactttaatcaga

SEQ ID NO: 49376 - DNA, 19 bp, Homo sapiens
  siRNA target sequence for EIF4G3 (NM_003760.2,3166-3184).
gttcatgcttcaagatgtt

SEQ ID NO: 49377 - DNA, 19 bp, Homo sapiens
  siRNA target sequence for EIF4G3 (NM_003760.2,3169-3187).
catgcttcaagatgttata

SEQ ID NO: 49378 - DNA, 19 bp, Homo sapiens
  siRNA target sequence for EIF4G3 (NM_003760.2,3188-3206).
gacctaaggctgtgcaatt

SEQ ID NO: 49379 - DNA, 19 bp, Homo sapiens
  siRNA target sequence for EIF4G3 (NM_003760.2,3221-3239).
gcagatcaagggcctaaaa

SEQ ID NO: 49380 - DNA, 19 bp, Homo sapiens
  siRNA target sequence for EIF4G3 (NM_003760.2,3224-3242).
gatcaagggcctaaaacta

SEQ ID NO: 49381 - DNA, 19 bp, Homo sapiens
  siRNA target sequence for EIF4G3 (NM_003760.2,3240-3258).
ctatcgaacagattcacaa

SEQ ID NO: 49382 - DNA, 19 bp, Homo sapiens
  siRNA target sequence for EIF4G3 (NM_003760.2,3391-3409).
ggtactggacccctcaaaa

SEQ ID NO: 49383 - DNA, 19 bp, Homo sapiens
  siRNA target sequence for EIF4G3 (NM_003760.2,3421-3439).
cactaagcctacaattgat

SEQ ID NO: 49384 - DNA, 19 bp, Homo sapiens
  siRNA target sequence for EIF4G3 (NM_003760.2,3532-3550).
gtcaagtgcttccagttta

SEQ ID NO: 49385 - DNA, 19 bp, Homo sapiens
  siRNA target sequence for EIF4G3 (NM_003760.2,3534-3552).
caagtgcttccagtttaaa

SEQ ID NO: 49386 - DNA, 19 bp, Homo sapiens
  siRNA target sequence for EIF4G3 (NM_003760.2,3597-3615).
catccacgcctgtagagtt

SEQ ID NO: 49387 - DNA, 19 bp, Homo sapiens
  siRNA target sequence for EIF4G3 (NM_003760.2,3600-3618).
ccacgcctgtagagtttga

SEQ ID NO: 49388 - DNA, 19 bp, Homo sapiens
  siRNA target sequence for EIF4G3 (NM_003760.2,3617-3635).
gattcccgaaggaccttaa

SEQ ID NO: 49389 - DNA, 19 bp, Homo sapiens
  siRNA target sequence for EIF4G3 (NM_003760.2,3686-3704).
gcaacagctcggccaaata

SEQ ID NO: 49390 - DNA, 19 bp, Homo sapiens
  siRNA target sequence for EIF4G3 (NM_003760.2,3693-3711).
ctcggccaaatactttcat

SEQ ID NO: 49391 - DNA, 19 bp, Homo sapiens
  siRNA target sequence for EIF4G3 (NM_003760.2,3695-3713).
cggccaaatactttcatga

SEQ ID NO: 49392 - DNA, 19 bp, Homo sapiens
  siRNA target sequence for EIF4G3 (NM_003760.2,3726-3744).
gtaaagacctgctagacaa

SEQ ID NO: 49393 - DNA, 19 bp, Homo sapiens
  siRNA target sequence for EIF4G3 (NM_003760.2,3828-3846).
ctgaggctgagcgaaataa

SEQ ID NO: 49394 - DNA, 19 bp, Homo sapiens
  siRNA target sequence for EIF4G3 (NM_003760.2,3832-3850).
ggctgagcgaaataaaaca

SEQ ID NO: 49395 - DNA, 19 bp, Homo sapiens
  siRNA target sequence for EIF4G3 (NM_003760.2,3890-3908).
catgacaaggctgcattat

SEQ ID NO: 49396 - DNA, 19 bp, Homo sapiens
  siRNA target sequence for EIF4G3 (NM_003760.2,3927-3945).
ggaagtcgaaatctatcat

SEQ ID NO: 49397 - DNA, 19 bp, Homo sapiens
  siRNA target sequence for EIF4G3 (NM_003760.2,3928-3946).
gaagtcgaaatctatcatt

SEQ ID NO: 49398 - DNA, 19 bp, Homo sapiens
  siRNA target sequence for EIF4G3 (NM_003760.2,3931-3949).
gtcgaaatctatcattgat

SEQ ID NO: 49399 - DNA, 19 bp, Homo sapiens
  siRNA target sequence for EIF4G3 (NM_003760.2,3933-3951).
cgaaatctatcattgatga
